United States Patent Application Publication US 2015/0240253 A1 - sequence listing, part 37

SEQ ID NO: 173778 - DNA, 387 bp, Zea Mays
gaaccaggtcaaaagcctgctcagcccgagaagaaagaagtagtaaatgggagacgagtatgtcggcctagctgacaagcatgacagagaccctcaaaatgtcccctactacatgaaagatctagactactggtaatcttggtcatgatgttgggtccaggatggccgagacgacgatgccaagtggtggaggaggtggtggagaccaggacgggaggtggagacatgccggcggtggagggctggagcgtgtagagcggtcccgagctgtcacagcgggcgagaggggtcctggtggccagatccttcacagaaaaaccagaggggtcaaactcaatggaacaagagttgtcattggtgaatcgacagacaaaaagaagattatga

SEQ ID NO: 173779 - DNA, 545 bp, Zea Mays
cctcccacggccgagggggagcggtagcgcgcgtacgggagcggtggcaccatgccaggatccccccacatagcgcacccccgattgttaactggcccaaaacaaagaggaggagcgggtgaactcggtagtaatttacctaccggtgctaagggcaggagaggtgtcgccccacagcaaagggcggatccacggcaaaactggtgcgacggcgagaaattgctagagcatcggtcgtccaattgccaaattagtggtaggggcagcatctttgtatctccatgattcttcagagacaccgccgaggacccattgatgcccaccagcaagaacgatgatggcgacacaagctcatctctcactcccaatcgcgaggtcatctctcactcccaatcgcaacaacccagagatccccatgtgcttcgtgattctgacgtcgggttccgcgcgtgtggttgagccatggagctcgaaaatcccgggacgccgagcgggttgttgaggagggggataagcctgacgagtgggccccaccacgacagagg

SEQ ID NO: 173780 - DNA, 496 bp, Zea Mays
gagattcatggtggccgagcattcctgaaaacggagtcgggtgtgtgaatcggacggggttcaccgtagggcgcgttcgccggtgtgcttccgccgctctgggtgcgcgcctccgtgctctggcgaggcagggaggttggtgacgtgctcgcgaccgttggatctagctatgcggtcgagattagaatcgcgtaccccttcgatttacgaaagcgatcggcccgttgatcatgaatcgtgtgggtcagggtgaatcaggagagttttaaatccgtgccgctgatcgctgatcaaacggctatagtatcgtaccgcttcactttagataggatttaatctgggtcgttgaagtgatcgggcggcccatagttcccgataccctttggccatgcgtatttgcaagaaagccactccgtttctggcatatcaacccgccgtcctagcgctgtgcgctctgtgtcttaggaagttttgcaccagagcccctgtgttttct

SEQ ID NO: 173781 - DNA, 565 bp, Zea Mays
gcagacgcaatgaccgaggctactactccactctttcaaatacggtcatgtatctcttttccatggatgtgcaacgcatacaaactcatatgctctccctgattcactattccagtcaagaaaacaatcggtctgttcaatttcggggggcgttggtcctcatcaccttccttttccatcatgtggtggtgtcattcattgatctggtgccctgtattgctgtagattaagagggtgacagtgtatttgcgtgtggcgtctgctagtgatgtttggaggtcgtgcatatactagcgtggagttgtttcttgtgatatttctactactcgcgcaaactgacaaactagtgatcgtgtgtgtgcttgtgtggtactgcacgatttttctggttggcatagatcgtggcctgattcttgggatcttcgatgcataatattccgttgttcctctttggattgttgtcgtggacgtctccctcggctctagcagctgctttgtatctccatcaatctcctaccgattaggctcagacgtgagtgatataattggtttctatgatagaact

SEQ ID NO: 173782 - DNA, 496 bp, Zea Mays
ctcgccattaactcgctcaccagcacaaattggcgccttgcgtccccacgcagtgtgaccgagctgtcccgtcgccaccgcctgccccgagccatcccgtcagcaccactgtgcgccatcatcgccgccgcagcaagccttgttggtgctcgccacctcttccttccccactccccgaccacctataaaaggaccgtccagaaccccttacttccccgcactggcctcgaccactccatcttcctcccctggacccaatcgagctcgacgtcgtcgtccctcctctctccggcgagcttctcccacccctctccagtggcttaggatcaaattagtgtagtccacgagcttcaccacctcgccacaagcacagtgtgcctttctccctcacctattacaccgagtagcctcaccggcgacctcgccgcctcgggagccaccacctcgccatggaccggccatcccaagtgcccaccggtcaaattgaccccaccac

SEQ ID NO: 173783 - DNA, 489 bp, Zea Mays
tgccatgttggatagttcttgtttacctaagtcatggtggggcgaagctattttggccgcatgctttgttctaaaccgagttccattagttaagggtgataaaacaccctatgaaggatggaagggtagaaagcctgctcttggatttctgcgtgcatggggctgtttagttgaagttaatgtgcctgcgtgcaagaaacgaaaattgggacaaaaaaccgttgattgtgtctttctaggatatgcgcataatagtgcagcttatagatttctggtgattaaatctgattttccagatgtgcatgttaacactgtgactgaatctcgtgatgcctcctttttcgaagatatattccctatgaaggatagagttgcagcacgtagcgaggcatctactagttatactcctgaagctaatccagtttctttacctcctacttattctgaacaacacaattgggataacaatatggtagctcctcataggag

SEQ ID NO: 173784 - DNA, 678 bp, Zea Mays
ccaatctcacctctctctcttctcaaaccgtgagccagggggcataacccggtgagcgtgttagcggcacgggggcataaccctgccggagttatcatggagcgagagtacgagctccggagtagaggtccagcatcccagccgaacactgctcttgacaacctggtatcaacgtcacgtcgatccttccgatccaccgccgctgcatcccaacccgcagcgccaccaccaacccctccaccgtcaccaccaccctcggtcgcgtccccctctgtgcatccggccatggctgacgaagagctaagcctcgctgacgttgtcaaaatgttgaagaccctgtccgccgatgtggcgggcctcaaggcaaaggtggcctcgtcgtcagacgctgacagctgtcccgacggccagcaccacaccaatcggccgcccaggttacagaagctggattttccccgatatgacggcaagacggatccgctgttgttcatcaatcggtgcgaatcctatttccgccagcagcgcaccatgccggaggagaaggtatggatggcctcctacaacttggaagacatttcccagttctggtttatccaactccaagaagatgaaggcacgcctccttgggggcaattcatggagcttctcaacctgcgattcgggccgaccgtgcgttcg

SEQ ID NO: 173785 - DNA, 841 bp, Zea Mays
cgtgagcatgtcgcaccaacttaagtcgtcgccgacttgagccgattgctccgttagcagggtatagtggtcaccctaagtcaattaggtgtgagcatgtcgcaccgacttaagtcgtcgccgacttgagccgattgctccgttagcagggtatagtggtcaccctaagtcaagtaagcgtgagcaagtcgcaccgacttaagtcgtcgccgacttgagccgattgctccgttagcagggtatagtggtcaccctaagtcaagtgagcgtgccgatttcaagccaggcccaatcaaagtcagttgtgagccaaaaatcttaacgtctttggaaaacgaaagctttattgatgatgaagtcttcatattacagtgtacaatattccttcaagagttttgaggccttgctaagggtagaactttctgaggtgttctatgttccatgagttccccacttctgtaccgtccatctgagtaagccgatatgatcccgaccgtgcgacctctgatatgatgaatggtccttcccatagtggtgacagcttgtgttgcccttcccccgttagaattcggcgaaggaccaagtctcccactacaaaggatcggtgtcgcacaactttatcgtggtagcgcctcaaagtctcctggtacctagccgactgaattactgtgttcaatcgttcttcctcgagcacatcaatgtcttctagcctggttgcttctacttcggttatgttttcgaaagttaacctcggcgccccgaagattagatcggcaggcagcactgcctctaacccataaaccatgaaaaacagggtatttccatgtagagctcgactggg

SEQ ID NO: 173786 - DNA, 582 bp, Zea Mays
aaatgaccatcttcactgacaacttcttaggaaaagaggaaagtgggaataaatggattacccaactaaataactgactttattaataactacaccaagttgcaggggatacccacaccttgttgacaatcattacaaagatccaactttagacatgtccatcataacaagcatccaacataagataagcaaactaactctaactaagactgaatagactaagacactgaactaagcattattacagactccgactatgtcgatctagggatccaaatctatgtgggtcctgcagtcgggggtaccatagtcgaagcgaccacggggcggtgaatggtaagggtgcagaatcccgacgggggcgggagaaccaccatccagatagtggcgtgctgcgcacttagcacgcaattccgcaacctccgctcgaaccttgcccaactcgtcaagggtgtgatccaactctgtgttgagcacggcagccaagttgaccatgctgttcaacctaggattgccctcaccaactagcgaggcaatcacacctccagcactgccggtcgaacggcgagggtagtacttctg

SEQ ID NO: 173787 - DNA, 1298 bp, Zea Mays
atcaacttcaagctcaattctgagcatgatccagtgctcaactaagtttaatccctatagtcgaattgtagctggtttgtagctctgaaactttgctacagagagtggagtgagttactagagaaactttagagaaatttggacctaaaattgctctgtcaggttcatctaactgaacttcctccatggtacagtgctatcgggaggatcagatcgccagcgcaatggtcctcaccgccggtgacctgccgccgcaatttgggtttggctaagttggatagcactttgggtcacataaatatcctcgtcgtggataactccggccataaacaagtccggccaccgtactgtgtatgccgcggtggaaagttcgatgggctcgccggtaaaccatcgtcgcacggccttatgccacgtatccgagcaccccgtcgtatcatcgtgactccttactgctgtctcatcaacgccggtgaggttgccacggcgggggacacgaagtcgcgacgacagtgctcttccgtatctccggccacccgcacggcccggccaaattaagcgccaccggcgaagctgcctataaattgagcccccgggcagctgagttaggtcatcacgaagcccacacacccgttcttcccctcgattgcccaccatagccagagaattccccttttcccccaaattggtctccaccaccgtaaagcaccactccaccgtggcatgtccgttctggtaaggaaccatccaattcgcgcgttgttctcatgtccctgtatgctggtgatgctctccaaaccgtccaattaaactagaagcccaccaatcactgggaacacgaactaatgtttatagctttcgctgtcctcgtgggcagagcgaaatagatcaccaaatatgaaattgaatggggggaaaccattgataggccgtgaatttggtgtagaccgctcagtagcacctatccttgccccgtttggccagtccaggagctcgccggagctctgccgcgccatgcatcgtcggggacttcgacgtggaaggaaatagaaaccgaaggaccttagcgcaaactatcagcgactctgagtaacagtgaaggaacccattcctagttagcaaaaaccccgaggccctttttgcaaagctgccaacgcgggcgcgcgcgcgggcgcaattctgtctggacttggaccgcctgggctgaaaccggcccagtcctgttgaatcttttcctttttctttttcaaaagaactttggaaatttgttataaagtgtagaaaaatcctaaaattgt

SEQ ID NO: 173788 - DNA, 573 bp, Zea Mays
gggaaaatgatgaatagtatcaagctaaaaccagcccaagttggcccacgatcagggaaacgcacccgcggtttactttgtgcagaggactctgatcttttaaataacccgtaaagaatcatgcgcactattcctatgtgtcactgacattcgcagttaggcccctccctttctatttcttcgcaaggtgagatccccgacctcggacgacggagcagtggctccggtgaccctgtaccggctggaaaatgcaatgaccggcgctcaagtttggccgacacctaattccaccctcaataacactaatccctcaagcaattgcaaagttctagctcaaaaactctctgtccacggtgatggcgcacaccgaggacaatgtgaggtgttcccggtgatccaacacgggctagttcaattggctgggccgataagcatctatagcacacaggggtgttgaaacgagagcgaggagggcgtgaacggacctgcagaaggctggccacgacgagctcactcacggcggcgcggagaactgaattgggggaaactctaaattagagctctctggtggac

SEQ ID NO: 173789 - DNA, 548 bp, Zea Mays
cgcttccagcttcggcaggccaatgcttttggaaagggttctgacaattttggcctcggtgcggttccgaaggcaccttagttttccttcgttcaccccaccaaatagcatagcccctgatttatatccgcaagatatggcatattttttcaactcctctttctcagcgtctgtcaactcttctccaagtaaatcttgaaagttgaaatcttcttctgaaatttcatcaatttgctctttccccttctcagtagtcgtattcactgtagccacggtagcttcctcttcagccattttcaggagtatattgtcaataacctcaagtgtggtttccaggttcgactcttcggtggcctcggcttcggccccagtagcttcggctccgccgatttcagcttcagcagttttcattctagcagctttgacttcggcagtttcagcaaaaacaatttttgacaccgttgccggtggcggcgtctgatggatcacatctgttacttgaataattctccgctttttcggcttcacaggactttttgttgccgaag

SEQ ID NO: 173790 - DNA, 392 bp, Zea Mays
catccatggaagtgtgagaaggagaaccaaccaggacaccctcgggggctgggtcatagctcgcgctacccatccgagccggatcatctccggtaacacccacggggctgggtaagcgctagcaccatccttaagggccaagccttccgtaacagccacctctaaggctgaaggaccttcaaccacttccatgggagcgatacaatccagatcagtctcccgacccttaagactgcgctctaaggtcgatgaggtacgggacgctgcttgggataaccccaacccagcatcaggcatatcagcacaagcatccattatgccaccatctgccggctctgacaacagatcttctgggaccatatcttcaagagtctgatcaaagttggccagag

SEQ ID NO: 173791 - DNA, 423 bp, Zea Mays
gcaagactttccatgggcattttgtcgaacacccacggcgcgtcgatgttgtggggctgggggaaaacttggctgcgcggtgctgcgctgccgggagagggaaacaggggcgccatgggagggagtgctgctgcgcagtagagagaagaggtgcagggggcgctggtctgcaacagagaggcgatgaactagaggacagagcgagcgagggctgctgcagtgcgtggcttgctgcgtagtttgttgagaagccaaagggcgtcaaggagaacagcaaggggcgctcagctaggggagcagagcttcaaccatgccgcgctcctaccaacagccatgcgcgcgatggggaagaatggccagcagagaggggcgtcgagctgctggttggggaaaggaagaagggcttgggcgccatggctgagg

SEQ ID NO: 173792 - DNA, 740 bp, Zea Mays
aaatccatagaatgcgtgggaaaaataaaaactagcttcaccaatgttggcgcatactccagcgaagacaacttcgtaagaggcgatcctgagggcccaattgactggatcagcaacgaagccgaagcttttgaggaaattttgagtggtcgtggagatgtctgtgccttctcaggtgccaagggaattgcggctattttggagaagtcaggttgcaatcatgtgaaagctttggcccaaaccgaagctactttatctattgatgacacgaaggatccttcggctgaagcgagcttagttggcggaaaattctttactgacatctgggagaatggcggccgagggatggcccacgagataataaaaaagagcgaaaaagattctcacgatacaagagaagcagcagaggcagctgaaaagactgcagaactcgaaaggcggataggtattgcctaattgtttttaactttatattttatttttgtgacttcgaacttatttacgttttgtatcgcagctgaactatctcctcctccagagcctttcgagtcaatggccgacctagaagcagagaaagaagatgaaattactaaagtggccgaagctattgtggacgaagctgtttctcgactgctaaacgaagctgcggaaatagttttaaaagaagaatagctgttattgtaaaaacatttgaaatataatatttgctgaacaaagtgtgtaacattttatagttttga

SEQ ID NO: 173793 - DNA, 395 bp, Zea Mays
gagtagaatgtgatgcgaacatggtgcattcatgagcttttaaaattagttgggttcagtgcatggccaagtcttttatctacgtcggccatgctagtctcaagggcctagtggcaggcatagaggtcatggagcttaggccatttgttcggtggtggtgatcattcttgtgtcgtatggtcgggggaggtcatgatgtcgacattgtttctccctccaatcactaaggtcgcacactcgcacttatgtttgggatggttctttattcgattgctgaaggtggtgctaatcgtctcttctccagacgcatggtcgttggcgattaccattagctcgatgatggtcttgggcctacttgaaagggaaatgagctatatgcacttctaacttggttt

SEQ ID NO: 173794 - DNA, 739 bp, Zea Mays
cgataaagtggttgaggtcgccatagttgtagcatccatcctttgaccagccacgccaccgactcatacggttgttgtggaaccacatgaactgactggccacagtgccagctcttcatccccatggttctccacctgctcctctgtaatggtgaacaaagaagaaatagcaaacatagtaggtgaggggttagaagcagaaccacctctagagaccatggccatggtgggtgcaccaggattctcaatcttcccaggactggtgctcaatctcagtggacttgagcttgctgaacaactcatccacggtgagagtctcatagttggacgactcaatgatcgccgagaccttcacctcccaaaccctctgatccagagcatgaagtagcatgagcgctctctcactatcatcataaggtaactatgctttgttgacacacatcttgttcacaatggactggaaccaggaaaacaaagtgtctatgatctctccaaccaactgaacaaagttcttgtattctcgccggtatgtctcaaagagtctggtcttcacatgatcattgcccttatggaatttcttgagggtggaccagatctcgtgagtcgtaaccaaatgtccaactcgctcaaactcacctagcgagaggcaccagaacaaagcgttgcgagctttgttgttcgagtcatggaactccacttgaattggagtgattcgttcacttgcagcactgaacccaac

SEQ ID NO: 173795 - DNA, 1025 bp, Zea Mays
gggcaaagaaatggccaacaattcagaattaggcgaatgggggcgccgggatagagcatcggcatctttgttctcggatccctgtttgtacacgattttgtactgtaatcccaacaacttggtgaacactctttgctaccacggagtgtgcagacattgatcagagaggtgggcaaggctgcgttgatcagttttcacaataaattctccaaactgcaggaactggcgccactgttggactgctaagagaatggagaggtattccttctcgtaggtggataatcccctggttttaggacccaaagccttgctgacataggtgatggagtggctgttttgcatgaggactgcacccacactggacccgctggcatcggtttcaatacaaaacggctgagaaaaatccgggagcgccagcaccggtgatgactggagggctgtcttcagcgtgttgaaggccgaggtatgcacttgagtccagagaaaaactgcagatttcttgagcagatctgtgaggggacggctgataactccgaaattacggacgaactttcggtagtaccctgcgagaccgaggaaactgcgaagttccttgactgagttgggaactggccatgatacgatggtagaaatcttggttgggtcggtggcaataccgttagagctgattaaatgtcccaggtacgttgtctgccgttgagcaaaggagcatttgcttaatttgattttccagtgttcagctgctagcaaggacaggacttgatgcaagtggagcagatgtgattggtaatccgtgctgtagacctggatatcgtcgaagaagacgagaacacaccgacggagaaggggcttgagtgtggcgttcatagcgccctggaatgtcgctggggcacccgtgagtccaaaggcaagcactctgaattcgaaatggccctcgtgagtagagaatgttgtcttgtgttcttcccccgattgaagcatgatctggtggaactcggaccataaatccagttttgtgaaccaac

SEQ ID NO: 173796 - DNA, 431 bp, Zea Mays
ctggtcgattagcatctctcggatagtgtgacggcaatctaggaaacgaattggcccttctgccggtgagtctgctgtcgggtgaacaggggtctgggcaggttctgtcgtgaggttgaggatgactccccaagcgttggatcggaaacaggtggttgtgattcgttcgtggaataatgtgtgggggatctaatcgtgaccggttatttgtaatccgagggctaggagtttccgctggcgtggttagatattgggcatcgatcttggatccaatggctctgggcgcgtaccgattcgcggggtgtggggatctaatccggggcgttgaaaatagatctggcggccagtatttcaccgtaccccttcggtcgtcctgatttacaaaagaaaccctatggacttagtaaattaactcgttgtcccatagtggt

SEQ ID NO: 173797 - DNA, 323 bp, Zea Mays
caaatacagagaaacataggggcagaaccagaagttttccccagactcaggcttcccacatatggacggcgggttggtttggataaagatcgggggcctttatgcaaacattcttcggtaaagggggtacgcgccgatctgcgccgtccgattcaaaacatacggatccgattagatcgcacagcgcgcgaaccggtacgcgttcaataccgcacgattccagatctacgggtaagattttaaatgggcgagattgaccagggaccgcccgatccaaacccacggtccagattcgttcctcaaagcgatacgtgatttatcta

SEQ ID NO: 173798 - DNA, 434 bp, Zea Mays
tctttggtttgaccggtgaagtcgaagcacatgcttatgatgctttccgcaacattacgttcttggtgcatcaaatctatattatgtggtaacaacaatgccttcgtgtaaggtagctcccagataaacgaggtgtgcgtccaattgtgttctttaccatacccttgaaatcgacctcctacgcccggttttaggtcacgatgttgtatcatgatattttcaccagtttgccgcttcggtggcccatctctaaccctcttgccttttcggaatgactttgtatcctttctaaaaggaagattatggggaaggaggcgtcagtgaacatcaaaaaatgtttccttcttaccatgttctaacctatatgcttgtgagtcacccatacatatcggacaacgcagtatgtcatggacacaccaaccagaaaaaatgcc

SEQ ID NO: 173799 - DNA, 661 bp, Zea Mays
ttgattctataattttgctggtggttgcttctccaatttatgtttgcgtttcttggactcttaacatagtgcctgcgccaacactgtgctgctctgttatgccagtatatagcgctggttgagtacattctgcaaacactgtcacatcattcttggttatgatcatcagagttgctgtagacaactggacatgtatatgccagtatatagctctctgcatggtcttgctagtatgatggtgttgccaatttgccctttcctacggattttggtttaccatatcttttctatctttcaggctaatgccatttttactatctgaaatgatttctcctgtgatactgataccttattgttttagatgtcttatatgtatattaatattaagggatttactgtgacaagcattggatatatcctgtttgttgagctagtattacccatataccagacaatcagatttgcacctgagcttccctggacataataatgttacaagttgggtgatctgtgatcttggtgatgccattatcacttgaaactaccaacttgataaaattgtgtaggcagtggaactgggttactagccccctggccttgaagccatattttaattttcgcggaatccatttgaagtacaggggaatcgacttgattaggg

SEQ ID NO: 173800 - DNA, 449 bp, Zea Mays
tgtcggccatctccgcgcgcactcaccgtttcacgctgatgtgtgggctccacccagacagcactgtggatcttccctgccgcgtacaagagaaccggcgccatgccgcgaaatccgtcgtggctctaactagtccgcaaccacctcgcgcacctcgccggggggataagtatcacgtcaacctgccctctcctgggacctaactattcgtgctcacagccactagaaagcaactacccacctgggcgcatctcgccaccacagccgcgccggcgaggggcatccggcacagggcctctcaccactccaacccgattttccctctgtcgattcaccgggtgactcggtgtgagaaacgcgagtactacggacgaagcattgccgagggccagtggaatttctcgccagacctcgtgtctccgccacgggaccacccgcaccatggccgg

SEQ ID NO: 173801 - DNA, 347 bp, Zea Mays
caggaggggatagcgggaaacaccatgtcggtgaggacatggtcattgagggtgtagcggtgggcaaggtcgcactagcaggcgtaggaggaagaagccgagtcgagaagaacgggaaccagtgaccagatattctagacatccgtcgcttgggccatggaggttgatgatcacgacagcctcatatgctcaaccgtcgggaaagttgggggtggatcaacacaggaaggaccaccgagatggtgctcggcctcaacaagctaacctgcgagggcatccacaactgtacgttcctactcccaaacgagggagaaaaggaaaccccccttacactgggtccctttagc

SEQ ID NO: 173802 - DNA, 916 bp, Zea Mays
tcgtcaggagcacgaatgttattaccttgctggcggtgttggtgtggcataccttttgtgttttgatgaagacggcgatgtaggtgcaaatctctggtggccgcttcatcataattaccttcttcatcaaacaccgcatcatcgggaagtcgtggacgaggaggtggtggtggcggtgcttgttgttgcgtctccaaccagcaagtctgtcgacgatctgggacaatcgtcgatccagccactcgtaagtcttgccaaggttcatgtcaatgaaggcatcatgcattgacttgtggaccatctcctccatttgctccttcaggagcttgttgtttgcctcaagatcttggcggctaacacattcatcaaagtctgtagggacccttgcttcttcgtcatcgcctgccatcgaaacacaaaaacaggaaacaaagggtgacggttatccctaataatttcactacacgctcctctcaggtggaacacaggaacacgctctaatgtatcttaccaagctcttacaagtgtctaacgaaatacaagcaaaggatggtacaatcggaggttggttcatgatacttaccaagaggtagtgaaaccacgattgcaaggtcaaatctgtattgatcacaagatatagtatgtggagcttgggaggccaaaaactaatatcaaggattagcaaaaatcgagtgcagattagcgaagttcaataagtgtccaaagcacaagtcacaattgctggctaagacgtgtcctatcgaagcacaacaaggtaaaggtaacaaggaacggtggacaaaaacttaaagaacctgcagaatggcagttctgtaaatagagcagatttttcaacactagtagaaatcaaaggcgcgtttccaaaggagtaccagcaaaagagcttgaaatattc

SEQ ID NO: 173803 - DNA, 470 bp, Zea Mays
gaaggctatgagtattcttccatggcaaggttgattgcatttgtccaaggttatgccaaagaaggggaggggatttgggaaggtgtagttgggtgtgggggtagggaactcacaagtggtgtgctcatgttaaaaataattgaggggagagaggtgtgctaggggtaggatgtcctgcatatgtagcactgtttatgagtggggtcgtagtgttagtgagtgggaggggatggcgagctgtgactgcacgtggctgacaaactggtaggttggcttgtccaaagctagtgaatcgagtgaatggctaggttaggcacacaaaagaatgacgagtgagtcaaggctgagctatcgatgggctggcggctagtagaccaatagacaaaaagacaaaagatgaggctaagaaaagtaaaaagaaaataagaaaggttgtgagttgcacttttcaaaagattggggtttctaag

SEQ ID NO: 173804 - DNA, 580 bp, Zea Mays
gtcagtgtcagcttgtggttaatttcagtgtatattttctgaaattgaccatttggttttcagttagtgttagtttcagtcagtgccagcttgtggtcaatttcagttttgtttagtagggatgaccagcgatgcacaggagctatgaacaacgatgactaccgacctgcagcacatacgagcccatgacgcaaacgagttggccgaaataggcaagccatgacccacggaatctgtttcaaaattattagggattggttattagcagtctgatgtggatttaaattgtttttagcgagaatattttttcatcagccccaataagacgttttagcaaacaaatttttagtgttcttttggagttgctcttagcgcatttatttacttaagaaaacaattcttgcattatgcatgtctctagagactcagacttgcaataaacctggactcctgattatagtctgtttccctaatttcctatcaaaggtaggttttagcaccaaacattagagacattttctttctagttgtgctaatacagcaatatttacagtgaacctctaataacactgtgcagttc

SEQ ID NO: 173805 - DNA, 356 bp, Zea Mays
tgattggggatgttttgaaagatttcgaaatttatcttcatcagctgactcctaacgccatcgttaggctcagcgtctttatctgggccctccgaagccaaggagtgaacctgcttgccgaagctttctgccgggtgcacgagcttcactatcagacgaaggctagagaagatgggttgcacgataatttcggctgctacaactttgcttaccgcaaagacatgaagactccagtgatcagctatcgcaccaaatggccaaccggctggaagaatgagtggttttgtgttaaggttgatggggggaaggagaagatagttcagagcccactggatctaaccttcgggttaactagg

SEQ ID NO: 173806 - DNA, 807 bp, Zea Mays
gaagtcaaacgacgtgaaaacgacgtttgacagacaaatagtgacataggatgattggaattcgaattgaggcacgaaacgatatgggattgagccgatacttcacgaataggtttatataggtcaatatgagtgaagtgtgtgcttggtttgaatttaggcgaagaaatagggttttgggcactcggctcggaaacgatcgcgcaaaacgggaattttggtgaaatttaagcctgggatctcggattggcgtgaaatttggcaagtaggttactggaagtgtggtgaaggtgcctgaaaaatttgggttcaattggagcaagtttgggtggtttgggcatttcaccgaacacgtgaagggcgagggattagggttttagggaaatggccatttgaggtgggaatgccctcccgaaggagctaaaagttcgcagggatacataataggggtaatgaaatgcattccaccaactggattcatgggatttcacagaattttgaaagatttgcaaaagggagagaaaggggggagctctactgtctgacaggcagagaacatgagagaaggggagagaagagcaactcaccgagggggaagaggaggggagcccaaggtcaccggagcacggccggagaagatggccgccggtggagatcgccggcgggggggaagtcgccagacgcagagagcagcgggcggctgggaaaagaaatgagcgcctctggctcggtcgggctgggggtggtttttttaaaacgcgagatgggcacaccggacagtctacagtgcctgtccggtgcacaccg

SEQ ID NO: 173807 - DNA, 885 bp, Zea Mays
caagatgtcatgtaaaaatctgagatcggggccctacaaattggtgtgtcaggcgctctgaataggatgccaatggtacaatacctgacaaaaatcacagattcagctcccctcgctgctggtgaccctcgcgccgtgatccgtgctgtcgccacgatttgtgttctctggcgaggagattatcacggcagggtaaaaatcttggcaccggataggctcagacccggtcgacggtgtgctcatcgtacccacttgggctgcggtcgggcaaagtggtccttgccggagttggccgcctatcgaccgtgcgccatgtgccttggtgctctaccacgtcgcagtaactcgtcttaagcgtattcgtttgtcgccggtgaccttgccacggtgaaagccaccaatcctttgcgccagtgctctcccctctctctgtccgccagcgcgccatgccaaattcaagagccaccgccctcgggccctataaattgagtgtggcatcagctccgctaggtagtcaagcacccaacgcagcagcccgtgccttagatcgtccaacagagcgatccaatttcaaagttcccctaattcagtcaaaactccgccgtgagtgagctcaccgtggctagctctttacaggtccgttcttgtcttcgtcgctctcgtttcaacatccctgtgtgctgtagatgcttagcagcccggccaattgaactagatcacgctagatcaccaggaacatctcggattgtcctcggtttgcgccatcaccatggacagagtgattgtgagccagaaccttgcaattgagtgaggggaaatggtcgttaggggtagaatcaggtgttgtgcaacggagaagcttagccgttgcgttttccagtcggt

SEQ ID NO: 173808 - DNA, 467 bp, Zea Mays
ggtttgggtaaagagtatgatatggaaaggctccatccaagcgtgtggatcttgattcctctgaaggtccagcttgaatcttatccttcctcgatttgatgaggtcgatcatcttcgatcttcgttcttgaagttgttatccgaattagggacatgtaggtaagataaagtagtaggtggagcagccagtttagtaggtggctatgagttaaatgagattagtcagaatctggtttggatgttttgcttctaaatggtttggataggttatgtaacatattatgcaggtcaagttgctgggtatatccgagttaatctaagatcctaaacttgttttataggagcaaggtctaatgtatctcctcggcattagctaatcatgtttgagtgcctcacattaggtttgatcataatagattggataagattgggtatgactagaatagactaatttaggttagataaat

SEQ ID NO: 173809 - DNA, 679 bp, Zea Mays
cagaagttttttgatcaaggggtttggtcaaaatgtctgcaagctggtgagtggtatcaatatagcgcaattcgatgtcgcctttcttataatgatcacgaagaaagtgaaagctaacatcaatgtgcttggtcctcgaatgtagcacatgattcttggcaacacttatggcactcgtgttatcacaaagcagaagcacatgatgaaaatccaagtcaaagtcccgtaaggtagccatcatccaaagtaactgcgaacaacagctagcggcaacaatatactcggcctctgtggtagacagggcaacactagactattttcaagaagaccataaaaccaatgaagtacccaaaaactgacaagtcccagaagtagacttgcgctccaaaaggcaacccgcaaaatcagcatcagaataaccgcataaggacagaacgaatgatgaggagtaccacaaaccaaactcgggagtgaaacgtaggtacctcataatccgtttcatagccattctatgagatgtgcgtggggaagcctggaaacgagcgcacgaacatactgcgaagtgtatgtccggcctcgtcgcagtcaaatacaggagagagccaatcatgctcctgtactccttctccacgggttcgccatcctcatcagtgtcaagtgtcatcaaggtggacatggg

SEQ ID NO: 173810 - DNA, 1138 bp, Zea Mays
cctgatttgagttcgctattttactactagggtatagtgatcaccctaattttcttcacatgagcatgttacaccgacttaaggcgtttccgacttaggctgattgctccgttagtagggcatagtggtcaccctaagttgtctaagcgtgagcatgtcgcaccgacttaaggcatttccaacttaagccgattgcttcgttagtagggcatagtgatcaccctaagtcatgtaagcgtgagcatgtggcaccgacttaaggcgtttccggcttatgtcgattgctccgttagtagggtatagtgatcactttaagtcatgtaagcgtgagcatgttgcaccgacttaaggcgtttccgacttaagccgattgctccgttagtagggcatagtgatcactctaagtcatgtaactgtaagcatgtcgcaccgacttaaggcatttttgacttaagctgattgctccgttagtagggcatagtgatcaccctaagtcatgtcataccgattttgagtcaagtccaatctaagtcagttgtcaatcaagagtttgaatgcctttggaagatgaaagctttattgatgatgaaatcttctgattacagagtacaacttgccctcgagacttttgaggtatccctaagggtagaacttcctgaggtgctcaatattccatgagttgcccacctcagtgtcgtccatctgagtgagccgataggatcccggccgtgtgacctctgctacgacgaatgacccttcccacggtggtgatagcttgtgtcgtccctcccccattagtactcgatggaggaccaagtctcccactgtaaaggatcggtgtcgcacaacttcgtcgtggtagcgcctcaaagtttgttgttactagccgactgaattactgtgtttagtcgctcctcctgcagcacatcaatgtcctctagcctggttgcctctgcctcagctatgctttcaaaggtcagcctaggtgccccaaagatcagataggcaagcagcactgcctccgacccatacaccatgaagaacagggtgtttccatgcagagctcggctaggctgggttcctaggctccagactacgtacgacagcttcgtgatccacttccctgcaagcttctcgc

SEQ ID NO: 173811 - DNA, 745 bp, Zea Mays
gcaacatctagggtctccaagcgactgacacgaaattggatctaccccgaccatttcccccaataatttcactaatagccacaaggtttggtctagccacggcgaccgtggacaaggcggaccgatgagcgtgttcccgtggattcatggcggtccagtacaattaaggggttcgggaagctttagaagagcctagggacgctagaataatcaacagagaagtatgaagtcacctggaacaggttgaccatggggagtatacaccgcacggtgttcttggtggatttgggaagaatccaaaattagtgcttactggtgagggtttggggatacaggtaggtgcagtagatgctggaatccatggcggagccgaggaggtgctcaatttatagttcccattgtcggtggtgtccaattccacgaagttgtgctggcggccggaggaaagcaggggtactggagcaggggatgggtggcgttcaccgtggcgcttcctccggtgagcaccggttgaggagctacggcggttaccgatgatctagtgcggctaggaacgacgtggtgaaaagctttgagcgtggcacaaccgcagtgaggcacggcaactccggtgacggccatgaggccacgtcgccggtgaaaaagggcaggagacagtgaggccacagtatctcatactcatccgcgacgagatctttacctggtgaacgaaatccctacgcccgtggcacgaatcccggcgaag

SEQ ID NO: 173812 - DNA, 1182 bp, Zea Mays
cttggacgtatgcttcgcttggcttcactgggtggtgggaccaagcggccagccgctgcttgactcgcgcaagccacttccaagcgggcccgttcggtcagcagctatctccgctagttcttctcggggtcggctcgcgcgtgcgataaaacaccgaacagatcccgcgttgcccgtcaactgaatcctccgtgggacccgcgccttgacccccgtaccctctctgttcgctcaatgatgggtgggctctcattgccacggagatgttcgctcaatgatggaagcccttccgttggccgttgcgcactgcccggctcaacctccgccgtatacggcgggattccgtcgagtccgctttgcttgcccctataaaactgaacgccgcatcaccgagcacctgcgcatccatcggcgacaacatgccacaccgtgagggtgaaaccaagagagattggaaggcagattcaatgccgtcgctgccgtcgaactgcgctcaggatgacgtcccagcctcgatgactgctctgtgaggttcgattggacctaacgatgaggtacacgggctaaccagggtcgggcgtcaagcacgacgcggccaattgctcaccggagcaacgatgaccgcggaggacggcacatctccgtgggcggggatctctacgcaaccctcaatggtaagaaccccaccaaacgattcgtgtccgtttccccattgtgttgcgtggccggattggggtatggtgcgcccagggttggatcggtcgctcgccggtgactttcggtagtggtgtagtcatgagcgccgccgctcggtctggctcagggaagaagggaacgtcgtggccgttgatggggttaatcaacggtgtgaattgggggctggatatcgggcagcgggggccgtagatttcgaatctggcggttgtgggttaattggatttcataaaatctgggccgcagatctggggatcagcggtgctcagtgcataccggttcaggaagttgatcgatttaatctgtgtcgtccatatccgatcgcacggctcaggatgctagataccccttcgccatgttcattttactaaagagaccctgaacgtttatgaaatgaacccgccatccatcctaagccaaaataaattgtagccgagcccagaagattatgctttagcccctgcattc

SEQ ID NO: 173813 - DNA, 2747 bp, Zea Mays
ccttcaggtttcatagatgcacataagcataaggagataacgtccagcacaaagcaaaaaaaaaagtaactcgatgatttttcatcttcatttgagtacgccatcttcaatatgaacaaattgctgtacacttcaccatgcatgtcaggtgtcttggtcttggactgcgactaaaagctgtatgaggctacatgcaccgagcaaatacctttgctggtcttgtaaacactcactgctcaccgcggcttgcaagacgccgcattcaagtattcaactaatgcgatatccttcctgcatgactgcatccaggtccaggccatcagggtctcaacctgcagggttatttcaccgctcacgagtagtgcgggagttcagtttgttgttcatatatatgtaaatgttccgaaatgccccaatttcgtcaaggtgacaaggtgtcaatgctgcagataaccaaaaggccaatctgtcatagcctgagctgatcacgtcatgggacatgaacaaacaccagatcagcaagctttccactgctgcagtactgattcatgtcagatgatttcatctctaccgtaatcaactacatgcagtaatgagtgttcatggccatttttagggtagctttgcaatgctgcatgctggactttaatccaactagaacctgccatcttgctcaatcctctcaacctcatctccttcctcaggctatcagcactactccagttgccctcagcagcaaaaatatgtgacaacaaaacgctgtaaccagcatggccatacttcttctcaatgcagatcaatctctctgtcaccaaattcaccaattcctgcttgtcctgtgctttgcaggacgcgagcagtgttccccaaatagaaacgaagtcaccctcctcccccagttcctgcacaaattcataagcttcctccactctgccggctttagctaacatgtccacaatgcagcaacggtgctgaggagtaactacgaccccaaaagtttccattgatctgtacagagcaagcccttcatcaaccagcccagagtaattacatgctgaaattgctgccaagaaggtcacaccatcaggttttagccccttctcttgcattgagtagaaaagggacaatgcacttttgccaaaaccatgctgaccaagaccagaaatcatggttgtataggagacagtgctcttctcagtcatatcagcaaagacatgttctgcagtagaaatctcaccgcacttggagtacatgtcaacaagagcagtacctacgaagacattggtgtccaaacagcggcgcaaagcaaaacaatggatctgcttccccgcacacaaacctcctcctagaggatcacatgcagggagcaccgaggcaagtgtcactgaagtaggttcaagacatgcctcaatcattgcccggaatgccaagattgcttgttcaggatgcccagtctgtgtgtaccctgctatcatggcattccaggtgacttcatctcttttggcgttaccatagtcatcaaatactctctgagctatttctatgcgaccggacttggcatacatgtcgatcagatagctctccaatccctcaccctcaatgccatgccttataagataactgtgggcttgtttaccaatatgaaggtctcctgtatttgacgcagcagagagaactgcagtcaatgtcactaaatcagctgcaaaacctgatttttgcatctgataaacgagcaacaggccttccagatcaaaatcgttctgcacaaaagcagtgatcatggtgttccaagaaacaatgtccttctcatgtaaccgatcaaagagctcaaaggcagtttggacattgccacatctcgagtacattacaacaagtgcattaccaagtatcactggcaaagtggtgtgcattcctttgatcaagtagccatgcagttgctgacccaacctgccatcctgggactgtgatgctgccgtgagtgctgacaagaaggtcacgacatccaatggaacctctttagacaccattaaccggataacgagacccatagcttcagcaaatttcccgttctgcacatacccagtgatcatcgtgttccaaacctcggtgttcttcttggcagcatactcaaacaccctccaagctgactgcacatccccgagttcagagaacatcacgatggccgagctgacaacgaagagatcattgacatattccatcccatgcttcacaaggaggccgtagagcacgaaggaccagctggggtcttccttggccactgcggggaagacattgacgaagctgactggcgtaggcttgatgccatcctccagcatacgcacaaacatctccagagcttcctggggacgtccggttttgacgtaccaaccgaacagtgtgttccaggaaaccgcgttccgcttgggcatcgcgtcgaacagcctccggacgacgtcgacgctgccgtcgccacggtaccgcacgcaggaggcgtagacgttgaggagcgagttgcggagcaccgcggtgtcgggcagcgagcgcgcgcggcggaggaggtgcgcgtggacggattttccgaggcggaggcggcgggtgcgggcacatgcggtgagcgcgcaggagtacgtgtagtggtcggagcgcggcgtggggcgcgcggcgtggttgaggagagcgtagagccgcagcgcgtgttccgggagggcgcgggccacgtaagcgatgaggagcgcgttgtagagcgg

SEQ ID NO: 173814 - DNA, 519 bp, Zea Mays
gcggcatcggtcctttgcagtgggggatttggtcctccgccgaattctaacgggggaaggacgacacaaattgtcaccactatgggaagagccgttcattgtatcagaggtcactcggccaggatcataccggcttactcaaatgaatggcacagaagtggggaactcatggaacatagagcatcttagaaagttttacccttagcaaggcctcaaaagctctcgaagcaacattgtactccgtaatcggggactccatcatcaataaagttttcattttcaaaggcattcagactcttgactatcagctgacttagatttgattggacttgaaatcaacatgttaactcggcttagggtgaccactataccctactaatggagcaatcggctcaagtcgcgacgacttaagacggtgcaacatgctcacgctaactcggtttagggtgacaactataccctactaacggagcaatcggctcaagtcgacgacgacttaagacagtgcaacatgctcac

SEQ ID NO: 173815 - DNA, 493 bp, Zea Mays
tggagtgcctaagaagattgtgtcagaccggggatcacagtttacttctcggttttggcggaagttgcatgagtgcttggacacacagttgaatttcagttcggcctaccatcctcaaactgatgggcagaatgagaggaccaaccaagtactggaggatatgttaagagcttgtgctcttaaacatggtggtagttgggataagagcttaccatgtgcggagttctcttacaataatagctaccaaaccagtttgaagatgtccccgtttgaggctctatatggcagaaaatgcaggactccactgtattgggatcaaactggtgaacgacagttctttgggcctgaaattatacaagaggcagaagaacaagtgcgaatgataagggagaatttgagaactgcgcagtcaaggcagaaaagctatgcggatacccggagaagactgctagagtttaaggagggtgatcacgtgtatctgaaggtgtcacca

SEQ ID NO: 173816 - DNA, 796 bp, Zea Mays
tttcaattgtgccacatcaacaaattacatttgatcgacattatcatgtttttcgactaatcgtggttagtggggcttatcggtgccatggggattagttatgcactacaattgattgcaattagttcgtctggttggtgccatggtgactatgtcgattagttgatttgaaaaccatttgatcgatgtctgaaattttgcatctctcctttgccactcttttgttagagtagtgtgtccatgtccatctggctaatgcttgttgaccataaagtcggctctaaacctaacacactaatggggttacaagtatactcacaagttagtatgtgttttcacaacatcggtgtgagtacctttgctataagataaatatacatttgcagcaagtggtgaaatggtttttgttttccttattaattttctaagaacgtttcaagagcgtagtatctcacatttgtgttgtgttaaactcctgtgaaattgtgaactatggagagattcgccatcctaccgtgatgcatgtgttctgtcacatgctggtttttaaccttaagctctgtcacatgcgtgatctgaagtcccctgccgaaaactaaaataggactaaaattgaggctcactttctctattccatgtgtcctttgttttaatttttcattgcttgctaacatgttcaagtatcattacttcataaccacgagttgagggaataaggtagcattatcttctaaaaatgtggtcatgcattacatattatagttaaacttaattttatgagctataattcatttga

SEQ ID NO: 173817 - DNA, 842 bp, Zea Mays
actatatagcaaataacacctacatttggtgcaagcataaaacaggcatagacataacttctcaatgaaagtgtaccttgtttcagcgtccaccagcctccgacttaggtaggttaccacatgctcctttcctttagtttcttgtgtcacaacagctccaataactttatcttcggctgcaatgtataatctgaacggtaatcctgcctatggtgcttttaatacgggattcgaagacaaatatcttctaataaggtcaaatgcttcttgttgttttgcgcccaggtgaattcggcatcatttttaagccgaaggacgggagtgaaggcattgatcttctcgtctagattagaaataaaccttcgtaaataatttactttgccgaggaacttctgcatttcaagcttacatttcaggggtcccacattccgaatggatttaattcggtcagggtctatctctataccatgttcatgaatgatgaaccctaagaacttaccaaccgacactccaaaatcacatttacgtgggttcatttttagaccataccatcgcattttatcaaaggcgttgcgcaaatcagctatatgagaactaaactcagtcgatttgactacgatatcatcaatgtagacttccatagtgtttcccaacaattcatgaaagatcaaattcatagccctctgataagtaacaccagcattttttcagaccaaaagtcatgacaacccactcaaataagccaatgaagcccgtacatataaaggccgttttagacgtatcttcttcggccatgaaaatcttattatatccgacattaccatcaagaaagctaataattc

SEQ ID NO: 173818 - DNA, 417 bp, Zea Mays
gtcacgaggaagggtggtcccagtcactcctcgaacaaggcgaggcccggtgctaccacgtgttctacggcgcgtgatgtaagccatcgggggaagtctagcttcagcctctaatgtgaagtgcatctgcattacctgtagactagacgtatacctgcccgccatagtggcaagcggtgcgtctgtaatacacaggccgcacaataactcgcgcgttaccaaggcaagaccattgtctctgcgccgtgtgggctgctatcatcatgagtcccactgtagcccacgcggtatcgaggcgaagggtgagaggcggggaagacatgacggtgccgcctgagcacccctacatgcttagtgtaccagccttcgccgcaacctattcctgcgctctgctttgactctaacccttgtgttctc

SEQ ID NO: 173819 - DNA, 599 bp, Zea Mays
cttttatctccacggctaagatggtaccttcgttttctcctctgcgatggattcgtccaaaggtgctcttcggtattcctcttgttacacttagaacaaactaaaaagtagttgtaaagttagtgttttgaggaccttcggaagaataaggaccaagggtgaagcttcatccggaccataccgaccgagccaaaccacatcgcttcagcaacccggctgacatagcatcgcacggaccacaggcgcacgtattcaatcgtatcacaccgatcgggccccaccaaatctctttttccacttgctacgtacctcctcgcatccatcagtcacggtcgtcggttatttcgctgattcaaattttcattccacctcgctcgatcgcccttggtgtttttagggtttccaaaccattgggttctgagttgttaactcacagattgtgctacggtctacgtataattaaatcgaggagagtagcagcatcggatttaggattttcgttcggtttttgtcctaggtatgttttttcgatcatccttttatatcaaatcgcctgtggttttacattcttttcaagcgcttggatgttttctgaacac

SEQ ID NO: 173820 - DNA, 540 bp, Zea Mays
ttagttttcttcggtttcctgaggtccggtgtcagttgcggggacaagaaaaagtaaggaggttcattagtgaggccatgcttgttaaaaagatgtaagggatgcataaaaaggtttggggaggctagttgtctcccttctcccttattcctactgtaggtcagcccagggggctgttctagggtcaggaggtaggaacggtccatggtgccaaagccttattgatggttcaatcgtcctaccctctcgatgtcctaggcgtcggctagcgtccttcctttttttctgccgtccaacctagtgcgtcatagccgggggtggtgctggcctgctgattgatacacgaaaggggaaacgggtccttcaggaatgcttttgtcgaggccggtgccaccctcacacgttcttcgtcgtacaatctccttctggtcagcgttgattgggacgcataccctgatcggcgcagacgccgattgcaaggaatttgcccgtcccctgcccaacggcgctttgtttgcgttcgtgaaaacgtcgcagccg

SEQ ID NO: 173821 - DNA, 523 bp, Zea Mays
tcgagcgcagaaaccacccgcgcgactccgccgcgattccgccatgcacggcgctcgttagaagagagctacgcacctggacccacgtgtaagcgtcgatggaggggctgagcagagggcccatgcggtcagccaatccgaggaacaagcgcgcctacagactggaattgctagcactgggccgcgtgaagtaaagccaagtgggccgagcgtgcgccagattcggttggatggtgaagttagatgggcctgcagtgagcattcagcccaagtgacgtggtaaagtcccttttgttttattcttttgtaatttcctgttcacttctttctatttccttttcccaatttcaaatattcaaacaaaatctaaattcatgttttgaacttcagatttcaaactccaaacacagtcctaaagtgaataaattgttctactgtttacattttgtttaactcttctttctatagttagggaatatttgacttaattcgaattttctttctaattcataatcctttccaa

SEQ ID NO: 173822 - DNA, 1038 bp, Zea Mays
ctggctcaaccagtctagagctctcgagctttcctcttttcttgccttcgatctaagctttggtgtgatcttagccttcgcgggtttaacaacacgtctagcactaccaaacctatctttatcccttcgtggagacgtgattatggtcgtcgatgagttcaccagacgtgggcaccaaatattggggacctgccgaagttcttcaaaagcctcttaagccaaacttagcgcctagaaactatagaccttcgagagctctcctagacgaatatgctacaagatctagggaaccaagtaatcgccccctgtagcagcaatattgttcacctatttatagggttggaccagtgtacatctctaaatggaattataggaatgcccttcatcctctaccaagattctacatcactagagatgggtagttgtgtctttacaagagagacctatcatgcatgcctcctcttccttctatgtagcttccccttccgcaccgtccgaaggggatcctagtaacagtctagctttctccctcttttcatcttcgacttatcatttgccaacttcgtagactagtctaaagctctgactcaatctatggtctaaaggtgtattccctaaaaacacactaaaacatcacttcttgttaacatggaccttcggctaagaacattctctccattagtcgcatatacttgcaataaatgtgttggagagagtagaggtaccatataaggctatcaactatgttgtctcctccgatcctaggaatgattggaagacttttggtcgctcgagacaaggtttcacagatatgatagcatagacaaggacccaagccacttgcatcactcaaaaattcaattgaggaagcttaacttgtagttgaaaacgtcctaaaggacatcatcctaaagatggagcccctaaaatgacaactcagcatgaagttgacctggtacctgaaggaccccatcctgaatatgtaaatttcaatgcgttgcgcacacattatcacattgaaatattggaatgccctag

SEQ ID NO: 173823 - DNA, 452 bp, Zea Mays
cgtattctgcttcggaaccattttgtccgtgccagacgaggaaggaactctacatcgcatcgtggatccaccggagagaaagccttcctcaacaatctccggaaaagccggagcgaagcaggaaaaagcgcaacctccagcgctccgagcaaagactacctcctgcaagccaggagcagaaggtccatctacccgaagaactccactgtccacctcttctacggaaagatggacacagatcacaaggagaaaggaagcgaacaaggtaaaggatcgtcgagctgctcttgtggtacctccgtcctcaaaggagaacagaaaggagcttatcactacgacgattccattctaccccgacgtcctcttcatcgggggaagagtggaataaactcccatctccgacgatgaaccaatcgcgccgggagaagaatctcttcagcaggaatctcgcc

SEQ ID NO: 173824 - DNA, 1100 bp, Zea Mays
cttagactgattacaataacaaatcattaagtcacaactgatgttaagacttgatcgaaactccgaaaatagcgagaagacccttggtgaagatataggcaaactgcgagctcgtcaggacgtagacatcctcgacatcaacatgctcacgaacgaagtgaatgtcgatctcgacatgcttggacggggttaacagagaggtagatgacgctgacgttgtcgcagtaactagagtacttttggtgaggggctgtgaagctcctacagaagctggcgcagctatatcgcctcagccaccccattagcaacaacctagtgctcagcctcagcactggagtgggagaccacaggctgatgcttggaggaccaagagatgaggttggctccaagaaacaccacatagcccaaggtagaccgacgggtgttcgggtacccgacccagtcgacgtctgtaaacgattagctcatgggtggaggatcgtcgaaggtggaggccatagtcgacaataccccgaagatactgaataactgcttgatcgcacccaagtgcggctcacggggatcatgcatataaaggcaaacctcctggacgacatatgcgatgtcgggcctagtgaaggtgagatactagagagcaccggtgaggatgcgataggtggtggggtcacttacggaagcgttgtcgctagagagcttggcatgcgtgtccaccggggtcgcacagggtttagtctagcatgccagcccgcttgaggatgtacatggtgtactgtcgctgttgaggaagagtccatcggagtgatgctcaacgacgatccccagaaattgatgaaggggcccaaatccttcatgtcaaactcatgctgaagggcagtgatgatccggtgcagggagccgaagaggaggcaatgagcatgatgtcatcgacatagaggagcaggtacatggtgtcactgctacgctggaagatgaacatggatgtgttcgacttggcctcaacaaaaccatgggagagcatatatgtggcgaagcggctataccaagcgcaaggtgctttctttaggccatagagggacttgttgagcttgcacaccatatcg

SEQ ID NO: 173825 - DNA, 968 bp, Zea Mays
atggctgaagaaagccccaaaacttgcctccaaggcaccctccaccaacagtcaggctagcaagctgcagttccacaatagggctcaggtgaaccacatcaacgcccaagaagcccaacatgcctcttgaatagtgctcagtgaattcttggtagaatcttctcctgcaatagtactctttgattctggagcatctcattctttaatagctaccagttttgtgggaaagcataaaatacaaactacaccgctaggaatacccctgatcacctagaccctggtgacacacctcctcttccaacttaagtgtcccaaagtcaagatccttttaagtggggtagtgttctaggtagatctagaagtattactatcacaagggattgatgtaaccttacggatggattggttatccctacataatggcatcataggatgtgccgacaagaccttcttcctcactaatcatcagggaaatccagtattgtgccaagcctgtccagctactcaagacccaatgattttcagcatggaaacgtccccagctagaagtgtacctgtggttggataattcatagatgtatttctagaggacctaccagacatgtctcttgagagggaagtggagttctacattgagcttcgtctaggaacaacaccaattgccaataggccttatgcatggctcccactaagttggcagagttaaaaacccatatccgtgacctgcatcagaaaggtttcatctgccctagctcgttaccttggggtacccccagtcctatttgtcaccaagaaggatggaagcatgaggatgtgtattgactatcgatccatgaatgaagtaactatcaggaacaagtatccccaaccttagattgatgacctatttgaacagatcataggagcttaatacttcttgaagattaacctaagatttggttaccaccaacttaggatcagcgaagagg

SEQ ID NO: 173826 - DNA, 951 bp, Zea Mays
cggttgttgaccaaccggttgctggatgttgtccgcacccaaccatgtccctggcccactcgccacccttggtcctccccgtcaagctccgacaggttcttctcctgtgtacaacggcggagcgaatctcgcggatgccgtggccaacagggcggactccaaccaaatcaaccgatctccacgcgcgcgattctagagatcaagtcaaatctggattgcactcgcaccataaaacccagaccctcccatcaaccgagccaccatcgccatgagagcaagagagagagagggatcgggtcgtcgagagaaggacggcggacttgtgcgggcggtcggagtgcttcaactgggaaaacagcggaccccagggtcgtgtcaatatcggggcgtgtgggttgtacatcggctcgacatcatcgcaaaccggcgttgtactgcgggcgattcgtctcgtcgcggtgagtgcttcccctctctgttggtcgcgctcttgaattattgacgcgcgtttccgtgcgacacccgacttcgttgcgcaaccggcgtccgtcaccggcgttgcgccctcgctggctgcgcgcgcgaccactgtcctaggtgccagcgatcgagctgttgggcgagaggttgaagatggactaggtagagggaagaagaaaggttgttcgccgttcgatcgtgatgaacggtagtgattggatcgtcactggagttcggccgaatccgatctgtgccattgatcgagtgatgagcggtcctgattataaatccgcgtaccccttcgtctattatatctggacggtcagatcctgatcggatgactggagttcagatcagttgtgatccgttggttttagatctagcggtagatatcgcataccgattcagcgtaagtcggatctaatccgggtcctcggttttgatcgaacgacccaaatggcgcgatacccc

SEQ ID NO: 173827 - DNA, 582 bp, Zea Mays
gtggctttttgcttctgcccgagttcaagcgctcataggttgaagatcttcgcaaatttgggcatgatcactacgcaagatttgctcccccgatagagctttgtcatttgtgtgtggaattcgagcggtttggggcaacgtatagagagttgtcgtgtcacaaaggtggcagtgtcacaaggttgagtcccgaggtaaaaccatgtcaagagcgtgtcaaacggtggagagaggtttccaaactttgccacggcgtgctcaagggaatttggcgccactttgatatttggacttgtttgattggagttttgaaaaatagagaacgcgtttgatctttggaaaggggctgaaattcagatttctgaatttctgaatttcccccaagtgcattagtttaggggctgttttggggattttgaaaagttcaaatggcaaaacttccttactatgctttgttggttaattagtgaactaaaactttgtaatttggtttttaccaaaatttatatttttctcccaagattttctcccaattaccctttatgcttaaatggttcacttaggattaattagggtttgaga

SEQ ID NO: 173828 - DNA, 377 bp, Zea Mays
gcaggcatttgcggagttgggatacgtggaacacattgtggatgtcggacatggattctggtagttccagatggtatgctgcgggtcctaccttgccaatgatgggatagggacctacaaaacgtggggctagcttccctttgacttggaacctcctgacaccacgcattggagaaaccttgaggtagacgaagtctccttcctcaaatcagagttccctccgcctgttgtctgcgtaactcttctgccgactttgagcttcaagcaaccttctgcggatcagtgcaactttctcttccgcctctttgacaaaggcaggtccttctagtgcttttccccccacgttggaccacatgagaggggtctggcattttcgt

SEQ ID NO: 173829 - DNA, 622 bp, Zea Mays
ccagacgatggtgagccggtgtactctgtccggatgtgtggtcacaaaatttaaagccgcctcggcttcatctgtgcgcttcttttctcttacgttggctactaagatcacttagcaccccacctaagagaagagaagcacacacatgaagccggggcggctttaaattttgtgaccacatatccggacatagtacactggctcaccatcgtctggccccttaacaagctcacagacgtcttcagcccgaaggtcgtttgctatcaccaaatgtttccagccatcggtgaagcccacaaataacgggaagtggtagactacatggcttaatctcttcttggggtccttcagcattataacatcacagccatgccttctctgtctaactgcattggaaagtgcacttctatctgcgagcttgcttcccgacccgattcaggcattccgccgatgccattctccatataagtcccaaacagagaatagggatgaggtagtcaagattgtaggcgctagtgctcaactactagcatctatagatatggacacaagtccaaatttggtgctactcggcaccatcgatatcactagaaaaaaatacatcaaagagatccacttccca

SEQ ID NO: 173830 - DNA, 414 bp, Zea Mays
cgcgggtgggcatggcttggcgcgggtgcgtgggctggcgtgcaccgggcatgtcagccacggtcgagcacgtggcaccattgcttctacccgtgttctaacgctgatagggcgcagatcttcgcgaattttggcaagatcgccgtgtaagctttgttcccccgactaagctctgtcgtttgtgcgtggagctgagtggttttgggtcaagggcagagagttgtcgcctcgtcaatgtgccagtgtcacaaggccgagttccgaggtaaatccctgccaagatcatgtcaaacggccgagtcttgctcccaaatttttccaggatatgttcaaggtagtttggcgccatttttatatttagaccaaatggatttgtgtttttgaattaagagaacgcaactgttctttatgaag

SEQ ID NO: 173831 - DNA, 586 bp, Zea Mays
aaggttcttgaaatgaagccgctagcgattctcttaggccattaataattatgctctagtagtttctctagtactatgatatttggatggctacgtacaataatagtagtagaaatatataccgctaggtggctggtggatttaatctgtattatttattattataaactagctggtaattaaggatggtatactgtatctagcacatcttctggaacagagttcaggtgatgcgaggaagcaggcacagacagaagcactagcaacgagaccgcgtgcagcaggatgcatggtttactcatcaaaagaaaattcacgaggcaaatctgtagtactcgtgggtggcgaacagtaatcaaatttaggcaccataaagattattaggatctgaccaaggcctaagattattctgcatggcgtaaggtggagccgccaagcaggacagttgtgataaactctgtctgtggaagtgtggagtggcaaatgatccatggcattggacatcagcatccagaattctccgcctgcatgtcgaaagagagggggccgcactgtcgtcattgtgttggagttgccgactggcagc

SEQ ID NO: 173832 - DNA, 916 bp, Zea Mays
cttcggctgaggcttcgagggcagaggattttgctttttctgccatgctggtatctgaagtttgctgatcagctttgtcttcaggcgtgacagtcttcgcctcaatgggcgctgaaggcctagcttcggcctcatcttggactttggcagcttcagcatttttcttagtaggtccagggctcaaggccttcgtggtctccaagacagcgtccagtacgctggccattctcctcctcttgggagttgcggcaggagccttttgcaccttcggcaattttgcctcagttgatgggctcaaaattttaggcatttctctattttttccacctatggctcttcggctttatcattcttagcttcggcttagcattacagttggctcttcaatgctctacacaatcggagcagcttgttgtgcttcggcagtcgaagaggccccttcgccaaattcaggcaccacagccagttcaatataccgtggccggtgggtcaggcccttcacttttttgcccttcggcacatcagtggtagccgaagcaacaacttttctctttttcttttccttcgcagcgggtagtgataatcagggtatacgaagctgattgcatcgaataccctgttcaatctttttcccccagccctcgaaggctgcggacatggcatcatcttcagccttggaatatgttccaaccagctcgtcactggtagcttcaatacatttcaaccagtcattgtctggctcatcaaacttctccctaaatttgaaggtatacttcaatcggactagaccaccctcactggaatcggtagtggtctccttcggcatatcccagctctccacaagtggccataccctgaaggctatatgctcttgaattaaatccctcgtgccaatgaaggcacacatagtactaaa

SEQ ID NO: 173833 - DNA, 434 bp, Zea Mays
agtcaacaccatcggaaggcgcaagttcgtcattaatgtcattgccttcaaggattactaagtcattatcattttgcacctcatcatcctcctcattaacaaccttttcaatatctacgtctattccgatagcttcggttaagtctatctcaaatcgcccttctagcccatcttcttggaagaactctccatcatatgtgtccgggtctaagttataatcttcatcgttaggaacaggtaacctcctgtgtggcgataccttatacacaacatcccaacccttaagatgttctttcgtttgacacgcatatgggagataatacacttgtgtggcctgttgggccatgatatagacattgtctcctggtaaggtggaatcttgtcgaatttcgactatcccaagattagaatgtgtttgtctcatcacttgaggg

SEQ ID NO: 173834 - DNA, 374 bp, Zea Mays
ataacacatcataggttaaatctacttatctcgaaagggcgctaacacagttcacacataactcaccatttaggccctactgataattcattgcgaacgtcacattaaatctacgggctaactcaattgaaacactacatatgccattcacatttttagttttatcgtataacaaagcttaatctaatacatcatgggcactaacgatgcctaccattccacgttgcgaacacaaccaactacgacctaccaccaaacatttcaaccatagaggcgatcatctccataacgttctacacaaaatcatccctaccaattattatgcgcatagcatctagttaaccatattcgacacatacagtcttcgagcaccc

SEQ ID NO: 173835 - DNA, 884 bp, Zea Mays
caacttcgtgttgctaggatactagccatttatctcaaagttcgcttcatgtcgttcaacgacaaagagagcaacgtgtcaacatctggttgagcaatgtataactgagatttatagccttaaatcatttggtaagaccttttgcttactaatagaatcccaatttgtgatgtcttctatgccaaaaaggatttcatgcattatattatatatcttcaggttacttcgagtaaaactttatgcatgaggagagagcaaagaattatcttatctgtgttttattgtttttcagtttaatttcctagatttccaagctataaagagcttgatataattgttgtggccacttggcgatatatataaatatatgatgtcacacaacacaatcaaataaaatatagagccaaataaaattgtttatgaaggttgcgctatgatatggcttcaggggcttgaacaacccacctcaatccacacgagtacaagctctagcgtctggtgtcaacgcgtgtgcagccatcagggctacgacaagacatccatccttcataataagcgcaacagacacaattgtggcttggtagttggggtacacaataagtacgcgcaacagacacaacagacgcaacaagtgtaattgtgactcaatagttgcgacacacatgcaatgccttcagggccctcaaaaaatgtgtgactcggcgatggcggtctgactcaacgggagcgatccgattaagcgagagcgcgacatagcaatcacatgacgcagccaagttcgaacggcacaaatactgcgtcgtgttgccagggcgcagccaatattcagctaatgccataactcagctgattaccaacacaacctgatcagcgtgtccgagtac

SEQ ID NO: 173836 - DNA, 641 bp, Zea Mays
gatgaaccgaaggttgaagagataataaaaatgccaaagattctgagccctccgacaaaggcaaatctgtcgaaggtgcaaaaggcttctaccgcaactcccaagaggagaaggatggccaacatactatatgttgtgctagagactacaaaggcgttgagccctgctccttcaaagaaaattgctcaatctgaagccaaatcgcaagccggagcagaaattgggcaagcagaagccaaagctacgcaagttcaagctgaagccaaagctgagccttcagtgcccaccgagacagagcctgtcgcgcctgaagaaaaagcggcagagcagattgctcctgaaaagattgagactcatgctcccaaagctttgatcgaaaatgttgactacatcattcgacacgcttcggggaagaagctgtccaaagaagaaattctggaaggcaggcactatgcgcgaaagttgaaatatccgaaggaagccttggtttttaacgggagtaatgaagatgatttcttatactgtctcccggacaacaaagaaatatccgtttgccgggagataggtagaagcatgggattcctgaagctggaagacgacctttcaattttgtcgaaggatgatcttgctgacagcctagc

SEQ ID NO: 173837 - DNA, 436 bp, Zea Mays
ttcggcatacggcaaactggactcccaatttctgtcgaacgtcaacacacaagctcttaataaatcttcgaggaccttgttgaccctttccgtttggccatctgactgggggtgataggcggtgctgaaatctaacctggtgcccatagcttgctggaggctcttccaaaattttgaagtgaactgcgtccctctatctgacactatcttccgaggaataccatggagcctgactatctctttaagatatatccgggcaagggtggctcctccaaaagtggtttccaccggaatgaagtgggccactttggtgagacggtctattattacccagatagagtcattccctttttgcgtccggggcagtccggttacaaaatccatgcctatttcctcccacttccattcaggcactgggaggggttgcagtaggcct

SEQ ID NO: 173838 - DNA, 704 bp, Zea Mays
catcttagaagtcatgccttggccttatcatgcactaaagagaagagaatgactcaaaccctaattcaaatcccttgtaggcaaatggagccctagaggggattatggcaaaaagtctatgtaaatcacattgtcatgacttggactaattataaaagttgtaatacacttaataccctacaaaacatagtaagagtgtgaccccaaaaaggattcagaagaaccccaaaaaggtcaccaaagagaagagcataaaagaaaaatcaggatttgctcatgttcaaaaccgaccctctttcaaagatcaaacatgttcactttaatcccaacctcaaaaccttatggcccaattgacgaaatggcgcccaaagacccctagaacaccctggaaaagtttgaactcaaccctaagccttttgacatgacttggcatggcttttgtctcagtgtggacagctctgacagagccgacttctcacccccatatctctctactccgaccgtatccttgcttggaactcacatcaaaaaggtaggatttggtgcagggaagagaccgtacacgagggttttgccatgatctgcacgctaaggcgatcaaatcgaccgttgaaccctgacagaagtaaacccccacgtgttcgacgtgggctgacactcgggggcgcgctcagagcacgcccgcacgcgaaccccgcgcgccc

SEQ ID NO: 173839 - DNA, 1087 bp, Zea Mays
ccaggcttgtccccaagcctgtgcacctagaaacttcgctttgatcatggctttgtcttcccatgtagctagcttgtcaggccaagaggaccaattgatcagcaattgaggaacatcacccatgggttttggcagaacatggtgttgcaacacctttttggccattgcagggaatctggcaaaaggggtaaagatgagttaacctatgtgttaggtccaatagctttttttagaagagtgacatgaaagacatggtgtatgctggaggaaggtgacagctctaaatgataagcaacaacaccaatcttggccaccacaggaaatggtccaaagtacttgaatgtcagtttgtggttcgcccttttggtaactaacgattgaacgtttggttggagctttgagtaaaccaaatctccagcttcaaaagttttgtcagattgatgtttgtcagcttggtccttctagcattgctttgctctccctaaatgttgtttcactaactgtaccatcactttgtgctcctccagccatgtctaaagaggggggacatcataggaggttctgaatcaaaacccaactggcacgcaggatagccatagagtacttaaaggggtgtgagcttcaaggatatatggtaactggtattataccagtactgagccaaaggaagccatcttttccatttggttggacaagcatgagtgaaacaatggatgtaagtttcgagacactagttgacacgctccgtttgactgtctgattgagggtgataagctatagtcaaacgtaattccactctagccaacttgaacaattccttccacgcactagtgaatattcgatcatgatccgagataatagacttggggaatccatggagtttaaaatgttgtccatgaatttgtgagccactatgaaagtagtgaaaggatggtgtagaggcacgccgttactgtattttgaaaatgtatccacaacaaccataatacagttcgggtgattagacaaaggtagcccttctatgaaatccatagatataactgtccaagcaccctctagaactggtaacggttgaagtaatccgtgg

SEQ ID NO: 173840 - DNA, 717 bp, Zea Mays
ccctcctaattcttgcaatcaccgcgtgtgctgctgactcctccacgaccatagtgcacccagattgttgtgtctcatccccctcactctgcgcctcgtcttgattcccatctagtcctttttttatagttgggcgacctctttttcttggagttcaacctacagttttggcacttctctttttgtccttgttctcggccgctctgcttctgtttgggttctgagggcatgttgtgctatagtgccccctaacatggcaggtttggcactctcttatgccctgacccccacaatatgtgctgtatggattagcaggttccacactatttttagcacatttagccccactcgcagacttcctacccttcgtgcgcgacactggcggttcagtcaatgttagatcagcgaggcagtttgcagaacctggattgaggcccgattctggtggtggtgtaggtccagtgggcatcacaacaggttccatattgttgtcagaactttgttgtgttggtgcaatgggaccaatattctgccgtccatctgcatcttgctgcaactcagtatttgttgcttcatccggaccaatctccgctgttcgtagaagctcaatcccaggagttatcatgtcgatgtgcctgatagtttcagtgtatgctctgtcagatttgcttcccgctcttcccaggcgcattaactttggcagcagcttcgacaacc

SEQ ID NO: 173841 - DNA, 376 bp, Zea Mays
gtgagtcacttcaatcactctttgatcggctaatggtgttggtcaacaaaataagagtgcttggaagtgaagattggagtgactccaaggtcactagactgtttatgagagcatacaaagaaaaggacaagagtctagcaaggatgataagggaccgtgatgactatgaggaaatgacacctcaccaactatttgcaaaaattcaacaacatgagtctgaagaagccccaatcaagacaggagacacccatgtcttgatctcaaatgaacaagattcccccaagaagaacaaagaccataaggcaaagaaagtggtcgaaacatcaagtgatgaagatagttcaagtgatgaagacacagctatgttcatcaaaac

SEQ ID NO: 173842 - DNA, 819 bp, Zea Mays
gccagacaagcgaagggtcacgtacagaatcgcgcttcctgcaatcagcgtcacaaaatttgtgcgaaccaacgcttgggccgtggcctagcctcggcttgggaccttgttgggccataacagctggaccacacaacaacgatatgtttagagcttggacgtgtgagaataattgatgttacaaggagctgagcattacaatgaacagaagagaaaccaacataactgcacgcatttgttttggcatgcttgtgttgtggaccataaaacttagtagtgctggctgaacacaatggtgtatcgaggatattttcatgaggtatgctataagaaacttttataaataatttagtataatccataatgatttaatgtacaattcagaatataaagataacaatagcatacgaaactatagatttaacatttaagtccataagtgtgtaaattagaatgcaaatataatatgaaatagtctaaatatcaagcataaaatatactactgctgtcagattttttctaggactcggtgcattggcagttcagtggtcgatctagattagggtatgtcacggcagctcatccattagctatgctactagctgaatagctagaccgttcccatcccctcgtgtagccaagagtcctaacacctcccaatcccacgaacatgatacacactactcatcttgtccataaagcatgaaatatatgttgtggctaatggacacaccactcgggccctttaatatacagcggcttcaatatcatgatgattaatttattggtccgtgcagttgtgtggcattcactgattcc

SEQ ID NO: 173843 - DNA, 535 bp, Zea Mays
gtaaaactttctgaggtgttctatgttccatgagttcccaatttccgtgctgtccatctgagtgagacgatatgatcccggccgagtgacttcagctactatgaatggtccttcccatagaggtgacaatttgtgccgtccctcccccgttagaattcggcggaggacgagatctcccactacgaaggatcgatgtcgtatgggccttatcgtgatagcgcctcagagtttgctgatatcgtgctgattgaatcaccgtatttagtcgctcttcttcgagtacatcaacatcctccagcctagtagcttcagcttctgctatgttttcaaagattaacctttggtgccccgaacttgagatcagcaggtagtactgcctccgaaccatagaccatgaagaaaggtgtgtttccatgcagagctcgactaggttgagttctcaggctccaaacaacatacgacagctctctgatccactttcctgcgaacttttcattcttgtcgaagactttctttctgagcgcctccaatatca

SEQ ID NO: 173844 - DNA, 308 bp, Zea Mays
ggaaattactctaagaaagaagatcagttgatgactgcagccttcggcactcgtccgaagcgaagattgaaccgtgtgctagatgctttgaattttgattaccctgattacgagcaactgggcggagatgccgaaggcccaaagagaaagaggattgctagcgccctggacaaagaaagcatcaagttggccagaaaggaaaaagaaatttctgaaaaaccgagggtagctgtttcaaggaaaagagaaggtacatctccaaaacctgcatctccaaaacccaagacgtcgggccaggaagaggagac

SEQ ID NO: 173845 - DNA, 359 bp, Zea Mays
tttacattttcactacagaaatcttgaagatttttgccgtctaaaataattcttatcggtctttgactaagccgacgtgaattagataaatatcgtcgggtaaaacatagccaaaggaaataaaactaactcctgttggtcacactgacaaccaacggggataagataattcttgtaggcccctttctcttcccgatggggattaatttttctaagaaaaccggccaagcccttttctctcaccccacatacttagttcttcggctcttcgtcttttgcctcatcgtcgccactgctcactggacaccaattgtcgccgcactagagctcgttattgctctgctccccagacgccgccg

SEQ ID NO: 173846 - DNA, 541 bp, Zea Mays
tcacaagaactaaaggaagtagaagtatcaaatgaactatcatgtttggactcattaaatttggttttaattctagtccaaatatcatgcgcatcaggaatatattcattataatttgtaatgaaggcatgataatcttcttcactaagagaattacctaagatgtcaatagctagatagtttaagcgtatacatctttgatcttcctcggaggcatcataattagaaggtatgatactcttgtctatgatttgttctaattgaggatctatggttctaaaagcatttagcacactagtagaccatgaatcatagttagaacaatcggaaagtaatatctcaagagttaccttcttccgagttgtgttcttgttcttttgggatcttctttgagccatcacttcgagttgttagactcaataggaagtgcctagctccgataccaattgaaagccgcctagagggggtggataggcgaaacctaaaacttaaaacttaccccccaactagatcctttgattagtggttagaacaagatata

SEQ ID NO: 173847 - DNA, 441 bp, Zea Mays
gggggggggggctgcagcacgccaacagagggggcgccatggcaaacctacagcaggaaggggcgaccatggaagaaaatctctatgcacagatcagagggggaacgagggggcgaggtcggccaccagggagatggctggtgtccagggcgccatggttggggcatcggcttggagaggaaaatagtggcagaggagatagggagctcctgcgccatggacaactagggttgggcacctggctggggagggaggagatagaagagaggcggccatgggagggacgccgatgtgagtgacagggaggagagggcgctgaccagccatggttgagggggaagaaacttggatgtggggagtgggaggagggagggagcagtagtggataaggccaagcggtggattcgtgaagactccaggacggcggctacagatatggac

SEQ ID NO: 173848 - DNA, 685 bp, Zea Mays
ttaaaccgatgcagttccctcgccagtcgttccatccacgtcaacaaaaaaatctaggccgcacacgtgttccctactgcttcgtatcacgacgcagcctggtgctgctcttcctttaccattttgcttgcccttcacatttattaaaaaaatgaaacgatgacgccgccgagtgaacaccccagaacctgccagagaggtaggggacgccgccgccgacagagactccgcggcttccgctgcactctccgacgattaccgcttttccaggtaaaaaaaattcatatgcttccttctctacccactggtcgtcccttactatggctcccgcatccatttcgaggacgaaaacaagcccatgtcttcctccgtcgtcgacgtccacctccgcccagtttcgagggactacgagctcgcggcttcctccgtcgtcagcgtctacattcgtccattgtcactttttcaggtaaagaaatgtttttcatgtttttgttcgctttccgccgttcgtggcttactgcaaattacacatttattttcctcatcgctcttcaaactcatgttgcaatgtgctctacatctacagccgcaaacccacatactttttcccattttcttaggatattgcaaaccctaaatctaagggcaggtattgtggacctgcagttgccttttgctgctcacg

SEQ ID NO: 173849 - DNA, 1409 bp, Zea Mays
tgggtatggtaagttgcgttgagctagtcaatctgttgtccaaattttcttatgtatgaccagccacataaaaaatctgcatttgttcggtgcctaggatttccaaacacgctcccaggcctcaaaatttatggagctatggaagagattggaataggccgatttgctcgaatattgcccagaacaagagaccctccaacgatgaatatcttgagcattagactacagctccacatccaaaagcaaatcccataaatgtagattttcagttagcatgctcatataaatcctccttgtacatcttggatccaacgattatttgagagagcttcctcaatagtacgttggttggcttttctttttggaacaacgacgacaatgttgggtgcaagatcctccaacctgtgtccctgcaaccatctatctttccagaatagggtctcctttccattcccagttgaggtttcaacagccatagagaagaaggcgtgtacgtggttctgaaatttggtggaaagttagcccaaggtcgactcagattagttttttggagccagagccatctcagtctaagggcccaatcaagtttttgtagatttgaaattccaagaccacccaaatcttttggcctttggaccttatcccaagcaataatacaatggactccttttgcatccaatcttcctcgccacagaaaacatcttcagatcttatcagttgctttaattgaccactgtgggagctctactgccatgctgaagtagatagtcatggtagttttcttgtgggcagatacatattgttgtttgatttctattgatagatacatgtgtttagattgttatgtgtacattagcatgtttaatcatgttgattttgctcactcaatagatccaatctattactctgccgacgagccctgcacgcttattgtgcctgcagaaccgccctagttgtaggtcccacatgcctacggaccgcgctacgcgtcgcacgtccatctcgctggtgggcccccacacgcccaccagtcgcgccgacctacagccacacactatgctggtccacccagctccacgacctgatatcgtgccagcccacacaccctcaccagttgcgccagcccgagtcgagacaacctgcaacgcaccgtactagcccgcgcaccactctacatttggcgcgccctcctgggccatgctctcacgggccatgcaatttgttttttttcctagttttcactattttacacgaaattaatttctacaacgattcatattataatcgttacacttaaataaattcctactcaatttgttcaataaatttttaatgcacatttaaaaatgtaagcatgctttgtattttttgcactatttctgatgtcatatcactgtttgtctttaaac

SEQ ID NO: 173850 - DNA, 358 bp, Zea Mays
ccttctcaaagagtctagtcaaaggcttagcaatgctggagaaatttggtacgaagcgtcgataatatccagcgagccccaagaaacttcggatttcagagacactagagggtctcttccactccaccacagccgcaacattcttgggatcaaccacaatgccctgttgattaatcacgtgccccaggaaagccacttcagacagccaaaaggcacacttcttcaacttgccatagaactgattctcccttagagcacccagaacgagacggagatgctgctcatgctcggccttggtctttgaataaatcagaatatcctctaggaacacgaccacaaactcgtccaggaattcatg

SEQ ID NO: 173851 - DNA, 575 bp, Zea Mays
ctcgggattcagaagtgagacaaaccagatttcatcactccatatctttggctccattcagcaaaacccataagcctccacacataaacgacaaaagaaggtcatatgaagagatctctcaatgggatcatggccataatcgtgaagatttggagccaatccgcactttaacttgaccactctttgcgctgcctcgtgctcgacgccgtgcccaggcgccagagcgcgcactggcgctcgcccgcgcaccccctaagcgcgtgtcagagccaccctcggccgtgctcgcctgtgcccttaaagaccacccccggacgcgccacacctcactccacacttaccctggctgaccagaccccgtcattagctccggcgagctctgcgccgcccgcccgagccacccgagcgccggccaccgcggccagccatttctagagacccctagcctcacccgagcctctggacaccttccccgaggagccatcaagcttctacaaacaaggatcgaggccctgccccaccggaaaagtgagatcaccatcctcggacttcggccgcccgccaccgcacgtcca

SEQ ID NO: 173852 - DNA, 592 bp, Zea Mays
gtacgaggtgaacgcgagggggaatactataggcaatggagcgctagagggtgttgtccacggagtatggcgactctgcggcgatgtttggtcgtcgtcgaggaagtccatggctaatcctaggaagtggggcttcaggaacctcctccacagtgcagtgaacgttgcagacgagctatcggcacccgagtggtggcacagtgcgaattcaacggtggtggcactattgctctctcttgctctgtctccctctctcgcttactgtccaacgacgatgatggctaggtcacaacggtgagaagggggtgaggggtcatgtggctccacactttatggcctgataccgaaccctgcgcctcggggcggaggcggttgtaatggctcgtccagatttcgcggtggagctgatacacgggcgtgacgcggtaagtgaagacggtgctgatcgagatggtccacccaccagcgacttaaggtctattacgtgagcgggtcgaagcgcccggctggcgagcctacggggttagtggaaagaggcccgcgcggaggacgcctgataggagggtcccgcctgttggcaccgacttcctga

SEQ ID NO: 173853 - DNA, 450 bp, Zea Mays
cgtcatgattcttggaggagcatgagatcgaccagaattgagagatttaggcaagatcaacatcagatacttgagaacgggttatagcagatgaccagataatggggcagaatcattaaaggatcccgggattcggatgataaagccaacatgattcataagaaaaaggattaccagatccaggtgaaaggagaggtagtcacatgagatcgaattaggatgagcaccagaaagtttatgaagattcgggacaggttctatggaaggaaacagggcttggacatggtttgcgcaactagacaccaaacgatgtttttttacacaacaagtgcacaaggagacttgggttggtctagccgtctagcggtcaagctgtgggggtctataagttgtgtaggtgtaaattcaagggtagaacactcaagggctagaaaataccacacaagcatg

SEQ ID NO: 173854 - DNA, 538 bp, Zea Mays
aagcaatccagttccaacatttcgcaagaggtggccaggggcgtggatgcaagaatggttttatgtgaagaatgatctggttgagagagaagacatcaaggggattatccaacgtcccatatggtctcacttcggcattaagagaccatcccttgcccttgggaacgacatacaagcttgacaagctacttataacgcggtatgtacctacataggcaccagggacttagtccaagagcacattgcctacaaagtgtggccactcgggagtgggtgggagatgccgaaggaggctgctgctgggtctagccaaagtggcttgatttacttgaagtatacattcaaatacaggagccaatttgatgaaccaaacgacgactggctagatgccatcgaagccaccaacgatgaattagttggtgcctatttaagggctgaagatgacgctatgactgtgtccttcggaggctgaggcgagaaaaggctaaataggatttttgatgttattggttttgtatacccagactactgctatccc

SEQ ID NO: 173855 - DNA, 526 bp, Zea Mays
cctctctccctctcgcgccgctctcccactggcagcccgggcccgcctgtcagcatcgtcgtcccgcccatgcctcaccggcgcgttcgccgccgaccgcctcacgccccgtcgcctcgccattaaggctcgcaccggcctcagcgaccaccccgccattgtacccgagccgtcccctcacccctcgcctgcccgagccgtcccaatcgccgtttgctccattcccgccatcatggcgagctcgtcggcgctcgccgtcccctccatccctctccctctcccgggcgcctataaaagggaccgcccgagctccgttccttccacaccagctccggccatctcctccactcctccccgagccaatcgagccagcgccgccgcgtcttccccgtcgctccggtgagctccgttctcccctcccaagtgaattttagtcgaattaaccagtgcgtgaagctccgccacacgctcacggtcacagggcacccctccccacctcctattgcacccggcagcctcaccggcg

SEQ ID NO: 173856 - DNA, 904 bp, Zea Mays
gaaagatccttgccggcgatgagctggaggtcactccggtgactcaccgtggctttcttttctactttgcggctgagcagataagctcgtcggtgaaccgccgtgtctcggccctgcgccgcgtgtcctaaccgcgccaccgcatcgccgtgactccctctaaactccccgtcgaccaccggagttactgccacgacgatgaacacgtgttcactgcaccagcgttcttcctcacttccgaccgccgcacatcaacgcccaaattcacggtcaccgccgaagagccctataaattgaagccctcgctagctccgcaaggtcatcctccacccggccatcgctaatcgctagcagtccttcgccaaagctcgcgaattttgaattcgccccaaatccctctccgccgccgagaaccacaccctaccacggccagccctttccaggttagttcatctctctctctcccttgtttaagcaccctggttactctgtgatgcttgtcgagccttcaatttaaactaggagaccaccagtcgccgggaacacgacgatctagccgccatgctctcggtcaccgtggccagagctccttagttggtcttggatgcaattaggttgggggaaatgattaaggtagccccaatttcatgtctgttgctcggtgaacctagccgttgccccaatcggccagtttgctagctcgccggagtttgtccctgtgcagttcgccgccggggacttcgaacggagaaaggatagaagtgcggggttgtttttgtagatgtcagagagacattgaacagtggccaggaattcttagcagatatccaaaacgttgaggacctctgcacaaatctgccccgcgggcgcgggcgcgcacgtgtcttttcctctggactgggcc

SEQ ID NO: 173857 - DNA, 548 bp, Zea Mays
gacgaatcctacagctactctctaatccgccatatggtatgcgtagcgaagaacagtgcgaagcaatgggaggcatgctcaccgaggatggcgcacgcaagaacccagtccacggtgacttgcggcgcgacgcggtcgtcgtactccggtgagcgattcccaacggtgtcccccctccgaggtccacagatcacccacgctagttccgggtactccggttatgatccccggtccctcctacggctccaatcgacggcgaatgggtggaaaggcacggcggcggcgggtttcacccgtggtgttcgcggcgacgcggtgatggtggcaagaagttggagaaatcacagagaagatagaagggacgcggcgcggaggccttatacccaggtcggggcctggaaatcaggcggagtcggttcagcgcatgctgatccacttctctcggcgaagctccgcggattacgcgcgaggtgggcaatgacgtgtgggccccgcgtggaagtggcgcagggagaggagttgatcgctgggactgccgagtgggtcca

SEQ ID NO: 173858 - DNA, 450 bp, Zea Mays
gccgtgttcttaggtaccaacctcatctcctgatcctcgaagtggtagtccatcgtctccttctctagtgctaaggccgagtactgcgctatggacaacaacgtggctgaggtgacctagcttcatcagctgctccaagagcctcacatccctctcaagtgtcacccttgtttaatgcaacaacgtcagcacgatctacctccctagtaatctcgtgcaacaccatcacatgaagcatataaaggtcaacctccagtttatccaagagtatgtcgttgttgacaatgcccacgtccgaccacctcccagtttaccaatatccaccaagggccttctatctacggtgttctcagagttttgttccagtctcatcgtttgtaatggctatagttgcaactacaaggaatgttatagattgtgttacactaatataatagaccttggtccaac

SEQ ID NO: 173859 - DNA, 518 bp, Zea Mays
cctgccactacaccagctagggtgttgaggtgatcttctccagctccacctggaacgtgctggtctggttctctccacgaatatgtagaggaagattcctatacttcgtgttatgcagctgctgcccggtaggtgtggctgagagaccatagcgttcgcctagcagcgtcgctgaccgaagcagcgtatgtggatagcgacatcagagactcatgtgctgacagagtcctgaaccctctatcacctgcatccatcaccctgacatgaatgcgagtgaggtagtaacaagcccgaggaggctcgtacactcaccttgtctcgtacaggggtcggacgtaggttcccaatgcgtgcagcacgtcttgcagcaggttagggaagagtcatccgggtcgtcgcctccaggagcaggggcttgaactgctggtgcaggcggtgctgaggttgatgatctagctgcgaaggctagtgattctgccaacagggtgggcataggcagaagttcctccaagttgtcc

SEQ ID NO: 173860 - DNA, 722 bp, Zea Mays
gaaaacaaaaagaaatagagaaaaagaaaagaaagagaagaaagagtacagattgggccgcctgattgaaattccccgcctcgacccagttgttgttcgcccgcgcggcccaacttcagctctcgcgcaacccagccccgtccgcttgtctcggcctcacactgacgatcggggcccacactatcagccggtataccgcgcgcgctctctggttggctcgccgacgtgtgggtcagttgagtcagcctctccctctcttctccctccgcggcccagcctctttcccccgccagcccatcttcactttccctccacgtggcccacaccgcgacatacactcatctcaccaactgccactgacgcgtggacccgggagttcagacccgccccttccttcgtccgcacgacccgggagagcttaattcgtgcgcgagcctcggaatcggttgataccgccacaaaacgaccctcgcgcgtctacaagggattaccctagggcttcgtgtccccttttgcatcttcgtgggccccatatgtcagcttgattcccttccaatggaacgccgccgaatccatcatcgtgaagatcggccgatgcaacagctccgccgcggaattcacgggcatgggctgaccgggctgaccccccggactgggtacaaagggcgactcgtgcacttctttcttcttctccctccattattctcaacctctcgccagcc

SEQ ID NO: 173861 - DNA, 380 bp, Zea Mays
aaatcggtgacttagatcaactcggccatacccaacaacctgacctacataataggttacataacctatccaaaccattcagaagcaaaacagtcaaaccagattatgactaatatcatttaacttatagccatctactaaactaactgctccacctactactttatcttaactacatgtccctaattcggataacaacttcaaaaacaaagatcgaagatgaccgacctcatcaaatcaaggaaggataagattcaagccagatcttcaaaagaatcaagagccacaatcttggatggagtcttttcttaccctacactttcttaaccaaacctatctatgctctaaagacatcttctatcctacataataaagtggac

SEQ ID NO: 173862 - DNA, 633 bp, Zea Mays
gttatcttgagcattcacctctcaccaatcttcagacaagcttttctcactttgttaaaagcccccaagctctcccattgattcccttgatattctatgagatattggactctaaactccaatagatagtttcccaaatcgagcttgaactcttagagcacttagttcacattcaagtcagtggattggattctttacagttggaataagagctcctagctggctaggcatttcccatcaaagcacttgactcttatgcatgctttgagaagtttgtaactctcccaacatatactaagaactcttgagcaagaaacttgagttgttgatttgagaaagaggatagagtttatgaactcatgccttggtgtggtggcttcctcaataacatggaggtaggcgagcctttatggcgagctggtccacaaggtaaatccatcgcttgtgttgttgctattatgttgtgctatgcttatttttattggtattttagggtttggtaccgatctacttattccttagctttcaaccatgttcaagtggtgaaataaactttacactaccctaggatcatcaatagtttacttattctacttttcgatctacttttcattggacagttttcgaattgta

SEQ ID NO: 173863 - DNA, 915 bp, Zea Mays
ccgccatgtccgcacaagccggagtggcatccctggcgcattgccggcatgggtcgccgctaggagctccgtccctccccttgccctcgcgtgccggctccagggacgaggatccaggtccctctgttccctcccctcaaacgccgccgccatgtccgcacgagccggagtggcatccctggcgcattgccagcacgagtcgccgctaggagctccgtccctccccttgcccttgcgtgccggctccagggacgaggatccaggtccctctgtcaatttaggaatgtcggacatgttactgaccgacgtccagatgtggccggatgaggcgctctagcgcaacaatacccgcctgctgtgttccctgccatggactctcattgtgagaacgtccacatgctgtgccatatccctccacacgagcctcttaggatttggcatcacaagacttgaacaaaattaattgcgagactgatcaccaatatgaagcgaatgcaagaaactgaagtgtatagcgactaatcgacaataccattgcagggttgctaaccaatgaagggcgcttcaacactgcggagctgtagggctgtcatgttggccagggcatgcacatttattttttaaaagccataggtattctttttttaataagtaaatctgattttttacatcatcttatttaaactacatcacgagcagcttatttgaaaaaatcaccttaccttgcattgtgcttcactgtggtctcctatgtcaaattacatggtgtatatagtttattactgaagttcaaaaaaataactatccgtcttggtgagataaatagaaccattcataacttcaaaatcgactccttcgtgcttcctgtacaaggaaacgaccatgtatcaacagctgaagcacttctgtattcgc

SEQ ID NO: 173864 - DNA, 450 bp, Zea Mays
atgttggcttaagcctgcatcgctaaaaggcccacaacaaagacattttcttcctgttgaataccgcacagcttttgtcacctgggttgcgcgtgggccgccacaccacgcggcctccacctgttgcggtgttgccctgtccctgctctaccaggccaccatcaaggatcgccacttcgccagtatgctccgtggacaatggcggcggggcggcaaccacgagaccttccacctccacatggccacgtactagtggcggatccataagaaccgaaggagaggttgattttctaataaccagcattgaagatagcataagctggtagtagatttatctttactctatttttcttcttcctttctttctctatgccctttgtatctttctctagtgaaatgtggggctcatttttttttaaaaaaattctttctctttcttctctgtttttt

SEQ ID NO: 173865 - DNA, 1128 bp, Zea Mays
cgcggagctagcttcccttttgcttgaaatcttttgactccacacattggggagactttgaggtagacaaaatcaccttcctcgaaattgagttctcttctcctattgcctacataactcttttgtcgactctgggcttcgagtagtctcttgcggatcagggcaactttctcttttgcctctttgatgaaggcaggcccttctagggtattttcttccatgtttgaccacatcagaggggtttggcatctccttccatacaaggcttcaaaaggtgatatcttgatgctggcctggtaactattgttatacgagaattctgcatacgacaaactggactcccaatctctgttgaaggtcagcacacaggctctcaacaaatcttcaaggactttattgactctttctgtctgtccatctgattgggggtggtaggcggtgctgaaatctagcttggtgcccatagcttgctgaaggctcaaccaaaactttgaggtgagctgcgttcctcagtctgatactattcttcacggaatgtcgtggattctgactatttctttgaggtatatccgagcgagggtggctcctccgaaggtagtctttactggtatgaagtgagctaccttggtaagacggtcaattatgacccagatagaatcgttccccttttgggtccggggcagtccaatcacgaaatccatgcctatttcttcccacttccatttgggcaccggaaggggttgcggtaacccagcgggcctttgatgttctgccttagttcgttgacaagtatcacattgggctacatgttgagctatcccctttttcatccttctccactagcatctagtcttgaggtgtaggtacatcttagtaaaccctggatggatagagtaggctgagttgtgggcttcatctagcaggatttctcgtgcctctccctttggtacacacagacggttcctgaaccaaagagttcccttttcatctgttctgagatccaggagttgttccttgttagccttttctgcaagtcctgtcatctcggcgtccaaaccctgagctttgtgaatgaggatttctagcatcggtttaacttctacactgctcttttccccaaacaagcat

SEQ ID NO: 173866 - DNA, 703 bp, Zea Mays
ggggtactcagcataagttagatcatcttgaacactaaggtcttccgttggtaactgttcctcaggcaccctgagacatttcttcagctgagatacatgaaagacatcatgaacatccgcaagatgatctggtaactccaattggtatgcaacctctcccactcgctttaagattaagaagggtccaataaagcgaggggacaattttcctttgactttgaattttctcataccccggagtggtgacagcttcaaatagacataatctccctccttaaactcaagcagtctcctccgggtgtcagcatagcttttctgtcttgactgcgcagtcctcaaattctcccttatttgttgaacttgttcttctgcttcctgtataatctcaggtccaaataactgtctttcacccgtttgatcccaatacaatggagtcctgcactttctgccatacaaagcctcaaacggtgacatcttcaaactggcctgatagctatcattataggagaactcagcataaggtaaactcttatcccaacttccaccatgtttaagggcacaagctcttaacatatcttccagcacttggttagtcctctcagtctgcccatccgtctggggatggtaagccgaactaaaatttaatcttgtatccaaggactcgtgcacttcttccaatatcgagaggtaaactgtgatcccc

SEQ ID NO: 173867 - DNA, 917 bp, Zea Mays
ccacaatgcgaccagggatgtcgaggcctaggctacaagggctaggggttgacacagcataggaggcataatgatggtgcctaggtcttctgccatccacgcacatcattacatccaactaaaagagcctgactagagcacctagaatatgagggtgaataccgacggacatgtttctaccaagggaaaaaccctttattttaccacgacgtggtaactccttccacgagacgccacttgtaacgaggcccctccttagtctataaaagagggaggtcagcccagcataagaggagagtcacatatcgacgccaaacgagagcacacgcaatgaagcagcaatgctcgatcgaataggctaggaatcgtacacccaatacatatccccttagaaccaacgacacagagacttgggaactcttccctctcttgccggcttgtaacccctactatgagcaatgagcaagaaggtgtcagtagcaccgaagactagatgtagggacattctgcccgaaccagtataaatcttgcgcccactgggcataccatctggatctagaatgtgcatacattaaatttactcgtcggtgctggttcaaaacaccgatagttggcgcacttggtagggtccttgcgcattctcgacatctctttcaccatgctttggatgaccgaccacaatgctatcttgacccctagaacgaccatctattttgggatccttgactttgtcctcaatgatgagggagaaatggtcatggccccgaatgcacgatcctttctgaccgagagcctcgacaccgccacaagatcccttgatgacctccaccttgactcgtaggagcaagacatatggcaaggcatggcctcgccctccgaggtgatgagataaggcagtagatcatgatccacttggg

SEQ ID NO: 173868 - DNA, 844 bp, Zea Mays
atgcaactgttaatatgagtttgttggagttgatttaatgttaatataatgttttaatgttaatataatgtattcatgatgttagccccgcctattgcagtgatgcaactgttaatatgaattcatgatgcatctgggtaagctggggataagagtttgtgctggcaggatgagggtgggataacttgggatagtttcactgccaaggattggattgaagaggtgaagcctatctgttgactatgatgtttgcctgtctgcttgcctccagtccgaacactattggtcaccgttcactgtttctctgtgcccttggacatatgtggtgtccgtgcagtagtgaagctatgtgctggctctggctccctccatattaagctccaataaggccacgagaactcggtttctgttaactctccgttatcgtagtctcgggttcgggctgaacttcgctgttcctgtgccccatcgcttcgtttggtgctcaccatccctttacgcttgtgttaaccccctaagtcaccccagtttctttgtccaagtttggtgctcgaagccgtccctgtgactggtgaccgcgctggctgttctgcccctccttactgtgggcaacttttcttaaggtgtgattcgtccatgtggcatgtgttctatgataattttactatccctgtgtttagtgtgttttgctcagagtactccagatttgccccgataggaaaatttggctttctttgtgtttgtaacttctattattcacattatagcagagagtatctataaaaacatattgtaccaatcaaagctattcctgtttattgtgttgaaatatatttcaagacag

SEQ ID NO: 173869 - DNA, 535 bp, Zea Mays
tgctaagtatatatctgaatgcgacacttggtagagagtcaaggccagccatttgaaggtagcgggcaccttgcagccccttcccatcccatcttggaaatgggaggatatttgcatggatttgattgtgggattgcccaatacctcccaacaccatgattctatttgggtcattgtggataggttgaccaaggcagctcatttcttgccggtacataccacccacagggcagagaaatatgcagaaatctacattgaccagatagttcgcttgcatggaataccaaggactatcgtatctgatagaggagcaccattcgtggcacgtttctgggagcaattgcaagaatcacttgggactcatgtaataagaagctcagcataccatcctcaaacagatggttagacaaaaagggtgaatcagattttggaagacatgttcagggcatgtgtgctacactatggaaaggattgggacaagtgtctttcattggcagaattctcttataataacagctaccagtccagtttaagg

SEQ ID NO: 173870 - DNA, 436 bp, Zea Mays
gctctcctctgttcggccatgccatcatggatttgactgccttacggccgcggttgaacgtggcaagctctaaggggagtgtcgtgctcggtgccatcgttgatcgccagctagggccggcaatggttatcaccgtggccgcggctgtgcttcaccgcgcctataaattcaccccgtcctcgctcccttcactcaaatcaaccgagctccgaccttcgtctccaaattgtgaagccatagccaccactcccgtctccgattagcccccctagccggagaatcgttgtttgcccccaaatcggtccgccgcaccgcaagaaccgagctcgtcgtggccagcaccgttcaggtcagttcatgccgccctctccctcgtttgagcactctcataactctgtgatgcttgccgaaccaccaatttggactgagagctcac

SEQ ID NO: 173871 - DNA, 407 bp, Zea Mays
cccatgcagcctatcaaaagctcctctagtcagtaagctagagcgagagacagaacttgagccaacacctactagacaaccaaaagttttttgaatccaatgaagacacctttctcatgtagtttgagttatcaccttgatcttcaacacttgacatccctgcatcaaccccctccttagaacccttaggttttgtagatttttgtgcttgatgccaatatgtgagataagagtcagagtgatagatgtagtgagatatatagggatcatatttgccatttgtatatgtgacactctcatatgaactttcatatatctcttgcattgccctatataatttatgtcttgcatttgtatgatatgttgtgacatgatgcttggaggattcaatcgatactgtcctgaac

SEQ ID NO: 173872 - DNA, 737 bp, Zea Mays
ggcaattttccctgaaggaattgaacttgaagtctttactgactcgagcacatctagtacacttgccatcctttttcttttgggagtcaccacaagaccttttgtgccttcggcgccatcacttctgccgaagggcttaaaacttctaatgtttttgccccttcgattcttggctcctcagttttatcagtctttcgctcagctaacttggctgagggtgccttcggcattgcagccgactcttcaatcttctgcgtaggaggagcaggtcctttcgcttcagtagctgaagaagtttccccgctaaactcaggcactatggccggttcaatatagcggggccggtgggtgaggactttcaattttttactcttcggcgcaggctcgcttggagcagccgaagcggcaacctttccagaggttgcaccctttcttttttgccctcgtggcgggtagcgatagtcagggtacacaaacccaatagcatcaaaaaccctatttaatcttttcttctttcggctcccgaaggccacatatagtgcattatcttcggacttggaatatgctccaagtaactcatcgctagtattttcaacacacttcagccaatcatcatctggttcgacaaactggtctccaaacctgaaggtgtattttaatcaaaccaggtcgccttcgctagggttagtgatggtttctttcggcatttcctagctgtctatcagtggccatatcct

SEQ ID NO: 173873 - DNA, 841 bp, Zea Mays
attcgtggaacactacctgcccgggctcgactccctttctcccaggttataaaaccgtgccgcatctctcctctcatcccttgtcgcgaaccaggtgagacttgcgccacctttgttcatacagggagagcgagggagaaccaaatctgcgccgccgttgactcgcttgtccgccgtcgatttggggtaaacgcggggtcttggcaactcgcccgggcgtgtggagcgtgaccgcggcgaattggggacacggatgcctcaagtgttggggaaatttctcgccgaccggccagcacttccaccattcgcaactcaccgcgcgctggaagcttcgctccgtgcctactggtaataccccttcccacgtattgcttttcgcctagcatcgagtaggagggtgttaatcgagttttgggggcagcgaggatgggattttgggtgcactccggcgatgcgccgccgtgtccgtcgcgggcgccgccgtccggtcacctgggttgtgggagcgtttctgaccgcgggatctaaaagctgcggtcgggattaggggatggcccggtagttaatcagaggtagagtttggaacttggcgcaagcaaccaggtgtcgttgatctgagatttaacgcatagggttaaatcgcggatactgaaaatcgggaccgtagaattttgatccgagggctggggcgaactcgcgtcatggtgaactcctagtcttggatccctgatcgcacggtcaaaatagtgtaccgtttcgtgtatgggaaatctaatcttgaccaccgattactgatcgtgtggtcgtgatcccgcgatccctctgcgcccagacctttttg

SEQ ID NO: 173874 - DNA, 698 bp, Zea Mays
cacacgccttttgatttaaacactaccgccaccggttaaccggaacgccgctgtgtcagcagtgaccgccgcctcggacccccttcacgtggactgaccaaaccatatctttccccagccaaaccttgtaagcaccgtgtccttactggtccacttaaactttctatgccactagattgaacactaccatgtttaactcctcggtatacctcgccggagtcccggtgtctgccaccaccacgaccagtaggggttgaggttattttggtgcgattaaccaagggagaaacttggactgagtttgggtatcatgttggtgtgctttgtttcaccggagaaggtcattgatggtgagtccttgcggatgaacccaggtgttcgacctggaaccaccggtgtcgcagttggggacaataccttgtaaaagtaggaaaacctcgggttcccgatgcgatgtcagtgaaagaaaggaacatggcgttaggcgcaaataagttcagttgaactgtgagggtctttgcacaaaatggacacgcgggcgcgggcggctgacgcggggccattttcccgtgcacccatgggccgagcttaaggtttcggcccagaactgttggtcgttttcctttttctttttggtagcaggatgcaaaattcatcataaattgtagaaaactgcaaagattaccaaaccaattttg

SEQ ID NO: 173875 - DNA, 363 bp, Zea Mays
tgcgggcgacaacaccaagaaacgtcaaacacatcgttgtagctagagctacaggcgagcaggattgggggttcatttgtgtacctcatcatgtggttccagggaggtcggattggagccgcggaggccgtcggcgaggagacgatgaaggcagcggtgaacaagagcactgtctggatctctggaaaaacaaagcacatcaacatcgattcgcgtgggtcaacacaactcaacatcacgatccgtaccgggcacacagggatctctgaagcttaccagacagaggaggtggtcgcttaccagatggaggaggaggtcggcgtagagcgacacgccatgggtcgcgaagacctcggaatcgcg

SEQ ID NO: 173876 - DNA, 527 bp, Zea Mays
cgaacgacgaccgaggcatgagagggtcttaggtcaacgacggcggagctgctacagtgcggagaaagggccggtgagcgtggactgagaggaatagaggggaagggagcgaaccgaggggtgtcctaggttgctggtgacgaggcgaagctcaccgaggcaacggacacggcgagggctcgacggcgaccgcagaacgagcacgaggccatggtggatggtggcagagatccctaggtgttcatggtgcaagagagaggtgcgagggggtctgctgggggcgcaactgagtgagggaagtgagcgagtgggtgcgggctccagaaagaggtcgggcgcatgggtagtggccatgaaacatgcgacgtgggcgcgtccacggtggagtacgtgggcgggaggttagggaaagggaggaggctgacaagtgggctccataggctagcgagaggggactcgcgaacaggcggtctgcgctgacaaggcagacccaccgagctgcgcgagagaatgggcgcgcgcgtgag

SEQ ID NO: 173877 - DNA, 781 bp, Zea Mays
cttctgaaacgtgggggacgcgttatatatggtggttctctgggtgtcaattcaatcgatatgattgattactttcaggttactcttttatctctatactttataaaatattttaataattgaattagttcttataaggtttggtttactcaaaaaagtatgcgagtagacattcatctttcactgtactgaaatacctatgagatgatgaaatatgcggctaaaaaaaattcttgatctccaaacttgcttacaccaacactcttttacttaacaactatacattttgttaatattctgaacacagtccattcctggtgttaatcatatttctgaaggctacaatccagcaacctggatgcttgaaatcaccacacaagcatgtgaagagattcttggtttagattttgcagtggtgtacaaaaactccgaccagttcaggtgatttctattgaacataaaagaagcgctaatgttgtagttttgttggtctatgtaattttgtttcattttttttgtaagaataccaaatttatgcaactttttatgcatttttttaacaaacttgttcacaataatttagggaagtcgaacagttaattaaagaatcgagtattccagctattggcacggaacctttaaaattctcatcagagttttcacagaactttcttactcagttcaaagcttgctggcgtaagcaaagacttgtttactggagaagtccagagtacaatgttgtgcggttatttttcacggcaattgcagctatcatattcgg

SEQ ID NO: 173878 - DNA, 342 bp, Zea Mays
ggcggcgccgcctcgcgtctagtactagtgaagaagatagcgctgctccattcgatccgatctgtgcggtctggagtgctcgggcgaagcgttttgattttattaaagtttggtcgtgcgatcttgatcgggtggccagggattagattaagcgttggcgtaacgttgtccgtcgagctctgatctagcgacagtgggtgcgtaccggttataaaatggatggtttaatcttggtggtccaatacagatcgaacgactcacgagtgtcgataccccttcgccgtgtatttattgcaaaagagaccctgaatatttcatgaatcaacccgtagtacaggtcag

SEQ ID NO: 173879 - DNA, 880 bp, Zea Mays
ggggaaacgacattaggggggcgagatgggggatctggtcgggagggaaaaccggtcaccggagctcgacgttggttctccgccgttgatccggttccgggtggttggggatgtggcgaagcacgggtagggggtcatggtggaggggtcattttgaccgataggcacttgggatggtcggtccacgacgaggtggcaggttcttgcggcggcgaggtcaccggtggggctactgggcacgataggcgaaggagaagggcgtgctgagcttgtggcgaagtggcggagctcgtgaactatatcaattagactgtaagccaccagagaggggagagacgacgacgccaagctcgattgggcccaggggagggggagggagtggccgaggctggtgcgaggagatgaggggctcggggcgatccttttataggtgaccaaggaggggggaaggaggtggcgtgcaccggcgaggcgcgctgcgacagcaatgatggcgcacattggtggcaatgggatggctcgggcaggaggtggcgacgggacggctcaggcatagggcacggggatgcaaggcaccaatttggctggtgagtgagttaatggcgaggagacagggcggatggtggccagcgacgatcgaatcgatggccgatcatgggcgagagagaaggggctgacgagcgggatcgggttgttagcggaagagcgggtgcgagggagaaagagagggcgtggctgacgggtggggccgggcggtcagtgggagagggaagagagtgaggcgcgggcgcgcgggagagaggtggagacttgggccaggttcggcccagccgatagggaagggttttctttttctgttttcttttctcttttcttttcc

SEQ ID NO: 173880 - DNA, 533 bp, Zea Mays
aaggagaaggagcggatccgatggacgtgaaggctcggctcaaggcgtgggcacatgcggtggccctcgcatccaccacccatctcaactcatgatatatggataaaatatatatatagtaatggtcctcgaatttggtatgccgtgttacttagattctcaaacttagaaaactaggaaaacatgtgctggaacttggtggcccattcaaagctgtccaatatcaaatttgcttgaaccagatgccaacatagtgtgccacgttagagtcatttggatccctaaactcaacatgttgtgtcactttagatccccgaacttggcatgttgtgtcatttgggtccataaacctttattactgtgctccaacatggcacgttatatccgcgtccagtttaagcaaatccagttttaaacagttttgcacgggccgaccaagttacctaacctgtttttctgagctccagcgtgccaaattgaaaggactatatatatataagcaaacacctttttcttcttatatatatagccat

SEQ ID NO: 173881 - DNA, 671 bp, Zea Mays
gtgatgatcctacggagctctgggaggcttcaatttatagagcgcaatagcggtggcgctcaatttggccgagaactgctggcggccggagagggggaggattactggtgcagtggattcgtggcaacaatcgcggcagcgctcaccagcgatgatcagatggttatagtgagtcacggcgacgcgacggatgtgtcctgatacgtggcgtaaggccgcgagacgatgatcactggcgatctcatctaattccaccgcggcgagcttggtacggcgaccgaaattgtttactggccggggcttatccatggcggcgtgctacgagcgttatccgatcaacctgagcacaaatcaagacggcgacagcacgaatcacggcagagatcatcggtggtgagctgagctgtaaatctgatctgtttcaggttactgtaccatcgcgagttcctttcagtgcacctgacagtcaaagtttgggctcaaatctctctcaaatttctatggcaaccagtggatcagccagtaacaaaagttgttgtctgatgatccaacaacaatcttgttgtagcaaccatggccaaattctcattagatcagggttgatttctagttcaaagttgactcagtatcactgttagtctgaatttcagactgcaaacagcctgacagcc

SEQ ID NO: 173882 - DNA, 1056 bp, Zea Mays
ggtcacgccagacaacgacgaagaagaaaacgacaacatcacgttccatcgacggtcgttgtttgcttgatgcaggccagatcaccggcagtgagagagaggaaaaagccgaggcacaaaaaatgggagggctaggggtttttctgcaagcagatgggtaaaaatcccacagcggcgagtgcgctgtcttttagaggccagtaaaaatgcctcggtaaaccaacggtcccacagtaaaacgtcacctttaaacggtcacatttcaaaaaaacccgtgggaccacttcaaccgagcgaggacagcgtctcagccatctcccgaaaaagacttcgagaccaacccactaagttgaactggcccctcgggggacaagtgttggggcgaaggctgactgtccccctcgctcggttcatttataacgtcaacaggataaatcacgacaaagggaaagcgaagtctacctcaaccaagtgaaggccttaggacagagggaccgaccaggataggcgaaggccttgtcggcttcgcagtttggccaggacaggcgaaggccttgtcgactcccgaagacttggggccctaagacgaaggctactgtcattgcccacacatgtttttaaagagggcccgtgtggaaccgtcctgggtcgcttgaccccacttgtaagccacatcacagggtaggattgatggtgtgttcgtctgtgttgtacttaaccactctgtaatgacctgtagtaacccttgagggtgaatattatgagaataacgtaggtaaccaggggcataactgtatttacaagggtgagactgtcccttggttacctataaatacccccgcactgtaccctgatgggacaggctgaaaacactgttgccctaatccaccgtgttattaagcatcaaagtattcccgttttctcacaacttggacccactcgaccacgtgtcagtgagttccaacagggtgcgctaatgaaaacaagttcatgaaggaagcatgcttgttagatcaatgtatcaagatattatccattttacgccgattgagtata

SEQ ID NO: 173883 - DNA, 1055 bp, Zea Mays
tgtttaaactaaaaatcatgaaactatttttattaaattctagggaaaataataagcctaggaaaattggtttcacaattttaggatttttctacaatttataacaaatttcccaagttcttctgaaaaagaaaaagaaaaagattcacaggactgggccggtttcagcccaggcggtccaatccagagggaaaggcgcccgcgcccgcgcgcgctggcgactttgcacaggggtccccggtgttttggctaactgaaaacgagttcctattactgtttcttgtgtcactgacagattgcagataagccctccaccttctatctcttcgcaaaccaaagtccacgacggcgctcacgagcggagatactccggcgagcctctgtaccggtcgattggggcaacgacaaggttctccgagcaacagacatgaaattggctaccttaatcatttccccccaacccaattgcatccaagaccaactaagaagctctggccacggtgaccgaggacaaggcggcaagattgtcgtgttcccggcgatgggtggcggtctagttcaattgggcgggtctaagagctttaggagggcctagggatgctagaacaagcaaaagagggacttggactgacctgagttgagctggccgcggcgagctgagttttgcggtggcggagagtcgacttgggggaaatgaacaattcgcggttgctggtggataattggaggcaagcgtgggtgcgttggcttcatggtaacttggcgcaacagccccagccatcaatttataggagggtaaagcggtggccagtgaatttggggaggacgcgcggcggccggaaatgaagaagaaggcgggcgcgatgaattcgtggctaacgtcgtggcaacctcaccggcgttgataagacagtggtagggagtcacggtgatgcagtgtaaagatagagccacacggcacacggctgggaggcggcggtcaccggcgagcctatcgggttccaccgcgacgagctagtacggtggtcggatttgttttaccggccggacttatc

SEQ ID NO: 173884 - DNA, 783 bp, Zea Mays
tagggatttaagtgtaaacatttgcttttgtgatacgaaacctcggttgctgcgcaggttccgacatttgggcctacgcaagcaaccgctgctggcaatactaattttgtggcggcctcaaccgtagtgcctgccgaggataattaatttgactctgtttctgagtgttttgagtctaatggtgaatctgggagttcgttttcctggatggaggagtcctcggatgaaggcttggattattttgctgcattagatgtggctgcagcggagtctccgccacgtgtggagggtgccggggatcttcctagtgcgagtactgggtataggcggcgaagggtggtgccgaaacaaagtgtgggtgagttttcgcgaagtggtaggcgacatcgtatggggatggagcgtggccgtcttcgggtagaccgggttggtaaatgagaattgttgtcctcgtcgattggggcgagcataggtgagggggatctgcgaaatctttttgagggtgaggagttgaggataatgctgttcaattatagggagatgggtatcatcccgaaggttgagccgatgtaatatatgatgccctcgtcgtgtgtatgtaattgtaatttgtatggtaatgtggcttgttggccgtattcgcacgcctgtgcttgatcaggctgcacctgtgggcgacttttgcgcagggtgtcttttagtgagagacttcgattaacgcacttgtgctattccggctacacccttaggtgacttttgcgtggagtgtctcttaaataaaag

SEQ ID NO: 173885 - DNA, 547 bp, Zea Mays
gccattatgaatgttgtgttatggcgtttggcctcacaggggcaccagctacatttcaaaaggcgatgaatgcaacgttgtcttcactgctccgtcgctatgtattggtattttttgacgacatcttaatttacagctctagttttgcggaccatcttcagcatgttcgggcagttttggaattgttggttcgtgataagtggtaggttaagctgtcgaaatgctcatttgcgcagcagcagttgtcatatttaggccacatcatttccgctgcaggcgttgcaactgatccatcgaagattcaagcggtggcatcgtgggctaccccacgttcactcaaggaattgcgcagttttttgggcttggcgggttattatcggcggtttgcaggcacttcggtattctggccaagcctttgacagccttcctggaggaaggttctttgtttgtgtggacttctcagcatgcagcatcatttcaggcgctgaaggatgccttagtctctgctctggtcttggctttgccaaactttgctctgccgttctgc

SEQ ID NO: 173886 - DNA, 1140 bp, Zea Mays
agggtagggtcggacatgggttcgccagaagaagacaacttggattgggtatctgctggggtggcgcaggtcttgcagccagtcatgccggcgcgctccaatatctcaagcgtgtactggcgctgagagagcaacatgccggtggcggaacgagtcacggtaatccccagaaaatgctgaagtggaccaaggtctttcatcgggaaggactgctgtagtgaactgatgatctggcgaagcagagctgatgtagaggccgtcaggatgatgtcatcaacgtagagaagcaaataggcactagcagtaccatgccggtagatgaagagcgaagtatctgtcttggcctcaatgaaccccagggaccggatgtgagatgcaaaacaactgtaccatgctcgaggagcctgcttcaatccgtagagtgatttgttgaggcgacatacgtgatctggatggtgagggtcaatgaaaccagctggctgggtgcaatagactgtctcagtcagggtaccatggaggaacacattgttgacatccaactgatgaatcggccagtcctgatgaagcgccaagctgaggacggtgcggatggtggcgggcttcacaacgggactaaaagtctcgtcgaaatcaacgccagggcgatgagtaaatccacgaaggacccaacgcgccttgtagcgctcaagggaaccatcagaatgaaacttgtgtttgaatatccacttgcctgagacgacgttggcatgaggcgggcgtggaacgagagtccaagtgttgttggtgaggagggcttggaactcgtcctccatcgcacgctgccagagggggtcgtcgagggcgcgacggtacgttgatggtataggggaggcagcagtagtcgtagcttgcaggttgaggcgcggttggtgaaaaccgcttttcgcgcgagtgcgcatgccgtggctgttgaccacgggaagagctggaacggagcccacaggaacagatgatgtcgtagcagccggatgacgagcagatcggtgcctgtcggtagtaccccaacgccaaggaagactatcgctggcgcccgcaggatgcagctgggcggccgcgcgcgtcccaggtgaaggcggtagcccaggcacgatgggcccagac

SEQ ID NO: 173887 - DNA, 394 bp, Zea Mays
tcctttcggatatttcagtttttgggcataatgtctggtttccaggatttcttcttcggataattttttccctgaagcatgtcaaaaaatgtaatcaatatcttcaactagggctttggggataggagattttgttttttctgccatgttttgccctgctgtcatgtcggtatctgaagtttgttgatcagatttatcttcaggcacgacagccttcgtctcgatgggcgttgaaggcctagcttcggcttcggcttggactttggcagcttcagcaattttcttagtaggaccagggatcaaggcctttgtggtctccaagaaagcgtccagcacgctggccatcctcctcctcttgggagttgtggcaggagccttttgcaccttcggcaat

SEQ ID NO: 173888 - DNA, 273 bp, Zea Mays
gtcggttgctctgtaggttccgacgtctgggcctgcgtaaacaacccttactgatgatattaattttgtggtggctgcgaatgcagtgcctgttaatgaaaatttgtctagttctgaaactgtgtcttggtcatctgacgggggtgagtttgggagtccgttttcatggactgaggagtctttggatgaggactgcattattttgctgcgttggatgtggctgcggcggagtccttgccgcagcctgaagtgcgcgaagcgtttgctcccccg

SEQ ID NO: 173889 - DNA, 324 bp, Zea Mays
tgaccgtgaacaaacgttgcttgttgctgacaacaccggcaactccactaattaaagttgcccatggtgggtaaatgccatcacacaaataatagcccatggtatattctgtcccattaacaatgtaactgatgggaggggtatcaccttttgccaaacaccggtgatcgatggagcacgtttatgtcgttgcatgacccatgcaatccgaaaaaagcatgccatatccacaagtcatgtgatgctattgcttcaaggataattatgggttttttgaaatgacctcgatagctaccgtgccaagcagttgggcatcgttcccac

SEQ ID NO: 173890 - DNA, 742 bp, Zea Mays
ggtcagctccaagtacagaatatcacaaaccagcagcaaccaggagagaaccccccaacgccagggctactccccgcaacaaggtcgcgatggcaaagcaactagggtcagaggctgaggctgaggccctcagtggccgagaagattctactgtgttttccatggcgaagactcagggcacccaaccagggattgcccggagaccaaggcgaccgaggaccgactggctagggctgccccggtagaaaaccaaagagtaatcgctcatacctatcaaccataatagtatcaccagcatcaataccaaaatgagcatccatattacccccagcaccaaaaccccaaacccttcccacaacaacatcgccttcaacaccaagaaaggttggccctgccaccaccaccacaccacatcagtcaaaccaacacccaccaccaaagcatgaagacttcgctgatccacccttcgagggagtgattcgtatgatcactagagggtccacctcagattccgagaacataggcgggagggggcccaaaaaatatatgtttcatataagtttttagataatcatgatatgcatgattgttacaaaaacaatttgcagatattttttatcagtgaattttaagtcttgcaagtaattttttctcatgctttgatgcctgtaactgagatccttatgtgcattacagttgtagattgttatccaaatttatctgtatcacatggattttttga

SEQ ID NO: 173891 - DNA, 1534 bp, Zea Mays
agcccctgaagctggcggtggggtccgcggacagaagtagcggccgcatcgcggaccactgttccacggaaaagacgtcattattttgtccgtgacattgcaatgtcgcgtgaccctgacctctgtttgagttatgacaacgaaattgcagtgaggcagtgaccaaacaaacggtttattatttatgtgaaaaccagcaggagaaaaatcctacattgcgaatgtaggtattatagatgtgattcataatttagaccgacccaacggcgttatgcatcacgcgatgcacacaggtaataaggatgcgtttgttcgagatcaaactaaaatgaggcggggtgacattgtcccctttattttttaatcacgccgccatcaaaaattgttcccgtgtttaccttgctcttgcgtaactcgcatccaaacactagaaaatatggtcgtcctcttttatcccttcttgtacgtccaaccaaacacaccctaagcagggccggacctgggggtggtcgagccgggcggccgcccagggcccccaaaatgttgggccccccactaagtatatatttaagtacagtgtttggtgattaaatcagactaaacaaacaacattcgctttgttagttgatcgatcaaaatatctaagccaagctatgatcacgttcacgtctctactatatttaaacaccatttttctagttccatgatttccactgtcattgtgcattctatatttaaatgaaaaatgctaacattatgtacaataaggattcaaaccataattgttggctttaaaccaacatttacactcacttagccaatagaacacacatgtctttatgttttatattatatacttaatcgtaaatagaaaacgtagcaatgtacgaacactttactagtatacggtatacgtcatttcctatttccaaagtgccctaattcttgccaagtaattacggttatataagagacaagctacgattacgtccacatatatggttatatcatatcatcaagattgaaatagtatatgtcgatattaataacatactcaatgtctctgtattaaagagtgttcgaagaaactttataagataatccaatgtgccaagtaagtttttattaatttagttaatataatttttgaacctttcaacatatatgtttataattatatatatgcatatatagatattatatatatatacacatgggttaaaaggacctacttatgggttaaaagggcctacttataagttttcgcccagggcccctaaaatctcaggaacgaccctgaccctaagtatcgctcacaaccactgtttcggtaaaaaaacaccttccaatataatagagcatgtacaataacgatgcatttttcgtggtctgaccgaaatctaaaattgcatacactctctcctctatgcatatcacttagcaatgcatgggagccgcccgtcaaaacacaataaatacacttttttcatctaatgcatcacattgttggatgtctctccttttttatgtgacc

SEQ ID NO: 173892 - DNA, 508 bp, Zea Mays
tggactcttttggtttcaagcctcaaaattaagggggtgtatgcctaaagttagtccatgtcacatcagatatttcaataccaattactagtattaaatatagattaattataaaactatacacagataaagcgataaagggcgtgacgagtccccacgcactggatacccaaagtaggcctattacttgtggtgacccatctgggtaagaagccacgggagtaggaacgaccaactcctgtcgagtaactctacgaggcggacaagaccgatcaactcccaccgagtaactctacgaggtggacaagaccgaccaactcccaccgagtaactctccgacgcaaacaagaccgaccaacccccgccgagtaactatgcaaggcggacaagaccgaccaactcccgccgagtaactctgtgaggcagacaagaccgactaattcctgtcgagcaactaggcgaggcggagatgtgaagacccatgtgtcacacccggatttctaggggt

SEQ ID NO: 173893 - DNA, 556 bp, Zea Mays
ttccgacaacagagaagggaactcatgtgcgggccaatgttcagacaaagagacggaggaagatcgaggaagccacctgacggtgttctgaaaccgaatacgggtggcgcctttctcagtcaggagaagtcaggggggcggccggacggggattcgtcgtcagagatggcacagaacaagtggtgaaggcgggaggagggagagaagagtttctccaggatgcttttcacgcagaactgttgcgagtcctatcctatcaggcttgaagaaagctgttaatatgggcatttcacttttcacgcttgtgcttggaaacatgtgccaccatggtccgggatgctttgctaggagaagactatcttctatcagcgatggcgggaatcatcacggaagcgaagcacttgatgtctgcagagtttgttttggtttctatgtcagtttgatgatcgggtgcagaagtcctagtgagtctgtaatcacttgggaggttgccccccatggtgttggggttttggtgtccagtgattttagtttacctactattcataagtaatgg

SEQ ID NO: 173894 - DNA, 599 bp, Zea Mays
ccctacgcgccgcatgcaaggggagggggaggggcagcgtccaccgctgcggctagtctaatatgccaatcatctttggagatgtctctgcccgctgtacacttcatatcagcggttgcagatgttgcagttacgaaagcaacaccaccaaagttcaagtactccctccgttccaacatgcacatagcccagctttagctatgttctaagttgaacttttataattgaccaaattcatagaaaaatgtgttgatacatacaaatatcaaacaaatgcagtatcaagaagtagttcacggtggatggtttaacccagctaattgctagtgtgatgttagagtatttttaatttaaattgatcaaagtcagagaagtttgccttagagaactaaaatgatatgttttttttaaacggaggtagtattgaaacgacataatgaacaattatatatttttaatgaaaaaacggaagctttgccgcttaattaagaaaaggagcaattcagacgtgacacacttgcagccccacataagcgccaataagtaatggagataaataactacgaattctctatcagcaaaagcacagcattatcaaa

SEQ ID NO: 173895 - DNA, 563 bp, Zea Mays
gtcgtttgcacgccgagtgagcccaattagggttggattcggttcacgtaggtggcgtcgacaaaggcgagtgagcaagtatagtcagtatgggagtggttgagcaagagggagaggcggtgataatgggagtgcacgacgttagggtcgtgggaggccaagacagtggagtcgaggccaagaactttgtaggggtcgaggggctcgaatgggaggcatcgacgctggccagcgaggagagcatcaatggcagtgaggaggtcttcagcacacgagatgttgtggtcgaaagaaatggtttaggtgacgaaaggatccaagagggcatgtgggggagtcaaatacccgcagtcagatcgaggccttggggtgcttagttgtagctagccaatatttttgttgttcttatataattgcatgtatgaaagcttatctattaggcgagaagcgggggagtaatagatatatgtgctacacgcgtgatgcacaacggtggaaattagtgttctgtaggagtagagaagtgtttcttccttatatgttatgaccttgtcatatcttct

SEQ ID NO: 173896 - DNA, 315 bp, Zea Mays
aagggatcgagtgaagtggcatgagcgtctggaaactgtctgtggtctttccgggtgcgattgtgggccaacgacgtcggaatcgctcgccgtagcttaagtgccgccgcgaacccgcctgatgtcgaggacagcttcactccgccacccaaccctcggtaatgctcagttttctgtttcgccatgcgcctaggtccacgttgcaccggttcaatttggttttggaggttgggtggtccggtgggtggccgtgcgcagatggggatccgctgtgggctgaacgcgccgttgtgcttggcagtcggacggggaagg

SEQ ID NO: 173897 - DNA, 645 bp, Zea Mays
gtaattttaggatcgaagaaaaatgcatatcatacatcacgacgcagaggtctaggagctttcttggtagcctcggcgttcgccttctcaatttgaacaatcatctccaaagccgtcgcactagcatcattggcagcttcggcggcagcactagcaacgaaggcggctttgcgtgcaacgacgacccttgcacgcctggctgcagccagcaaatcgcttaatcgtccgcgacaacaggacctttgcccgactccatgacaacggggaagaagccacaggcggcgaggaatcaaatggtagacgagcagagggggaagaaggaagagctcaggtggaaccctaacgtacctccagtgtgggacctggatccgttttggaggaagaacgggaatgggactcctacgggccagcttagtcaaaacgcgtggttataagccgtttaacagtagatgactatccagcacggttaaaagtgtcaaggataatagaaatacaaagagtagccagttataataacaaaaatttcaaatacttcgttgggtagttattttactaagcccagacatcggaataccggcgttccaaaaagctgagcgcagacagtatcaaatgcgaatcactacggctctttgccgagttctcgtc

SEQ ID NO: 173898 - DNA, 525 bp, Zea Mays
gtcgccggtccacgttgtgctcagggtaagtgggtaacacccggtgtacgctacgccgccgtggataagctccagccgttaaaaaaactccggccaccatactgcgccaccgcggtggaagccgataagaacgccggtgatagccgtcgtccgaccttacgccacgtatccgggcacctctgtcgcgtcatcgtgattccccgctgctgtctcatcgatgccggtgagcccgccacggcggtggacacgaaaccgcggcgccagagtccttcctcatctccggtcgccgcgttgctcgaccaaattgagtgccaccgacgaagccgcttataaattgagctcgtgactagcttcgcaatatcattgcgcacccccacaccaagtattgctcctagccgattcctagcgagctctaatttcgcattcgccccaattcggtttccgcccgcgatgaacacctccccgtggccagcccaactcaggttagttccagtgtctctgttgcttgttctagagtccctaaac

SEQ ID NO: 173899 - DNA, 400 bp, Zea Mays
tggcatctgcctatgctgatttcttgggcaactcttggcatagtgacccacattgccgaaagtgaagcacttgttcccatttccctggcaaaactgctgctgaggaggctgattgttccttggagcgggagctcgaaaacgagtgggtgccggctgctgctgctgaggtggcctgatcacccatctgcctaccttctgctgaaatcccctgctctgattatgggaaacaatcctgaacctctaggtctaagcggagggtgctgccattgatgcctttcttttcttctctgcccagtgagctacaatacaatcctcctgggagatggccaggttgaccaactcattgatactatcagcccggacagtgttgagacgttcacgcaggttggtgttgagaccc

SEQ ID NO: 173900 - DNA, 421 bp, Zea Mays
atttccagagaactcagggggctcggggtaagaatccagagacacagagaacagtgcaagtggactgcgggtttatttctatcttctgcaggggctttttaacaaaaccgacccgcgaaggggtattctctgattctggccgcccgatctccatccgagggctcggattacaccaggggggtttataactcgatgtgcaatgccagctctcagatcgcccgccaacgttcaggatttaaaataaccgagatctattctaacgcctctgattaccatccggcggtcgaggtttaatgaagcgaagggttatgcccggccatctactccatatctgacggcccagattaactgtgaaaccatcaactcctatccctccgattaagatcctacggtgaccaagcatctcctacttcacgccgac

SEQ ID NO: 173901 - DNA, 885 bp, Zea Mays
atcagtttcttacgcaattctctatgataagatgggggaacaaatctatcacacatagcatcctttaggtcatcccaagtagttggttctctaccatcacccactaaaccagtccaccaaatgatagcaaaatctttgaactcactagtggcttgtctaacctgatggtgttcaggcacaagatgggtggcaaattgttgctctatgtcatctcccaatcaagatatgcctcaacatcataatgacccgaaaaagaaggtatgctgaacttaatcttagcaaaagggtcatcgagaatacgattgttattacctcgctggttgtcacccatacctaccctgttccgacgaagacgacattgtaggcgggtgtctctggtagctgcctcatcaaaattgccacgtgcatcgaaaatggcatcatcttgagcctgtggtggatgctgctgatgctgtggtggatgctgctggagttgtggtggtggaggaggctgctgatgtagtggacgtgtctccaacatggcaacccgatcgacaagctcggttatccgtctctccaccctatctagcactttgccaagatccattgcaataatcgcgtcatggatagacttgtggaccgtttcctccatattttcctccatacgcttgcaaataacatcaaagtcttcgtggctgacacaatcagaaaattgtgtgggaatgactacctcaatctcgtcatcggatcctgccattggaaacaccaaaacaggaacaaacagtaaaggttatccctaataagcaactacgctctctgggtgaataggaacacacactaccgtgtcttaccaagttcttactagtatctaatgaaaacacaatgcaaaggacggtacaatcggag

SEQ ID NO: 173902 - DNA, 1055 bp, Zea Mays
agcaactgagcatgatctctgtagcagaattgtagtttgtatattggactacaagtttgctacaaacagattagcaagttttcatgcaaaaattcaagaaaaatgcctctgaagatcctcggccagaacaactgatgaagcttccaatgttacagtgcactgtgattcgtgcctggcactccgtggatattcgcagggaggtaactttggacgtgtagcgacctcgcggacctagcccaagcctagtcggagataatttaccagcggccgccgtggctcagtcatttccgccaccgtgtcatccatgcctcgctcctccctcactgtgtcccttctttacaaggtaaccatgcatgaacggtgtaatccatggccgtggatcgttagccggaccaccacacctttaaatagccctgccacccatggcgaggtattcacatcttcaccagtgaactcggttgaagcacaaattcgcgaaatcctctccacctctcccaaaattggttgtgcaaggtgaaaccatagtcctttgcgaccgtgtagccccaacctcacctcttaattccgcccagaaccgtcgtggcaccgttttccccttttatgtcatcggcgaacgaaaatcctccgcgctccgtggccagctactcccaggtctgttcatgctctctgctctcccgtttcagtgtccataggttatcctgatgctcctcgacccattcaattgagctaagttgcgccagctcgtcgggaacacccgtgttcatccgttgttcgcgctgtctccgtgggcaggatgatttagagctccgctagtgcaattgatcgaggggaaacacttcttcgatgttgaattaggagtaaaccaatttatagcactggtcgtggtgtattccggccagagtgagctcgctggagtgcctgctccgccgctccacgtcgtggaccgagctctataaagaaatagaacttaggggttgtttttgttgatgtcagcgactctaggaatagtattgtgaccctgtttcaagttattcaaatcagcaggggcctttttg

SEQ ID NO: 173903 - DNA, 521 bp, Zea Mays
tgggaagcggctcaagccgagaaacagatgttggataatcttgctgatcgcctcaagggaagtgagtgagaaaaatgatactataattatgttagtacaatttatttatcttgactttgttaacttattttgctcattatgtttgcagagattggaggtggcgtaaactatttgaccgatgaggcgcatgcaagatatgttcaggataaaatggcgacggttgagctgatggaggaggaggacgacgacacatctagattaagtgagcttatcgctctcgcagagacaggattacatgaagaagaggaggacgacacatcaaggttgagtgagctcatcgcactagctgaggcaggattacgtgctcaagaggaagaggacgagtttatgtctcaggccgccgaagaggtagaggcggcttattacaagaagaagtctgatgaggctgaggctaaggatgagttactctcccaagctgcagatgaagcagaagccaattattacaagagaactgttgataa

SEQ ID NO: 173904 - DNA, 727 bp, Zea Mays
cttgggtgttatggtgctcctcacaaatgcggaatcaagcgcgaagtcgcacccgacgagcgaattttgagctagggatcgtagcgaaagcagagttagggttttaagcacaaacaaagggatcgaacaaatatatcaactgatcactcacctcctgactaggaacctattataacgttgtgactcggtttttcagtcgacctactaaaacctccaggcacgatctcaggaccagcggattggaacacaaaaacaagggcaaaagaaaacaaccaaacgagtttttcaaacccaaacatataaatagagttccatgcatgcataacctgccttctttttacataaacgtcagttcattatgaactgacccaaaatacaccccaccaccaccactacagcaagctacctaacctaagctggtggcgacccgccaccagctctgtcgctgtcgccttcactgtcgctacacttgccatcgccaccgctgccgcccttgccatcgtcaccactatcgccatcgccgaccttgctgctgccaaaccttgccaccattgttgaccttgtcgtccttgttgccctcgttgtttccctcgtacctgtcctcctcctcctcagagtcatccgagccatcaagcactactcgctcgatgacctgaatgtaggctctctccaccccatgaagtcatctgtgcagacagatgatggcgagcgaggagtcagtggcagg

SEQ ID NO: 173905 - DNA, 803 bp, Zea Mays
gcaaagtgttagagggtagtgtggtgagcagtctctgttaagttggatctccctaaatttgcttagaattgggagaaaatgttgttcttagttgagctgtccggcaagttgtgcactgaacattgttcagttagctggtacagaatcagtgttttcgtctcgttttggagcacaataactcttaatccgtgagccttaggccttggattgctgcagaaaatttgtagatctatattttgggaataagtttagttaacttaggttggtcttttattgcttggaatagtgaggtttgaaggggtagaaatgagagttcagacggtttgttttgagttcagttcaaatggttgcagcttggttcagttttggggagcagaaaaatccccacgtctctgctatgctccacttgtagcagtttggattgagaccatggataggagtaggattcgatgcttccagtgcctaagtaatttatgcttggtgtttatccattgccggtgcccatcctgtctacctgtctctggtttgtgtgtgacttaggttcactgctctaccgtggattcgatcgggcatggtgcttgtgccgtgaagccgcgtgtgcaggtttaagcagctgctggcaccatcgaggtccttccctgctgtgatcaggacaacttcagccaacgcctatttctgtaactcgtggccatggttctctaggtgtgtagcgctcctccttcacgcgctcaggcgcgtcctccacgttcggcgtcttactgcccctcgtgcgcgctcggccttacctcccctgaccacattgc

SEQ ID NO: 173906 - DNA, 1146 bp, Zea Mays
ttttgtattaaaaatctactttccaattcaattattcaatttcagactgtattggactgggcctcaattttcagaaagcgcaggggccccagggtaaaaatccccagacccagcgaacagtggaggtggatggcgggttctaaatcaactaaacacaggggctcaattgtaaactgacccagctgaaggggtaccgcctaatctaagccgtccgatcggaaatcaggggcccggattagatctccacacccgtgcgaaccggtacacgccagatccgcaagatttgaatccaacgccccagatcaactctcccctcttttaatctacaacgttcatcaatgcttggacgtcgccgattcacctaagcgaaacggtatgaccccgtctaatctagaccgctcaatggaggatcgacgactcagacttgttcttccacctcgccgccaacaccggcgaccgcaccgaacgttgcgacgacccgccatggcaacgacgcccacgacactaatctgtatccggttcctacgtatctcgggtgcaaaatgaaattgagggaatggcgaacacgggagactgattattaccaatgttccagcagtggccagctccgtccacggcgcgttgtagtcccgcggcggagaacaattcgatggcgagaaattggaggcacacggcccgtcccctcgcacggcactacgacaatcgcgaataggaggttcgggcggagctctctgacctcacagcactggcttgaaggcgcgggaacaggatttccacccacagccgagcgcgtaacggcgattggaagggggaaacgagggggagagctcgagcactgacgctgaggtcgcgggagaatcgtagggtcgacgaggagaagggccgcgggacacgctacttatccccgggagcccgggaggtcgcggaatccgcggtgaggaagatcggagtgttgaccacgcgagcatggcgcattctgttgagatgagcacggagaataggtgatgacagcgtggccccaccggtaagccacgcatgtgagcggtagtgagcgccatgggctaagcggggcaaaaactgagttgggccgaattgaggttccgaagcccagttagactaggttgattttattctttattctctttt

SEQ ID NO: 173907 - DNA, 711 bp, Zea Mays
ctttttcagtggtgtaacaaacaaatactccagcagtttcccaaaataaaaagctgaaacgaaactgggccaacatttacaaattttaggttctgacaccagcccagtttgcctctatggctagcccattgatacatgtcaatgccccttttatttttgcttctcgctataactgtaatcgtccaacgcaccccgtcagtaattgtgacgccaacgccaggatttatgttttagttcacaaatatttatggttcacatactatgtgcttcttgtgtctttgctggaatgaaaaccacgtcctccttcctttaagcacttgagtactggactcaatccgtcagctagctagcaagccaaaaaagcgcgggcaccatgcctcgtttccaggatgcacgggcgcaagacgcggaggatgtgcgcggaagcgattgggagagtacttttctcacgcatatttgtgggacgcgatgcctcgtttttgggtcacgtataaatgcgggtgacaaagggggaggtctgttggagcacaaaaaacaaggtttcgcatctgaaactggttttggggagtctttacgtggtttcttggagatgctcttatgtcttgactagttatttgcccgtgcgttgctacgatttctctaaatattacaagtagaccttatttgtatatgatagttcaaacatgtttcgcagatatagcctaactaaac

SEQ ID NO: 173908 - DNA, 938 bp, Zea Mays
gattctagggtttaaagtggactatataacccggtgctccctcgccctatcaattgaacgaactggtgaaccggccatcgagagtggagaaaggtgtggaggtcatcgcttgcccatctccgattgcgccgtcgcggggggttcgacggtggccgaggagcttcgcctcggggcactgatcgtggttgtaacagttgcgggtatagagaaccgttttgtgggggccgaattcctcaccggcgctcttcaccgtcgcggggtccacgtttcgtcgtggccagggtagtccacgccgcgttcatcagtgagttttccctccctatctgttgcaattccttctgctttgctggcgactgctgaattggagtttcaggcggagatgcaaacttagggcacgggtcggcgatggcgcgccgacgtggatgggctggtgctatcacggttctaggccatgggaaagtgatagatgtggagagcaatctggccatcagatcggatttctgcgggcatgattagattaactaggtaccggtttgtctgggtgatcggtgttcattggatcgagaaatgtggataggaatagatcacgcttcattaaaaccgcaatcgttgatctacgatttgacgggtgacgatgcgtaccgattcatttaagggtcacatccattctgatccgctgatttgtgatcgaatggttaagaataggtcaacatgtgaatgttccttgggccgtggatctcggatcctagcatccagagtgcataccgatttagggtatggggagatctaatatggaccgcagaattctaatcgtgtggtagggaatggtcgtccccctttggtcggtgcagattaataaaagagccctcatgttttgtggtaaataactcgcgacccacactgtgtatagagtagtttaatccaagtccttgattttt

SEQ ID NO: 173909 - DNA, 415 bp, Zea Mays
tgcctcgacagtgcagaggtgtggagaaaatgtggatccgtgcagcggcgattttgacgaggggaacgcaccacaccacgtcttctcctgcagctgctgcgtgggggtctacgggatcagcatgggcgaactggcggaaggttacgacggggtatggcgaggggcgccgcacacagacaggcacgtacggtggcaaacggatttggggaaatcgaactgcgaacagggaacatgacagtggtaaacagatctgtggatggtgagctctgaacaataaacagacttacaatcgatgacttctggcgaaaggacggcggctgtgacggtggaacggcgaggacagagctggtggcggggaggacagagctagccgcggctgcgacgcacccacaacgacgaagacgcaggccgtgta

SEQ ID NO: 173910 - DNA, 543 bp, Zea Mays
tagatcttaatgttgtgtatcttaatgttgtttccatttgtgtgtatcttaatgttgtgtatttaatgttgcttccatgcgcagggtaccacatctagtcggtagaggctagagcagctcatctcacctctttcggaccaccaatagccgtcaggtcacttagttgtagatcaggtggcagatgacaagactaatgaggtggtagatgatgaggacaatcagatgatagcagatgaggtagaggttgaggcgacaacagatgagaaggaggcagatgaattgacagtcgcagccactgccagcattaggtattttattcttaattaacacctttactattaatttcattttcaaataacaagtttcatacaagtttcatttgcataggtttcttcagtacctaacatttaagcctcggaaggagttcgagcaacgacacataacaaggtagaaggggaccaggtgttgggaagaggtggtctgggacggacaagggcaccgtacaccagtcagcagcgtgaattaaatctattgtagattctt

SEQ ID NO: 173911 - DNA, 377 bp, Zea Mays
gcaaatcattcagaaatctagggtgcgctgatgacttccagtccaatcaagtattctaaaaaagaattatgtcccaaacaaactacaatacctgtggccagtacaggctaaatcgtgctcaagttagtatctgcatcagatttgtattttagtctaccaaactgatataaccttggtagttggtacattgctcaagtgacttggagcagagcagaatgtgaatatctgcctgatgatcccttttacagcaaaagcatgccagagtgtgtgtgtcgtattcattcgttttccagaagggagcccggccaccatatggaaggaaattcactcttcatagtcacaacagcatcagtgtattccgtgttgcacgtactgct

SEQ ID NO: 173912 - DNA, 361 bp, Zea Mays
ccctcctaccccttcaaacaacttgtattcatccgccctgccactgcccccacttcaacaactcagccgagtgcccctggtgctcgtttccccgcacttctgagttcatcaactggatgcttcaattgtgggaagtctggacatttcatcaaagactgcccatatccgaggtggaacaactccaataatcagcagaacctagggagttcaagccaaggtaagggaaacacagcaaataatgcagcgggcaaaaatatgaagaaaactgggcaaatctattatacacaagtggccactacaccggagggagagccagttatgatgggtacgtttctcgtggccaatcaccctgcagtcattc

SEQ ID NO: 173913 - DNA, 445 bp, Zea Mays
gtagtggatctacacgaagacgcattcgctccaaccccatccgacggcgcctaccacttcgcgagctctcaccaacactatgcttcgccaccacttttcgctgacggcgttcgatcctcgccccagccaggggatccaacgcttcgcccatctccagccacggtgaagactccgccgcggccacatctaacgcagcaaaataattcaaatcttcatctgaagactcctcagtccacgcaaatgggctctcaaacccgccaccatcagacaaaaaagacctagattcagaaccagaaaaaccatcattagcacgcactgcgttcgcggccgccacaaaattaataccatcagtaggtgttgcttgcacaggcccaggcatcggaacctacgcagcaaccgagtttcagtattacaaaaacaaaaccccacacccaatgcctctaag

SEQ ID NO: 173914 - DNA, 463 bp, Zea Mays
gggattcgacaccatcgaattctgcgttgagggagagagagcgtagcccgccattctcggcctgggcagtgtatcggtgtcggctttgggcttgtgatcttcgccatggagttgtgatctcaagggtgtcaaccagggcgaccgggagccaccatatcggctgcaattcctcgctgttgcacgcgcttggccacaaatccgcgcgggcggggacaacttcgatcatcgtcgaatcatcggtgagataacttccaaccgatttggtttagccttgcgatcatataggcccttttaattgacgtacagctcggtaacaagccgattggcatcaccggcggcgttagctcatcggtggcgccgccatgtccggggttgggggagagaggggtccctcagccgttggatggccagggagtggccgtgatctaatccgtgaataacccttcgtccgaaggaaccctag

SEQ ID NO: 173915 - DNA, 744 bp, Zea Mays
tcagcttgtttatctttagcaaaagtacgtaaggaatagtcgatctggtaaacttttgttcggtgcgtgctgcgattgccctccacctccatggtcggtacctttctccacacacaacacaatcgctgtttcgtgcccaggaagttgcaacgttgcatgcgcaatggcgaaaactggctcatacttgctattattatgtgttcatcagtgatggtgatgctcctactgtcctaaaatgattcgtaggcttctgtacttcagctggggatgattcatacgagagtggtggttttttttggtcacataccgggtgagctttctaccggcaacggctagagtggtatgggtttagggttagtcatggtttcatggactcaaggcacggcccctttgagcacgaggagttcgcggtcgttcggctgacacgcgggtccgaccagcgctgggaaccgaacagtttggagaaagcccgggcccgggcctttgttgcatgtttttagcacccggggagggcccgcgcatcagggaggcagagctagttgacacatttaggccttcgattattcctattacgcctggattggataagattaataattttataaaatattttgacttgttcagaaatgaaacccactcatgactcgttcggtacaataggttttagttctaacctcaacgattccaaggcaagcatcagggaggcagagctagttgacacatttaagtcccatttggtttaag

SEQ ID NO: 173916 - DNA, 545 bp, Zea Mays
atcttttgaagtttggtattggaagaaattggcagtgcatcattcgaaggtttttaggtgtattatttatttgaggaacacaacaacaccacacttgaaggagcttgatgagcgaggccaaaagatgatcttcgtcgggtatgagcgaggcactaaagcatttagggcatatgacccaatcaccaagtgtgtaaccataactcaagatgtggtgttcgatgaataagcttgctgggataggtctgatggcaacaagggtggtgaaggagatgtcactaattctagtgatcttgttgttgattaccaggtagctccaaatgtggctagggcaggcattgttggtgaaacaattatggaactaagatttatctaggtgatactttgcttaggaccgaggagctggacgaggagagtctggatgtcgaccattgatgatgatcctttgtggacactttctgtagatgacatcattggaccaacaatagctcctggttatgctgcacacaacatccataacatctgttcatggtggattctgaggagcc

SEQ ID NO: 173917 - DNA, 494 bp, Zea Mays
ttggtattctgcgatctgatcacagtcgtctcgcggtcatccaacggtccggcgtcatcgtctacacacgtttcccccccccccaatggcgacggtgtttccctaatccacgatggtgcatcaccgccgatcacatttgccgcgagccggtgccccgaagttccacccgagaggtgctacgcgcaaagaaaattaggatggagcttttggggatgtgctcaccgggatttggcgctcaggtgagggttggtcgcggtgccaggcaggttcgcgacggactggtggctccggcgagcaattaacttgtctccactggttctcccgatccaattcctctgtagcgccaatcaccggacccagctaactcgatagacaccacgtaggacaccggaacgaccccgaggtgtggattctgcggcgggggcgcaacttcactttcccaacgacgacccccaattcccggtgtgatggttggcaatcgattgagcggaggt

SEQ ID NO: 173918 - DNA, 698 bp, Zea Mays
gcgacgcgtggttgtatacagccgaaactgaaatccttgtccaatgcagttgtgggcgcctaggcacggaccccaaatccctctccaatcccgtgaaattcctctccaatcccaccgcctccaccgtcactggcccgataagcctcgcctcctccctctacctctccctccctcctccccgtcgccatagcacgcagctctgacgtccccgacgcgtctctgctggtagcgcgtcgtcccctctgccggttcccacgcgcctctcatcgaatgagcacagcctccacaaacgtgtgccaccgctctccacctcctctgcggccgcgtagccaggccggggccaccacgatgcctcctccccgctaccgcgccctctccgctgaccgccgcatgcaccactgccgaagaccacgccttcgtgcctactccaatccagctgtaaacgcggacgagggctcttccttgtgagttacgattggtgccgtgttctcgatccctcctccatctcgtgctacttcttcctccgacgttgctcgcctccctcaggatcccatcgccccgctcgccttctcctccatcagcccgaccagcctcgcctccaccctttgcctctcacttcattctcccgtcgtcgcatcgcgcagctccgtcggccccgatttggctcttttggccgccgcgacgtccctctgttggat

SEQ ID NO: 173919 - DNA, 2560 bp, Zea Mays
gctaaaggtacatagtgagttaattacacaacaaagggaaaccaatatataatatatatcataatcaagaaggatcattctaaagtactagcccactaggtctcaaaaactacatgtctgcactgtgtatccttggatacatcatcatagattcgttgtcttgtatttagttacctctgtgaaatcctgatttgagatcgtgtccattgtgataatctcttttttttctaaattagatatctcaagagcataatctgttgtcttcttaccaacagtgtatcgctctgcaactttatgtgtacctacatatagaattaaagccaggtagtgtaagtatttagcatctcaggcctatactctgtagtattagactattagttaatcttaccgagaactttcaccagtcggtacatatcttgcttgttgccaagaccggaaattcttatcctcacaaaagccccagcaattttgtcagagaaaacagcaacctcatcaataagatcctccataacactgcggcgcaagtaaatcagattgatattgtgcatgtcaatggcagcataatcctctggattaattgtcgattctctttcaatcttcatatgagccttcctcctcttatcagaacctaatttatcggacaactcattatatcctccatgatttacttgggccgagtatgaatcaaatgctctttcactatctgcattcaatgttggaacctgtttcacaagataatgcatctccaaaagctttaacatctcaaaatgaccaacacgtggttttctaaacaaattgctaagccttgcatcacagataatctgactttttctgcgaggatcagagaggttattttgctttatatattcgagcaaaagaacctggacatcaaactgggaaatataagaactatcaccatttctcatgtgaccaatgaattccaataactcagatgatgcccattttgtgtcacctgccaaggacatcccttcacctgttgatccattcggtaagcttccagcactattaattgagattccacgcttccttgaagtaatgccaccatcttttttacgtttttgtcctctttttcctgaagagttattctgtctttgtttctttgaggaaatgtcaaacgtagcatcttggtcattgcttgcatcatatagttcatcagatgactcctctttctctctcctaccagcagtagtaggaacagtccaatagttctttgcactttttagctcttcaatcgttagtaaatgcttccctttcagatccaaccaatataacttgaaaagatactcccagctatttttatcatcaaaatcaacaccaacctaaaagggtgaaataggatgacaaacagatctaggatggaactattacttgctcaaggtatttatatgtcaacgaagtagtactgcttgttccaggcatgtgtttgccaaaagcaaaagcttatgagagtgaccagccaatacagttgtgccatgttcaggatcagtgtctatttagtattttagttaaggcatgagttactaaaaaatcacagtttctagttcgtccaaatgaatgaaatcaaaatattatgacattttgagtttcaaagtgatgccagtttttttattccacttacattatacaacattcctttaatctaaaactattattttgcacagtaaattgaagccaaagcaacccataccaaaaaaaacttaagcttatacactagagaaatcaactaaaaaaggtaccaacagtgtatgaacaatacctcatagcaaattttgaaacattaatgtaaaaaactcagaaaaaagaaaaggcatttgatatgaaaattcaaaatagtgtgtaaaagatgcataataacaagctcttaacacaaaaccatggctcagtagcaatataagaaattcattgtggaaaaaatatcgataagaattcgaatcacagtgtatgccaaattatcccttagactatctccagctgcttactcattctcatccttatattcaaacttcagtctacgaatagtacattctacagtacaaaacagtgttttgcatggtcatatgagtaaactgttggaggcggtcttatcaattatcaagactcatcttccaacattagcacaacttatggactggctgcctcatgccttgcggtgccaatttacgacctcttgatgcaattagcttgttgactgaaagtatctacttaatcatatgctgaactttgaagactcaatcagaatttttaaaagtatagggaaccaaatgaagcttaggctccgtttggatgtcaatattaaagggcaaagaattgaattggattcaataccaaatcagccatggtattgaaatgggatgcaattctaatcacaccatttggatgtagatattggagtcaagaattcggaattggaattagaattcctgaattctgttgtttggttgtctaatgaattcagagtcaaaaatggatctcaattcctcggtattcaactataactaaaagttgtctcaccatttggagcctagaccctctgttacat

SEQ ID NO: 173920 - DNA, 507 bp, Zea Mays
ctaattttgtggcggcttcgaccgtggttgctgaagataattctgatgattccgtgtctaagttttttgagtctggtgattctaggagttcggttgtgtggacggaagagtcctcggatgaggacttggattattttgcggcattggatgtggctacggcggaggcttctccacgtgtgatgggtgctgaagttcttcctggtgcgagtgctaggcgtaggcggcgaatggcggtggcgaaacggagaattagtgaggtgtcacgaagtgataggcgtcattgtggtgaggtggagggtggtcgtcttcgtgtggatgggtctggcaaacgggaattgttgtcctcgccggctggggcgagtgtaggtgagggagagttgcgaagtctgtttgagggcgatgaattgaggataatgttgttcaactatagggagatgggtatcatcctgaaggttgagccgatgtaatgtgtgatgccctcgctgcatttatgtaactataatttgt

SEQ ID NO: 173921 - DNA, 786 bp, Zea Mays
tcgtggttaccggactccacacgggcgagcacataggcattacactaacaaaagtgatatcgacgtctcgcctctctaatacttgagttctctttccttttcaccgacaatatctagaataaaaaagtaatcaaaacatagcctaccatatcatagaaaaatgagcatatactcaaaagaaggtaacctgaaaacaatggttagatggatacacaatgcattgtcacatcatgtcatgttggtttcgctttcgctgtgcagggagggacgaaagtgctaacgtgcccatgtgctggctacctagaggatatgcacgaccacctgtctacctgtgactgcacgagagatagagatgaaatgtcgttgtctagttgtacactgtgacactgggtacctgggcctaagactatgggctactactagaatatgcaaatcaaaattgatgggatagtgctccttgcttgttgttgccttattgttcacttgtgattaggccattaaaactttatagagctagcaaggcctgtatgctgaatatatgtactagtgtttagtacctggggtgaggccctgttgatctagggcctaggttagagtcactactcgaccccgccagggccagcgctaacaccaaagcacaggtctaaggcccgaccatggttgcgatttttctcacatgggctatggtgatgctgtgtatgggtagggtaggggctttctcgacttgtgcccatgttgaaatagtttcctggtggattatgaaacatgggtgttttacaataagaa

SEQ ID NO: 173922 - DNA, 612 bp, Zea Mays
gcaggtgcgctccagtatctgacactaacacgacctgatgtggcatatgatgtgaatcaagcctgcctgtttatgcacttccctcgtgatggtcactggagtctgcttaaacgcatccttcgctacctgcgaggaacactgaagaaagggattcatatctcgacgcttgattccagtcagctcatcgcatactctgatgctgattgggcagggtgtcccgatacccgtcgctcgacgtccagttattgtgtattcatgggcgacacccttctctcttggtcctctaaacgccaacacaccgtttcccgatcgagtgcagaggcggagtatcgtggcgtggccaatgcagcgtacgaatgtggttggcttcagaatcttcttcaggaacttgatgttcgcattgataaggccacaattgtgtactgtgacaacgtctcggcggtctacctatctgaaaacctggtccatcatcgacgaaccaagcatgttgaaatagacattcacttcgtccgggagagagtggctgctggtgacttgcgtgtcatacaggttccaacaactcagcaatatgcagacataatgacgaaggggcttccaacttcgaccttcaca

SEQ ID NO: 173923 - DNA, 750 bp, Zea Mays
tctcctggtcatcccagtcacgacggtggtcaaggaattgcggcggcaccattgctggccaacctccacactgatcggctacacggctagcaccctagatgctaactaaacgttgtggaggacacggagagtagacccaaagtaccttcttcgaagattgtggtaaggatgcagctgtccacggtgagctgagacccgacgttgattttcctctccggtgacagcctacggtcacattcagccgccacagcgctctccgaggttatgcatgaggacggtgcgcttctagggacctctccgaacaccacgtgatccgacgacatccccctgaacccaacgatgttgtcatggcggtcgtggttcaccttctctctctcctcggttcgcacagtctgctcgatggcacagtgatgctcaggtcccaatggcgtaggtatgggatggttgagggggcgatgcgattgggttttacagccagcgacgcaaggatcccgcccgggacatcggccgatcaggaggagtccggtgaattaggtggctctgttgtggttgaagatagatctaacgaggatggcccaccagtagtgactagcatatgtacgcagaccacggcgcgcggcgagcaggcggctggtatgtggggttagggtgtcggcgtgggttagtgaagttgggccgcgtggggcacattgaaagtgggtcgatcaccaggtagtaggcccagccaggcatctatctttgtttttgttt

SEQ ID NO: 173924 - DNA, 503 bp, Zea Mays
cggagataagtaactcccgtctgccctaatgtctagccgatgagaattaaagggtttttaggtcccgcgcgcccgagcccgccctcagttttcctcttctcgtctttggtaagcgccgccgccatcgtgtgttgccctgccccggctccggccgccttccccacaccttgcccctacttcgaccgccgtccccgcgccgtgcagctgccgtgcagctgcaccagcgatgtccgctaccctcatgtcgtgcccctgccccgacaacggcctccaatcccacgtcgtacccctatcccaactcttgctcgtgccccccgcgtcgtgctctggcccctgctcaggctcgcgccaccattgtcgtcggccgaagcgaaatcccaccgtagcggtgaagtcagacccttacggcatattccgcggcattttcgctttcatcattcctcacggcgtccagaggcttgctgcctcaaggttgcgctctttcctgaccccatctcgttggc

SEQ ID NO: 173925 - DNA, 475 bp, Zea Mays
ttgatgtagtgcttcaacgtctacgagagcaccacctttatgccaagttgtcaaaatgtgatttttggctaaaggagatcaaattcttgggtcacactatctctcaggcaggtatagctgttgatcctggtaaagtgcaggaggtgatgaactggaagccaccgacgactgtccgtcagattcggagttttctgggattagctgattattaccgaagattcatttcggatttctctcgaattgtgaagcccataactgagctgttgaagaaagaagccaagtttgtttggggtcagaagtgcgaagatgccttccatgcattgaggcaacatctgaccacagcaccagtgttagcgcaacccgacagcagcaagccatttgatgtgtactatgatgcctctggcactggactaggttgtgtcttgatgcaagacaaccgagtcattgcttatgcatcaagagcactcaggcctca

SEQ ID NO: 173926 - DNA, 599 bp, Zea Mays
gcaggtttgactgaggacggcaaacttttgcatccagaattggtaggcgaagtttcgacaaaaattcaagaatatgcagaaaagagaaagaagggcgaatttaagcctcagagggagaatgacatactaactgtagcactaggcaatcctgaacacactagacggctcggggaatctcttctaaaatttcctggagagaggcgtttctagagtatgcaacatcatataggaaacacgagaagtcgaaaaggacccttgaagagactattgatgaaagggtacaaaaggctattaatgacgtgatgaagaaaatgaagaaaacagaatgcatatcatgtgaactcaagccaggccacatgagtccacctctagtccctagcagcataggatctgtgcaagacttcgtatcgggcaccaagtaccctgtagacgatattgttgaggacaagtcttgctttcttcatattccaatcaatcgatctgggtcaaaaacaaaacaagctgctactggtttggtaaaaccaggacttgttaactaccaagataatcctgtcccgccacactatgttgtggtccaagttctagagatcacagacagt

SEQ ID NO: 173927 - DNA, 316 bp, Zea Mays
tagggggatggcctttcatgaactctgcccgcttgtctctaggcacttgtggcatctggacttgcactgtaggctatggtggtggtagctgctgctgcacctgctgcatcgctgctaaagtctgaccaatttcctgaactgcttgggtctacatcaagaacatctgctcaatggtcatcgggggtggcggtggcaaatgctgttgcggagctgcctcttcctggggtgcctgctgctctggctgagcacgcctcgcacctctgcgcctgttctcagacatctgtagaaaccacacacatatcagatctgactctgc

SEQ ID NO: 173928 - DNA, 421 bp, Zea Mays
gttgatatgggccccaccttctataacaatttacatgaaaatgaaaattgacctttgaattcttcctcaaactctgaatacatccgccttatatatgattcagctgcagtcttcaacaatggaaattttgggtgtaattaaccgagttgttcatacgagacttaaaatcttcatccaactcattttcccgaagagaaccaggaactttctcacattcaacaatgaattccgaaagaccaagtttcatccgaaatctgttcttgaagacactattcattccttcactcctttgagttgttgtcatgtcagctgtaaaagagtcgcgataaacaacaacccatttttctctcaactcatatagatttttcatccatgagtttcctccaagctatattttgtcaacaattcattccacttctta

SEQ ID NO: 173929 - DNA, 916 bp, Zea Mays
tactatattggcaaggcaaatggaggagacgggcaaggtggtggcgcagttgcgtttggagacgatggcgaaggacttggagggcgatggtgctggatcatcaagggagggtgctgatcaaggtgatccaaaccgaagaagaagagaaccacaacaggagagagtaagagaagaagaagatcaggtgatgggagggcgaggacatccatctctaccaaatatttgtttcccagatttcaagggaaggaacctggaatatggttagccaagtgccaagactacttcaccatttatcaggttcctgaagctttgtgggcaatattagcatccatgcacatggaggggaatgcagcgaggtggcttcaagtgtacaagatgaggcagggactgggaaactggatgcagtttggcagagctgttagggccaaatttggagtggaagaatatcccaaggccatgagacatcttctgaacctgtatcagaagaatggagttgaagagtacactcaagagtttgaagaagcaaagtatgccactgctgttcacaacccggggatggatgagatttttttgtcaatcagtttgtgaagggactgaagacagaattacaagggggtgtaatgtgtcatctgccacagtctgtggatagatcagttattttagctcacatgcagcaggagatattagagaagaataggttgaagatgcagaggagtattactgctaataaggctttgggcagtaatctgaagactgacaataagggaggatttattctgggtgatctaacaaaggagaggcaactcaaggagcttagaagagctaatggactttgtttcacttgtggtgaaaagtttgagccaggtcaccaagggaagtgtcccaagagggtggtgcctcagttgcatgccttaac

SEQ ID NO: 173930 - DNA, 650 bp, Zea Mays
gcagggctccagcatcgggggaaaccaccacgccatagctgggtcgcgcccctcctctagccatagtctgcttggggtgtgctggttcgctcggtggggttcggcgatatgcggggaagcttatgggggcgtcaggggagagggaaggaccctgtagccgttggaattgctctctagtgcctctgctccgccgcgggccgtgctgcaccgtggccggtgctctccacgtcgtgataaccggtgagacttatttctttgtgctcgtgatcatcaaggctccgtgtagcaacgttcgaattgaagattcgttcgggttatggattttgggggggtcggccatggcaccaccgcgtaatcactggtggcgcagccgtcctcagatcgataggtaggagacggccatctggccgttcaatttgtgatgggcggcccagatttgtgccagtgaatcgattggaatcggctgttgtgggctgtccgatctgatcagagggataggattaactctcgtttcataaaatctcggctgtggattctgtatccaaggattgcgatggcgtactggttcacctagtgaagatctaatcggtgccatcgattctggatccaacggctcagctgcgaccataccctttcgccgtgacatgttg

SEQ ID NO: 173931 - DNA, 362 bp, Zea Mays
gcagaagaacaagtacggttgatacgggaaaacttgagaaatgcgcagtcaagacagaaaagctatgcagatgcccggagaaggcagttggagtttaaggagggtgatcacgtgtaactgaaggtgtcaccgatccgtggtatgagaaggtttaaagttaaagaaaagttgtcccctcgctttattggacccttcatgatcttaaaacgagtgggggaagttgcctaccaactgtaactacctgaccatcttgcggatgtacatgatgtcttccatgtatcccagttgaagaagtgtctcaaggtacctgaagagcagctacctatggaggatcttagtgttcaagatgatccgacttatac

SEQ ID NO: 173932 - DNA, 500 bp, Zea Mays
gcatgcttataagggatcgggccgagtctcctccttccccacctcttctccgtttgaactcagccgccaattcgccaacgcttgtcggggggaaacgaatccgccgccgcgggaggagcgtggtgtcgtggtcagctcggtgtttaccaccgccctcggtgagttctccttcccatgtatcgctagaatctctagcacgtctaaggtagctcggagttggcttaggtgcgttaggtcgcgtgtccactgccgattgcaatggcgccgccgcggcacgcttggggccgggtcctacgctcgacatcagccgaaattagttgtagcattgagttctgggagtcgtcaattgtgcgtgggaaaagtgaatcggggtttggcgctcgggagcggccgattggcagcctcgccggcgtgctccgccgagcgtgcggggcggcgccgccgtgcgggtgtgctccgttgggggaatccatgcaggccgttggatggtgtgtgggcgg

SEQ ID NO: 173933 - DNA, 790 bp, Zea Mays
tagctgtgggctcgcttcagcaaaagccgccacgagagagttggcagagttccagaagggtgccgactcgcaggctagtccggatgctcccaaggctagttctggtacattcaaatccactaaggacacgaaggatgtcccaatcgacgataccaacccttccaagcacgttcgaatcggggtagcacgctccgacaaacaagaaggcacccttatcgatttactctaggccaaccgtgacgtctttgcttggaagcccatagatatgtcggggatcccgagggaggttgctgaacactccctgaatatctagcctacgatcaggctagtcaccaaacgactttgttgttttgatgaagaaaagcgcttggccataggtgaagaggtagcaagactactggtggcgagattcataagggaaatgcaccacccagtgtggatcacaaatctcgtgcttgtcaagaagaatgtgagttggaggatgtgtgtcgactacatagggctcaataaggcgtaccccaaggatccttttcctctcccacgtattgatcaggtcgtagactcggccgccgggtgcgagctactttccttcctggacacatacttgggctatcaccaaaccgtcatgaaggggaccgaccagcaagccaccacgttcattatcccttcgacacattctgctacgtctccatgtcgttcgatatgaagaacgcaggagctacgtacaaaaggtgcatgcgccactacttcgctgaccaagtcgggcataacttggaggtctacatggacg

SEQ ID NO: 173934 - DNA, 382 bp, Zea Mays
acatgtgttgacattagaaattaagagaaaatgatgctccaagttcggctgacaggctgtctgaatgggatttgccatggtacagtactgaagatgatcagaacgccagcgcgacagtctctcaccgccgacggctctctccgccgtgttttgtgtcgtcggcgtcgagattagtgcctgggtgttggatagcgctgcggggtcgcgaaaatatcgtcgccttggataactccgggcagtaaacaattccggtcgccgtaccgcacttaccacggcgggtgtggatatgctcgccggcgacagccgcctcccggccttgcgccgcgtggctcagcccctccaccgcatcgccgtgaacccttgtgcctcttcgtggctcgtc

SEQ ID NO: 173935 - DNA, 656 bp, Zea Mays
gtttgatctatttacatcactcatatcttgtgatcagcactaggaagggaacttctagttggatggttatttaactttacaacaactaggattcagattgcatccttgtttattattcctcaccaagctccacatataagcgatcgtaatcggtactctggtcttgtattcgcttaaccaccactttcttgttaccaccacacattttcttgcaacccgcagggacctcataagagctttggttggtgagagtggtgaggttgtgagattctatatagcttcatattccacctatatttgttgccttgtcgccactaatttcgcaggaagatggatcccaacgctgagattgaagaatgtgtcaccatgatacaattcaatgagctcaaacaaaacatagaagacaagcaagatcggttggcacaagatcttcagacacttatggctgaaatcagaggttgtcgtcgactccctgatggtgcaagaaaccaagatgaagatggcgaagaaggtgaaggaaattattctagaagagcaagtgaacatgggaggaggaaccaaggtgctgcatgtggtagaggaagagggcggaatcgaaggaatgatgacaatggagaatatgaatttgggaatgatgatgagcagtcccaacatcg

SEQ ID NO: 173936 - DNA, 870 bp, Zea Mays
cgccggctaggttgttaagatcttcacggggttgttgggattggtttcccaactcctacgtctatataagcatcgaccgacccccgtgctccatggtctaccaccatgaggtgagagagcagcaaagagaaggagatctgtcgtggttgagtcacgtgtacaccatcgaaggagtcttgcttttgggtttgggaacattcccgagcttcgtggagaccataccatgggcatctaaattcggggtgtgaccaattcgcggtgaattgctcctcgtagcctgggaaccgccaatcaccgtggctgaccctctttccatccccaccatcgataagaacccctctgttgagttcgccattgtctcctttgcatgtagcaccttacgattgggagaatagtgcctcagttgatgatccacgcaattccgatgttcgccgccgggaagtcgggaggcaccgcccacacctgtcgtgtggagaatatgggaggaagcgttgatttttcggtggacggctcagattgaatgtgtgttccccttcgcaggtttgatctgagcggttggatccgatctgatggccctggtgggatcacgactatttaaaatatgggtcgtagatctcagaacgtacggttctgattagatcatgtgtaacgtttcggccaggatctatgttgatcgtagatttttgatcgggtggttgtaagctcatgttgctcaagatccattttggaaggtaggatcgggatccattgacccagactgcgtaccgattcataaccacgccgctctaatctgggccactaatatctgatcggttggctcacaacaaaagttaccctttcggtctagtaaaattgttaaagcaaccccct

SEQ ID NO: 173937 - DNA, 2381 bp, Zea Mays
attctgaagctaaattggtggtcttcatgggaataaagtgcgcagacttagtcaagcgatccactaccacccaaatagcatccctgccccgaggagaatgaggtaagcccaccacaaaatccatggtgatatgctcccacttccaatccggaatttccaatggcttcagcaaacctgcaggcctcttatgctcggccttcgcgcgctgacatacttcacaggtggccacgtacttagaaacgtcaaccttccacttccaccagaagtttttcttcagatctcggtacattttggtttcgccagggtgaacggtgtaaggcgttttatgagcttctctcaagatatccatcttcacctctgatttctgaggcacacaaaggcgacccctgaaacgaaccaaatcattctcatcaatggagaactcccgaggtttaccatcgccaaccctctttcgagcttcctgtaataaacgatcctgctgctgagccacacacactctctccatgagggaagattgaatgagcatacgtgtctcctcactagcggtgccgacatagcacaaagcgatccccaaatggtctagatcagcaatcaactacaaggccacttttggaaccccggacctgctaagggcatcagccaccacatttgccttccccgggtgataatgaatagacaaatcataatctttaatcgattcgagccaccaacgctgcctcaaattcagatccttctgagtgaaaatatacttgagacttttatgatcggtgtaaatgtcacaagcctcgccataaagataatgcctccacgactttagagcaaaaaccactatggccaattcgagatcatgagttggataattcccctcatgcttcctcaactgccttgagccataagcaatcactctgccttcctgcatcaacacacagccaagacgaattcgtgaagcattcgcataaactgtgaaacgcttaccgctctcaagcaaagctaggataggggcgtccaccaacttgctcttcaatgtctgataactgacctcacaatcgccggaccaaacaaagagaacacccttctccaagagtctagtcaaaggcttagcaatgctggaaaaatttggtacgacgcgcagataatatccagcgagccccaagaaacttcgaatttcagagacactatagggtctcttccactccaccacaaccgcaacattcttgggatcaactgcaatgccctgttgattaatcacatgccccaggaaagccacttcggacagccaaaaggcacacttcttcaacttgccatagaactgattcttccttaaggcacccagaacgagatagagatgatgctcatgctcagcctcggtctttgaataaattagaatatcatctaggaacacgaccacaaagtcgtccaagaactcatgcaacatcctattcattgcttccataaaagcagcaagggcattagttaagccaaaatacatgactacgaactcataatgcccatacctggtgcaaaaagcggtcttctcaatatcctcctcacgaatcctcaattgatgataaccagagttcaaatcaattttggagaagacctgggcacccctcaactgttcaaagagaacctcaatacggggtagcggatatttattcttgattgtcacttgattcaaagcgtgataatccacacatagcctcttgcttttatccttcttctcaacaaacaatactggggaagcccatggagacctgctaggcctaatgaaacccttagccagcagatcatctaattgccgcttcgattcaacctgctcctttggggccatccgatacggggccttatgaataggctgcgtacccagaatcagcttgatctcaaaagctgcatcgcgctccggaggaatgcctagaagctctgccgaaaacacgtcagcaaagtcacacaccacacggatgtcctgtacccgcaaggcagcctcaccttccaccaccatggagaaaaagattcccgacttccttgaccggcgatctagaagaaattgcgccaacaaggataacgtgtactttggggaacttcccaagaataccacctccctacctgacgacgcctgcaataacactgttttccaaaaacaggatataactgcgcgatactgagataaccaatccatacctaagataacatcgaatgcccccaaggaaatcacaacaagattggccaaaaagacctcatcagcaagaataacggaacacccctgacaagctgaacagctactaatggagccattagcagaactaaccaaaattgggtgacccaacctctgcaccgaaagaccagcccgcgacacaaaattctccaaaacaaacgaatagcta

SEQ ID NO: 173938 - DNA, 599 bp, Zea Mays
cgggagggaactaaacacttaatagcgaggcgcaatacaacacttataaataatcactagattcgatatagcactaagtataacaattacacttttctagattaaccatatctaactcaagcaagaaactatagccaggcataggttctattaactttctaacccaatattataatctaacctaaataacacgccaactaattagagcatcacccaatttaattacacaggtctagtagaatttcctaattacccgttcgaaacattagacatgcttaaaatgtcatttgctaagaccaggcattaacatcaccatatcaacaaaattcaccaaagcaatatggatattacttatcaataaaacactaaaaatactaaccaggcatcaaccaccatacaagtctacgaattaacatttcaaactatttacagcaccaaagctacaatatgcagttaacaagcacatccgtcacatatgcgttatatataaaaagatttatcataacacaatacctattcaatccattcattaaactaactagtagaaatagtgagtcaaagcattattaccaagtcgaatagaaatccccgaacccgac

SEQ ID NO: 173939 - DNA, 473 bp, Zea Mays
tgattttggcctaccagactttgtaaaaccaatatgtcattgagttgcttggcacattgctactgaggaaaaagaccaggtcaaccacttagcctagctttagctccaccaatgcttacacaatttttttgtaactaaaaatataattatacaaggttcgccacaccatcatcaagtgccacgatatgaacagaaaaataatatacaatggataaaagcaccaaacgttatggtcaaatgaacttaagcaaaagcaggcataagtgtttggatgcaaagagaaggattagagaaatggtatatcctatttttctgatattccgatactctcgaaaaggttgaatatccaaacttcccacttgcttttactatttcgtgattattgcaaattaaggctgccaaacttaaagaacttctgatctcacatgtatccattagaatccacagaaactacagtggaaatcattgttagt

SEQ ID NO: 173940 - DNA, 492 bp, Zea Mays
ccatgccaaatgactgctaaattgtcgctaaaggaggatatggtagcttcgtagctcatcaaaaactgcttcgggtcagacagacaaaatacaaaggcagtgtaggaggtctgtataatggtggctagggcgtagcttgcagttttggtgtgagtggagacgcttcgtcgtataggaaactttggaaggtgtatgcctctggaggtggatcattgaagttgtgttcttcgtgacgaaggtctttgtgattgtactaattttcgtatgaatcaatgttgcgcatttcttcaactagttcatcaatctttttttgtagctcgaagagacgaagcgtcttttccttgcgcttctctactcgctaatggattatatcgaggttgtcgatctcgcgatcgagtttgtcatcctgggggtcgaggctgatagctttcctcttatgcagcctgacctcccgaaggagagctttgtctcctttgttggtgtccagggtcg

SEQ ID NO: 173941 - DNA, 524 bp, Zea Mays
aaaacccttctttgattcaacactaggtatgcaatgcttctcaacaaaagccttgctcatgaaagtatgtgatgcaccagaatcaaaaagaatgacggcgggatgattggcaacgaaaacttacccatcatcacaggctctccttctggggtggtagccacttgagtatagtagactcgtctagttttactttcacctttgcctgcctgagtgtttgtcacatttcccttgccttgcgatgtgcttccagaagccttttgaaagttggatttattttgcttcggatagggacaatccttgatgaaatgtccagacttcccacagttgaagcagctgttagatgaactaggtagggctaggaaatgagtactatgagcacttggctgaatatttttagcacgagcagtagtgggacagatgaaaactagtttgttgaaaggataggcgggtggacaaggaaaagagcgatttgggttaaagggacgaataaccaaccttgaccgcttctcggatccttgagagga

SEQ ID NO: 173942 - DNA, 901 bp, Zea Mays
tagatgtccaaacagtgcgggccgcccgtttggcccgtggcacggcacgaatttagcccggtccaaacacggcccggcacggtcggttacgggcccgggccggcacggcccgtttagcgggccgggtatgggcacatacggcggcccgcgtgctttggcccggcccggcccgataaatgggtcggcccgataaatgggtcggcccgacggcggcccgcatatttttgtaaatactaaatatgtaaatacatttaattctctcatagtatgtaaatactaagggttaattatgtatgtgtcattataattttgtatgttttgatttgtgccactaaacttcttaagcttgtaaatatgccattaaacttttaatcaactctaaaatatgccattttgcttgaatctggcgtacccaccagcacatgtatttctgtattcccttttttacccttgtttgttcatatggttcagcacttcagctaggcgaggtcgcaactccggcgaaggtgacctccagtaactggctactgctgctgctagcctgctaggttacgggagggcacaggctttaagagacgaacagtgaactcacggtgggttcgtagcagcactgctcaagtggccatttcttttgaacaagggtaaaaaaagaaatacaaaaatacatgcactggtaggtgggtctgattccatcaaaacagtataaaatggtctatttcagagttgattagaagtttaatgacatatttgcaagcttaaaaagtttagtgacacatatcaaaacaagaaaaattgtaatagcatagacataattaacccaaatactaaatacgcggccaaacatatataaaatgcatacataaatattttgttgtcttaatatatataaataatatgttat

SEQ ID NO: 173943 - DNA, 365 bp, Zea Mays
cgaagaaagctagggcctctttagaaaaagggcacgacgaaggggtatgagtcaatcccggccgccggatcaaaggtggatggcacggactcctgaaccggtacacgatacaacacgttggaatggagatcaatggcgtggattttaaacattagagatctgcttctgcgcaaaacgcttccctccatctaatctaagccaatcatctctagatcaacgatactggtttctctccctctcctgtcactcttgctcgtagaggcaaaggttccacacggcggcgccattgcctggggtcatccccatgaggccccctacatccaaactcgacacccatggtgctataggaagagtgcgacccgacg

SEQ ID NO: 173944 - DNA, 1663 bp, Zea Mays
agtaactcaaacgcctgttggtgttccacagtccaaataaacagcacattcttcttcaacagatcagtcagaggacgagatatcatgccaaaatgccgcacaaacttacgataaaaaccagcaaggcccagaaaactgcgtagctccttgctgtttgccggtgtaggccattgttgcacgacagttatcttgtcgggatctgtggaaacaccttgggcactaattatatggccgagataggcaatgctggtttgagcgaattcacacttggataacttcaccttccactggtccttccgaagcaaatgtaataccgaggacaaatgagtcaagtgagagtcaaaagtggggctgtatattaaaatgtcatcaaagaatatcaatgcacatttccgtaagactggtgctaaggtagtattcatggcctccagaaaggtgttgggtgcgccagttagtccgaaagccatcacgcgaaactcaaattgacccaaatgagtttgaaaagctgttttcggttcttcgcctggtcgcagacggatttgatgataaccagccttcaagtcaagtttgctgaaccacttagcttgagtgagttcatcgatcagctgatcaaataccggcactggatatttgcctttcactgtgatagcattgagataacgatagtcgatacaaaacctccatgtccgatcctttttcttcaccaataaaactggggatgagaacgagctttgacttttctgaattacgccttggtccagcatttgctgcacctgcgtctcaatctcgtccttgagcgccggtggataacgatacggacgcactgcgaaaggattagcgcctggcaacagtggaatggcatgatcacactgtcgggtaggaggcaagccgactggatcatcaaaaacttcggtgaactgtgatagcactgcttgcaccttgtcgtcagcaggggcttgctggtgctcgcaggttggtgattgagagtccgagaacagccgcagttcaatcactgctcccactggtaacgtcgacatcattccctggagacagacataggttccctgatacggaatagtaatccacttgtgataccaatcaatatgcatgggactataattctgaagccagtccatgcccaccaccaaatccaccgaaggcagaggtaaaaagatgaaatcggacaagaactggtaagcagccatagaccaagttgtccgaggaagatgttgagaacaagtgacgatttgtccattagccactcggacagccattaggcgttgcaattgctgcgtgcccgtcaacaacgacagaaatctgttgctgataaatgaatgtgtcgacccggaatcaataagtatcatcaaaggatgctgctgaatactgccctgaaaacgtaacgtggaaactgcatctgtgcctgtccacgcttcatcagaaagtgtcatcaacaactgaggctgagtttcttgcaccggctcactgtcatctggttcatccaacaaatcccacacctcttcaatcacttgcagctgcacagtagttgggcatttgtgtcccctgaaccacttttccgcacagcgatcacacagaccccgagcacgacgatagcttttcaatgaagcaacacgatcggtagaagtacccagccgacggccttccg

SEQ ID NO: 173945 - DNA, 377 bp, Zea Mays
gcggtggcaatatactatgcctcgtaggtggagagtgccaccaccttctgcttctgggattaccatgaaattgcgcacaatctgaggaagaagatgatgctcgtcgtgctgcgccgcccgtcgacatctcctgccatctcgctgtcgctgtaccctgtcagctccagtcgtccgcctcctctcttcggatacacaagcccatgctcgatcgtccctgcaatatagcggagaaggcgcttgatcgcggcgaggtggtcctcctgcggatcctccatgaaccggctcagatagccgatggcatagccgatgttcgaccgcgtgtgcgctagatagagcaaaccgtcaacgatgctgcggtagctcgtcgcgttcaccct

SEQ ID NO: 173946 - DNA, 930 bp, Zea Mays
gcagtaatggttgataaagctgattcagtgttgggtttgattaactgaagaagatcctgtccctgctgatctcacttgtgtgtgcaaagggaattatggacgaggtacacagtgaaggatctagattctcctcagctctactcaaaagaaaatcaactgtggactgttttggggaagataagctgggaggctttgtctgttggtcctgcgatgggatgagctagacagcagcaaatttagtggcctcacgctgtaagaaatatcaaccttggactatagtgtataccctccgtggaggccttatctgctccctcccctatctgttttgctgagcaaagagagtggatattttggctgctagaagtgaccaagttcatcagtgtcccagctatatggtgtgctggtgcagatctgggtgcatgagagccacgttgattaactcaagcagtgctggcacactgaaaacactccttcactgcatgtttgccaagttcagggaacacctacctcatttcagctgtttataagggcaggatccagtggagctttcctccctgccgtgagctctgctcacagacacctgcaaagagtgtggagtcccatgttagaactggtgtaaccctctcctatgccacacagttgagctgctccagagcttagtgtcatttttcctatgccgtggtgaccatacccacccagttgccacttcaccatggccaggtaatttcaaaggattcctcaaatgtgttgtacatgttccgtgctcttcattgattagtgaagctcaccgtgtctgctgcttcaactctactgtggtgcactgcccggaatggggttgcgccgccgtagactggagccgtggacagctccaccgtcgcccgaccaacttgaatcgtccccggccaatctcacgtgcacactgtgaccaag

SEQ ID NO: 173947 - DNA, 487 bp, Zea Mays
gctcatcttcgtcccttcaacgtttagcagcggtataattagagtttggggcgctagataccttgggcttcgtgcgccggcggaacaccgccgctcggcgtgggtggcgccgcctgaatccggtgaccgatggggatgatggggtggcgccgttggatctctgatggagggatgagattagaattccaggtaccgtttcgatgcattaaagcgtggccatcggatcggtatcgggcggcttagatcgaatctgtggctcggtttagatagggctatgctcgtccgttggattcaaatcatgcgcacccgagtggtttagggctcataaaaaccctgatggtcagattttgatccgacggccgagatccaagcgtaccccttcgcgggtacgttttgtaaaagaaaccctgggtttaaaggatatcaacccgcagtcctgcgctgtggcgctctgagtcattgtatatttcgcgtataagtccctgcg

SEQ ID NO: 173948 - DNA, 387 bp, Zea Mays
gtcagatgctgcctcaaggtgcaaaaagcatcttcgcacttctgatcctaatcaaacttggctcccttcttcaacaattcagtcatgggcttcgcaattcgagagaagtctagaatgaaccttcgataataactggccaatcccagaaaacatcgaatctgacggacagttgttggcggcttccagttcattacctcctgcactttatctagatccacagctatgccagcttgagagacagtgtgacccaagaatttgatttctttcagccaaaaatcacatttagagagtttggcataaagacggtgttatcgtagacgttggagcactacatgcaaatgaccagcatgctcttcttcattctttgagtacaccaatatatcgtcg

SEQ ID NO: 173949 - DNA, 541 bp, Zea Mays
ggaaccttttagtcacagacttagtcatcaatatggtagaccattctgttacatctatgttgtacgaccattgtaagtttgttatttgaaaagacctagcttatggacattgtaaaggtttggaacatgtttcaataactatcccatttaaacaatgtctacctatgtggttctgtctgtctctgttctgcctcgacgggtgggacctagatactcgttgcacgtccctctatcggcctccacttcttccccatcctcgctctgatccactaggtgcctccccccgccattgtcatgcatcctccctcgcgcctcccctcgcagtcgttgtgcgtcctccctcgcacctccctccaccgctgttgtgtcctcccctcgcctccgcgttgtgcgtcctccctcgcacctccccccaccgctgttgtgtgtcctcccctcgcctccgcgatgtggcgtcctccctcgcacctcccccatcgctgttgtgtgtcctcccctcacctccgcgatgtggcatcctccttgccacccctgtctcgtg

SEQ ID NO: 173950 - DNA, 533 bp, Zea Mays
gtcgccgtgttttcggttcgtcaaccacatctttggtttgtcatcaatccacgaaaaactgagagctccggtgcgggctgtctaccccggtgaaccctccattgtccatatcctttttcacaatatagcgcttctccttcctccattccgtagcccatgctcgcatcgcccttgcctccaccaaccaccgagttccgcaacccttggtcgtgccccccaagacggcgcccttgttgtgcatgagtgcacagggctgttgtgcatcccctatcaaccctcccctacgcaggcccatgctcacgctgcccttccctcccccgggtcccgcagcccctagccatgccccctcccctggccgacgagtaggttgcgcgtgtgtgcacatggctattgtgtagcccctcccgaccctcccctgcgtgagcgcccatggtgcggttccatgtttaatcatacacatctttcgaaagttgtattgtttcaaccgtatcaacgttttcagcgattctttttctctcgtgaccataacaatg

SEQ ID NO: 173951 - DNA, 762 bp, Zea Mays
gagtgcctgtggtgattggcagcttcgaaaatattgtcgtcttcggctgctctggtactttttccgttactggctctggctcactggccaggtctgcagtaacttcagtaggcacaacaggaatagcctctgtggctgggaggttgtttccaccttttcactcagcttcggcacatcggccgtctcaatgcgcctgggtcggcgcgtcaaaactttaaccttcttcaacctcgagacactagaagaagcggaggtagaggctttcctttttctcccttgctttcacgtggtataacagtagtctggatacacaaacccgataacatcgaacaccctgttcaatctcttcttgtcgcgagcactgaagccagttgtcatagcttcatctttggcctttgaatacactccaagcagctccgctagttgcctctatagcatctagccagtcatcgttcggttcatcaaattggcttctgtatcgaaaggtatacttcagatagaccaagccattttgactggagacagcggcagcctcctttggcatttcccatccattcgcaaggggtcacactctgtaagcaatatgctcttggaccaaatctcttgcgccgatataagtgcacacactgtgttgaaagatgcctagcatgcttgcacgtcattcccaagtgcaaccacctcctgatgccgaagtgtgaccatatagggtgctgaataatccctttcatatcctccctctaactcaggtcaatcttcacatta

SEQ ID NO: 173952 - DNA, 726 bp, Zea Mays
aatcaaacaattaaacttgactatatacatacaaagcaaatgcttgtgcatccgcttaataaaaggcttccaccctgcaagttcagaaagcacgtagccgatatgtgtctaatgaagcgactatacttctgaattaatgggtcataaaatacaacaatctcccttaagactaggttctctgttttgagatagaaatgtatattatagtcattgaggccaatagcttataacatgctactataacacctcggtcttggtacatcaatttattgaaaaatggaaattataagttaagaagtaaagcaaagtaagttctaaacataaacagaacaaagggggataatgttggttcaatcaagaaactagaccgaatgcaagaactgtgcccgggttgagggcgtagcaacctctctagttgcgggcctctttcactcgacatacataaataggaagaggaccaataccacgtttgccagtagcatcctcgcccgtacactcctagagaaaaccgatctagtctcctacacgactagtgaggagaaagaccgtcgccgccactcatcctcatcgtctcaagccaagcaacacccttctaatagtctctgtcaaacgtcgaaggtaaagctcgtttctacacctctaacctaaattcggtgattacttcctcatcctttgacatggtggtaaatctatctttcgcgacatcaattgcttattgtattttga

SEQ ID NO: 173953 - DNA, 329 bp, Zea Mays
tgttgttgttgttgcttcttgttttccttttcctttaccaccaaattcttcttttagttctgcaatgagataaaacactgtctagttaatatgtgttgatatgcaatgaaccattgaataataatgaaaaaataaggaatgctagacctttttctagcatggttaattcttcaaggttttcttcaatatcaataggtattgaccacctcaaccaatcttgtgcacatactagagcttcaagcatgaatggagtaagggaactacggaagtcatctaaaatgcccccacttgtgctaaatgctgactctgatgctacagttgatattggt

SEQ ID NO: 173954 - DNA, 388 bp, Zea Mays
cagggattttatcccagcgggaacgggaaaaaaggtcccccataaacatttgtgggaatcctcatgggagaatttttttgtcgcggggacagagatggggagctattcccaatgcggaattcccgttgccatccctagggacgacatgtttaaggtcaactcctagtgcaacaaccagtggaagtgaagcattacactgtaattaggttccttaaaatttcagttgttttcctttcaccccctcacttcacgcgctcccaaaagctccagggcacgacgcgtgcgcgtctcggacccgagcgtctaattcaattgagcttgttgtcgacccctctctagctctctctctctcgcccctatgccctcccgcacccgcaccacgctgctg

SEQ ID NO: 173955 - DNA, 688 bp, Zea Mays
cgggggtcggggcaagaaaaggctgaacagggttttcgatgcaattggttttatataccctgattattgctatccctcgcgaaagtagggaaaaaagagaaaactgccacttcggccatctctgttgtgccgaagggcaagaaaatcaaggttttgacccaccggccaagatatattgaaacagccatagtgccaaaatttggtgaagagacatcttccgctgccgaagcggaacaagatgctctcgctgctcggagtgctgaggaatcgactatagtgccaaaggtgcctatagttgagccagtcgaagccgaagatggggcggccaaaaagccagagttgagaaaacaatagtgctgctagaaattctgagcccaccggtagaaatagaattgccgaaggttgcaaaagctcccgccacaactcccaagaggagaagaatggctagcgtactagacgctgtcatggagacaagagcattgactcctgctcctgtaaaaaaggttgccgaagctgctacggctcatactgaaaccgaagctgggccttcaatgcttgctaatacgaagcatgccataactgaggaaagagctgagcaagaatctccggacattggcatagctatggagaaggaagtgaccgaagaaactaaatctcctgctcccgaagcaccacccgaagatcttga

SEQ ID NO: 173956 - DNA, 694 bp, Zea Mays
ctttgcgcatatgatttgtcgtcagtcccctgcccgtccgtccgcacggcgcttaaatcttcacccgcaggccaacgcttctgccccccaaaccttctcctcgtcgatagttgagtagagcgctgcgcagctcgatcttggttggttgttgggaagggtcgccgccccatgcctccaactcctcgatctcccccggatgtgcttcgcttcagctagctaagtcccttcttcctttgagattttgctacgaacaaccacctcgatctgctctcgtgctcatccgccaagctccgtggtgccatactgccatgtcgctcacggaggtcagcctccacttctgctacctccactccctctccatcgtgctcctatacttcctctacgtgatctcctgatcgcctcggccgcctcccgccaagctccgatcgaacaaggctttggtttgattcgatcagagccgaagcactagtattaattactcgatgcttgctcctcttcgttcttccatgatcttgtcgtcccgttcttctcccggccctctcctgctttgctgctaagtctcatacgtgcctctcctagcgcgtactcccacacccgatcgatcattcgactaggagcagtgcgcggcagtgttcgaggaagcaggtaagtgtttcccttctcaggtagtgggatggttccactggctggcgcc

SEQ ID NO: 173957 - DNA, 494 bp, Zea Mays
acgaagatgtgttgcgacgttgttgttgtcattgcacatgaagcgccagcacaccgttatagagtttcgtaaatttgcaagtaaatgtaaatagacaaggatatgtgatagtgctccttgatggcttaaagtgttcttacccagtcccttggggtcttggtatatatgttttgtctccgggaccatattgttaacggtacgagcttcggagccctccctactgtcctgttagtgcatatcttgcactgggagcttagttgtaccagctaggacttggtcatagggaggtggccctatgatgaaagaggtgaggagcgaccatgcgctcatcacagggttgcttgaagcatttgaggccgaaggctgatgtagcctaggttcctagagctgagggtggatatgttgtggaacataaggtgaacagtacgaagatgtactaaacacctccttcagctgagaggactgagcagttgtcgtagcgatatacttttgct

SEQ ID NO: 173958 - DNA, 912 bp, Zea Mays
ccacatagtgcttttgagaggatgacgaagtcgatcgcaactcgatgtttcgtgcaaagcacgacgggacacatcggattgtacatgtttgggcagctcaattgcgtaacaccctatgtcccgtgttctctgggaggtgtattgctcgatgatggatgattacaagaggtttttggaggtggaagatgactatggtatgagggtctaccattttcatacgggtttcctctcgtccttatatccgattgaagagggatcaccccacacaatctcgaagcacgatcctatctaccaacttccgttagaagagcaccacgtcctctgaatgttagttggtatttgtgaggcctacacgtatgctgcatgcgtgggacatgatcttgggaaccttcgctcccatccatgagtctcttttagtcgtctttagttgcaccctactgatgcccgttgggcgcctttcgggcgacccattgggggccttgtaggtgcctcatgaatgaaagcaatgccatggttacctgatggatatctatcccacacaagcccttgaggctcaagccaaattttgagtataattggctcgagactctcaaaagtgaatcctggtgttgacgacttatttcgaccaagttggttgattgcatttcttgagtgcaattttccttccaaaattctaatccattgggtgcattgtaggtgcccccaatggtttagccctcgagctttgagacaacttgagtagctatcgacttagaggtcccataaattcttgcttcaatggatcgtcctatttgtcttgtattgggttgattgacaatctggtcgactgaaatccgatcgattgaattctgctcaaattaggtctgcccgactgaagtccagttgcctgatatatgtccggctgagtcctgg

SEQ ID NO: 173959 - DNA, 1000 bp, Zea Mays
aacatttgcagtatctgttgtttttcttggggaagtctggacccttcacctagcgagatggtcgatctcggcgatgaaggcagcccctcccggacctagtgcaccacaccctcctcctgcacctctctgaaatcgagctctgtgtcgtagtccagtttctagagctggggtttcgagccagggagggcctcccaagcccgtcgctggatctgggctcctccgggggcagacgtagtaggcaacgacgagcggcaaggtgggggaggcgacgccgaggtgctggagcacgcggcggcgacgctcgtcgacgaaggtgcgctcggagatccacacgtcgtacgtggggggcagcgagtggtgccgatggaggtggtggcggcgcttgctgctgcggcggtggtgctcggcgtctcatcgaaggagaaggagcaggcggaggagagaatagatggattggggctgcggtaggaggaggaagggagggaagcagaggcggggtttgcggggaggttgcgggagggcgccgtgtgacgatgggtgaggcgaagcgaggtgacgaccgagccatacgagagagagggagaggaggtggccggtttctctagaagcattgcgtggctgcacaggctgccggtagaaaaaggtgatagagccgcgtcgccgattcacgatcgagcggcttgaaatttttctgccgacgtggatactcccagcatcgccgttttgcaccggctttaaagaatagtctagaagcattgcgtggctgcacaggctgccggtagaaaaaggtgatagagccgcatcgccgattcacgatcgagcggcttgaaatttttctgccgacgtggatactcccagcatcgccgttttgcaccggctttaaagaatagaaatatgagaacattttggtgacgagctctagaaggcgactgaggcctaagcttgtgtagaagcgcccaaagggcccacgacaagctgactgaagcaacaaataggaatg

SEQ ID NO: 173960 - DNA, 510 bp, Zea Mays
caacaacgagagacaaagacaaattgtaacgcgatggaatgcatgggcgacctaatttcattatgtggcttcgggaccgtgtaagtctcaattatgtggctctgagacctaattttagttaactaatattacagaatttgctaatgctttgtagcataattgatagtttggggaggaaatgaatttgaatgatgacttacgtcagttatctattggacgcgtaaatgccaaaagctatggacattacaacgtcaatggatatcgctttcgatcaagcattttcgaatctagtcatcctatggccgccactcaaatagtggagtcgttaccagggcaaccgatatggaaggacatgaagcctgctattacgggaaaatcaaaaatataatcgagattacctttgttggaaataagcctttagcgctagttttctttgagtgtaaatggtattataggaccgaatttgggatgacacagatccaacctgaaaaattgcttcaaggacacgac

SEQ ID NO: 173961 - DNA, 409 bp, Zea Mays
gttgttcaaattgattgatgcagttgcaattcaattcatagcggctgttcaaattgattgatgcagttgcaattcaattcatagcgacaatacaggtgcagcatagagacaaaacaggtgtagaaacaagacaacataggactctgacccatctccgtcatctcagcccaagagagttcaccggcccaagagaggcgttcggctgacaattgtacgactctgttaagccttcagagttccatccgccgaccctcctcactcgtgtcctgttcttctttccgttctcacgctacctcaccgcccaatgtgtaacagcactaatcacacatggaaagcatcacaggagacaggagtttcaaaactgactttttagaggcccaatgcgaaatcggatatagaggcctcatcc

SEQ ID NO: 173962 - DNA, 634 bp, Zea Mays
tttgggtggtggtgacggaagcttctctctcctttcctggcacgtcgctggcggcttcgaccgtgccgagtacctggtgggcgcgagccaggcgtttggggtagggccacatgggcaggcttatatgagcagggagtcctggcggccagtgcggatttccgttgaaccggactttgctggtagcagagaaaccggccggatctcaacgaaccccgcgatttctccggctgaggtgctcacacgaggaagaagatcccggtcggggcggctgggagatccatgcttagcgcgcgagtctgttacagccgtggagtagaagattctgttgaatccagacccataagcagcgacccaagaggcttaaagcaggttcgtgaggacttctgggggcttgcatgctgacctcattatgatgatagggtgacgcaggctccggcaaggagaataaagaattgataaaaattacatgtgatcgtggactgctacgtggagtgggctgcgcggtaaatggagggctgggccgactacagtggcttggtaagtttttttctatataaattctctatttcagattttaaatcaattccaagtgtttttttatttaagtttcaatcaaaattccacacaatatgcg

SEQ ID NO: 173963 - DNA, 690 bp, Zea Mays
ctatgaacaacataaagatggggcgtattcttggccttcggcttcggcttcttgacattgttaggtaatgaactctgttgatttagttttataatgacttgatctcttgcttgaagctgttgttaattctctaaggaataaaacacccctgcatctgcattgcattactctatagccatttcctttgcccttcgtatcaaaggcctcttgacactcccactcatgtattgaggatggcgtcagtaattgcttccaagagcactgtatcatcttgcccaaagttccagttccagcttcagcaccaggtatctgtttattgatatgagcctttatattacatgtcgtctctcaatgatcaacatcgcctcgttagttttatcaaccatcttgagtgccatctagcggactgtaacaaatgcggttgaaaacactatggatgctgcttcaggcagctccctgtctttccatacgctcttttcgtccctcggctcgcgctatacggttgcttcctgtcgacacaaggcttcttggattccatcagcatcccttcaattatgacttcaacctacttctcaccttgaagtacgattgctctctgtgtgcaggggatcaagactggggagttctctcgtgatgcttcctagaacacctcgacaccctctctggatcgcatgataaaatagttaccat

SEQ ID NO: 173964 - DNA, 856 bp, Zea Mays
tattttctatttctcattcttattttctatttctatttctttttatctccttttcttttgaacaacaatttgctaaataatcttaggtgttaaaaataatctatgtgaggtgcttctaacaatcaaagtgtatgcatatggtgagatggcctaaggggtggagtttaggagagataaaaataagggggggttaggagattagggttccaaaccttgggttgaaattttgggatgttacaaacctaccccacttaaaggaatctcgccctcgagattagactggatttgagaaaaggtaagggtattctctcctcaaagagtcctcactctcccaggtagcttcctcttctccttctctgctccactgaactttacagagtctcacttctgagttgcgggtcttccggactgctgagtcaagaatctttattggcttctcatggtactgaagatctttctgaatctgtattgcctcttcttcgatgtgactttctggtacttgcaggcatttgcggagatgggacacgtgaaacacattgtggatatcagacatggattttggtaattcaagacggtacgctgcgggtcccactctgccaatgatgggatagaggccgacgaatcgcggtgctagctttcctttcacttggaaccttctgacaccatgcatcggggagaccttgaggtagacgaagtctccttcctcaaatctgagttctctccacctgttgtctgcataactcttctaccgactctgagcttcaagtaatcttctgcggatcagggcaactttctcctcagcctccttaacaaaggcaggcccttccagtgccatttcccctacgttggaccacat

SEQ ID NO: 173965 - DNA, 353 bp, Zea Mays
tagatgttcagattgcatcaccactcttacgagttgagaccgagaaagcactcagccatccaaatggtgcgatccgctgccatcctcattcgcatgtccttccaggctcccaaaatgcgaacatagcctggggcctattagcgtcaggccgtcagcttggttggaggtggagcactataccgcgctgaccatctccaccgtaggcctgtagataattggcagtgttaagacttcgggctttggagcatgcacggtcccgttaccagaatatgagcgatctatcaaagcatagaaccttctcaagaaaaaagtatcaaagcataggaagtcttaagaaaaagaaacaaatttgc

SEQ ID NO: 173966 - DNA, 1014 bp, Zea Mays
ggctaacgcagactcacttcgaatggtgaatcacgtgactcgaggggagtttatactggttcaggcaagtgccctacatccactgtagtgctaatcttagtattgctcttggtggcgttataaagggtgctagtgagagtgagagggtcagggtgagggagaggagaattacgacagaatgctcctagctctcttgcctgccctggtagctgtttaagctgccccatttatagttcaagggggtggtatttatagagagatgggtcatttgaagcagagtgggatctgttatctatgggagtttttctaacgtagttctactgacgttgtcttcctgatatgcgcgtaagcgaacgatcagtatgtcggccgccatgtcccatttgtgggctactatagagactatggtgctgaggctccttgtagttgaacttgcttggtcccacaccgtagggttggggaattaagggtcatacgtgatgacaactcgtcccattgatagagactctccgtcactccctcgacgtgtcgtggcgtcagtcgagacgatatttggtggcgacatgccttatcgtggctggtgtcggtcaataatgtctgtctcgttttctcgctagatagttacaggtgtgcgcctatgaggtgcgttacagggggtcatggaactaagggacctcagatgtatcggccctcattgtgggtcttcacatctccgccttgccccagctgctcagtgggacttggtgggttcgtccgccttgcagatttgctcggtgggacttggtaaactcatctgcctgacaaagttgctcgataggatatggtcggtttgtccgcctcgcagagttttcgataggacttggtcggtctgtccacctcacagagttgctcgacgaaatttggttgggccatccgcctcatagagttgctcgatgggacttggacgacctttccgcctcgcattgttgctagactagatttggtcgacctgtccgcctcacagagttgctcggt

SEQ ID NO: 173967 - DNA, 278 bp, Zea Mays
tggtctattgtttcactttcttgttcacaaagagggcaactatcagggtgatccaatcctctttttgcaagacgatcagctgtccaacaccttttttgtgcaactaaccacagaaaaaaccgacatttaggaggcgcccaggttttctatatcctctcatacggttcaaaaggaagcgagccaatgaaaaccccctcgtaggcagatttcgctgaatattttccattggcagccagcctaaaaatgtgcttatcttcaacattctgccttaattcagc

SEQ ID NO: 173968 - DNA, 417 bp, Zea Mays
tgtaagttccatcactcgctgcttgactgacttctatgttctattactcgctgcttaactggcttctttgttccagcatttcttttttaccttttgtagtgggaaacaccatcattagtactttatggttgtagaacacaggttgaactacaatagaagccattcgtgcacaattgagtttaggcaaagttcattcaggggttgtcttagggtgattagactatgggtatgatgactagggcagggcacttgtttcatgtcacctaactatctcttaaaaacaacaacaaagccttttaggcttttaatcccaagcaagttggggtaggctaactatctccctaaaggcagttattaacacaattaaaaatgtgtgattctaacctgttaatagccttgaaagacttctagtttgtc

SEQ ID NO: 173969 - DNA, 441 bp, Zea Mays
gtgcccgtggagacgagctcgacaaccggactgctagcacccttcgcgtcatgcgtccaacacggatccaggatctggcaacctcttcaccccctgcttgtgccctaccacactccacagattcgtcgcgggcccatgcctgccgccctcccctcatcggcggctcggctccaatccacgacggtcgacagcggctccacctccagcttccaccgccagttcgccatagtgccgcgccggcctcccctccctggtctaaggccgccaccccgtcgctagaacactgaagctctagatgagatctcgtttctctttcagatttcaaaaaactgaagtgctagagtgatgagttcctgcttgcatcagcctcgtttctctttcagcatcagcctcgaggacctaggccgggagcgcgacgttggggaggagcgcgacttcctg

SEQ ID NO: 173970 - DNA, 472 bp, Zea Mays
gctccacggggtgatgtagaggccatgcgcgcaacgaattgagaaatggtgcagagggttacccggtccacgtgctccggcgggttcacgaactccagcgagcgcgattacactattccggtggggctggtcctcggctcaagctcgggcaagcttcatggcctcccgggaaagctatccgagggcttggatcgagcggaggtgggcgggaaaggggttggccatggtggttgccctcgggcggctctggcggaacgcggggaggtcgccggagctgcgggcgagctcgggagagttaggcgtggtacagaggaggcaacggggaagatggtcgtgcactagaatgggctttatagccgcggcgcgggtgtgggcacggggcggccgagggcgcatgggggttcgcgtgcgggcgtgctctggacgcgcccccaagtgtcagcccacgtcgaacacgtgggggtttacttct

SEQ ID NO: 173971 - DNA, 998 bp, Zea Mays
tgtggcacctagtggaacctaggaaggtcagacggtctgaccatgtgccctggatggtccataccccggatagtccacgagatagcccgagtggcccatgattagatcaaatcagacgagacatctcccttttccgtgcgtgtttatctaactaaatacacggagtttgttggaaacgcctaggaacatgttcagacctcccctatacatataaaggggtacaatcaattgtgtgcatcactaatcgaaccaatcaaacaaatctactctatttacttcgttcttcatcacattaggagtaggcttaatttagacctagtttagctttccccagcccccaatctttatccctctcgactctacgtcgtctccaacccccaatcttcatccctcttgactctatgtcgtctagggatgtccagaggcacatatagaactcttctctctaataggtccctcctgggaggtaagatttagggttcttagaccctttgcacgcacaaacagtccagccccgaagctcggacccaaccagaggagaccgactcctgcagcagggtcacggaccatcggcaccaccgcatagagcaccaccagaagatacaatccctagtgtttggcccgaatcgaaaccaacagtgctcttttggttattctgtttttcaggttctagaagtcccttggttcatcaaatcatcagatggctcttggcagtcttataaatcaggtcataaactggctctcgtaatacaaatcaaattggctcttggcctgttgccattgtcagcacaatcaggcagtaaacgctctacattaatcagcaaataatagctcctggtacattattctcataatgcataagtttggcctctggataccatttttccatgacgaggtgtaacacacaaacttgcggacagagattttatgcttcaacaaatagaatatcagaatctgaaatactaatggggtgttaggtttaaagaatgagttagccc

SEQ ID NO: 173972 - DNA, 891 bp, Zea Mays
gtggagttctcgcctttgggagaggtgtttcaagagggaaataggttagctttctgatgttgggtttctgagtggggcacataattgatttttagctcagtgtggtgttctttgtggacctgtcgggaaatgttctatccacctgttgacctgtatgcggtaaacggtcggtctttgttaatgctaagactggggctcggacctagaactccaaaaaaatgcaaagtaaacattaaactcatcaaaataatggttgatcacttcaataccttctggaatgatgccgatgcatgaccaatttctttcttgttcctccgatccgcctcaacgatattcagttttaacgaattctcctgcagcttatgatcctacacagttttcacaccatccctgcgagtgagcacctgcaccaggaattatcaagccaccatgagttagcctgcaagaggccttcctgaagtagaaaaatgacgacacctgctaattgctgcccctcgatgagctagcggacgaagtgttgtgtgtttaacttcccaccatcagatctatctgcgtggtggttctcgctgcacttccacccctcctgaactcatgtcacagcaggctctggcttccactcctcactgccatgcttctttattattcttgttagtccagattgctaaaattcggcgtacaaacaagctgcccatctcctccgaacaatatttggcatccaagatgtacttcaaacaagttcttgggtgtatgtgtaaatgctaaattatgtattataatctacagggcccaggatatgtacatgccacttatgtaaagtgtgcttaattgactggaaccatgcatccatctccattaaagacacatgtatttagtgataaaggtctaactcca

SEQ ID NO: 173973 - DNA, 470 bp, Zea Mays
gttagttatttgtgtactataaaccgtccattttatgaaccatatatgtgatagaatcacttatttaaaagcaggaacatgccttgctcgcagtctcgcactagtgcactactgaatcatcatacagtctactagctaggaagtggttgaagagtaaatgttatctttccttctaaaaaagaaacaccataggaaaatgaaaatctctccggttagtatttaatgcaaacgccgaacaaatgctctttgggacggtgttattaaagacgttaaagccatcacggcacgcatgattctaaccgaacagtggactgattaacgagttggttttgtggttggagacgctccgattggttcacgatttgatcgatatatatgccgataagacgagtccacctcatgcgcttgcaccacacacatgcactatatacgtgctttggtgctgatggctatttgcgacctcgattcct

SEQ ID NO: 173974 - DNA, 678 bp, Zea Mays
ccgggtgtgacaatggctctcactatcctttgatcagaggttatcaggctaagaaacaaagccacggaaaaagacaaaagtctactttcattggtagataaagtaaaagaagatgaagcttgattcaaaacacaatccgacgcccaaaaaactgaagttgaagaccttcgtaagcagctagctgaagctaaagagaaatatgcagtcgtagaagctaaacgaggaattaacgaatactgggcaaatcatttagagaaaaacattgaagagcttcacacatccaaagaaagatgctttgaaaaatctttagactgtgtgaacaaaattaatgctagctttgccaatgtgggcgcctattcttccgaagagaacttaatacgaggcgaccctgaaggtgttattgaatggataagtggggaggccgaagcctttgaagaaattctaagtgatcgtggggatgttgcgcgttcttcggtgcgcgagggatttcagctatcttggagaaggcgggatgcgaccatatcaagaccatggcccaggacgaagctgccttgtccgtaaatgatacaaaggacccctcagctgaagcaagtttaataggcgggaaattttataacgacatctgggcaaatggtggccgagaaatggctcatgaaattatgaaaaagagtgaaaagg

SEQ ID NO: 173975 - DNA, 754 bp, Zea Mays
tgacggtcacgccgatgtgcggatcgtctccggggatggtcggagtaggccagtccacgtgcgcaggcgggtgagctcatcggcggcgagtattccggcctactcacggcgcgatagtccatctggttagctcaggaggctcgaccaggtgacgtagaggcggtatacggaaggaatttgagaatggcgcagatacttacccggtccacgttcgccggtgagcggaagaagtccggcgagggtgattcggggtcagcccgagcccgaggcaaatcttcggttttgtcgtgtctagggtccgaatcccaatgccatcttcagatatgtggtagaggggttagtttagcacatttttgttaatgggagcttagggttttgatgtagggattaaggtgaacgcgctcggttttgagttagaggctgaaattcagaaatctgaattttcagatttctctaggaagcctctaattgaatggcttgtttggggtttttaactaactattttggccaaacttttataacctttattgtagcttagttagtgtatttcaacttttatagttggcctaagccatgattccatgtttttcatggtctttttacccatttcttcctctctacttaaatggcctaatttgggttgttctagggttttaacatttttcccttttttgaatgcatgatatgatttaggcatgatccttaagataaaatgcttagttgagttttagctcctaagttttttggtgtcttt

SEQ ID NO: 173976 - DNA, 504 bp, Zea Mays
cggtactgaaggtcttcctgaatctgcactgtctcttcttcgatgtgactttctggtgcttgtaggcatctgcggagctgggatacgtgaaacacattgtggatgttggacatggattccggtaatttcagacggtatgctgcgggtcctaccctaccaatgatgggatagggaccgatgaatcgcggtgctagctttcctttcacttggaacctcctgacaccacgcattggagaaaccttgaggtagacgaagtctccttcctcaaatctgagttccctccgcctgttgtctgcataactcttctgtcgactctgagcttcaagtaaccttctgcggatcagtgcaactttctcttccgcctctttgacaaaggcaggtccttctagtgctttttcccctacgttggaccacatgagaggggtctggcatttccgtccatacagtgcttcgaatggcgacatcttgatgctggcctgatagctattgttgtatgagaactct

SEQ ID NO: 173977 - DNA, 850 bp, Zea Mays
ttccgagttcaattccaacaccattgtatgtggtttcgcagataacccgatttgaaacggttcgtagtgacctcgcacaagccattgcaaagatgcatgtagttgggaacgagttgttagatttggccggaaacgagataatggattcgccaaatacggccaaagaggtgtcagtgaacttctcaatgtggcgcgtgtatgaacttgctcagtcactgttggaggaagcacaacgtttagaagatctcgaagctggtccttcgccaccattatctgaatgtttcgataaccaatttgctgaagatgaagatatgggtggcggggaatgggcactggatgatgtgaattctgaagagattgtggatcgtcagatgaagtagagtagtatgtgtggtgtggaatggttatctgtgtaagagttagctgtgttcaagttatctgtgtaaggttagcttgtgtaagagttatctgagtatggttagcttgtgtaaggttatatgtgtaatagttagcttgtgaacctgggttatgactgatgctgaacttgtcctttcagtttgccattgagtattgaagttgccattcagtttggcattgtgaagctgtccattctgttttcttttgtaggttatttgttcagaatgttcagtttgccagttcagctgttaggccctgcagcagctgtccattgtaggttattttcacaatgcagaaaacagaaaatagctgttaggccctgcagcagctgccctgcagcagctgtttgccagttcagtttgccagttcagctggcattctgatgttcacaatgcaggttcaagaaaatgttcagtttgccattgtaggttat

SEQ ID NO: 173978 - DNA, 516 bp, Zea Mays
ggtgtcccaagtaagaaatctgctgcttagcaaagtgacacttggacaatttaatgtgccagtgatcttgtgataacagctgaaagaccaactttagatgagccaagtgttcggtgtatgaggaactatagactaaaatatcatcaaagaagacaatgacacactgtcgcaacaaaggggcaagggttgaattcatagcaccttgaaaggtggttggtgcacccgataagccaaacgacataactttaaattcaaagtgtccatgatgagtggaaaatgtcgtcttaaattattcaccatctttcaaacaaatttggtgataaccagctaagagatccagtgtcgagaaccattgagcatgagccaattcatcgataagttggtcaaatatgggaataggaaacacagatttacgagtcatagcattgagataacggtaatccacacaaaaacgccaagtcttatccttcttgcggaccaacaaaactggggaagagaaaggtgagttgcttggtt

SEQ ID NO: 173979 - DNA, 602 bp, Zea Mays
agctaccaggctagaggatattgatgtgctagaggaagagcgattgaacacagtaatttagtcggccagataccagcagaccttgaggcgctatcatgataaagccatacgacaccaatcctttgttgtgggagacatggtccttcaccgaattctgacgggggaaggatgacacaagttgtcaccactatgggaagggtcattcattgtgtcagaggtcacctagccgggatcataccggcttactcaaatgaatggtacggaagtggggaattgatggaacatagagcatcttagaaagttttacccttagcaaggcctcaaaagctatcggagcaacattgtactctataattggagaatatgtcatcaatgaagtttccattttcaagggcattcaaactgttgactatcaattgacttcgattcgattggacttggaatcaacacgcttactcgacttagggtgaccactataccctactaacagagcaatcggcttaagtcggggacgatttaagacggtgcaacatgctcgcgcttactcgacttagggtgaccactataccctactaacagagcaatcggcttaagtcggcgac

SEQ ID NO: 173980 - DNA, 484 bp, Zea Mays
ttcggccatcacggctgagccgaagaggaagaagatgaaggttctgactcaccggccgcgttacatcgaaccggctgcgatacctgaatttggcgaaggggcctcgtcggccgccaagacaaaagaaactgtttctcctgcacagaggattgaagatctagctacaatgtcgaagctaccttcagctgagctagttgagacgaaggctggtaagggtaaagctgaagagtcaaatattgaagaaataaaaatgccagaaattttgagcccttcatcggaggtaacagtgtcgaaggcacaaaagagttctgccacaacttctaagaggagaaggatggcaaatgtgctagatgttatgctggaaacaacaaagaccttgagctctactcctttaagaaaacttgtcgaagcttcgaaagcgcaacccgaagctgaaacaaagcaggtagaagtcgaagctaaaacaaagcaggcagaagtcgaa

SEQ ID NO: 173981 - DNA, 304 bp, Zea Mays
tttttgagggtgaggaattgaaaataatgttgttcaattatagggaggcgggcatcatcccgaaggttgagccgatgtagtatgtggtgccctcgcgttgtcctatggtagtagagggcgcaattgtatttatttgcgcggtgggtccgatgacccttcgctgtgtgaatgtaatctgcaacttgtattgtgatgtggcatggtgttcttcatttggcagtgtggtgttgtaagtgtccgatggcacccttgtcaattcttgaccggggttgtcttgtggggtagacttcatgttacgcatttc

SEQ ID NO: 173982 - DNA, 1134 bp, Zea Mays
cttataaatagataaatttattccacaataatttagtcaaatcatatactcagaaatttgagtacaagttcatcacaaatttgaaattcaaatttagattcaaaaataagagaagagagaataaaaaaaggaaaagaaagatgaaggaagtgcctaactgggcttgtggtgtcaaatttggcccatttggggcgatttcctcgcattggctcaaccgaaaccgctccaccgcgcgcaggcgactctctgccacgtgggccccagcggtcagccacaccatgacaccgagcgcagctctctggtgactgacaggccagcccctctagtcatccccgtccgtgcgtcaacaaagtccacagattgtgtggcttcactccccgccattgtcgcgctggctcccaacgcccccacctcggcgcagactcgcgagggccataaaggatgggcacagacctccctcaatctcctaacctcccctaatcgtgtcgcattcgagcctagaacaccatcgccgcgcgcccgcggctcttgcagtgtgctcgccgccgtcatccttacccctctgggtattccgctgacaccttgcaccgtgtagtcacctctgttctctctggtgcgtgtgcccgagtcattggggagggcattcggtgggctggcgcatcctcaacgctgtcaccacgcgcgcagcgtctccgacccgctgtgcgccgcaattcgctccgccagtcgcctaactctggtgactatgccgtggaccgcctttactttcgtcctgtgtctgtctagtagccgttaggttcgagttttagggagttttgccgcctattccgattgccggcaatggtgtccgccgcgggctcgtgtgcgctgccgcgctctcccgtcggagtggggaggggcgctctgcaccgttggatcctaccagacggctgggattaggatatggcataacccttcgcttgaatataccctagtcgtagatctgtgatccgttgaatacgattcaatctcgggtattttgaatccgagccatagatataggatccagcggctatcgttgtgtaccagctcagttaaagtcagatctaatctgtagcgtccatttgtgatcgtgcggccgagattacaagatac

SEQ ID NO: 173983 - DNA, 293 bp, Zea Mays
gcagcaggtcgccgaaacggatccgccgtgcggtgcagcgtagaacccgtcgccatgtctccaatcaacgtagatgatgtagtggttgctggaacgctgatacccactggcatcgtgcccagcggggtagccactggagcaatgaaggtcttcggcggcgtcttacccatctgggtttgaagtttcttcagagattccaccatctccaccactttcttctcgatatctggccgccacttctaaaattcgctgcgatcggacaccagcccttgaaccgtagcctccatcttctc

SEQ ID NO: 173984 - DNA, 880 bp, Zea Mays
gacgtctccgtcgagtgtctagcttggatcaggacgtcgatccttctgttcctgatgttgaggaagtgccagtgcctgcatttgctgaagctgaccctaatgggtgtgacccgactgctgtggatcctaatgggtgtgacctagatgacattgaacccaatgggtgtgatctggccaaagctgaacccaatgggtgtactgtccgcattgttgatgaagatgaggaagaggaggatgaaatccctctaattcggaagaacagccggcgttgcctagccagcagggaaagcagtggtgttccttctccagctttatctgccctcattggtctgcaagaatgatctgtggcgaattttgatcagactcttgaagacatggtcccagaagatctgttgtcagagccagcagacggtggcatgatggatgtttgcactgatgtgcctgatgctgggctggagttatcccgggcggcgtcccacgcctcatcgaccttggagtgcgatcttaagggtcaggaggctggtctggattgttctgctcccatggaagtgggtgaaggtccttcagccttagaggtggctgttacagagagcttggccctcaaggatggcgctagcgcttacccagcccccgagggtgttgccggggatgacccggctcggatgggtagcgcgagctatgacccagcccccgaggatgttcgagtcggttctccctctcacacttccatagacgttcacgtagggtcttctccttcgcattctggttgcatggcagcagcccaagcttcgggtcaggaagtcgccttagaggccagcgctcctgatgacagagttttgacccctgctgatgatactgatctagtccccactgatgcatt

SEQ ID NO: 173985 - DNA, 712 bp, Zea Mays
gcatggtgcaatcctgaagccaaatctgaagccccattactcctccggtgtaccctcgattgtgaccgctaccaaggtctataactcttctgaagaaaggcgaggttgagtcaacagtggcagtcgagatgaggataacaagttgacagccttgaaagcatacaggcgggcaaaggggctgtgcttcaaatgtggggagcgttggtgttacgcccataagtgctccaacagcgtaccattacacctagtcgaagaaatttgggtaatggtagtggccaatgaggatgagaacctggttacagaggatggagagtcagcagagcaaggggtcgatgaaagcatcgtggctatttcggtggcagcagtcagtggtagtgagggtaacctaaccattcgcttgtgggcatcgatccattgccaacaggtgctggtattggttgattcaggaagttcagctagcttcatcggcagtcatctcatgggcatcataccaagagtgaagttactagataggtcgttgcaagtaaaggtggccaatggaggtatcatgtggagcaaatattaagtccaaaactgtttatggctgtgtgcaggaaccacgttccgtacagacttcaaggtgttgtcgttgggtgggtacgatctgatcttaggcatggactggtaagaggggcatagcccaatagcagtccactaggctgaaaagtggatg

SEQ ID NO: 173986 - DNA, 475 bp, Zea Mays
atttcagtttatgttttcatgatcttcctgtcttttgagatcccttcctattttgttgttaagtcattacctttcaacattttctattcccctggtcttagtatgctcatgtccttggagtcttgcatactctcatatttttatgtatgcttatctttcataccccaatgactgttcaagacatttcagttaacacatccttgaccacccttgtttcttgacgatccatgagcggttattttatttttgcacatccatggtaaccttgttgtttccttataacttccttcggtaatgaatttttacttcaactcttctgttggaaccctacctatcttacccttgattgttttccccaccttgccatttcgcgtgtcttaccttaattctaccctttgtcatattttttattgatatcatccttacctttgtcatctctacatatcaccttgttgcttattgtataccttccctg

SEQ ID NO: 173987 - DNA, 569 bp, Zea Mays
ggacgcaaccattaggatcaacctcaggaaggacctctcttttcacttcaccacaagctggagcagaaggacctgcatcctggtccaaacatgacagtcgccgaagtcgcctcttctttttcttcttttcctcaacaggcgcagtcgggcggctaacttggcgaggacgctttgggtgagcgccctcaggttttcgagtctccactgctttgtcaagctcttgtccaactgtgatagccatcggctcagcatgggtcgagtcagaagattccccagctaacatactaagcacaacatctatctctgcatcatctggactagctggcatctcaaagtgaatttgcttctcatcattgggaagattccgaagaggagcaatcagagcctcaatgtcctcaggggagggtcgcactctaagacccagaccaccatcactagtacgagggttggacacaaattcagaaaatgacctatgaggtggcagattccaagcagaataggcaacaggagcaccaacatttgacactctgcccctcagaatcatgtccagtccgctcaccagatcctca

SEQ ID NO: 173988 - DNA, 536 bp, Zea Mays
gttgttgtgtaaacatttgcatatgtatataaccatacacacaaacataatgtgtcagtacacataatgcatgcacatggattttattagttgtctcctagcctgcagcatcgcataatatgacttcaaattattttcattgcatttcaatcaatactatacttcattatcatttttccctttttcacattttttaaaatctgcatattgggttgttcattttctagaaccaggctgagtattgatgttaatgttctctagccattgtcatttcagtagcttagatctgtaaaacttgataaataaatgtttgatgcagatccaacaattagatcgtttagtggtctaaatttagaagatttcgtagaccttcatctgtaaaggccataacttacataaaaagttatctccacaagatgtagcaagcactatccaaactaaacaaacttgtgcatgggtaaaacataatgctcgaattagtggttaaattccttttctaaaaaatcattctttgtctgagaatggcattacttcta

SEQ ID NO: 173989 - DNA, 320 bp, Zea Mays
tagcatctctgatggtgacgttgaaggtatcccaccaggctaaggccatcccggaaagttgatgggcggccagttgaacacgctgattttccgggcatccaatggcttccagctttcttttaatcgtgcgcagccaatcgtctgcatcgagggggttgctagatccgacaaacgtgggaggcttaagcctcaggaaatccccattctgtcttgtggtcttccaccattcggacgttgattttccagacttcgagtgaggacctcgatgagtcgggtttgattggctagaacttgggctagatctaagggtagttgcagag

SEQ ID NO: 173990 - DNA, 1262 bp, Zea Mays
tagagagagatggagagtcgtatagaacgtatagagagggagagagggagattcgtacggatattatcgagttgtgtaccccttttatcagattggaacaaaagattagaacatatatataatatcatactaagttcttacataatacgccgtccatcatactaagttcttatatataatatcatactaagattagaacatatatagtaatttctacttttctacttctcgtcgtctatcagtgtcgtccaatcgatctcctcatcttcatcgtcggagatgttggtgatctactcctctcttccctttccatccctcctctctcttccctctcccttctctctcttctcctctctcttccctctccctcctctctctttcctctctcttacctttccctctctcctctcctctctcttccctctccctcctctctcttccctttccctctctcctctcctctccctctctctcactctctgcagagacgcgcgccctagctagggtttttacacgcgcgcggcggcggcgcgtgcacggcggcggcggcatgcccgagcgcgaacgaagtcgaagaagggagagagagagagagagagaggggaacgtacctacggcgcggggacgacggcgaggacgacggtggcgcacggcggagaagatcgccggggcgaaatttcggcagcctgacggcgggagtgtaaaatctctggtttttttactagcgagcggtaacttaaaccgccagtgataatttatgggtgccacaggctttgagctcttttctactagtgtgtccggcgctggtctccgccgaccccgccgtggagctcgctcctgctcgcctctctcagctcactctctctagctgccgtggagcttgcccagctctcaacctctgccccaggctggtgttcatgcgcagcacctgctctcctttttcaagccgcctctcctccctcgccggtgctcgccagctaaccgtcattctctgctcttcccatgccgacggtgctgttgtgcccaactccctgcgatggccgtcgtcttgcatcccgtccgcgacctcgccttggctccttgctgcgctcggccatgtcgtgctgcaggacaccatgtcgtacgccgtcagaagctcggccctgtcttctctatgtcgtgcgctcctctgctgctccttgtcggtagcagctcccagcgcctctccctacccctctcagctccggcatcgtccccaagctgctgaacgcgttcattctatc

SEQ ID NO: 173991 - DNA, 337 bp, Zea Mays
aaggcagcgagtggatcggggcacaagtttgtggagagcagtggcagaggtattacaataggaagcacaacaaaaaacacggagatgcgtatagaaagaggctatgtcgaagagggcgaagaatgaagtgggatgactggccgccttggcggggaggcagttcaggaggtaggtgcaatgtggaggccctcagcccagtaacaagcaggaaagaaggcatgaaacaggagggtgcaaatgaggttggtgatggtgtgaatcgtgcgatcggccttgccgttctaaggggaggtgtaaggacacgacatccacaatcgcataccgcgcgataaaaaga

SEQ ID NO: 173992 - DNA, 461 bp, Zea Mays
gaagaggtctcaccgacaaaatcgggcactgtggccggttcaataaagcgcggtcggtgagtaaggaccttcacctttttcctcttcggcgcaggctcgcttggagcagctgaagcatcatctttaccggaagttgcaccttttcttttttgcccccgtaatgggtagcggtagtcaggatacatgaacccaatagcatcaaaaactctgttgagcctcttctttttccggcttccgaaggccgctgatagtgaattatcttctgttttcgagtacggcccaagcagttcatcgcttgtagcttcgacacctttcagccaatcatcgtctggctcgtcaaactggtctccaaatctgaaggtgtattttaatcgaaccaaaccaccttcgtgggggttgttgatgtttcctttggcatctcctagttggctaccaatggccatatcctgtaggccacatgc

SEQ ID NO: 173993 - DNA, 848 bp, Zea Mays
gacaagtcgtgccaagccctaggttattgaggccaggggtcggcgtcgctccaatgatggcgctcgggtcacacattgctcgcatcgttcattataaagaatacaagacaactagacgaccccaacgcccatgggtgcacatggcttcaccctgtggtagaacgctcgattttaccatcatccggtgactccttcctaaacaagccatcaccgaatgacctcttcattggcctataaaaggatgaggttggtcctcgtgcatggagggcgaaagaaagacaaacacacacatgagcagatgcctagacgaacaccaagactcaaagacaatggaccgactggaggatggaggatgcaccgaggaggacccaaaggccatagccccgacgacaagccaagacttagttagaactccactttatacccttagctccacttcctccaccccacagagacttgggagcctctcctcactctctctcccgcttgtaacccctactacgagaattgatctgcaatggtaccggtagcgcacagcgaaatttacttgtcggagcgaggttcgaaacaccgacacacactacaatgctactatcatcgagtaaaataaatacacccacaaatgtacaatcacactcaagcagtaatagtagtagattgcataaatatatgtactaatcaagagaggcaacaggtaactcagagcaccatctccacgcgggcttcgtctactcgggaaaggctgaatctcccctgggaattaggcttctaaactcgcccttagcctatgacctagggtctcatctctcttgttttctcatttggtcaatgataaccatccttttttt

SEQ ID NO: 173994 - DNA, 818 bp, Zea Mays
gacgagcaggcttcttgcctcgcaccgcctcagcccagtagcccttatcacttgtcactgtcgtcgtcgctgccggcccaggcggtcgacgcctcaccagtgtggagttcgacgggggcgtgcagagccttgccaccggcctcgtcgatcgcggagtgcgccctagccacatcgccgccaccctcgccctcaacaggttcctgcctacctgcacgcatggatttcgttagtcggagctgcataaacatctgaaggctgagccattgttgtacttacgcacatgtatgtgttgctctctacctacgaggaggaagtggagcagatgggtggtgggtcaggatctcaaggtggcggtagcaacaacggcagggggagcaaatcgatttctgacagaaaaaacagaacgagtgggtaaaccttgcaattttttcattgccgcaagttcttggatctaaacaagtctgcaaaaaataaaggaaaataacaaggcgttgttgggatggattgatgaggacaattctcacgaacgattgaactgccgctcaactcacttgacagatctgtctgtgcgtaaatgccggtaaatctcttctcttccttgctcctcctccctccgtcacatggattagttgtcgatcttgattcttgttgttgcccccttccttgctcctcctccctcctccctcctccctcagtcacatttttatagagaggttccaactttcttttttgtttcaatcaagattcaagtttccattgaatggttgattttatcagctacaacttttatggatgtaaaacattattcggtgtttctg

SEQ ID NO: 173995 - DNA, 688 bp, Zea Mays
gttgatgcaatcacaaagcattagctgtgccctaagacctaagaaggtattgagtcaaagcactagacttggagatgatataaagtatgtatagacgcgctgtcccctagatcttgcatcagcatagcacttcgcgcgactagtcaagttgaactgcaacatgtgttcgcggagtggcaagtggagtgcaccattacaagttggagtacaattaacgaaaaggacgacttcttgttacaaaagagcgacaaaggaagaaacttcgcgcacctccattctcgacagatgctagcaaaacgagcatgccagatgagcagaagaaacactttcgccgtagcacaagcacagtctcacccaacatcgtacaacctcttcattccttgagacttgacagtcgagagtgagaaacgaacatccctagctttagaaccaggatgaaagggcgacgagccaaggcaagaagaacagttgcggcctcaccaagacgttgaagaacgcctgcgaccttgccaagatgctgaaggagcagaaggcgatgttgtacatcatacgtcgatgcatcgtctgccaccgtgactccatgggtgatgattagtgattgacacgtctttcaatttgttctcgtcagagattcgttcttccaatgtaggattagaaattctttggtgtacatggagttgagttttag

SEQ ID NO: 173996 - DNA, 640 bp, Zea Mays
gtaaagcgtagccgagggccgctctgacatgcgctcggggcgtgcgcggaggagcgctagtgcgcgctcggcctcttgggcacggcgtcgagcccgaggcagccttgagagtcgttgtttttaggcgcccattagctctagatctttgcgattatggccatgatccctttgtaagatctcatcaccagactcccctttgtcgtttgtgtgtggcgacatatggattcagttgactagaaccaaagatatggggtgctctagtagggtttgtctcatggcgtgaacccaaggtaaaaccctcgacttgacatgtctagggcccgaattccaatgccatcttcacacatgttgcagaggggttaatttaacacaactttgccaatggaagcctaaggttttgagttagggatcaaggtgaacacgctcgagttctgagtgaggggctgaaatttagaaatctaaatttcagatttctatagagagcctccacttgaatggcctttttgggtattttgaaaaattcttttggccaaactctcctactaatttttgtagcctattaagtgtatgtcaacttttataattggcccaagctatgatttcatattttccattgcctttttacaaatttcccctttgc

SEQ ID NO: 173997 - DNA, 701 bp, Zea Mays
tgggcccgctctgccgccgtccgcgcgcccgcgtgctcgctctccctctgtgtcgtgggccccgcctatcggcgccctctccacatccattgccagcacacccgcaccgacccgttgacgccccggccccaccggtcagcccttcccctccttcaactgctgctcgtgtggaccacgcggatgtcgaggaccctgtgcccacgtcgtgcgtcaagctcgaaaccgcccaccacctagtcatttgaacccccagtgccccactcgctcgcctcctccctcatttatgcatgccgagggagattcgctgtcgcactgcacccgttctctcaccgacgtcgaggccccgtcaagtttctgaccatggtgagcttcgcctcggtactagcagctcgaagctcacccccaatttccctttctccctctggtttgctctgcccgtgctcatccgtcgttacccatgcagccccagagccgccactgtggttctaggcccaccgccacaccgttgtcgccaccaaggatacctcggtactcgccttgaggtaaggaaccaccccttccacctctagttccctccctcactctccgatgcgtgtaattactcgtcggagccgtcagtgccgctgccttgccgtggatctccacccttcggtgctcccatcgcggtttagcactcgccattgagttccccaaaccctccc

SEQ ID NO: 173998 - DNA, 1624 bp, Zea Mays
cacagagttttgcttgctagagtacgcatatacaaacatgtaaaagttatttccctgatcgatgacaactacagcaatcggtatgtcctttttcctactgcaaggtaaaatagacataatgaatgaaagatctgaaagttcaggctaaagcactaattcaccaatagatggggcaggcaaaaaccaaatcaaccaaagaaggcagagtggatgattccctaaaataacctgtacttccaactttatttaactgaagaaattatcagacaaacaaaagtttgaatcagggaaaccactagtttttttagttaacacaagtgccattttgtaaacttgacatgggaaattgagattcttcctggtaaacatgaagataacaagaaatcacatacacggcagcatcataaccactcataagcagctatggcaattgacacaacccatcaaatgagccaaccttccgaataaatcaaacacaaccaattatctatccatgctagttacatcatcctagaagcaaacaaagatggagcccaactaaaccttagtaccctgcacaccaatcaaacaagacaaacaaatttccctaatctcacagctccaaacccaacaaagaagccagatatttctttcgctttcaatcaacaacaaagaagtaacggcataaccccagtgatagccgagggaacatggcagaaacacaactacgaagaatcaacaatatagtcatagcacgaataattcgcgctcctcaacaacgatcacgcggctggggttcgccgcggtaggaaccggggaggagcagcggctgcgccggcacaagaggcagtgaagccaggggggaaaccgccggcgccccatcgacaacacgcgaaacgaacctcgaaagcaggtaccaaatttggagcctgacgcaatggtgtccatacctgtcgcaatcccaacccgccgccatgctcgctcccgagagcccagacccgcgcaccgaagaagaagaagaagaggaagctactgcgctcctctccccccacgcctcaatccatcccctaacccttggaccatggccagcagcaagctcctgagttcaaacggctccaatccctccgaggaagcagaggccaagacgtgtagcaccaccaccaacaacaccaagtcgcaccaaatcacagcccggagcagttgaacactggagcggtcgtgtgcccaccggtatttcaagtggcagtgaggacgcgagggggcgcgagaggacagagagccactgggaggagtgggaggttctcgctgggtgctcggcggcttgctcgagtgggcgtggtggcggtgccggtaacgatttctacggtgcgcgagcgcaaaggcctcgcctttccggtgccgcgcgcaattcttttggcttcttttatttagccgagggcgcgcctaattgcgctgcgctaatgggatcccatcccccaccctgccacttttacgagctcgcgtgttcttcctccactctccctttttctctctccaatagaccaatacaggtgttgggaactgaagacgaaagcttttggtgggctcccgaatttccatttccttgctccgaaatgacgcggacctaaccggggtcagggtgatc

SEQ ID NO: 173999 - DNA, 387 bp, Zea Mays
cgatagaacctattagttttagttcggaagctctggggcgtcggtagtggatcaccggaggggtgggtgctccgccgtgagtcgatggtggccgccggcgtgccatcaagtggtgaagacgagagtcggtcgttgatcctcgattggacggtggcgattagaaatagagtgccggtccggtcggatgtggcgtgggccgttcgattccaatcgatcggacgtgagtgggattaggttatttaaatctggaacgtccaagttagatcgaaaggcttagattgcgtactggttcgtagggtagtggatttaatccatgccgttcacgcttgatcggaagactgaggacttatgatacccctttggatcgctgactttacaaataggacc

SEQ ID NO: 174000 - DNA, 271 bp, Zea Mays
ggtttgcgctgatgtgcttgatgctgggttgaggtcatcccgcgcctcatcgaccttagagcgcggtcttgagggctaggagactgatttggatcgtctcggtcccatggaagcaactgaggggccttcagccttagaggtggccaccgcagagaactcagctctcaaggatggtgttgacgcttacccagcccccaagggtgttgccgagggtgactcggctcgggtgggaagtgcaagccactgtccagcccccgagggtactgccgga

SEQ ID NO: 174001 - DNA, 771 bp, Zea Mays
ataaattttataaatgcaattaatactggtatgttcaaagaagatgtttaattgggaaaaacaaatccacaacaacatttgaattgaaattcaaagttataaatcaaaagggaaggaaatagtggagaaaggaaaaataaaaacgaaactgtgcaccattgggccgacagacaccaattcggcccactttccctttttctccacgcatgcgcacgacccagaaatcttcctgtgaccgacacgcgggcccgtgtgggcagtggtcgcgcccgcgcaccgtgtgacaccgccgtgtgggtcctctctgtcggatctatcctctcccctctttgtctcctttcaacagaacgcgaaatcgcacgggtgtatcggtgtcgcaccgtgatcttcggggaaaaacgttgggattcttggccatggggcataaatagcagtgctgcatccccttctcggcctccaagctaatacacgggtctcatggcagaccgggggatcgtggggaagaagcctggcgctgagaagaatggcgggccgccgcggttaatcccagtcctggctgccggttcgccgtcggggcctccaaactccctggggatgttcgccggttctctctaggactttgcgtggcatcggtgagccggatgcgtctggggcactgatccagtttgctcatcggggcatggcggagtggcggaatcgcccctcaccgttggctggctaactcgctgcaaggtttatggtagggacatcctcgttgaactcatcctttcc

SEQ ID NO: 174002 - DNA, 466 bp, Zea Mays
tgaggtctcatcgtcgccgctgtgcggcattaatgccggcgctgtgcacctcaccggcgcccgcctagctccgtcgctccccttccctcgggcgcctataaaaaggtcgccccgagcacctcctcccccgcaccggcgtcagccaccactctcctccctcacccgagcccaattcgcggaagcgccaccgtcgtctccctctccggtaagccttccccctcatctcccttcccctctgttggaccaacgagcaattacttaggcctatcagcttcgccacactgccgcgaactcaggacaccactcccccaccccagtccctcgcccgaagctcaccgacggcgactcccgtcgcggagctctgccacctccccgcggacagccccctcccggccccctctagccaaattgagcccgcctctaggttcgccagcccctccccgtgctaaggcacctacccgttgtc

SEQ ID NO: 174003 - DNA, 1035 bp, Zea Mays
aacagaaattgggactcatccgttgtgatgatatccaaaaagttcagtgtgctacccaacaacttcagggtcccgctggagcttggtggaccgaataccttgcactgcagccagaaggtcatcaagtttcttgggtggagttctgtgaggtatttcgggcacatcatattccgaaagcccttatggaaataaagttcaacgaattcctagatctaaagcaaggcgaagaagagggtgtgatgggatattttgagaggtttactcgtctatcccagtatgtcttggattttgtgaatactaatcagaagaaaaagttctatttcttgcgtggccttaacgagaagctccaatgtttgatggcaactagtttggctgaagattataatgagttggtcagtcaggctgttttgggtgataacaagattcatcgtcattaggaatctaaaagaaagcaacttgtggaggaatcctctggtagtgtcaagcagtgccggaggattgtttatcaacctgtttatcatcctcatccttttctaccccagttacctagctcacaacagtcatgtgaaagacatgctactattccttttgttccacatgagccggatgtcctagacattcattttgaaaatattccgaataatgtcaattcgggtgcgaattgtggaaagtcgggacactctattctagattgtcgcttccctagccgagtgagtgagcgacaatcgcttgtgactctttgtcgcggtagccagccgaaagcaaagaagaaagagggtgttcttaaaatgggacaagttcattatactaagatcaaagctattcctgagggtgaaccagttatgctgggtgcttttccagttgccaatcacttggctagtattttgtttgattctggtgcttcccatacttttataaatcggacatttgtgttaaagcaccagttgtctttggtggtggtagagaatggatatagcatacaatctcctggagggcgtttgcatactaaggagatggtataccagatacccataa

SEQ ID NO: 174004 - DNA, 506 bp, Zea Mays
agccacgtgtgaagttttagtgcgagcaggtggtggctctagacaacggcgatgtaacgtgatggggggactggtgtgatggtcggcctatggcgacgtaacctaagcatgatctccctccctcgcaccagatctgtgtgactccacctaggcaagcctcactaggggtgaagaagaagaacaagtatgtgtttggttctcagatttcgactcctcctttttgttattcggtaagaagcatttttacaaccactacatgggccaagaatcactatagattaggcctaacacatgccatattattcccctaatcttttgttaagcactcactgatttctgcccgatccatctccttccttttctgcaacatctcccagtgccacagaacacgcttgacccatagcgagggcttctcgaaatttgtcgttcatcacataatagtcctcccaagtagccgaatccactgataaccccaaccacattatcaacacctaaggcacaatgtg

SEQ ID NO: 174005 - DNA, 647 bp, Zea Mays
atcgaggcaagggcagtatccacaataacgtcgaagactgcccagaagttcttctggcaaaacattgtttgccgattcggagtcccgttcgagatcacagtcgacaacggcaaacagtttgacagccaggacttcagggacttccgcctctccatccgcaccaagcttgccttcgccttggtgtaccacgcgcaatccaacggcgtcgtcgagcgcgccaacggcaagattttcatcgctatcaagaaaagacttctcgacgacaagacgggtaaatgggccgaccaactacctgaagtagtctgggccctaaacatgaccgaatgccgggcaactggattcacaccttttcatccgttatatggatcggagaccatgacgctgcaggaaataaagcatgggtcgtcccgaacaaacacatcagcaatccccaacgtcgacgaaccaacgtctaaagacctcatcaacggagaccgcgtctttgccctgtaggccctcaacaaataccaagctcaaaccaaggcctggcgcgacaacgaggttgtcccaagagagatcaacacaggagacctcgtactcgtccgtaccacccggacagagtcacggggtaagctggagccgaaatgggagggtccattcatcgtcaa

SEQ ID NO: 174006 - DNA, 712 bp, Zea Mays
gttgtcgcatcctatttaaacaatggatgtcgctaacaacgcatattaagtgttgccacatcctagttaatgaacggatggtgctagcaacacatattaagcgtttccaccaccctaataaattaatggatgatgcttgcaacgcatattaagcgttgcccactaatttcttacaacacataatacaatgtgttgctacggatgtgttgctatatggggatttgtgttgtagtgttacgtctaaataggttagccaatcgaaccctattatcctccacagttaaacacgtacggctgttgtgaccatcaactatgccacatttctggcacttcttgctcatcttcttagctcctttcgcacccaatttaagaacttgttgctcactacttttgattgttcttcccttaggcttggccttatctggtcttgctaagtttacaccttccatatgaaactccagtttctacaaatcaaagatattaagtcagttttcatattcacatattcatcatatactgtagcaatgttattacctttctagcttccacatccgtagcaccactatcaaccagacgcatatcagtgttatgttccaatgttaatatcggcatattacattgatcatcgttagcattgcattcatttgtattagaccccattaaaatttcttgtgaaataacgcaaactacagtgaagacacatattttatag

SEQ ID NO: 174007 - DNA, 842 bp, Zea Mays
cgtgatctaagtcctaacatgtacataattcacattcggtttgtcttctaaaaccggtcgtgacattaactcatcaagatcaatggtgtgatcttgatgcaagttagtccgaagcaaaaaaaacatcatgggtgaaaacctgacccgcctcacataatctcataataaagtttttcctctatggttcctagcatgaacatgaaacagagctgtgttggcatcgccctcacccagccagctgatcctagagcggctcctcgcaatacgcttgagaggagagggcaaggcaatgtttcttgatattattgtgcagccatgcttcctcgttggacaaagtccgagagtcttgagcaatttccagtagatgaagaaactctgtggctccaattctgaagctttcttgcagtggatttgagtttcctggacaaaacatcaaaagggcaggaggatcctagaaccgagttccaagcttcctcaacagtatgcatgaagccttcgatttttggccaaaaggattcgaagtgaaatcgaggttttccaggcttaatatcatccagcccgagcaacagaagacagtggtcagagtcctccgaggctgcactctgcagaaggcagtttggaaacagctgctcccactcaactgtcaagccttaccaacaccggatcagcttgcagatttgaccaagtgaaactccgaccctgtaaaggaatgtccctcaaggctaaatcattaataaactttcgaaatctgcccatcattcttgtcttcatctttgtatataaggttaaaattcccaagaacatcccaaggtccctgacaagcatcgtgaatttctctcaac

SEQ ID NO: 174008 - DNA, 587 bp, Zea Mays
gtcaaagtggggccactggccagcggctcgcatcaccgcacacgcgcgcttctgtgatggtcagtcactgactctgtgggcccgttaacctggtggccagaccgtgcactagttgacacccgtgggtcactgacatgttgacccacctgctagactctccctcacggatgttgggtctcctagctggcgtaccccgcaacaacctcgccgggtttgtcgccgtcgcttctgctgggggcaatccaacctcctaggtataataccgagctggggtgcctggtttcgctcgcccatccgagcacttagtcgagcgaggtactaaccgaagcactcttcaccatagtagctagaacctaggggatgaaggtagttcggtcgccgttgtcaaccttggggattactatccccgaaccctccattcgtggggaggggtgattgtttctgtccgccgtgtgttccccgcacccattggagtgttgtggatgaccgtagtgcagcgaattgctcaccggagtcattgattccgcaaattactgtcgtgtgccatggacgggactcctgggagcttaatcctcggtaaggcttcc

SEQ ID NO: 174009 - DNA, 292 bp, Zea Mays
attaccgaaggttgcaaaagctcccgccacagctcccaagaggagaagaatggctagcgtactagacgctatcatggagatgacaaggtcactaactcctacccctgtagagaaagctaccgaagctgcaacgactcatgctgaaacagaagctgggccttcagcgctcgcggaggcagagcctgccgcaactgagcagagagtcggagaagaatttttagatgttagcatagctttggagaagattgtggccgaaaaggccaaatcccctgctcccgaagcacagtccgaa

SEQ ID NO: 174010 - DNA, 898 bp, Zea Mays
cgggaacacacaatgttttttttcacaccaacatagtgaaatttttctcagagtaacctttcgatgtactcgcaacatgaacatgttgagctatttatctcaaagttcgcttcatgtcgttcaacgacaaagagagcaatatgtcaacatctggttgagcaatgtataactgagatttatagccttaaatcatttggtaaggtcttattgcttactaataaaatcccaatttgtgatgtcttatgtaccaaaaaggctttcatgcattatattatatttattcgggttacttcaggtaaaaactttatgcatgaggagagagcagagaattaacttatctgtgttttattgtatttcaatttaatttcccagattttcaagcactatagagcttgatatagttgttatggccacttggcgatatatataaatatatgatggcacacaacacaatcaaataaaatatagagccaaacaaaattgtttatgaaggttgcgcataatgtgactttaggggcttgaacaacccaccacaatccacgcgagtacaagctctagcgtctggtgtcaacgtgtgtgcggccatcagggctacgacaacacaacaagtcttcgtaataagcgcaacagacacaattatggctcggtaatcggggtacactactaatcatcatttactattacggatggaaattaaattatataccgtgtctttcttggtcaatgactcgggagcaaagcatgttaattttgaaaccccgtacgtacaaaaggaccgtgccctattagttaatcaccatttactatttacgagtacaagcagcgcaagagagcagccaggccctaggagtttattattttgtgcactccatgaccaacacggacagcttcttgcttg

SEQ ID NO: 174011 - DNA, 473 bp, Zea Mays
attctgtaattgaattcatcgtagcataggatttttttccaccacggatgaaccgaatttcattatccaaaagcaacgaaatcacaaaagtttaatgattcatcgtgtgatactcaatcgcgctaatgaactgccagattgaactgaacatacagggttcagccgacaggcaaccaaaaaccaccgaaacacaacatagaatagaaaaaggacagcacaaccgacgaccaagtttaacactactcactatcaaggctacggactctatgacaagcccagatcagctaatacagcacaggctgggtccaagctgcttgccttccataaacacacactgtaaacttcttgtttagatgatcgtgagtctgttgtctccataggaaatgccggtaatgatgcctaaatcaaaaccaaattcatgtattgatttttggtccatatcaccttagtgtatactctgataatggcttttc

SEQ ID NO: 174012 - DNA, 475 bp, Zea Mays
gccagaatgttgcccgaacaaccctccgacaactatgccagaactacaacaaggtgatctttgaaactccccttcgctactttccacccagcaacaagaatacccccacctggaggaaaagacttcaggccctgtcaggaggagatcctattgaagatggccccaccatcgtctacatggctggataccttcacacccttgataaccaatatgatgacctcaccctccactgcacccacctaacctcccgggtggaaagcctggagcaaaaagtcagggaacttacaagggaaaaggcgtcccttcaagagagcctcgaaatagcagaaggcgaggaaaccaatacctgtgaggcctaccgcaccctaaagatggattacgacaagaaactgaagaagctcgcccccgcaagaaaaatccgcaagaagaccaaaagccaaggatgtcagactgagcagaaggaggaagcccctcc

SEQ ID NO: 174013 - DNA, 708 bp, Zea Mays
agacaaatttgaagggctggaatttcatcatgtggaaagagatcgcaacgcggcagcagacgcgttgtcgaaactaggatccagttgaactcaggtcccactcaaagttttcatccaggaggtgccacgcccgagcatttccccagatcaagcattaagagtgcaatgttttgagccagccagagtcagactctaatgacttgagggagcccatcatcagatatataaagaatgaagaggaaccggatgataaagccgcagcagaacgcatcacaaggcagtcagcccactacaccctcattggggatgcactgtacagaagggcgcaacaggagtcctcataaagtgcattccttcggttactgggaagcaactgctagatgagatccacgtcggacagtgtgggatacacgcagcatccaggactctagttgggaaggtcttaaggtctggtttctactggccgacagcaaagagtgatgcagccgagttagtccagaggtgtgaagcttgccaattcttatcaaagcaacagcatttaccaacacagcaactgtagaccatacccgtaacatggccatttgcgtgctggggactggacatgattggacccttcaagaaagctcagggaggatgcactcacgtgttggtcgccattgagaaattcaccaaatggatagaatacaaacccattgcttctctaacttc

SEQ ID NO: 174014 - DNA, 276 bp, Zea Mays
gaatgtgggattgcaagtctccagttgaaccttttgacgctaagggtgcaacagtaaaccttgagcttcctccagtcatggttcgtgcaccatatgacaaagggtttgttgttcttagcatcttgctgcagctggcgttcagctttggtggcttgatgtaccaaatcaataagacatcggtacggctgaaactcaacaatgcgctgaatgctgcggtgtaatccagccatgaaacgtgcaatggtttgctcttcgtcttcatacacattggctcta

SEQ ID NO: 174015 - DNA, 365 bp, Zea Mays
gacaatttaagggctttaccttgcagcatgtggaccaagccaagaacgaggaggccgatgcattggccaaagcagccgccagaggcgaggccctaccctccgacgtgttctaccatgtcatcggcacgccagccgtccacagtccagagggcctacaaataaccaacgacactgagggccaccgcatagtcaacctcatcatgaccgaagattggcaggcaccaatcaccctgttcctgcagggatattaccatccaagcgacatcaacgaggccaagcgcctcaagcaccacagccgagacttcgcactcattgagggccaactttacaagaagggggtcagtcaacccatgcttaaatgcgtc

SEQ ID NO: 174016 - DNA, 673 bp, Zea Mays
cctttttcctgagtgcatcgagtatcatcccgttggctctttccacctgcccattagctcttgggtgtgccactgatgcatacttgatctggatgctcctctgctcgcagaagtcaaagaactctgaactagtgaaattagatcccaggtctgtaatgatgctattaggtattccaaacttgaacattatttcatggatgaattgcctttgctgaggtcaaagaggcgatgggcttgtattctatccactttgtgaatttgtcaatggcgactagtatgtgggtatccctcccatgagctttcttgaagagcccaatcatgtccagccccagcatgcaaatgaccaggtcacaggaatagtctgcaactgttgtgcaggtagatgctgcagctttgataagaactggcacacctcgcacttctggactaactcggctgcatcattctttgttgtcggccaataaaacctggacttgaaagcctttcctaccagagtccttgacgctgcatgtacgccacactgctcgatatgaatctcatctaacagctgctttccagtagccgagtggatgcacttcatgaggacccctcctacacctcttctatacagcaggccccctataatggtatagtgggccgactgtcttgcgatgcggtctgccatagctttgtt

SEQ ID NO: 174017 - DNA, 486 bp, Zea Mays
tgaatcatgagcttctctcaaaataagttagcgcaggtgttcgatttccggtacgcagattctgttcttaaaccatactgtgccttgatcatcctccgtgaaatctggggatttacccatcccaatcaaagttttaatttccttgattttctcatcggactcttgtcctttacaaatctcttcttccaaagtagattcaacttccataattgttgcttctacattattgagcataccaaggttgagttgttccatttcccagcacaattcctgtgacatcaaatgagtagtgatgttgttcacttgacccttgcggctcaaagcatcagccactacatttgcttttcttgggtgatattgtatttccaaatcatagtccttaattaactcaagccatcttctctgtcttaggtcgagttccttctgagtgaatatatatttcaagcttttgtgatccgtgaagattttgaacttgtttccaatcat

SEQ ID NO: 174018 - DNA, 791 bp, Zea Mays
tatactttgccttcattgccataagacgtgtaaccacctgcaacacggtcacagtggtgtcgtcatgcactttttcctctgacgcgtgaagaagcttataaaactcctgcatttcctctgttgtaccctgttccgaggccaatgttggatactctctactaatatcagccaccaagtcatccatccgatcctcctcatcatcatcaattctttctgactctgtgatattctgctctacttctccatgtgagcgccacacaagatagttaggcataaacccattcttgcaaaggtgatgctccagttcttcgatttttctcacatacttaaaattccgacacttggtacacggacacttcaccacacgaggtccaccggaaaatgcgagatccacgaattgttttgcaaccctaacccattcctttgagtgacctagagtcacgctattgaatccatcatacatcgcccttcttctattgtcatccatttccaaaactaaataactcaatgtataaaaaatatgtaaataaacatcattaagcatacaaacataaataaaaaatgtgtaaatgaacatcattaagccatatgtacaatttgttacttcaacaagagcacaagatactaaccctgtctgaaccaagtccccttgtaaatgatgctatcgactcaccgccctgctacccagtacctagccacctagaaaaataactatacgcaactgcaagtttttttctttctattcttactttaggacatctgcaacttctgaattcaaatgaagaaacaac

SEQ ID NO: 174019 - DNA, 814 bp, Zea Mays
ttatcttgaagagattttatcttatcctaatagatctaactaatctcaaaagattctatctcattcttagaacctcatcttgtcctaataagcatacttatccccaaccacttttgcttatctcacaatagtgtaacaaacatgatttatgccaaaataaattaagtagatcttatatagtctaatctaattacaccaatttaattttgattccatctaatctgatcagatttaatctaatggacaaacatgttaggtaatactggtaaaataagattggatcctactcttataaatatgttttaatctattggtgacttagatcaacttggccatacacaacaatttgacctatataacaagttacctaacttatccaaccaatctagaagcaaacaaccaaaactacattctgactaatctcgttcaacttatagctatccactaaattagctacacaacccactaatttgttacctacggacctatattaacctcttgtccctaattcggatgaagacaccaagactcaagaagaaggagatcaaactcgttgaggaatgataagagtcaagccatacctccaaaggaatcaagatccacaatccgggatggagtctttctttaccctgctctttcttgctcacacctattcatcgctctaggacatcttttatcctacataatggggcggccatacatatgccttcctaatcacctgataatttgatatagtctgaaaaaaaaatattttggtactagaactaattagaatcttaaatctagactacaagctaaacttgttgtatcctct

SEQ ID NO: 174020 - DNA, 615 bp, Zea Mays
cgtcaatcggtccacaatgacccaaattgaatcatgatgccgagaggtgttgggcagacctaaaatgaaatccatgctgatgtcatcccatttccatgaagatattgataggggttgcaaggcaccagctgattttaagtggcttgcctttaccctctgacatgtgtcacattccgatacatattgggctatttccctcttcattctggtccaccaatataggggcttcagatcatggtacatcttggtgcttcccgggtgcatggagaatttggagagatgagcctcatccaagattttcttcttgaggtctttatttttaggaaccaccaatctgtcttcaaaccatagtatccctttgttgtcttgacgaaagcacttatacttctccactttttgatgaagattctccttgatgatttgcactccgttgtcattgagttgggccataattatctggtcttgcaaggttggctcaatggagatgtgagacaaggtaccagaaggaattacatcgatcttcatcttgctcaactcgtcacatagggtattgatgtgagaatccatcatcatacaattgcattatgacttccgactcaaggcatcagctaccac

SEQ ID NO: 174021 - DNA, 776 bp, Zea Mays
ttcaacctattggtgaccgttctttttggccgaaggtggatttttcaaaggaggtatgtgcaccaatggctaaaagaacggttggacgacaaaggaaaaacagaatgaagagttgtctagagggtggcagtgggacaaaaagaaaggtcacacagaatgctcaaggaacaactaagataaaaagacagtacacttgtccaagctgtggtcaactaggtcatcggaagaccagttataaatgccctttgaatggaacaaagaagaggttaagactccatttattaattgaccaatgtttaattgaccaatgttttactgtttaattgaccaatgttttactttgtaggaagaggaaaccaaggaagaatactacgaaaaattagatcccgaaagagttgcggacttctacatcacaacctagtacttcaaataaagatgtagaaactggtggcgatgaactagtgcttgttcaaaccggtggccaagcagacagcaatgctgatgcagatctagtgcttgttcaaaccggtggccatgaagacagcaatgctgatgcagatctagtccgtgttgaaactggtggccaagcagaacttgtgcgtgttgaaacccctcctagttatccacccagaagtttgaagtggcttgtgaagaaaattactccgaggaagaaaatgaagcgtgatgtgcaaagggagtagctagaagtggcttgtgaaatctgtgaaacaatctgttttctgttctccacccagaagcgtgaagcgtgaagtggc

SEQ ID NO: 174022 - DNA, 419 bp, Zea Mays
ctcggataagatcccagatctggaagaattccgagaaagcaatagaggaggaattcccccctaatgtcaagaaccaaactgctatctttaattgcttcctagacagttcttgacctcacaaccttcttgttaacagcagcaaacaatgaaggagcccaatctgcaattgttttgtcgtgtaaccagcgatcgatccaaaatttggtgtcggttccactgcccaccactaactgaaccgatccagcaaaaagggtagcaacattggaatgaacttggacatccaagaaagcccacgaccactcatgttgtattttcttttaacaacaacatctcatattgagagagcggcacataacttcaagatttggaatacctaaaccacccaaattcaaaggtaaatacaccttctgccaacccac

SEQ ID NO: 174023 - DNA, 479 bp, Zea Mays
cggcgaggaggcaccttgggagggagaaggacagccgaggaagaggagtgtccccgcgggggaaggggacttgtcacctcgggaggaagaacgtggagctgctgtcgagcttggggaccttgcggcgatggcattgggacgccatctgcggtgatcgccagctgcggtcgagattgaagggggacgggtgtcgccgatggtggggtgaggccggtcggtggcaaagggactccccttccgtggagagcgtggatcgagagccggtgcgtcgatcctgagcatctgattcgccttccatggagagcgcgacgcgaacgcagatgggaatatggggagagagcagggattgcggcgatccggcggatgattcgccttccatggagagcgcggcgcgaacgcggattgagaggatggggcgaggagagagcagggattgaggcgattctggggagagagcgaagacgggggcgtgcgcggcg

SEQ ID NO: 174024 - DNA, 518 bp, Zea Mays
tagaaaagcaattagaaattccctagaaaatagaaaagcactttcagcccaagtcggcccattaggcccagccccgcgctcgcccgcgcctgcgtgccctctgtgtctgacaggcgggtcccgcctgtcagcgccaacctgcgcgctctcccccctctttccctctcgctgcccaatgggctagtcctgtcggcgtcgttcctctcgcacgcgcgccctctctctctctctcactctcactctgtcccgcggacccacccgtcagtcagtccccaacctcccgcccacgtccctcgctgtggacgcgcccacgatcgcgtgttctccggccacgttctcgagcccgtgctccttttgaagccacatgctgcttgcccacttcccctcgctaacttgcgccctcagccgaactctctcaccccctctcttgccctgtgcacgcgaccagacaagctccaccgccgctcatcgatgaccaccgtccgttctgcgcccgccatcgagcccgctccctgatc

SEQ ID NO: 174025 - DNA, 660 bp, Zea Mays
gaacattcagcccttaaaggataggacctaccttgcttatttgtacagcggtgtcaacgactctacccgggtcacgaacagaaaaattctcactgaagatctgatgagtcgactggacatgatcctgaggggtagagtttcaaatgctggtgctcctgtggcctattctgcatggaacctgccaccacgtaggccattctctgagtttgtgtccaaccctcctgtttgtgacggtagcttgggtcttagagtgcgaccctcttcttaggacattgaggctttgattgctccacttcagagtcttccagaggatgagaagcaaactcattttgatatgccggctagcactgatgacgtggagatagatgctgtgcttagcttgctggctggggaatcatccgattcaacccacaccgagccaatggccatcacagctgggcaagaacttggtgaagaggtggaaactcggagacccgaaggcgcccacccaaagcgtccatgccgagtgagccgcccgactgcacctatcgaggaaaaaaggaagaagaggcgacttcgacgactgtcttacttggaccagggtgcaggcccttctgctctggttcctaatgatgtaccggcagaggcccatcctgaggttgatggcaagggttgtgatcg

SEQ ID NO: 174026 - DNA, 304 bp, Zea Mays
caaaataaccttcatcagaaaacatcttcatatcaaaacaataaaaaagttaagggaagaattttaccttaaagttagaataaaataagctactggcgatatgctgccgtcggtatctgctgagatcagcttcgagcttcaggaagccaacacttttcgataaagtgctgacaactttcgccctagtccggtctcgaaggcaacctaagctctcttcgtctataccaccgaagagcagcgcccctggctggtacccgcaagatatagcatagtccttcagctcttctttttcagccttagacaa

SEQ ID NO: 174027 - DNA, 493 bp, Zea Mays
aaagaaatggaaataggaaaataaaaaagggaaaatcgcctaccacatgggccaaattgccctggtcggcccatttgcctcccccgcgccagcccaattgccaccttcgcgctgaccggtgggtcaggtggtcagcctccttatccgagcacgcacgcttgcgctcagtcactggtgtgggggacccagttgccagttcctccctcccccaaacgagatttgttagcaccgactgcgtgaacttcagggaaaacaggctcgtcgtgatccctccgcctcctaatccgcgagcttcgcgaagatataaacccgatatccccgtgacctgaagcccgaccgctataagtcatcgccctgctcgattcacctcatctattgaaaccactgagggcctcgccgctgtgttgtgttcatgcgtgggcatatgcgagccaccgcccatgttacacgaccattgttgcggtcggtctcttggtcgggaggattcacgggg

SEQ ID NO: 174028 - DNA, 630 bp, Zea Mays
aactcctccctctgtctctggatcaagacgaatgccatctccttccatcgccggcgaatctccagagtcggccatctccaactccaattagttatgcaggcttagtggtcttttttcgaatgaaaggaaatcacggatactatacaagtaaccgcatccacgtttacagggtctccccattatttccgaaaccgtcccgatattatggcgatgtcaatgtaaaactaatatccataatacactatttacgcacaatgactcaacgttctatgccaaacggtatatactatttatgcaactattatgctgtttcggttttatgccatagctttcaaaatcttatgctacattttttttacctgccgccattacttcccatgcaagatccataaattacgcgcccacgtatcatagtaatcatgtttgcatgtggaaattattccctataatttcacacctttcccttatgtttaccgccttgccattcaaacaaccgcgtaacggcgttgtctctcctgcatgccgcctctcagcactacattaaacacaggcgcgcctgtctcagcggaccagacctcggaaccgacctgggcttcctttaatatccgaagcccagggctcccgttatac

SEQ ID NO: 174029 - DNA, 609 bp, Zea Mays
gttgggattaattgtttgtttcatttatatttgaagtgctaaactcaaacaaaaattcaaatttgagttcaaagtgaaaattaaaaaaaaaacctatgcttgggccgattttctcctcggcccaggattcctccgtgcggcccatctcccctggcgtgcgcgctcctcagccttgccttgctccatcgcctcgtggatgactggtgggcctcgctcacccaaaccctcactcccactgatgtgtgggaccaatcagtcggaggcttcttccagcctgaaacagaatcgcgcaaaagctggaaccgaaggtcgcggcggggctccgtgatctgcgctggctgatgtggttacgagtcttcgcgattcttaagcacgggctctaaccgcccctgtataaagccatgtgccgcacctctgggccaccatcgccatgggcaaacaacgtacggggggagggccgccgctggagatctctgcccacggtggtgaaacatcctcggtgcatcgacctagggcttcaccgcgactcgttggagctttcgagaagtcgtcagactcggagagttgatagcgcacaagtaattgctcgccagacgttctgcttccgcc

SEQ ID NO: 174030 - DNA, 596 bp, Zea Mays
ctggagttagcatatcatgaccatggttggttttgaagatctcaactgtttagcttgtgcgccattaatcaagtgtccgtactagaattacagtttcttggacaatgactcaggtggtgtacaatagaaaaatctgggagtgtgcaacggaattcttaacacgtactgcagtcgttttcttaacagtacagtgatcttggacctagtatgacaccaaataaaactgcattgctgttgaaagctcctgttctttttttgcctgtgttccagataagcctctaaggatcagctgtggtcgaatggaatacttttactgcagacagcaagagttgaagtgatcattcattgtgcacttaatattctgtctgcaacgccagcttgcaggggatgacgaagcgagcacagcaaccactccttccaccacccgccaattcagcaggtgtgttgggtggccattcatcctcccatcctttctcgtctacgagaaagcaagccattctgttaggaaaagagattgtgaagtggactctgcactgggtggggctgatggttgcagcttaacaccccctccacaaccataaaatgcacatgttaat

SEQ ID NO: 174031 - DNA, 874 bp, Zea Mays
ccacttcgcatgagccactagtccagctcgcgcctggatgcgcttgacgatgtcttgtgggaccccaccgtctgggtctcacccgcccacacctctcactgctatcaccgccacgtggggcccgtgttctagattcgtttcgtcctcgccatggatatgcttcaaaccaacgcagagatgacagaaattgttgttgttcctaggtctatcccgaatgaaccattggcggggagtataaaggcagccctaggtcaccctgtccatagatcgaatcgacaaaagtagaaccgagtgttgggaggctcgtgatggtcaccgtgtgggggatagatatcccccgggtccactagaaggcgaacgatccttgcatggggcaacgagccagttaccccgcaaggccatctcatcgtgggccgggcaaagactacgagtggaatgggccaacccgacaagacaatggactcgagcccagattgtccgtcggatcgtgcactaccccaagaaaccattcgactttccagcgcctgccaccctcgaatgtcaggatgattcagggaagagttggcgagtttttctgaagattggttaagtcggttcgctattaattaggagatatactggaaaaacgtcatcaccgtgtacgtagggagtgccccatggtcgtgtatataaggcccagggggaaccccatcattttcatctcattagcccttctccatttaggagacaccacttgtaacacaccacatacgaacccatcccaggaagtagggtgttacacctctcaaagcggcctgaacctacagaaaatcgtctctctatctcgtgcccctagtacgaaccatcgagctacaatcaacaacattgtcctacc

SEQ ID NO: 174032 - DNA, 1397 bp, Zea Mays
taggcatcagttatgtctctaacaatttgtgaaaatatacactatatgtcagtacgctgtgaataaaagaaattacagatatctggaagatcgccttgatgccttaaccattcttatatgttttgatcgtatcctccctaaagtcatccattaaatctgcactttaacaatatgtaagtttaacagtggatactataacatatcatgtatttaatgtaatgagtttgacatcttaacttacccgtttctggattatcatgttgtagtattgcaagccactccttatatgcatcaattaacacttctatattttcttcatcaacatttgtctgctgccttggacgcttgatgggagttatgcttacctctagatcactgggtggatcttttgtgagcacaaaacttatttttctctcgtccacattatcagatatcatggcctcttcttggtggatgtaatcaagtgccactagcctagatcgatcaatgccacatcgtttcttgtaaaacaagaaatccctttcagaatatccaagttttgattttatgtacaccacgttgtaaaaggcaacataagctttatcaatatttaatgtgacaatctcttttctaggttgtgctcccatgcaatggaatttcaaggtccatatctcaccagtcaacctgccacacaaatatattttaagcaaacaatgactaaaatagtgctgtaaaatatttcttgcaaaaattaagaggtatgaaaacaatatacactaattatgatctgcgccaaggacaaagcagtagaaaacaatatgtgtagatagatttttacttgtcaggaagatcaaagaagacgttcttcccagccataatctcgtccacaatccgagtaccaagttggctaccattgtcattggtgcacagattagcttcattgcttgtcggtggcaatcctccttgagtcgtcatcataggtcaggaaaatagatgttgactggatagggaatgaaaaaaatcatgtaagaggacatgccctgcttatatcacaggttacacaaaaaaggttaacgagatgcttctagcaaaaaggttaatgatgagtacatcctccactattactcgttagcaaagacgtaattggcctagttggcccaattgtagtcggatggtgaccgtgtgagcctcagaattatcccacctcgcttaacttgggaagaggaagccactttaaaagggagtcacccttccctcattggactagtcttttggggtgattgggcctttccctgagttaagtgtgcttaatgaactgttgggctccggacaaccctaatttgttgggcctctgccaaccccacctgggctgggtgtatcagttaatgagatgcttatatcactgattgaaattgaaa

SEQ ID NO: 174033 - DNA, 314 bp, Zea Mays
gccgccatgtcgcgaacaggaagacgggcaggaagaggaaggtggcgtcgaggtggagccggcgcggcggcggcatgggaatgcgcggcagcgtgtggggagatggagggggagcggtaggcggggggacatggtaaggcagccgcggcacaagtgtgagcgggtgtggcggcgtcaggtggtggatttggtggctaatcctgctccggcctgcgcgctctgctctagcactcgcctcaactactctcagctccgctcactgcgctgccgcggcatccggcatacttgcgttgcgtccatctccatccgccaag

SEQ ID NO: 174034 - DNA, 445 bp, Zea Mays
agaatccccgagcggtggcccatgaattttacatggcgcggtggttgtcggagaaagaaaagagcactgtcgcaagagattggtggctttcaccgtggcggctcaccggcgatcaccggatatgtgtaatatgagctactgcgacgtggtaagacaccaaggcacgtggcgcacaatcgttgagcggcgaactccggtgagctcatccgaatcggccgtgagttaggcggacacggcggccggagtgaacagtggctcaagttcatccacacggcgatatttactaccccgagcaacaatcaatacttacttgagcacgaatcgtagcgtttgtcgcaaatccgagcgtgcgactcactggcgacgaggttctctgaacctgggatatttccagtacactgtaccatcgcgctgcccattcagttagtctaggagaccactttgc

SEQ ID NO: 174035 - DNA, 1006 bp, Zea Mays
aaataagaaaaacagatcagtaagtcctgtaacattgactaaatatcaatattatgtgtcgaagtgcttgtgtccctcaccgactccattatcaccatcacccaaatatcatgtcccctgacccacttcttgatcctgatctgaagttactgattgtcctgtaacctccttgattgctgaaacttccttcacaccgtccccattccccacataaagttactgacggtcctgcatcctgaaattgcagcactttgtgcacccagtcacatttcatggggttgtgttgcattaaccagtcataccccaaaatagcatcaaaagcagcactctcatgtatgtacaataaaaatggccatgagaccaccactccaagttcttgaccatagaattgcaaaccatagcatgcccactggccactctcaccttcactggttggcactcttccaccccaggtctaactgatgcaccatgtgttccctaataaaagttaaggagctgtctgaatccaccagcatcaacataatattcttccccacaatagatctcaccttcataatgtggttacggtcagaaccagatacaacctggaatcacaggtgacaacacacctctcctttttcatcctattgctccaattgccgcaacacctcatcagatagcaccatctatccatcatcagcaacaacatcatttaactaaacctgccccctcttggcacacttaacaaatggccaggctcaaatttctcacaacaggcgtagcaaagcccatttaaccttcgaaactccctatcttgcctttctctatacaagtctccaacagcctgttgaaccttcccctccatcctatttccaggctgatactgcttcatggcatacccctgtcgagcacctctatacattcccttgtctagcacatcttgttgcagctgagccagtaacacaaccttgtccatagtagtgggctgatgcatttgaaccacaccctgaatcttcatattcagtcc

SEQ ID NO: 174036 - DNA, 984 bp, Zea Mays
gttgattcctataatgagcggggtctcttttataaaaccaccagctgaaggggtatccagaaaccctggccgttggatcaacgatgcacgtctcagattagaacctagccttcccgatttccaatcgcacgatccggaacaagcggcccagatttaaaatcgtgaagattcgtctgatacgaccgattaagatctgagggttggaatctaaatgggtcaacacatcctaatctcacccgtcccgtggccatccaacggttgagggatcgtcttcccccaacagagccaagctggggagcgcccctgcccatggcggccatctcgccggtgcttcgccaaattctaccgccccggtgactaagttcgagtaagcacgtgtggaaaacgaaattgatggctaggagaacctggaggaggtgtctcaccacccgagaggacggcgacgcggtcagtcgacggtgcagagccgaccgcggacaccggtgaggaatcagccaagctccggcaacccacgcagtcttcaatgcccggcgaggagacccggttcgccgcacgcacaggaagcccctggtgactagcgcgcaaacccgcagagcaccctcccagcgacactcgccagttctctctcgctatttccaacgtcaagctctagtcgccaatggcgattgggtcgtcaccaggaacggggcgtggccgattatttttataggcacgacgaggcttcaggatcctggcggtcgcggatggggagcttgcgtcagcgcaacagttgcggccgaatcaggcggcatctacggcgttggcgacgagcactttacggggtttgttgagccggccgcgtgaatcgtggatcgtgcaagcctgctgcaaggcgcagggaggagaggcaccagcgcataggggcggcggacgtagcctaggatctcggcgtggatttcggatcgagcggaaccacccgagctctggcggtgcgatcccaggcgc

SEQ ID NO: 174037 - DNA, 509 bp, Zea Mays
cgtgaagcttgaggaggacctaaggacgctagaacaattgatcaagacactgggactgacctggaataggctggccgcggtgaagtgttcttgcggtgagttcaaacccgatttgcgggaaaattagaaattcgagctcactggtgattgactgggagcaatactggtcggggtggtgtgggataatgtggtggagctggccacgggctcaatttatagaaggagcgagcggtgacgagcaatttgggcagattgcgctggcggccggagatgaagaagaaggcactggccgcgtgagtgcgtgtccacagtcgtggcgagctcaccggcgacgatgggactgttatagggagtcacagcgatgcggtggaaagactcggacacgcggcaggcacagagatggaacgacggcggcgagcagctttatctacggcggtgagcaagggggaatgaattacggctagccggaatggcttccaagtcaccggcggcgaagatattttgacccc

SEQ ID NO: 174038 - DNA, 427 bp, Zea Mays
aacatacacggaatgcttcggtgtcggccaattctcctaactgtgctaagaactggtctatgtgctcacgcatgctcttttcttggtcacccgaaaactttgcgaattcaggtattctggtcccttgtgggtatgggagccggtcaaactggctatcataaggtctccgatatgactgcccccctgggactatactaactccaagcttatctcggaacgccccagctatttcctcccttactatatcaatggcagccggtgggagaccaccggctctttgatccaatatgggtgagtttgtttggatgttggtatgttgttttcctccccattggtttgggttttgcagcgcgttaatgcatgccctatgaggttcataggactggccattcctttctggcactctaggggccggaaagtactcact

SEQ ID NO: 174039 - DNA, 626 bp, Zea Mays
ataccaaccgcatattatgcttgacaaatggccagcaaaaagaccacatgaaccaagagaaaagccaaaggcatgggccatggaggggaggggggagcacaagacgcgcgtcctgactactactagctcaggatgatgcgtcgggggagaactgaggaaaaggtggtggtgtcgccgagacgagcgacgacacaagaaggttctcggtgcagcgtcgcgtcgcgtcggccattctccaagaatttcaattgctagcgttagcgtgctgtgcatggcatggcatgatggagggtcgcccacgggaacttattttaaggggcccttcattccgtccaggaacatggcttaatgttaaaaaaaaaactactccgcattttaaatttccccgcggcgtcctagcacgtgcatggacagacgaaacacatacttgtagctgtaccaaggagtgatgatcacagtggagtggagtggagtacgtgcctctgctgacttggaaaggtcactgagctcattttgctcgtgtcttttggtacaagtacaatacatacaggccgtggtcaccttgacggccattagactccagctccagcgctgctgacgtttctttattcttgtgtgacactggg

SEQ ID NO: 174040 - DNA, 885 bp, Zea Mays
ccgaagcaaagagtgggaaccgatggcgagccgtccagaggcatcggaggctcctggaggcatcatcgtatgggaatgggggcctcgcccatgggtttcgcttcatgaagtgctctgcatgtcacctcggtgtcctcatgaacgagagaggatgctgtcagaggacgggcctcgccggatcgtccttgcgctgatgaccgaacagggctttgaagagcgagacctaagagctcttttcgatggtgaggatcttaggcttatgttgtttaattttcgtaggctggcctgatcccgaaagtggaacctttgtaatatttgacattggcatagccgtgccttagcgaattgaacgctgtcctcgcccccattcgccgagggacgactatgcgagtcttcggttgttgaatgtactaaggctttcttcttttttctgtgagtggtgatttcgcgctcctaggtgttttttcgtgcttgtgctaatctggctgcacccttaggcggatttttgctcggatagattctgcgtctctcagatgacttcgcacccttatgtgactttttgctcggatagattatgcgcctcttagacgacttcagacccttatgtgttttggcacacttattgtgctaatccggctgcaccatttagcagctttttgctcggatagattctatgtctgtcagacgacttcacacccttaggttgtttggcacacttattgtgccaatccagttgcacccttaggcgactttttgctcagatgtatcaatttgtcacacacgatggctaacttatgacttgccgtcgtggtttgtcctgtcgtcgaatggcaaaggccgaccgtgtggccttttccgacttttttaggtcgtacttcctttctt

SEQ ID NO: 174041 - DNA, 720 bp, Zea Mays
agtcaaccaaaaggaacgaatacatgtttaaagacaggaatattggaccaaacgaaacatttgcttcaaattttcgctatagcaactagatttcaaaaagaacaagaaaaatgaaaaccaaagatgcaaatatctcaaggatcaagatgcacctaattgacagcaaaaactagctaaacacactaacacgggacagccgacaggcgacacatatcaagcgctaaactgcactatttttctctgtgctctattttaatttaccccttgtaaatgttttgcgcgttttatttgatttaccactgcgccagtaactttgtgcacgtttgacttactatccttgttcaggcacgtgctgcatcaacagcaaggctctgaacatgcagatgcaaaacgagctcattttagacacacagtaaacttagacttgccacggttactagatggccctataaaatcttcgttccccaccatagcagtcttcagatcaatcaactagcaagtcgccttcttcccattcctctcctccccatcaagcaaaagacactgtgaaccgaaaggcagcaacgaccggtccgacgatccaccaataatcgccatgggattcttccagggcaagacctccaagcagaccgcgagggtcaagaagcttctcgggctcgccctgtcgcgcctcgccattgcacgtcgtccccgccttgctcgcaggtccatctaccgtag

SEQ ID NO: 174042 - DNA, 780 bp, Zea Mays
aggggtacaagtttgattaagtgactaagcattggtgctgtacagaaattggagaaaaatagacatgaagttggactgtcagtcaaccttaagactgaatcttaaccatcagtgaaattggatgaactttgagatcgatttgtgggggatttagtggatgattgagcaaggtctttgtaacaaagttgtagctggtacattggacaacaactttgatacaggcaggagagtgagtagccacacaaaatttggagaatgaggccctgcaagttgctcggacagaaggactgacgaagatcaccaaggtatagtggtcggaaagatctccagtaccgtaaacctgacgccggtgatcctccgccgcaattcgtgctcgcctaggagattcatgccacgcgagagatagataacgccgggacggggtgaaaagatccagggaggggtgaacccagtcactggtcagaccggccatcgtgtccagctgtggttagtcacgttggcatcaccggagctcaacatttctccggccgtgacacgcaacgatctctcctccgtgtcgtaagggtcatggcaagcaaccggctatttgccctgaaccgtttccctcttgcgcgccatggtgagcaggccaccgtaaaatatcccggccacgatgacctcgatttcgatccaaaatttgcgatgaacttggctgaagtctataaattggagacacccctattccgcctactcgttacgaacccagtgaaccactcctcactcccgatcgtccaccgtagc

SEQ ID NO: 174043 - DNA, 592 bp, Zea Mays
aaagactctgaagagccgttgcatgaacacatagatgtgagtatactcgcttttgtgacacggctcttggccattaagtccaagtacttttttctcgaacaattgttacaatgagattttaaagttattcggagatgtgctcccacatcctaataagttgcctaaagacatgtaccattcaaagacaattatcaaaggtctcggtatggattatgagaagattgatgtgtgcaaaaataattgtatgcttttcatgaaggatcatgcggaagagaaaaaatgtctgaaatgtggacaatttagatttgtggaagttgttaatgatgagagtgagaaggtgatgacagatgttgcacataagtagctccgctacttgccactaactcctcgagtgaaatggatgtttctatctaaaaaaccgctatgcacatgcgatggcacaaagaaggtgtccgtgataacgatgacctaatcgtgcactcttcagatggggatgcatggaaggctcttgacacgttttatcccaactttgcagctgatccgaggaatgttcgaatccgcctcgcgaccgatggcttcacaccttttggtc

SEQ ID NO: 174044 - DNA, 924 bp, Zea Mays
gtatttatgagggctcgaaaaaagttacactcttgatgcatcacatcgatgttgtacatcagaatcaatgactcaacataaggaagctcccataagtcacatacgtgagtccagttatgctcctcaccaaaaccttgaaaccttttcccactgtcatctaggacaagtttcctatgctcttatgtaatttctatcccaccatgtcacttgggcggtcccttcgtgacggtggtgccctttttaaactcctttctctgccatctgaacagtgattcaagggtagaaaacatatatggcaatcaaaataacatatcttcccaccaacactaagacgaaaacaatctatatctttaccacaaataagacatgtcaatctaccatgcacgctccatgtagcccaaacatcatatgcaataaaatcatgaatcgagaacggatacgcaacccgaagattgaatttctgcttcttgaaggagtcatatgcttccactccttcccatagcttctttaacacttccatcagtggctgaaacatcacattgaaccgtacgccaggatgcttgggcccaggtataatgagacataggaacacaaactcgtatttcatgcaaagaataggtggaaggttgtacggcatggcaatgataggccaacacgagtatgacgtagcggtcatattgaaagacgtgaaaccatcagttgccaagctgatacaaatatttcttgcatcgatggcgaactctgaatcaaagttgtcaagagccttccatgcatcaccatctaacgggtgcaccattaacccatgttgtctctctgtatgatctttgtgccacctcatgtgcatagcaatcttcctcgagataaataaatgtttcactctaggagtgagaggcatgtaccaaagttgtttatgtgcaaccttgg

SEQ ID NO: 174045 - DNA, 712 bp, Zea Mays
tctgggtggaacgtgcatggcagattgacgtgtccttatcgtgctaaagatacaaattgtttttgtcttagtgctggtggcaagatatgttactttgattgtcatagatgttttctacccttcaatcaccccttcagaaggaagagaaaggagtttaggaagggcaccatcgtcacgaagggaccacccaagcgacgtagtgggatagaaattacagaagagcataggaaacttgtcctagacgagagtgggaaaaggtatcaaggtattggtgtggagcataactgaactcacatatgtggcttgtgggagcttccttatgctaagtcattgattttgatgcacagcattgatgtcatgcatcaagagagcaactttggtcaagccctcataaatacatgcatggatttccctgataaaacgaaagacaatgacaaggcacacatggacttagtcgtgatatgtgatcgtccaacccaagtgcttagagaaaacggaggcaaaccaaaagctaactattgtctaaaacctaagcaacgaaaagaagtgatgaagtggatgaaggatattaaattccccgatggttatgctgctggttttagaagatatgtgaacttgaagacaatgaagattaatggactgaagagccatgacttccacataattatggaaaggctcatgcctgtaatgtttcgtgggtacatttccgatg

SEQ ID NO: 174046 - DNA, 1079 bp, Zea Mays
cttcttacaggatcttcggcgtcgaagcatatccccaacaatcaccatctgcatcaacaaaggggaaaaatgcagcaaacaagaaaactaatagttcagattcagattcatatgtctctgtctatctccttgacgatgatgatcaaggagatactgatgatgatgacactgaatcttatgagcaaccacaacccctggcaattaaggtgctccttctatcttcaaagttgtggatggcaaatagttgcattgcatttcaatgtttttaatctggtgtttaatatatgctcatgcttttagattcatcttctttatttcatacctcttaattaatatatggtcttgcttttaaatgcacatgactattttttgtggacaatatcctagaagagctagaaacacaacccttgcttcaaagaagaagagaaaccccaacatggctccaggaattaggtttagcaagagagtgagggcaggtccacaactagaggagcaatcttcaaaaaggcttcactctacagagacagatggccacaatgtataggaaccaacagatgctaatgatgacataccaaacagccctactacacctggacttgctgatcatttcagcagagctgtagaggaagacatggcatctgctgctcatgacagtacaggtgatggtgaaggcaacagccctactacacctggacttgctgatcatttcagcagagctgcagaggaagacatagcatctgctgctcatgacagtacaggtgatgctgaaggcaatgtagctagagatgaagaaactgaaggcaagttatagttttttcagtcaaatatggcatctcttttgctgatttgcatgaaacaaaacaatttcattattcaataaatgtgaattctattttgtagctcctacacagcgagcaccaaggagacccagggcagcaactaagggaaaacaactggacaggatgactaaagttatgtaaaggagacttcccatagctgttgaggaaggcaaaaaaggccacatgaacctgttcaagctgccaagtttgcatcagaggctggcatcattattcgggaaa

SEQ ID NO: 174047 - DNA, 353 bp, Zea Mays
gttgttcttcatcatcattaataaagtcatcattaaacaaatgtaccttgtctccttttgccatgaggcaagttggagtgtaggagttgtcgtgaaggttggtgaagagttgtgagcttgaagtagattggatggtgatgtttgccacctcttcctcttcttcggagctagaactttcttcatcggagttccattcttcaccaatgtgggcttggccatatttcttcttcttgaagtatcctttgttcttgccccccttttgaacttatcctttttgtactccttcttggcttcttgttcctttttgtttggacaatccgctatgaaatgaccggtttggccacattcataac

SEQ ID NO: 174048 - DNA, 936 bp, Zea Mays
aggatatgtagtacatttaatcagactgtacttaacatcgctgtaatgaccctgtaaagggaatgttctggagctgtagcagataaccggggcataacagtacttagaggggcacacccacatgctcggttacctataaataacctcacaatgtacatagacgagacacgcttaccaagacgctatagtccctaagctacttactgttttgttgagcacttgtgttccctctttgtcgagtgtttgagcccacctaaccacgtgtcagtcggtcctaacgggtgtctagtgtgtaatggtaaaaaaagaggaatcgacagggaagaagtgagtaataatgctatctcacatgtcacaccactggtatagttaagttcttttgggcattagcaaggactgaggttcgaaaaaggcaatgtgacctttgagagtctgaattgcgtgcagtttcgactaccaatttcagtatgaaacatggtgtatttatttatttatttaaataaaaaggtttgtaggcacataattaaagtgatttcacggtgacctactaaaggtccatttggtttgggtgggggatggagcggtcggagcggagtgactccaaatcaggaatattctcattagatctgggatgagctcgctctaaaaaacggtggaatcccactgttccacttctctctctttatggtgggcccaaacagaaaatagaattattctactccgctcccaaaatctggaatgtagctgctccgctctctaaagctggaatagaaccgctctattcccaaccaaatgaatcataacccgaaaggaccgggtttttttttcttgcaccgcataattgaggatagcatggaggagttttagggctgtgctattttctcaaaatgttttgagcagctgctggagggtaattatttatgcaatcctcaaaat

SEQ ID NO: 174049 - DNA, 329 bp, Zea Mays
aacgcttttgttcgatgacctgggagaggtagggtatacacgatggcgacggccaggggattggtgcagtgtggagaggctacaacgacgatgttaccctgtgggtcagatgtcggtatgctgtaactccactggctgcgttactggcgccaggattccttgaagacagcaacgcagttcatccaagtttggtgggagcaactcaccggatacccatgaggacaattggtgatcatgagcaggacacaccacacattctccaaagccatgtaagttcagtaagataatgtcagattttgtgcatatttgttatactgtccgtgcaagtt

SEQ ID NO: 174050 - DNA, 819 bp, Zea Mays
tcaccggaggattcccctttgccacgccagtggataatccgcgcccgcatctacataaaacaaaattcactgccccccgagccgattgagataaaaattatcctggattggggtcccagcggcactggccaccacgatccacggccttggtgaagcggtggcggtgcccggccattcgctctaccgaaattcaaattctaacacagcgaaggacagaggagcgtggtagaagtcttgagtgagatggaattgctcaccgattaacagggtcgcgtaggatccggttcttgacgtcgggacgatgatttgctccagacacgaattccggcccgccagtcggttaatccaccccaccgaggcaacgtacgcgtcacgcgtgccctagtactgctccggtagacagccgtcgaggacaaagcgctaggccaatcccacaccgacgctcgcggcactcaccttcccttctccctcaccacgacactctggtggttaattttggtcgccgcagcttggatgcgtttgcgagtagaggatgacggacacggcgaaccagcttttatctatggtcaaggcctttgaggatcccacagtggtggttgagctcacgcccacggagcctgcggcgtccgcggccatcaacggaaggaagccagcttctgacccagctaaaccggacccacacgtcggtcggtcactatggcttgcgggtgagcggatgagaggctgcgacgcgggcccggccggccagaggcagtgcgcgcagggaataaaattgggctgccaacggagaaaaggtatggtgggccacgtgcgcatccg

SEQ ID NO: 174051 - DNA, 547 bp, Zea Mays
ggaggtctagccatggctaggtttaatgccgcggagctggtgactgtgttcggggaaatccagtgaatgggagctatggtggacgttaggaggtggttgagggtgaactgagcacataactgaggggtggagcagggagaactttcaatttaaaggagtcgatcacacatgtcatgaattttggctaagctcgggctcatcggcgtgattagataacttactagagctactctccatggcgcgcaacagtgaaatggctcaaagacagtgacttactgcgtgccacaatcatggcgacatggtgaaacggtccatggcatggcgcaatataggatgatggcaaccactatggcgacaaccgctcaaccacgtcgcatcgcaagtgggcatagtggacaagctgactcagagcctatgttcttcccctgtcgatcttttaccctccctgacttatccacttcacctcgtgcatgaatcttaccgaggcttggctcatggcacgagatatcatcgacgacatggttcatcaaacctgtgatcttgttca

SEQ ID NO: 174052 - DNA, 559 bp, Zea Mays
gttgattttactgaaacccgagggctcatatgcactttagcgcgaccgaaggggtatgatgacatgtggaccgcacgatagaaaccagacggcccagattagaccgtcatcataaccgaaccggtatgcattattggccatgggatccgagatcagcggcccagaatgatccacgtcatcacataccacaagcccttggatggccaatcaacgtcccagattgaatgcgctgaaagggtaccttctgcgaccaatctgagtcgtacaacacgatctaacggtgtcggtgcatattctccaacacgacccttgcccggccgacgttgtgcacgctccggcgtgattcagctcgtagcccgatgacccaaaccctaacctaacgtgagctacatcatgcaggtaaccaggcgaaaccgaagggtgtgcttaccagatttcagtagcgacaggcgctgctggcgacgttggacagcggtccggtggtgaaattctcgccccgacctaaaattcgtcgagcacagaccgcccccagcccaagaacacgacacagagatggccg

SEQ ID NO: 174053 - DNA, 760 bp, Zea Mays
gcaacgcgcggctcggtcaatgcgtaggggacgctgaagttgacggccggtcggactcggcgttggagacggagctcgcgacggcgggtggattgcctagggttcggccgccgcggtggagaagaacgagggctcggtctctgcggtggagaagaacgagggggcggcgccactgcttccacgattccgggtcccttccccggtgaagaagaacaaggcgacgacgtctctgcggtggagaaggcgattccgggtctctgtggtggagaaggtgaatgcgacggcggtggaacgacgggggggagaatctctatggttcggcggccgcggtagagaagaagctcacggcggcgattaatctagggttcgacagccgcggtggagaagaagcatacgacgacgattgagctagggttcggccgccgcgagcgttacgggtgaggtgagctgaaaaaaatgcgtgctcggttgctggattcgtgggcccgatacacgtaaactgctggcgaaatcaacgcgaaggcccatgcaccgacacatggattactgtatcgtaaacggaaacataagacatcgtaatatcaatatttatgtggggactagtacagctgcccagattgcgggaacacaatcttctcgtgggtccggatgcccgaaacttgcgcatatcaaaaagtgtgtaaaccgtaacacgattgagcataacacgtagttataattgacgtaagtaggtggtacagtgagccaaaaaagcctgcgc

SEQ ID NO: 174054 - DNA, 677 bp, Zea Mays
actgcagttgagtgtatctataaggatgtaccgccactagtgttgtgcccgacatcaggtggatgcggtgatcacatggtcgtgctggagggaagcccattggggatgagaaaacatcatcaaattgctagagtagggagtccatcattggtgtcgggtttgatgttgaaacacatgttgaaagtggcctgtgtatcacgatgtgagtagaattcaaccctttccacaaaacttggtaaccattcttccataatgccatgctcatgttggctaagtcccaaaagatgggaccaagagtgcgcgggaactgaacccctaatatgatgtcaaaggaatacagtggaatagcataagcatccatggtgaaaatatctagacccacgcaaagtctaagactgttggcaaggccatgacagtcgatcttgtcgccatttgctacgactacccgacctcggcttgaggagacttccaattgcaatgacaaggcagtgttgaggtggacaaaattatgtgtggagcctgtatccagtaatgcagtgagtactctgtctttcatctttacttgaatatgcatggtgtcctctgatctgatgcctatcgagcatgtagagagataactggttctggctcctcagcaacttcctttatggtagtatcctctacaaagtcagctactt

SEQ ID NO: 174055 - DNA, 312 bp, Zea Mays
tcgaaggctaaaagctacggattttcataaagaaatggcctccaccaaaaaatgaggaaactattttttaaaactcgttcgggttgggaatgaccaccctcccagtataatgcctgatgcacacatcccactgatggctaagagaccaaaacactggtccgagccaagaaaatccctaaaccctagcttcccatgactaacgggcttggtgtcaactgtacacattgcaatggcccaaatgtagggggcacacatgatatcgtaactcgagagtagaagagacatagctaggagattttttaactaatccaa

SEQ ID NO: 174056 - DNA, 1089 bp, Zea Mays
aacaaaatcaaagagggattgtaggacaacaatttttctgcaggcagatgatcatgttgttagacagaaattggagaataaggcgcttcatttagctctgttaggcgccctaaatggaattccaatggtacagtgcctgacaaagattagtaggtgcagtgtatctcgccgccggtgacctcgcactcggattcgcgccggcgctatgattcgcgcctagtaatgcgcggataacgacccttggtgaaaagatctcaccgtggatgaagtcggagcactgtggccgctctgtcgcctcatccacctgcaccgctacgtggccgcgcggccatcgcggtgataatcgtcgttaacccgagcctgccatgctattgccttgtaaccacgtcgtcgttggtcgcaattggtagcctgcttgtcctctgagtcgacgcgccaatgaatgccacggtaacccgtgccattgaacctcccctctctccggccgccagcacatcttctcaaaattgggtgccaccactgatgaactctataaattgatgccctagtgagctccgctaggttattacgcatccaaagcaccacctctcgcctctgatcgttcaccagggcctcccaatttcccatttcccccaaatcagtcagaacgccgccgtgagacatctcaccgtggtcagtcgtctatgggttagttcatgcccttctgtgtgatgttctagtctccctcatgtctcctgttgctcacaggcccgttcgattgaactagaccgccttgaatcgcctagaacacgttggtttgtctccggttttcaccgtcgtcgtgagcagacaaaacctgagccggatttgtgcaattaatggggggatttgtgttgccgagggtggaattaggtgtcggccaaactaggactctggtcgttgagtgccttggccggtataggttcaccggaaggcgtgctcaccggcgatcaccatcggggacctgagtttgcgaagataagaaagaagaaggggctcggtgcacttgtcagtgagacatggaatagtaactcaggactcttcatcagatattcgaacagccgaggtcct

SEQ ID NO: 174057 - DNA, 420 bp, Zea Mays
gatcatcttgcattggcggagtttgcttataacaacagctaccagactagcgtcaagatgtcaccttttgaggctttatatggcaggcggtgtatctcccctctgtgttgggagacattgggagagagatgcctggttggtcctgattgggttcagcagacttctgagaaggttcgggaaattcgtcagaatattttggccactcagagccgttagaagagttatgctgatgtgaggaggcgggacttggaatttgcagtgggtgaccaagtcctcccagggtatcaccttctaaaggagttgttcggttcggtgtctccgaaaaactcagcccgagatacattggaccgttcactatcttggcccaagtgggcagcctaccttatcacttgcaactgccggattccatggaaggggtac

SEQ ID NO: 174058 - DNA, 818 bp, Zea Mays
tgaaaatggactgtcagtcaccactcatgactgaattatgaccaccagttaaagtggaagaactttgagatcaaattgtggggaattgagtgattgtctaagtaagatctttgtaacaaaattgtagttggtaccttggaagacaaaattgatgcaggcaggtgagtgagttgttacatgaaaaatagagatcaaagcgctccaaatcattctgtcagagcgtctgatgaagatcaccatggtacaatgaacagaaaaatatctggtgccgtgaacttgacgccggtgatctacaaccgcaattcgtgcccgcctgggagattcgtgccacaagagaggtagataacgttggggcggggtgacaatatctggggagaggttaatccagtcactggcaggaccggccgtcgtgtctcgccgcggtcagtcgcactggcatcaccggagctcactgttgtctgaccgtgacacgtaatgatcactcctccgtgtcgtaagggtcgtggcaagcagccggttatagtccgtagagcagttccccctagcgcgccacggtgtgcaagccactgtgaaatatcctggccgagtaaccgtgatctcaatccaaaactcatgcccagttcaatcgagatctataaattgaagatatcctctgctccacctctttgttacacgtccaatccacccctagctagcttctatcgtgcaccaccgcgtcctcatttggggtttcccccaaaccagttctccgcgcctccgtgtttcaccgcgtcgtggaccgccatttctaggtccgctcttgttctccttgttcatgt

SEQ ID NO: 174059 - DNA, 782 bp, Zea Mays
cgctttccagttttccctgtgctgcgattgacttttcgttttggtgattatagaagggcgaagggtgggaggttggcgctttagaaaggaaaaacaggcatacatacttgcatcatccattgaccattggtactgctttagaaagaaacaaattttggatgttcgcttcggattaaagtcgactgtttggattagtgcagctataatatatagagacaaaaacgcacagcctaaatagatggaggtttcgcttttcagttttcctgggccgcggttgacttttcgtttttatagcaaccttctggagtagctttcggctttgaacgaaggagcgccggctgggctcccgttctctccccctcacgaccacacctcaatctcacacccacagacaccagcacaaatggcggcaaggagcaaggacaaagaaagaaagattgccccaaaagactcgaaaggcatggcgctacggctgccattgccaaccaagtgtaggaaaggcgggtagcaatgcacgagagagggaccggactgacgcgcccaccattccgtctctcacaggcacagccccgtcgcggtcaaaccctaatgaatcaggccacgcttttgagcgaggcaaagcggtcggatgggaatgggatttgccgaaagatagtacccgtagtctactgctgatagcagtccctcagaccctccctcacatgccaaagcatcagccatcagggagagagacgcccctgttaatactgcaatcactgggctgccgcgttgagcatgttctc

SEQ ID NO: 174060 - DNA, 918 bp, Zea Mays
aactacaaaattttgtttaaagactactgggaaggaattaaagatgcagaacatttgacattggttgacctggaagaagctagtgatattctgaacagaaagcttaactgtaaaggagcaactttagagagatttccagctgatgatcacaagttagatgaaaatacatctcctgataatggtgctaatgatcaaacaagatttccagctgatgatctcaagacacatgaaaatacatctcctgataatggtgccaatgatcaaacaatttcttttgactctgagggcaaacagattaaagcaaacacatcacggaacaacaagtcaaataagagaacctatgttgggtggggttccaaagagctaattggattcttgtcaagtttgggaaaggatacgtcaaaatctcttgatgaactcgaaattattggagttgtcaaggggtacatcaaacagaagaaactgtaccaggatgataagaaacttcgtttcttgtgtgatgataagctgcaacccctctttacaagaagaaaagtgagatgtaaaatgatccgtaagttcttggcagttcatctagcttcaaatgctatttcagaggatgaaagattttgtagttatgaagatgacgatgatgccttagttattaaaaagagacctcggaatagtctagggccaaagattgctaagagggtctcagaaagaagcaagagacattttgcgtcccttactcagaataatatcaacctaatctacctgagaaaaactttagttattagtcttttgaatcagccagacacatttgaacagaaagttattggctgttttgttagagtcaggtgtggcaaaaagacgcacagctatgaaatacctaaaaaggcatacctgcttggaaaagtaataggtatggatcacttgcaa

SEQ ID NO: 174061 - DNA, 452 bp, Zea Mays
cgcggatggaggcccgcttgaccgaggcgacggtgggacgttgcgacgtcttggagcaacgcgtcgccgcgacagaggagaaaacagaggcgcgcctcatctcgttggagatggatcaagcacagattgagtcctggcacccagcagtggagaaacgcctggacaacatctccctcgagctctctcgcgtgaacaaattcatggagcgtgaatcgttcatcaacgatttcgccaagcccggtattctccccaacgccaagacgatgggcgagcgcctacctccacggtgccccaacatcgacgggctagatggccaccacttcgacaactgtaaccaggatcgtggttttgggcctgttttcacccaaccccgcggcctggtcaagggtacgctctatgattctcatcctgctccattcaatgatgatttagatccatggcggggcaacgag

SEQ ID NO: 174062 - DNA, 403 bp, Zea Mays
gtacccattgccatctctaggcgctgcaacaatgccgtagttgtggacgaacttgcggtagtagcctgctaagccgaggaagccacggacggctcgggacgaacgaggagtcggccagtcgaggatggccttcaccttagttgtatccatggcgactccatccacggatatcacatggccgaggtaggcgattgaagaggcaccaaaggagcacttggctcgcttgacgaagagatggtgatggcgtagctcgttgaggacgacccgaaggtgacgaagatgatccgcccatgtcttgctatagaccaaaatgtcgtcaaaaaagacgaggacgaaacggcgcaggaaaggccggagtacatcattcatgagggcctggaacgtagccggggcattgcagagc

SEQ ID NO: 174063 - DNA, 741 bp, Zea Mays
caattccaaagaacgtagcaactttctcacaagatttagccatgtcataaagtgtaagattaagactatgacaagcacatggcatatataaagctcttggattaacatcaagtaatcgcccttgcactccctgacgtatatacactgtatgtatagctgggtggggcccctggaattttggggcccggtgcggccgctccggttgcccgccctcaggaccggcccaggactagtcacaagttagataaaaaaaagaacatatatatagtttaaattagtgaatattggactgctagttagctaataagtactaactggttaaagaaatttctaaaaataccgtagtcgtagacgtgtcagcccgcccgttttttttataaaaatcgctttgatcaaaaccatctaaaatcaacgtgaacataaaattatgacccgttgaggaaacaggaaacagttactttctacgtcctaaactaaacacgaccctttttatcttgttcccacgtgatacttagggtgcgtttggttgagaagtggagaagaatggagcggcgctattctagtttttttggatgtttggtttctaacaaaaaaggagtgaagttttatatgaaaatttaccataaataattggagtgctcccgctccaacaaaatgattggatgcgagggctctctcggatgcgagcgctcttcttccttttctctcctctacactcatatgtctctccaaccaaacaaa

SEQ ID NO: 174064 - DNA, 572 bp, Zea Mays
atcctaccctagtagatatatctaacctaaactagtctaatctcgtcatacccaatctaatctagatcttattcaatctaacgagagctaatcgaatgtggtctacttaatcagactagtgatactggtagaagagattagaccctgctcctataaataagtttgaaatcttagatcaacctgaccctacccaacaacttaatctacaaaacaggttacataactaatcccatctagcatatagctacctactaaacacctctacccatctgttacctacatacctatcttaaccatatgccccaactctgctgatatacactaacctcgaatcaatgaaaccaagaccagaggagaaaagatcaacctcgtcaaggaaggagagaagtcaaactcaatcttcagatgcattaccactcaacacggaattctttcccatcataaacttgcttaccctaggctatttttgccctaacctatcttttatcctacacaataaggtgactatacgtatatatacccatgctttcgtaaccactttctaaataacatgaaacttcttattcataaac

SEQ ID NO: 174065 - DNA, 316 bp, Zea Mays
cttcggtaatataggcccccaacagtagccccttgtggatgagttcgttatttcataacgagcttagatcgcaataatttgtagttgggaggccttgtgctgaaggtacgaaaaacacctccctgaagctcattatgaaatcggttgacacgcatagtgggacccaatggtcattgggtgagataactaaagtgagatgatcacgtgtataaaagggggcggtgcccaacgttatagggtacgacttttgttgcttgtgcttactgctgctagtgctaggccttcgaagctaatttcgaacactgtctgtttgctc

SEQ ID NO: 174066 - DNA, 518 bp, Zea Mays
ccatcccaattgattcactgcatcgtcccgtaggtatttccatcgtctgtgcgcgcgttagggcatcgggtaggggatgggaccctgtaattccaccgccgctgcggtagaccggccgcgccgccgtgccatatgtgcgggggagggtgatgaggggtgtgtcgttggattcatgcccaacggtgtagattagatagggagataacgtttcggtggattggatccggaccatccatccagatcggacgggtgaaaagcaatcgcaggactttaaaatcgggcccgttcaattttgatccaatggctaccagtgcgtaccgattcgatgaatcctagtctaatctctgacgtcggttgttgatcgggcggacctgggccacccgtaccccttcgcgggtacatttttctaaagagaccccaagttttcgcagaatcaacccgccatcccactccactgtgcgctgggtctctggtttcttgcgccgggaaccctgctctttctggtatttgaggcgtag

SEQ ID NO: 174067 - DNA, 641 bp, Zea Mays
ctagccctaggattttcatttttagacttctcctgaactctagctcgtccccggagagttgcctggattcctgcgctttctcaaggagggtaaggacggtctgaatgattgctagttgcacattaaaattgcctactgtctttcatctccagatcaatagtgctttagccgtgcgggtcatcttcacatgcagccgaagaatggcatcggaagaacgaacactagatgtccatgcttgctgaaccatctcattgaatccatcaatttttgtccaaaaagcttcaaatctaaaccccttatagaaactaaaggcagccataccttgcataactaaggggcaatgatccgaggtcatggacccaatggcctgcagatcagcctgggggaagaaatcatgtcattctgtagtcgctaagaacctgtcaatcctagacatcgtaggggcgtcctgttcgtttgaccatgtgtataatttaccgttgaggtcaagctctaaaagctgaaggtaatcaattgtgtggttgaactgtctcatcagtcttctattaattgttcctttgtttttctcccttgctctccttatcatgttaaaatcacctaaaatcagccattccggcttcatcagattacgaatatggcgc

SEQ ID NO: 174068 - DNA, 698 bp, Zea Mays
ggaagtcgagggagtaagtggtagtggggtttatctttacaagagagatagattagcgaataggatggcttaaatctatgcaagttcagtttcactagatatttgtatgtgtgtgccaagctgttgacgaatatataagtatttggtatttggtactgcagtttaataactcgaacattacacactggtggcactgacaggtcattgtctttggtcgttttactccaataatacacaccacagaataatctgattgtggatgaactttaccattcgtataactgctaggtgcacgatgagattattcagaagctgtttggttggccaccggtatttgccacaacacagattcgctgtttggttgccatccagtttgacgcaccaactttttgctttttgtcatttttgagaaagattttcacaactacgcatttcctggtttgaattcagaaaatagatccttacctcggcgccatctatataatctcggtttcatcgttaaattggcgcttacgtctcctgctggtatgacaactttgccacggctctagcttcattttttaattttctattttactatttactcctgtactgctcgtgcattttcaatggcaactcttgctgcaaactgtccagagtgatctgacgtgaggtgtggtcacaatgaggatggcaaacatctcgctccatgcacgaaa

SEQ ID NO: 174069 - DNA, 624 bp, Zea Mays
gtaatatatgttaaatattatcaaagttgatagtagaatttacacgtatgcactatttgtatgtaatacaataaacatctaaaatctatggaggtatactaaaaatacggtagaatcataaatgaagacaaattccttagaattttatagtatgcagcaattgtaggtagggagcggggaagaggaaagaaagaaataagaaatcgaaatagatttgcaatgataaatagtttcatcatgaaaacatagtaaaatgtatttgcacctgctttgcaaggaccaaatatattaccaccttttatatcctgtaacaactcttccaatttcatatgaaatactcttacaggaatatcaggtgcatctgaagatttttggccagagtgttgaagaccatctacaatttcatgccactttgcattgcatgtaaatgttacaaaaaagtcgggtggaccatggactctgcagatggctatgctatcatggtaattttgtatcatatatcgttgtccaccaatgtgtgacgccggaagtacgattgtttttcccatttcgtcaccgtttatgcagcctttactaacagcatctgatatgccttgaaggttttctattcgtaatttatcttga

SEQ ID NO: 174070 - DNA, 1162 bp, Zea Mays
taggctacaatgtaaaactgtattttacacggtcatatacacgctttgcggagcacaagattcaaacatggtcgacccactccgaggtagggaaatgagatgatgttactgtcgggtacataagaacgaggtacccaaagtaaaggcccataacctctctccgacctatttgccgagtaagtctacgaggtgcggcaaacgagcaagttcccgccgagcaagtctacaaggcggagcgaacgaccaagtctccaccgaacaagtccacgaagagggacgaccaagtccccgccaaacaaatctacgaagcgggacgagcaagtctttgccgagcaaatctgcgagcggggagaacgaccaaagatccgacaagcagacctgcaaggaaggaacataggccgacgccgctgggccacgtcggtcgtaacaagacgcgtcatcaccaaaccacatccagaccgtacgtacaacaccaaaaggaccctgataaacacgatgatacaccctcgcatgcgcctcggatatgccctcactaactcgtggggccggtcaacttcggtcgcgggaacctcagcgccgaagtctacaatgacttgtacaccggaaaggccaggataacaccccataccgggtgtatgcctacacgtgctggaaggtaacacaaggggtatgacgcaagatgaagttgtagtgaacacgaccctggacctcaccataagtccactttgcggaacccgccaggtaccgcaacgttgacatcgagcaagctacatgatccgtatggagagcagaaaggatagaacacagtatcgtgagtgcgtcagcgcacgcccccacatacaacaccaggagggctagagcaacctaggggcaacaagccaaggaccccgagtaaaatacaagtcccgactgtaaaggcagccctcgagcgataaaagggctagacaacctcctttctcaacacaagcacactagttgtaacacgctccaagtaatattacgatcagcactacactggattagggctcccgcctgaacaagtctaacccctgtgtcacagctcctagctcagatcctcatgattcaccattcagagttagcccgcgcttgcatcctccactgaacacaattctattgtcctcccggttttcgaaaccatgac

SEQ ID NO: 174071 - DNA, 292 bp, Zea Mays
tgacaaaatagcaagggaatataaagccaaaaccaaacatgcatgtgaaatttccgtcagtgtgcacgtatgtatgttgacaacattaattcatcctttgactatgcatcacggcagtcaggcataacttgctcattccccccaacaagttgcagagaaaaaatattgacgatcgatgaatgccactttgtgcgtgctgtgtggcagtgacacctgtttgtcgacaaaactgtggggggtttcaatggtcacaggaggtaggaataggacgtgtcccctgacccctcccctc

SEQ ID NO: 174072 - DNA, 873 bp, Zea Mays
gacctacagccagggacggacccaaccaaaaatctgaatagagacctaaatgaagggttaattataaagaaacttttgtgattatagtaaataagataaaaagtccactaaactaaaaaattgtgtgggggcatgtcccactactctaaacgtcggtccgcccctgcctacaacccagactactttgaaacatatgttaggctaaactgtgatcatgcatacattatatatcttctgaatttctgcacaaattaaatgatagaaacagccgtggattgcgccaaaaagcaagcaggggaaagctggccttttcgataggtaagttctctatctcaaacttttgtactgaatctccgaaattctcagatatgggtgtcctgtaagatctctttattataggcaatagctattttttaattatccggtcttttgtactaatatgattgcttatgtgacccatgaggaacgaagatcaccctcggaagtcagcagatattaccaccactcatcagttagttgctttctatataatatgtatagaaaaagtgttatcatgactgctagaataattgtgataactatgcagcatgtgaaaaaggaaataaatttcacgaagttctggtttcttcgtcatgaacagccataagctagcatcagccattaattccatgtacgcttaaaccatacacagcctagacgtacgattcattgcgggcagcatatgtgtataagaacatcatattgtaatggtgagaaggtttataattactgattgcaggttcgaagacaatctctttatataattattagtatggggggagaaggtttgctttgatttatccttttcttacacccgattcacgtaaaaaaaac

SEQ ID NO: 174073 - DNA, 720 bp, Zea Mays
taaatctttttcatggtgtaaacaaagtagagctccatcagttcacgcaaaaacgaacgctcaaacaaaactgggccatttgcaggtgctgtcgctggcccagttgggctctatcgttggaccgtgcatgcttaccatcacccaagcgaaaaataccgcgggaaacgataggcgaagcgtgcgcaaggatggattggggaaagactttgctcacggatatttgcgggagggcggaccatggatgcgggacgcatgtaatttaggggaaggaagggaggtctgtgtaacgagaaatttcgtttttccacccctaaacacgtttacggattggttttagcatccttttggagatgctcttagccgcaaccagatctcaaagccataccggaaaatagtaataacttatctgaaccgtttcaactctttatatttacaaatgaagtcctcaggcatctccagactggcactatggatgagggtgcaaatgctactcattctgtaattgttattttcttctttttgaaccatggtatcatcgttatctcatattgcaacagtctggtcttccttccagtaacttctcccacatgcatagcattagccttggcgattggtaatgagcagtatagtagccaaggacgcatccatatggacataatttgccgctgtgaatgtattcaacgggtcttgtcctattgaactgcttgacccacaaaccca

SEQ ID NO: 174074 - DNA, 401 bp, Zea Mays
ataaactattagacagatccaagagtatggtgttcattgggtacgagtcaggtacaaaagggtatagactatttgatccaagcaccagaagacttgtggtcagtagagatgttattttttaggagaataaacaatgggactgggatacctctatgtgtgaagcatacagtcaagatccgggcacgtttgtggttcactatgataaaactgacagagagacgacaatagaagaaattgcagaaactaaaatttcttctggccaaaactcaggaggggtgaactcagttgaacagggaagtgagatgggtcagccagaaataccaaacaccacactcaattcagcttctggctccacacaaaaccagggattagtgactccaccttcccaggattaaagcttc

SEQ ID NO: 174075 - DNA, 806 bp, Zea Mays
gcagaatccatactcaattatgatcttctaccccctccaattggactagacttacaatattgctcttcatttttgaaataaactagactttagtgagtaccttgtagctctttgtcttggtcgagagcatcatagagccaatgccctcgatcttgatgtgagcaccttgaggcaccctgtcatgtgatttctagccccccctgtgttgaggatccaaacatcgttgccttcatcgcaattagcaggggtcaccttcttctcattaatacacacacattgatcatccttgtgcaccattaatgtcataatgttacatgacctcctctcgagatgcacaacattgaccatggctagcaggagtgtcagccgttctggcttcgcctgcacttgatgttcctctttcttgtgctccaatcgggtcgcttgcaatcatacttccagtgaccatagatacaacaattatgacatcttcccttccacctcgacattccctttgacattagcttgatggcaggatacttcttatcgctacgcccaactcccttcgatttggcctggttggagtcgccctgtctctggcatccacttgtcgaggttgacttaggggtgagttgatggtggtactttgacaaccactcctcctctgataccatgagtcaccccatcttctcagtgatggagtcgatctcaaatcaatctttagcggcctttaggcatcgactaagtcttccatcgttagtgtctttagatcgagtagcatctcaattaagaccatgagctaggagtagttcttccggagcacacat

SEQ ID NO: 174076 - DNA, 833 bp, Zea Mays
ttctcaaattctcccttatcattcgcacttgttcttctgcctcttgtataatttcaggcccaaagaactgcctttcaccagtttgatcccaatacagtggagtcctgcactttctgtcatataaagcctcaaacggggacatcttcaaactggcctggtagctattattgtaagagaacttcgcatagggcaaactcttatcccaactaccaccatgtttaagagcacaagctcttaacatatcctccagtacttggttagtcctcttggtctgtccatcagtttgaggatggtaggccgagctgaaattcaactgtgtgtccaagcactcatgtaacttctaccaaaaccgagaagtaaactgtgatccccggtctgacatgatcttcttacgcactccatgcagacaaactacctaagccatatacaattctgctagcttggctcctgtgtaattagtcctcataggaatgaagtgagccacttttgtcattcagtccacaatcacccaaatggagtcatgccttacaggagtgtggggtagatcaacaatgaaatccatgccaatttcttcccatttccacctaggtattttcagtgggtgaagtaatccaggaggtctctgatgctcggctttaaccctttggcaaacatcacattccacaacatgtgcagcaacatccctttttagtccataccaccaatacttctgcttcaggttctggtacatcttggtactacccgaatggatggaataagctgaatcatgtgcttccttcaatatggtttcacgattactgtccatctcaggaacacaaattcggttcttgaac

SEQ ID NO: 174077 - DNA, 366 bp, Zea Mays
gtcgaagtgcagaagtttctcggcaaggtgaattatttgcgaaaatttatttctaacctagccgggaagattggtgccttcacccctatccttcggcttaagaatgatgccgaattcacttggggggcagagcagcaagaagcatttgatctcattaaaaaatacttgtctttggctcctgtattaaaagcaccacgcgcaggagtaccattccgattgtacattgcagctgaagaaaaggtcattggggctgttctgacacaagaaactgagggaaaggaacatgtggtgacatatttaagcaggaggttggtggatgctgaaacaaggaagcagtgttacctgtggaaataaatttgaatgctg

SEQ ID NO: 174078 - DNA, 565 bp, Zea Mays
gctatcgatctcatttgattcgactcattttatatcactaaaaatctgggttcaaaaatatctgtgatttccggttaaaaaatgaaataaaaaagtgaaatatctcgtcgtctgccttatcccgccgcccgtacctctaatttttccaaatcacgcgatgtccttatctgttatctcccgtgcgcgtttcttttttctctttcctcctcatcttcttcccccgcacggcaattcctctgctcaccatgtctggtgagcccctctccttgagctccttccccatccgcgcgctctggagctctctctgcgcgccatgccgtctggatccctcactcccgctccggctcttctgcgccaccgccgtatcgcgcctctctctagagctcgttcaacctctagcttgccggtcgtcctctgctcttccccatgccggtgatgttcttcactaccgccttgctggcccaagcgcccaaggtcatggattcctccctgctcgactcgtggcggcgttgtctcttcaacaccggtcatgatgcgccctctccttgccgatcgctgccttccc

SEQ ID NO: 174079 - DNA, 483 bp, Zea Mays
cattatattaagaagaaagaaaaaaagtccaaaatgggccagtacaaagagaaccaccctacggtggccaaacccgcacatacacgaactgatccatgctaaccaaaaaacacaccactcctgcaccagaactaggtatggccatatcttccttagcccagtcgccccggccaagcaccacattctcgtgtcttccttgatgtcttgaacaataatggagatacttggagacactccctcaaaaacacaagtattactatgtttccatagccaccacgccacaagggccaccattgtgttaaaacctcgccttttctccttaggtaccctaggagaggaagcacaccaccaatcctggaacacagaggagcccagtcctgccgtgaactgttacaaaccgaccatagacaacactataaactagacctgcctagcaaacacatatgtcaccaagagatgtcgcacgatctcatcatcttggtc

SEQ ID NO: 174080 - DNA, 469 bp, Zea Mays
ggctaccacacatatccagctctggctccttggtgccctggtctctcactctgagtttgacgtcatggatttccttatttgtgagatcgaggacactgttttggatggtctgcgtgctcgacgccagctgccgtatgctcactttctgtgccacatttttgcgcagctgattcagcctccacagttttagggcacacttgaggcctcacgcctcggctttggatcctaccgtccagcgcctgaggatcctgtgccagcttctgctccagtttttagcactcaggccgaggatgctgctcaccatccgttcgcagctcaggatgcggcagttgatgatgatgatgatgacgatgattttgggattctgcctcctcctcctatgcctcctcgctcacatgatcatgaggctgggagttctagtgctacccctgctgccccttctgctgttgaccctgaaagtcgcctagag

SEQ ID NO: 174081 - DNA, 491 bp, Zea Mays
cctagatgaagctcaacgcagatgcatgtcgtacctgcctcctggacagtgcgtgtggggcgattgcaacggggcgcgagagggatgggaatctagaggtggggccgtgtccatcgatgtcgagcaggacggcgcacgtataggtggaggggagcttctagaggaggtcgagcctaccgtgacggtggcgcgtcaggggcaagggggaggatggaggggacgacattggggcggcgcaaaggccacacgtagcgaggcataggcggtggaggggcccgtgcttgtcgccatcctcgttgtggtagcggtggcggaacagaaggaggcggaggcggcgatattccaagggtttgggttgggggaccatgaggccgaatctggttagggttcaggtgatgactgcaatttagatgttgagtttccttttttgagtccaaatatctgagattatctctagctcttgtcctatctcatcatctatttcaaattca

SEQ ID NO: 174082 - DNA, 698 bp, Zea Mays
caaggctacacaagtcaagcccatcatcacatgtggtttaacttgagcaaagtacaccaaacttggaaatcaagatcctaagtaagtgcaactcatcttagaagtcatgccttggcttatcatgcacatatattgggagaattgcccaaaccctaattcaaacccctttgggcaataggaaccctagaagtgagtatgaccaaagggctatgaaaaccccatgatcatgacttgggccaattataacatttgtggtacacctaataccctacaaaaaatagtaaggaagtgaccccaaaaaggtttcaggaaaaccccaaaaggttcaccaaagggaagagcataaatggaaaatcagattttttctaagtccaaaaccaaccctcttccaaagatcaaacatgttcaccctgtttcaaacttcaaaaccatttgacccaattgacaaagtggcgcctaaagacccctagaacaccctggaaaagtttgaacccaaccctaagttgtttgacacgacttggcatggcttttgtctcggtatggacagttctgacagagccgacttctcacccctatatctctctaccccgaccgtatccttgcttggaactcacataaaaaaggtaggatttggtgcagggaagagaccgtacatgggggttttgccaagatctgcacgctaaggtgctcaaatcgac

SEQ ID NO: 174083 - DNA, 1187 bp, Zea Mays
tcatctcaaccgcgtccatctccgactgcatcgcggcacgccaagccgcgtgtttctcggcctccacgaaagaccgaggctcgccatcgtcgcatgcaagatgcaactcttctgccagaatgcgagacgccgggcccggcactgacggctcaatgagaaggctctccacctttcgataccgcaacgactcgccatcgtagcacgcgtcgacgcgctcctcgtcgtgggagagcggggtcacgagctccactgggttctgctcgacacgagctggcgtcggagaggacgttcccggagagggtaccgtcggtgctggagtacgtggtgacagagagctcgctggagccggagtagtggctgaattgcgtggtggcgaagagctcgttgtagccggagctggagagcgtggcgctggagtcggtggagacttgggggctggggtaggcttactcggagaagggtcgcctactcccccggctccctcaaagtggacatactcgatggtgaagtcgtcgtacgttagagtcgtgccgtcgtccaccgccttgtccaaggcccaccctcgcccttcgtcgaacactacatcgcgcgctgtgcgcacacacagtgttcctgggtcaaggatgcggtaggccttcgagccctttgcgtagccaatgaacacccctagggtgctcctgtcgtcgagcttgccgatgtggccaagctccttggtgaacgcgagacagctgaagacccgtaggtgagagaccgccggcttgcgcccatgccaagcctcatacggtatcatcccgttgagtgccttggtggacgagcggttgaggatgtagaccgctgtcaccaccgcctctccccagaagagagccgacattcccctctgcttgaggagagcccgagccatccccacaaccgtcttgttgcgccgcacgacgacgccgttttgctgcgggctgtatggcgcggagtagtggcgttgaacgccctcatctgcgcagtacgacgcgaactcagccgctgtgaattcaccgccgttgtcggtgcgcagcacgcgcagcttgcgaccgcactccgcctccgcagcgacctgcacacacttgatggcgttcgtagcctctcccttgctgccaaggaccatcacccacatgtagcgggagaggtcgtcgacgagcagcaagaagtagcgtcgt

SEQ ID NO: 174084 - DNA, 825 bp, Zea Mays
taaacttttgtttttgtgatactgaacctcggttgctgcgcaggttccgacgtttgggcctgcgcaagcaaccgctgctggcaatactgattttgtggcggcctcaaccgtagtgcctgccgatgataatttatttggctctgtgtttgagtgttttgagtctgatggtgaatcaggaagtttgttttcctggacggaggagtcctcagatgaaggcttggattattttgctgtgttagatgtggctgcagcggagtctttgccgcgtgtggagggtgccgggggatttccctactgcgagtacggggtataggcaacgaagggtggtgtcgaaacacagtgtgggtgaattttcgtgaagtggtaggcgtcgtcgtatggggatggagcatggccgtcttcgagtagaccggattggtaagcgagaattgttatccacgcctattggggcgagcataggtgaaggtgatttgcgaaatcttttcgagggtgaggaattgaggataatgttgttcaattacagggagatgggtatcatcccgaaggttgagccgatgtaatatatgatgccctcgccgagtgtatgtaactgtaatttgtatgatgtggcctgttggttgtattcgtatgcttgtgctgatccggctgcacccgtgggtcacttttgcgcggagtgtcttcttaatgagagacttcgattaacacacttgttgcactattccggctgcacccttaggcgacttttgcgcggagtgtcttttaagtaaaagacttcgattcacgcacttgttgtgctattccggctacacccttaggcgacttttg

SEQ ID NO: 174085 - DNA, 558 bp, Zea Mays
tagcctaattgttgctggtttatagctctacaattttgctacagagcttgggtggagttgccattagaaattgtgagcaaattttgctccaacttgctcggtcaggcatcaaaaactgaatttctgatggtacagtgccccaacggatcagaacgaccgcagcagagggatcccaccgccggtgatctcccccgccgtgattcgtgtcgccgacgtcaagattcgcgtgcggggtggagtgataacatcgcggggtaaggatcttcgccgacggtgagctggaggtcactccggtgactcaccgtggctccccttctgctttgcggctaaagccgataagctcaccgacgaccgccgcctcccggccgtgcgccgcgtggctcaacctttccaccgcgtcgccataactcgctactgctgtcaaatcaacgccggtgaggtcgccacggcgtaggacactaattcacgtgcgccagggttcttcctcatctccggccgcctctgctatccactcgaattaagcgccaccgccccggagatctataatttgaccccgca

SEQ ID NO: 174086 - DNA, 644 bp, Zea Mays
cacaatctttgaaaagatggccaatatttctggctcttgcctacacaacatgcaaattgggtcatgcaaccgtccactgaccgcaacaaattcttatccgtgagaattttccaatgaagcaaagtccatgcgaagaagtggcgtttaggttctatctttgccttccagatcggcatgagcctaagcctgggctgagagctgactgccctagaactgggcaaggtaagtgcttttgatggtaaacacgccatccagagtccacctccaacttatatcgtcctccgtggtaggatctagagccacctcactaatggcctcccagagagccacatactctataatttccatgagtgactccaccgtcagcatgtgggagacccatctgttaccctcgatggcccgcctaacagtgatcttcttttggttggtcttttcgaagagcaaaggagctaaggtgcgagcctaagagccatttagctagttgaagtaccaaaaggatgccacatctccatttccaatagtaaccttggtcaacatgtgaaatagggctctatcaacctttgaacacgggatatccaaccctgcccatgcatgatctttgtttgaactgctaagacaatacttcgtcatgagttaatcactaa

SEQ ID NO: 174087 - DNA, 744 bp, Zea Mays
ggcgaaggggtctcagagatcggggaggtcctggcgacccgtcgatggtcggatggcggtcggtggtggtcggagtcatcctggccacgtgcgggggcggaagagattgttggcgacgaggagcctagcttacacaaggcggtctagttcaattggatggctcggggaggttcaccggatgacgtagaagttgtgcgcacaaggaatttgataatggcacagtggcttacccggttcccgtgctccggcgggcggagggattccggtgaggatgatccggcgcttttggtgaggttgcgctcggtctgagggctcgggaagcttcacgggactttggggaggctagctgagcagttggcatgggcgagggatggctggggcgagctggccggtgctcaggcggctcaggcgggtggtgtggaggtcgctggagttgggggcttgttcgggggagtgaggcggggtgcggagtgggttgctgcgcacatggagagggctttataggtgcgagctggtgcagacgcggggtcggcctgacaggcgcttggggcgcgtttatgagggccagtgcacgcttagcgcctttggcacgacgtcgagcacgtggcagggtttagtgtagtcattttcaagcatccgttggttccaaatttcatgaatttgggcaagatcctattgtaatattttccccccgactaccctctatcgtttatgtgtggatgccgaggcatttcttgggttgtg

SEQ ID NO: 174088 - DNA, 429 bp, Zea Mays
tggccgtaggatctatcgaggggcattctggattgatcgtggctagatcgatctggaccattgaagcgtcaacgcacggataggattagggcgcgcataccccttcgcgcgatcggatctggacctccagattttgatcggatggcttagaatagaacgtacccgttcggtcgaggcaagcttataaaagagtccctgggattttcaattattgatcccgccatccctgcacagtttagaacagttacagataagtccctgtgaattacaatcatacccctggagccctatttaagtgcagaataaatattaaaaataacctaaaacttgtttaacccataacttttacgtcttaactccgaattgacccgttccagttgcgttagcttcgtataaacatttacttcgcagtaacaacattaattttac

SEQ ID NO: 174089 - DNA, 585 bp, Zea Mays
tggggcctaaccacgccgtggagggtccacggcggaagcgaaacgtctgacgagcaattgcttgcgtgcaatcagctccccgaatctgacaacttcatgagtgctcccacgagtcacggtgaagctctgggccagggtgccgaggatagtttgccaatgtgggcggagatcaccagcggcgaccctcttctctctctgttttcgcttttcacagtgcggcgcacataatgatggtggttcctgggtctcccgcttgagtagtcgagggaaaacacgccctaggtcgggtatataacccaggtaggcttccacaacggacaactctgaattttgcgccactcgcgcagcaggatcggcgaagatcggtgggggagactgagctgacagcatgggcccacacatgattgacacaggctgagaagggcatgcactgagcggctgaccggtggggccacaatgttagcacgtgcgcgggcgcgagaggaagtgtgggccggctgctgagtggattcggcccaatacgtttttctttcttttttctttccttttcttttcttttctctttatttttgaatctaaaatttg

SEQ ID NO: 174090 - DNA, 590 bp, Zea Mays
ccgatcgctccgttagcagggcatagtggtcaccctgagttaagtaagaatgtaggtcgatcatgaacaaactgagtattcttgaagccttttttattgaagacatatttcccattttacagagtacattgtcgtcccgatagcttttgaaatacagctagggataaaacttcctgaggtgttctatattccatgagttcccaatttccgtgtcgtccatctgagtgagacgatatgatcccggccgagtgacttctgctactatgaatggtccttcccataagggtgacaacttgtgtcgtccctcccccgttagaattcggcggaggatgagatctcccactgcaaaggatcatcgtcgcacggccttgtcgtgatagcgtctcagagtttgctggtatcgtgctgattgaattactgtgttcagtcgttcttcttcgagtacatcaatatactctagcctagtagcttcggcttctgctatgctttcaaagaccaaccttggcgccccaaacttgagatcagcgggtaatactgcctctgacccatagaccatgaagaaaggagtatttccatgcagagctcgacta

SEQ ID NO: 174091 - DNA, 989 bp, Zea Mays
agagcataagaggcttgcaggtttgctgaagccattggagattccggagtggaagtgggagcatatcaccatggattttgtggtgggcttacctcgttctcctcagggcagggatgttatttgggtggtagtggatcgcttgaccaagtctgcgcactttattcccatgaagaccaccaattcagcttcagaattggtccccttgtatatgaagtaagtaatcaggcttcacggggtacctaagttcattatttctgattgagactccaaatttgtatccaaattctgggagagacttcacagtgcattgggcaccaagctttctcttagtgtcacttttcatcctcagattgatggtcagtcggagcgaacgatccaaaccttggaagatatgttgcgtgcttgtgttctgtcttggaagggtagctgggaagatcatcttgcattggcagagtttgcttataacaacatctaccaggctagcatcaagatggcaccatttgaggctttgtatggcaggcggtgtatctcccctctgtgctgggagaccttgggagacttttgaaaaggttcgggaaactcgtcagaatattttggccgctcagagccgtcagaggagttatgctgatgtgaggaggagggatttggaatttgcagtgggtgaccaagtccttcttagggtatcacccactaaaggagttgtttggttcggtgtctccggaaagcttagcccgagatatattggaccgttcactatcttggcccgagtgggcaacttggcttatcgcttgcaattgccggattccatggcaggggtacacccagtttttcatgtctctatgctgaggaagttcttgcgggatccggaccatcagattgagatggaatcaattgcggtgcagcaggacctgatcttggagtgtcgtccggtgcatatcttggaatcctcggagcgtgttttgaggaagagatcaattaagtatgtcaag

SEQ ID NO: 174092 - DNA, 938 bp, Zea Mays
gccaaaccaatttctatgcttaaatcatcagaggtcgacgcattattccgctatatcatctaccgtttcagggtgcccaactccatcatcaccgacaacagacccaatttatgggagaaccattcctacaattttatgatgacttcaacatctgtgtcgactatgaggttcccaagtctaatgggcaggttgagcacgtgaatgtcataatcctacaaggccttaaactgcgaatttttgacaagctgaaaaagttcgtcggatgatgggtggtcgagctacccgcagtattctggagcctactatccacactatccagggtgacaggctgcacatctttattcctggcatttggtgtggaagccgtgttgccctaggaactagaatatggctccccgaggactaaggcttacgatgatgtatgagcaactacagacgcacaactcatcatcgacctgctcgacgaagaatgcgacacggtcgtgattcgctccaccaagtatcaacaagaattgttacgctaccataaccgacaggtgcgtggcagatcatttaacgtcaaagacctgatgttgcaaagggtaatgaccaccaagcacaaacataagctctcatcgcggtgggagggaccttacatcatcgcccagatcatgcgcccgagagcctactgtctcaaggacaacgacagaaacctaatgactaacgcgtggaacatcgagaacctaagaagattttacccatgagtaagcgaactcaatcccctcgtcttcatgatcgagaaagcaaaacatgctgacctaactgcaacgtcctgcttgaggactaggagagaagcaccccaggatgcattgccaagactcggaagatcgaccacgacaaaactcaacattcgcaaaaagaagcaaattcggaaaataaatctccacgatcaagtgctc

SEQ ID NO: 174093 - DNA, 352 bp, Zea Mays
cttcaaactggcatggtagctattattgtaggagaactccgcatagggcaaactcttatcccaactgccaccatgcttaagagcacaagcccttaacatatcctctagtacttggttggttctttcggtctgcccatcagtttggggatggtaagccaaactaaaattcaatcttgtatccaaggactcgtgcaacttcttccaatatcgagaagtaaactgtgatccacagtctcacacaatcttcttaggcaccccatgtaagcatacaatctgtgccatgtacaactccactagcttggctcctgaatacgtggtcttcactggaataaagtgggctactttagttagg

SEQ ID NO: 174094 - DNA, 489 bp, Zea Mays
gggcagtggtgtaagaatcccaccaatcagcagcaggaccagtaagacgaccagaagcataaagaaccttctctcggtcagagcactgtgcaataatcagcatcttctccactgacttcagccaatcatcagtgcgtaggggatctagagagcaggcagatgttggtggcttgtagctcatgaactcccggtgattgtaccagggtggaactcgtggtggtggtggaggaggaaatggtgcttgttgttgtcgcactattcgctcttggcgcatctcttccctcatctcctgcctctcttggcgcatctcttgatgctcctgtcgcatttgcgcctgcatatcttgcatcgtattcgccatttgttgcaggatctacatctgagctgcaaccacttgatcagtcccaaccggtggaggattcagaggattcatctcggcttgttgttgtctaagcaccctccggttgaatgggttggcatgtagatcaa

SEQ ID NO: 174095 - DNA, 693 bp, Zea Mays
gcaacctggggtccagttctagagaatgggtgctcgcctcctggagtggtccagagctgtgtagctacttagcatggttccgtacgctaagcctgcacgttccaccactctgcaacgggtaccctagtatttggagctgtgatcctgtgggtccgggcatacggcttggcttcccaggctaaatcctgcaggtcctgttgcatgtatcaaaggatgaaagataccagatggtgggtcctatgggtgtgctcctaaaaacttcaaaaccaaagctgtgtgcaggtccaggtcccagtccagtagtaggtagtctcaaactgtagagacgacctcctaggggccggaccaccaattttatctttggtatactggtatccagcctcgacacgtcgagcctacctcccagggggccaagtaatagggggaagttgatgacgctactcacaacaaggacaaataacatacagataagtttaagttccagtgctacctcattagcggttcttagaatatgttacaaaaccaaaagttattatagccgcccccagcggaaccctcgcgttgtttctacaggatcgactattcagcgtcggcaggatcacgctgaaagcgtgcggccaccatctccaccgcatcttgtacactctcccgggcgacatcttctgtggcggccaccggaccatcgatcaccgg

SEQ ID NO: 174096 - DNA, 383 bp, Zea Mays
gctggccgcctcacactgttccttcaattcagatgtcaacgaatgcgaccatccagacacctacccttgtcatggcatctgcaccaacactgacggaggatacaagtgcgaatgcgttcctggcttcgcgggcaatgcttctgtaccaactggatgcaaaggtacacgtaccatatatatcgatcgtaaatacgagtgttatgtgaagccattcaactgctagcttgctatatgtgatgtgatggtctctcacatcaatcatcacttaatcgttcagtaattttccccatgaacctcattctgctaacgaaatctgaataattattgtattcatccattttttaaaatgttcactaactatcaaagcatctcagttacagatc

SEQ ID NO: 174097 - DNA, 534 bp, Zea Mays
cccctttctccctctgttttctctgcctctctattccattgagcagtgcacctctcctttccacccctcaaatgccatactcatttttcctatccaattctgtgaatccatgtggtgagaaatgttgctctgtgtcccttgagtgttcctacaggtttctagctccttagggagggtttcacagactctaatagccatttcaccgaaaccctaaaactccgcacgtcacgtgttcggtgaaatgcccaaactagccaaaaatgatccaattgaacccaaatttttcaggcaccttcacaacacctccagtaacatattcgcaaaatttcacacccatccgatattccaggttttaatttcaccaaattccctatttcgagcgatcgtttccgagccgagtgcccaaatttcattttcttcgcctaaactcaaaccaagcacacacttcactcatattcacccatataaacctattcgtgaagtatcggctcaattccacgtcatttcgtgcctcaattcgaattccaaacctcc

SEQ ID NO: 174098 - DNA, 432 bp, Zea Mays
agaagtaaacagatttaaaccacaatccaacaagtatagaggtcatgagtcaagtttgttgtatctgcaaaagcaccttttcttccttagttgtctgcatttagtttgatataagtgttactaagttgtggactatatgtatgatttgaagtgtttttagcagaacaactattaccattaaatttccttggactgttaattttattatttcatatacaattttggaatgcattgagactgttgaggctaggtaaggggtgtactagccctaccacacagttgtgcagaagtagttgctttgctttgtagagttatttgacaattttgttttctatatttgttaatgggcatttcttaaaaattaagaggagcaccaaccgtttttagttttgcattcactcacttcttttatttatacgattgtatcagttt

SEQ ID NO: 174099 - DNA, 666 bp, Zea Mays
tcatcttcagccttcgagtaggcacaaagcaattcatcactgattgcttcaatgacatctagccagtcatcatttggctcgtcaaactggctcccgtatttgaacgtgtacttcaggtagattaaacaaccttagctagacccagtagcagcctccttcggcatgtcccacctaattgtgagtggccacactctataagcaatgtgctcctggactaagtccctagtgcctatgtaagtacatactatattaaaagcaacctggcatgcttgtatatcattcccaagggcaatggatggactcctaatgccgaagcgagaccatataggacattgaataatccctttaatatcctctctctcaaccagatcattttcacgtagaaccactcctgcttctaggcccccagccatctcttctgaaatatcggaactaggtagctcaccccagagcgaggcacgaagctatagcaaccgaagttgttgtgatattgttcctttccggtagccttcgtctcataagatagctcattgatgttacagaaacattttgcatctggttcctatccctggctcctcatggcccatataaagatccccatcttgatgatagctttgggagtaagctgatgaaggtaaatctcaaaagttttcaggacctcgacta

SEQ ID NO: 174100 - DNA, 982 bp, Zea Mays
ctttacatttgtataatgtagatgtttaatctttgtgggtacagatgacccgacgggtgatgcatacccacatgggtatgagtatgagggtaaatttatattcaccagtggatatgggtaacccgacagagctattttttatcgtgcgcatgtgtatgtgatagtaatacccgatggttattttacccattgccatctctacttagatggcctggccaacagacgaaggatgtccattacatcaagacaaccccaatatcgactttgcttgcgttggtcttggtgacgaactgcttactgaccttcctgtcttgctatggcttcctggatgacgctgtcgttccacgttcgccgcactataggcacatggaacccatcggcggtgacctagcggctagagcacgcgcgacggcggctgcagtggcaacggcaacgacagcttgcggcgaaaggaaatggtgggattcgattcgaaggagtagcggcgacctaggtcgtgtctccatcgcgagcggaggcaggcatggcgagggcgcagcgtctaacggggtggggtcgggcatcacgggggaagggggtactgggcccttcgcccccagccgcgccaggtccaggatttgagtctggtactcgtgtcctttcggttccgaatcccgatccccgcttgctcgccgggccgccgcctcggcctgagtggtaagggcatggcgtgttgggagtgtaggcctggcagggtaggtggatcgtagtctcgtaggagacgtgagggcggatcataggagacgggggaaggctgggggcggggtctgttgccccatccatggcatgagattcgagggctggtggtcgatagaggagagcgacacgtggatcatgagcaggtatgtgttgagggaggggcttcatggcgtatcgaacgaggaaagggcttcatgacgcatcggacggttgagattgatgggagacagaaccgcagaacggt

SEQ ID NO: 174101 - DNA, 333 bp, Zea Mays
aattcttcaaaataattaagctgtgaatatactccacatatatatatcgctttaattataaacagtccaaacagcgtgtggcttgtcgagttggctccgatcgacatcgtgtctgctgatcgatcgagcacgttctccatcacgcatgcgggatgggcctccgctaggttgctgttgcagtgtcgttgccatagggcccacagcatttataatttgtcagatgcatgctgcgacgatcgactcgtgcgcgtccatggacgcacctttcgttatcgtttcacgcgcgccctagctgctagcttgtcctcctccctccctccctcgaggaagacg

SEQ ID NO: 174102 - DNA, 326 bp, Zea Mays
ccgcggttggggatgggtctatggccacggtaaagatcatccatgatgtggcattaaaacgttgcggtggcactgcacggttaatcggcggtcaccggaccatcgtcgtggctctgcccgcgcgggtgagctcgccagcgtggttacagctccgcgagtctcatccaactccggccatcggcctataaattgagcccggatcctgcttcttcaccacatcacgcacacaagcacttgagcaatcaacttaatttcaccagaagaacgtacacagtccacaaaaccattccgccctgttcttcgcgctgccgtgaaggactcctccg

SEQ ID NO: 174103 - DNA, 621 bp, Zea Mays
tccttcaaccagcccaatccgcgcgtgtgtcactggcggggtgggacccaacggtcggccttgggcttgattccgcccgtgcccgcgcttcctgttggcgcggcttgtctcaccgcctggtgggcccggttggccgatccactctccagacgctgtctggtggggctatgtgccagggtcatctcccagctcggatcggggctgttacgacggaatccatcgtcctcgcgcgattagctctctcgtccttctcgcgtgcatggtcagctcttccatcttcccccgcgcgcttcgggtgtgacactgcctggtggtccagaccggcagcaccctcttcaacctcttctcagagatgggcgcaacagaaccccgtgcagcgcgcagcggaagcatggtggtcctgcctcgtcagctgtttctcccatgccgtgaacttcgcaacaaatccgagctccacggcaaccaatcgtgcggagtccgccgccgcaccacctacgcaaccgactgccgaaatccgcgtgattatctcgacccacttcggccaccgttcgcccatccgagtttcgcgcgcgtcatctggtatatatgagagccccgcgaccctcccatcgaccataggcg

SEQ ID NO: 174104 - DNA, 471 bp, Zea Mays
ggttgtcgcacaggcggcgcctgacagcacaggagcgggacacgccccgcgcgcgcctcccgctatcacattctcaccggctgccccggtcgcgctcccttctcctgcagccatcagaaaagggggcaaaaaggcccccgaattctcctcgcccgggcacaacctcgctccagagtccaggccagaccagcaggccgcctttccgctcgagcacccacgcaatcatcaccgccgtcttcctctcgctcttctcttccccttccattcctcggcaccacgtcctcgggaaccccgcatgccctccgcacaaggcgccgcctgttcccggtgaccgcggggccgagatcggcgcgccatggccgcgcccggaggcctggaccaggactgtgcacaggacgccgccattaagctcttcggccgcagcatcccggttctccactcctccgtcttcgccgccaccgctgcggccgc

SEQ ID NO: 174105 - DNA, 373 bp, Zea Mays
taagcacaacccttaccaacttcgacaattcattttaattaaatggtgaaacatacacaccagatgaatgtataagaagatcaaacacctcacctctcagcaccacgaaacaagtagttctattgaaaccaaaactcctaatcttcctaaaccttgttcttgccatcatgaaaagataatcatgtaatataacattctttgcacccactaaagggagaagtctacagaactaatggagcaataaagccaacaagaagccaataacattctgcgtggcacaggtcatcgaaggaatgccaaaagctccacaaagagcactgacagcacaacaacacaatacttggttaaccaatgtcactatacttcatccaac

SEQ ID NO: 174106 - DNA, 647 bp, Zea Mays
ctcttggttcagcagctgaagaagcctccccgccaaactcaggcaccacgaccggttcaatatagcacggccggtgggtaagaacctttaactttttgcctttaggcacaggctcgtctggagtggccgaagtagcagttttcctcttctttccctaacctcgcagtggatagcggtagtcgggataaacaaaaccaatggcatcaaaaactctgttcaatctcttttttccccggcctccgaaggctgtggataatgcattgtcttccaccttggaatatgatccaagcagttcatcacttgtaacttcgatgcattttagccagtcatcatttggttcatcgaatttatccccatatctgaatgtgtactttagccggaccagttcaccttcactagattcggtgatggtctccttcggcatttcccagctctctacaagcggccatactctgaatgctatgtgctcttgaatcaaatctcttgtaccaataaagaagcagacagtaccaaatgccttctgacatgcttcggcggcttcgtcaatttcaaccttcgggccttcggaggccaaagcgggaccaaatggggcgcataataacttccttaatatcttctcttgccttcaagtcattttttatgtaaaa

SEQ ID NO: 174107 - DNA, 348 bp, Zea Mays
cggcggcgatggtggagaggatggagacggcagcggcacggacgacggcgatgatggtgaccgcagcggtgatagcgaccgcgttgatggagatagtcatgaagagggagacgacggtgcccacggaacggagacgacaacggtggtgatgggcctgacggcagcagcggcacggacgagaggatggatacgcaagcactagtgacggtgactacggtttgcatttcttggacctgatgcctagatccatgcctgtcctagatgacacggcggacaagggatttgccttcatgccggcgccggccaatctaggcagcgagctttgggtgcagagagcgttcagaaggc

SEQ ID NO: 174108 - DNA, 506 bp, Zea Mays
gtccaatgtatctcgggctaagctttccggagacaccgaaccgaacaactcctttagtaggtgataccctgagaaggacttggtcccccactgcaaactccaaatcccgcctcctcacatcagcataactcttctgatggctctgagcggccaaaatattctgacggatttctcgaaccttctcagaagtctgctgaacccaatcaggaccaaccagggatctctctcccaaagtctcccagcatagaggggagatacaccgcctgccatacaaagcctcaaatggtgccatcttgatgctagcctggtagctgttgttataagcaaactctgccaatgcaagatgatcctcccagctacccttccatgacagaacacaagcacgcaacatatcttcaaaggtttggatcgttcgctctgactgaccatcagtctgagggtgaaaagcgacactaagtgaaagcttggtgcccaatgcactgtgaagactctcccagaatttggat

SEQ ID NO: 174109 - DNA, 458 bp, Zea Mays
cctactatcttcgtctaattttatctaaccatgtctaccactcatctatctcatgtcgtcatctttcacggtctcacacaatccacagtaaattcggtaaccaaatcctgcacccactctttttagatatccaccccgcgcgcaaccatcgcgagctcagccacacgatccagctcccagtcccggcctggttttcccctgtggcccaagtcgtaaacacccagcgccagtcccgcgcggtgcccgctgccgctgtaacccgagccccacctaccagccccggcttcttctccaaccgttcgtccactccatccggtgcccacgttgcacttgttcgtggaaccgcccatgccgaccccagttgagaaaactcccagcgcccctccatgccatactcgcccagatcctctccctcacgccacctctcgcctcgagccatctagcagcaggtgtgtagg

SEQ ID NO: 174110 - DNA, 627 bp, Zea Mays
cttcaatgcaagcatattcatattggaatattctctccacctctttataaaagttgggtattacaaatcctacccccttaagaataatctcgacctcgagattaggaagaacaagggaaaaggtgaggaaattctattcgtagttcttcttctctctcccaagtagcttcagcttcactgtgttgactccattgcactttgcacatcttaaccactttattcctcataacacaagtcaagttatcaaggatcttgatagggcactcagtataagtcagatcatcctgaacactaagttcctccatgggcagttactcttctggcaccctgagacacttctttaactgggatacatggaagacatcatgtacatccgcatgatggtccggtaattctagttgataggaaacttcctccactcgctttagcatcttgaagggtccaataaagagaggggacaacttccctttaactttaaacctcttcataccccggaattgtgacaccttcagatacacgtgatcaccctccttgaactataactgccttctccgggtatctgcatagcttttctgccttgattgtgcagttctcaagttctcccttatcaaccagacttattcttct

SEQ ID NO: 174111 - DNA, 795 bp, Zea Mays
gatgctcatggatactagtgtattatacgcgcccatgcgcgcgtgacgagccacgatataaaaactttttatgagcatgtctaattagatattgtgtcgcgatcatatatacattgaaagtgatcatatataaattaagagcagtcattatggagcacataaatacataagtgcacgacccaacttactgtatttcagcagctatcgactaaattgagacgataattcaagcgcttacaccagttgtaaactgagattacaatgcatattaagtagcattaaagtagcgtatatcaagagttaattagaggggtcgcatgaacatatacagaggtagaaaggcatcaacagttgggttatatgtatacaaaagcattcttgattcaaaagtgacgatgtccttcataggtatgcaaaaacagctacttgtacacaaataagaagagaagatccgttgcacttaaagtgtttgtcagttattttattgttgtgtaatgggtacaatggagggcgaaggacaatgtgcaaactatattgtaaataagctctgtgcgatttaggagcatagatggtgtcataccttcatggaattcatgacgatctaaccgttgttctttttgggatatgcgggtaggagtttgtgaagttggctaggtttgatcatgtatatatcatgtctgtgctttgttgcatcattatgaagtataagttatagctataaaatatcaagctatttgctatttgtatttttcccaaataatctcctatgtaatatgtacttcgtcctggttaagc

SEQ ID NO: 174112 - DNA, 634 bp, Zea Mays
gcctaatcaaaatccgttatggacagttcttgaaggctgacaagagcagacagagctggagaaggaatatcactatcccccctactacctctgtaacgccggctattcttacgaattagcgggacttcttcttcctcttcctcgtcctcataaaaaatacggacaatagccagtgcacggtcacacccattgggttcaatttcagcacgattacacccattgggatcaacttcagcacgattacacccattgggatcaatttcggtgcggttacacccattgggttcagcttcagcatggttacacccattgggatcaacttcaacatggacaccgtcattgggatcaacctcaggaaagacctctgctagcacttcatcacaaaccggagcagaaggaccggcatcctagtccaagcatgacagtcgccggagccgcctcttcttcttcttcttttcctcaactggcgcagtcgaacggctaacttggcgaggatgcttcgggcgggtaccctcacgcttccgggtctccactattttgttaagctcttgtccaaccgtaatagtcatcggttcagcatgggtcgagtcagaagattctatagccaacatactgagtacaacatctatttctg

SEQ ID NO: 174113 - DNA, 844 bp, Zea Mays
tcgggtgaaggaggtgaacgcccagaagatgctccaagagttcgagaacatcaagttcaaggacggagaatcggtcgaagttttcaggatgcgaatcaccaacctcgtcggcaaccttcgagcacttggcgaggtcatggaagatatccgcgtcgtcaagaagttcctgcgggtggttccggcgcgcttcacccaggtagttgtcacgattgaaatgttctgtgatctcaagcaactctcggtggacgaactggtggggcgtctgcgtgcggccgaggatcgattcgacgacaaggtcgaacacctcgttgataaggcaggacggctccttctcaccgaggaggactggcttgagaagaacaaacaccgtctgcgttcaggctacaaggacggtggtggtgactctgacgctggctcctcgaaaggcaagtcgccggcacaccacgacgggaatgcctctggaccggtcaagctgacctcccagggcactctgcggcgtaaaggacggtgccgcaaccgtgggatctacggtcactgggttgaggactacaaacgcccaaagagggggaagaaggagacaccgacgcctgaggcaaatgtggcgatcggtggaactgaacacaatggcgcactgatgctggccacttgtgacattgtgcacgatgtggttcagcatgttcatctgacagagaagactataccaatttcagttcctgaaggtatgtgggtccttgacactggagcaagtaatcacatgacaggtacacggtcgtcgttgacacagcttgaccaaggtgttcggggaacagtttggtttggagatgggtctgtcgtcagaatacaa

SEQ ID NO: 174114 - DNA, 738 bp, Zea Mays
taaataaataaaatacaagttgtaccatgctgaaattccaattctgcatttagactggagttcggcatctctatttgaacttagattttacaggatatatataattggaaatagaaatagaaaactaaaaaaagacgcacttacttggtttcggcccagcctgccatccatatacccaatacaacccacatccttctctcattttttttgttgttattttctatctgcgcacgacgaccttgcatgcaaattaaatcatgtttggctgaacgtgccccacgcatgctgggtcaccgccgggtgggtcccactcgtcgggttgctctccaaaactcgaactctgcttgccaagcggacgttgcgatgtgagcggtaaggaatctggaccagggtcgttgagatttggccgagtatacccttggaaacggactctgctgctataaagtcgtggttgcgatccccttgaccatgtacccaagccgtcgaagctgcctgcagtgagactttgccgatgagctttgagaggagagagggtgctgacatatcgtgtagccatcaactatagactcattttctctatagcctcgctgcagcgctgtcgttatccaagccacaacaggtcgctgttagctaagctcccagccataagccgccatgacctgctcgtcgagttcgagttcctccccaactctagcaacaactttggcgagtaatttttcaccatctgttcatctttcg

SEQ ID NO: 174115 - DNA, 347 bp, Zea Mays
agagattacagcttcgtatagtgagaaatgaattctacccttgaacaaaaagtctgaacaatgcatggcactgttcctctatttataggcgtgggatacattttcgatgaattttcaattatgcccttaagcctacacatttagactattatacatgccaagggtacagtggtcttttccttctatcttcgacgaaatgagcctcgaagactccttatggtctagtccagcttcattagtagggtatgcacgtcgactacccgaagttctaccttcctgtatgtgtttgttaacagcatcggctgtggatcatcttcggcactagtcttgcaaaacatgaaacaaga

SEQ ID NO: 174116 - DNA, 326 bp, Zea Mays
tggattcccagaggtaagaactccgtagagaggcagcaactatctgagcccttgaccccttgcgtacaacaggaagtacttgtctgaaatcaccctcgaacacaacagtcttcccaccaaagggcaacctagaccgtcccattatatcatgcatgctattgtctagcgcctcaattgcttgtctcttagtcattgatgcctcgtcccagataatgagtgatgctttttgtagcaactttgctgtcccgctttgtttcgtgaagctacatacaacaccatcatcaatagtaagtggtatcttgaagcgcgaatgggcagtcctcccc

SEQ ID NO: 174117 - DNA, 610 bp, Zea Mays
atttctccaatctggcaattgagggtacgggataggatctccatcttgtcagaaggcacgtttatagggtacatatttgatttattatagttaaccttcaggccagtagaagaagcaaaagagttgaggattgccttgaggaagaaaagttgcttagggcaggcctccaaaatcaaaagagtgtcatctgcatactgaacaatcgggaaatcctggtcaccaatatccggtaaagggagcttaagaagattccatagcctagctttattaatgatgctctgaaggagatcagctgccaagacaaacaacagaggcgaaagagggtcaccctgtctaacacctctcttgcaatgaaagggcttaccaggaacaccattgagtaacaccgaagacgtgccagaaagaaggatgctccgaatccagttgatccatctaggaccgaaacctttgtgagtcagaacctggataatcagttcatgttcaacagtgtcaaaagccttttcgaagtccagcttgagcacaatgatctctttttttgaggagtggcataagtgaatgtattcaaaggcccaagccaagcagtcctgaatagatcttcccttgatgaatc

SEQ ID NO: 174118 - DNA, 352 bp, Zea Mays
ctgttcgaggctctatatggcaggaagtgcaggactcctctatattaggataagactagaggaagacagttctttggacctgaacttattcaagaggtagaataacaagtccgtataattcaggagaatttgagggtagctcaaaccaggcaaaggagctacgctgataatagaggaagaccaccggagtttgaggaaggtgatcatgtgtacctcaaggtgtcaccacttcgtggaatgaagagatttaaagtcaagggcaaattgttccctcgctatattggaccattctgagtttttaggcaagttggagagatggcctatcaactcgagctacctgataatctatctg

SEQ ID NO: 174119 - DNA, 997 bp, Zea Mays
cacaattgccagaggtaacccatgaagtctatatacttgctgcataaaaactttagctactatcgcagcagtaaaggggtgtttgagaggaacaaagtggctgaatttagaaaatttatccaccaccaccagcacacaatttttgcctcctgacatgggtaagccctcaacaaaatccatggagatagtttgccatgccccactaggaactggtagaggttggagaagcccaggatatttagatcggtcaggtttagcttgctgacaagtagtacaagcggccacaaaattttgaacgcacttccgcataccaggccaggaaaacaattgcttcagtctgtggtatgttactgggaacccagagtgacctcccactgcagagcaatgcatggctgtcatcacagtgtgatgcaatgtgacattgttgcctaaccatattttccctttgtacctgagcaaaccatcatgcaattcgaagtcaggcacggccacagggttgagagataacttggccaaaagttccttggactcagtgtcttccaaatacccatccaggactgcttggcaccactgtggttttagtactgaaattgcacaacgctggccattatccggggcccttcgagataaagcatcagccaccctattatctgaccctggtttgtacacaatcttatactgcatgccaagtaacttggtaaacactttttgttgccaaggcgtattgagtctctgctcattcaagtggatgagacttttctggtcagtgaagatcagaaattccccatgcagcaaataaggtctccattgctcaattgccagcaaaatagctaaatattctttctcatatgtggacaagcattgtgtcttaacccccaatgacttgctgatgtatgccaaagggtgcccatcctgtaacaacacagctccaaccccattcttacaagcatcagtttcaatacaaaactgtttggagaagttaggtagagccaaaact

SEQ ID NO: 174120 - DNA, 393 bp, Zea Mays
ccgcgctccaaggtcgatgaggcgcgggacgccgcccgggataactccagcccagcatcaggcacatcagtgcaaacatccatcatgccaccgtatgctggctccgacaacagatcttctgggaccatgtcttcaagagtttgatcaaagttcgctagagataattcttgcagaccaatgagggcagataaagctggagaaggaacaccactgctttccccgctggctaggtaacgccggttgttgttccgaattagagggatttcatcctcctcttcctcaccttcatcaacaacgtggacagtacacccattggggtcagttttggccagatcacacctatcgggttcaatgtcatctaggtcacacccattgggatccacagtagtcggg

SEQ ID NO: 174121 - DNA, 351 bp, Zea Mays
atcggatatgacagacacaatcatttattcaacaattcaatagcatgattagtcaaattccttcccaattcaccatcatacataattaaaacttaataaaagaattattatgggcctacgggcctcggttaggaacactagagcttggaagggccagctgtctgtgttgctacagtctatgagacttggaagtggccacggggcacagcgcaggaagctagcaaggctataaggggcagccaacagtgggaaattgggagcgttaggtgtggggtttatggtgttaagatttgttctttgcgctatgtagtatgggctaggccaaaaaaatacattatgggtcgatttcgg

SEQ ID NO: 174122 - DNA, 759 bp, Zea Mays
gatcattagtaagtacctatgggtgtttccacccaagttcgcataaatcgtgctcttgatcgacactctactcaatctctccacctccatgattaagaatgtaatagagggactgaaggccatggggaaaggagttaaggcgataatgacatagatggtgatgggtagaaagttgttcctcatgaatgagtaatgtgtggctcacatgcacgactagcaaaagcctagtggcttgtcaagtcatggaagtattagacaacaacttggaaggtcacttccatagaggaataaggatggtgattcctgctatggaaaggagaacacaccgcggaaccatgacttctgccacaagtgcgataagatggaagactagtcttgacactataagagcaagtacatcttgctttgggcatggatgatgaaccgacactcctaataggtaaaatatttgtgctatgaaactaataagcttatgacacactagaaatttattcttgatgaacagtgcacccaaggtcaacttgagtgcgaagacacatatatagaacaatgttggtatgttgactctatcatcaaataccacatgattaggaggagagatagaggtattcatggtattcaacgtgggcctcactatctctagggagtttggttatggccccaacatcgacatatgtgggtgttacatgatcttgttcaagagatagactggtgacactaggcgttcataaatgtgtactacaccccaagctttagtca

SEQ ID NO: 174123 - DNA, 501 bp, Zea Mays
gtccaaaagcaagggagaaaaaggaaagtcgttgcttcaacatcttctgatgcgccgaaggcgaagaaagtcaaggtattgacacgtagaccgaagcccattcggacgcccgatgagccagagttacttgaacaagcagaaactgcccccctagccatagagatggctcctgtgatgtcgattgaagctagtgcagacccggtcgaagagctgaaatcagagaaggcagtagagcagccgaaggtgctggcagcgacagcaactccgaggaagaggaggatggctagtgttttggatgctgttctggaatatgtgaagacgccacctcctacttctgccgaagcttctggcaagaaaattgaagatgccagagaagtgattactgcatacatttcttctattcacgttgaagcgggatcttcagaagctgcgccagaaaaacttatgaaagagaaccttccagaaagacccacaacacctgctcccgaagcaccttctcag

SEQ ID NO: 174124 - DNA, 826 bp, Zea Mays
aatatacaaagtttgtcgcagcatagttacaaactccctggagactcaaactctccacgtccgacgcatgcaaaagtagttacagggagcatctatgttgcgacaagtttagactcaccggaaaatttcaatatgaagaaaatcttattgatgtcgatcaaagttcaggtaggttatagttgaaacccaacataaatcacaagtcaagattcaggcacatgtataactgtttcctatggtgtatgcactcctatagtcctatttaaggctaaatatttggatatattctatccttttaagtctccttttactacctctccccatctcaaatttggccttctcctgcctctcttcccattgctactgcgccttaggaccccacaacgtattggtgcttttggaggggtctccgttggacataaaaagatcaactgagtcaatgtaatcgcggttcgataaaaagatgtatgttatatccggatcacaagtctatttgtttctacgacatcccatgaattaatgtaaggggttcgctactaacatacaactgatcaactgagtcatctgaattgcagatgcacagaacctataagcctataacagtttcatacttcaaatatgcttcgaaatggataggtatagaaacctttcacagaaaaactacaacagaaatcaaacatactgcattcacaacaatatccatcaactgaccagctaatcctttatacaactgcaataaagtaagtccatgtaagacatgagtggcacacaggtaaatttattatgacatagcagatgaaagaatgtagcacctttgtctccagag

SEQ ID NO: 174125 - DNA, 1359 bp, Zea Mays
taacaacacaggaaacgcgcgcccgcgcccgtgcgcgatggcagaattgcaccggggtcctcgcgtttttatctaactgtgaacgggttcaaccactattcctacgggtctctgacgctttacaccgagccccccggatttctaattctttgcacgcccaagtccacgacgacggcagcgcggggagcactccggcgagcacctgtaccggccgactggggccacggctggattctctgagcatcagacaccaaattggatctacctcgagtattttccccaacccaattgcacgaatggtgaactaatttggtctggccacggagagcgcgcggatgaactcaagacccatgcgttccctacggtcagtagacccatagcccaattggacgggtcagtaagcatcgcagacgcatgagaaagcttaaacgaaggaaagggagggatgaactgacctagaaagggctggccgcggtgagcttgattctacggtggcggaaacccgatttggggcgaacgcgaaattcccgagctctggcgaacgattgtggctaattggcggtggctggttagctgatgaccctacggagctggtcacgggctcaatttataggagggaagggcggtggccagtgaatttcgggaggacacgcggcggccggaaatgaagaagaaggcgggcgcagtgaattcgtgtcccacggcgtggcaggcttcccggtgacgatgggacagccttaaggtgtcacgacggtgctgtagaacggctaggccacgcggcgcacggccgggaggcggtggttaccggcgagcttatcgggttctaccacggggaactttgtacggtggccgggattctttaatggccgggcttatccccggcggtgtgctccgagcgcttatcaagtcatcctgagcacgagttgagacgacggcggcgcaaatcttagcgcagggagggtcgccagcggcgagcaggctatgctggcgttctgatccactcgggttactgtaccatcagaagttcagtttcagtttcttgctacatgcctgacagagcaacttcagaactctttttctccagattttctatggcaacgtgatccacactctgcagcaaatttgtagagtaatataccatctacaaatttgttatgggaatcatacccaaacttgcactggatcatgtttaaatccaagtccaaagttagctctgtttcactgaagttctgaatttcagaattccaccagcctgacagtccaactttgggcttacttatctctggatttttcttaacaagtgagcttaccaccttaagcaaagttgttcttctataatcaggttacaattttgatgtg

SEQ ID NO: 174126 - DNA, 1039 bp, Zea Mays
gcgtctcgtgcgtccacgggcgtgggttttacttacactggcggtcaggacccactcgccagtctcagcgcgcttctgtttctctaccccgcggccaaatccggctggcgcaaccacttgcgacgaagctcgcgggtgttggttgaccgggtagccatcccgggttggctacaaaaaggattcacgcacccctttttcccctcctagttcgcacccaccctcatacgaacatcggagatagagaagagagtgaattcgtgggagggagagggcgcggcggaatcaatcgcgtcgccacctgcggccgtcaacaccgaggatttgagttggggtgtggcgggcgcatcacagcgaaccgctcggtggccggtgattgagtggaggcggcctcatgctcacggaatttctcgccgttgcactccaccgccgctgtttcgtggagcgccgtggccggggattgttgcaccgtcgatcgccggtatgttaccctatattaacctgcgacttcgtggcaatgtttggcctgttccgggtgaggtctttggggttagggtggccgttcggggttgctccggtgaacccgtcgtcgtggttgtctgatggtcgccgcctccggtggccgagagagtgacaatgggtgtgcgccgttgaatccatagcggatgcacaagatctgatcggaaaaaaacgtttcacgtgggttgacctgtagcatagatccgtaagcgaacggtcgcgatgggttcccgattcattaaatcctggtcatgagttctggatctcacggttaccatggttcaccgtttgagccaaccgatgatctagtcctcactgtcagttatcgatcgaacggccgagaacccttcataccgtttcggccgggatattttacagtcgggcccctagggttttaatgagtcaacccgcagtccacaccctatgcaaagtaattacatacaggccccggaatcttgtaaaccagcccctaaatttcctgatattcatgcgcacagtacaaagagttagaaaatcagagaaa

SEQ ID NO: 174127 - DNA, 346 bp, Zea Mays
gttcagatgggcaacacttccagatcaactaatttggcaatcgatcacacaagtttagagatctggaatttcagcggcaactcagaacagagggcatcgatcacacaagtatttatatgtaagcttgttctgtttgtccatgaaacaaagcgaagcagaccctgctggttgcagcatgcatgtaaagcatgagcacgatcgagatgctggctgtacaaagcgaagcagacctgttcctatccaaaaggaccccgatgagtacccgcgtatcttgttttttgcagatctgatgagatccccgccctttacacatgcagccatactatagttcaagcataaaaacttt

SEQ ID NO: 174128 - DNA, 695 bp, Zea Mays
ggtttcacgaaggtatgagggatgacatctcgatctctccttgcttgatgatcttattgtgtcgatccatcttgaagtgcttcaagtactcctcctccacatccttgatttattgtgcctctcatcgcaatgtctcttctcttcattgcctcacgtagtcctcgaatcgttactgatccatagtcgatggactctcaagagttgcttaatgatagatgttgctaggaaaacgttggtgcgatcatttgaaccggtcatgtatggctgatctttgctaggacacaactaattatgtccccagcagagtcaccaaaaagtgtgttggctccgattcgaggccgaacaatagaattgtactgtttagtggtgctctctgcggtgtggacggtccgtggcatgggtcctaatgatccacgcccctgctctaggagtgggtctcttctgctctcttcttagacggtccatgttctaggctggatggtccgcgcgtgctgagggtcttacaaagaacacaagaactcgcctccgggagggacccccattagggaggagagttccaggggatgccccaagatcggcaagggacgaccctagacgatcacaacaggaattcaggtaattcctgtcagccaagaatagatgggaatcaaccctaaaccatgaggtgtcggttctaggccgatggcaatccctgg

SEQ ID NO: 174129 - DNA, 386 bp, Zea Mays
attggtttatgtaatatatggttactatgcccctacttatgaattttgttgcggtttttgcaaggatgaaagacaaggttaagaatggactacttctaagtgtcgattggagttgaggcacacttagagtagtttaggactttgtttttcctttgaccatattataaaggggtataaactagtagcttgacctagataagtctagtgagtttagtgtggcgtaaactagttatctttatctctagctggtttaggagaggcccaaaactagtaaggatcaaaacccaattccaatgttgcaaaattggacaatttagaagggtttcaatgcattagaccttgtgttttagggttattggaccatagtggattggtctgactcctcc

SEQ ID NO: 174130 - DNA, 470 bp, Zea Mays
aaagcctctgggctacgcgcgtctttgcatttattacggataagacgtgcgcctgtccattccagtaacaggcggcgcgcccagtccacgctgcatgggccacgctgttactcacacgttaccatagcaagggcaatgactcaccaatactcgcgcgttaccaagaaaagggtaactgcctatcaatgctgcatggactgcagtcatcatgactcccgctgattactcatgcgttactaagacagagggagcaacgcagcgtccaataaagatcttggtgtgctgtcagcattaattattcacataatgtatttcttccattatgctcctgggcctgcatgtcggggctcagcatccttgtatgtgcctcccttaagctataaaagggaaggcacacaacgttacaagggacacactcaatacaacttacacatagtggaggtagggtattacgctctagtggcctgaac

SEQ ID NO: 174131 - DNA, 1002 bp, Zea Mays
ttttaaatgatgctttcaggttggtgatgttgttttgccaccttgggctaaaggcaatgctagagaattaattaggaagcatggatcagagttcagaactggtcgtttcactaacgttttgctgacatgacaactgacctaaactcgtggattttggaaatcatccatagcatcggccgatacaggcagcacctacactggtggtaatgaacttgaagatctgggcccaaaaccgtagagagctgaccgatggcattgatatgatagcaggccatctcatacgtgggtactgggtggggatgttgaaatcaaatcattccaatttaagactaaaaaacaataatgtaggtggattctacggtacttaactgcgcctacccgactacaactcttagttactttgttgcagagatggtcattcgagtttgcgctgtgcaaagatttgatagtttgaggagcaatggcacagccgcagtcccacaccgagggttttcatgccttgtagtagaataaaataatttcagggcacaaaacctttatgtcacattaattgtgtgcagggggtacatatacatcttctgatattcaataaattaataaatctggtggggggggggggggggggggagcttgtgagggataaaagcaaaatgagctccatccctgtatcaacttcaaatcttgatcaagttattgcattttgaggctacaaaggaatagacaacaataatagaaagaaaaggtacatatagatgtgcatcatggtcatttcatctccaccttgcaatctcttcactggaactctgtatatccagtgtttgttttcttaccttatgaattgttgtctctcggttgagttgaaagtctgcattcatttactgcacagatagtgtcatggttgttttttttttacatttagtaactgaacgttttctcttaatttgcatgaaaaatgagtgaatgtgttatgtagagcccacatgtcaggaaccgcaaagtgtt

SEQ ID NO: 174132 - DNA, 277 bp, Zea Mays
ctccttgaggcatgcattgttgtagtaagttaactattcaactggtatctctttgtgatagaattgatagagtatgccttgaccaagagatgttgtgatcccctctagttctgaggaagctagaatgtgcaaagtgcaagtcattcaaatacttgatgcacaactttagggggagcacacataacatgtgtcttttgagactaattgtttcttgagtgatcttgtatagtctcaaggtggaaaagagaagatgagcaagaaatggagcaatcaggac

SEQ ID NO: 174133 - DNA, 560 bp, Zea Mays
cctgcccgcgcttcacgggtacggcgctccggctatggtgacacgcgtaaaggtccggacgcgaactcatcctcaaactgagctttggatatcgccatgtccggctcccatacccccacgtcgtgtccagctcccatccctcccacatcatccctgtctcctcacctcgcgctcgtcgctcgtgctcgactcgctccaccagcccgccttgccgtggggcacgaccttccaccaccaccccttcgccgccgaccacgcgcttagagacgtctaggtcgtcagtgttggcgacctgctcctctgacacctgtggctccggcgacctgctcttctacaaccgcagccaccacaccttctgcctccccccaatcgccaccgaggtgcccatccagtcgcctccccatccggccacgccaccatgttgtcaacggccgcgtgcctcgtagctcgacgcctccttagccttacctctgcatctgcatcgaaagccatcagcctctcgcttgcttcgtttctactctggcctcttctctgcccaactcatacccccaccattcccc

SEQ ID NO: 174134 - DNA, 892 bp, Zea Mays
gtggaatcctgctttcttgcatcgcactaaggaactccatatattcacgatcatgcgttttgttgcattgcaattgccctttttctgtatctttctccaagaattcatgattatgctcatagtttaccagatcaatccgaacggaaataacattctctttagcatcatcgtagattttttaagtttcatcccagccttgcactgtgttcgtttcgaacatgtgttacgtatccttggatttccagctaccctttcagcattctttccttccattgaacaattcaaccatttacaattcttccactccctatatttcttcaacggaaatccaacctcatatgcatattgactataaaaattatacgcctcgtccacgttactaaatgtcataccgaccttaggtatcaatcttatatcgatattgtccggccgcgcaaagaaatttaacatttacgattcaatagcgactaaatctaacgtaatatgggagaacttacgtggctttgaagaatatgaggtgtgtcctgttcatgtggcccaatatgtctcatggggatgtgcttctctgcgccgaccacgtctgccgtttttgtgtgctcatcgatatgtccaggtgccctcaatgccgccggaggagtaacggagacaccctctgtgtatggggcgatcacagacgctacaggatgcatgtccattgaaatagacgtacctgttggcttatgcacagatgatacaggtggcatgtcatcgccagcgccggtgttggacatcttcttgccgccaatcgccggccggacctctcacttccgccgccgctaaccgccgccaatatctcagatacgcacgtggacgagcgaacgtggacgagcggctgtaaagttgtatttgtttc

SEQ ID NO: 174135 - DNA, 519 bp, Zea Mays
gccaactccttcaagatctgcttcacagcctcagagctccctgcaccattaaattcaacggttgattccaaagccaaaagttgagagaaaataccgccaactccagtagcatcagcattttcagccgttgtgccaacctcttccactttactaacagcagcctgatctttagctttctgctccttctccaggctatcctctagcacactgccagccctagcaggaagaaactcctccatgtcattccagataggctggcccaacaccatcactcacacaagtccaacacagcccacacgatttacaacaaaaaagaaacacacccctaatcatcgcacgacaatggctcctcttcagacttcagcttctactacttctgtcctgcttcatcaggtgtgacactgcagggccctggagcagcaacaacatgatggcttcaggggcggcgacccattgccgctactgggcggcaccccatggccggtgtcaggggcggcagagggcgtcttctgctggtgg

SEQ ID NO: 174136 - DNA, 499 bp, Zea Mays
gtcggtggaagggctaatctctcattgcttgggagttggggtgttgatgggggtagttggagggatgttggttgtagtttttgtggtaatgcgggaagggttggtgattgtcttcgtatcgttggaggtattgtggatggtacctgtgggctatagccctctcattgtttgcaggggccattccagccatatggtcattagcttcctttgttactaggcaatctctggtcgaatgccctacgtcttcgccatggaaaatgtagtagagctttctttgctgcagagggcctctcccacagcctctccccccttgctgcactaccaccgtgggcttggtgtgaggggtagtcttgacgttgatgggggccttcgcctggttgctgttgattggctacgttgtgaacttgaagttgttgttggccttgctcttggagagggtgctcttgttgtgaacctctagtccatgacttgctagactgcatgatatcctttgacttgt

SEQ ID NO: 174137 - DNA, 511 bp, Zea Mays
gatgaatgctgttttttttccttgtcttattttgccaggctgatatgatgatacccggaatagcaatataagaaggacaacacagaacaatcagtggtcgagtctaccacctggtctattctagaaagtccgaagggatccttcggacagtgtttgttgagatccgtatagtcgacgcaaatgcaccaatccactttattctttttgagtacaagaacaggatttgctaaccactcgggatgtagtacttctctaatgaatcctgccgcgaccaagcgagccagctctgcacggatggcttctctcttgtcgagcatgaaacgacgtaatttttgttggatcggccttgcctggggatagaccttcagtttgtgctcggccagttctctcgggactcccagcatattcgcaggatacgtctcggttatcttgcagaaactggacgagcgcgccttcctatttgtcatccaggctggaactgatgatggcagtcttgcattcatcggcgaac

SEQ ID NO: 174138 - DNA, 340 bp, Zea Mays
caaaaaattgattcggtacaccaagcatgcccaatatttgttgaaggttctccgccctactactgcttgctttgacacatggatgaacgccacaccacacatcgcgatggccatcacatccatggcacggacgccggtgcttagccagccccgaaccctagcttctccctagctagctgccgctacaacactaccctccctccatctctccgcgctcatgcacgtaccagcagaacttgccttgcctcttgttcgcccaccgccgcaccgccactatgcgaagcacacacaacgcgactgcatgcatgcaggttggtcagggactgccggcccaaacggc

SEQ ID NO: 174139 - DNA, 363 bp, Zea Mays
gttcacggtggcgcagaaaacaactttgggggaaacgcgaaattgggaggctctggtggatgatccgaggtgagagctggtgcactaggtgcataataacctagcggacctgattgatcactcaatttatagactctatcaggagtggcgtccaatttggagagagtgcgctggtggccggagagaggggaagtcactagcgtgagcgttatcgtggctttcaccgtggcaaagcctccggcgatggatggactcactactacagttcactacgacgtgttaaagctcctaggcacgtggcgcacgggcggcaagcggccaacgccggcgaggattatcacggccgaccatagagcaagtggg

SEQ ID NO: 174140 - DNA, 580 bp, Zea Mays
ctggaattatttttggcactagaaattcatttcctaaaaccttatcctactttctcatattttcttggactgcgcgcacaatacgcgaaagacaaggggctacctcaaaagattccctagactcatgctacacccggggaagggcggtgggttctatttttgtgaaatcaggggactcatagcaaagttgtctctacgaaggggtatcgaggatatctgaccgtccgatcggcaatagagcgccctgattagatcggccctagccaagtctcccgcttccccctactactgttggatccaggatccatgtccgggatctgaccatgctagagctcgatcacagccgtcggatgagtaacacacggtacaaatttaccatgcaaatgagatgtttcccactccatcatagtcgcaatcaccgaatcctacggtcaccagtcatcttcttcaccgtgtgcatgctcatggcgcgccccgacactccaacgcacccaacagcgacgaggagcgcccccagtcgatgtccccaccacagttcgcccacctcccgtgcaccccagatataatcgctataaatccg

SEQ ID NO: 174141 - DNA, 651 bp, Zea Mays
catttccaaattgcccatgctccaagggtgatgatcgaattaagcccattttgttcctcaccatttttttcaatggaccttgtgaaacctaaccatcaacccttgcttctccccttgccgatcattcatcaaaggaaacatcatctatatttggaggacctgcaggctgcagcagtctaaaccagaattctaatgcaaaaacacacaatgtgagcaggtgattgatcatctcagcttgatcacaaagagcacagcaggtagggtgcagaagactcatcatgcatgctgatcggcagtccattatctattatgagtaagtaaccacaaaagaaccaacacttcctggggcccaagattttcaaattctttcccaaggcccaagaggacagaaccatgaaataaacccttatcaacagacttgcctcaatcatctacatctatcgttaacataactaacaagagaagaaataaaccatttgagctcactttgatagtacaacacttctgtgaacaatatgtgcatgtgaaatgtagcctcgttttctcataatgcatatatctgtggtgtttgtcaagggcctcacactgctgtagtgtccataaagaaagcacaggaatcaacaatccttcttcgggaacactattgaagct

SEQ ID NO: 174142 - DNA, 561 bp, Zea Mays
cggtcaccgtttgccacctgcagtgctggtaagaaccttgtaagagcggggtaagacacttcataatttgtattccaccaccaccaccaccaccctgagagatagttgtagggctcacattgtttgttgcttttttgtctctgttttatgctaacaatgacaggaccaaagaatcaaatggacaaggacaaggggcctaagcttaacgacgatgagtgtgtctcttagctagaattgaaggagatgatgcacgcgatgactgaagcttttaaaaaataccaggactctgcggcgacatcctatgagcagcttgattgacgagttgctaaacttgttacacgcatgaacgtactggaggctcgtccccccaccaactccagccccagctaactctcctgtggacgacgacgacgatgacgacgatgtttatgcaccgctgcgacaacgcctcgcacgtaatcgacaaggtctgggaggtaatggtagacgttgtcatcataatcctgaaccagaccacgatccatttgctaagattaagttctctattccaccgttcatggg

SEQ ID NO: 174143 - DNA, 849 bp, Zea Mays
gcgctggcctctaaggcgacttcctgacccgaagcttgagctgctgccatgcaaccagaatgtggaggagaagaccctacgtgaacatccatggaagtgtgagagggagaaccaactcggacaccctcgggggctaggtcatagctcgcgctacccatccgagccggatcatccccggcaacaccctcgggggatgggtaagcactagcgacatccttgagggccgagctctctgtaacagccacctctaaggctgaaggaccttcacccacttccatgggagcaggacaatccagactagcctcctgacccttaagaccgcgctctaaggtcgatgaggcacgggacgctgctcgagataactccaacccggcatcaggcacatcagcgcaaacttccatcattccaccatctgccggctctgacaacagatcttttggaccatgtcttcaagagtctgatcaaagtttgccagagacaattcttgcagaccaatgagggcagacaatgctggagaaggaacaccactactttccctgctagctatgtagcgccggctgttcttccgaattagagggacttcattctcctcttcctcatcttcatcaataatgcgaacggtacacccattgggatcagctgtggccagattacacccattgggttcagcatcatcaaggtcacacccattgggttcagcatcagtcgggtcacacccattgggattagcttcagcaaaaactggcaccggcacttcctcagcagcaggagcagaaggaccggcatcctgatccaagcatgacactcggcgaagacgtctctttttctttttcttcccctcagcaggag

SEQ ID NO: 174144 - DNA, 591 bp, Zea Mays
gccaaaagagaccatcagcaaccctaacgaaggtggtttggttcgattaaaatataccttcaggtttagagaccaatttatcgaaccagacgacgactggctgaagtgtgttgaaaacaccagtgatgaactacttggagtctactccaaatctaaagataacgcactatctgcggccttcgggagccgaaaaagaagaggctaaatagagtttttgatgctattggatttatgtaccctgactaccgctacccaccacgggggcagaagagaaagagtgcaacttctgggaaggatgttgcttcaactgctccaagcgagcccgcgccgaagaggaaaaaggtgaaggttcttactcaccgaccgcgctatattgaaccggccacagtgcctgaatttggtggtaagacttcttcggctaccgaagccaaagaacctgcgcttacgcagaggattgaagagccaacggcaatgccgaagacatccttagccgaactagctgagctgaaggccgataatattgaagagacaggagttgaggggaccaaaatattagaagttctaagcccttctacagaagtgatagtgccg

SEQ ID NO: 174145 - DNA, 743 bp, Zea Mays
gggtgattatgtgtatctgaaggtgtcaccgatccggggtatgaggagatttaaagttaaaggaaagttgtcccctcgcttcattggacctttcttgatcttaaagcgagtgggagaagttgcatatcagctagaactaccgatcacctgtcagatgtacatgatgtatttcatgtgtctcagctaaagaagtgcctcagggtacctgaggagcagttaccaatggaagaccttagtgttcaagatgacctaacttatgcggagtaccctatcaagattctggacactttgactcgagttacaagaaataaggtgattaagatgtgcaaggtacaatggagtcaccatggtgaagatgaagctacttgggagagagaagaagagcttcgcatagattttccccatcttttccctagatcatcttaaatctcgaggacgagattatttttaaggcgggtaggatttgtaatacccaaatttgtaaaagcataaaaaatgagattatctcccttacatgtattgcctctatccatttacacatgtgaacaccacattagaaacaaataaataataaaagacgtaccattaatttatgcatcatgctgaggttttattttgtgtgcattttgtgatgatagaaaaatagagtaaaaagaagtatgtcaatacccaaattggaatttaaattctaaagaaaaagagaagaaaacggttacaaataagggaaaataaaaatagaaaat

SEQ ID NO: 174146 - DNA, 871 bp, Zea Mays
cgcccatcttgtctcacttcagccttcaaaggccgagggtggcgattgaaagtgatgccaaagcgtgtcaaaaggctttcaacaatgtctgtgctttcattgacacaagagacataatccaagagcacatagcctacagagtgtggccacatgtggatagctgggagatatcgaaggagactgttgctggatccagcaaagctggattagttcgattgaaatataccttcagatacagagagaagttcgacgaaccaaataatgactggttgaaatgcattgaggctactagtgacgagttgcttgggacatataccagggctgaagatgatgctttgtcctcagcctttgggggtcggggcaagaaaagattgaacagggtttttgatgcaattgtctttatataccctgattactgctaccccttgcgaaggcaaggaaaaaagagaaaaactgccgcttcggccaccactgttgtgccgaagggcaagaaaataaaggttttgacccaccggccacgatatattgaaacagccgtagtgcctgaatttggtgaagggaccttctccgctgccaaagcgaaacaagctgctcccatcgctcggagcgctaaaggatcgattgtagtgccgaaggtgcctatagtcgggttagtcgaagccaaagatgatgcggccagagagccagagttgaaaaacacagtgatgatgccaaaaattctgagtcctccggcaggggcagaactgctgaaggtgacaagggctcccgccacaactcccaagaggagaataatggcaagcatgctagacgccattgtggaaacaacaagagcactgactcctgctccagtgaagaaggttaccgaagctgc

SEQ ID NO: 174147 - DNA, 972 bp, Zea Mays
tttacacaaaccaggaactgaagttaccatacaaagccactaaatatcgaaggtatacagcatgtgtggacggtttatggtgaggcttcgagttactgcttcccttctctagcgagacttcttctgcacatgagatgaaataattgtgaattgctactcccaagcatggatcatctgttcaaggaaaaacaaacttcagaggctgctcaatctaaaccttgaagaactaaataggttgaaaaacccatagcgcaattcaggataatatccatgtaaccaccggattgaattgaatccgaagtctaaaacatctagcaaatcggtctctcaggtagagaacactgctagagctaacactacctttcctctcgcgcgggccaccacggccgtggacacctgctgctcatcatgatgttgttttcttgttcggaagactcggaattagtccggcgtgaatagggactttcgcatccttgcaggttgtaaatacggtggggaggaaacatctagatagcaagcaaaacctatagattatgatgcgcgtacgcctcaaataaaatgattccccaactgatgaacgattaggaaggtttcaatcagatttttagcgaccttctatcttaaaaagatgctttatttgactggcgatatggcatgttctctattctgaactttgagtacatgtatatattaaaggtaaagacaaaaaaacaccggaagtagaattctacatttgagatgagatttgaatggaaattctttttttagacgggaatttttttagacgcaatcaccggataccttggaaggggaagggcttgtgcttctttgccgttgcccagtggccagccccgccgcttcttcatcaaggcatccatcctccatcctgccgttgttaagcatgtcgaggccggacaacatgtacgatgtacctcattcttggctgtgcggcggcgatgaggtactgtcgtg

SEQ ID NO: 174148 - DNA, 1466 bp, Zea Mays
taccttactccttcagatgcatgccttttagagctttctacctccaaccctggtttgagaacatacctctcaggcccttggtaatttgcaatctgaaagaacatccaaatgtcaagtgagtttactccttattccctaaaattttcctaattgggaaaggacatggtaaaaaagtttgattactcacattcttgacgatgctctctattttctttgatgcatttggaaatgcatctgcagcaactttctccaaggcctgcatatgattcataacatgtgagcacaaaatcagacaaatcttggtggaataccaagtgaaatatgcattttaaaaatcaggggaaggaataatggaatatggtgcggcatccataaacatctagtaagtatgataaaaacaaaaaaaaatgttgttactgtacagaacaaaaaacacatttgccgtgtatgatttaacaaaaacatgctactccctctattctaaagtataagacgatttgtcttttttagaaacattatttttactatgtatctagacatagtgtacatctaaatgcatggcaaaaattacatacatagaaaagtcaaatcgtcttataatttggaactgaaggagtacttaaagaaagcatcaagatacaatgacacttaaagaaagcatcaagatacaaatgggtttgacagccaaaggagaaggcaacaaagtctgcagaactgtaagttctgacaccttcaacattactaaggtacgagtcttacaaagaattgcaggaagtttctgagtactttcccatttgcacatgggcttgattaatgtcatgtgacccatgctcagagagataaagaaagatttgttacctttaggcccattccttttggattttttgagagcacagatatcaagtagcttcgcacttcttttgtattattatccacatttgcagcatgagaacttgcacggcgatttatacctttgttagacatcttacttgcagtcgatttctcatgtttactgttttcccctttgttcaaatcaaaaggtgttgtgacttcattatttgcatctgatccaacaggaaatgaaggattgcttgctccaggttgttcaggagaaggtgcaggtgaactcgagatattccctttgggaatattgttagataacttgaccttcgaaactgatttggttggggtgataacagcagctggatcaggcaaataaacaacagagttaaacataaacacagaaaacaaagaaaagaaagaaaaatatgacccagcaggattagaacctttattcttcttaaaaaattcattcttctgcttccagtgcatcctccgtggattgcctggaagaatacaacaaaaaagcctttcagtctcaagcaagttggggtaggctaatagcactaaattgtaattacatcctctaacattagccagttgagaattggtattactaatttact

SEQ ID NO: 174149 - DNA, 496 bp, Zea Mays
caatgacactaagttgttgtgactgacacaatttctatggcatgactttgtctgttagaagcatataaaacatcaatcgggtaccaactggacccataagactgccaatttaaaatcaaagttagcttcatgaactatgatagcacgaagaaacaacacgcaggtgcagaacttgaccacccaagaaattgcaaaattaaataggtattattagcacaacaacacacaagaagcaaatccacaaggaactggatggaggaaggcagcaaacgcaggagaaacattttgatttcagggctcacaatagagaaaatattacacataacatagcaagacgatgcatttgccgaagcaatctagacttcctaaccaagcaaaataggagcaagcaaaccaagccgtggctcaagaacggggcactaaaaaaccaaagcaccaggtggatcgagatggacgtaccagtggatgtgccaccccctctcatagctgctgtcgc

SEQ ID NO: 174150 - DNA, 635 bp, Zea Mays
ggggcgaaccgacctccgacgaggttcaacggtggctctccgctgtggctccggttctccgagatcgaggaggtgggctagcatggccagagccaggcgaacatggttgcagggtcaatttggctggtggcgttctgggaggggctgaccacggggaggtggtgggctccacggcggcgaggtcgccgacgaggctactaggtgtgatagtggggaaaaggaatggtgttctgtgcccgtgacgaagtggtgaagtttgtgaactactctaatttgactctgagctattggagaggggagggagagctcactggagtgaaggaaggcagtggcgccgagcttgattgagtccaggggaggggagggagagtggccgaggccggtgcgaggagaagtggagctcggggcggcccttttataggagcccgtggagaggtggagcggaggctgccggacatcggcgaggtgcacatcggcggcgataatggtgcacagtgccagggacgagacggctcggggcgggatgccgtgtgagggtgcgagcacagtggacaggggggcgaagcagtgcctaacttcactgggacaggagtaatggtggagcggaggaaaggacggtggccagcggagttctc

SEQ ID NO: 174151 - DNA, 742 bp, Zea Mays
caacttcagccgaggtcttcccagtcctcagcgtgaacgtgcacgatccaaattgagctatcttatcacctatttttctcttctgccagtgaagacagtaattcttcgcgaagacctccacagatggctgcccactgtatgaggagacaacccagacatacttcgcgagcgtcgccacagcatttggtgtcaactaatgaacttgtacctcgaacctccgcaaaacctctactacaaactgatgcattggcaggcgaagaccagcagcgaaaaagcttcaaaaacaaccaattcaccctctagctcagggacctcttctgcccctagagcccgcctgacgccattcccaaattaacctagccgctgcatctccagcacacggcccgaaaatatcctcgaggtcctgaactcgacggtgtggccgggctgcagttctaccactaccgaatggctcaacgtcttctcagacgacggcgtggccgacgacgcgctcgcagcagacaaagaagaggatgacattgtcacgtaccatcggcggcagcgtgcgatttgcttgatacgagcccagatcaccggtggataagaagcaaatagggcaggcgagcagatgtaaaactagggttttccagcgcgagctcgagtaggcaaaagcctcggtcgaggccgactttttataggcgcggaggtcgcctcgggaaacccacaatcccatagtaacacatcccatcaacggtcacatttc

SEQ ID NO: 174152 - DNA, 675 bp, Zea Mays
aaaaccctgggtcggcccacctcctctcctcccgcacggcccagctgggagctccgcaccctgataggtgggcccaacctgtccgtcacttggtcgcgcgcgctccggggttcgcggacgctgacatgtcgaccccacgtgacagtggctcactaccgctcggccgttgtcatgaggctggtctttgggccctcgctgccagctcctgcgtgtaactaccggcgcgaagctcacgcaacggccgccacgcgcgccgctgaccccagcgtggccgtcgtggtcgtagctcctcgcctacaaatagggggaaccctggcaacgcacaccccccacccgaacacacaaagccatcggagcgccaccaggagagactcgccgcgagcagaggagtgatctgagggcggccgccgtcggtgaactcttgacgccatcgttggggcttcggtgtggaatttgggtgctgtgctgggcatcaagagcatgttggtggccttggcgggggtcgcggtgcatcgagaacgggcgaatttctcgccgtcgtcgcgtcgccaccgcggttccgcccttcaccgtgggctgctgcacctcctacgtgcacctcggtgagaacgaccctcatcgcttcgtactgttatcctctacatgtagcatagggtggattaggggatagccgtg

SEQ ID NO: 174153 - DNA, 699 bp, Zea Mays
ttctacacaatttcataaagaagaatgatggttctaaacagtggctaaatcagaattctatccaggtcaatcctaccgagatagtagatgtaccagatggagatgaacagtaccaagatgatgtactatcactaaatgatcgtcgtcgcgcaggaaatattagaaggaatcaaattgcacaagctatgtggactgattatgttgcatatttgcaaagaagtaactagtactgattatgttgcatctgaaattaagaaataagtactaagaaataagtattaccttaaggtgtaattgaacccctgatgtaagcatctgcaagatctatctcatcacaaccaatgaatatctctctagcctctttatctccttttagaaatttaattgcttcaagtctctcttgctgagtaaaagaaaattttcaatttttcaatacattttgtcatactgaatggatcattgttggggtcacatttctctattttcctttgtgtaagttgaagttgtctctctgtgagatccttatagacctctagctcttctcgccgtaaagcaatcaactcatccattgaagtctcattgtttatcttacatttcttgggacggccctccctaggtgcttgtgcctccctagttgcttgtgtctccctctcagctatttccttaaatttctcagcttgtgccttttttcagcttgtg

SEQ ID NO: 174154 - DNA, 587 bp, Zea Mays
caaggccgaagctgccgaaacagcgcccataacagaagtaatgaagcgatcaggtctagttgtgccaggggaagttactgacgaaggtgcttccaatgccgaagctggacaaactatggttgagggtgagagtgataatgaaagcgaagaggataacaacattctgaacccggcaaagcctagtcatcttgaatttgaaaaatctactataacagaagatgacatgactatgatgaaaaactgggctatttcggggagtctgagagcaagcttgttcgatttgctggggaagagataattctggagccgagggaggacgaagttatcgtctttaagagcttcttcagagcagagcttcggttcccccaaaaggacatgataggggaggttctaaagaactttgaaatataccttcatcagctgacccccaatgctattgttagacttagcgtcttcatatgggttctccgaagccaaggaatggatgctaatgccgaagctttttgccgagtgcacgagatacactaccagacaaaggctagagcagatggccttcacaaaaactttggctgttataattttgcata

SEQ ID NO: 174155 - DNA, 688 bp, Zea Mays
ctccaataattattgggctgtgataacgctcatataagactcctactcgatcaacaagacatttatttatcccatgggcatggaatgtaatgatttataaaagcgaagcatcacattgccatacaacaaaaatcatgacaacaccgatagatactatccactaaccgtttgaaaaactaaacttacttctcgcttgccactgcatcactcctcaatcacatgaccatcatgagcatcctccacacgattatataatagcgacctaagcgtcgtgttacacaatacatacatctttcctcgtcgcgagtataaccatattacggcatatacccgcacacctcaatcaattatcttacgtcaccaccactataatacaccacggcacacacacatacgtgtccccacgttacgcacaagacatcaaccacaccagtgactccaataggatttatcatattccccattcacctcgactatcacaatcgccgatcatatgcataaaacaaatacacctttcacgtagacacctatcgatgcattccccaacacataatccgcaatttaaaaatttatccgcacagcaaaccacacatcaaatacattattaccgaaacttaaaaaaacatccaaccctctttctaactcgtttcctttcaccagaaacttcaatccataccgtacatttttt

SEQ ID NO: 174156 - DNA, 477 bp, Zea Mays
aagatgagcgcattgcatacatgaaccaaaatcatgcaagtaaataagtaataaggcggaaaagcaaactctgagctaataatgacggcaccatggtaagttgaatcgaaaccaatagaagcaaacgaccttgaatctgcacacatgcacagtgacaaccaaagcagcgaaaggctagaggaggcggcctgggtcgacaagtggggacgagaggagagcataccgtggatgcgcggcggcaaggcgacaacatttctaggggctagcaggcaggccccggcagcgacgaactggtggagacagggggcacgaccacgagagtgaattgccgttgccgttgccatataagtcatagaacatagaataggaggggccactgttgccgttgccggatggggtcggacgacctaaggggacaagctggggttgaggacgaggaggagcggggcaggccagagatgagtaggttagcggtgg

SEQ ID NO: 174157 - DNA, 578 bp, Zea Mays
cctcggtttactattcatatgagtctatgactatgcaaaaaacccctggtttctgcgaaaacgaacacgcgatccttcccctaatggaacagtgaccgcggcggaggaaaagggtggaggggcttaccggtggtgagactgctccagtgaagtggtcgagggtgtaggggaggtcttgacggtcacaccgatgtgcggatcgtcaccggcgatggtcggatgaggtcagtccacgtgcgcaggcgggcgaactcgtcggcggcgaggatttcagcctgctcacggcatgatagtccaattggttagcttgggaggctcaaccaggtggtgtagagacggtttgcggaaggaatttgagaatggcgcagagacttacccggaccatgttcgccggtgagcggaaggagtccggcgagggtgattcggggtctccggcgaggctctgccgggtccgaggacttggggagcttcaagggcctctggcgaagctaaccgagtagctagcgcagcctagaagtggctggagtgagctggccgtggtggccgaggctcgggtggcttggcgggcagtggcgcgg

SEQ ID NO: 174158 - DNA, 1077 bp, Zea Mays
gctcaaccttgaactactgacctactgcccaggacctcgctcctaccccgcgtctgatgtcactaaaatttcgtcatgtctatgttcatccaagtaggggagcggatggatctagatgccgaggtaggggagtagatgtaactgggtgccaagaggtgcaagacggagggaggcgaggggaacctaaaccaaaatcccacactagagcaggccgacatcgatagctccggcgagaacgacgggcaaaaccagaagccatcaggcaaggggaagaatataatacgggtagagtcccccaaggactacgccatgtctaggacaggagagggcagactactaacagcacatatcacttctatggtatgctttgcgcccacttagcctctccatgtgttgctcaattatgtcatgtgactcatgtcttatgacaggtgagaacggaaggccaataacatagcttttttgtagggaaggtgattccacaccaacaagaagaagccaacattctataatttttgtagacaagggaacaccaaaccaacaactaatgatcgaccaaaggatgaagattcttcaagacccgatgccaggatgtcgccaggatgtcggtggtctggtttatgaatgaggaagcaggaaaatcaagaagcggtagaagttgatctatcccttgactagccacaaggcttacagaatccttctgctgagatgttgccagttcaggtgatcaacaaggcactaatgctctacgtgcaatcactgtaacaacagtttgaggcaagtagtatagtccgttcgaagctaatcatgtgccgtgggattcatccacctttcgaaagtcctacgaatttcactattttttggcatcgactcctctttatcgagcttgtgactgtgagcccgctcgactttagcgacataactaccctcatgcaagaagttgtaagttgagcatgtcctataatggatcagttcagtccaccagattagtggttgcttacacatacacacggtgccccgcaaaaattcacacatattgaatattgaataaacattcgtgcaaccatacggtgccag

SEQ ID NO: 174159 - DNA, 797 bp, Zea Mays
aagaaatatgagtgaaagaatcaaaatgttcatgatccatgacttagactagatggaaaaccacttgagatattttttctaagtcataggatccctctcaagtttagccaaagcaacttggagaagattgttcaaagatcaacaagaagtcagaaactcaagttctgaaatcgccaagtgcggaccgtccggcccctactggcggaccattcgcggcaccgctttgacttcgaccaggaactataaatcatggatagtccgactaaaccgcggaccgtccagctacaaagcacggactgtccggctataattcacggaccgtctgcatgtgaagacctgattcagcctgaaggtgacaagttgagcaaaaggaattatagagctggcgcgaaccgtccgggaccaagggcgaaccgtccgcatggtgtcaccgaggcagatagtcgttgatctagccgttgatctgtcagaatatccgttgaagatgtcagaatcgaccgttggagggtcgcggaccgtccgggccctagtcgcggaccgtccgctagtgcaatttctggcagatgcgccccaacggctatatgggtggttgagggctataaaagccaccccaaccagcccattcacaagcattcattgatccatttcatacacaagagttgggtattcactcctatctactagagcaacacttctatacacatcaaagcctcacaagtgccacaaaagagagatcaagcaagaaatagctactcgtgtgcatttagtgatagtgccttgtgagaattattgagaga

SEQ ID NO: 174160 - DNA, 847 bp, Zea Mays
tataaaatctcagaaggtgttttttcctcaaaatgtttcttaatgcgatttaagtttttttcctgacatatattcctttcattccatgtaggatcagcttcaacaaaaggccaagcaagagtctgaaaaatttatgtcttggaaggctgcccctgaaaaggaagtaatacaggtacttgttcttaacatgttgatcatgtttatgaacttctttctcaaagatctcgttgtgatagtgctgtatatccattaattagctcaagaaggaagggagacgaaatgaatatgacatgcacaagctcttggctttaaatcagaggcaaaaaatggtaaattcttcatttttcctctttcagctttaagatagcatgattgtcgcctacaccattctgcttgaaattgtaggtcttacagaggaaaactgaagaagcagcagctgctacaaaaagattcatggagttgctggaagcaaagaactcatcacttgagacatatggtaggaagtgatgtccaatggcttcatatttttaccattaggtttcatgtgtgctcattattcctagctggttatacttttactagttttggtttcttgtttttacaggcagtggaaatgcttcggggatgcaggtatccttcgagaaatctttgttagggaatgaataaactatttcccatctgtgttctgtaacgtgtctgaaacattatttttatgtcactaggccttaatgcgagctgttgatgatgaactggaagtcactataagagcacatgaattacgctcgtattaccagcgacaaatgcaagagtaagtctttgttttgcattgataatttgtagatcctga

SEQ ID NO: 174161 - DNA, 442 bp, Zea Mays
tgggagatcactgaaatggcaaccaacgccttgacttgtggctgaacagggatatcaagaccaatccaggacctgctagggtcggttttctgtagccacaaccacctagcttgcagtgcccagcttctgtaaagcagatttgggaggccaagaccaccaagttgcagcggcctagtaaccttctcccaagccacaaggcagcaaccaccatttatttcctttcttcccttccagaggaaagcccgtctaattttatcaatagctttgatcacccacttgggaacgctcatagcaatgaggagatagactggaatggctgagaggacgaaacgaaccaaggctgttctcccagcgagattaagaagggatgctttccagttaggcaaccttgcagcaatcttatcaacccaaacaatgaggtcacttcttcgcagtttcttgt

SEQ ID NO: 174162 - DNA, 667 bp, Zea Mays
ggcgagccttagacgtagggaggcgaggagatggcgtgcaggcgagctgggcagaggcgctgaccgtgacgggggcggcagcatggcggactcggacgcggtggtagcctctccacgacgtgggatcgcgagggggcaggaggaagtggaggctgagaacgagcgtgatggagcttgggtttcgtgatttatacggacaaggaaagaggaagagttgctggaaggaagaggaaattatggctggagatttgatggccattgaagctgaaaaactgaagaatttagaacgccattaatcgccgggagaaatagccggcacacagtatgcgagtagcacgggcgcgagcaagcagcagggaaaggagtggctcgacggtgcgcaactttgatttatagaccgagagggagttaccggtagtaaagaggtgaggagaggaacggaggggtcaaccaccattaatgaggagtaacagctgttgctcaagtgggcagagagaggaaggaatcgacggttagtggcactccactacgcagaggcaagatggcttggtgagggcatgccggcagtgctagacctcgtggtgcaaggagccaatggtcaggcggtggcgcgctcgatcgttccttggcgaagcaaacatgagagagttccgtgtggaagatgaac

SEQ ID NO: 174163 - DNA, 276 bp, Zea Mays
ggttgagcttctctgcatcttctgctcgggcaatcatctgacggtggtgccgggccaagaaatcatactgggcatccagggtgagcaggtatgaagtgaggtacacgactgtggggtcatcctcaagcagctgctgcccttccaatgcacgcatcctggccatccaaactggacagtctctctgaaagggcggaaagaatctgagcggggtgtcagccacttcttcttcatagatctgacacagggccctcaatgccttgcgagcgacgacttggc

SEQ ID NO: 174164 - DNA, 573 bp, Zea Mays
aggcgtatcgagcctacgaccctggaacgggtcaggtccaagtcagccgcgacttcgtcttcaacgaggacgcctgctaggattggaagggcgagcagaaggaggatctcctggacttcactatcgaccccgtcgtcaacacatttcctgaatttgcttctgtgtcaggttctcgtacacgggagctcactccgttgggagcgcagacaccggtccaggcccactcgccggcgggcacacctgtgccaccgtcgggatcaccgtttccagcaacctctaccgcgagcatggggccaacggtcgagctggtgtctcctcccagccgggttgaggagatgttggacgctgacgatgatgtccatgctgcacatcgttttcacaccatcagcaatattcttggggctgttcagaatccaggagcggtgacccaggaacaggccatgcaggtgtgcctggccgacaccgaggagccggtcacattggaggaggctcaggcacgtgagtgctggagactcgccatgattgacgagatcacctccattgaagctaatggaacctgggagctggtggacc

SEQ ID NO: 174165 - DNA, 654 bp, Zea Mays
aattcttgcaccagatctctagtgctaatttgtttagccaccaccctgaattctgctacagacagttggcatgctgaccctggcttcatgttacacaggggcctggtcattccgaagtttagagttatcgggcacataaccatcgtcatcagtttctctcttttcttctcatcagctttgatataaaaccattcacctttccagcctgttggccacttggtgcgatagctgagaaccacagccttcgtatccttgcgatacacaaaattgtagcaaccaaagttttcatttaagccatctgccctggccttcgtctggtaatgcaactcatgcactcggtagaatgcttcggcaatacgcaaaattgtagcaaccaaagttttcatgtaagccgtctgccctggccttcgtctggtaatgcaactcgtgcactcggcagaatgcttcggcatctgggtccaccccttggcttcgaagggcccaaatgaagatgttgagcctaacgatggcgttaggggtcagctgatgaagatagatctcaaaatttttcaggacttctgctatcatctcgttcagaggaaatcgcaatcctgctctgaaaaaactcttgaaaaccactatttcatcatccttcggcgttggagtggtttcttc

SEQ ID NO: 174166 - DNA, 902 bp, Zea Mays
cttcttacctcagaccgagcgccaggaaggattgcccatgcgacgaggcggtcctacggcggtgttggatctccggtgagaaatccgaccagcagccgaagtccccgaaccccgaaaccacctccaacacaattcgtggagcaaggcggatcaagatgtagacctcatccctgggttcgcgacgtcgagcaagcaggccacgcagccctgcggctaggcggcgatgttgtttcccatcgagcaatccaggctacccttggatcccatccttccgtgtgaagtcacggctagctcacccacgaccgagagaagcgcctgagcaacacaccgaggcctaggagatgtcaaatcgcctgcacggcggcggcggcccagcgcctatttctttggttttccgcctcgagttgatgttgggggctcggatagatggataagggagcgggagtggctgggttatataggggcggggcgatgcagtcggccgagaatctcggcaatttagttgaggagcccccggattccggtgatcactcacgatcgttatgagctcaccgagcagagcgtgcacggaaaggggaatcgccaggattccgcgtaggtcgttggggaggaagacaacgctgaccacgcgggtccacccgtcatcgccacagcacgaagtagcccacgcgtagcagaaccatgtgtggctgccaccccgggcccacgtgtcggcgcacaggtgacaagctgggctgtgcgcacggagaaaaccggaagatgggccacaggggaaaagaaatcggcccagtgaggttcaggtgagcctttttcttttttctttttatttacttatttttcctgatttctattttaaaattcaaatcaaacaaggttgaattccaaactttttacttttagat

SEQ ID NO: 174167 - DNA, 338 bp, Zea Mays
ggggatgttgaggtcaaattggaaattgggcacaggttgccccaatccaaaaaattccaccggaagttgatgcccattatgagggtacggaggtacaggttcttcatcctcaggcatgttaccaagcatgaactgctggactatgtcacactgaacagtccaggaaaccccatgaaacccttcagctactgaaaacacaataaactatggaacctcctgcagagaagtcacctgtgctctaacaagaaatctagtagcattagaaatatccggatcccacatgagcacccgaccaaaagaaccaatagcattctgaatgtgctcgtgtgaccagaaat

SEQ ID NO: 174168 - DNA, 1220 bp, Zea Mays
aagaaatcggcacacctacctcaagtttcatggtgcgcaagaacagcaatgacggatctagaaaacttcgagaggctagacaaaataagtacatatactataaataaacagctttatctatatgttacatatatttaactatattttaatgcttcgtgcacgtttacaaattcattggcactaatgtaagagcctgagtaagaccctagccttgtctgcacctgggtccgccctgcgctgagccattgataccctgttccatttcatattgcgttggtctccaacgacgaggatatcaaggatatttttttctaaataatactacaaaaacaacaagaaagttatttatccaaaataagttggtgtcggaaatgacctccggactatgggatccgacggtcagtgagcatgctgagaaaaaattccctgatcgccggtggctgttagttagttggaagagacaggtacgtcggccccgaaaggacctgaccccggtcgaaccatgtggcaccgagcccagggtcaagtgtggcggagcctgacaagaaaggatgggcgtgtcagaagggaaccactcaaatggatcatgcgttcggccttggactgattcgtcataaatgaccggttgcattaaccacgcctcacaccgagccacagcgtgggcgccggtccgtttcctacccatcacctatggacccctcgggcaacattgcgctcatgacctacgagcccccggactgcgacgcattaatggcatgtcgtccctcggcctgcggcacacttatgtcctattgaactaggcctgtgtgtgcagacctctcgtatggcactaaacaacgggctacggcgagcccaagcgaagcctggggttggcgtagccggaatgatggcacctgggaccatcatcgcccccacgtcatccaccacgataaatacacgacagctaggcaaccccgggtccacaagtacgcatggcctcactcttagtaaaacattggttttaccctttccttatgggcatggcctcactcttagtaaaacattggttttaccctttcgttatggctccttcctggggaagccatcgctagctgatccctactccggcctataaaaaggagatctcgacctccgagaaagtgaggggaaaacaaggacaggtcgaatagagagctcttggagacaacctgacggctttagacagagacgaacccacaagg

SEQ ID NO: 174169 - DNA, 1016 bp, Zea Mays
ccgctcgcgccatggtagcgtcctgtccgccgtgccgaacaggtgcctgtccagcgactcgttctccatgtactcgtacaccagcagcttgtgcttgccctgggagcagaacccccaggtcctgacgaggttgatatggttgatccgtccgatcaacgtcatttccgcccagaactcgtcgtcgccccccgccacgttcgtcagcttcttcacggccaccactttccctttgtcgagcacgccgcggtagacgacgccggagccgccccggccgagctcttccttgaagttccccgtcgcgtccttgagttcccggtacgtgaacctcctgaattggcccctcaccatcctgtagcctgcctcctctagcgaactgggtatgctctgcttgctggagagaaaccaccagcctgtagcaatgaagataagatcgagaactcccagcactccggcgaacgcgaacaggtacgaccattggaacgtgtccggcgttccttggacgatctcggggccgtcaggatcgcaagcaaggccttgggagctacgtgcggacactgaccgagccgagggatcgaaaccgattggcactttgaggtagatgttgcctatgaagtctggagacgtgtagccgctgaagagggagccttttcggtagcatttgccatgcccttcgaacggccggtaggagaaggcggcgcacgagcacatctccaagcacagtttcttgcagtactcaaacgtaaccgagttgttgtacgccatgtcgtggccgtagaagtcggtgtgcggtacctcgacgaacttaaacctctgctccggcagcgccgcttggctgcagttggtggtgacgctgaacatgggcttgcagccttgtcgccagtcgtgctggtcgaccatctggtgccccggcgcgcacaagcacctgaggctcggcaagtacacgcagatggcgttccggccgcacagcccgtgagtggagcacgcctgcgccatagccgcccacgtcactgtccaac

SEQ ID NO: 174170 - DNA, 726 bp, Zea Mays
gccgcgccccgccacgacgagctagcaatcagcttcaacagtggtatgcacgctacgctaatgatgatacgccgagcaggtgcgagcgaggggaaacgcttaccgatgaccactcgaacaacgccttcgcgatttcacccaccgccgagcgcagtcgcagaagaatcccaactgcagcggtgaccggtccgagctccactctgggtacccggctcctgcggtgaccacccgaccgcccagagcaacgaacggaggtgaggcgacggcggcgaccccaactcccacgacgaatcccgagctcccctctctcctagccggtaagtttggcgcggtggcggcgctgaaacaggggagacggagccagcacagcgactctttataggcgtggccaggtcgggatgagggtgggcgcaacggacccagcaaacccggccgacgggcgcggaggtggttgaggtgtgctattagcgcgcggcgggatctacggcaagagctccggagagaagaacacacgatatctgacaaggcgggcccgcgttccagatagcagaagggagaagcgagcgcacgcggttccgtttccagctcgcaaccgagaaggacggaagacctgacaagggtggcccacacgggagtgtctagtgcaagggataggctgcttcgtgggtcccacgcgtcgatggcgtgagcgagcgcacggctgaccgaagtggtccacctgtcggc

SEQ ID NO: 174171 - DNA, 509 bp, Zea Mays
gcaatgatgaagtcgctcgtctcgtctccatgtgtacaagaggtgtacatcataaagatgaacttcaccactacagaattaatgtttgttaggagtgagagtacgagtacatcaaacataaacgctcgcgttcagcggaggtacctgactacggtaggtgcagccagcgtacctagcttctgctgtggtaagaggcaaactcgtcagtacagtacctcaaactgaacttcccagtcactactgtcccggtacatgagatgaactgcattgtgctggcactgataacactagtgtgattccgtaccagctctagtcgtttaaactactgtgccactggataaaaaagagcagtgcaatggtccacctagctcttctaagatgctgtcgctttttacggtctgcagcagcagcagaaccagcagccagatatcagccctttgcgcacatgcgctagcacatggttaaatgctaacggggtcatgtgtttgcagacctaaagcatatgtgac

SEQ ID NO: 174172 - DNA, 313 bp, Zea Mays
cttgtatttcatatagatctgatgatatcccaaaaaatagttgagtagagacatgacttcgcatcctgctgctaagtcgatgattttgtctattcgtggtatgggaaaatcatcattggggcaggccttgttgaggctgctgaagtctatgcacattctctatttgcagtttttcttcttcaccatgtctaagttggcgagctaggtggggtagttgactggctcgataaacttggcctcaagtagcatgtggacttcgacttttgcaactttagtattttcgtctcacatttcgcccagcctctgcttcttt

SEQ ID NO: 174173 - DNA, 821 bp, Zea Mays
cagggagagtgcatcgctgccaggggaaaattgctaaatactatcggcatacagtcgggtttgatccgtgagcgttgctgggagctttagagggtgttcgcagtgtcctcgtccgagttcggtgaccagagatccggtgattcgtcgccattgccagtgctccgccgtggagccgcatcgtcgcgtgggtagagcattcaccgccccgatttgaggtaaaaccaccccatcctctttgtctcactcacctctgcgcatagcaccccttcggaggtagttttagggcgctaaatcgcaatcaccacgcccggtcgggactgctccaccgtgggctgaacgcgccgccgtgcgtggtgtactccgccgtggccgaagggcatgggtacgggatgacccctctctgtccgttggatcctttagtaacggatgagattagagccggaaaacgatcggggttaattagatctgaaccgttggatcgcgaatcgactgtcttgattagatccgagcgctcgtctgtcaccgccgttggatgcgatctaggctgatctggtgaacctgtggtgtggcgtgctgtcggccgtggattcttgatcgtgtagcctacattgcatacccgttcagaattattatgttatgatcctagccgtcgtcttcagatctggcggtcagaacacttgcataccccttcggccttgtaattttgcgtaagagaccctggagttaccagaaaataattcgccgtccaactcggtggtagtctgagtctactaaagttttatagtctagcccctacatttctctaattttggagcgcagtc

SEQ ID NO: 174174 - DNA, 313 bp, Zea Mays
atacttttgaattgcagaaactggattttgcagtcgatgggataagcttggcaagaccaaataactcaaaacccaaaggaagaacaataaaggggagtgaacaaaaggttattaaattgggagcaaaaggtacaaagaaaatgaacatgaaatgccagaagtgtggaattgctgatggtcacaacagtaggacatgtttgccattggaggaaaatagattacagttggctagccttgctggacgtaagagaggacgacctcctggatctaggaacaagggtggaagtaacgctcctcattggaatgagacaac

SEQ ID NO: 174175 - DNA, 462 bp, Zea Mays
ccactccgactatgacccgtggagacggaggaagagcattccggcatccaccagcgcctgtaggtcatcgtcggtgatggaggatgccaaccacaggtcgtggggaggaagcacattcactttcctggacatcaggactggggaagaagacgagaggagaatgcaagagtttttcatggctaaaggagtaggcggctagggcaggaaggtgagagcagagggtaaagaactgaaaggtccatctcaggtgaatttataggggcaggcggagccaccgagtcttgggccgagccaccctaagacaaaccgaaagccggttgggacgcttcgaattccccgcgcacgtgtgcagcaacggtcagcatgcagaccggcgcgtcttgtcacatttaattcttgcccttcctatcggctgacgtcagacaacaagcgctgcctcatgttacgcatcaaaagttgtgc

SEQ ID NO: 174176 - DNA, 496 bp, Zea Mays
ctcttgtcttgctatctaggcggtattgtaatcgttcaaccctttttgcaaaaaaatgttgtccgtcctgctcatgagaagacccccctccaaacaaccctgagtttagcaagtgaaacccttaaaaaatctaatcacatgatagtgtggtgttttctagccctcgtgtgtttacccttgaatttacacctgcacaacttatagaaccccatagctggaccgctagttcaacctaaagcttccttgtgcacttgtttatgtcaaaaaaacttggttggtgtctgtttatgcaaaacaatatccaatcacaaattcttcttggaagccttgtccaaattctcgttaacctctcatctactcattctagaagccaactggtttggcgacctctcttttcacctggatctagtaatcttttcctttgtgaatcatgttgtggctttatcatctgaatctctggatccttcattgattctgcctcgttatctggttatct

SEQ ID NO: 174177 - DNA, 670 bp, Zea Mays
gcgaggccgagtacatagcggcctccactgcttcgactcaggcgctctggctagatcgactactcagtgatctccgtgggagagacactggagcggtggaactcagggtggacagccagtctgctctggcattagccaagaacctcgtgttccatgaatggagcaagcacatccgggtgaggtaccacttcatccgtgactgtttggtagaagggagcattaaggcgcgctacatgaacaccaaggatcagcttgtggacctgctcaccaaaccccttgggaggatctagttccttgagctttgctccaagtccgggatggtccagctagccaacaaaacgacgcacaagacttatgggggaattgttggaataagtctcatggtttgtgggaaggacaacaacagtctttttggtctttgctacaggacagcagccctgcagtttctttggtctttgctataggacagcagccctgcagttttctggtctttgctacaggacagtagtcctgcagtctgttggtccttgctacaggacagtagtcctttggtctttgttgtagtatggacagcagcagtctttgctgcagtgtggtgtggacagcagttagcatctgcttttgtaaaggtgtaggacagcatctattgtagccatagtgtaggacagca

SEQ ID NO: 174178 - DNA, 326 bp, Zea Mays
caagttgcttcatcttcgctatggtgactccattgcactttgcacatctttataaccttattcctcggaacacgagtcagtgtatccagaatcttgatggggtactcagcataagtcagatcatcttgaacactaaggtcctccattggtaactgctcttcaggtaccctgagacatttctttagctgagatacatggaatatatcatgaacatccgcaagatgatccggtaactccaattgatatgcaacctctcccactcgctttaagatcaataagggtccaataaagcgaggggacaactttcctttgactttgaatcttct

SEQ ID NO: 174179 - DNA, 946 bp, Zea Mays
cctcaggtgcacgacaagacggtaggtagggaaatgtagcatctcgttatgtatgtatcattccgctacaagatgggggctttataggtcggtccggggtagccggataggtggcccaaagtacattactgcccccagtcagcgaccacatttttacaacatgtactgtacaacgaggtaattacagtgccgcagcccccactagttacgtgtacacacaattatacccactgattacattgacaggtgggccccacatagcatcattgcgtgtccacgaccaagataggtacgtcttctgcattcgctgccttcgtccagacgagccttcgcatctcctaccggcccttatcgagatggctcatttagaaggcttcagttccggacatctcgtcccttgtagtggtcgaggactcccgagccctcgtcttcactgaccgatggccgatgtcaatgaagtcattgtcaagtgaattctctggtcagctacagtgctacagttagttgaggtggttggcgaagacttcatgtttctgtccaaaggcctgttcgacattcatcccaacaatacccctcgagggaccgattcatcctgatgggccaatcctaaagtattttcctaaaaaagggacgaatgtcacaattgtacatctagtgaaccgccttaacggggccactggatgtgactgttggaaaatcgaggctacaatgcttgtgtggtagagtggataaattgctgctagcaacaacacttttctttgctgcacgcctttttcaatgtagtcgttgctcctccaccgtcgttgctcgatcgccaccatcctattgatgcgctaccgacgacgagactagcgttgagctccgcactggcctgtgtcaagactaatgttcaccgtcggcactaatatgccgccgtgcacccgttcccaatggtgatagctaggca

SEQ ID NO: 174180 - DNA, 615 bp, Zea Mays
gacagcacacaattcacatcgaactcccgctcatcagggatttgatatcaagcaagctgaatcagcttccatcccgccaccgcctgggtttcatagagaagttgtcacattatgatacagaggttggtaaggcttgttcagttattaaacagactcttcagcagattgttgagaaacaatacaatctatctgatgtttttggcgagttaattgatgaggtcctccgtgctgagtcgggggacaatgaagatggttatgatgtgcagaaaaataactacaaaatcagatgatattcttgcctagtcggcaggttagtcagttttatggtctttacgtcaatataaaaaagttattcaaacatttgtcgatatcgttatgttatctaaaataatgtttttgtttaaatgatatgtaaagaaggatgtacgtgtccgggcccccaaactgtacctgatatgtctactccagcatcccagcaggatacacagttgacagactcacaggtacatgaattactgttaaggcaacatcatattcgtgtactattagaaagttgccccgatgaagctgacatcgatccactggttcatacaaataaaacgaaacagactaaaa

SEQ ID NO: 174181 - DNA, 515 bp, Zea Mays
gctaacgcgactggaacaggtctaatcggagctaagacggacaacttatgatttatctaagctattggaattatttctatagtaaaatcaactttcagaatgactttataaaggccaggggttgttttgcaaattatggggacctaggtgtaagagttcctttcagccgagggacggtgggtatgtttacccaaaaacttaggggttcttttacaaacattacacggtgaaggggtatcttctattttcgaccgcctgatcacaatccggtggacaccattagatcaaatcacttaatgaaccggtacgaccttaagattgttgatttcgggacgaaagtcgtccacctatgatccaaatggagccgcacgatccagattcagtgactacgattttattaacctggatctaatcctacccatcaacccccgatctaacggattttgctccaaaagaaacggtacaggatcagatctcgcccgttaatccccacatcaacgatcacacttcttcca

SEQ ID NO: 174182 - DNA, 303 bp, Zea Mays
gtttgcaagaattacaaaggcactcaggccttgagactagacaaagaatttgcgtaggttatccacattccacaagtgctctaagtcttcgccggatggtgaggtgagcctgtaggcattcggggatgttttggtcttgacgatgtagggcccctcccacttgggttcaagcttgccccgagactctcttgtgatggttctggcgagtactaagtctccttcattgaactctcttgggatgacagtgttgtcgcgccatgccttattttgcgcttggtatttgcttagtgcctctaaggcaag

SEQ ID NO: 174183 - DNA, 367 bp, Zea Mays
aattgattttgaaaaagcttatgacaaagtaaattggcatttcctctatactatgatggagaaaaaaggttttgggaacacttggtgtgattgggttatgaggattgtgcggggtggcaaagtagccatcaaagctaatgataacctgggtccctacttcactacacacaaaggggttaggcaaggggatcctttttctccccttctgttcaatttggttgctgatggtttagcttgtatgtttaagaaagctcaagatgagggtttgattgaaggtctgatccctcatatcattcacaatggttgttgttgtttacaatatgccgatgataccatttttcttattcaagattgcttagaaggggcc

SEQ ID NO: 174184 - DNA, 402 bp, Zea Mays
gaacgacggtgcaagcaagctatttatagaggctgggagtgactgtccacttcctaccacgcttgccgaacagtcgcaagtattcaataagcaattcaagccgcctgaaaatgagtcaggcaacaggcgccacttcgcataacacgacaccgtttggaccaaggtcaactgctcggacggtatgattacaccccatggtcatatcaagttactactccagaacagtgttctaaacgctctgcgtaccaagacgtcccttagtcacgcccattggggggtagccaagaattatcaaaagattttctgaagaggtcatatccatacagtatacacaatgaatgtattgagacagaaggaagagattgatagagatcagaggaagtccaaatatagctattgaac

SEQ ID NO: 174185 - DNA, 483 bp, Zea Mays
cctgttgcggtaagccgccactccgattttccaccgttacaacccaatccattcacagcatctgtaacggcttttcctgcctagctaccatggccacacaccgccactggctgctgctgctcttcctcccttgggccctcctctcccgccgcggcgcgcagcctcccgacgccctgtaccctgtcgtgctgctcccgggcaacacctgcagccagctcgaggcgcgcctcacggacgcgtacgagccgccgccggagtcgccgcaatgcggcgcgggcagcaacgagcgcggccgctggttccgcctgtggaggaacgccacggccatggacgaccccgccgtcgcgccgtgcctcgccgaccagctccgcgtcgtctacgaccccgccgcccgcgacttccgcaatgagccgggcgtggagacccgcgtcctcggctttggctccaccgccgacttcctcgccgacaccgaagccaacaagt

SEQ ID NO: 174186 - DNA, 631 bp, Zea Mays
gggagccatgcagtatggtctttttgcgattggtgcggtgcctgggattagatcaatgtagaattctacctccctttctggtggcattcctggcaattcttctaggaacacatccatgaattcttctactacagatatgctttcggctgctagattaaacaccattggatcttgggtgggtggttgagccttacatgaaactgactttccttggtggtcagtgagaagaatggtcttatctgcgcaacttatgacgccattatgcttgattaaccaatccatcccttagaccacatcaattccgtgggatggcaggacggctaagtctgccaagaacactaccccacttaaaagaatcctgacttgggagcatttgaggtggcatagaaggtctgaccttggggttcgggtgaccaaaggaatttctagagatgtagtgggaatgccatgcttttccacaaaaccagtagctatgaatgaatgggatgctcctgaatcgaaaagtacaacagcgggggtaaattcaactaggaactcaccaagcactactcccggggcttgctgagcttcttgagtgtcggcgtggttcactcgtgccttgccatgaaactaggtcttgctcagctggctg

SEQ ID NO: 174187 - DNA, 384 bp, Zea Mays
cgtcgtcgggacgcgagggaggacgccgggacgcgagggagggtgccgccgtcgggatccaagccagggcgccgctgggtttggagatcgggtgccgctgggctgggagatcgggtgccgtactcgtcgagcgctgttctgcgttggtattccgatgggaagtctctcgatggattctttttttggcctgggagcaacgtgtgtggctgagattggctctatttgaatgaacgcttgagattaggtgaaattcaggagatacttccctgcggttgagaaaggaaattcaggggacccggttccaggtagcatatgctcctgccaccgtcgtcgtctcctcgaccaagcctgccatcctacgtgtgcatgggttggatgcacacg

SEQ ID NO: 174188 - DNA, 1325 bp, Zea Mays
ggctagttggcgtcggtaggactcgattcccttggcggacaagctcctcaggtggtgggaagatgattccccaaaggaatttggctagggttggctatggaagcgggtctacactcaccggcgctcgggtgtggtccggcaagcagtggcgcaactctggcgaggcgtgggttcatgggggctcagagaagttatctgagtgtcggtgtggggtggaacatggtccaggtggtttggtcacggtggccggtgttcgaaggcgatggcggggcgcgctgagctcgccagagttggcaaggtctcaggtggagctcggtactgtgggggagaagtgtcggggtattgcctgagagctgggtggcctttataggcgtgagcgcaggcgggcaagggagtggccgaccgcgggtgccggggcacgcgcacacgtgggttgggcgcgctctagcgtgccatcccgggtcgaacacgtggctcgtttgcttaagcccttcttctcgcgcgtgtagtcaccgtttcatgcccgatcttggcaagatctctgtacatggcgtgttctcccaacctcaagcatgctcttttgtagggggttcaaagatttcggccactggtgcaagagatacatggtctggaaatatggaccgtcggctagtgcggttctgaggcaacaccatcgttttgccttgtctaggggtggagtcccaatgccatcttctgacaggggctaggttggttaatttgacacaactttgtcaattggagtgattagatttggggttgttttcgtgttgaacgcgagagagttctaatcgggtctaaattttcagagaatagtgagctgaacttggtgcttatttctctcccttttgtggttgtttaggaaagtttcatccatgttttttagtgatgatttgtagtctaactcgtagtgaactgatttggtatgttacattattaagtttttggtccaagccttggtagtaaggtccatttagctttccttatctgacttctattttgctcaagataagaccaattaggggttttagttcaccttaccttgttaatgatcataggaagattctatagtgataactcttggtaacttggtatttacttagggtctgagtttccatttatggctttgcttagtgcagttttactctacttgtgagggttaagctagtgaagtcatgcagaaaccatgtaacacttggggtgttacagtcagcgttgatagcagcatgatcgccattgaagagctcgccctagttgtcggcattgacaacaggagccagggttggtgcagagacgtccgtggcgac

SEQ ID NO: 174189 - DNA, 653 bp, Zea Mays
aaaaagaggagatcgcacttaccttggcctagcagcccactccatgcgtcaacccatcaagaccagcaaccacgcccctgcccattttgtttttttattccagctgcaaattatgtcacgatcacagttggattggctcataggtaaagctcacctccgcgcaagcgcttcggctaaaacagtgatgtgtgggtcctgaatgtctgatctatatcctccatcccgtaaccttcgctggacgtcggatctctgtagctgccccaccgggtttgttgcaaattctgtgggccgttacaaccgtctccgcgcagcacgcattatctcactctcgtgcatatatatatatggcctcgggctggggttggggaaccaagggccgccgtgaaagaagaaccaggggagggaggtagcacaacaaagcaagagagagagtcgctgcctagggtagccggtggtttggcgcttgcgtgcgcggtactgggcgttcttgtcaaagcatcgccggtagccatcatcccgaccgccgtcctgatccccggtgcgtttcttttctatgttttttacacgcatgctcagcggctaaatacgctagaggttggtcaccggatcgccgtgcgaggtcatcgatgcgcgcgttgccgttggatggctat

SEQ ID NO: 174190 - DNA, 437 bp, Zea Mays
aaaaggtggataagtacaaatgcttttgtcacgacagcaagggagttctatggtttgaagaccgattggttgttcttaaaaatccagaactcaggaagaaaatattggacgaagctcatctttccaaattttccatgcaccctagcagtaacaagatgtatcatgacctcagacctttgtattggtggacccgaatgaaaagagaaattgctaagtatgtatctgagtgcgacacttgccaaagaatcaaggctagtcatttgaaggtagcaggtaccttacagcctcttcccatcccttcttggaaatgggaggacatttgcatggatttcattgtgggtttgcccaacacctcccggcaccacgattctattgggtcattgtggataggctaaccaaaacagctcatttcttgccagtgcataccacccacaagg

SEQ ID NO: 174191 - DNA, 705 bp, Zea Mays
ccgccgccgacggtacgtagccatgccgtcttcttcttcatccgctgcgaatacaccgctaggcgaatcgtcgtctgaggggactttcagtgatttggcggcggtggagctacctgggccacacggtggaattcggcgtttcgaggatctcctcggttcacgtgcaagacatgcagcagttggggtattttgggaatggagttggacgagttccaggggcggaagagattcctaagccggagggtgagatagttgtgttcgaggcattttttactgtcggcatttggttacctgcgcatcgttttgtggtggaggtgttgcagaggtatgacgtgcagatccatcaattaacacctaatgtcgtggtggccctggcaaagtatgtctgggcagtgacttcgtatggtggtcagccctccatagaggtcttcgctaagaattattgtttgcactagcagaagagaaaagttggaagcaagattgcatagtttggatcatgcacctttacaccgaggactgggaagacttcggtggaagttgtggagctagttccttgcgcccgcaacaagtggggcaactggtatgattattggttttatgtggcgggaagcaaagtcgaagacctcccaggactctcggtggccgtgatgtgctcccactgctatgtggcattcccgtcgtttgaggtggcggaggatgatagtg

SEQ ID NO: 174192 - DNA, 393 bp, Zea Mays
tgaagcttgtatcgagcctgcaagtgccactagaaataggacatgaagatgcaaataatcctcaccaaaataacattgaagttaaacagacaagcatgttctttaccttaggttgccagcgctcatactgtgaatgcaacgtttttccaatactttcaagagctttaagaggtgtcatagagaaagggtctgaaaaggaaggaataggtctatgaacataacacaaaccaactgcaccaagtgtaataagttaataacagtaatgaagtgcaaacctatcaacaaatataaattaccatcattgcctaaagtctggtaacacttgcttgacattataaccatcccaaggactaataaataagtttatatatccatggccacagccaataggtg

SEQ ID NO: 174193 - DNA, 471 bp, Zea Mays
ctcatcttgagcctgcccgccaagcatgttttgctggataatctcacactggacagtccaagaatctccaacgaagccattggcctccgaaaaaacaatgaattggggaacttcttcaagggatgtgacacggacacgaagcaaagttctggaaacattgctccgatcctcctcccaaagaatcaacctaccaaacgacccaatggctacttgcaagtattctgaggaacggtaatccagaggaaaacccagaagcataagccaacattcatgattgaaaaaagagcccgatgattccaggcgtcattatggctaacaacggtgaaagtagcatctaaatattgctgggggccaagcagaaccaaattatctcgctccaaaacactgtgaaactgcactagcacctgccccaaatgagagcgctggatggctctaaccccaacccttcgatgttccacaaggtactctctg

SEQ ID NO: 174194 - DNA, 432 bp, Zea Mays
ttatcctacccctgatcaatgcggtatgagcgtgaactactcatcatgggcatgtttctcatcggttgtcattaacaacatggaaacgagctccatgaatagcctttctcttctcctctcggttctatagtaggcacctagggcactgccatggcctagtctacctgagcttgttgatgtccctataggtctttagaaccatatgatctatctacctttccctctatccatgaaattacttagcaatagatatactctattttgatctagtggtgtagagagagaaggggatatagaggttatcataccattagggctgaggtggagagacacagtacaaatagcaatcatgtcgggtgtaggagcgtcggtgtcctagagtcttccttctccttcacctcctacttgcaggttaggaaggtgatcgggacc

SEQ ID NO: 174195 - DNA, 287 bp, Zea Mays
tgaagaagagtcgtcgtccgttgatcctctaatgggcggccatgattagatatagggtcgcagtagtgagaaccataggatctagatcctgtggacatcatggcgtaccatttcataatatgttaggtctaatcctgcgcgctggaatcagatcggacagctaggaatcgttaataccccttcgccaggacaattttgttaagaaacccctgaaaaatatagaaaccaacccgccgtcctcggcgactgttccctgagtctaggaagctttaccctgtggcccctgt

SEQ ID NO: 174196 - DNA, 1239 bp, Zea Mays
ctgggggacagcaccagcttgttggcgacgcaagtctagaacttcgtcgcgggaggaaagtagagtacctcggcattcctcttaaggacaacattaaggggtggcgtctcgagtggttcattgtggagaaccactgcaagtcactcccccctaggtcagggaggcagccagatgtccgcacaccaagctggatagaacctccgactccttcggagataacagaggctagagtactgcttgtcgaggtctgcttgctgaaggatagaggtctgactgctaaatctatggttgctgatttcattttcaagaacatccaacccttgaaggacagggcataccctgcttatttgtatagtggcgtcaatgattctaccgggctacgaacaggaaaattcccactgaagatctgatgagccgaccggatatgatcctaaggggtagagtttcaaatgttggtgctcctgttgcctattctacctagaacttgccaccacttaggccattttctgagtttgtgtccaaccctcccgctcgtgatagtagcctaggtcttagagtgcgaccctctcctgaggacattgaggctctgattgccccacttcggagtcttccagaggatgagaagcagactcattttgagatgccagctagcaccgacgacgcggagatagatgttgtgcttagtttgctggcttgggaatcatctgactcgtcccacgtcgagccaatggctatcacagctaggcaagaacttggtgaagaggtggagacttggaaacctgaaggtgcccgcctaaagcatccacaccgagtgagcgcccgactgcacctgttgaggaaaaaaggaagaagaggtgacttcagcgactgtcatgcttggaccagggtacatgcccttctgctccggctcctgatgatgtagtagcagaggcccttcctgaggttcatgccaagggttgtgatcgtgcacaggctgttgtctgcatatttgacgaggacgaagaggaggaagaagaagaagtcccgctgatctgcaagaatagccgacactataaaggtagcgagggggtagtgatattccttctccagcgctgtcagctcttgtcagttttcagggacttttcaataccagactttgatcaagtactggaggaagtcgtccccgaagatatgctatcagagccacctgccgatgatatcccagccgtctgttcagaggtcccagacggtgggctttcc

SEQ ID NO: 174197 - DNA, 889 bp, Zea Mays
tggcggcggcggcggcatgattgccagcgcaccgctttctcagccaatacctcctttttcaaagcgccttggcatctcttgatcaatttagtttgagatcggccgtgcctctacgggtttgaagggggtagcaattcgtaaacgcgagggttttacttccagtttgctctctggtactggcaaccctggtcgtaacagctgtgattaggtgtctggttttaatttggggagggagggcaggcagaactaagcagcattcttttcgagtttcggcgaagtggttggcgtcattgctgctgcgggtgattgtgacaggccactgtgggacttcggctcggcatcaatctggagccgaaaggaaccaaatgaatgatggcatttactagtagctagtagtatgctgggtgtcctcttcggtccgacattgcgaggaatagaggtccactattagatctcgacgctgttgggttgtgacttggtatgagcagttttaccagcctctcgccttgactgtttcacacactttacaagttacaagcacttccagatgaaacatagtgcactataacatgatgtaaatgcagtagtacaacattacagctgactagcaaggatgaacttgctgtcaagacatgactaatttgattggagtcctggtttgtcgctacttggaagaagttatgcttttaacgtcttattactccaggtgacaactaagtaaactatttgcattttatctagactgctgttgttatggcatttgatacaggtcctagtaatacagtacaggaagtgatgccgacaattttggcattaaccaaacatgtgtgtgaggcatccaaggatacacttagtcttagataggatgttgggggctgtactgtattac

SEQ ID NO: 174198 - DNA, 432 bp, Zea Mays
gtccaaccaagggtctgaaaagcgacaaaggcatatcaaccagtggcatatcgactccaattacccgaaacattgtctgttgccatacaaaaaaatttgttggcctagaacccttgtttagcctttgcaattttgttttcagtttggctttgtttagttcatgtccatggccgagtcgtgttgctggtttagggtgtatcttcgtcgtagatcaactgccctcgctagccgctatcccatccaccattacccagatcacaagtcgatccacccattaatcgacttgccctcgctagccgccgccgtgccagccctagatagattgcagatacgccgttattccatccaccattacccagatcacaagtcgatccaccccattaaccaacgtgccctaaccgttgtgattgcagatagggaatctttgcccta

SEQ ID NO: 174199 - DNA, 747 bp, Zea Mays
gttctcagttacctgtctatacaaataataatttctactagcccgtagcactagcgattatgaaaaacaccagcctattatacattgacattgcaaaatctgcatactacatttttcccttctctgcttatggttgggttacttgtgttcatcttactctaatagcatcctttaggtcatgtgctcatcattatatatatatatagtttatatattgagagccttgtgctctcaataactgtagagagccccgaccaccaacactgaaccatataacgtaaaccgagccccacatccgaacccacgttccaggaataccgggtcaggcccactttccacgcggtcaaccgagcatatgtcctcatcgtccacatcacctatttctctaccctaaccccagtcgctgtcctcttccctcgccgactcgttgtcaacccaccataattcatcgtgcagcgcagcggtgactcctcgttcctccgcccctgcacgcttctcaaccctaaccggtgtcgttctcactctcctcgcggtcaaccggagtatatgcccctgtgctgccgccgccattcgtcgttgagccaccaccgcgcgactccataacaccaggtgcccgcatccctctcccaccaccgttgctgcattactctttcccaatctcaccgcctcattcttctgttccatttcttctccgccgctccgccgccgtatatgtgaggtgtccctcatcgtgtcgccccatctgcc

SEQ ID NO: 174200 - DNA, 414 bp, Zea Mays
tccgggcctgacgtttcggcatcacaggcctagtaaagctatgaaaagttaagttttgtgggagtatatgtggaaagaattctattgttgatgacctcggccaccctagcaaaagcgatcatacactagctagtaatatatcacactaaggtaaatgacatgtgcagtgatgtcatttcctaatcccctcttccgagcatggtctatccaaattgaatcccagattttttgtaatgaggaaaaacactctcaaagctatagtgcctcttcccccttttcgtcttgttcgatttgtaattaaggctttattctgttaatctgttccacatgggaattgagtgcgattgaatcccatgcaagtcaaaatctctcttatccccttccatgtcctaatatcccgtcaaacgaaccttg

SEQ ID NO: 174201 - DNA, 883 bp, Zea Mays
cttttctgcatgctagggggcttgagcaggagaagggatagccatccttaatttctcctatcatgacgaggaccatcgacctatataggatggagcaagtcctattcaatcacttcatcattgttggagtcactgatattctttggctcatcgtcgtcgttgtcatcatccaccgacccccatcggtgggtcttgagaatgaattgcttccatagcttcttgtccctcttccttcttcttctcgtccttattattcttctttgccttagcgacatcacgatttgttgtgtgcatggccatgtcttttagtagcggtgtgtgggagaggtgaaaatgggagcatgactgcaaatcatagtccatgagaaattgatacatcaaaacatgaaaagaagagagggaaataactcactagatatgaacgaagctaggctcaggctacattttggggtgtcccacaatcgggaaatcctagctaccctatcacgtcacctctcaaatcctctgagcaatctcattgtcccaatgacacatgtcactgatcgagatcctcaccaatgagagactagggaacatctggtatatggggaacagacgcaccatcagcaatgcaaccattcgatcatggtacaccgtacacatcgatgacaccagcgctcgatagaccttagccgatgatgtggaggatgtcgtgcacacttgagatctccaaactacttattctctaggtctgcagcacccatcctcacgacatggcctctttgttgataccgcgccaggtgtaggttgggagaagcatgtcgaggacattcttgaggtagaaccacctcgagtgccaccccatgtttgatttggttgtcggtaggtgcatgtactccaaggc

SEQ ID NO: 174202 - DNA, 587 bp, Zea Mays
gctttccatagagcgcacacaaatgaacttccttagtagttaaagttgttgtaaggatcagttaaacttgacagcatcacttttatagtgagggcactgcactttggcatcagtggaggcggccggcagctccagctgcttcttcttgctagcattgcccatcactctaatatagctggagtcaaatttggttcattcgaatctctgctcaagtcagaagaaaccagcaaaacgtagtcgccacggaaatggagcttggcgacatctgagctgtggttcctacggcagccgcctcacctgctaggccttttgtgtcctccgcaacggtgagacaacctccgcagcgaagggtcccagtgggagagaggaggcgtcggcgggagaagacgaccgtcgttgatctcgccgtaacaccggccaacgtggtttaatccgacgtagccgcctccgaattggaccttggcggcgtcctgacagtggtactctagggtccagcgaggacctccgcgtcttccgagacggcgaggcgtcctctgcggctaagagcactttccttcctccgcgacggcgagccggcctccgctgcg

SEQ ID NO: 174203 - DNA, 461 bp, Zea Mays
ccgccgcgtgtcctaacgcgttaccacgtcgcagttaaccgtgcgttgcctgtccgatgatcaccgaagtggatgacacggggtttgccaccaatcacgtgcgccagtaaactcccctcctccgaccgccacgcgtctcgccccaaattcatcagccaccgcttaacaaccctataaattgatggctaggtctgttgcaccatgtaatcacgaagccgaagcacccgctcccacccttaatcgatcaccagagctcacgaatttctgatttcccccaattcggtttccgccaccgtgaaacacaccccgtcgtggtcagcccaattcaggtcagctcctcccctctgcttccttgtttaagcactcttatacgtatgtgatactcgccaacccacctaattgaactggaaaaccactggtcaccgggaacgtgcgcaattgtcctcatcgtccgtggtccg

SEQ ID NO: 174204 - DNA, 764 bp, Zea Mays
gtttttgaagtcccaagtgcagtggcctcctcttgttcccaatcccctcaatggagatgaagctacgggggcgacttgccagccagcctggtggacggtgtcctccatgttaccctcggcacacagataggcacgcatggccttgaacgggcctaggaacagctcgaccacacacaaataaaaatccagggacaccagcacatcgtactacccaagtgcagtggcctcctcttgatgaagtggacggggatgaagtagtatgtccaggcacaccaccacatcgtaccgcaggagtgggcggggatgaagaagcgggcgtgggcgcgcagaagaggatgagtacggggacaggctaccaaacgcagatctgacctgacccaagtgcgtacagcggtggagatcacaggcgaggatggttaagacgcggcggcgaagatccggggcgagcctgggcgagggcgtgcggatgaggatgaggacgggaatgggccaccaaatgtagatctaacctgacccaagtgcggacggcggcggagatcacgggcttgggtggtgaagacgtggcggcgtagatcgcgggaaagcgtgggcgggggcatgacgcgcgtggttgacgggggcgggggcacggtgtagttttggacgccctcgttaggctcatatagaatagtagagaataggtatatgcccgtgagctgctacaaaatcgatatgataaaatagagcaaaaaaatatgcatgtgtttcctcaatgtagattacta

SEQ ID NO: 174205 - DNA, 562 bp, Zea Mays
tgggaactcccctcctccacggcggaagtggtatcacggatagcacttcaggaagcattgtggcctccggcgcctttggcagttgctcgaaaggaggccgcacctttggtggttgctcgcaagcgctcctcacggtatgttggttcttctcgctcttctcatctttgctttctatccttgttccgtatttttctctgatttcctgagtcagtgtgtatgtgccacgtaagtcggtgaaggacgcggcttcaactacgaaggttgattctgactcctccatccctcatgccccctacgctgggggaaacaactcctttggctgtcgtggccatttcgctagccgacgttgcattagccccacccgcgccgacctccttggttgtcctagagaaaccaagagcgttggttcctaccgtggccctcctcgtgctgccgtcccctacacccgcccaggagaggtctcgatagtcgaagtagccacccttggtgggatctcatcaatggaggcagtggttctggcttcatcgctgtcgtccccaacccccttgcctccaggtgctgc

SEQ ID NO: 174206 - DNA, 349 bp, Zea Mays
cgacagtggaaaagatcttaccacggataaggtcgtgtgctggccgccgtacccacttgctctgcagccgggcgaaatgatcctcgccggagttggccgcttgccgctcgtgcaccacaaaatcagtggtgttaccacgtcacagtagaccaatgtaggtagcctatccatcgcctatgacagtgccccggtgaatgccacgatagataattccggtgactcctcccctctctcactgcccgcccttcctcgcctaaattcatcgtattcgtgaccgctctctataaattgagtgctcagtgtgctccgttgggttgttacacgcccagtgcaccagccctcgccttcg

SEQ ID NO: 174207 - DNA, 589 bp, Zea Mays
taacagagcccccaaaaaaatttagtggaagccacgcttccaaaaattggtccctttcggcaaccatctctcttacctcttctgatgttgatgtgcctttttaacccccaccgcaccgccaccgcacgctgttgcggccgcgccatataaaagctgccgagcaaaactccgtcgcccacaccgttaccccccctacgccgcactgcgaaaccaacaaccaaatcaaatccggagccagtagggagtggtaggcggagcggagccgcgaggagcccgcgtgtcgcgagagagcagaggcggcggaccggcggcgtccaccgaacaggagatcttgccgtgacatcgtcccgtcgcctgttcccaccagaatcgaaggagaaacttcgtcgccgctgccgcggcatccggtcatcctcgccgcttgccaatgcaggtggagaccaccgcggtaaggcccctctgcgcgcggttccgttggtgggagcagcgacagcgtgctgtttgcacagctgctgcgaattcagtagcactactattttggacaactgatgcattagcttctcgccgtaggtcatcgattttcgtggtt

SEQ ID NO: 174208 - DNA, 356 bp, Zea Mays
gctgctccaattccaggcaatctacctgctagccaaccccggcggcacgatcaagctgtacgtgttcgtggccatcttcggcgtcttcatgatgatcctggcgcagctgccgtccttccactcgctccgccacgtcaacctcgtctccctgctgctctgcctcgcctacagcttctgcgccgtcgccggctccatatacctaggtactgatagttcccggaccagcagttcatcagctagaccaaaggactactccatctcaggtaacatgcatgacaggaaactccgataaggcgcccccaaaggactactccatctcaggtgacgcccagaaccgtgtgttcggcgtcttcaac

SEQ ID NO: 174209 - DNA, 659 bp, Zea Mays
tcgcctgggtacggcgactccactgtgctagcgacgaacacctgcgaaccgcggcctagcgctttaaaaccccaaccctgagcccgatagcctcaacacaatgcagaactaatggtgaacacgtggatgggtaatttacctgtagtggcgcagaataattctccagccacggaaccgagctgactgcgacggaggagatagcggagcgaagaattccagactcccttcgaccccaatcgcttcttcccagctccgtaaaccttgtaggagacccgaacacaacggtgattccgcaccaccaccctgaggtggccgcacgggagctcgcgttgatgagattcccacggcggcggcacccgattggcggaatgccaagcttttcccaaccctctgatcacgttgatgctttcctaatcgaggcgcgaggatggggaagacggtcgcggggtcagcacataaaggcccgaggcgcccgccgttgcaatccaccaccctggaatcccggattccgttgcaaccaccgcgccgcgagctgggatccagacatccgacccaccgccggcgttttgacgacctgcataggtgccgatgaatcaactttctgggaagtgcttcatgcacatccgctcgggtttcttaccatcactcgtgaaaatcac

SEQ ID NO: 174210 - DNA, 440 bp, Zea Mays
cgtgtttcccttgccttgatttgaactccctgagttctgctgattgttggatttgttctgcctcggatatgggcagtctttgataaaatgtccagacttcccacaattgaagcagctagttgaggaactagggagggcggggaaacgagcactaggggcactcggctaattttttgaagtgggggcagtggcagggcggatgaagacaagctgtttaaatgggtaggagggtggacgaggtgaagaacagttttgattgaaaggtcagattaccaaccttggtcgctttttaggcccttgattggacctatcacctccgaatcccttcgattttcctaggcctatgttctttgcttctactgccagcgctgtgctgacagccctgccgtaggagagatctaggcaggtggccatctttctttgaagccggtcattgaggc

SEQ ID NO: 174211 - DNA, 490 bp, Zea Mays
agcatcttttggaaccttgagcaaaagctaaaaaatatgcatacaaatcagatgtgcttgaattaatgatcaactgcttcctttgaagaatatacaatcaccaaaaagcaaggaattaatgttatattgtattctacataaaacttatgccagtccttgtccaacaacttggatgtttagctagcacaaacagatcattctatctaaagctgtgaatgcatcgtgccaaatcgaatttcagtggtgcatgctatatgaaaacatgttaacacaaattaaaaaaaaatatgaatgctagttgcctctggcaaacttagctactctaatggatcagtaacaatgtcctgatggattgggtggtatctccaacatgagaaggacatcacatacttgagaagcctcatttgcatgcatcatttcccatgaagcgatcaaactacaagatcgtttgaaaaagtgaatctccacagatcaagaagaaatgtccaat

SEQ ID NO: 174212 - DNA, 419 bp, Zea Mays
tagagctatgaaaaggcttaaacgagagagagaagaagatgagctgaccggagtacggctggccgcggtgaggttgagtttcgggtggcggagaatggatttgggggaaatcttaaattcgagctctcggaggcacggttgctaacgattgctggtgactgggtgggtgatgatgttacgcagctaggggagggctcaatttataggcggcttcgtcggtggcgcacaatttggtcgagcaacgcggcggccggaggtgaagaggattactggcgcgcgtgaatcgctgtctcatgccgtggcaagctctccggcgttgattagacaacagtgggggtttacggcaatgcagtggaaaggttgagccacgcggcgcacggccgggaagcggcggtcgccggtgagcttatctgttccag

SEQ ID NO: 174213 - DNA, 763 bp, Zea Mays
gccttggtatccttccggtatgcaaaattatagcaccagaagttcttgtgtagaccattggctctggccttcgtctgatagtggagttcgtgtacacggcagaaaccttcggcatttgcacttttccttggctgcgaagagcccatatgtaaacgctgagcctaataatagcattcgaggtcagttgatggagatatatttcaaatcttttcaaaacctccccttatcatatcgtatagggggaaccgaagccccgccctgaagaagcttttaaagacaacaacctcatcttccttcggttctggaactagttcttctccagcaaaacgaatcagtccatcttcattttctccaaaatagcctagcttcttcatcacaaccaagtcctctgctgttacaaggaatcttccgaattcaatgtgactagctttggttgggcttagaatgctattgtcttcttcactttcgtcatcactttcgacctcagcctcagtctgtttagcttcgacattcggggtaccttcggtagttgctccctctagcacaactagacctgagcacctaatcacttctgatataggcgctgtatcaataacttctgtttcgtctccctcatgggacaccctggtagtagatcttactctggccattttagtgttcagttactttcagacgaagttgatctcaagtaacaaagcgcttgtttgcaagcacaatgcagagagctttgacttcggttaaaattttcaacagcacaacagag

SEQ ID NO: 174214 - DNA, 677 bp, Zea Mays
gtaggaagcaaggcggtggatcaaggtccgcacggtggcacagcggcgatgcggcggcctggtgctccgaatctcaattaaatgagccctgacctcacaaaatatgcagcgatcacaggggtaccgacaatttgactatggtagttgattggggaaactacacatacgttgaacatcaactcgtcggtaacccacaccgacgaccccaaatcatggcgctagaccatggtcttggttacgggcatgccatagatgtagaaggacataaggcgaaacgcaatacacaatgctcaccagggtttgcggcgtgaggatccctccactccgacgagcacgacgcacgcggtcggcggcgacacagcacccggcggagcaatttcctcccaagcaatgatggctgaggtggtagaaaggaggggagaatcacgggagtcggagggacccaagtatcccggccgagcgcatacttatcccatcgcaaggaacgactgacgagtctaccgggcgagcggcaatggcggctcggtttgttaccgagaagcaaggaggtgctgacgagcgggcccgaactgacagagagcgcacggttttggttagtggctggcgactcaggcccacatcacagcagcacaagcgcacgcggcttcagcgccaggtccacggggcccacgcgtcat

SEQ ID NO: 174215 - DNA, 569 bp, Zea Mays
gcggtcgggactagttgtgacagaggacgctcctgacgaaggcacccctgttactgaagatgttgaagagggcgatattggtgaagaagaaattgattataacaccgctatgccatcgaagcccagccatttggattttgggaagtcaactatgtctgaagctgatatggctatgatgacgaagttaggctacttcagagaagccgataaggggttgattcgttttggtggggaagagactatcccgaaaccagaaaatgatgaagtggtggtttttaagagcttcttcaaagcagggttgagatttcctctgcacaggatgattgcagatgtcttggaaaattttgagatttgccttcatcaattgacccctaatgccattgttaggctcagcgtttacatctgggccctccaaagtcaaggggtggagccactcgccgaagccttctgccgagtacatgaacttcactatcagacgaaggctagggaagacggactgcatgagaactttggctgctacaactttgcttattgcaaagacatgaagacaccggtggtcagctatcgca

SEQ ID NO: 174216 - DNA, 1171 bp, Zea Mays
cgctatcgctgtttccatccatggtacagacaaagtgtttccttctttatcatgcaaacatccttctttatttgcaaaaatgtaaaaggctagaggtttgccacagtacagaggcagtgtatcatacagctgtatttgcaagtgcactcgggttcacaagttttatttatgagggatatgtcgtctcctacagagaaggcatattttgtcctctcgtacagccagcagctctcaactaagaacaagacacagaaatactaaacaaaaggcaatagtctgaatcaaaaaaatatatacgaacatctttagaactggagaataccattagtatcaatatagtgaaacatcttcagaacacataaccaatatttttgcagcaatctgaataaaaaaattacatgagcatctcctaaaacactgaaccattagttcgacagaccaacatcttcagtatcatcgtcatcaaaatctacactggcctcttctgataaatattgtgcattgtcctcttctctgttagtcttgccttttacattcttcagctacaaattaaaaacaagtagtaagtaacccaaaataggaaaaaataattatgaattaaataattaccctttctgggcatgttctagcattatggcctcctttcttgctgccacaaatgccacatgttcgtggtttcttcgcatttgaacgtggctctgaaggtggtttaaatctttgtggttgctttctcttccccttgcattgtgacatcggtggatcaaatatcacttttgaaagatctgttgtgcaagcgagaccttcacatgtctgtgtttcatgatcaatatccatcgattccatttgttgctcagccccatctaagaattcctgaaaataggtaaaagctccacgggactttgatgccatcttaagtaacttcatcactctaggctttagtgtagcaaaccttatggtttgttgctcttcacttcccccgagatccatgctcctctctatttttgatcttttttgccaatgcattagcatctttgcaccaccgtttcattatatatgtagttggcaagtgaaccatatttacatgatgcataaccttaatggcatgtgaacacaacaatccctcaaactcatatcctttgcagctgcaagaaattagttcctcaaatttgtt

SEQ ID NO: 174217 - DNA, 401 bp, Zea Mays
caggcacttacggagctgggacacatgaaacacattgtgaatatctgacatggattctggtagtgcaaggcggtatgttgcgggtcccactctgctaatgatgggataggggtcgacgaaacgcggtgctagctttcctttcatttggaaccttttgaccccacgcatcagggagaacttgaggtatacgaagtctccttcctcaaatctgagttccctccgtctattgtctgcataacttttctgtcgactctgagcttccagtaacctactgagtcctgcggatcagggcaactttctctttggcctctttaacaaagtcgggtccttccagtgtcctttcccctacattggaccacattaggggggtctggcacttccgtccatacaatgcttcgaac

SEQ ID NO: 174218 - DNA, 712 bp, Zea Mays
accatggtacagtagcctgctatggatcagaacgccagcgcgacagtctcgccgctgatgaccgatctctgccgcgattcacgccgccgtcgttgcgattgacgccgccagtaactagataagcctgccaggtaatagctcgtcgcctgaggataactccgatgactcaccaccgtgcccccgtgctttgcggcttgagcagataagctcaccggcgacagccgtcttccggtcttgcgccacgtgctctggtacctccgtcgcgtcgccgtgactctctatagccatctaatcgtcgccggtgaagtcgccacgacggtagacacgagttcatgcgcgccagtaactccctgtccctccgaccgccgcgcgtcatcgtcccaatttccggccaccgcttccgcttagtataaattgagcctgtggtcagctccgcaacatcatcacacaccccaccatctagtatcgcccccaatcttgcaaccgtgagcgccaattttaagtttcccccaaatctgttctgagacaccgcgaagaacatctcaccgaggtcagctcaattcaggctagttcttaccctctgctcccttgtttaagcactctcatatgtctgtgatactcgttaacccacctaattgaactgagaaacctctggtcaccgggaacgcgtgcaattattctcatcgttcgcggtccgcgtggacagagcttg

SEQ ID NO: 174219 - DNA, 330 bp, Zea Mays
ccatcacgtacacagcactgcttccagatctctgatcctatccatagatttcatttaatctctgtttcaaagatgtgtttcctccgtcgatgatccttgggctgcctgtatgtttgtgaattgttcatcactgttcgctcatgtacctgttagccttttgcgtattggagcagcatgccatcgcttccttaattcccttcctccctcccggtcatggccccatcagccacccctgccggccacgcacgcctgcaggccatcgctcggctgcggcacctcgtcaatcgggtgtgggccctgcgtgcatctcgtgctccgcactgctagcct

SEQ ID NO: 174220 - DNA, 684 bp, Zea Mays
gaaagatttaaaaatggatgccgacacattaaagatcccccttgagaataaaggttcagataaaaaaatcttggacatgggtcgattataaggaatcggagtcagacacagattggatgccttttgttgagaagtttgaataaatgattttggacgggatttgcaagacgagattgactttcgaattcgcattcatttcaagaataaaattttaacaggctctaaatttggcatttctcgagatcaaataactctgaattcggtggaactttcatgaataatcttgataaacggagataggcgcaattgagaaatcattatccttactaatgatatgtgtttatgtcaaatctcgcgacctaacacgagataaacacccgagatgttacacattcctagcatcaacatcatacaatgagaaattgggaacgacaaatttttcaaatgcacgtgtcattcttttataatcctcttgcataccccgtattacttgttgcatttgctctcgatgttcatttatgtaagctctaagagattgaatgtcatatattttacttacattggggtgggtgcagtaggtcagagtgatgttatgtcagtctccctttgtcagatgaccttctgatgttggtccatcttgaaattggtcaagtactttgcatcgccttccttgatcaactacat

SEQ ID NO: 174221 - DNA, 504 bp, Zea Mays
ggatataatcagatttttatggccgaagaggatgcgtctaaaacgaccttcatatgtccaggcttcattggtttatttgaatgggttgtcatgacatttggtcttaaaaatgctggtgctacttatcagagggctatgaatttgattttccatgagttgttaggaaacactgtagaagtctacattgatgatattgtagtcaaatcggctgagtttagttctcatatagctgatttgcacaaagcctttgataaaatgcgtcggtagggtttgaaaatgaacccacgtaaatgtgcttttggggtgtcggctggtaagtttttaggatttatcatccatgaacatggcatagagatagaccctggccgaattaaatctattcggaatgtgggacctccaacctataaggtcaaagtgcaaaagtttctcggcaaggtgaattatttacgaaggtttatttctaacctagccgagaagattgatgtcttcacccctatccttcag

SEQ ID NO: 174222 - DNA, 431 bp, Zea Mays
gtggggtcatcttcaataggatctcttcctgacagggcctgaagtcttttcctccaagtaggggtatttttgttgctagatggaaagtatcgaaggggggtctcaaagacttccctgttgtagttttggcatagctgtcggagggcttttcgggcaacattttggcaagtatatgggaagcggtgtctagtgaaggtgacttggaagggagggtggttcgggtagcttcggctttctcccagataggctgccatagagcacttctcagttccattctcgtgatattctttccagacgtactccggcttcttgcagatccccatgtgaagcgcgcaactccgcaacaggtgagggaatccttccacctctgagcagtaggatgtcctaatgaccaaggagccttccatctggtagaagaaaagaagggtctg

SEQ ID NO: 174223 - DNA, 611 bp, Zea Mays
agagaaatgctatgaattatccttggaatgcgccaaaaaattgaaggacaacttttctagagttggggcatattcttctgaacaaaaattcatccgtggcgaccctgatggagtcgtccagtggatcgacggagaagtcaaagcctttgatgaaattttaagtgaccgaggagacttctgcgccttcgctggtgcacgggggcccatgtcgatcttagaaaaagctagctgcgaacatgctaaggctgtagctcagccaggatttgttttctcaacggatgacataaaaaacccttcggccgaagcttctaggcgggagattttactccgaggtgtggatgaagggtggtcgtgcgatagctgatgaagcaattagaaaaaatgaaaaagaatctcatgacgcccaagaagaagccaaatgagctgaagcagctgccgagcgtgcaaggcttataggtacttctaccgggttttaatcttcggaaatcgtttttagcttcggagttaacaaatattttttttaatgtagctgaactttcacctcccccgaagccatataaccccgaagctgacccgaccatgaaggaagcgctagatataataagaattgc

SEQ ID NO: 174224 - DNA, 564 bp, Zea Mays
tgcagacttcccacaattaaagcagccacttgaggaactgggtagggcagggaaacgagcaccaggggcacttggctgattgttttgggcgggggcaggagtgggacggataaacactggttgtttgaacggatatgtgggtggatgtggagaagaacgattttggttgaagggacgaattaccaaccttgtccgctttttagacccctgagatgatccttcacccccatatctcttggtttttccttgtcccgaattctaagcttccactgacagcgctgtgcttacagccctgctataggtgagatccagacatgtggccatcttgcgctagagtaggtcattcaaccctctcatgaagcaatttttatttttcaaatccgtgtccacttgatcgatagcatattaggagagatgattaaacttgttgagatattgcattactgagtctcccccttgcttcagacgtatgaactcctccagcttcatctatagaaccccttctggaacataatgctccctgaacgcctgtttgaattccgcccacgtgaccagatgtccagc

SEQ ID NO: 174225 - DNA, 521 bp, Zea Mays
gaattaaattgtttcctttctgcataggaaacagcaatagaaaacatcatctcaaagagcttgagctatgctgcaagcctgcaacactgatgatggaacaacagaaattattacagcaacaaaaattcaggatatgtttgaagcactcaagccaggaccttctattgtctctctcaagctagaaaactattatagccacggatccattttggctgcatccattccataactcttccccttacactgcacctgcacggtttatcccggctgctgaacagcacaaccaaaaagagcagcagaacaggcagcttggcttgggttaattcgctcagaagttaattcgctcatggagttgttaatatcccggctcagaacaggcagcctggacatacaaatttatcccggctcagaacaggcagcttggacatacaaattgctaatatctcccatatctcagacgtagatccagaatttcacatggagttgttaattcgctccttcaacctttgctctggaccata

SEQ ID NO: 174226 - DNA, 767 bp, Zea Mays
attttgcaagtataaattgtaataattggtcacaagagtttgaattaaatttgaatacaacttgaatttgaaaagagttataaataaaagaaaaacagaaaataaaagagaaaagaaaagggaagggagcatacctgggcctcggatacttcatttggcccatctggagataacatccgtgcggcccattctcccccacgcccgcgctgacactggggggcccctagtcagccgtcacccctattcctctgttgcacgccgcgtctgtgggcatctctgagtggtgggcctgcatcatcagccgtcttgctttggcgcacaacaaactccgcgcacgacgcgcgagatcgccgtgggagctcaacccctgaactttgtggccgatttcgccggggaagggttccgcaaataaatagccgcctgccctagcgcgttccttcgcctcccatcatcctcggccaacgccgtgcgagttgtccgccggcaccagtgtaagggtcgcgagagtccgccgccattgatgcgctcaacgtcgaccgacgccgtggactgctacgcgaatacgggactcgagtagaaatcgcccgccatctccttcagaacctgtgaccaccgctacggacttgttgggagctccggagagggattaattgctcactggagaatccttccccgccgtggaacaccctctccgtggtcgggcgtcaccgtgcctcggtcgactgagggtaagcttctaccctgttcgtcgtcccctcctccacgtt

SEQ ID NO: 174227 - DNA, 761 bp, Zea Mays
agagcgaccgaccagatccctgtcgagcaagtccgcgaggcagagtgactgactagatccctactgagaaagtccgtgaggcggagcgaccaaccagatccctgtcgagcaagttcatgaggcggagccaccgaccaagtctataccgagcaagtccacgaggcgaagcgatcgaccaggtccctatcgagcaagtccacgaggcggagcgatcgacgaggccctactgagcaagtccatgaggcggagcgaccgactagatccctgtcgagcaattccataaggaggagccaccgaccaggtccctgccgaccaagtctgtgaggcaaagccaccgaccaggtccctgtcgagcaagtccgcgaggtgaagcaaccgactaggcccatgtcaagaaagtcaataaggcacaaacccaagtcaaacatcatgaagtccatgccgactaagacaagacatgacaccccaagccatggccagccacatgaacgacagaccgagggcacaccgagtgatcgctatcgacatgacaacaccttcccaagtacggccctagacgcgccccactatcttaaggagtcggacgaccctaatcatgaaggacctcatgatcatagcttctacaccataccgggtgtacgcctacgcacgccaacgaatgacacaggctcgtgatggtgggcaggaccgcatgacgtatgactgctccatatgactgacctacggaccctccatgcactactatgagggtgtcagcaaga

SEQ ID NO: 174228 - DNA, 1084 bp, Zea Mays
tgggataaataaaaccttgctatgatggtttgaccaaactgcataattaaaataggttcaaattcccaaataagtttgaatccaaatttggatttaaaagagttaaggataaaagaaaacaggaaataaaataaaaaaagggaatacatggcaactgggccgcagaccacctattcggcccaccagaggaaatacatcgcgcagcccactccgcgctcaccggccacggtcactgaccggcgggacccgaatcccaggtaaaaaaaaactccctgtgcagtgccatctcccattgactcgtggggcccgcttgtcatctctttccccaccccgtccaacagaacgcgcgcgcccgggtcccgttggcgagctcagcacgttatcctggatccacctccctctcgctgactgcgagcccgaatgacagaccatcttcctcctcgtatcgttgcgcctgatgccgatgtccgcgcaccgcaacaacccgccgcgtagatctcgggccgacctactggtcaccgcctcctcctcgctcggactcggggaaaataaatacccacatgttctcccctgctccctcaatcctcgaagccgaatgattcctgcggcagggctccagcgtcgggggaaaccaccacgccatagctgagcgccaccccgtagccgcccaggtcaccaagagaggcgaggttgggatacaaagagaaggatagcgatgtttgccgtcgtcaatgtccaggacagtctgatcacggtccgtgagcgtcgcgagatggattgaaacgtgagcgtgtacatggatgggctcaggatccttcggggcacaggggggcggcgtgcaccagaaccttacgccatggcagagcctccacccatcggccccaggtctggacactgcataatacaaggtaagcgagccatcgacaaatctgcctccctcgcctctacaaactagacttgctcaaaaatggaatcccctcgatgtttcgtccggtcccctgctcgctgctgtggcaccgccgtggcactgcgaaacgccgtagtcagcccagtcggagtatccatcgccggctggtggtcttcc

SEQ ID NO: 174229 - DNA, 295 bp, Zea Mays
gcacgagtgacatattagttttacactttgcggaggtggtacaactttacccacaacccatgtatcccatctagcctgggttgatcggacctgtaaacactaccaaggtgaatggctagggatccattatgaggctttcacaaaatacacttaatacaaagcaactcgctaaggtttccaagtcggtgtggaggccctctgggtgaggtaccttagccaagaatacgtccccatattaacgtgagctaccaccactaccgctctccctcttgcccatatttcaggtaaggttgct

SEQ ID NO: 174230 - DNA, 545 bp, Zea Mays
atctgtttttgctagcatgttgagactgacctcaactctatctccatgtgaactcgttaacacaaatgctctctttgcacataatatcattccatcatacttgactagacaattcattcccaatatcacattagtgccgcaagatttcaagactattaagtcaaccataaagtctattcccattatcttaaggttaacattggagcattgatatgtggcttctatttcaccttctggtaaactaacaagtagtttctttcacatagaatgcttaggagtgttatgttttccacaaatatttcagttatgaaagagtgtgatgctcctgtatcgaacaaaactgaagtgggcattgagttcataaggaatgtaccaagtacaagttctggttcctcctgagctttcttagccgtgatgtgattgaccttgactctgctctaactctgttggtgttttccttgggtgttgcgtgcaggcatgttttggtcaaaccttgcattattgttcctttgaggtgtctgttggttgcgctttgggcatttgtt

SEQ ID NO: 174231 - DNA, 382 bp, Zea Mays
tgtcagcactgtctctccacgcgagtcgacttcggaagacctccaggtgcagcaggcggaagcagccgtgtccgaggagctacagcagcaacagagcaatgtggagactggtgggcctcaagaggagactactacagctgggctgagaaggggaacacgccagcgtaaggccaatgtgagattccagggcccagaatggagaacctgaagatatacgctcgctgagacctacggaggaggcaggatgtaacagaactacgtttatcttcttcctcaagtttcttcttctcctctcgctactgtcttccctgctactgctactctgtaattctgtttccaccaagcgaatacatcctcgcagcaaataccggtagatcgtaac

SEQ ID NO: 174232 - DNA, 389 bp, Zea Mays
gtacaagtttgttatctgttgtccaaattaatgtattcctgtatttcattccagaatggctgacaacaacacaaacacaccttttcgacctactggtgccagccccaattcaggtaaccagattcccccccacccatgtgggatcctcagatgtggcagggccaaggtttagacccaacacatccttctacatttactagtccaacatcccatatgagcaatcctacctggtcccagggagctaatgacccatctgcatatacctttcgtagtccatggaacccattttttggtatgatgaatcctgggggtcctccaccacaaacatcattcggtcaaccccagttggtaccacccattccatgtccacaggtttctacccatgttcc

SEQ ID NO: 174233 - DNA, 717 bp, Zea Mays
gtgctggtcaacagtcgtcagcttgatcctatagatatggaggtggacccaagcgtccttgtgccgtggtacgccgtcgacaccgacgaagtcgtcggagccccacaactgtgcgctactcctccgccttcccgtcgactgtgccgtcgcggcggcaggtgctgcttgactactgtcggtgccagcaacgtcgtcacgggtctcttcctctctccttggttcggcgtggggcagtcgaggaacttatatatagccaatgcccggccgagatggacgcttcctaggattccaggtgaggtggttacgtgctcgtgacccaaacgaacgctgagggaaaaaaatatatgggcagtgggtgcccagatagccatagtccgagcccagggatttagcattcggttgtaactgtcgagtttgctatggcattatttgcgcacggctgcatgtgattagcaagcttgggctctcagcgtgcgtaggaattattctaggctgtggcttggagatttgaggggtcacggtggcgtatttatacccagcaggatgcactcgaattgcaacaacttcgacgacgcttaggaatgcaggagttcagagcgctacgaagccggcggagtctgcggcgttcattgcggtttgttacaaacgaaagaagcatatggttcgtgggcccgcatgtcagcgtgagcttccgcgagaaagcatgcacggacggtt

SEQ ID NO: 174234 - DNA, 572 bp, Zea Mays
caaagatcgactggttgttcccaaagatccagaactcaggaagaaaattttggatgaatctcacctctccaaattttccatgcaccccggaagtaacaagatgtatcatgatctcagatccttatattggtggaccaggatgaagagatagattgctaagtacatatccaactgcgacacttgccaaagaatcaaagctagtaatttaaaggtagcaggtaccttacaacctctcctcgtaccatcttggaagtgggaggacatttgcatggacttcattgtggggttgccaaacacctctcggcaccacgattctatttgggtcattgtggataggctaaccaagacagatcatttcttgcccgtgcacaccacccacaggactctcggcaccacgattctatttgggtcattgtggataggctaaccaagacagatcatttcttgcccatgcacaccacccacaggacggaaaaatatgtagaaatctatattgaccaaataatacgcttgcatggaataccaaggactatcgtgtcagatagaggagcaccgttcgtagcacgtttctg

SEQ ID NO: 174235 - DNA, 1963 bp, Zea Mays
atttgaacagaaggggtctgtagttaatgaacaccactgcctttttagttccttgaagggcttcgtttggattggctgtcaatggtgggattatgaagctgtcttacgtatatgttattacatgtggtacggtagagtgaaaaggagcttcaccagcactacccaattaacattagcaatccaatcaacatgttactcctttaacattgttgacatggtttggtttagccattgaagcactgagcctgggtaaggccaagcctgtgagacctggatataccatggcagtaagggtcagctaatctcatagcaatattacatgtgtgtgcgcaatgggggaatgtaagcacagctcattatttcttgagatggatataccttttggccccggcttccaatatttcaaacctgtgtgttcgagtatatatttggtaaggatattgaaatcctgtgttttgaggtggtgttttacctactaagtcttctactccatttatacctcccgagggctcaatgcaatatatccacacattatacacaatcatgtttgctttcactaaccacgagtttaggttttgatcctgagtcaacgcttccactactgccaatacgccaataatcgatctgccaccttattgtcgagcagcaacaaatcatcaggatggctcgccaagtcgccgtcatccatgggttaccacgctactattgtcattgttgattctctacgctgtcctgctaagtggccatcgtcgggaattgccacaccctctctagccgtgcctgatctgcctcagccctcctcggcacgcgactgctgctgcctttgagcatgaacaagcatgaacgcatagctgcggcggaggcccttggggacacggagctgcttccattggggctgtcagggcaccgtggttgaggacgcacggtcgccactgtggtggttggttgtcacgctgttgtgttcttttatttttttccctgtccaaagatcggggttgcattgccgtgtttgccgatccctcgacattttgattgttgactctcaggacactgctcgtggttcagccatcttcctggttaccaccaatccaggaagccatccatactgttggtcctcgttactctggttggctctcagtctcagcctgagtcttagagtctgttcctactgctgccacctccaggatgacgctgttggtgttgtagatggacatgtgagtgcttgtcaatgtgttcgagtagcatggcctacctttgccatctgaccgtctctttgtcttgctgcggttgtcagagagaagctgttgattatgtatactcgtgtgcctctgttgatgttttggactagcgcctccctctatggcttcaacaatgtccacctcgatcttgactacttccatgactaaaagagctatatctgcatgagttacttgttggtttctactccagtcacagcatccacattgtaatgttgctatgactgtgggagagtttagtctttggtttcttctctagctagtctgatcatttgtgacgctcctgttatgactgtgggagatgttatagagtatacttggtattaaggatattttaatcgtgtattgccatatgtatttggggcatcttgctccccaagtcttgaactcaatttgtgtcgcccaagggctcaatgcattacatccatgcattatatgcaatacttagttctttcactgtcctgttggacagtcataaatgttgacaattagatttctttgcattactgttaacaacatattaagtataattccttcaatatggtataaacttgacccatcgtactttggcctagcacttctctatactaaacccgttgaaaggcataactctgcaaagcacctaccagcataactctggactgaatacttaaacatattggtatttctactggtacttcaaaccaactcgatatatattacaattc

SEQ ID NO: 174236 - DNA, 356 bp, Zea Mays
tggtggtaacactgattcgaagcaaggcgcaggtctctggttcgaagctccgcgggcgcaagtttttttgccaaataaacacatgccgcttccagttggtgggacggggccgtgtcgccaagcgggggctgtgtcccactttaccaaaaaactacggcccatgtaggccaaggatcccacgccgtcaagtggtgtgtacacgtggggcgtttttttactaaaactcatctgtgaccaaattatttcatcattacatcagccgatcaaggcaaattagcaatgacgatatcaaatctaatctgtgacgaacttgttgcgtccaaactttgtgtctatgacgttcctttcattttcgt

SEQ ID NO: 174237 - DNA, 498 bp, Zea Mays
tcatagctagatcctccggtgatcatacgaatgaccccttgaaagggttgatcggcgaagtcctcttgtttcggtgctggtggtggaggcgattgattttggtgatgtggtggtggtggaggcggtagagctaggatcacttggtgttgctggtatatgttgtggttttgctggtggggatggtaatgctcattgcggaattggtgctggtagtattgttggggatggtaggtgtgggcgacaactctttggttgtcagcaggttggtttctggccattctatcctttgtggctttggttttagggcagtccccggtgggatgtgccgagtctttgccatggaaaaggcaatagaaccttcactgttgtgggcctctgcccctgcctctggtgtttccaccgtggccctgcttcggagggtattcgtgacgacgagcggtgtccctagtctgctaccgattggcaatgttgtgcacctgggactggttatgattttgc

SEQ ID NO: 174238 - DNA, 532 bp, Zea Mays
gccgaacgcacccgagtcaaccccggtcgctaattggtggcgtaggctcgagtcactggcgacgacggcgaacctccttatggacgaacgtggcggtggtttctgttggggtttagccgatgtgggcacgagtgggcgagagaaggggaggaccgggtcacgtgagccacattttatagtccctagcgtcgagcaacggccgggcgaattagcagggagccgcccgatttcctcggcggcgatccgccatgggcagcgaggtgggcgattgcgaagctggtggcacgggtccacctgccagtgggaagaggcgccacgcgcatgtgtgagccagccgcgcccagcgatgaggtcccacctgtcggcacccccgcgcgcgtgcggtaataggccgcacaggagaaggggaaagtgggccgacggccgaggtttgggcccaggtacggttttccctttttttttctttttgttttatgcttccattttcctattttgccttattttgaattctcattcaaaacctccatttaag

SEQ ID NO: 174239 - DNA, 952 bp, Zea Mays
catggatcggcaacggtggtgcgattcggatgtgagtgtggccggtccaacactctagtttttattctatgcatttagtttagagatgtgttgaattttggattaaactattaaagttgcttgttaattatagaatcctgttttttgtgggcgcttgggtggtcccattaatctgttaggaaatctggcgaagtttttgtttccattgtgaagggagaacggtgctttacccacaacattcttctcttatgtacgactagaggtccaatacattttagtgtttgttccttcaaggtatggtcatatcatatggcgagtggtgtggtcatgaatgcagtttgatttagttctatacttggcttatagtgtgtttcagacttgataccagtagtatccggtaatgtaacatatgcgcaatgttgtgttggcgccgtatattgtttcttcattttgttggtttatgcatgtctccccttgtactctgcttgttaatagcttcaatatgctgatgttgtctggcaatctaatatgaaaatatttgcacaagttcaaaagccaaaaggcaaagctgtgtgattctgatgcggttatacttgccagtctgtttttcatatttgcttcagccttctcacgttatatatattttacaatatgttaggttactcaatccaaatttcttaatactttgttgtgattcactatatgattcctgttcaagtattttatgcttgttccttttgaacgccagataatgcttatattctatgtgtttgatgtaaattgtacatatctgttgcagttatttttttatttaatccctggttcatgctttttgggtgcagaatgatatggaagtttctcaccagtatgtttctagggggatgcataccaaaagtagcagtggcaatagcctgcagagttcattccataagccatctaaagcaaatcaagc

SEQ ID NO: 174240 - DNA, 684 bp, Zea Mays
cagggagtaatattattaggacctcctttcactcgctcagctaatcctaggatcgtcggaacttaactttcgatggtatcaagaaattatcggaagtcgaggaatataacgggccacaccatcactctcgcggtcatgtgctacctatccgtcttcctctgctcggccccgcgcgttgtcggtagcccacctctcgtcgtgccgtcgcgcccgcacgctcctggcctgcccctgtgcaccggtgtgttgccgacctctagatctggcgctatcccgacctccatgtccaaatattgtccctaacctctatgaagtggtgcagctcacagtctccaatgtctaggtgtgctggccttggtccacaatgccctcgtgtgctgcctccagtatttgacgcctctatatatctcccaccatcgtgtctcatcaaactaagtagcattttttaattggtcattttttgtctgctagactaacttccatcgcttatgttctctaatctctactactacttaagtgtgtagtgtagacgtccacattcccagtggtgcacggttctgccgtcttcccaccgcgcgtccgcgtccgcagctcccgtcgccgtaatccacgcctccaccgccgcaatccacgcccgcaatctcctacccccgtcccccgctctctagcccctgccccgtgcgc

SEQ ID NO: 174241 - DNA, 581 bp, Zea Mays
ctttatatgtcaatttgcaacatatttggggagagtgaacaactaacacaatgcacaaaaactgagggatgcaatcagagttatataagatgggataagaaaaatagcattacacagacaagtccatcattgtatagcataagatatgaaatggtactggctattacaataaggtcatcacatcattaaaatgtttgtggctctaggccatcaccacatgcatcacaatagtcaggcgaataaaattattacagaccaggtgttcattacaaaaattaaaagcgctgccaagatgagaatccttctccccctttttggcaactagcaccaaaaaaaggagagaaccaccagccacaaatcacgtggtgtgggagatccgcgaccaggagatggacgcgaggggtcggcagcagcaggttcacgagagctggagggagctttcctcagacgccctgctggattgtttggatcaatccagaagggggtgtacgagagatgtcttgttcctttttcaaagcgaaactgagtcaccacttcaatcatcttcatgatgaagggggcgtgaagtcaccacttcaatc

SEQ ID NO: 174242 - DNA, 603 bp, Zea Mays
acacaagtttgttcaagtgagataggcctatcagtataggataatagaagaacagacggggtaaagatagtccattagtagactgaacacctgcttgatggtctaaaaatatctcaggggaaaggatctctctccactagagtttctggaggtttattggcaaaagggtggtagaaatagagtttcactggggggtttcacctagtatagctccaccatattgaagaaaaagttgaagacttgaagacttatctagaagtgactcagctgcttcactattggtatgttgtccaacatgagtgaacatgtgttcatgggtttactgtgttttactttgacaaggtgaccatgcagggaataagtggaacatgttggccctcttttatccattgcatatggtcccaaagaagctacaaccaggttgcagcagatatgccttgttatggcatatgaaaacacaaactgagatccaccgagccctagttgattccatactttctccaccatgccacaccattcacatacatccagggtaagccctcaaaccttgtccacccctctgtttcactgagaaggccagaacaccgagcaggcaatggctgt

SEQ ID NO: 174243 - DNA, 1290 bp, Zea Mays
tagtggtcaccctaagtcgagtgagcgtgagcatgtttcaccgtcttaagtcgtcgccgacttaagccgattgctccgtttgtaaggtatagtggtcaccctaagtcgagtgagcgtgagcatgtttcaccgtcttaagtcgtcgccgacttaagctgattgctccgttagtagggtatagtggtcaccctaagttgagtgagtgtgagcatgttgcaccgtcttaagtcgtcgccgacttaagccgattgctccgttagtagggtatagtggtcaccctaagtcgagtaagcgtgttgattccgagtccaaacgaatcgaagtcagctgatagtcaagagtttgaatgcctttgagaatgaaaactttcttgatggcggattctccaattacagagtacaatgttgatccgatagcttttgaggccttgctaagggtaaaactttctaagatgctctatgttccatgaattccccactttcgtgtcatccatttgagtaagccagtatgatcccgactgagtgacctctgacacaatgaatggcccttcccatagtggtgacagcttgtgtcgtccttcccccgttagaattcggcgaaggaccaagtctcccactacaaaggatcggtgtcgtatggctttatcatgatagcgcctcaaggtctgctggtatctggctgactgaattactgtgttcaatcgctcttcctccagcacatcaatatcctctagcctggtagcttctgcttcaactatgctttcgaagaccagcctcggtgccccgaacctgaggtcggcgggtagcactgcctccgaaccatagatcatgaagaatggggtatttccatgtagagctcgactaggttgagttctcaagctccaaaccacatacgacatctttctgatccactttcctgtaaacttttcatttttatcgaacactttcttactgagtgcttccagtatcattccattggccctttccacctgaccattggctcttgggtgtgctactgatgcatacttgatctagatacttcgttgtttgcagaaattgaagaattcagagctggtgaagttggatcctaggtcggttatgatgctatttggtatcgcgaacctgaatattatgtcttgtatgaactccactaccttggttgaggttaaagaagcaataggcttgtactctatccatttggtgaacttgtcaatggcaaccagcacgtgagtatagcctccatgagctttcttgaagggtccaatcatgtccagcccccagcatgcgaacg

SEQ ID NO: 174244 - DNA, 276 bp, Zea Mays
atggaaggcaatcgtcattggtggccttaatcacgttgcaggcaatacgacatgcaaggagagattctcggttcccaaataaatcggctggcagaaaaaactgtaggcaaaccaggaaacaaagcatgcatgggtgggaaggaatcgtgcatgacgttgtcactcagcacaaaaggaaaacatgcatgagcagggtaggaaattaatcacgcagccacacaagaaaactggcatgcacatgggtgcaaagaatcatgcgtctagaatgagataaaa

SEQ ID NO: 174245 - DNA, 437 bp, Zea Mays
ctgtagaggtcttcgccaaaaattattgcctgcattgtcagaagaggaaaataggaaataagatagcacaattcggatcgtgcaccttcacgccgaggacttggaagacttcagttgaagttgtggagatagaaccctgtgctaggaacaaatggagcaactggtgggatttttggttctatgtggctcctggtgacgtcgaagacctgccaagcctccctccggccattctgtactcgcactgctatgtggcgtttcctcgactcgaggtggcggaggaagatgaggacaaaggggcccttcgacatgctgcccgcctgagtagtgggcttgacttggttgaggaatttattgcttatggagtgtggcccttggcgcaatgctgggtattgggcgaagtgaccccccgtcggatgccaaccctaggcggccagctg

SEQ ID NO: 174246 - DNA, 650 bp, Zea Mays
gcactgggcgtcgaggatgtcgtccaatgttcgttcgcctccgcggggtgcccctcaggtatgagagacgggtggtccagcggcgtggacctcttcacgaggcctcttctcctaacgcttgtcggttcgctggtttgcgtcatgccgtggtgcagacggagtaggcttctacccccccccctcgatgaggtcctgagcccgttcgtcagcggtgatgtagaggtttgcttccctgaacaactgttcagaggtggtcggtgccttttgtagtatggctcagacgaaggctgagtcattggatcaccggtagaagtcctcaatcactgctgcctcggcgacctcggggatgcgatttctcatggtctgaaacctcttgaggtacgaccaaagcatttcatcccctcggcgcctgatggatttgaggtcccacggctgcactggcttgtcggagagggattggaagttggcgataaaacgccgactgaagtcgctccaatcgtcgatgcaatgccaaggtaggtgtcgcaaccattgcagtgcatcttgcccgaggacgatgggcaagtatgcagtcatcacatcttcagttgccccagtggcccaggcagcgtttgtatagacggccaaccagcctcctgagtcctgcttag

SEQ ID NO: 174247 - DNA, 574 bp, Zea Mays
attggatataggccgcatagatcacgatcaacggccctgattagagttcttactcaatgaactggtatgcaatgttagtcatcggatctgcgatctacgacgccggtttaattattgcgctatcggttcttgaccgcacatccgatgatttacgatcgagatgaaccccgggtgaaacaatgcatcgatctaatctgagtcggtccacaccagatcaacgacccagatcaccccatcccgaactggtacctcacatctaatcgcgatcgcccaaactgaatcggacagcgcaaacaagccttcacccctgcatcgacccgacgatgaaacccagcggccagggacaccggcgtccagcgcccacggcggaggggccatggccaggccataccatcccacgaaccctagccctaagcatggatccgaggtatggtacacgtagaggagacattggtgaactagatgaggaatttcttaccgcaaattgccgcgacgattgacccggtcacaacacgactcgggccgcatggcggcggcgccctccggtgaggaattctgcatgccggctgcccca

SEQ ID NO: 174248 - DNA, 419 bp, Zea Mays
tccagaaatccaaagggaaaccgagtacgagaagccaacactcatggttaaagtacaacgcacgctgattccaagcctcattgtgcctaataacagtgaaagaaaaacccagggcttgctgtgggcccatagccacaagattatctctgtcaaaagcaaatctgaatctcacaagggcctgacccaaatgggagcgctgaatgctcctgacctgaacgtgtcgaacccccacaaggtactcacgaataatgtcatcaaatatgtgaaaattaacctcgtgttctggcagcggctgcacaagaacgatgccccaatcttcatgagcggagggctggggacgggtgacagtgcataccatgatttcccggtgatcaacttgttgcgccacaaaaccgtgagggaggaaagaagtgggatca

SEQ ID NO: 174249 - DNA, 381 bp, Zea Mays
tggcattcactttcgcatgtcatgtccctacacgtcctcgcagaacgatcgtgccgagcggattattcgtaccactaacgatattattcgctctcttctatttcaggcaagcatgcctccttcatattgggctgaagcgttgcacaccgcaactctcctcctcaacatcttgccaaccaagacactgaatttttcaactccgcactttgctctattcggcagtgccccgtcgtacgataatctgcgtgtttttggctgtaagtgttaccccaatttgtcggccactgctccccacaaacttgccccgcgctctgccctatgcatcttccttggttattctgctcaccacaagggataccgatgtcttgatcctacctccaa

SEQ ID NO: 174250 - DNA, 497 bp, Zea Mays
tctgttgattgttgaacttattctgcttcggatatggatagtctttgataaaatgaccagactttccacagttgaagcatcgagttgaagaactagggagggcggagaaacgagcaccaggggcactcgactgatttgtagaagtggggggcagtggtgggacgaatgaaaacaggctatttgaatggataggagggtggacgaggtgaagaacgattctgattgaatggtcggattaccaaccttgttcgcttctcaggtacctgattggacctatcacctccaaatccctttgattttccttgtcctgtattcttggcttctattgtgctgtgctgacagccctgctataagtaagatctaggcaggtggccattttccgttggagccggtcgttgagtcctctcatgaagcaattcttcttcttcaggtcagtgttcacttgatcaatagcatattgggataaatgattaaacttgttgatatactacatcaca

SEQ ID NO: 174251 - DNA, 594 bp, Zea Mays
ggacaaccaagatatcgtcggtctggcatgcgcgatgttagtacatcgatatcattggtgttttgtctacacatgtgtggatatcacggagtcatggcgatggtaatgacatcgatgaataaagaacgtcagacagtggcggatccaggaatgaatcaaaggaagggctactaagccaacaaatcgtgacgctggtggtctgatggtaggcggcttgtaccttgtgatgggcaacttgaccaattagctattgtcgcctgccgatctagagcttgggcgggagtgtctgtcgaccatagtcgcgccatggtgtagatggagggcaaccaccagtcagacaacagcgtgctgcttgtcgatctagagcctgggtatgggcgtttgtcaaccgtagtcgtgccatagagtagatcgagggtaaccaccagtcagacaacaatgtgtccatgactaacagataccacgtatgtcagacatcagatgactaaggttaggacacataataggacaaggtcgttgtcatggtgcacgtgtgctggataaggatatttaatctcttgttgtctttacgcaccagtcactaacaactgagtc

SEQ ID NO: 174252 - DNA, 908 bp, Zea Mays
tggagccatagcacgggcacacggtggagtttggtacatcgaggatttactcgggccacgtgcacgagatgcatcgtctaggttattttgggaatggagttgggtgggcgacgggggttgaagatgtccccgagccggaggggtggttgtgttcgagtcgtttttcgctgctggacttcgcttgtcggcgcaccgattcgtagttcaagttctgcggaaattcgaaattcagattcatcagttgatgtcgaacgctatggtggcattgacgaagtatgtttggtcggtgtcttcgtatggtggaaagccatatgttgagatcttcgtaagtattattgcttgcattggtagaagaaaaagataggtgggctgattgcgcaatttgggtcctgcacattcacaccgagaactgggaatacttcgaccgaagtgattgcgattgtttcttgtgctaagaataagtggggcaactggtgggatttttggttttatgtggcgcgggggaatgtcgaagggttgcctggtttgccctcggccattttgtgctcgcattgttatgtggccttcccacaatttaaagtgaaaaggggataaaaacaaggagacccttcgcgacgcagcctggttgagcagcggacgggacctagtggaagagttcgttgctagcggtgtgtggccgttggctcatgggtggaatttgggggaaatcaggccttgcttgatgccatctttaggggatcagatggtgcggagcccggccttcgctattgatttgcgatgacgggacgtggctgccttcgtgtgggaggtggagtcagagggaattaagattgttggaaaatatgtgccgaagacggagatgttgaggagctgggatatccgtggttccaacgtcaggttgaaccggg

SEQ ID NO: 174253 - DNA, 1403 bp, Zea Mays
gttggcggggtggttgtcgagttgttgttggtcgactacctgatcaagtgagagctcgagtttgatatccagatgtagcaatcggttggaggtatttgcctgcgcgctgatgtatatatgtgtgcgtgtgtatgttgatgttttgctgatgggtgttggcatagggtgtgtagatggaccatcttgtgatgacccatgctgggcctatcgcggggattgctaaagcggtggccgacctatgggcaaaattctgtgccattgatgggggtggtggggagactgccgatgtggttgcctctggctaggttgccagtgaaggccttaacaagtgtcactaaggcggtgaagtatgttgttgagcaaatgtgttatgtaagtttgctgacttcgtcattttggttctattttggacatggataatcttggtttttctagtaggttggtgccttcgctaaccaagtggcgtcgatcgccttcgtcgactccgtcacctcgcaattgcggaccgagaagggggaactggaggctagggtggagtgcttgttggttgaggtgaagagttgagggcttgcgaagaaggctgtccagcttgagggggggagaacatagacctcagccatcaacttggagatctgaaggcgatggaggctatgaggcggttggaggcgctggcttctcaggggcgtgtagccatgatggaggccgaggtgcactgaaggcagggtgagaagaggtggaggttgagactcgggttggggtgggctcgagctttattttgcaaggcctactacgatctaggtgttgagttggtgcccttcgatgaagcggaggaggggctcaacacccatttccttggttgtcgacgggagttgagtaacctacccacgatcgttgccgagttgatggcttactcatctcttgttacctgcgagggcgtcgtcaacactctctcgtgtgaagggtgcaaccattttgagagcttctagcgcagttactcggatttttaccgtgaggtgttctgagtcgaggacctatctctgaagatgtctgctggtgcgttgtttgatcggatgtggggttcgcatggatgctctgttgttcaggagagggccaagcgggcgatggagcaggttgttttgcgaggcatttttccctaaggttttaacttgtatgttttttgtgtgggatctaatgttttggttttttggctaggcactgaaggacgaggaggctagggacttcgaggactccgtcactacccaataggttgcgggtgtcaaaaagggcacgaagggggggtcatcgctgtctatcgtggttgctggaggccgaggcactatggggacctcttgccatgttggagacgagtacgaggatgatgggaggtgtagatagtgttggcc

SEQ ID NO: 174254 - DNA, 1330 bp, Zea Mays
cgggtctggatttggaaaaaacggacttggaaaaaaggtttaaaaagttacgaagcttgtggggaaagtacactatgactatggaggcatcacttgcacttgagggaactgtctatggtgaacaagtatgtactcacttaaccactttactgtatttccctgtttgaacattttgctgtattcctctgtttgaaccactaagtttgactttccattgcagaagaaaaatgagttgtcctcagaaaagtacgcacttattgtggaatttgaaactgagttggatgaaatcttttgtttctgtgacgagttcaagacaccagcggtaatggcatgtagaaccatgtctcctacaaaacgcagcagcagcaacacaaggtctattcagcccttcacccgctagactcggcggaggagctcagaagttggtacacctgagtcatcacatcgcatgacccactcgagtgcaatgaaatatcttagacagaatgatattaaaggtgaatctgatcagtatgctatagctaatgaagtacttaaagacgaagcaaatttggatgcattcgcctggctgccagacattaaggaaaggatgggtttcgtgcttcgaacctggaacgtaaaggtaagccaaacatctaatgtgttcatgttttaattttccagctgtatttgttcaaccttactgttctcaaagtaggtgcatggtagcctgaacgcaggggacatgaactcttgagcgcctgcctgctggtaagccaatgtcttgctagcatatttttcccctgctgatcctttgctagtatttaggttctgcagttacagccctcccatactgcaactcatcatttgtttcttgccgctttcttagttcctttgcattttagtttcattgatgattagtagctcagtgctttggttgatatgcaggccaagcccctggcgccggcatatttgcatttaggcccctagcgcgcgtggccgccattgctatgaagctttgcccccatatcttcttccacacctacgacctatgggtggccgccgttgcgtccaatcgtcattcctctccgtcgctgacaacagccgcttgaaacaacctcaattactgccatccagctctccttcctttttccgcgcatggaagccgaatcttctacttcttgcgtcgctggtagttcttcttcgtggaggtccgacaggcgtcctggttgtgctgctccacgaaggcccatccgaggcatctccgctggcgcatctcgccggactcactcgcattattccaggtgcgtgcgcccgccctcaagcgaccgaccttgtcagtcttcacccg

SEQ ID NO: 174255 - DNA, 919 bp, Zea Mays
cttgcttctatcgtgaaacaccgggttcttgctcagttctattgctgactgattgtcaataaataaactgaacttctgcatattttcctttaatatatctgctagtagcatactcagccacactccctgacatacacccagagcagcagctacatattctgcctcgcaagacgttagagcaactactctttgcttctgcgacgaccaggttattggattcagacccagaaagaacaggatacctgaggtactctttctatgcacaagatcacctgaacaatcactatcggtgtaccccagcagtgacagaccaactccaccacctctcttatatttgactccaaaattgactgttccagcaacatacctgataatccttttcactgcaccccagtgatctttgtttggagcttccataaatctactaacaaggccaaccgagaaggtcaaatctggtcttgtgttcactaaatacctcagactaccaataatgcttctgtatctagtctgttcaaaatcagttcctttttgagcagttgtcagttttactcgctgttccataggtgtatctgtaggattgcaccctgtcattcgacattgatccacaatctttgctgcataggaactctgacagatagttatttcattcttcgactgtctgacctccatacctaggtagtagctgagcaagcccagatcactcatactgaaagtatgcatcatttgatgtttgaagtgtgtgatgtcagacactgatggtccacaaatgatgagatcattaacataaactcctaccaccagcaaagaaaaccctgaccccttcctatagacagcatgttccaccttgcacttctcaaacccgagggaaataagctctgaatcaagtcgagcattccaagcccttggtgcttgtttcaaa

SEQ ID NO: 174256 - DNA, 553 bp, Zea Mays
caataagtttgttatgagatttccagatcctaaaatgataggggatcttggatactttagacctttgggcatgagaacagcgaaagctcagattacaattgatccttggacacctgctgttaatgctaaaggttgcttgcaaaaaggatggttcagaattagtggcattcctatggaacaaaggtctctggtgacaatcgctaaagttggtgggctcgtgggtaaggtgattgaaattgatgaaaggactagacttagaaatgaatatgtgagagctagaattgcttacagggatgtcacgactgttcctggtgttgtggaaggctcccttggattgtttttgtatgattttttctttgaaagggaaatacactcggaagaggatgaacaatttcttgatactgggattagagttgatgactctaaccagaaagctgcaaaaagatccaagtatgaaggtaaaatgaagaaagataagaaagtggattatgggaatctggaggatggaaatattaaacagcatgatgagtgtagcagaaaatctcaaagttat

SEQ ID NO: 174257 - DNA, 747 bp, Zea Mays
ctggttgacttcgtatcagagtggactgaacatcatgtcccagacagcccagaggttatcgaggtgtggaaaatgtactttgatggctcattgaaactacagggagcgggtgcagggattctctttattgctcctggaggtgagcaactcaagtatgcactccagctactatttccagcgtcaaataatacagcagagtaagaagcactgatccacggtttaagcatcaccgtatcactcggcatcaaaaaactaatggtatatggtgattcgctagtggtcataagccagataaacaaagactgggactgctcgactgactccatgggcaagtactgcgtggttgtgtgaaaactggaggacaaattcgaaggattagagttccatcacgtggaaagagaccgcaacgtagcagcagacgcgttgtcgaagctaggatgcagtcgggcccagtccccacctggcatcttcgttcaagaaatatcacaaccaagcatcatcttggatcaggtggaagagtgcaataccttgagccaaccagagtcggaccccaacgactggagagagcctatcatcaggtatatagaaaatgaagaagagccggatgacaaggatgcagcggaacgcatcgcgaggcagtcggcccactacaccatcatagggggcttactgtacaggagaggtgcagcaggagtcctcatgaaatgtattcactcgactaccgggaaacaattgttggatgaaatc

SEQ ID NO: 174258 - DNA, 529 bp, Zea Mays
gtcaataccaggaagggaggaggaattgatctacctgccaatccacataaccggagggtgcttagacaacaacaacaagcagagatgaatcctccaaatcctccaccagttggaactgatccagtagttgcagcccagatgtagatactgcaacaaatggtcgatactatggcagacatgcatgcgcagatgcggcaagaacgccaggaaatgcgtcaggactactcgagatgcgtcaagagatgaggcaagaacggttggaaaggcaacaacaaccaccactacctccaccaccaccagcagctccacccagggataagcaccggaagtttatgagtcacaaaccaccaaccttctctaactccacggacccactacaagcagatgactggctaaagtctgtagataagatgctcaacatagctcagtgctctgatagagaaaaagtgttatatgcatcgggtcgccttaccggccccgctgcggattggtgggatgcatactgcgctgcacatgctgctgtcaacac

SEQ ID NO: 174259 - DNA, 282 bp, Zea Mays
cttgaatcaatttgtagacctttcccttctcccaagagtatgagtccttactaaaccttggagatcaatttatagagcttcccttctcccaagagtatgatcccttccaaaaattcttagtggtcttagggtctcaaagagaaggtttggaaatagctttcaaccagcaattgatgctcattatgacctcacaagccacgttattacctgaagcgcaaagatgtttttccataggtcgatcacccccacatatattaggttgtcctcatcagtgaatgtaaa

SEQ ID NO: 174260 - DNA, 382 bp, Zea Mays
agattgtggatcttgattcctcttggagttggatttgagtcatctccttccttgtcgaggttgagcttgtccttctctggtcttggtctcattgattcgcggtgagtgcatatcatcggggttggggaatatggttaggatagatatggatgagatacactacatgatgtaggtcaaaaatttgtttgatgataggtggggatagacagattatgcattccatcaagactctattggttgggttggtctgtcattctttatttagtgcagagtgaactaagctaaagcatgtgtatagggtctaatctatttcacaagtattaacttatccattaattaactcactttagattggaccatgttagattagatgggatctaga

SEQ ID NO: 174261 - DNA, 357 bp, Zea Mays
tgagctcatcgttgctcgaagaagaggaagtgttgtaagagtcatggttaaggtcactgtgggagacaaggatggtgcactccttgagcttggccttgtagaggtacttctgcttaaacgcctacttgtcaaacctccccttaaacttgtgtttgtcagaagtgtactctcgcttgcccttacgccaaatggagtcgtggtcacaattgtcggcctatagcttgcccttcatcttagggcagttggcaatgaagtggcggaggtctccatagttgaatcagtcatcctttcccccaccagctatcggttcatgcggttgttatgtaatcatgcaaaccaactggcgacaagtgccag

SEQ ID NO: 174262 - DNA, 866 bp, Zea Mays
gccaaccttgacttgtgaccgacagagcgcaacatctcctaaagctcaaagtttgaccgctgactaggttggagacaagttcgaaagacaagttaaggatgaatagcaggggagcgaccacccaaggtttataaagagggtagaagggcgctcgagtcctccctaggacgtggacgatggtacgacaaatttccgagttacgccacaatttctttgggaacaaacagacaagacacatgtccgacccgttatcagcccataatggaagacagtctcccctcgagggcttggggctactgttggggaaatgatccctaatccctgtacccaccggtcattgagtgcgctaaggaaagagccattaattgcaggggcccattagtcagtcggaagaggtaggtgcaccaaccttggatggacccacccccggtcaaacctcgtggaacctagcctggggccgggcatggcgaagcctgacaagggaggacaggcgtgtcagaagggaaccacttgagtggatcctgctcctggcgccagactaacccaccataaatgaccaactgcattaaccacgtctggcaccgagccacagcgtgggcaccggtctgcttcccactcatgacctactgacccctcaggcagcataccacttatgacctatgagcccccggactgtggcagattaatgggccgcgtgcccctcagccaacaatgcacttatgccatatcgtactaggcctaagtgtgtagacctcccgtagggcactacacgatgggtcgcaccgagccccaagctacaaaagctaggggtcagcatagcccgaatgatagcgtctgggacaatagccaccgccacgtcatccacc

SEQ ID NO: 174263 - DNA, 486 bp, Zea Mays
cagcccactacaccatcataggggacgcactatatagaagaggtgcgacaggagttctcatgaagtgtgtctcctcggttactgggaagcaactattagatgagatccacggcggacagtgtggaatacatgcagcatctagaactctggttgggaaagtcttcaggtctggtttctattggccaacaacaaagaaagatgcagccgagttagtccagagatgtgaagcttgccaattcttgtcaaagcaacaacacttaccggcacagcagatgcaggccatacctgtaacatggccattcgcgtgttggggactgaacatgattggacccttcaagaaagctcagggaggctatactcacgtgttggtcaccattgacaaattcaccaaatggatagagtacaagcctattgcttctttaacctcagccaaggcagtggagttcatacaagacataatattcaggtttgggataccgaatagta

SEQ ID NO: 174264 - DNA, 1134 bp, Zea Mays
tccccaactctttatctcccgttcgcaggtctgggcacacgctgccaccgttctttgagccgaacgtgcctagccccatgcagtgctgccgccgcccgaagtcggctcacctcccccacacccgcgcacaaatgctcctagccgtgagcccgtgacgctcgcgctgtcgctgccggttcatctcgacgacggctcacctcccagcctccccactcgatgtggaccgttgccgttgtggttcacatgctttccctctactgttgcaggtcgtttcttcttctgcaccactagagcgacagtttctctttgccattagtggtattatttcgtggacgcttatcttcggcaatcaaattcgaagctgtgatttccttctctcagccaataaatgacgcctagcttcatcctttttctctctgctcgacccttgctcagctgctaccgcactcgcctcctcctctccattgctcagcgtatctgctcgtcgcgccctgcaactatccatgctccacacgcctgtgctgtgccgtcatctgctactcgagcactgccgctcaccgatgtctaagctcgcctcggtgtcctttgttgttcgtcgtccctgtgctggtcacctgtcgtcgttctctccacgctcaaagcacagaagctactgctcgcttcattcctagttcccctatccttacagaaccgtcaacatcgtgccaccagtccaccactcgccagcgtcccgtcgttctttgcactccggcgatcctctccgtgacttagctttcgtgccctcgtcactagtgttcctgctctgcttcgcttcatcacccgtgtcgtgccttaaaccccacctcaccggaatattctctgcatcaccgtcgctcgctgaagctctacgtcaccctgctgcttgccgaatcccctcgccgaagcactctgttgcgacgtcttgcagccacagccgttctttgtcaccctcctcgagccgtcgttgatgtcactcgtgcctaatctctctcccgatgcccaccctctcactgcgtcgtgtgctgatgatgctggtgttcgacgccgtcaaactcgtcttgccggaattctatgcgtcgaaattttgcgtactgctacgccgtcgaagacgaaccc

SEQ ID NO: 174265 - DNA, 690 bp, Zea Mays
atgacgaattaacctcattactatgagcaggaccactagatggttcttcttcgctttcattttcattgcttctatttgtgttataaggcaggcaagagcgctccacattcattaaggcatacattcgtagatggaagcataagtgaactatttgagtattgtgatttagtgcttgctcgttcggtcagcttagttcaagcgcatctcatctggtctcggtcattcagaggagtatagtggcatgaatttcatgccttttagctcctctattttttattcatgaatagtttgattatgtcaaagaggctctagatttgttcattgggcaagattggcatgctttatgaaacgtcccgatgattttgagtgtcaagatcttcaatgctttcatatttgagtcgactaattgcgctgaatcttgaacatgttagttccattgtcacaaagctcaaacactagtgttagtgtcaccaacccgagattataggcttgacaaattgcgctcgaaccttttggccctggaatctggtgtgaaagggattttagtccctcgccactcgcttgatgtggactgatacagacatgatcgagcaagtgtctcttcttatcctttcattttttaaagaaaaaaattgattctttcatttgttttggttatgaagattatctattccatgaattgagctacta

SEQ ID NO: 174266 - DNA, 840 bp, Zea Mays
gtgagtttctggacgtccttgactcgggtgggggcctcatcgcttcgatcgccctgatcttctctcggtttgcttcaatgcctcagtatgaaaccaggaatccaagcagcttcccggcggaaatgccaaaaacacatttgtccgggttcagcttcgtgcgggttgctcgcagcttgtcgaagaccagggttaagtcttcctctagggtcgacctcctcttggtcttgactatgatgtcgtcgacgtagacctctactttgtccctgatcaggtccccgaaggtcttactcatcgcccgcacaaatgtcggcagggcgtttttcagaccatacgacattacaacatagcagtacaatccatccactgttacaaaagtcgtatgctttctatcttccctggacatctgtatttgatggaaaccagagtatgcatctaggaacgacaacagatcgcatcccgaggtagaatccacgatttggtctatacgtggtagtggatatgcgtctttaggacaggccttattcaggctggtgtagtcgatacacatccgaagttttccatttgctttggggacgatgactgggttggccagccatatcgggtgatgtacctcttcgatgaagccggcgtctagtagttttcggacctcctctcggatgaagtcctgtcgatcaacagactgtctgcgaggcttctggctcactagcctggcgtcggggttaatcttcaggcagtgcttgatcacctccctggggatcccagacatctacgacggctcccatgcgaatatgtcggcatttgcctggaggaaagcgacgagcgcgagttcctatttctcac

SEQ ID NO: 174267 - DNA, 871 bp, Zea Mays
tttttttggtgggatttacaagttcgttttgtttgagattcatgatgaaagggaaggcatcatttagctggcaatcatcttattcagttattatagcctagttactgtgaatgatatgccgttacgtcgccaatgtctgaatggatcgtcccttgagctgtgtgccatgtttgttgtactctgatcttgtctgattgtccatgtctatctgatcatctgtatgggccggtgagggggccggctggctggcgtttccatgaggtgcgaccaagctcaaagccccggtctgtagttccgcatgcatgttccttgctcactggggctccgccgctccgccccttcctcgcctacattgtttcgttcccctgtgctgcttgctgtcaccattgttttctgctcttcacggctgtcagtctccggcggtggcgagcatcggtgtttctggtcctcacgtttcgctgtttgtcaatttttttccatcgaatttcctggatgcattattctactgtttattgaagagaggcaatcgatcccgttacattggactttccaaacaaatcatgtaatcacttgatttctattggggatctattgaaagcttgtctctcattgctaacatgtatgaaggggtaaaaattcaaaattctgaagctgtttgaatgaatactacttgtgaaggtctcagcttcttgatacagtgcacgattgcttagcactttagttcttccattctcccctctcacggaaatgaatggaagaaggattatagtgcctcccgtatatccgaagaacattcaagtcataagcaaaaagtaacaccaaatgcttggattaatgtcacataaggcagtcgatattagcaaaacaactt

SEQ ID NO: 174268 - DNA, 462 bp, Zea Mays
gacaaatatgctaccaccttttatatcatgtaacaactcttccaatttcatatgaaatactcttacaggaatatcaggtgcatctgaagatttctggccagagtgttgaagaccatctacaatttcaggccactttgcattgcatgtaaatgttacaaaaaagtcgggtggaccatggactttgcagatggctatgctatcatggtaattttgtatcatatatcgtcgtccaccaatgtgtgatgccggaagtacgattgtttttcccatttcgtcaccgtttatgcagcctctactaacaacatccgatatgccttgaagattttatattcgtaatttatcttgattatttagaatatacataagtctattttcatcaatacaggcacgagaatcaaccttagcctggtttgatagtgtcccataagatagaaatggatttggctggccaaccttgtaata

SEQ ID NO: 174269 - DNA, 620 bp, Zea Mays
cggacgtaggttcccaacgcatgcaacacgtcttgcagcaggttggggaagtgccccgtctcgaacattgatgtgtaatgttcggtgacaggaccaaaccccatgaagtagtcctgctggacgtaggtggcctcctcgttgacttgttcctcttcatcctcgtcctcgtcgtcatcctcatcatcgtcgtccctagagtcgtctgggtcatggcctccgggtgcaggagcttgaacggttggtgcaggcgatgccgaggttgatgacctagctgcgaaggctagtgactctgccaacggggtgggtgtcggcagcagttcctccgagttgtcttccattatgactccatgctccactcgaatgcgagggagatccaccggaacttcctcaacttccactgggtagacaggaatttgccgtggtggaggggcgtagctagtgttaacccgggtggtttgaagggtacgaaccatctacaagagaaagtgtcaactcagttgaattttaaagaggtaaggttgataaaaataattttataagaataaaattagcaagttttgaacaaactaggctttccatttctaacacatttctaactagtctaacgacctagggtcagc

SEQ ID NO: 174270 - DNA, 925 bp, Zea Mays
ctaaagtatattatgtggtaaacgatatcacagtaaaagttaataacaattatgttttttttaataatactaggcagtcaaacttatggtaaaaaagtcaaacgaattataaattggaatggaggaagtataaggttttttattgttagatagagtttactttttaaggtggaagcccatttcattgccgtggtggtgttcacaaactgaaaagagaagttgatgttcttgttagttctaagttcatcggatggctcccaacactgattagtttgtttatgaaatactctcctttcttccagttgacttgtgagttgtaactcttgcttcaaagtacacatatagagggcattcatcccaaagaagtcaccattaacattttttgtttgattgctgttgagtttgcatttaaaagtttggaagtagcatatattagaatatacaatgctcatattaacatggttctctgaacttagctagagctttgctgttcgctagcgaagagccgaagagttgcagttttgggaggctggccagggcattatctacttctttgcccatgagctacttgagaggcatggtcatgttgtttttcttgtaataggtgtgcatgttttgattgaacctctagatcaaggtgccgtggtgtgtggttgtatgggttcttaaccttttctttcttaatataatgatatgttggttcctgcatgtttgaaaaaaatggatagtaacattaatctcagaaaaacataggaatggatagtaaggaactgttaaaacaaatggttgatgtgtgacatgtactaaggctctctagcattatgcatggccttcttgtaccactgttgttagcaagttgacctcaagcttttcgtcagtatttttaaggttttgaagttaccaggtccagtaaatgcaaaacagc

SEQ ID NO: 174271 - DNA, 315 bp, Zea Mays
ggcttatccacggcggcgatatttaggtgaccccgagcattatccagacactggtgagcgcgaatcacctcatcggcgggaatcgtggcatgagggtcgtcggcggtgagggtcactgaacctgattcgatcggctactgtaccatgggatgcttcttcagtatgcctgacagtcatagtttagggccaattctctctccatttcctatggcatctcacccgaagatctgcagcaaagctatagagctacaaaccagctacatttccactataggaactgaactcagttgagcactagatcatgcttgaattcct

SEQ ID NO: 174272 - DNA, 1203 bp, Zea Mays
cagttttcctctctgtatgtgcctcagcagaatggcatattgaacacaagaatcaaacccttgttgagatggcgaggacgattcttgatgagcataggactcataagcgcttttgtgccaaagtggtcaacattgtctgccatgtgtcgaaccacatctttctttgatctttcttgaacaagacttcatatgagttgcggtttgggcggccacccaaagttagtcattttagggtgtttggctacatatgctttacgcagaaacagattaatttggacaaatctaagtctcggtcttctgatggggttttcttgggttatgcattacattctcgtgcttatcgtgttcttaacctagagagtaactgcattatggagacttgtgaggttacattcgatgatactgcaccttatccatctcctttctttgagcttgtaggtcaaaatcagatgggatataaaccatctttgtggaggagcacgacgccgccgattaggttgatctcgagctaattccactagctgcccagtcgagcctgcttccactacttcggctaacgcatccgatcccacttctttcatcacttaggaccgctcgagccaattcctgctgagactagaggagttgatgctactgttgagggggaggccacctcttcgaggacgactccgtgacatgttcagcacgatcaccctccttaacaaatgattggtgagattgatgagcgagtcactcactccatgtaacaacagatgtctcactctgctcactcaacttttgttgcttcttttgagccctgggatgttggacacgctttgtctgatcctaactgggtcaatgctatgcatgaggagcttgaaaattttgagagaaatcaggtttgggttttggtgccacctccttcaaacttcctcccatagctacaaaatgggttttcaaaaacaaagagagtgaggatgagttggtagtgagaaacaaggtgaggttggtagcccaagggtttcgccaaaagagggtatagattatgaagatacttttttcccatgttgcccatttagagtacattaggatccttttaggctttgctgcttcaaagggttttaagctttttcaaatggatgtcaaaagtgcctttttgaatgggtatatagaggaagaggtctatctgaggcaacctcctagttttgagagttccaagtttcc

SEQ ID NO: 174273 - DNA, 378 bp, Zea Mays
caagaattgccgcgttctagagacttgaatcattctagcactttaccatttcttagagttaaattaattaaatgacgactaacaagtagacttacaaattttatccaaatcatttagtgcactaaaattaccacattcatttaacaaacgccttcaccacaatcatcaaatccggcatatatttatatcgatgcacttttcacccactagtccgcattttaacttagacaccacctgagcactactaatttttacccgcgaccataaacacacgcatttagactacaactatcaattcatcatgaccacgaacttaacccaaaaccatctaacaagttggtcaaccaaagcagcaacataggccgctatacaacctac

SEQ ID NO: 174274 - DNA, 362 bp, Zea Mays
ccgaagattttgatgacatacttagcgatcgtggggatttttgtgcttttgtcggtgcccgaggggccacgacaattttagaaaaaggcaggtgtgaacatgttaaggccgtagctcaggcagaatctattctcttagttgacgacactagtgacccttcggctgaggcctctacattgggcggtaaattctactccgatgtgtggatgaagggtggtcatgagatggctgatgaagccattaaaaagaatgagaaagaatctcacgacacccgagaggaggctaagcgagctgaagaagctgctaaacgtgccatgattataggtatttttatttaaaaccttttgcttcattgttcgttt

SEQ ID NO: 174275 - DNA, 435 bp, Zea Mays
gctcgagcgaagagcggggaggggcggcacattattgagctctggtgcagatcctcgacgaggccgaggcggggcgacacactgtggacagaggatgctaggcggacggtggtggcacgacgtcgagctccaggctccgacgcggatcctgggcgagagtgcagggcggcgtaccgtgggacattgatccggcatggacttggcggggcggtacgacgtcgagcactgctcccgcgaccagcacaaatttgggcgaggctagggcttggggcggtacatcacggtgtgggtatgggagacaaggaggatgaccgggacagagtggagtcgtggggaacagatataggggatggtcgatctccgatgtatggggtgtggcttagccgtttagggttttttgggcttcaatttcatggaccgcattctgaatatgct

SEQ ID NO: 174276 - DNA, 290 bp, Zea Mays
atcacaatcaggaaacaatcacaaaacaagtaccaccaaaaatcacataaaaacccaacatgatgcatcagaaccagtgcgagccaatcgaccaggcaacacgactcaattcccatgccttatttagggtggagctagagctcgtcctaggcagaataggggcgacacagaaattggccagacggatcaagggcggggtagatctcgtcttgggtgaagcttggcaggggtagggtggggtagatctcagcttgggtggtccttggctgcgacagctcaacggaggatag

SEQ ID NO: 174277 - DNA, 751 bp, Zea Mays
ctggattgcaatttgcattattacataaaaatctcaattgaacaaaaattaatcccccagatttcccaatgtcccatgttgttaaaaaaatatggaaaattggcctgtagccagaagtgtgattcaaaatctcactctcaatagcttatgttcctgcttggaatggagggaatattgaaattgttacattcagattttccactgatacatgtatcattgtatctcaactggtatagagtaaaacaggccttgagagctattaagtactgtgacagttcctagcaggagttaacctgaaccttttacttatttattgattttttttgctggtattgagagaatgacagggatgctcacctctgccatttcgatccaattggttcaagacatgatgtagtttcgaggaatcgaggtagtcggtaaaagatcaagtaacaaatcactacctgaatcatgtcaaattatgcaggatcaaccttcacttcacatgttatactttagaaatttgctgacctttttctttaggaaaaggcttctgagtgtttttatcctttttaatttttgctgacctttttctatttacagtgctcaaatgctagtgggagacaaccgcagtattcatcagcacgtcatgtgatctggacacatgtgcaatgcctccctagtggtcataatgcaaacaaccggtgaaagttttgcatgtccattctatgtagtagtttttccagttgctcaccaaagttttggttta

SEQ ID NO: 174278 - DNA, 536 bp, Zea Mays
ggggtgtgctaccttgcagcataagaacctaggagtgttgaggccgatctgaatgagctatgttggagaaaagccatggaggccgagatgtagtcgatcgaagcaaacaaaatctggcatccgtctacgctacctgctggtcaccgtgctattggcctgaaatagatattcaaagtgaagaaggatccggagagaaaggtagttaagcacaaagctcgtttggtagcaaagggatatgcataacgtgagggggtggattttgatgaggtttttgcaccggttgcaagaattgaaacagtaaggttgttgattgatttggctgctcaaaagggttggcaagtgcatcacatggatgtcaagtcagcgttattgaatggtgaactgagggaggaggtgtatgtccaacagcctccgggatttgtttccaaaagtggagatgacaaagtgctcaaactgaacaaggcactttatgggttgcgtcaggccccaatggcatggaatgtggttgaagtaggaaaaacttggataacttgaat

SEQ ID NO: 174279 - DNA, 646 bp, Zea Mays
aggtcaagtcttccactagagttgatcctctcttggtcttgactatgatgtcatcaacatatacttccaccttgtccctgatcaggtccccgaaagtcttactcatcgcccacacaaatgttggcaaggtgttcttcagaccgtaaggcattacgacatagcagtaaagcccatccactgttacaaaagcggtatgcttcctatcttccctagacatttggatttgatggaaaccagagtaagcatctaagaaagacaaaaggtcatacccggagatagaatccacgatttgatctattcgcggaactggatacgggtccttgggacaagccttattaaggttggtgtagtcgatgcacatccggagcttcgcattcgccttggggacgatgactgggtcggccagccacactgggtgatgaacctcttcgatgaagccggcgtctagcagctttcggacctcctttcggatgaagtcctgtcgctcgacggactgtctgcgaggcttctgactcactggtctgacatcacggttgatcttcagatggtgctcgatcacctccctggggatcccaggcatctgcgacggcacccacgcgaacacgtcggcatttgcctagaggaaggcgatgagcgcgagttccta

SEQ ID NO: 174280 - DNA, 977 bp, Zea Mays
aacgaggaggttgaagaccttgctggcttcaagtgctttttggctactcaagatgttggtgttgaggagggcgcggaggagcaatcgtcctgtgctgaggtcaaccacgccatcctcgatgcggtggggactttgcagccttatgccgctgagcaggtgtaaataggagtaggcttactaagtggtaatatacttgatgtatgttcacattaaagctgttgcgcaagttccggtgactaggcctgagcaggcaaactttggcttcctggatagagggaaagaaatcattggggctactgagtgcgtcacgccgttgtcccgctggagtctaattgtgtgtagcggtgagaactctgggtttggatcatggtcatcggggtagcgacgggtggttgagcccaatcgcaaagatggatgaggagtcttcatctagggccccgatacctatgatgaacaaaagaaaatgagttggtgtaccaaaacaaaggttggggagtgctgatgcgccggtgggatgtggcgcaggctctcgaagacttcgttgtatgggattgggcggacctcgccggcgggtctcgctctgcgaggtgcttcgcatgtcaccccacatcctcatgaaagggagagggcacggtcaaaagagggacctcgccaaattgttctagcaccgatggctgaaaggggttttggggagtaggatcttagggcgctttttgaagccgaagagcttaaacttatgttgtctaattttcgggaggcctgtctaattccgaaggtgttgcttttgtaatattaaaatatgtgtattgtcgtggcttgacgaatttgagtggaacactgccctcgcccccttcgccgagggacgactatactgctctttggtgtctgaccatgtttgcacattttttatgttatcctggcttcgaaatgtttgtttctgctaagccgtctttgcacgttttgtgtgcgtatctagc

SEQ ID NO: 174281 - DNA, 538 bp, Zea Mays
tcatctgtcgaagaaaaaaatgagtgggcaggagagcataaaaagcggccgagtggcctgcctgcctccttccgggccagcatgacagtgactcgagagaaggccggggccgggggccggggtattattggtttggtgcatccagtacacatgtgtctgaaaccatgcatcaaatacgatcagcgcgaggcgtgtttgcctgcgtgcagcgtgctccagcctccagcaaacatgcatgctgcatgcatgtggacgtgccggtgatctctcgaccgtacccttttgctagctctccggggcctcacgagcctttgcttgctgccctgataagccaacgggcgtcctctcctaacagagcacatgtgccttgccttgtgttgtgagccgtcttcctcttgcagctagtgcagggagcgagagagctcaaagcagctagcagcagcttcttgcttcagatcgatatgcagtgttgcccttcgagtaaactgaccgtcgtcaccattatattttacaccaggcaattgccgtggtcacttta

SEQ ID NO: 174282 - DNA, 856 bp, Zea Mays
gattgcttcactcagctttcacgctatgcccttgaagaagtggatacggatgagaagcgccaagagtgtttcttggaaggactaattggaccactaaattatcaacttcagagccatactttccccaatttccagacactgctgaacaaggcaattggccttgaaagcaaaagaaaggaattatctgaccataaaaggaaatttcaaggtcagtctagtaggaacacccgcccgaacaatgctcaaggttcgcagttccgctctagaaatcaaggcagaaacaattatcaattgcaacgctctggacaacaaggccagagaaataatcagggtcagaaccaacaaaggagcaactcttagaccaaccagaggtctggtggaaattcatagaatcgtcaaggtggcgcttgtaacgcgtaggtcagaagcaacgcaccagtccaacccaacgactgtttcaagtgcggtgagctaggccactatgctaacaactgcccaaggcgcaaccagcagacaccctagaaaagcaataaccagagaaatgaccagaacacccccgctcatggatctgctcagaacaagactccgcagaaccagagcagaggaagggtcaatcacgtcaccgcagaatcagtacctgaggatgccgacgtagtgtatggtatgttccttgttaactccatacctgcatcagttttatttgactctggagcatcgcattcgtttataactgggtcatttgtggaaaaacacaacatacctaagtaccctcttaagaagatattacatattagttcaccgggaggtgacatgaaggccacacactcatgcccccatgttaatatcaagattcaag

SEQ ID NO: 174283 - DNA, 761 bp, Zea Mays
cggctcgtggctacgacgctacgtacgtttgatttgatttcctgtctgcctcttctgcatgcgcagtttcgttcgccctgcagtctccgttccgtgatgagctgctcgccgtttgaagctggtcgcggaaactaaaccggccgcgcgcgggttcagagacacatggacaagagcggcggcagcagcaggaagacgaggaggaagaagaaggtaagcatcttttccgtttcgtgttcccttccctccggccggccaaaaaaaccagctgaaacactagcagccagttcatttacacagcttctctcttacctctctcctttccagtctctcttcccaaaactccacggagcagaagatgatgttgggaataatgatgcctcgccgagacgtctcgccgcaggtcatcagttgattaatttgacaagttgctattattaatattgtaacttgaacttcagtcaaattaattcagaaaaatgccgttggtttggtttggtttggttttttttttctttttcagttgctggcttgaaggagtcccctgaacggtggtcagtggcagcagtggcttccccgtcagcgtcagcgtcgtcctcatccttcttcaaaagcctttcgggtccgctccgctccgctccatcgagatccaacgctactcagcctttgacttcgcttcccgttttttctgactccatccatccatccatctttcttgctccaaaactaattaacagagagcaggagtctaaagtttggcggcg

SEQ ID NO: 174284 - DNA, 702 bp, Zea Mays
ggaaaaacagtcggcgctacctagtcagtggggggagtagtgatgttccttctccagctttgtctgctctcgttggtctgcaagagttgtccatagcaaattttgatcaggctctcgaggatgtggttcctgaagatctgctatctaagccgacagatggtggtatgatggacgtttgcactgacattctggatgtggggttagagttatctcgagcagcgtctcatgcctcgtcgaccttcgagtgcggtcttcagagtcaagaagctggtctaggttgttccactcccatagaggtagctgagaatccttcagccttagaggtggctgctgcagagaacccggtccccaagtatggcgccagtggttacccagcccccgagggtgttgccggtaatgatccggcttgggcgggtagcacgagctatgacctagcccctgagggtgctgccagcggtgatccggctccgatgggctatgcgggctgcgacccagcccccgagggtgttcgagcaggctccccttctcatacctccatggatgtccacgtcgggtcttctcctccacactctgattgtatggaagcagtacgtgcttcaaatcgggaagtcgtcttagaggccggcgcgcctgacgctagagttttgattcctgctggtgatgctgagttgatccccaatgatgctcttcagattgcctcgg

SEQ ID NO: 174285 - DNA, 448 bp, Zea Mays
cttaacgacctgtatctgttctaacggaagtttggcaagtgacaacttatgctatgctagtacaagctattaccggccatgtgcatggaaagtgtcggttagatatgccaaaatatgaacatgacacttaaaatgataaccagggagccatttgcactagaggtcgctaaagtttggctgcacttcatcctatttgtctctcacgcctatgtgctgatatgctgtgctaagctggcatgataggactctttggcttcttcaaagcattgatgccaattgcaataagcgtttctggctccaagttgactattcactctatcttttggtggtaccagatcagatgaattgttgtcgctctattcgaaggtcttttgaacttactggctatgctttacagcgattatatgctttggcaaaagtatagtctcatattacagtttgttctgtt

SEQ ID NO: 174286 - DNA, 366 bp, Zea Mays
ggccgaagtatcagcaacgagtaattaaggccaaaaaaacgaccacttgatggtggtatattacctctgacggtgaggaaaataaatggaacagttttcagtcagtatcagaattcagaaggcccccgatcgacttgtcaagcacgtgacgtgacctgagccgtcgtcgatcacccggcccgaaacgctcactgttaacaccgctgtttaatatttaaccggtttttaattacgtaactgcatcagttattagtcgtagtagtctactaaaaagtatatactactgctagctagtagtagtagatggcaacgaacgtttagatacaacatacaatcctccctccgacttcaacgcatgtcgcccac

SEQ ID NO: 174287 - DNA, 844 bp, Zea Mays
attactcttctggatgacaccctgctgcagcatggtagtgatttgtcgttcaatctcgtctttcagttgcggtgggtatctatatgctttgacagacactggttgagccccttggatcaatggaatcacatggtcacagtcccgtgaaggtggaaggcccactggatctgcaaaaactgaagcataatgttgtaacaacaactgaattcgaggatgcaattctggttgtgctttacttgaagaagagactagtaggagttcaacaatggtacattctagtataacagctgactgtccatgtaatgtgacagttcttccttgatagggaatagataaccatttatgtgccaatgtaccctcctgggactaaatgactgaagccaatccattcccagaatcatgtcataacatggtagaggcagcaaagtgacatctgtatggaaagcacacccttgcaaatgccactgtagctgttgaattttgtgctggcacctcaatacagccccactagccactcacacttgcatggatgtagaaaccaactgaatattgggcaataaggattgaaatttctcatttaagaaggaatgagaacttccactatatagaaggatgagcacaggatgatcttgaatgaagccctcaaactttaaagtgtgtgttgtttcagatacgccccagccagctcgagaaactgacataaacagctgcccgattggcaatctagaggctccggttcttcaggtatcaataagtcccatacctcctcaagggcatgcacatgtgcagcagcagtacacttgtggccataactccatttctcagcacatttgtcacataatcc

SEQ ID NO: 174288 - DNA, 612 bp, Zea Mays
ggctgatgaaaacactaaaatttcttgcaggaaagtggtgacaaaagacccatgatggagaagagtcattaaagatcaccatcacgacctccaatgccgaggggcagacgcagtgaggcagacaggtgcgactcttgttctgcgcatcgcggaaggtccggcatgtaggcgcggatggtccgggacaccccccgaatagtccaagtcaagcgaacggtctggcagcgcccaggagcaacaacgtacacgtacctttaaacctcgacaaccagaaataggtacatggaagacaaacacatttaaggcatctggtcgactggtcaaagcgcgcccaacctttgattcattactatctaaatatgtgaaaaagaaggttggcccaagcgacctcgctttacccaggagcgacgacaggtaataccgatcgggtcatctcactaatcggaggagtcaacacatcacgatattcatctaagacctaatgtacctacacggacacctccacccaatacccaccagtgccatgtcaatatgcatacctaccaccaccttatatcccaaatcaaatgtggggcatgtcaccatatccatacgtgatccacagcaccccgc

SEQ ID NO: 174289 - DNA, 1042 bp, Zea Mays
tggcggtctacctaggagaaagccgaagttacccaaaccaccctcccttccaagtcaccttcatcgggcactgcttcccagacacttgccaaagtgttgcccaaaaagcccttaaatagctatgccaaaactacagcaaagagatctttgaaacccccctccgttactttccacccagcaacaaaaatacccccacctggaggaaaagacttcaggccctgtcagggagagaccctaccgaggatgaccccaccattgtctacatggccggatacctccacactctcgataactactacgatgatctctcctcccactgcacccacctaaactcccgggtggaaagcttagagcagcaggtcaaggaacttaagaaggagaaggcatccctccaagagtatctcgatatagcagaaggcgaggaggccaacacccgtgaagcctaccgaaccctaaagatggattatgataagaagctgaagaagctcgcccccacgaagaaaatccaaaagaagaccaagaaccaaggaggccaagctgagtgaaggaagaaggctcccccagcaccagctgccgccaggatagagaatttgtccgacatcgaggatatgtccctagctagccttgatgaccttctcaaggaatttggggacaccttagaaaaagagttcgggagtacctctgagaacgctcgcatgtagtacgacttgtagtagttgtatgcttgtaatgtattggtgtaatgaataaaataacttggttgaaaacaattggcatgtgcataatagtgattatctccccctggcagatggcttcggataaaaccacacctaccgcctccgggattggagcagggttcccctgagagctgaaagggaagccggtagagaggaaagtgagacccacctccccgcacctccagaactacccttagatctagcccaagttctagccaaccaaacccgactcatcgaggtcctcactcgaagtctagaaaatcaacgtccgaatggtggaagaccacaagacaggatgggagatt

SEQ ID NO: 174290 - DNA, 680 bp, Zea Mays
gtcatgacgtcaggtcctgggtggttgagacgacgatgccaagtggtggaggtggtggtggagactaggacgggaggtggagacgcgccgatggaagaaggccggagcatgtagaggagcccaacgctgtcacatcgggtgagaggggtcctggtggccagatgcttcacaaaaaaaccagaagggtcaaactgaatggaacaagaattgtcggtggcgaactgacggacataaacgagattacgggtgatatgaggggctacgagaatatcgttgagatagaacagtccagggagaaccgaggcacctactgagttgactgacagagtggaaccgtttccaacgacgatcgaggtgggatgcgaggaataaggtggttgggagcgagatagcatgcctacagagggggtgatgtggtaggaggcaccggattcgatgacccagtcaaaggagggtggagccaatgccatgacgagggaggccgggtcccagcctccagcaagtgggaccagagagtcgtggtgggggtcccggaggtgggaatggaggcggagcctagttcgtcgagcgcacgccgtatggaggtatgtcgtaggcaggcgtctgaggtgcgccgtaggggagcgcagtgaggagagccggcacaggaggacggggagcactcggggcctgacccggcc

SEQ ID NO: 174291 - DNA, 624 bp, Zea Mays
tcaacacccgaagacttctgcgactccatggtatactggtgttgcatctccacacccagtgcctgctccaccgtagtatggaagtccaccaatggaaaggctcccagtgcatgcgtgatagaaggtttcagaccctgacggaactgactcgccttctccatctcattataagccacatgagggacaaagcggaccatcttgttgaagcccacctcatactctgtgacagacttcttctcctacttgtaggactgcaagtcaatcttcattttctccaggaaggtgaccgggtagaatctcctttcaaactgtctgatgaagacatcccaagacaggactcctggtgatgaggagtgcgctgcctgcacgcctctccaccaaatttgagcctctcccttcagcagctgtgtgccaaagcgaacccgatctccatacacaatctcgaagacattcatcttatcatccacataagtcagccaaactgccgcctccactagagtaccactgccatcaaaagaatccaacttcatgcccatccactgcattagagaaagaccactgactggaagaggcacctcggccccgccacctggagcagcacccgtagggacaacgcccccaggc

SEQ ID NO: 174292 - DNA, 1013 bp, Zea Mays
attctcatataacaacaaccatcaggccagtatcaagatgtcaccgttcgaagcattgtatggacgaaagtgccagacccccctaatgtggtccaatgtaggggagaggacactggaaggacctgcctttgttaaagatgccaaagagaaagttgccctgatccgcaaaagattacttgaagcttagagtcgacagaaaagttatgcagacaacaggcggagagaactcagatttgaggaaggagatttcgtatacctcaaggtctccccgatgcgtggtgtcaaaaggttccaaatgaaaggaaagctagcaccgcgattcgtcggcccctatcccatcattggcagagtgggacccgcaacataccgccttgaattaccagaatccatgtcagatatccacaatgtgtttcatgtgtcacagctccgtaagtgcctgcaagtaccagagaaccacatcgaggcagagacaatccagattcaaaaagatctccagtaccgagaaaagccaataaaggttcttgactcagcagtctgaaagactcgcaactcagaagtaagactctgtaaagttcagtggagcagagaaggagaagaggaagctacctgggaaagtgaggactctctaaggagggaatacccttaccttttctcgagccccgtctgaatctcgagggcgagattcccttaagtggggtaggtttgtaacatcccagattttcaacccgaggtttggaaccctaatccaacccccctatttatctctccctaatctcccccataggtcttctcatcatatgcatacactttgtttgattagaagcatctcacttagattatatttttagcacctaaggttatctaattaattaattgttcaaaagaaaaggagataaaatagaaatggaaaatagaaattgggaataaaaaaagagaaacctttcttcctccctggctgggtcgattcccggcccacacccgcggccactctctcctcgcgctcgtgactcccc

SEQ ID NO: 174293 - DNA, 458 bp, Zea Mays
aggagatggagaacgggcagaagcactagactaccagatcactagcacatcagaatgactgagaccaatgaggcaatgatggaggcatggagcagcgagcactgaatccaggaagattcgagagacaccgagaggcgagagcgcagtggagatatcgagagcgagaggcgtgccacaagcggagaggcaggagtgagtccagttagagttagccagttagggttaggagcttatatggcagcgacactcgtgagtgggctgggccattggggagtgggggccggttagggggcgctagggagtgggtcggttacaaggcctggctgataccgagtcgtgcccgggctgtcccaataggctccaatggctatcgagcatggcacgggcttcatgctaggttgggcctaggcccgcaatagtccgggtcgggccaggctagtgtcgggccaaaaaattgt

SEQ ID NO: 174294 - DNA, 573 bp, Zea Mays
aaacagatgtctgccgcgtagcccagtctctatcccgcgtcctctcaccctgccaccgacggatggggcccactggcatccactcatcgcacgcgcgctcgtaccggtgcgttcacggacgcgtggggccaccgggtcagatctcgcgcactcgctgtcgctttgggcccacgcactagctcgttacacaccgtgctaaccacctccgctcctccgccacgttgttcgccgcgaaccagcccagccgtgcagccagcggagaccgagttgacgctcccaacggcgtataaaggatcccagaaacctatctctgcctcccgtgtcgccattaaccatccaccttgcctccatcattggaatttcatgccgccgtgggtgattcaccgccaccgccgtagacttcactctaggccagcttcccagtcgcggcgaactgccccgggtgcatcagaggcccccgccgcgtatgttggaccgacttccggggtggattcgcttgcccatcgtcgatgaattgctcgccggtgtcaagaaccctcgcggagccgccaaaccccgtcgttggccctctgc

SEQ ID NO: 174295 - DNA, 1230 bp, Zea Mays
aacaggtggcttagggagacgactacgatgggaggggatagcaagagggaaggttctgccgtgggagagagaagcagcgagcgtgtagcagacgcctgagatcctccacatctagcgtctctatcgcgtcggcatacataattgtatcgcccgctaaacttaggaaataaaaccctttacagggtgttgttgaagatagcttgatcagtgtgtgtgcgatagcggcaggaggagacgaaggagaaagagaatgatgcaggcgatagcaggggcgtgttaatgacgccacacctgcgctcgtcaacacccttttcaaagctgtgtagggacgcaacaatgtcgagaagtgtgcatatttagagaataggtccacaaccaccaaaatagtgtcagcatgagcagacctgggaagcccctcaatgaagtccaggcttatgatttgcaaagtagcctctggtacttgtgtcgatcaggcttagattgttggcaaactgtgcaagctgccacatatgacttgatcataggttttatgttctttcaggcaaacaattgcttaattctttgatatgcaagaggaaatcctgagtgacccccaactagattgtcatgtaatgcagatataatctgaatctgaagagcttcacaagaccccacccaaacatggcctttatatttgagaatgcctgattgcaaggtatatggtccagttaggttttatgttcttcaaggcaaacaattgcttaattcttcgatatgtaacatgaaatcctgagtgacccccaattggactgtcatgtaatgcagatataatctgaatctgaagagcttcacaagaccccacccaaacatggcctttatatttgagaatgcctgattgcaaggtatatggtccggttaggttttatgttcttcaaggcaaacaattgcttaattcttcgatatgtgacatgaaatcctgagtgactcccaattggactatcatgtaatgcagatataatctaaatctgaagagcttcacaataccccacccaaacatggcctttatatatgagaatgcctgattgcaaggtataaggtccggtgttacctgtggtagtagccagggtagtgaggagctgctatgagaaggtgtcagctgcatagatatccaacgcctgatccatccattgaggtactaccgaagtaacatgaaacaatgaggaatcaggatgtggtcttctagatagggtg

SEQ ID NO: 174296 - DNA, 730 bp, Zea Mays
gccggcataggatcctcaggagctggacggtaggacccaaagaggaggcgagaggcctcaagagtgccctggaactgtgggggccgaatcagctgagcgaagatgtggtagagataatgagcatatggcagttgtcgctgggcacatagaccatccagtactgtgtcctcgatctcacaaataaggaagtccacaacatcaaactctgagtgagagaccagggcaccaaggagccagagctggatatgagtggcagcctccctgtaacccatccgtggcagaagcgtctgtctcatgagctgatagagaaacttggccgctgtagtgaagtctgccggaaaacgtcgtgacccatctgagaagggcgaccggaacagagccgtgacgtgagctgtaccaggagcaacttcgccgtgagggcgacgaggaggatcagaggtgccgtagcacaagctgtgaagacgagtcgatgactcgttgaattcaaacaactggcgaacctggctggcatgaattgtaacatcctctcactcaaagcggaatctcatccactggtgatcagggtcgatccatacagaagcatagaaaactcagacccattcctcaacatatctactgatgttagttaagagagtgagaagtccaggcagataggagaggtgtacctcagagtcagcaccggcggctagcagaaatgcaggaaggtccaaaagccggtgcactcgcagag

SEQ ID NO: 174297 - DNA, 585 bp, Zea Mays
ctaagaatagccatcaagagcttccaagactgtctttttcttggtcgttcttttgttaaccttagaaaaagagcaaggggaccatatcagcaattctttgactatgaatccatctgtcgtaccaaaacaaagttgcagagccagaggtcgatcagcatactgtgaccacgcccccagaagatgaaacattggcgagctagctgctcgagtgtgatgagcaaggtgtggcacagtccccacctcgtcgacgctctaggtcaggcaggaacaggcggagcgtccccgacctaaagaaccagccatcggtcgtcggtacaacttgcgtcgtggaggacgttttgaccctaacaaggaccgaagccaaagcccgcattcgctaggccctcggactttcgactgccacatcctccgagcgctagtgctgtaacggtatagggcacccacgaatatcgcaaactcaaaccctagcctacggttgggggattatccggttggcatgctaaacgagagaggcggaccacgacaactttataattcgaaacctccctctatatttggggattataggttggcatgccaaacgag

SEQ ID NO: 174298 - DNA, 1143 bp, Zea Mays
agttaggtgggctaagctcattacaatatgggtaattaggtaaatacaagagaaccctattgttctgaggggaagtgtaggggcacgagactcgcaactgaacaccacgggagagaaaggagcgagaggcggagttgtcaaactcgcgacgttatcgctttggagggcacaaactagaggaactgggtagagacccaagcgaagaagtgggtgagggtgtgaaaggtgtcgggcttgagctacagaggaaaaatctagagaaaacgagagaaatcatgaaaacgagagaaatcatccaggatgaccagatagtattggtaaccggagatgcttggaacaaggggtgtccaaaggtcacagtggatgaggtcgaaggggagcttgggacatagaagagaagggtaagcgagtatgacgcccgagctgatagagatgacaaagcgaggtggagttaccgtatgggcaaggaatggccgatagtcgagagaggacgtcgtggtcgaggtggccaagacaacggtgccaagtggaggtaggggtagtggaggcaagggcgtagggttggacaaaatgggcagaggaaggtggggtagggaagcgaatagggtataggggactggaactgtcgtagcgagcaaccacaacacgagtggtatgatcccgtatggtgagtccccaaggatcgaactccatagagcaacagttgttagtggtgaagtgacagatcgagaggaggttctggatgatgttgggggcaacaaggatgttgttgaggtacaacggaccaagaaggaccatgtcacctactgaggtgacaggcagagtcgacctattgtcgatagtgatggaggaaggggaggtggggttatggggatggggtaaatcgacagctccagtgtcgagagtggtgtggaatgaggccctggagttggcaacccaatcggtgggaggagggggcgacgaagataggggtgcgagaagagaggcaagggaggcaccctatagagcgaccgggaggggagttgaggctaggagcgagagtggcgccggctgcagggaggaacgcaccaggaatgggcgacgcggtatccgaggcgagagcgccgccggggaagcacgagtcgccagccgtcaaggagggaa

SEQ ID NO: 174299 - DNA, 451 bp, Zea Mays
cgcacatgtctatcagcctccccttaaagcgtcccaaaggtgtaggtattgctgcagcccagacaatttaagaggggtctcaatgtcgctgacccactgccagttctcaagagcatgggccaccgttctggaagaaatagtctgtttcccaacattagccactatagctggggcaaaatcctagatacaagacccatccaaccacctatctgtccaaaataaagtattagacccatcaccaaccagggtaacaactgaagaagcaaagaatctcttgacatgttgctgaataggaaatttcagcccaaaccacggcttgttaggatctgttttttccaaccataatcatttagtttgcagtgcccaactttggtaatgcaggttagaaatcccaagcccaccaagatttaaaggccttgtgacaatttcccaagaaacaaggcaactacca

SEQ ID NO: 174300 - DNA, 413 bp, Zea Mays
gaaatgattaatacaagcacgactactgctcttgccgaagccaaaccttcgaaagttgtgccaatagggctggtggaagagagtgttcctgaaaaatctaaatctcctgctcccgaagcacctccccatggtgacttggaatacattgttcgacacacttcgggaaagcagctatcattagatcaaattgttgaaatacaacacaatgtcaaggacctgaaatacccccgagggtccttgttatacataggggatgatgaagacaacttcctctactgtctgcccgacagtaaggaggtcaatgtttgccgcgagatgatgaataacatgggatttccgaagctcgagcttggtttgtccgctatgacaaaggatcagcttgcggacaaccttgcttacaatagcttgaaggt

SEQ ID NO: 174301 - DNA, 611 bp, Zea Mays
cccgcgtcggccatccctacttttatcttccgcgcagcccacttctccatttgtcgctgacacgtgggccatctatgtcggtctctgcgttgcctcggttgtgtgctcagctcgctgacatgtgggaccacctcgacatccctatcctctagctgctatccgccacacccgtagacattgtccgctcggatttggatccaaacaacctgcgtggaaagcgagtggatctcggctttaacctctcaaccacctggcagctatctcctctttcttctctcactgggcgcagggacctacctgtcggatcttcccccatcctcgggctgccgttgggacgctcacgccggcgacctcgcaacggactccatgctccatgtaactcacgcggttgttgcgtacctcgggcccgcctcctagtgcttatataacaggggcaccgttcctccttctcatctctgggagtcgaccggagccatcatctaccgtgaggagagcgtaggagtgccgtcgtcgggttgcaagcttgtgacgtcgtcgggactcgctaaacggatcaccgcgcttgcaagattgggcttgggatcttcgttggtagggaaaaagaccttgaa

SEQ ID NO: 174302 - DNA, 994 bp, Zea Mays
tgcgcataaaaacagaaaactagaggggcctctacgcaaataaacctaagactcagagcacagtagctagggacggcgggttttattatgcaaaagccaagggtttattcgcaaaagagttaagtgaagaggtatcgttggatatggggcgcccgatccgaatcctacgcccatgattaaatcggctcgcgtagtgaaccggtacacattgcgggccgatggatttaaatcctctggtccagattttaatacatcgcgatcgaacaccatcagccgatccaacgatccacggctgagatgagctgggccgaactggtacgcaacatctaatcctaaccgtcaacgcaaagatctacggtccaacccttcccttccccagatctaatctcatccactcaaacctcatcaaacggccataaggccatcttccacctggcaacacccaagcagcggcacccacaaccccgcggcggcaagaagcccaccggtggtcaccgacctccacaccccaagccccaactaccgattcgatcatcgattcgcgcggagaagaacaatgcgaacacctgagggggtacctttttggaagaaacggcaggaacactgttggccacggcagggagcggatgacggtgagggaaggggccccgatgagcgattcggtgagccggtgtgcaaatttgtccaggtgttgccaagacgagcttcagtacgccccgacaacaaaccaggaccacacaacggtctgtaagcaacgatgaagaccccggacggcggtggcggcctgagcacctacactatcaattcacggtgaacccgtagagcgaccaaggcaagtcccgggcggaatttataggggcatagagtccgcggagagatgaattgctgattccgcacggctggcgcggaggttgggccccaggatttgcggacggcgttgagaggatctcgcgtgatttcgttgatacgaagtctggttggggagaacacccga

SEQ ID NO: 174303 - DNA, 327 bp, Zea Mays
cattgttgttgacccttgtgcataactctaaagctttttacaatattttcactttgcctttagtaatggattctccttatcggtcgggtttggcacattcaccttatcaaaaacctcccaaaccttgggtttgcctttgcttcccccctcaaccttaactggtttattcacccatttacgcctttttcttgactctattcacatctccaccaccatcagattcatcaactctaacaacatcggcatctttcccacctagcaccgtcatctcatcctcacgcatttcatcattcttgtcaaaggagttgctctctgaatcagtgtcat

SEQ ID NO: 174304 - DNA, 642 bp, Zea Mays
ttcactctttttgtgtcgaatccacctgtcactgatggcagtttgggccttagagtgcgaccctctgctaaagaagttagcgtcttggttgcctcgctcggggaaattcctgatgatgaacggcaggtccattttgaggtgcctttggatcctagtgacgcagaaataagtgttatgcttgatttgctggctgaggactcttctgatgctgctcctgttgggatattggtggtggcgcctctcccagaaactggtacaaccttggatatccagaagcctgccagtacttgcctgagacgcccttgccgggccaatcaacttgatccttccgcagatgagcagaagaagaaaaggagacgcctccggtgagtatctagtttggatcgggacgttggtacttcggttcctgctgctgaagaagtgcctgtgcctgaatttactgacgctgaccctgatgggtgtgctccatctgttgctgatcccaatgggggtgctccatctgctgctgaccccaatgggtgtgttgtctgtgttgctgatgaggacgacggggaggaagaggatgaggtccctctgactcggaagaacagtcggcagtacatcgccagtggtgaaagtagtggagttccttctcctgctttg

SEQ ID NO: 174305 - DNA, 534 bp, Zea Mays
atcatcgccgccggtgagctggaagccactccggctagccgcagtacctctccccttgctcatcgccctcggataaggattctcaccgccgttaagccgtcgctgttgtccgccgcgtgtctctgcctatctaccgcatcaccatgactcactctagctccccgttgatcgccggagcaatggccacggcactggacaccaagccattgcgctaataaattttccctttctctgagcgccgcgcgtcaccgatcgaattcccggccgccgccctcccgtagtataaatggaccccgccgtgagctccgtaaggtagttaagtatccaatcaccaagaattagccccgatcattcacctgagctctggaatttcaaatttctcccaaactggtctccgccaccgcgaagaacagctcaaccgtggccagctcaactcaggttagttcaagtctctccgttgcctgttctagtgtccctagaccctcctcaagctcttcgaccctttcaattgaactggaccatcacccatcaccg

SEQ ID NO: 174306 - DNA, 1141 bp, Zea Mays
cgaaagtggagggcaaacggtgaagtggtgtcccctattttttggggaccctggactcctccttttatagccacaagggggagcccaggggtacaaaggtcttcgtaatgttgagagggggttaattcgagcccctgtagcggtatggccgtcgggatggcccttgtcctggctgttgcttttgatcaggaagaggatgtccgattcctgtatccgtgttttgaccatgcagagagccgaggctaggatcgggggctcggatgcgtacccaagcccatcctgtggacgagacgttcgagcgatagtggttgaaatagcgatcaacatggtaaaaagtgcatggtaatctggcccgtgcgtcagatggaatggtgtaaagcagacttgacaccaaccttgtggtttctgtagccatcctgtcgtcggtggtttttgcgggagggtgttcttctattaatgttgttggccgaggccatgttcgggcatacgaagacttctcccgaggccaaggttgggtttgagcatgggtacacagtcatgctgggagtggtcggaacagtagtccgagtggtctcctgcgggagagttggtggctttcaaaagcgccactgctagggcagttggtcgagactgagctcaagcgaggcgtagtttcctctcgaggccgacctcgggcgaggcagagtttcctctcgaggctgagcccgtgtctagttgtcgtatgtcctatccggagttgatgaagatagtgaccggagcgggggaacagtgcccggtattagcgggtgcacgtcatcgtgggtggtgaaagttgatttgactgtggtcacatcgtcctttgttgaatgtggtgtcatcggtggagcaggtgttcgtatcggttgcatttaatgtgcatgccttgcgtttcttgagaactttggccaaagtcgggctcgaggctgggccttcgctcgggatgcccttgggtgatgcagattttttgcttcccgtcaaagggggctccctgggtgagtcgaggatccatgcaggcacacccttcgcccgaggatggactcgggcgaggcgtagttttgtgcaaccagtaagcggggtctcgggtggaccgtgattcgaccccgcgtgacctcggggagctcat

SEQ ID NO: 174307 - DNA, 536 bp, Zea Mays
ttgtgagactagaaagaaagatcgacattgcgcatacgaaagggttacgcatagaatatcctttgtagactgacggtgatgatcatgtattagtatagtgtttcattttggtaataccatcttccttttatatttcactgttagtacttagtagtacatattcttaggaccattgaagaaactttccacgtggtttccttccttgacccattcttttcttacaatggtggaactactggaccaaaagatacttttaaacacgccagctgaaagacggcgtcttcttgaagaggttccagaaatcgttcctgatacagagtacagagaaaaggaaactgaactccaagttgcggcaagcaactcttctcaagagattagaggtgccaacacttgatttttttgtttcttaaagcacttttacctttgcatctgtttcacattcataatggtcccgaatacttaaatcgttacatgctcgatccaaatcgacttccacttcgtccgtgagtgtgtcgccgtcgacgatgtctaggtcc

SEQ ID NO: 174308 - DNA, 970 bp, Zea Mays
gccgaaggagaccatcaccaagtctagcgaaggtgaactggtccggctgaagtatacattcagatatggggataaattcgatgaaccaaacgatgactggctaaaatgcatcgaagttacaagtgatgaactgcttggatcatattccaaggctgaagataatgcattatccatagccttcggaagtcggggaaagaagagattgaacagagtttttgatgctattggcttcgtctaccccgactaccgctacccgctgcgggggcaagggaagaagaggaaagctgctgctttggccgccccggctgaacctgtgccgaaggctgcgggcaaaaagatgaaggtacttacccaccggccacgttatattgaactggctacaatgccgaaggcaccttcggttgagctagttgaaacgaaggttgacaaagataaggttgaaaggtcaacaactgaagaggtgacaaagatgccagggattttaagtccttcatcaaaagcaacagcgctgaaggcacaaaagagttctgccataactcctaggagaaagaggatggtaaatgtattagatgtactagaaacaaccgactccataagtctcgctcccaaagggaagtttgccgaagctgacaaaatgcaacctaaagctgatactaagcaaatagatgttgaggctacaacaacccaggctaaaaccgaggcgaggccctcagtgtcttctgagacgaagcttgccccaaccgagcagggggccgaaggaataactccagatactaatatagcttttgagaaaagcacagccaaagaagtcgaatcccttacacctgaagcactctccgaaagttttgattatatagttagacatgcttcgggaaaaagactatccgtagaagaaatttctaaagccaaacattatgcccgggaattgcagtatccgaagggagccttggtatttaatggtacaaccgag

SEQ ID NO: 174309 - DNA, 588 bp, Zea Mays
aaatcgtgtgatatcaaaatatttgggttttgcaaatcagcaatattcaggcagttactaaaaaaagagtttatacagaccgtataaccagctgaatacaactgttttttcttcaggagcaagttttacgatggaggaagcagaagaaatagttgactctgtcaatgaaaggaacgatgacctgctctcagcatggtgtgaaatggttaacaacaaagtgactcctttgcctgcaacgcctctacatattcttccagccataaccacattctgtgtttctggatatgagtgctaccacctgcgatattggactgaaattacttctgaaagtaggtgaactaattattaacgacacactactctatcttctctcttgtggctcattttctttctatatacttgcagctgatccagatcatccatatttcaaaccctgtgagatgatgcaagtgttctccttgggattatcaagccctctcactcatcctgttaatatttatgggtatttttctgttcgtgataactgggaaccactccgcaattatctatttaagcgctcaagagctgatccagccatgatttctcagg

SEQ ID NO: 174310 - DNA, 723 bp, Zea Mays
cgtccttcctgataaatggtcttctcttacagttttttgagaaattactgtgaaggaccgtactagaggaaccattggaagaacgccacctctgtgtagaatttgagtaagttcccactctatgcaataaatatccatattacgcatgtgtgcagattacggcatatgctacaatagcaaaggacacatttgtggcatattgctttcctttcaaaacttgagaatcatgtagtcatgcattagattgacatgcaccaaatttaagctaactggaaagtggggcaaaaggttgaggcaagcaaaatattcaataactctcatttgataacaaaccaaaaaaatgatatctgaaccagttaaaactacaaagtgcgaatatgtttagcttgttaccgagtgcacaaatttcagggaaagaatgtcgcttttagaacacatagccacgacaatccccttgtttccaaatagagcagaccggcaccaaggtccgaacctagaaataatatgaacaagtgaatcccaatcaaaaagatacaaaagtgtttataccatctaatttccaatgagtgtgtttttagattctaacaacttgtgctcattctttaaagacttttagagctaccagtgtttacacttttactgaaactttttatccattcacaattcattttcatatgccttgtgtgtctgaagcttttactctatgaatcccttcaattgctg

SEQ ID NO: 174311 - DNA, 500 bp, Zea Mays
cttgtttttaatagtcacttcattaaggggtctgtagtccacgcacattcgaagagtttgatccttcttcttgacaaagattgctgggtatccccatggcgatgaacttggtctaataaatcctttctccaataagtcttgtaattgcatcttgagttctgccagctcattgggtggcatacggtaacaaactccacatccctttccggaggtaacccgggcaaatcctcagggaatacatccgagaactcacacacaaccggaatgtcttggattttttgcaccatggatgcaaaaacttgtccaggaactttaactaggacagatatagggatggacaacttgacttttccatgtccatgacttaattgaatagtcctttggttcgcattgatgatagccttattctgtgctaaccaattcatgcctagaattacatctacatcctgtccctttataacaatcatgttggtagggaactcatgtccgtccaatcttac

SEQ ID NO: 174312 - DNA, 913 bp, Zea Mays
ggactacggaccaggtgcttcatcttcaacgacagcgattttcacggcaacaaacagagagagaatttggggactgcgatttgatgcggatcgttgcacgtggccaagatcttcgccgcgcagacctccggacggggtcggccatgaataccctcgcccccgggctataaattgggcctgcgacctcctcttctcacctcatccagtccgccgccatcgccgttgcccgagagagagggagcagtggggagctcgaatcgcgccgccggggaatcagggaaatccacattcgctgctccgatcatcgtgagtctcctcttgagtctacccctgcttcttctcgctcgttcgcgcccggattaacccatcggtgggagcttggtcgccggcaattgctcgacggagcagggatcctgccgctgtgcggtggtctacgtgggcacatgattctgtacctctatctcgggtaggtgctctacctggcgattcgtgatgctctgcgcatagtgtagcattctcggaatttgtcaattgggcttcgggtgtgctggggcgcctatcgtcggtgtcggtatggcgaggtcgccgtcgcacgcggtaaaacggcctcagctcgggatggttagtgacaagtagttccagctcgaatccgttgtcacctctacgattccgtggaccatcagtcgaactcggacgtggggaaaaccggtcatccatgggcggtcgtggcactgccgccagtgcggaggccgccatggtcggtctcggtggaagcttagtgaaaggtctagggccgtagattgacccatggatggcttagattgagcaagcgtactcgttcacacaaccatgatccgcaccgttggatcgatttctggtggctgagattagttgatgtggtaccccttcgatt

SEQ ID NO: 174313 - DNA, 823 bp, Zea Mays
gttttggtccgctgaccagccgccgcctcctcctttttctcctccccttccttttttcactctttacccgttcatttctctccaccgccgtcgccttcacttttcctctctctcacacacactcacaccactctccaaattccatttgtgccatcaaatccttaggagtttgtggtagatttgttcctctcagcctcatccatcaactccctcactttcgttgggatttctgtggttcaatcgtcagatcgaggtatagccttatttcctcatgtttttactcgatctcacaccgttcttgattatcttgtgtatcttttcaaggatactatgtagtttaggtgcttgcaacacttaaactgtcttgttttgtctcgaacattgtttgagtttagtgtttggtattgttcgttgtagttgaaccgctcgcatgaacggttgaagtgcatgctcaatatcatacgcgtctttactcaaacgtgtttgttaaaatccttgaacatcgatctcctcgctcaccatatattctcatttttatcttaaggatggtgcgtcgaaggaacccgtcagtagttgagactgactccgatgatgatcaagaaatccgtgaagaaactcctccacgttccagatccaagcacgggcaaggatccggaaatgtgatgcaaggtggtgaggcctcagggtctcatggtgctcgcggtcggacgacctggaatcccttcggtcggtctcgacccgcggcaaatccacaggcatgggagccaacaagtgatgatgacggaggcaaggatgatgaaattgacctcccctctgccaacgc

SEQ ID NO: 174314 - DNA, 435 bp, Zea Mays
tctcggtttcaatctgtgttttcgaagccttggcaatttttcctggagtagagcttgaagtttttatcgtctccagcacatctaatacactagccatcctttttctcttgggggttgctgccagatctttttgtgtcttcggcgcctccactcctaccgaagggcttagaatttctgatgttttcgactcttcgattctcggttcttcaattttgtcagccttcggcattgcagctggctcttcaatcctctgcgtaagggcaggtcctttggcttcagtagccgaagaggtctcaccgccaaattcagacactgtggccggttcaatgtagcgcggtcggtgagtaagaaccttcacctttttcctcttcggcgcgggctcgcttggagcagctgaagcagcatccttcccagaagttgcaccctttcttttct

SEQ ID NO: 174315 - DNA, 856 bp, Zea Mays
cagagacacagggaatagctctacggaccgcgggttgattactataaaacagaggggcctaatagctaaaccgaccagccgaagggctatggacaaacactggccgttggattagaatcgaagggcgacgattagatctatccaccaatcactcggccttcgacgagggccctcggatctcgatccaaaggtcttgattcaatgaacgcttaacgccacccgaccgccagattgaacatcgacggcgacgatctcgcgattgaaacggtatccgatcctctaatccgagccgcccgttggggatcgaacggtgctcgggtatcgtctccctcacgtggtctctaacggcgacgctgcgcccgcacggcggcgtaaacgccgacgaacatcgcgcccgacctcacggcgataaccctaggttctaacagcgttgacccaatgcgcagattaaggtgaattcgcgggtgggagacataccggccttgacgccgtagaggcacccggtcgcggagcgaggctgttcacggcggaaaatcagtcgacggcgagaaattgccacgattccacagcctctccttccgattgcaggcacggaccgcaatcccgagtgcagacgaccctccctggttcaataccgaagccatacgacactccctatgccgagattcgcaggcggcggcgtttttcctgcccttgccgtcacagatgggtgcggaccggcagggaagattctctctctcaccctctcgcgattcactctttcttggtgtcgaaattgttgagcaggaggcgggcccgattgaaggtttatggggaacccaatccggccatgccgcagcaatcgggcgagctcgcc

SEQ ID NO: 174316 - DNA, 480 bp, Zea Mays
cacaaacatccaccgcgtcaccgtctgctggctctgataatagatcctctggaaccatatcttcaagagtctgatcaaagtttgccagagacaattcttgtagaccaataagggcagacaaagcaggagaagggactccactactttccccactggctacatattgccgactgttcttccgagtcaaagggacttcatcttcttcctccccgtcgttttcatcagcaacacagacagcacccccattgggatcagcgacagatggagcacacccattgggatcagcgacagatggatcacacccattgggatcagcgacagtaaattcaggcactggcacttcctcagcagcaggaaccgaaggaccaacgtcccgatccaaactagatactcgccgaagacgtctctttttctttttctgctcatcagcaggagaatcaagttgattggctcggcaagggcatttcgggcgaacactga

SEQ ID NO: 174317 - DNA, 801 bp, Zea Mays
gcaaagttgggagaaaactaggctcaaagatgtgctgtcagtcagccctatgtctgaattttcagaaactgtgaagttggatgaacttagagctcgatttgagtacaatcctgtgactatttgatggtggacattataacaaagttaaagctggtttgttaggctacaactttgatgcagagagttggtcaggtcgctacataaaatctggagcaaatcgacccaaacatgctctatcagaccgactgaagaagctgcgcgatggtacagtaaccagatcagatcaccagctcagtaaactcaccgtcggcgaccctcgcgcatggattcacgccgccacagtgattcgtgctcggtgcagttggataacgcatagggagtaagaaatatcgctagtggatgaactccggccagtgttcactccgggcgccgtgtctgcttagctcacggccgctttggatctcccctcaccggagttagacaccttgcagccttgcgccacgtgccttggcactttaaccacaccgtcgtgactcatgttagcccatccagtgatcgccggtgaggttgccacggtaatggccaccaatcgtgtgcgccagtgcaccccccctcctctccaaccgccaccgcatgagttcaaattcaccggccaccgcttaagagccctataaattgagcacaacctcggctctgttaggtattccagcatccaatccactgctcgtgcctccaattactcaccagagcccacgaattgctcagtttcccaaatctgttttccatcaccgtgaacaagct

SEQ ID NO: 174318 - DNA, 709 bp, Zea Mays
cagacctttattttatttttgttagagtacccgtctagggttttaggttagccccttgtaataattgtcacacccttgtgtaatgggtcaagcctaacatctatcaatatatgcatcagtccctaccctagttagggttaaggggttctcattctccaacttggtaccagagcctggtttctctctcctccctctctcctcccacagccgccgcccactgccaccttctccaccgccgccggtcgccctcccccagggttggtgcaagccagccaccgcccctccccctcctcgctggcgctgcctccatgccggccgtgcctaccccaccggccgcgccctgccctatcggcgtcgtcgccactaggttgcgtgcccccaagccgcgcgcctgcgtccaagcctgcctccccgccccaggtcgtggccctctatgcctccactagatccgctgccgactgcctttccctagacaccaccgccttcccctctgctgccggtgccgacaaccaccaccgtcgccagggctctcctctccctttccgacacgccatggagctccactcccattccccgtccaccaaccctgcgctggcagccctccactgctccagccgaaccctagctctttctgcgcacctcgtggcttcaccacccctcccaatcccaccgattggctggtcgactccggagcctccttccataccac

SEQ ID NO: 174319 - DNA, 634 bp, Zea Mays
gcgatatatataaatatacgatgtcacacaacacaatcaaacaaaatatagagcgaaaacaaaattgtttacgaaggttccacataatgtgacttcaggaccttgaacaacccaccacaatccacgcgagtacaagctctagcgtatctggcgtcaacgcgtgtgcagccatcagggctacgacagtatagcaagccttcgtaataagcgcaacaggcacaattatggctcgataattggggtacacgataaatccacgcaacgtgcgcaacaggcgcaattgtggctcgcggcagacagacagtgcctacagggcatgcaaaaaatacgcgactcagcgatggcggtctgactcaacgggagcgatccgattaatggagagcgcgacatagcaatcacttgacgcagccaagttcgaacggcacaaatattgcgtcgtgttgccagggcgcagtcaatattcagctaatgccataactcagccgattaccaacgcagcgtgatcggcgtgtctgagtatccactatacaatttaatcgctcagcgtgagcctgaaagctcaatgcaactcaaatatttagagcaatttcagtatgcataatatatcattcacatgtattttgtaatatttttc

SEQ ID NO: 174320 - DNA, 357 bp, Zea Mays
tccctggtcagatcgatgactagcacatatattagttgatgactacatttcacaagtcatggacatggggatgttgaactaataatgtgggcgcatgtatgacatgaggctggaccgacccaatctgagatattgtaatatagttctctttttgcaacatgtatactgtgtcgttagacctgagattgtcgcatgttctcaagatgtggattgacctacttatggactatcaaacgctactccgtaactgggtagttataaaggtagttttgggtttgtcaggaagcatgttgtgaggcatggtcagttaagatggaatttgtccctctcttcttgagagagatatctctgggcccc

SEQ ID NO: 174321 - DNA, 495 bp, Zea Mays
ataggtagttgctcatcaggtaccctgagacacttcttcaactgggatacatggaagacacatcatgtacatccgcaagatggtcgggtagttccagttgataggcaacttcccccactcactttaggatcaagaagggaccaataaagcgaggggacaacttcaccttgattttaaacctcctcatgccccgaactggtgacactttcaaatacacgtgatcaccctccttgaattctaactgccttctctgggtatctgtatagcttttctgtcttgactgcgcagttctcaagttctcccgtatcaagcgtacatgttcttctgcctcttgtataatttctggcccaaagaactgtctttcaccagtttgatcccaatatagagaagtcctgcaccttctgccatataaagcttcaaacggggacatcttcaaactagcctagtaaatgttattgtaagagaactccgcatagggcaaactcttatcccaac

SEQ ID NO: 174322 - DNA, 344 bp, Zea Mays
aagcaatgatcctataggggatcttgaagctgaagtaagtcggctccaagcggaactccgccgcaggatgactatctgggtcgtagatggcgaccgcataaatgagttgagaagagatgtccgccatctgcgagatcagctcgcggaccgggatttggcacttgactgggttgttcaatcccgttcgcttgcatgggacaaggagcaaaaagctcaagctcgagtagccgagctcaacttggccgttgaagaactgcagacatattgcaataccttacatgaagaggttcatgtattatattcgcatctgcatcccagtgaacctacgcatcctgttgagttgg

SEQ ID NO: 174323 - DNA, 425 bp, Zea Mays
caaggctggtgccataggtggtggtggtagcgggacccatgcaacttgagagtggctttccgaagcaactgatgttgtgggctgttggttgcccacatactcgagaatgtatggggaatagcacgaagcggtatgcaggccctgctttgactgattctgccttgcttcggcttcagctatctctttctgcttctggatcatgacttggcatgtccttgttgtatgtcctttgtcctccccgcggaataaataaaacaatctcctgggttgggagctgaaccttcctccgaaggttctgcctcctctacctcttggagtcggtggcctgtaagagctttgttgcatccctaaagtctaggagctctgttgatgcccttgagagtggtttcctctgtcatcacctgagctgggattgtggatcgtcc

SEQ ID NO: 174324 - DNA, 498 bp, Zea Mays
gaccggctctacctccggtgtcgtggccacttgtgtataatagattcgcccagttttcttcatattcttgcctgctgcattatttgccatgtttcccttgccttcgctggaacttcccgggttctgctgattattggagttgttccgcttcggatatgggcaatctataataaaatgtccaaacttcccacaattgaagcaactagtagatgaactcgggagtgcggggaaatgagcaccaggggcactcggttgagttgttgaggtgggggcagtggaagggcggatgaacataggttgtttaaaggggtaggagggtggacaaggtgaagaacggttttgattgaaaggtcggatcaccaacctttgtcgcttttcaggcccttggttggtcctgtcacctccatagccctttgactttcctaggcctgcatacttggcttcaactgccagcgccgtgctgacatccctgctgtaggagaggtcgagacaggtggc

SEQ ID NO: 174325 - DNA, 379 bp, Zea Mays
ggctcatccgcccactgctaagggccccctcacctctgaactcgacgctgaccacgtcgctactcttcacgctcaggccaccaggttgcacaatatccgatccctcatgtccatcatattggacccaacatcctcccacaacccttgttggtggagtcagatcctcctcactctttagcgatatgcacttgccgatcacatcctcaacgacctcgtcgccctgccgtatccttcctttgttgctgagcaaagggactgcttccactaccattcatttggtaccaaacacccttgctcaaactcaagttcttaaaatccatatccatgttgagaaaggcctctcaatttcttcgtttttggtgctcaatgccaaagggga

SEQ ID NO: 174326 - DNA, 485 bp, Zea Mays
ttcagagcagaggggagtactcacttcctatgagtcgataaagtttgagtacccgtttttacgtttttctaagtccggacgctaagtgacacaatgtgtcaagttcgtgaactcctagtatactttactcttttaattacatggaaaaatgataatgactaaacaactcggaagagactagcgttcgtggggatatttgagcaccctcaacatggaaaagtataatttgatagaacctactaaccatacggatcggagggcaagctaaagatgatgcaaggatattctctttagtctgtcttttgctttttatccattattttttgttttttctttttgccagaaagaatgtctggttgtgatggaccacgcagatcatttcttctttttggaaggaaaaggctgtaaagcgaagctaccgatccatagaaagaatcctacaatttgtcctactacactacacgtcgcaagccaggggatccata

SEQ ID NO: 174327 - DNA, 550 bp, Zea Mays
gggtaagtttttcttttttatttgctctctccatgatcttttgttcatctgtattgtttgcatggcttcgttccccagcgacttcttgttcgagcggaggctcaggtggaggcgctgtgatcagctcaggtggagacggggcggctctgggcgagtgatgcctgcaccgaggaggaagagcgtgatcatcctgaacttcgctctgaaatcctacgtcttcaaggtgaggtatcatccttgcgcgtggagtgtgacggtgcttgcggcgacgtggatcgcctccgggacgaaagttctcgactcggggagacgcttcgtggagtgaagtctcacaccgagctggcggatcatcctcatgggaggtggaggttcgcttggagcacgcgggctcagagcttataaaggagcgtgacacgaccgaaggtccgcctcccttcttattcttcaagtcttgaccatctgcagcctttgattgcttcgtgatttttcttccacagagctctgcaagatgctcgcttaatcatgggatgcgaaagctgcgacaaacaag

SEQ ID NO: 174328 - DNA, 443 bp, Zea Mays
ttggaagaatcttttgtacaccacaatttcacatcacaaggcttagtgtctcctcatcgccgcctaggtgtgaaagttgaatattatcaatatagccaagctttgcataaaccttaagttcatcatctttggatttagactcgtcgtccttaggatggttaccacccaacaggttctctttctcaacaactcagtttgggctaatggctatttcttcaacgtgatcctcttctacaagcactttcctactagagagcttcaaaagatgtgggtggtacaatcgaagtggccatccagatgtgagccatctctcagggaacaaacatgtgttaaatagcgtgagagagctttagaggtggagcctggagtggaagcatgatggagcttttgaggtggagctcacaacaatagtttgtggtcataagtgagaaatatcacggggg

SEQ ID NO: 174329 - DNA, 524 bp, Zea Mays
ggaccacgtcgcaaatattccaagactcagtgtacagccgcataggacggcgggttatttattaacatcgtaaggggctcttttgtaaagttgtcggtcaaaagggtataggccaaccggggccgctcgatgaaggatcaagggcctagattagacagtgaaccggtattctatcctggccatcagatccaggatctatggttctgaatccattcctgcgtgattggatcgtctccatccgatccgattacaacggctcagatctacctactgaaacactgcccattattctaatcctagccgcccaaagccaatccgacgaccagggggtttccttccccgtccgacggccaagcacggcggcgcgtttagcccacggtggatccccatctgcgcacggccacccaccggaccacccgacctccaaaaccaaattgaaccggtgcaacgcggacctaggcgcatggcgaaacagaaaactgagcattaccgagggttgggtggcggagcgaagctatcctcga

SEQ ID NO: 174330 - DNA, 399 bp, Zea Mays
attgtttagagtttggatttatattcatatgaagttatatatatttggtgagtagtttatgtgagggatatatgttatatgaaaattgcatggacaatccgtgttagtttatgtatacttgtgtatgttggatccagaccagcacgagcacgcttgggccgtagtgctgattgtgccggaacgacaaatagcagcagtagtgtcgtcgtgcctataaggctataccgagatttccggtacagcggcaccaccatacgtttgaccatcgatacctgttgctcctgtgcacgcagcagctggtacgacaagaaattcgaggtgcagaacggaagctggcctgtagcttttcgcgacaaaaagcccatattattgggtgttgcatatcattgtacctcctca

SEQ ID NO: 174331 - DNA, 858 bp, Zea Mays
cttcacgaagttggttcacctcaacgcaacctttcgcgctgacaccacatgcgccttcgatttcctttagaaccgtgttgtcgggttttgaggctcaaattcggtgaaacccgtgaattgttgtgttgtctggttttgaggctcaacgaccaaaatcctcatgggtaccgtacgcaccccacatccttgacatgtgccccaccgcccccaaccacgttgacgatatatgatccacttctccatgtccttgcgtctgtcattgttcctaggtgtcagtcgccatggctactcatctggcttctctaggtcctcgatcaagacccaatgttcgtccttcatcgcttttgatccctcgacatgaacccatatgaacttcgtcattgaccattgtctccagactccacacctgcacatcataaaccaaaagacatgttacacaatcacgtccatgccctagttagtccacacaactcaacccaagacgttacacttgttgacaatcactcatcacaatctaaaccataagagcacatatcaaccatgtgttcacaaatgtatagaatttggaacgaagaaaggataagggtgagcaaaagaggacggattgaggaaagcccacgggggagcctgcaaatccagccaattcaaaagagggatacacttttagtccctaaattgccaatcaatataattaaaggcgcctcccaaatagaaattgtagggactaaagtttagtttctaaagtttagaaggatgactaaataaaccaaacacccccttatttggaccattggagaatgaagacaacagttcacaagtgtctgaaagagaggaaccaagttcagaaaggaaaactaa

SEQ ID NO: 174332 - DNA, 565 bp, Zea Mays
cccggggactaattaatctagtaagtagtgcatttcgggacgttggtttcatcttttcttgtttcacaggtgacatttggcagattccaagcagatgagcaggggtgggttgacaccatcaagtctgttaagcttgggggaattgtaagaatgaataccatggattggcttgggcagtcacagtatgctacccaaacagtctactggtcatctttatcgtcagcaatctcagaggtattcacaactggatccaacatttgaccctggcaaaaaaaaacccagatttgctctcttttctgaaggtttttcttcaatctacctctaattagcaacaaggcagtgctctgacaccaagggtaaactgactctcgccaggtagtattctcaaagaacgcgaccgtgaggctactcgtcgcctactgggcgcatctcatcccaaacaccgagaaatacctgaagagcctactgtactccaacgttctctgcgcgtcttcggcgtacaaccactgtggcggcaaggtcgagatcaagtactacgtggttcctgggcacaacgagaccggac

SEQ ID NO: 174333 - DNA, 843 bp, Zea Mays
cataattcgaatatacacaacatccactttggccatcaataaaagtagtggaagcacaaaaaacttctttcatggcatcactcttatgtcgtcttattgatttttcttaactattgtgatgagaattagtaatcaaaattctgccttgtgccttcagaatcttcaatgtaaagtaaaaacggcaagtacttatggaattaacctgggttagcatttatttaattagcctcccagtaacttcaatgctcaaaatccttgatcaaatcacaagtaatagcacatactgaaaagctagaaaccacaaggattaaaagcaatccagcaaatactactctcaagacccaactcaggcaatcatttcaacataaatgtctaggcagacaatccagccttgaattagtgacagcagctataggagagtttcacagtaataaaacaagacaggcatagagaaaaaaacacaatatagaagatgtacattgctggaattcaatataactgtttgggtcaaatctttatatcagagaagggatcagtatgtgataatagcactccttagtactaaacagttatacaaacaccttgatgaaatttaataccattgcgtatataagcataaaagtagcatagattggattggtacctcttttttccagaccagatttctacaagtgaacacaccgcataaaaatggaagtatcccaagttgcataaattagctgaaagcagctgaaaagcatcatgtagcatgtgcaagctgcaagctaacaaagacattgccatcaaaagaatggtcattccggaataaaatacaaatgagtaacaacccaccggtttcaccag

SEQ ID NO: 174334 - DNA, 937 bp, Zea Mays
gcttggttatgtggtttaatcctttacttggctgctttgtcatatggttcaattatctaattttgcttcattgcttagttgttgcactgccacttcttacacatttaatccttgtttcaagtgcaagagctgcaactcagcaatattggaagtgggacagccagcaataacacctttattacccatcgaaaattcaaaattcacaacgaagcactagcaattgactatcattctaaattatatgctattatactgttataatgttatacaatatacaattatacactgtataattataatatcggccctgcagtaggtaagacgaccaactgccgactagggttgaatagtcgccctagtcgtcgactactcatcctaggtgatctaatcgcccataagcctacttgggtcaactagacaatttaaaaacattgaaccataccacttttttcctgcataaggtaatattctccagatgaatctgtttcactgcagtatgtacaccaacctaaatcagagtgaaaccaaagaatcagcaacagctacatccaaattaccatttgaatcatgaacccataaaccagagacgaaatactctagcaaagataaaagaacacaggctcagttcgttattacagagtaggtatttcagcaagaattaacatgaactaaactgagttctaaaacctcattggtagaatcaaccaactcaagaactgcagtttaatatacaccacctagacaagaccggctgacaaaactgagctggtatttgacttcccttcccaagtaattaattaatatattccttctatacaataataatgcaaagtatgaagagcataactacagtttagacaggtttactgagtcattttctcctgacgccctgaaacaatagtagtgaacggcgtaccttgaatgatcaaaattaaat

SEQ ID NO: 174335 - DNA, 540 bp, Zea Mays
ttgagggccgtcacggtgtaccaaaagcgccaggggaactattgtgacgcgaatatggcaaaggaaatccacctgactgctcagcagtacaaagagagtgaggtggattggttgagccaccattcagatgcttgggcgtggatgtgcaagtattgggcttctgaggagttcctgtccatatctaatagaaatcgtatgaatcgattgagcaagccaggggtccacttcttcggggcagatggacacgttggcaaggccgcacgtatggtatgtgtcaaattgcctggtcaattgttaattgcatagacttgtctagactttctaatcatgtgttgcaggaggctcgaaatggagtggagcctactttgcttcaagtcttcgtcgagggacacaagggtcccgatccgaatcatccggaaatactgaatgatagtaatgcgacagagaaactggtaagtatgaaaattgactctaacatgaacatgatatgcctttgtctgtaacttggatgattttttcacaggctcgctacattgagaa

SEQ ID NO: 174336 - DNA, 311 bp, Zea Mays
agtgacgtggctccaaaggattcggctgttacctctaaaacgccgacatcaccagtaaccgctcggtcattatttctaaaacaccgacgtggcccgctatcactcggctatcacttctaaaagtgcttacatcgctaataatcactcggttgtcattcctaaagcgacaatgtgactccaaaggactcggccgctaccactaaagcgctgacatcgcgaagaaggcagtctgaagcgcgactcaacaattctaagtcgctactcaagcgttacattcagaaaacatctgcagtaagcattaatacgatcga

SEQ ID NO: 174337 - DNA, 628 bp, Zea Mays
ttcatatcatttaacataagcctaaaatgtatttaatttaattaaatataaagtatggatcaaattcatattagatctgacataatccaccatgagcagtctaaaggtaggttcggcataaagcgcaacataagccaagaacaagctgagctccaatatcatcagaaacattcctagctgcccagaactttcaaaaatacagtatatggtatagaattcagttgcacaaaacatgacaaatccaaagcaaagcagacaaatcccatctttttgttcaacaattgtggattttgatcagcaagagtttatctgacttcaactcgattcagaattctacaataaggccaaacaaacaaacaccattccgatttcataattctacaacaccaccaaaaaaacattcctaaactgaaacttagaagcaggacattcctactcctgctttgattcattgcccattccagaccaaccatgaagagagttgtgctaatgacatatttttcaatatctgaaaggcaaaaatacatgttcacctaaaaacaaaatactcaaatgcattacaagttggtaattgccatgcattcatcaatgtcagctatggcgtaaggaccttcttataaacaatatt

SEQ ID NO: 174338 - DNA, 343 bp, Zea Mays
ttcccatgtagcctcatcttccgtgtgttggttccactgtatcttgtaaaacttgagagttttccttcgggtaatcctgtccttttgatccaagactcgaatagggtgctctgaatatatcaagtatggttctaagtcaacattcgttacttcaatggttcgatcgggaacccgaagacacttcttcaattgagacacttggaacacattatgtacggcagacaaggtttcgggtaactgaagtcggtatgccactggtccatatctttcaaggataggaaaaggaccaatgtatcgaggtgctagcttcccctttaccccaaaacgtgatacacccttcatt

SEQ ID NO: 174339 - DNA, 3066 bp, Zea Mays
cgggaggcacgggggcagccagccggcgggctgcccaggcaggtggcctggtggctggcggcagcaggggaaagaataggaacaagtactggcctatgggcgcatagggcacaaggcaggcccattgaagccaacttcagcagctagggacgacgcagcgtcgcctgggagcctgcctagtcgccgtggtgtcgtctaaggtgaccaggtgtccgcctaactaggtttaggcaacgcgactgggcatggcgtccattgccggccgcatggatgcctaggcaatgccgtgataactatgccgctctctttgcttagaaaaaggctcagcaattttttacaagaactctgaactctaatggctaagctaatgacatgagccttcagagggatacaagctatcccttggtccccataaattagaactgcatacaagaggcaacaagccaacagagaattccttcagaagtacaaaactaacaaattacccaagcctgatgcgctgatggttccagatgtatgcacagtgacacttcttgccctattgaaatgaattacagttccttgtacgagaccccagacatcaatatcttcaacacgacagacctaaataggagaaagataccataagctgcatcttatgagagaatctatctgggagctgcatgcgagtgttcaaaaattgagtgtacctgaagggtaaatgacaatgaagaatttagattgcaatcttctggtggatgaattatttccacagggcagctatcagcttcacaattcagctttggggccctaatagatgcgcaagagcttattaatgagcaaaaagatttccaacataaaaaatagggaaaaagaatgtctctatgtgatagctgaaggtaaaagtatttacacatcatcgctacttctgtttacaagtgggccccgtaaaacagaaccaggtccaacctacaaaatgaatatttatcactattctttctttaactggtcacagaagcgaaaaagaacataatatctcatgtgaccacatattgaacattcaacccgggtagttgtaaatttgaattgtgtgtacaggaaaaacccatcagcagtatagtatgacacagcagacaccagacagcaaacaagacaacacacaaaagtatgacagtcattacagcagtataactattgcttagatacacttaaaataagtggggacatatgactgaaaccattacgattagcattgctataaaaattacctgtactggcaatcaaaaaaaatgaccagtactgcatctttggtttgactagagcagtgcagcactgtagagttcaaaatgtgaattgctatgcgatacgctaagattgcagcaataaacaaatacatcagaaaggtgatggctaaaaaagacactgatgctgaaaagcatatatatcatacttgtatgctgtagaacagcgaaagaataaggtgttgcgcctcaattgtgtctccgtccccagacaaatttaggagaccttggccccgaactccaagattagcattagagtgtatcacagatgattcctgaaaacatatgagcaatagttatacatactgagcacaagcagcaaaataggaagagcggtaattaacattggaccaactagaaaccttcagaactatcaggttgctagcatccaacaaagatgttgcaactatcgaatctccaccgccatcaatttccattctggagttccacataaggagcatctttacagacattctcaaagcaccgaacacctagaaaaaatcaagttaaatgtacttgtaaagcagatacaatgtagatgaataattgaatatcacaagaaaccaacagggaaaataccttgattgttgagtcactcataagaagctcctcagccatcagttcaaactccgagtatggataacgagtgagaccaaaagttagaatagcaccagaaagaaggctaagttgcccttcgacctgaaaattataaataagaagtcccatacttcaaattttagaaagaaaacatgatcaaccctaatataagaagcaactccacaataggcttatttctcattatagaaaagcaccatgcatgacttatgcaacttatatgtgacattgatttatggagatgtaaagagcttcagttacaacagagtacaaaaaataaatagaacatcaagactccagtatgtgcagccatatagtcatcagatttgaaatgtaaaatagttgaggtttcttttttgttcgacattatatgagaacatcacatctacactttcgtactttgcattgtgaacaccacatgcacttccgtaattcaccattgagacattgccacattgattcgtacagcctatgtttacaaccaaaatgcatatatgtattcataaaggatatataatttgacgatagactgaagagcaggaaagcataagactatagacctcaacaagaaaatgtcagaaaaccaattaaatgttacaaaagacatcatggttggtacttggtagagtgttaatcaagatagcattacaaagccacatacctgaacgcgactccagagcaaggggacagcaactttggcacgatttcttacaaaaacatttgtccacagtggttgatttggaaactccaaaagaagagtgtctgtttgtgtactcagattgttgttactgacaataagactttttggtactgcttcataaagagttccagcagctcctgcattatctggacagcctgaactccttccccctgaaaaaaatgacagacattaatttcaaacaaaataaaacaataaggtcatctcatcttaacaataactttagacgtgtggtctgtatcacaatcgctagaaaaataccaagagtaggagtttcatggcacacatttcacatatggaggttaagagttagagtgaaaaggaacagtacaatgcttctatagataactaaaaaaaattttattgtcatgatacaagcagcacatggcatgcagatctcctgcaaatgtagacctgttaaacctaaatcacaagaatacaagagagaagaag

SEQ ID NO: 174340 - DNA, 879 bp, Zea Mays
gtttcaaccagttttatggaaccattcctggttcacttggaaacctctcagcattgacatcgctcagaatcccctccaacgaactagaaggacgtatcccgacactgaaaggtctatcatctctcactgaacttgagttgggaaaaaacaagctcgaaggaaccattccatcttggttaggaaacatctcttcactagaaatcattgatcttcagagaaatggtatagttggtcaaatcccagaatccttaggaagtcttgagctgcttacaatcctctctctctcgtccaacagactctcaggttccatacctcatgagctcggaaacctccaagccctgactggacttttcatagataataatgaactagaaagcactttgccgccttcaatatttaatatatcttctcttcagattctgaatgtacaattcaataatttgactggaaagtttccacctgatatgggcagcatgctcccaaagctaaatgaatttcttatagcatataatcaatttcaaggcatgctcccaccatccttgtgcaatgcttcgatgcttcaacaaattcaagcaacaaacaatgccttgtcaggaacaataccccaatgccttggaacccataaggacctgactgtggtggcgttagcaggaaactggtttgaagcaagaaatgatgctgactgggactttcttgcaagtctaaccaactgtagcaatttgaaactcttagatgttaataccaacagtctccaaggtgcgctccctaattcaattggtaatctctcgacacggttggagtatcttaacataggagaaaacgacataactggaacaataacacaaggaataggaaacctcattaacgtgaatgaacttt

SEQ ID NO: 174341 - DNA, 773 bp, Zea Mays
tttgccatatctcaaaaaagagattattgtgctcaaattggattttgaaaaggcctttgattctcttgagcatgagttgattagggatattcttcggtctggcacgtcctcggtcctccttaatggtgtgccagggaaaacttttcattgcaagcgcggggttaggcagggagatcccctctcgcctcttctttttgttctagcggcggatctgctacagagcatcattaataaagcgcgacaacaagacctgctcaagttgcccctcgccgcgaattgtggtcaagattttccgatcgttcaatatgcggatgacacattgttgataatggaagcttgccctagacaattattttttctcagagctgttctaaactcttttgcaacttcgacggggctcaaggtgaactacaacaaatcaagtatgtaccccatcaatgtttgccccgctaaaatggagattctagtcggaactctcaactgtcagataggttcaatgcccttcacctaccttggtgttccgcttggtctgtcaaagcctaaaatctgccactttttaccgctcattcataggattgagaagagattgtcatgcacttatgctctcctttcccaggctggtaggctggagcttgttaactcggtgttctcagctctcccgacctttctgatgtgcaccctgaaaattccggttaccacggtcaagaagattgattcttatcggaaacattgtctttggagaggaaatgacgtcaattcgaagaaacctgcta

SEQ ID NO: 174342 - DNA, 682 bp, Zea Mays
gcggccttctcgacttttataatatgattcttactcatttaaaccccaattctgttctccaaattgccgtgtttgttcatcttgtgaagctttccttggaattcttcctcattttgggctttggaagtacctctaccactgtcggcccaggatggctggaggacatcatcagcttgttggcagtgctagcctagaacttcaccgaggcacgaaagttgagtatcttgatatccctttgaaggacagtattaagggatggcgcctcgagtggtttaccatggagaaccacaaaaagtccctcccttaccgatcggggaggcagtctgacgtctgaacgcccagctgaatagaggcccctacagattcaaagcttgctaagtccagagtgctgcttgctgtgatatgtgcgttgaaggacataggcttgactgctgaagctgttgttgctgattttggcttcaagaatattcaacatctgaaatatatagtctaccctacctacttgtatactggggtcaatgaccctacccaaattaccaacagacggattccagaagaagacatgttgagccgaattgatttgatgctgagaggcaagatttcgaaggctggtgctccattgtcgtattctgcctagaatcttcctccacagagccccttttctgagtttgtttccaaccct

SEQ ID NO: 174343 - DNA, 737 bp, Zea Mays
ctccgccgccggtgcaaccagaggagaatgccgggtccacgaccaccgcggttgccggcgacggtgaggggaaggagtcgctggacaaccctttggtggccatggagtgcttcatcttcctgtagcactaaccttctcctgacccgttctccgctgtcagcaaattactccacatagttttagcaggagtaaaggtggtggtgttggtagcagcagcaggcagtaggccagtagcagcgtaatttggtgagtaataatctcgtcgtgtaaaacgtttcccccctgggctggctttttaacccccgcgggagaaaaattactggctattcccgtagagccttcagcccgtcagaattcagatcgcagggctgggctctgacgcgctgtgctgatgtattgtctgcactctgtagagtacctctccgattgtgcatgtctacttgtaatcttctgttcctttttgcaatggcgagtcattcagagctggaaaggcattccatctgttatagtagtattgttttgccgttctctgttacactgcccgcccgattcaatttgctctggcggaactgaaaagcttctccgtctcacacacgtgttcttttacttttaccgttattagcacaccgttagctcaatttgcggcgcagcagagatggattttgcggtagccgtacaattttcgcagtgtagtccatgaacccaggcctctcttcaattcttctcgtatatactat

SEQ ID NO: 174344 - DNA, 1002 bp, Zea Mays
gacataattttaagaacattttaagtgcttctttttttatatgtgactacacaagacacataagaaatgatattctaaaatacttgcactttaaaagcataaatgttaccatcctttgactttcctccaagttgtaggccttgacttttcggcataggttgattctttattacctacaacatcaacactttcctcgagatgatatgagtttaagatataacaattcaaaataaccttgggtcaatcttggatatagatcattaaagattgatagcttgagttaataaaaattgaattgactcgtttaagcatcccaaagcttcataccatcttcgtctcctgcaaagcttgtcaagcatgttttggtacccatcgcttgatgggtccattatggttagtcaacaaagatctaggaacccaaatgccctttgcgctagcgcttggcaaattcattgcctttctagcaaaagttgcaattttgggttgcctagttatatatgaatcaaatgacaagttatgagtggaggagttaccaatgggacaatccttgcattgatgtccctttttcccggcatgtgtagcataggcgttttccaagttttgaagatttcttctttccttgcttgttgcttgctacatggttagtaaaaactttcttttctaaccctatgcctttttgttttaaatggggacaagatttaataaagtgtcccttctttaaacatttagaacaaagtttatcatccttgtcaataatcaagccatttttaatatagggacatgatctaatcaagtgcccctcttcaaagcattcactacacttcttgattctatttgtataaagtgtaacttgattattaccttggatgttaccttttatggaggcatggttgaggcttttgtaagaggtattgattttcttcttttgcttcctcctcttggcaatcctcaagtccttgacattttcttcaagggatttagtgcatgcctcggttgttcccg

SEQ ID NO: 174345 - DNA, 602 bp, Zea Mays
acccagtgccccataatcctttcaccccccttcctcaccaaaattgtatgaggccagtgacaatgactcatacgactctaacaggtccactaggtatagcatttggaacctgtaaatgtggtacctagaccaaggtcttagttctagtaatgcatcaaaataaataaaaacttatgtgtgctgtctgtgatgcatgggtaaccgatgtaggacatgtgggatgtttgttaatgttccttttgtatgaaccttatgtggaatgcatgaaacttgttacattttagtagaagtgtgttatctgttgttccaattcattgattcgtgtatttcattcctagaatggctgagaacaactgaaacacacctattcgacctcctcttgccggccccagttcaggtaaccagattttcccccacccatgtgggatcctcagttctggcagggccaaggattagaccaaacccatcctgctacaattactggtagtataagccacatgagcaatcctacctggtcccagggacctaatgacacatcttcatttccctttcgcaatccatggaacccatattttggtatgatgaatccaggtggtcctcca

SEQ ID NO: 174346 - DNA, 1003 bp, Zea Mays
cttctttagcataacatactttgggttttcatgggcacatcaaaaagctcttgccatttcctataatgttgcagaagttgcaagttgcaacaaaaacaatagacaaagccttttagtgccattgtgaaaagctacagttgaaacccaaaagaagccttaaggttttgttttacattcgctcatattcaaggcaggctaaatctttggctgcctcctcccatgtcaacttcagccttccactgcctctctttccattactacccggtcttacttctcaggataccaaatacccgacaaaccaactggcaattacattattatgaatgggattacatgccataggcagtacacaaaaaaacaatgtattgtgttccttaaatcatgacataactaatataacaactttaaagttggcagtcacgtcaacttatagcaacatgaactaactaattgtatcaacaacaaggttcgaccattgcacaagaactgctacaacacaagagaaatggtaaacataatgcaaactcacctggatgagggtgggcgcaggatttccgtcactgtaggatggttggagcaggatggcagctgcgacctttttaatgatggtgggtgcacagtttggggatttgtggtggatgtctctgttggcaaggcgatatccagatcgcgtcgcagatagtgcactttctaaatcggcgtcagagatcaagcgcgaatgttggggggaatggcaggatgccaaatctggggccctggtagcctagccgatgcatgttctatgtagcgcgaaaggggaaacaaagggggttgatggctggtcgggctaggggacgcaagggatcctccatagctggccacaccgcgactacgcggctggatggcgaggtggaggggacggcgaggcgggggcatggagttggcatggcggctcgagaagctgtacaaccgtgacaatccagccacacataggaaagaacactaacatcgtaattacagaaga

SEQ ID NO: 174347 - DNA, 456 bp, Zea Mays
cgccgccgtgcggtgtcctgcacctcgtgtgccagcgtcgaaggaaggcgaaggtcctctaaccatcgattgaggagaggacgacgccgattagaatggggataccctttcggggtgtggaatcccgaccgttgggatgtaatccaagggccagtagcggatcgtggatcttaaaaccgtagtcgtagatcctcaatccgagggcggtcatcgtgtactggttgatgatacctagatctaatcgtggcccttgattcacgatcgggcggccagaaaccgtgcattccccttcgcgggtacattttataaaagagaccctggggtttcacctattcaacccgccgtcctgatacgcgtaaatgaattataaaacaggcccagaagtttgcgcagagcaccctaggcttagttaaaatagtgtccacagtccagaatccttgggaaactcagatttta

SEQ ID NO: 174348 - DNA, 1147 bp, Zea Mays
ctgtagtcttcaaggaatcatctgtctccctctagatatcccagacaacgggctggaggacatgctagaggtcttcgacaaggcagctagtcgggtcatagctaggttgtcttctgatgacgtcattcgcaaggcttggtcattgcttgttgtttgtttcatttggtctggattgttttcccaaccgagaaacatgaatctgctttccacactacgtcttagttcttagtacatatttatgggggatcatgttcacgtgatcttgagggtcccacatcggctcccaacaattttccgtcggtcgacccaccttgggtccgctaaaaggcgttcgtcgctttctcgaaaggtgtaggcctttaggcatccgtctccataaatggacgagttcctcttgcaaaattttccctctcttgtcttctgcgctcgacaatggatcaaggtaggtcgtcgagggatgggctcctcttagtgggggaatctttcgaaaatcgtccttgggggctatggtacatgcatttttcctttggtttattccactaggttttcctattttcctcagcacttcgaccctatttaggcatgagcattcctttttccagggtgcgaggggagcttagtctttcacttaggccaattaatcctttggtccactcgaagtcatcggtggaggacctctaaagggactttgttgtagcccactcagctgttagcactgccaacatcgaggtccagtgtctatggacgcgtctggtggccctcaatgactcaggagctggtaactcaagtggcttggtttctcaatttctggcctgctttcggtgtggtaatgagagcccgcgatttttctgtgtttttagagctagaacatgaagctctaacccttcgattatgcatggactaggccatagggttcctccgtgcctagggtagaaatcacgatttacgtctttctgacatcacagttcacgtttgtgaggctgtggtgtttagggttcatcgcagcgcagtggtggctttatgcattgcgcaacttcattttggtggtgagcttcacaatgccattggattacctgagggcgtgatgtcggaggacatagataatttgacggacgactttgatgtcgccacgaacatcgtacttggg

SEQ ID NO: 174349 - DNA, 417 bp, Zea Mays
ggatattttagtttctgggcgtagtgtctggcttctaagatttcttctttggataatcttttccccgaagcatgtcgaataatgtaatcaacatcttcgttcgaagcttcgggggcaggagatttagctttttctatcatgtcttgccctgctgctatgccggtatccagaatttgttgctcagctttatcctcatgcgcgacaggctttgtctcaatgggcactgaaggcccagcttcggcttcggcctggactgtgacagcttcggcaactttcttagtaggagcaggggtcaaggcttttgtggtcaccatgacagtgtctagcacgctggccatcctccttctcttgggagttgcggtaggagcctttggcaccttcagcaattctgcctctgacggtgggctcaggatttct

SEQ ID NO: 174350 - DNA, 556 bp, Zea Mays
gaacatcaaaagcagtgcggagactggacaccggaggcatgaggcatctttctcatatcacaggtcacaacagtccatttcagtctcagcgctgtcgctcaactgctcaaggaggcacggggctggaaagggcaagaggaggagaagctgaaccatggcgagagtagaagcggtggtcatctgcctcctggtcctcgccatggacgtcgccgccggcgtgctcggtgtctacgcggagaaggctcagaaccaggcaagtttccgtgtagtcgggaagctcttttcttttcattgtagggtatccgggaaccagggggcaggggcttcgtccgtattcaggaatcaggctggctggccgtggccgccgctcacccggtgcggctggcgattgcagggcaggcacctgcggatcctgttcgtggagtgccggcagccggtccggcgggcctacgagctcggcatggcggcggccgcggtgctggcggcggcgcacgccatcgccaacgcggccggcggatgcgcgtgcgcctgctccggcgacaagctccgccgggcg

SEQ ID NO: 174351 - DNA, 355 bp, Zea Mays
agtcagcccactataccctcattggggatgcactgtacagaaggggcgcaataggagtcctcatgaagtgcattcctttggttactgggaagcaactgttagatgagatccacgccggacagtgcgggatacacgcagcatccaggaccctggttgggaaggtcttcaggtctggtttctactggccgacagcaaagagtgatgcagccgagttagtccagaggtgtgaagcttgccaattcttatcaaagcagcaacatttaccagcacgacaactgcagaccatacacgtaacatggccgtttgtgtgctggggactggacatgatcaaacccttcaagaaagctcagggagg

SEQ ID NO: 174352 - DNA, 280 bp, Zea Mays
gtcacgactcgtccgaggccaacccccaacgggagatgcagtcacgactcaaccgaggtcaagccctggctagacagtcagtcacgactcgcctgaggccaccctcgggtgggacatgcagtcatgacccgcccaagggcaacccctggcgggagacatagtcacgactcgtccgtggccatcctcaggtgggacagatagtcacaactcgcctgaggccatccgcgggcgggacaggcagtaatgactcgctcgaggccatctacgagtgggatagaca

SEQ ID NO: 174353 - DNA, 760 bp, Zea Mays
atccgacggcacagatccaaactccccaagcggtatgccagaactaatctaggccgcccattaaagaatccacggccccgcacccttcatcttccccctgacgcgcccaggcggcggcgccgcgctctacacggtggagcactccggcgaggcgccaaatctaccccacccgagtgccaaaccccaaattggaccgagctacgcgatgctacgcacacggcgaactagtggaagtagttcatactaggaaggatggcgaggaggtttcagttcacggtgttgtgcgtcccgacagcgcttccctagctccggtgacaaattctccagttcccagtcatgaatcctgttcaacgaggctagggaaaccatccatgtgtcgcggcgaagcttctgcgcccagtgcggtcgcctgattgttgacatgggccacactctattgcggcggacgaattcctccccggcttccctcacattcgcacgacggcttgttcacccacacggttccagcgaccgaacacatttcccctcatgcgctcacgatgccacggcgtagacgagatctggcagcagtggctccatcctccttgcactttcctctcggtggcgctgcagcgaggcgaaagaagctgcggcacaaggtagatgtcgagagggggccgcacgagttttatacccagggtagcggccaaagtccgactcagagccagccgggagatacgcgatgttttgttgagccacccgcgagattcccggcattggc

SEQ ID NO: 174354 - DNA, 544 bp, Zea Mays
gccatgtcgtggatgtgtgccgcggcgtgggcagcactactgatgctaccataaccggtatgacgcactccattatgttcttcataccctccacgttgttcggcatagctctgtatcctagctagggcacctgggtgctggagcactgcacaccggtgatctccgccgccgtggagctctctgctctggaccgctcaggtgactggagaaagaagaaaggactctagccgttgactcagtggtgaacgactaggattatatcactcgcatgcccgttcacctaattgatccgggttgttgattttggatccagcaggccgcgtgacatacctaatcgaccacgccatcatataatctgtgccactcttttgtgatcggacggctgtaaattgcccataccctttcagcctgacaattttacataagagaccctctgctctttataaattaacccgctgtccagccctattcaaagctagttgtgtattggtcctgtttttcacacgactgaccctgggttcttggaaaactatgtccccattct

SEQ ID NO: 174355 - DNA, 799 bp, Zea Mays
tcccaaagtcgaaggtgtcgaggtgccatcaaacgacaggacactagcaaaggcaatatcgagagcagactcgagacctggaggaggattagagcccatgcccaaggcaacacctagtgggacctccgctccaacagcgtgcagcggatcctcaacgcccgggtcactgacctctaaagtgactgggctaacaagagaagtaggaagatcaaggcttgtcaacgctggctcctcagactgaactggtggtgatccatcatgaacatccatagaagcagtcgaagaggagccgagctcgggaccctcaggggctagctcaccctcagaagcaccctcggggcctgggtcactctgagcggcaccctcgggggctgaatcacccttagcagcgccttcgggggctgaattatcctcaaccgtaccctcaggagctggataacccttgcatgtaacatcaggaaccgaggtgtccccatggatcaggtcgccctcaaaggtcgaagaagcatgagaaactgtccggattatttcttgcccgacaatattgctacctgagggaatgtcatctgggacctctgcacggatgccagcactcctagttttaggaagttccaataaaagaccttctgggataatctcctccagcgcatgatcaatggcagacatcatcatactctgaagattaaccagccctgacagagcctgaattgggacatcgttgctggttttgctacgacaattcttgaaaaccaaaggggtgaacttcttcttcatcctctccctcttcgtaagacacacg

SEQ ID NO: 174356 - DNA, 617 bp, Zea Mays
ggagtaccatgtgataaagcaagtgcttgcacacagaaaagatgggcaagaatagaaacttgttgtgagaataagaaacaagaaaaatattttgcagtgagatctaaacaaaagagatatggttgtcctgactctcaccagagggtcggaggccgaagtatgcagggatgagaagccagccagaggaaatggtaccagagggtcgattgcaagggtacgtggtggccaccgggtacacaggttggaggctaccggttacgtagacctccgagcgtggtggaaccaacagcggctgcgtgcacaggtcggcggctgtagctaagatcagtctatcagcaccactgccatcacgtgaggcgtagagctccgagcgtggtggaaccaacagcggctgtgtgcggcgataatgaccaagctccgagcgatggaaccagcaggccaaatcaccaagctccgagcaggggctgcgtgcggcacggtggtgagagggcagttgggaggtgctcgtggatctgggcagggggcacgcggtcggtgatttggcaggggcgcgctccggcggattttgggaggcgcgtttgtgctagtggctcaagatttgggggaagggggaaatg

SEQ ID NO: 174357 - DNA, 522 bp, Zea Mays
ccgcggcgcgcggtggaggcacaagtgcggcgacaaattctagcccacggtttgggtgattacgagtctgtcccgacggaacatgatcaagggaagaggagggcacggaggacatgaatctcaccggtggcagacgagcggacaccctagcttcgacgcacgacggatccgcagagcttcccccgaatcggtggtgacccagagcgtgacgacgctgatccaccacccaacgagaccacacctgaacgcgggacgcagagcggcgactacggtgcaattagctaagaggcgaggcttccttctccaatatgtcaactcagtggcgacgttgaggaaaactgagcagcgagcacccccaacaggcctaaataacccgctcccccacaagcggaaggtgtggtttcgttcgcagccgtcgggcgcaaggcaagttcgctcgtgggtggttgaagatccgcgatattggcgtgagctctgcgcaaatcgtggcggcaaagtccgcccacgccgcgcgattcccac

SEQ ID NO: 174358 - DNA, 399 bp, Zea Mays
cgtatcaattttatgtcgccaagaagcaatataatcctagaaatcctgcttgcatatttgtgcattttcatgtcacatgtgcagttgagataagtcacctttggcaggaccatcagcagccctagtgccaccacttccatcggcaccaacatcattattgccttggaaaaattaagattccaaagagtaaaaattacattatgttaataacaaatgtaaactggaaattttgattgaaactcaccatcaccttcatcattggaactactgtcacctgactcagcataaattgggctgccttgttcttgtgaagaatcagtttcatagtcttttgcggtaccttcagcatcttctccatcccattgcattctctgtttgtttttacaaccttttttccca

SEQ ID NO: 174359 - DNA, 308 bp, Zea Mays
cggcggtgaacacgtgttcactgcaccagcattcttccttatctccgaccgccgcgcgtcgccgttaaaattcccggccaccgtcgaagccgcctataaattgagccctcccctagctgcgtaacatcatcacccacccagccaccaacaatcgttagcaaccgtgccttcgagagctcgaattttgatttctccccaatccgggtttccgccaccgtgaactagccttaccgcggccagtgcaattcaagccaactcacgccctctgatccctcagttgagtatcctcaggtacccgtgatgctccc

SEQ ID NO: 174360 - DNA, 632 bp, Zea Mays
cgggatgagctcgggtcctgttcagttcaccatacccacttgcccgacgacgtggccgggcgatcatcgcagtggtggccgctgtccttcgcggttgcgccacgccgtgaccctttcactatgtagctataaccatggcaagcctagagttactgcccttgagccgttgtaccggcgggcgccacaacgaactcgtccagtggaatatcccaccaccgccgtgatcgtcttcgacccaaattagcgaagcaattagccggttcctttaaattgagcactaccatcactctgcctctctattacacactcatcccaccctccgttagcctctttcgtgcaccgtagcccccagtcactggatttccccaaatcgtgtcactcacgccgccgtgaggcacacggctgtgatcagccgttcccaggtccattcattcccctctatgccatgttttagcatccttgaatgttaacatagcacatcggctcaaccgattgaacactaccatgactgggcatcgagaacatcacctcgccgccgcagaacatgtctgagagcgcgctcacgtcgacccactctcccacaccctctccgtccaaattcacgcgtgtaccccacctctggtgaatcagtg

SEQ ID NO: 174361 - DNA, 560 bp, Zea Mays
tcagaccgtgggcgcgctagctagctcctttccgcaagggagcttctgccctgtgggtccgtggcgtcagggctaccttcaacctccagcaccgaaatcgtcgcgtggatccccgcggtattcgcgtcaacaaaagccgcgtccaggctagatcgagcgggtctccgtgcgggcttctcgggatccctggcggctctctctactccctttcggactctctccagtgtataaaataccaccgtgttgccgccgccatgacacatctcaatcgctcgccgctcgtcttctctcctccgcggctcaaattgctagcccacttccgtcgccgagcttgggagcctccagctcgagctcttcttcacctctctgccgccacaactagtgcccaataggaacatccgtcgtgcgcctatacaataggattccgccgccgtcatcgttctgccgctgcaccgcggaacctgcagcaccgccattcggacctctggtggtgaaggaggagtaccgattgcgtgcatggagactagccatagatttgcccggcgtagggacggccggac

SEQ ID NO: 174362 - DNA, 730 bp, Zea Mays
ctgaacccgacgggtgtgttcctgctgatgctgatcccaatgggtgtgaccctgccagagctgatcccaatggctgtgaccctgccagagctgaacccaatgggtgtgaccctgccagagctgaacccaatgggtgtgaccctgccagtgctgatccaaatgggtgtgaccctgtcagagatgatcccaatgggtgtgaccctgtgccgtatattgtccatgttgttgacgaggaagaagaagaggaagtccccttagttcgaaagaacagtcggcgttacagagtcagtggagggagtagcgatattccttctccagctttgtctgcactcgttggtctgcaagaactatccatagcaaatttcgatcaggctctcgaagatgtcgttcctgaagatatgttgtccgagccagctgatggtgatatgatggacgtttgttctgacatcccagaggtgggattagaattatcccgagtagcgtctcgtgtctcgtcgaccttggaaagcggtcttcggagtcaagaggttggtcaaggttgttcagttcccatggaggtgactgagagtccttcagccttagaggtggctgttgcgaagaacccaatcctcaaggatggtgccagcggttgcccagcccccgagggtgttgccggtggtgatccggctccgatgggtagtgcgggctgcaacccagcctctgagggtatccaagcaggctccccttctca

SEQ ID NO: 174363 - DNA, 274 bp, Zea Mays
gtgggcgcaagatttatacaggttcgggtagaacgtccctacatctagtcttcagtggctcacactactggcaccttatttttcaatgctcgtagtagaggttacaagcagacgagaggaggagttcccaagtctatgcgtagtggattctaagggacaatgtatcgggtattcgctacctagctaagctgtgaaggtgttgccgctccatcgttcatgtcgtccttctagctttgccccctgagtcaatgctgaccctccccttttatagacc

SEQ ID NO: 174364 - DNA, 773 bp, Zea Mays
ctttgctggttgggggcatatgaggcacttcttgctcagcagtcgaaaaatcagattgaaggtagccggtgtaggccacaaggaaggggaagttgttagcatgggagttgaggtccaagttttcaagggtattccccgctgccgatgatctaccgacatatggggattgcgagaagattggcatatcctcggagataggtgtgagggggaatcatcctgagtagatggatcatgagaaaagaagtcacggtacccgtcacctgtgtttgccatagcgaagtggtagcgataggccaggagaatgaaatgaattggatggcagatgcagagagagtagatggatcaaaatggggaggaagaaccctagccacaaaatgtgaaggacaagatcgagcagggaggaaaggagggttgctgcgtgatgaagctggacaacgaggacatgatgaggggacggcgaatccagcatggaggtgatggttccggtgagaaggccaaggttccggcgaggaggagatggatccggcgacaagatgacaaatacggcgctttagtggcagcaggtcagtgactctggtggcggcagcgtttagaggaaggaaaggggagggcaggtttatggaggaaggaaagggtagggctcaggtagcgagggcagtaaagaggggagagcaagtgtggtaaaaaattccactttaagttttgtttgggagcaagaggaataagaagtgatttagcctctctaatactcttcattccccttgctctcaaac

SEQ ID NO: 174365 - DNA, 815 bp, Zea Mays
actaaattgattaatttaacaagcatctcaccagtgtatgtgtcctcaccgtcacattgtgtagcattgggcacatcctctggcatccggtggtcgaagcttgtgacaggaatcacctgacgtcgcatcgatcccacaccagatacatccaactcttccttcgtcagacctgcatctcgttgcattcttcctgccgcaaatggtgaagtacgaagactttctcaaacctccattgcatgaggacgtggcggcctgtacatggacgaaagaggggcgaggaaaaaaatgcggcagcgtgggctgtacgcggcgcaagctgcaggcagcggcgcaggaagtacggggcgatgacgcaggctgtacgcgcaggagcaggagcgtgagggctcgggggcgggggacgcggaagagggagggcgagatggcgtgcgaaagggcgagagatgacgagcggcgagcgctcggcaaagatacctagcaaaggcagcaggatgacgagggggatggataagcgagaaagatggcgagactgttggttatgggtttcacatggtttttcttttttttaacgagtgaaggataattactgagtctgttggaggtgctctaacacagtgagaagggtcttttgctctaggttcgggatgcgggaggaagacatcaaagtggtgcagcattaccatgaagactccttcgtcaccttcgagcaccagcaccagcaccaccgggacgccgccgtggcacgacgcgacttcacttacggcaacatcgacattcgcgtcagaccgtggcagctccccgtccacggtgactgc

SEQ ID NO: 174366 - DNA, 411 bp, Zea Mays
aacgccttcggtctcggtgacgcatttaagcatgggttgactgacccccttcttgtaaagttgtccctcaatgagtgcgaagtcccggcttcgatgtttgaggcgcttggcctcgttgatatcgcttggatggtaatatccctgcaggaacagggttattggtgcccgccagtcttcggtcatgatgaggttgactatgcggtggccctcggtgtcgttggttatttggaggccctctggactgcggacggctggcgtgccgatgacatggtagaatacgtcggagggcaaggccttgcctctggcggctgccttggccaacgcgtcggactcctcgtttttggctcggtccacatgctgcaaggtaaatcccttgaattgcctctcaagactgcggacaaccgtgagata

SEQ ID NO: 174367 - DNA, 296 bp, Zea Mays
tgttcgggttatcaaagaaatgatcaagcaaagggcggagaaatataagtgctttcgtcaggacagcaagggaattctatggtttggagatcgattggttgttcccaaggaccctgagctcagaaagaagatactagatgaagctcacctttcaaaattctccatgcaccctggcagcaacaagatgtaccatgatctcagatccttatactggtggaccagaatgaagagggaaattgccaagtacatatctgagtgtgacacctgccagaggatcaaagccagtcatttgaagg

SEQ ID NO: 174368 - DNA, 479 bp, Zea Mays
aattccagagctcgacagtttggcaacgcgataccgcgcgaaagacagtccctgctaaggacacgagatcttgcttttctaatgaatcccaactgatggccagtgagatcccttgcaatatatgcacatgagacctttctttgcgaggtaccgtgactcacagacactcaactagtgtttgtcgatccaaactccaaagagcgctagagaaagggaggtactagtacacgaacaacgcgtggatccatttacttttgccgcaatcagaaggtgttatgaaatgaagctggtgatgattctatttactttacgaaatcaaagtgtgagcgtgcatgtgtgtaggcaggtagggcaaaacagaggcattattctgaagaccactcgaacggatggagaggaggctaaagagagcagtggcaagcatcatggtctgtaaaataatagatgcccttagaagaatcgccggcagactattacgc

SEQ ID NO: 174369 - DNA, 481 bp, Zea Mays
agggggatttcctgtcatacggagaagagggggaggggtgagtgagtgaatcataggactgagagagggggtgaacgattcagggaatcgttggagaacatcttgtattgcctcctgtaaccctgcctgagagactgaacaaacaagcagaagtcctgctcattgacttctgcatatttgaaccagaaggatattccgcgtgtttggtttcacgtatgagtagaggtggtaatggatcgggatctaaatatttacgtttcttcacaataagttaggatacttaaaaaattagttcgaaaatgaatagaaataaagctcgattctaatatgattcaatccttaaattttatatcgcatcattggttgtctacgcccgctcgtacagattcttcgcatgcattgaccaaaaggtagtctttgtttggttgcgtgcttatgccaagccaatgctgcacccgctgctgcaagacaggccaaaaac

SEQ ID NO: 174370 - DNA, 630 bp, Zea Mays
ggtggctgcaacgtgcgatttgccttctgctgtaggaaaatgaaggcatgccaacagcgcagataagacaggctccagattacgatgcactgttcgtttctggccggaatatccgaaaagaccagcgtgccgagagtacagggacatacaagagtcggtacaagagagtccacagccaccccatccggcgccctcatcctgttttgcttgcccgcatccccgtcagtcattttggtgaaaaccgaaaagcgcctcccctcctgctctgctcctgcctctctcgtcactcgtcattgcggccgggcactgggccactggcatcgtaacaactgccgatacgcccgagacagcgcgggcggagccagcgagagggaaggccatgaggtcgcagctcaacgcgtccttctcgccgccgccctcgctccggcgagctctcccctctgccacgccccgcgccctcaggtacggcgagcgcaccgcttcgatcggctccgcgtttctgctccgcagagcgacggaggctggcaggctgctgaacacagctctccctggttccaggttccacgcgttcccgtggcggttccgcgctcctcagcaccacggccgcggcgctggagctcgctgcgctac

SEQ ID NO: 174371 - DNA, 360 bp, Zea Mays
gtgactagctcggtacggtggtcggagtagtttagtggccggagtatatccacggcgatgatatttactcaaccccaagcgctatccaaccgatccgagcacgaatcacggcggcgtaggcacgaatccgcgcgcggctcatcggcggcgagagacagagctagcgacctgatcgggacactgtaccatcagaactgtgattcagagctcctgacagatcaactttaagtccaatttcctcccaattttccttggtaacacaaccaatgctctgcaacaaacttgtagccctacaaaccatcttcatatttgttatagcattcctagtcaaattcccactggatcatgattgaattcgag

SEQ ID NO: 174372 - DNA, 511 bp, Zea Mays
cagtaatcctttcaaccgtaagaaatttcatccgaaaagaaacgatgaatccccagttcacaaatttccgcggatctggtctgccttttagggttacacaattgtaaggtagtcacccgctgaatgtccttcatacttggtcgaactaaatttggttgtgcttagtattagggccagaggttcttcaccttccattattttgtaatccctacactacggactagcttccatactgccttcaagtgtagtcttctggaattaattttggatgaacactgtccacaacaacagctcattttagcaaatgtactagagtgattcatcgtagtgtgccccacaatgtgttacttcatccaactcagtgtaatgttcattgtttattatactttttaaaattctcatcgacataatcagatggggcattacctgtcaagttagtatgcctcatgttcattcatattgttaggtgtatgtcaacccttattgtgttcctctacttccccccaatttg

SEQ ID NO: 174373 - DNA, 565 bp, Zea Mays
atctaatactggccttgcgatcacgatccaagggctatcctaccatctaatctacatcgtccaacagaatatcaacggcacacagccatcctaaccgtccattccgagatccacggtcaccagctttctccctcgcctagcacaggtcacggcggctcaccccagagccacggtgggagttcgtcggcgtgcgcacgattctccgcccaagcgtccccaacactaaaattgattgctactacgcgacgaggaggatgaggcgagtcgattggatgggtttcttaccgacggaatgaggcacagttgcgtggccacggcgatgggcggaagttcgacggtggcggcaaattgggcgcgctccggtcaaggattcgtcaaggcgaggttctggaactctctggcgagctatggcggactcttgcagtaccacaccgacgacccaccgcaacagttgacggtggccaaggtgtgacgcgatggtgctttcctggcggcgcaatttatcccgatgtggagctcttgttcacacagcccttggactgggtaatgcgcggatggggcggag

SEQ ID NO: 174374 - DNA, 508 bp, Zea Mays
gaagatgttaccgttcaaggctctatatggcaggaaatgcaggactcctctatattgggataagactagaggaagacaattctttgggcctgaacttattcaataggcagaaaaaaaacaagtccgtataatttgagagaatttgagggtagctcaaaccaggcaaaagagctatgctgataatagaatgagaccactgtaatttgaggaaggtgatcatgtatacctcaaggtgtcaccacttcgaggtatgaggagatttaaagttaaaggaaggttgtcccctcgcttcattggacctttcttgatcttaaagcgagtgggggaagttgcatatcaactggagttacccaatcatctgtctgtacatgatgtgtttcatgtgtcccagctaaagaagtgcctcagggtacctgaggagcagctaccaatggaagaccttagtgttcaagatgacctgacttatgctgagtaccctatcaagattctggacactttgactcgagtt

SEQ ID NO: 174375 - DNA, 770 bp, Zea Mays
gaggttgtgggatagtgcagactctgatgctaggcactttcatgataacattaggttttttaatgaccatttctctttcacttccctatactattgcctcgatagtatgataactaatgtaacagactctggtatatacacatttcgagcacatggcatgatgtaccacaatatcaagtcatttggtagggaaggtggggcagagcaaaaacaccttgagctttactttttatgatgatgatcctagtatcaagcatcggtaccataagtgccacgaacagcatcaacagaaagacaaagaggttattaaagagatagtcaacatactacatggaaacccgtactccgagcaccttagggccatgggacacgttgagaaccttgatgactatcgtatcgcattgaacctagaccagacgttaaaccagaagacatataacacacctctcacttcagaggtggccgttgtctagatcgaagggagcgaagggcgaggccagttcagcaagagtgttatgctccatgggaaggacagttcaagccactgcatccgctcataccatggatgctacaatgcactatcatatcaactgttcttccctagaggcgaacttggatggcatgcaaatatcccaaaggttggagtacccatggacgaagtggatgcataccttgcgacacatagggcaagtaatgcaaatgatgaagatgcgggttagttgtttctttgtaatttgagatattttcacattattaactatccttttagc

SEQ ID NO: 174376 - DNA, 390 bp, Zea Mays
cgcatggcaacctacggatatgacgggagtcacgagagaactggccgagtataaattaaaggtctatcctcaaggaaggccgattcgacagaagctgcatcgtttcacgcctaacaagagagaagctattcgcgccgagttagctcgcttagtggctgcagggttcattagagaagtgttgcatcctgagtggctagcaaatcctgttcttgtactcaaaaagaataaagtggattggcgcatgtgtgtcgactatactgatctcaacgaacactgtccgaaggatcccttcgggctccctagaatagatcaggtggttgattcgaccgctggatgttctatgttgtccttcctagactgctattctagataccatcagatcaacttggc

SEQ ID NO: 174377 - DNA, 660 bp, Zea Mays
ctggtaaatctgtaaatttggctttagaacatatgctcttactagaactatcacaatttactatcaggatatgaacaaagtggaaacccaacacaacaactgctactggcaatggttgttgattctacttgagctcgtataagaataagttgtaatccatatacacccaattcaaatgcgagctgcaatggcccttgacacaaccccacaaccaaggagcatgaaccatgctatcatattgtaccggccgtagtgatgcaggaaaccgtagctccgactgacttagttcgtgaccacgactccacggtggcggcagtaggcggtggaggtccatcgatgatgaagcagtatagcgagccaataatgatatttgaatgagatggcaagggccagtgcggcccaaacagaggcgtcctgagggagatttgtcgcgccattggccatgaatgcatggacgacgtcgtggagatggctagcgcgagggcgatgaacgagagcatagggagtccttgcgagcgtgacatcttcttgggctcgtcctcggggcgaatgcttgtcggtgtcttatgaatggaaaggactgtcaggtggaagagcgtgacgacggtgagtacgacacatacgatgtcgaccagatcgatttggtacttagcggcggcg

SEQ ID NO: 174378 - DNA, 429 bp, Zea Mays
gtgaagcaactgtttgcctagaagggtttaaaagctgatgttaagacgtttgtcacaaactgtctgacctgtcagcaagccaaggcagatcgtgctcgtttaccgggcttgttacaaccattgcctgttcccacatcgttatggcaaatgattactatggatttcattgaagctcttccttgttcccagtcatatacctgcatcatggtctttgtggatgccttcaccaagtatactcattttctgcccctgaaacaccaatgagcaatatctggcctggtgacagtaagataaactaagctgccaacaagatgtctatatcaagatggatcctccaaaggtgtcccatcagtcggacgaagagataagtgaagatccataggcgtggcaacagtgtgagtatcactaagaccagaacgatcaaggagg

SEQ ID NO: 174379 - DNA, 389 bp, Zea Mays
gttgaggtgggggtggctgctgctacacctgttgcgtcgctgctaaggtctgaccaatcgcttggactgcttgggtctgcattaggaacatctgctcaatggtcatcggaggtggcggtggcaactgctgttgagctgcatcttcctagggtgcctgctgctctttctgagcatgtcgtgcaccttggcgcctgttctcagacatctgtagaaagcacacacatatcagatctgactctgcaatctttcaacataagaaaagatatatggaaaatcttcataatactaaacaattgatcatcttcactaacagcttctcagataaagaggaaagtggaaataaagggattacccaactaaataactgactttattaataactacaccaa

SEQ ID NO: 174380 - DNA, 741 bp, Zea Mays
aggttgtccaatagatgaatatgtgaaccgtaggtcaaaatcaacaacaacaagcacattttagcccttccaattctaccaatgtatctagtctggtcatgtgagggtggtattgctgcaacgtgagtgccatctattgcaccaatgcaatctttgaaaaaaggcatcatcctacgatccttggtaattctagggtgtgtagtaaaaaagtttggatcaattggccttatatattcctcacacatacccaccacacaatgcaatacctcctcaaattttcggctaatggtctctccagaatgcttaaaaacatgttgtgcaccactattagaccaaccatgaccacatgtaactaagaaaatggcaagagactccattgaattgatatgaagagaagatttgagcccatagttactcactagcaagtcatgcaagctatagaaaagagatgcatccatccggaacatcttgtggcttcctcctggattactcaatgtttccctcacccaagcatatccactgtcttgtggtccttgcctcattcttgtcaatataagtgaaataatattttccaagaacaagagttgtgcacaatgtatttttctaaacagaccgcgctagtccaataaccttccttctcaattcttcatcaccagatccactctcatcatcagatgcactcgcatcatcagttccacttctatcatcagagccactgtcatcaccagataataaatagag

SEQ ID NO: 174381 - DNA, 713 bp, Zea Mays
tgggggtgccccgctggttctctccccgttccccatatcattaccaccatctcctcccaccgactgggttgcgaactctggcgcctcattccataccactcctaaccccagaattgtctctttacctcatcctcctggcaccacattcccttcctccatcatcgttgataatgggtcaactctacctaccacctcggtagatgacactgtacttcctggtcctttgtacctcaacaacattcttgtggcccccaacatcatccaaaaccttctctcggttcgtcacttcaccactaacaaccgttgttctatagagtttgatccttgggggctcaccattcgggaccttaccactcgtgctatggttgctcgatgcgacacccttatattccattcgcttccccgctccaccttcctccgcccatgttgccacaccttacgcccttgcctccattgttcctgcctccactttgcactgtcgtcatggccaccctggacatgacatcatctctcgtctctcagccacctcggtcattctgtgtcttcacggcaacaccacttagctttgtcatgcctgttagcttgggcgtcacactcgcttacctttttcctcttccacatcttgtgctcctcatcccttcgacctcatccactatgacctatggacatcgcctatccctagcatctctattatatggtactatctcgtcatt

SEQ ID NO: 174382 - DNA, 1092 bp, Zea Mays
actgtactcaccgctagatctcaatcggacgctccagatgtcacgcggcgtgagcagattctgcgccccatgatccccatctaatggccaacagttgacaggttattcaggacgatctcggccgtcgcgccagagatcaacggcaccggttaacccaggcgactggcgccgcgcgctccacccgcggccacccgatggagaatctacgctctagattaatccaaccctttggtgcgcccaggttcaatcctatccctctatttagatccgacgacaggtacaccttcttcttcctctcgctgtctactgaattcctagcgcgcgcccatgacagcgcattagctatggcaccgagtaagtagggcatgggaggggaggtcttaccgccactgacgaactggacgacgaccggatgcagggcacagcgaggcgcagtattccagcgtgcttcactctctctcttcgcggttgcaactgaccaccgttcgactggccgacggtgaccgctctgcgagctgctccacctgtggtgatcacccgctggacccaccgtgctcgtccatggcccgcaccaggaaataacgccgcgcccggactcctcctcgacctccccgaatcgaatgcaggcagaagaccacggcagtgcgcgtccacggtctctctcctctctctttctcaactctctgtggatgcgttagtcgccgcaacgtagagtggcttgcgggtagaggattaggcatgatgaccccgcctttatccaggaagtccagctctctcgaggatcccacagtagtggttgagatccgatgtccacggagtccacgacgtccgccatgcgcgcagggtgaagggaggcagccactcctcggtgggccacgcccgtcagcgacgctagaagatgggtcatcgcagcacctggccccacgcaacagtgagagcccgtccacgcctcggctgcgcggagcgcgatcacccgggcccacgggtcagcgatacctggcgcgcgtgtggtgagaaagacaatgcgtgggccgcacgggtgggtttggctgctgggccgaattgaagtctcgaggcccatgaagcttttat

SEQ ID NO: 174383 - DNA, 380 bp, Zea Mays
gcggaggggcttacatgcggcgagactactccggtgaggtggtcgaggtggtaggggaggtcctgagggtcacggcgatgtgcgggtcgctgtcggggatggtcggagtcggccggtccacgtgcgcaggcaggggagctcgtcggcagcgaggagtccggcctaaccagggcacaattgatcaatcaaatgggtcagagagcttcactagggatcaaggaagatgtgtgtgtgcggaattgaagaacgactcaccggatttctcggtctacacgcgtaggtgggcggctgaagttctgctgtgaagttctgccgggtccgagagcttgggaagcttcacgagataccgacgaagctaagcgaggggcaggcacggcttg

SEQ ID NO: 174384 - DNA, 742 bp, Zea Mays
gcatgggcaacggaagaacacgggcgttcacggcaacccagggcggtcaagttcaatcaaaggagtcgtgaagcttgaggaggacctaaggacactagaacaatcgaccagagtgcttgaacgaacctggaataagctggccgcggtgagggtgtctctgcggtggcggaaaccggattgggggaagtaagaaattcgcggtctctggtgaacgatttgaggcaatacttggtggcttggtgcgtgatcatcctacggacctgaccgcgcgctcaatttatagaagacaagagcggtggccggtgaatttgggagggacgcgcggcggccggaggaacaaggagttactggcgagcgcgattagtgtccgactaccatcgcaggctccccggtgatagacggagggttacagcgagtcacggcgacgccggggatgtgccaaggcacgtggcgttcggtcgacgggcagccaactccgatgacttatccgaaccgaccacaaagcaaaaaggagcacgtcggctagccggataagtgcccatagtccaacagtggtgacgatctttttaccccgcggcgttatctgggctaaagtgggcacgaatcacctcatcggcgcgaatctatgcgcaaggtcaccggcagcgagctaaccgagctggcagtctgatccaggcactgtaccatggaattcatcttcagtgcgcctgacagccgaggtttagggcaggttttctccaaa

SEQ ID NO: 174385 - DNA, 427 bp, Zea Mays
gcctcagctttttaaccacaccgccgtgactcatgatagcccattcggtgatcgccggtgagcttgccacggtaattgccaccaatcgcgtgcgccagtacccctcctcctctctggccgccgcgtgtatctttcaaattcaccggccaccgctcaagagccctataaattgagcacaccctcggctccgttaggtattacagcatccaatccacccgctcgtgcctccaattactcaccagagcccgcgaattgctcagttcccccaattctgttttccgccaccgtgatcaagctctcaccgtggtcagtgcaattcaagtccggtcttgccctctactctcttgtttcagcactcctacataccattgatgctcctcgacccattcaattaaactcgaacgtgctagatcgtcgggaacacccg

SEQ ID NO: 174386 - DNA, 378 bp, Zea Mays
atatgaacattacaaatgtctacaaattagcaatggccatgtgttagaaaattactcaccgaattatttgcagtaatttcagcttcaacttcaattggttcatcatcttcccgaccttgagcatttaaatcgatgtcaataccaacacttcggccaccacgaatgatccttccggcactcctactaccgcgtatcacaccacgtttcacagaactagtgccacgaccggcactacgccctgccagtgtaaatcctgcgccacgacgacctgccgtcatagaaccacgtaccatggttggtctgcctcgttcaggtgtcgtaacatcaccaactcctgattcaatgtctgctggttccgacggaggatccatcacaata

SEQ ID NO: 174387 - DNA, 563 bp, Zea Mays
attcatgtcagttgtatctcgtagccttatgaatcagtatgggctgctctaaccaagtttgaaacaatgggcgaatcgatgacagacaaaatggaccaaagaccaaaccaaacagcacccggtaaggtcattattctcgatgaagggtttcacactatttccaaaactaccatatcaacatttgtttcccataaagctctctcatctcgcatcagccatgaaactctcgtatctctcttcgtgactttctacacatacaatctcttaactgtattaatgttttaggagctcacaatctcttaactgtattaatgttttaggagctcaggatgtatggcgcaatttcttaaccgtctcttctacatagtaaaccgagcaagaggctctgggttatacaagcaagatgatatgacgcttaccaccagtgatagaggtgacaatgtgctttcaattttacactataatatttaaaaattggattagaattaaccgtctcttctacatagtaaaccgagcaagaggctctgggttatacaagcaagatgatatgacgcttaccacca

SEQ ID NO: 174388 - DNA, 294 bp, Zea Mays
gttcaaatctgatgcttcaatgtgacgtacactcccttttccaactgctttacccggattcgcaaaaaattgaagggtgctttggggtgattcattttcgacatgaagtcgcactgaaggcgcaaacacattgttggctcaagcgaaatacctggttgagaattgagatatctccttaagagcaaaagcctccgcaatacacccttcgactctagccttgttgcgaacagacgcctgagctttttcaacgccctttctataggatacatccacctgaattgcactggtccgcct

SEQ ID NO: 174389 - DNA, 672 bp, Zea Mays
cccgatctcgcgctacggtagtctgccagtcgggtcaagcgaacggtgatcaggcgggttctagtctaccggctggagcactaccaggacctacacagtacaggaacgacgacgaacagccagaaccttaccggcgtcagtagtgtaggccgagccgcccacggagtggtctgcacgatggagtgcccaggcggtgcgtcagctcccgacacaatgatgcccagaccactaccgaagaaatggggccgccgtggagcgcccttgccggactcccgccctcggtttccccgaactccgaccgaacgcaccagcaacgaacccgaaggtcaccggcgagctcgattctttctctctcttcgatggagctcggtgtgaattcaccaatggcggcggaattggagctggcaatggacggctcagggaactctaggggtgtgtcgccgatgggatttatagctatggcgaggggcaatcgggcctgagagcagacgactgacatggatttatacccccgccgagtgggataagcacagcgaacggcgcaagtctgttgcgccattgccgcgggtgctgttacggttgagcggagggatggggtcttcgcgcagtgggcccacgcaacaaccagccgcggagctcggcgtctgttgcgaggattccggcgtggttctg

SEQ ID NO: 174390 - DNA, 503 bp, Zea Mays
ggttaattgagggggagaatgggtgcgtcggcttcgcgatgacctagcgctgtaggcccagccaaccatttatagggatagcgagcggtggtcgtgaatttggacgagacacacggtggccggaggaagggaagcttcactggtgcagtggtttcgtgtcctcagtcgtggtgaaggctccggtgatcaacggagagcaagggtgagtcacggtgatgcggtagatggacagagacacgcggcacaaggccgggaggcggtggctcaccggcgagcaaatctgctccagctgcaaagcagcagagtgcggtggtgagtcaccggagtgacgtccagcgcacggggtgacgaccgaagcgttatccccaatcctagggcacaaatccacacgccggtgacacgaatcacggcggaggagccgtcggcggtgagatttttctgccgtggcgatctgatccagtattgttactgtaccatggcgatttcagtcagataaacctgac

SEQ ID NO: 174391 - DNA, 701 bp, Zea Mays
ttgaaagccattaggcacgcttgcacttcgttcccaattgcgattgatggtcttctaatgccgaagcgcgaccaaatgggacgttgaatgatgcccctcacatcctccctctgattcagatcattctttacgtaaaaccattgcttcatctaagagcccagccacttcttccgaaatgttggcacaatataatttgcctcagagcggggcacgaagctataacatccaaagttgttatggtattgttcttttccggttgccttcgtctagtaggatagctcatgaatattgcaaaaacacctagcatccggctctagcccttgactcctcatagcccgtataaaaaccccccactttgataagggcttcaggggcaagttgatgaaggtatattttgaatgccttcagaacttcaaccaacatcttgtgtagtgggaagcgaagcccagctttcatgaagcttttaaagaccaccacctcatcagctttgggaaggggaacagtgctttctccccccccccccgaccctcactatagaaatataatgaaaatatttgcccttcatcgcttcgatttgcccttgcttgacagttgacttcccaaaaacgacatggcttggcctccatgaccgatcttcggcatcttcatttccactctccacatcaaagttgtcactgtcactggaatccctagaatactca

SEQ ID NO: 174392 - DNA, 546 bp, Zea Mays
tgaatcatggatggccatcacagctttcgtgattttctctcccaagccggctcatcctcagcaccgaggaacctcaccatccccatccacaaagtggcggaggacaacgagttcggcctcttctccccaacccacttgattcattcctcatcgatgaacaactctgcgccccggattcggatggatcaactcgatctgaaccaccagggcactgagtttccccacttcagtttgtatcaacaagttctagagactggtgaaccaacaaacaacctaggatttccagattcatgcattagaattggctgcactccattccaaacaaccagatctactactggaggcatgagaggaagaggaaacccgcctctggttcgtggccgagatgcatctagaggtatttctagaggaagggggaggttcagaggtttccgaggtagtggtggtatctccgttcctgttgaacatttggaggatgaagcagaaactgaatccgaagctcgtttagctgtggtaaggcactattttatatctgttatatgttca

SEQ ID NO: 174393 - DNA, 556 bp, Zea Mays
ggattttctacaatttaaacaagtttctgcaattaaatttgtactaaaaaccattttctaacctattttcctgattttattaattttctggactgggcgtcaaatatagagaagtgcagggggttaaaccaaaattttcccatgactcaggccactgacgcatggatggcgggttggttttctaataacccaaggtctcttatgcaaaagcgatcggcgaaggggtatccgtgaatatgggccgatcgattaggcacggacggccgtgattaagtcgacccaggtaaaccctaactctctcatgccaccgtcggatccaagatcaaggccccagatttaaaacacccagaccagcctccgttcattggatcttgatcaaacggcgcaggctgatccaacccaaccgataccctctgttctaatcacgaccgttgcataaaatatcaacggtccgcgcacctccactgcgcactagcccttcctggtggccagacgcggcggcgcctgtgttcccgcggtggcgccatggccggtgaagcggtcgcgtgccattccg

SEQ ID NO: 174394 - DNA, 671 bp, Zea Mays
aggtaccatcataggtttggtctgatatatcaattaatttcatcaagggacttcccaaagtgcaagtaaagtctgtcattctcacaatagtggacagattctccaagtattcacacttcataactttaagccatacatagcaatagtggctcaggctttctttgaatgagtagttcggcttcatggggtttctaagtcgatcgccagtgaccgcgacccagttttcacaggaaacatctagcgacacctgttcaaattaggtggtgtcaaactctagatgagcacactttccacccacagacggatggtcaatctgaggtggtcaataatactattgtcatgtatctccgttgcatcacaagtaatcgtccaagggcatgggtggagtggctaccatggtctaaatattgctacaacacaacttatcactcaacactgcagacgactccctttcaggtggtatatggcagagatcccccactgcttcactataagatggggaaaacaacctatcagctagtagaagagatgttacacgaacgtgatgtcttcctagcagaagtctaggatagattgctgcaagcccaagagcattctctgagattttatgatgcacgacatcgtggtctggggttctcggtggatgactggtctagctttgtctgctcaac

SEQ ID NO: 174395 - DNA, 284 bp, Zea Mays
aataattccaagactcagtgaatagcggtcaaggacggcgggtttaattcctgaaaacaagggggtcacatttgcaagttgcgcggccgaaggggtattgcgagattctggccgtccgattagagatgtacgcgccagattagatctaggtttaactaactccgcgtgcgctcgcggatcgctggattcagatccgagggccatcgcgcgaccacgctaccgccccatgccagccataggatcagatcgaacggaagaaaacttgccgagagacgcgggtatgc

SEQ ID NO: 174396 - DNA, 321 bp, Zea Mays
ggaaccctttggttcagggaccgtttgtgtataccaaagggggaggcacgagaaatcctgctcgatgaagctcacaactcagcctactctatccacccagggaccaccaagatgtacgtagacctcaaggctagatactggtggagtgggatgaaaaaggagatagctcagtatgtggcccggtgtgacacttgccagcgaactaaggcagagcatcagaagcctgcaggtctactgcaacccctcccagtgcccaaatggaagtgggaagaaataggcatggatttcgtaatcggactgcctcagacccaaaaagggaac

SEQ ID NO: 174397 - DNA, 403 bp, Zea Mays
acgacgtcaagcacgaggcagcgcagagagaggtcaagttcaagcgcggattagctccaaaccttcatgattgtggccatgatcccattgagagatatcttcccctgacattcctttgtcgtttgtgtgtggaggcttatgggttttgctgactggatcaaaagatatggagggatgaagtttggtttgtctcactgctgaactccaagaggaaatcccagatttgacgtgtctagggcacgaatctcaatgtcaccttcacacacattgtagaggggttagtttagaacaattttgtcaatggggacttaaggatttgggctagggatcaaggtgaacgtgctcaagttctaggtgaaggctgaaattcagcaatctgagtttcagattttccctagggagc

SEQ ID NO: 174398 - DNA, 441 bp, Zea Mays
ggattaaacatgttttagcatttatttttgcattaaaaatccttttccaaatggatttctatattttatccactgcctggaccgtgcgcacaaataaaccaaaggctaggggcttctgtgtgaaaaatcccgagacacaaggttaaactacggtggacgacgggttagtttagcgaaaaaagagggtattatgtgcaaaactgtcgcgaccgaaggggtaagggtgtttttcggtcgttggatccatgtcagatggcccagattagatcgctacacgctacgaagtggtatggaactgggtcatcagatcaacgttcaacggttacgatttaaaatttgcccgattcgatcctgcccttacgtcgatgatcctgcggtcaacatgagatcaagccgaggcggtgcaatctccctaatctacaccgttcttcctaaatcaga

SEQ ID NO: 174399 - DNA, 335 bp, Zea Mays
ccatacattttgggaagctagcttgggcgccactttttccagccggggttttggtacgccttctccatcttttgcacacctcccttacacgccccatccttgccttgttctgttcggttttacttggttccagcagcattagctacgtgtttgcacccttattcaactttacatttgatgattgattgtgctaatccttgctctaaagtgcagccttcctatagctccacaaatatctacagcgtgcaggttgtgtcctctggcaatcgctctatccaagctttgtggttgcaccgctggttgcaggtcacccctgtggacatagtaagaacgag

SEQ ID NO: 174400 - DNA, 498 bp, Zea Mays
tgctagctttacaagtcaatgacaatttagaaggagagacctctgttcgcttgtcgacgccacaaacatctcctccacgcttcagctatgctccccggccacacattgtggtaggaagatggtggaagcttcgaatcgatgatggcagtgaatccttctctctctacaattagcactggtggtcctcagttgtttgattggatggatgaggggaggaagagcttcggtatatatacaacgtcagtgatgcacgtcaagcaaatctcacgcggatacgcaagatctttggttgttgcaaccattgcagaatgggattttcgaatggagttattcgttcagccatgtccttattgtgtgatggatggatgacaaacctaggagatcatactgcgagggtacgactggggcccatgcgtcattgacttcagcgagtggtagaaaaaagaaaagagaaggacacataggtgggaaggctagggttacttggcccattcagtg

SEQ ID NO: 174401 - DNA, 904 bp, Zea Mays
ctttgttttcggttgatgcacatgtttgaaatatccaaatttgaatttgtggtttggtggtatttgaattcaatagagaaaataaaaagaaaagggattagaaattcagaataaaagaaaaacaaaaaacagcccaaaccccctctccctcggccttttgacccagtcggcccagctcgcgcctgccccctctaatcgtctgctcggtgggccaacctgtcggcgccaacctccccagccactcgcgctccctctctctatgctgcgggccccacccatcagcgccgtgttgtttccctccacacgcatgtgcctctatgtcgtgggcccgccctgtcagcttcgtcgtccctacaaccgccgctgaccccgcctgcgcacgcacgtcgagaagcccagccacatcatgacccatgtcccccggctctttttgagccccacgcgaacccgccctctctcccatgtctcatttcaccctctctcagcctctctcgcgctcagccgccgccgcccaagcttgtcgatgatccgcgcccgctgtgccgaccacctcgagctccaaacgtcgcgccaagcctccccaagcactgtcccgaggtaaggaaccatccccgcgcctttcttaccacggttttgttccctctgtggcaaattagtgctcgccagagtcgctacctgtcggtctgccgcatccgctcggcgtccgtcggatttagccccgccccccctcaccggagcttgtgccggcctcgacgcacccgttcacccctccccgtggccaggattgctcgacggagtacaaccaacctacccggagtgcccctccaccgttcacccgcttccagccccactctcacggccagaaccccgccatcgagttcatcaggtcccctcaccggtccta

SEQ ID NO: 174402 - DNA, 501 bp, Zea Mays
cgggagaaggagtgatagttttctcaggcagactctgctctgtagcctctttctctgctgcctttttctcaatttccgaaggttgtttatcaacaggctctgaaggcccggcttcggcactagtctggcccactgcagccttaacttcggccagttttgtttcaacctcggcaattttccctgaaggaatagaacttgaagcttttactgactctagtacatctagtacacttgccatccttttccttttgggagtcgtcgtaagacctttttgtgccttcggcaccgccacttctgccgaagggcttaaaacttctaatgtttttgtcccttcgatttttggctcctcaattttatcagtcttcggctcagctaacttggccgaaggtgccttcggcattgcagccggctcttcaatcttctgcgtaggaggagcaggtccttttgcttcaatagctgaagaagtttccccgctaaactcgggcactgtggtcggttcaa

SEQ ID NO: 174403 - DNA, 398 bp, Zea Mays
cttcgagggaggaagaggtcgaagatcatggcatgctcacctacggctcaaatcgacagtgatggcttgttctctggtttgaagagtaaggcaagtgttgttcggatgtgggggtgacaatgagatggtggttggactgtgaggttctgcggcaagggcatcagtatttataggcggaggaacgacagtttataatggagggagtcttgaccggcgtactgtgagtggtgacgttgccacagtgcagtcgcaacatcccgaggttggcagggtaacttggctcatggtggggcattcatttagttgtgattgtaacaagtgactggcgtgtgctcaagcgggtgcacgaggtcttgccggagtggctttctgcactgaggtatcacttcaaggtctgc

SEQ ID NO: 174404 - DNA, 770 bp, Zea Mays
ccaccctcgaggaaaaaagacatttggagggagtcaaagttccagctgatatcacccaatttctagagccattgcaccccgagaactacatcaaacccttccatgggaatcaccaagaaggaatctgagaaggaatgatcctgtataccaaactgaacggccgacagacgccccaaacatggcaatcgagctccattggccacctacacctgctgcttggttcctaacagttgtggaatctggagcaaggaagccgcatggctgctaatgaaattgtgtgtgcttccactatccaccaagcccactagtcgatgttgccccataatcagaatgacctgcattgtgcggctgaccttcaacccatttatggctagcgcagaaagggttggttccttctcaatcacatcatcctcttcatcctcgttgagcactttgagatcaaacaaacgctggcagcgatgtcccctcgagtatacctcatcgcagttgtaacaaagacccttctccctgcgttcagacatctcggctaaactgagccgacagtggtatggaggtgcagatgaggccgtcacagaggcttgcgaacccactggtacagctcgccctccctctgttttgacccccacagatgctgcaggaagtgtaacggcagatgatgctgcttgtcgattgcccgtcgaagcatccgagctcccttcccacggcgagctgcgagcctgtcaggatcgagtggcctgggttaccttggcaagtaagagatcttcccgcct

SEQ ID NO: 174405 - DNA, 638 bp, Zea Mays
aaaggtgtgccgccatggttcctcgccccaactgcgttcgatgtgctcggccctcgctggcaatcgctcgtcgtgggaagagaagggcggagccacagctagctaacctgggcatcggctcagaatcccctaggacgcgtagagtgctcgtcgccggggtgtcgtcattcccgcagaatcaccgtgcgccatcgcggctcggcgacgggggctagaagatgaatggtggtcgttgatctccctgtgttcggctcagattagtagtccgaaaccgatttggcctggtgcgatctgaaccgttaatctgatatgatgcggctttgatcgatggggtcgtgtgggccgttgatcggtcatccgatggccgttgcggcgtaacccttcgcgatctaatttgggccttcggatcgcgatcggatggctgacaatcaagcgtaccccgtcagccgagactcattttcagaagagccctcgtctttggaggtattcaacccgccgtccattagtgggttagcctgagtctgtgaaatatttcgagttagaccctatagtttctgatagttatgcgcctagtccataagctcagggaaaatcaggaaaataaatttagaatttgattttcaatacacaaataaatc

SEQ ID NO: 174406 - DNA, 809 bp, Zea Mays
ctcaaattttgtcaatcaagaacaaggcaacacaattgtttagtattaaggacctttgtcttccgaagcattatcgcatcatggacataatgatcatcagacaaaggttacgaaggacatgccttcatctctactatctattaagtcaatagtgtagaccacggcactaccatgacttcaccctcctcagacccccaccggtagatatgtggcccgtcgcggcctctattggtcattccggcctcgaggcccaagcatggcggccttgcatcggaggcccaagcccaacacaactagcttcagttcggtacacctggtagcacgacagctcgacaacgattagtaacaaaggcatgcacgtaaaagcggcagttgagtttaagcgcagaaacaaccccagccccaaccagtgtgtggttggcatcaagtctcccgggcagcgcaatggcttttttattgcctctcacttacaagtacaattgtagtatctgttcatgtacgcacacactcacaccaaaactcacatcaacacacccctatcgtacacaagcagaccatgactccaccctccccaggcccgcgcacgctcgccaacacccgcgtcacctcccgtgccctccgcacgacacgccccagccagcctcccgcttctgtgaacatatctaatcttctctcgtttgtgtattgattttattttatgatttatgaaacttcttttattggtttgaggtaacatggtgtcatttagaaaattaatgcacaaccaaatttatacccctgtaaggtgattttctatagttacactatac

SEQ ID NO: 174407 - DNA, 843 bp, Zea Mays
aaaacctaaggacgatgggttctattacccgaaaactgagggtctctttagcaaaactgccacgcgaaggggtacgaggtctcctcagctgtcggatctgcgatcaacgatggagattacatccgcagatgagcgtgcgggcgcagtgcgcaacgagggctgacaggtgggctcgggatgtcagtgacctgaggtagggctgacagattgggcccaacagtagagcgcgtgtgaggggagtggggtctaagcagctagatccgcatcggacagtcgagattagaccagttctgattaaatccagaccgccagatctgggatggacacccgagatccaacggccagcaaccggtcacggatgcggtggcgccgctcgacctcacggcgaggtctcaccggagacgagggggacaaccacagtggggctctaggggcttagggaaagactcaggcgcgttcagggcgacatggcgaactcgaccatgggcacaacgccggcgtgggggcaccggagggcgcataacatagtggggtggctcaacagcggtgcagatcaactccagcgaggaattacgtggacactagggcagtaacaggtgaaatgagggcatgggaaggttcctcacctcgagtgcagactcaagggcacttgagcgatggcgggaatgcggggaagcctcgggtcgacggcagcagactctggctgtacggggaggtctccggtgagcacggaccgggcgaaccagaggggttggggcggaccgaggggtgtcccgagttgctgacggcgaggcagaactcaccgaggcaacaggcacgacaatggctcgacggcgaccgtag

SEQ ID NO: 174408 - DNA, 675 bp, Zea Mays
ccgggtacaaaatcctgagagctcagggtttaaaaagtaaattccaggacttctctgtaatgattttaacattgccctagacaacgggttagttttcataaagtgcagggtttcttttgaaagatgggtcggccgaaggggtatcttgtcatctaggccgcacgatccagatccgccggcccagattaatcaccatttaaatgaaacggtatgtaatatgagtcctcggatcagagatcaatgcattcgatgcactcatcacctgaacagatctccaccacccgatcaagacttagcgaccaggatttaatttcacgaaaaggggtatgcgcgctctaatcatagctgtccattaggagatctacgacccctgcccttattccctaccccgacgatgcccaggcggcgccgccaggaccagggcggagtgtcaccgatagcacgagcaaaccggcgccctaccgcacgctgcccccaaactctgtcataaatggtgctacgtgatgcctagaacctggcgaatattctagtataacactcactagtggtgtcggggtggagaagcaagcccacggtgaggggcggattcatggtcacaacgaagtctagcgtgcaattgctgatgacacgaccacccccacgcccctaggtcttcaccgctcacatatcgcggtc

SEQ ID NO: 174409 - DNA, 439 bp, Zea Mays
ctcgggtagtggggaccgtggtcgcaacatagtggatgatcctctttacagcctgctcatgctcagtcgtcggtcgctgtaggaaccgactaacatagtcgatggagtatgctatgtttgactatgtgtggacgaggtagcaaaggctccctacaagaccgatactgcatagcctccacctccgtcgtgctgtcgcgacttagctttagcctctcttccatcggagtgagagctaggttgcagtcggtgagcctagccagctcaacgacgcgtttggcgtaggtggtctggcgaagcgtgatcccggagttgccctggtgcacctcaatcctcaggtagaaggagagatgcccctggtcactcatttggaagatggcattcatctattccttgaacgttgccacctccgcatccttggtgccggtgatcactaggttgt

SEQ ID NO: 174410 - DNA, 547 bp, Zea Mays
tggcttcctcctcccaagttaagcgaggtgggataattctgaggctcacacggtcactgtccgactacaattgggccaactgggccaattgcgtctttgccaatgggtaatagtggaggatgtcctcatcattgccaccttcttaaaatgggccctagctctgataccagatgaatacacccagcccaggtggggttggccgaggcccaacaaattagggttgcccggagcccaatagttcattatgcacacccaactcagggaaaggcccaatcgccccaaaagactagtccaatgggggaagggtggctctcccttttaaagtggcttcctcctcccaagttaagtgaggtgggataattctgaggctcacacggtcaccgtcggactacaattgggccaaatgggccaattgcgtctttgccaacgggtaatagtggaggatgtcctcatcacattgggtcctccaacaatagtaactaggctcttgggcacccagattgtcttcttctttggaccaatagtaggttgttccaatggacttagg

SEQ ID NO: 174411 - DNA, 511 bp, Zea Mays
atcttgccctaataagcatatttaccccacactagtgtaacaaccatgatctaatccaaagtaattagacattatctagtctaacctagttgtaccgatctaatctagatcccatctaatctactacgatccaatctaaagagagtgacctaacaagttagttaatcctggtgaaatacattagaccctactcctataaacaagtttgagatcctagatcaactcggtcatacacaacaacatgacctatataatatgttacataacctatccaaaccatttagaagcaaaacatccaaaccagattctgactaatctcatttaactcatagccacctactaaactagctgctccacctactactttatcttaactacatgtccctaattcggataacaacctcaagaacgaagatcgaaggtgatcgacctcatcaaatcaagaaggataagattcaagccggatcttcaaaggaaccaagattcacaattttggatggagtctttcctt

SEQ ID NO: 174412 - DNA, 619 bp, Zea Mays
ttcaaaccaaggacaacaataaagtcctaggtcttggccgactttatagtagactggacagggcctccggaatcacaccagcatcacatagaaactatttggactatccactatgatggtgcatggtaccatgcgggagcaggcgctgtagcaattattacatcacccacaggcctcaaatacagatatgttgcgtgtctccgtttcgcacttgaatcaggcaaatacacgaacaatatagcagaatacaaagttgccatccttggactccactaactaccagccctaggggtgacaacgtgtatagtcaaaactgattccaatatagtcgtcggccaaatcaaaaaggactgatccgccaaagaaccagtcctcatgcaatatctttcggtcatgtgaagcctggaaaaacagttaaaaggattcacattgtagcacatagagcggaacaaaaatgaagaggctaacatgttggtgaaagtagtaacgaaaggcgacccactgccatctaacgtgtttttccacacaatcagcacactagctgtaagaaaccttgaagccctacaaataacacaagaccccaacggtcatagaatcgtacatctgataatgaacgaag

SEQ ID NO: 174413 - DNA, 326 bp, Zea Mays
ggcggctaaggcatcaccgatgaccaatcgggcggcatcagcacattaatcagcgctcgattcatcgctaattgaagcagagaaggtctcaagaggaaggagggagttcttacaagcaattagtcggctccgaagccagcacatgcggaagtgcggattcaccacgaacttcaaccccgatgacgaaatccgtgctccactcgccgtcaccagtccggccaagtcaaggtcgtgcctttgcgagggtatgcggatgcccaggtgcttcttcccggtccggtcgcggccacaccacacgcagagctcgcggcgacgcagagcgtggt

SEQ ID NO: 174414 - DNA, 809 bp, Zea Mays
gtctgtatcccccaattgctagaccataggattccaagagctttgtcgataaagcgacataaaagagggcgatgacaaatcttgaacttgctctggatttcttgagatgccggttcaggtccagggctgtcttcaacgtaagagtattcggatcaatgagcagactgaacatgagcccgtagaagccgtacctaaagacgtcgactacaacctccgtgtacttgtttctgaagctgtcatagaaatcgtagtgctgtacgacggtggtgcccgttgaggccatgacaaggaaagcagcccagacgggatacaacgagttcttgattggggaggactgcatcgtaccaagggtgtagaagacgagagcatccataagtttggaagacgcccgcaggccagtaccgaggaaggagctacgccaccgccgcctgtagaagccgaagaagagctggagaagcagcagcacagcggccgctagcaccagaacttccacagtggtgatcgtcgcccttgggtggttcagccaaggggacagagcctgcattgctcttgtcatgttcactactccatcttggttggagcctggctgatccatggccatggagtggaggagatgaatgaatgaattgctgttgctcttcaggaatcaattggagtctaacactactatgtgctatcttctacagtgcaccgccggggtttcccacagacacctttccgtcgtccatagtgaatgatagactggatctagccagggggtacgcaagggacatcttgcacaactgaagggaaaaagaaatgctttctta

SEQ ID NO: 174415 - DNA, 952 bp, Zea Mays
gatggcgggacccgcacgtcagctctatctctcccccttttcttcgccgcgtagctcggacgagctcggtcttggcacactccgtgggtttcgttgggacgccaacaaccgacctcgggcggctatatgaagggcagagccgggttcctaaacccctttttattcccttgtcaatgcgcctgaccactatcgtccacatctccgggagaaaccgagcgccgtggtcggacatcttcgcgtcactaaccccggtgagtccttcctccgttgttacgctatgttttcctcttcgcgtaggttctcggtggggagagtttagtgcgtcatagctgcgggtctgggttcgccggcgatggagcatagtggcgggccgcgacatgccatgaacggggtcctctgctacgaaatcgtcaataataacttgcccactaggttccccctcgtctttacttcgcgtagcatcaatggtagggtgtcgggtgttcggattcatcgggatggcgtgttgccggtgagggcgccaccgcgacctgggcagcgccgccgtgcgtgcgctcgggaggggaaagaccgcttcgtggccgttagatgtgtggctcacggtttggattagaacaccagagtgcccccttcgatgggttgttttgggccgtcgatctcgtaataaacgatcacgaatagattcggttggggccgttgatcttgatctgtgcggctacagatgctttccagttcacaggggtttagatttaatcctaggcgtaggaagtgatccaacggctgagattggacgataccccttcggccctggctgtctttcagaagaaaccctagatttgtagaatatcaacccgtagtccacataacagtactctgtgtcttagagattttaccccgtggcccctgcgttttccattaattgaggcccaatccagtgacgtgttaaaatgaa

SEQ ID NO: 174416 - DNA, 318 bp, Zea Mays
tgggaagcggctcaagccgagaaacagatgttggataatcttgctgatcgcctcaagggaagtgagtgagaaaaatgatactataattatgttagtacaatttatttatcttgactttgctaacttattttgctcattatatttgcagagattagatgtggcgtaaactatttggccgatgaggcgcatgcaagatatgttcaggataaaatggcgacagttgagctgatggaggaggaggaggatgacacatctagattgagttagcttatcgctctcgcagaggcaggattacttgaagaagaagaggacgacaca

SEQ ID NO: 174417 - DNA, 290 bp, Zea Mays
gaggtggccgaggcctaggagctcgtgccgcggggaaggtcgacgtcggcgacggagatgacggcggcagaggatgtcatccggaaggcgcagcagctgaagcacctcctaggccggttcatccagtgccggccgacggggaaggcgaggacgaacccggtggtgacagcggcgctgtacaggctggtgaaggagagcgcggcgatgtactgcgagctcacggaggtgatgatcgtgctcttggaccgcttcgccgacctgggcactcctgcctgcgtgcgcgcccactc

SEQ ID NO: 174418 - DNA, 567 bp, Zea Mays
tccaaactagctcttattatacgtattttgctatctataccattatgtaatccatcagtttaaacgactttgcaaaactcacccatcaaatcactcccacactcataacctatactaaatccaccaaacaaatgacatctaaactttttttgatgttatgacacatagacttaacacattatcagaaccaacagttcgaatagttggataaccgcctctcttactcactcaaatccaataaacattattactatacttagattatctctcatctctctcctcgccgccccaagcctcccccactcacttcgcgtccttgcttccccctccacctcactcgcgccgccataatcgacctctctctagaatcataatattagcaatggtctatatgttaatatatcaattaataagctagtgaatttgcatggttgtcgtcccctacatcatcggcccgtacgcagggagaagcctatatgcatagtcgtgagccgtgagtcgtcgtgagacatgcatgcatgcctcgtacacggtggccaaaaacaaagtcaacttcttgtgtgtcat

SEQ ID NO: 174419 - DNA, 556 bp, Zea Mays
acgatcagctgtccagcagcgaccgtgagccacaagccgcatgaagaacttgcattttccaggtgcccaacatttccagatcctcttccaagggataagtactctcgcccgagttaatctgatcgcggactgtccgagttatctcgcggaccgtttggggcacatggccgcaccgtccgaccgtgcttaggtgccaaatatggtgctcaacggatctagtagggttgggtggtgttcagagaatgtaagtacatttttatgattatcatgaccattagatcagcttgcatatgtctgcatgataacttgtccagaaagtattgtggtttatttgttggtgatggctaccgtgtcaacgcaacattggtccatacctttgatttgaaatatttgggtgctgttaacaaagtgtatacctccaagccaaggtagtaaatgttggacctgaagtgttaaaacatggctcagctggttgggtggtaggtgtggtcgtgcacccaatcaccgaaggtacaaggcctcggcttgaatttgggtgcctatttctctattttca

SEQ ID NO: 174420 - DNA, 468 bp, Zea Mays
taaacaaacccaataacatcgaacaccttgtttagcctctttttcccgcgagcgccgaaggcaactgtcatggcctcgtcttctgtcctcgagtaggctctgagtagctcatcacttgtggcctctataacgtctagccagtcatcatttggctcatcaaattggcttctgtataggaaggtgtacctaatataaaccaagccaccttggttggagccagaggcagcttccatcggcatttcccactcatttgctagaggccacactttgaaagtgatgtgttcttgaactagatctctcatgccaatgtaggtgcatatggtgttgaaagccatttggcacacttgcacttcattcctagttgcgattgatggccttctgatgccgaagcgcgaccatataggacgttgaatgacacccctcacatcctccctctgatccaggtcattcttcatgcaaaaccattgc

SEQ ID NO: 174421 - DNA, 403 bp, Zea Mays
tcggcgaggtgctgcttcaaggcgtcggagtcgcggcgagcctgctcagcagggtcgtcgacggagggggcgggggtcccgaccatactgcggcgcggagtcagcgcgtaagggcagcggaagggtgagaggggttggggagatcccggtctcgtgataccatgaaagagtagtatggctgggaatagttgattgataaattggaggagcccaaggctcatacatataggcaaggatatccctaataaaggaaagatctaatctatcaataggaaaggtctaatctaggggatccttgccaaacacagccaactaaccaaatacagagggggggaggcagccgccgcaccctgttagggcaggtgagccgcctgggccctatttccctatacatcacgctaac

SEQ ID NO: 174422 - DNA, 654 bp, Zea Mays
ccgaggatggcaggttcataacaccgaaccctaaggactcatatgcaaaaatgcacccgcgaaggggtatgagcgagttctggctattcgatcagaaaccgacggccaggattagatcgcggttctcatagatgggtacgttaagctcaccgtgggatccagattggatggttccgattttatgaagcctgatctaattctgcccctccaattagatctcaacggcccgagtcccacccaagtgaataggtacacacttcaatcccgcgggttgatgttagatcatacggtgcacggcgtcgagacgaagggggaagtccgcttttaatcctagacgcccatccccagatggatggtagccatactatcttccccctctcgccagcacccgagctccacggtggtgcttgtgattaccgcggtggagcactgccggcgagatgcccgaaccccccaatcggacgtgattacactatgtgcacaccaatgtgaattacatggagaagcccttactgtctctggtggtgtaggtagcactgcccttgacagcccgaggatccaccgcggcggtgcaccaacagcgagaaatcgacggtcacccctgccacaagcatgcgttatttcaccggggacgcacatgcccagaccacacga

SEQ ID NO: 174423 - DNA, 827 bp, Zea Mays
ctaatggatagacaataatattgcaaaaatttaggaactggaatggaccaatttggagctcatatggattttctacaaattaaacaagttttaacatttatttatgcattaaaaatctatttctatgattatttactattttcccaagtctctggatcgggcctcaaataccgagaagtgctggggttaacgtgaacgaattcccaagacccattgcactgccctttggacggcgggttcataacacaaaaccctagggactctttagtaagattaccgagccgaaggggtactcttagatctaagccgtcggatcaaaatgagcggacacgattacatcgcgcgcaggattgtactcgcttggatccgtgccacccattggctggccaatagcccagatttaaaacacctagaccagcctacacttgttggatcttgatcaaatggcgtaggctgatccaacccaaccggtatcctccattctaatcgcgactgttgcgtaaaagatcaacggttcgccatccttcttcaacctcaagcctcccaggcacatacgccgtggcctccccagtacactctctctctcccgttgatccatcggcgctggccaagacccgatagaggtaccctatggccgaacactggccccccgaccatgaccgccacacccgcacacaaactcccggtgcgcaccaaaataacgcagaggctcagacgaggccggacgaagacgacgcgaagctttcgccacatgatgcgagcttcaccaggactgcgccgtagactagccaatatgtccgtctcggccgaacgcagatgggttctgc

SEQ ID NO: 174424 - DNA, 903 bp, Zea Mays
taatttagattttgtgcaacataattaatcgaatgtataatatagtggttgctaatatttgatccataactttgttgtgtagtatgtcaaccaaattttaaaagaaacataatataacataaaatactcgataaatgaccaatcgataatatgagacgtcaaagctaattcgcttgcaaacgttgatatctaaacttcacccctttatgatccatcttatcatctggctgggcagctatcgattgccgccgaccatttgacttgcctcttcaatagccccacaaccaaagtcaagagaaggtgatcacgcgaaacaacagaataagcgccaagagtccaacaacatcaatcaccagaaccacatgtcgcaaccgggacatccgcatagactacaaaactagatccaaatatagttaactttattattttggtattgttaccgcgacaactttagttcaatatatcaattaactagaaaatgagttcatggactaagataatttataaagaactagaattcgtattccatatcgagtgcttaagattaataacatcatataatattttttcattatatagtattgatgaattagtcggtccccttatattgtaatcctagctccgcccttgctcacaatcacaagagtgttttcttgaggctgccttacctagcccccatcccataagccatcgacacgtatccctacatctcctacgtcgtcctcctggcctatatatgctacactgcacggcgtgtgctctctctcccctttgccctacgattgactcgcagcagcggcacgcgtgacgcgtgcgagcgagaggacggcgtccagaaaacagccgctgccacgtgggccatcccagaccatgcaggtacgtacggtccagtggccagggacc

SEQ ID NO: 174425 - DNA, 1441 bp, Zea Mays
gccactatttttggtctagtgtgagcggaccagaattaaagcagctcgctagctgacaaaagttgaaggactgaagaaggctatacccacagtgctttaaatgaggtggcagcagcacaatggaaccagacaaaactgaaattgggttcgcatttatttcgctggagaattctcagaagaggagaagcactcagcactcagcagtactggccgtacctcggaggagagcccgtgaccattggcggtaccgcggacgatccattggtggttgccactgaacgcagcacggcctacggtcctgccaaaacaaaaaacacaggcgcatcgcgttctaaacaagagagacgatggccaaaccaagaaatcgctgcggctgcttttgcttacccttgtccgacgacatggacctgcgacgccataacgctgtgaacaagcgagcagatggtgttagcagcaggaacagagcacccggcgtcgctgggcagagattcggaaggctcagatccgacaggacatgacgtgtggccacagtagccgtcctcctgcaccaaatgcctgtgcatttccagggggggaaatgagacagaggaaccataaccatgaggcgatgaggagtatgaaatttggaggaaattgttcggcttttttagctcagatattcccatcttcgaaacttcgagcgaattttcagaacagattagcaacgaaaacttgacggttggaaaaagaatggttgaatgagcacaaagaccaaaaaataacttttgttacgagaacgagcaggataccagcgaagaaaaatgagcacaatggcagaagtcttagattttttgtaagattcagcgggaggacgagctcgaacacaaaaaaaccaaagaaaatctgaggaaacagtggaggcggcagcttacacggggtctgcagcaccgatggccttccagaagacggcgtaggaccacccgatctcctcgcacagccgtcgcagcgcgtccccgaccgccatctccgtgccccccgccccctcccctcttcctccagccgctccgctagaaccccggcgccctcagcgccaaaaccctagccccgagcccccgactcggattgcgagagagagagagagagagacggcgtccagtcgctcggtctacgcgccgcggcagctggcgcgcccggcctgcttcgcgcggagaccgccgcccctccacgcagctgccgcctccggagcacctacgcgtcccctcgccgccggggcacgggcagcagccatcacagggcggggccagtggccagctcctttgccgagggggtgtcgtcgccctcctcgtgaatacaagacgagcgcctctcacaagcggcggcggcggcggcgcctgcgatggcagccacggctgcggcgcgcggacctcccggattcagccttgtcgctggctgctgcctccac

SEQ ID NO: 174426 - DNA, 1106 bp, Zea Mays
cagtcttgcccttcacctgcctgaaggggcgacgagggtcctcgtcatcgccaccccctgacgccgacgcattcttcgtgcgcggcatcctgaactaaagtttgcaaatgagatagagagactaagcacagagcaaaagtgaccgatagatttagcaaagagtgagatgtctacctggaaagctcacacgagaggtgacgatccaggcaggacgggagacggcacacgatcacacacggtcactgaaatgacagaagaggtgagcacgtattagtcacatagtcataagcatatgaaatgtgaataaatacatacacagagagatatggcacgagacgggacgatcaagaagtcaaacgacgtgagaacgacgtttgacagacaaatagtgacataggaggtttggaatttgaaatgaggcacgaaatgatatggaattgagccgatacttcacgaataggtttatataggtgaatatgagtgaagtgtgtgcttggtttgaatttaggcgaagaaaaaggaattagggcactcggctcggaaacgatcgctcaaaacgggaattttggtgaaatttaagcctgggatcttggattggcgtgaaatttggcaggtaggttactggaagtgtggtgaaggtgcctgaaaaatttgggttcaattggagcaagtttgggtggtttgggcatttcaccgaacacgtgaagggcgaagaattagggttttagggaaaaggccatttgaggtgggaatgccctcccgaaggagctaaaagtttgcagggatacataatagggataatgcaatgcattccatcagcaggattcacaaaatttcacaaggatttgaagaaattgcacaaagggaagaggtgggaggctctgctcaccagaacagagaagaactgagggagtgagagagcaagagctgctcaccgaggaggggagaggagggagacgaggtcgccggagatggtggccggagatgatggccgccggtgaggggtggaatcgccaagaacagaggagaactggcggctggctgggaaaaagaaacctctggctcggctttgcgggctggaggcatttttaaaaacgcgatatggg

SEQ ID NO: 174427 - DNA, 630 bp, Zea Mays
cattactcacccaccagcaaggtttggcaccttgcgtccctgccccgagccatcccatcaccctgtctgcccgagccatcctgtcgccaccattgtgcgccatcattgccgccgcgacaagcatcgccggtgctcgccacctctcctccctccccctccctggccgcctataaaaggaccaccctgagccccttacttcaccgcaccaggccttagccactccatcttcctccctcagacccaatcgagctcgatcgtcgtcgtccctcccctctccggtgagctctgctctcccctctctggtgacttatggtaaaattgctttagctcttaagctcccctgatgaggacatcctccactattacccgttggcaaagacgcaattggcccagttggcccaattgtagtcagacggtgaccgtgtgagcctcagaattatcccacctcgcttaacttgggaggaggaagccactttaaaagggagagccacccttcccccattggactagtcttttggggtgattgggccttttcctgagttgggtgtgcttaatgaactgttgggcttcggtcaaccctaatttgttgggcctcgaccaaccccacctgggctaggtgtatcatctggt

SEQ ID NO: 174428 - DNA, 330 bp, Zea Mays
aatcattccatcgtctcaggattgtacatgccctaactagattcaatggggatacgcaataaatgtgtcacagctaggggaggcagtcgaatggatgctagggcatgtttggattgcaattttcaagaatctagcttctagagactttgggatttgaacaagtcagttttgccatcttttcgcatctttttgtgtcaaccttttccaaattcaaaactgtctgtatctagcatttcctagtttttcgtgattcaaaagagcaacaaatcaaactatgcctagctttctatcacatgaggttagcaccaagatatccatgcttaattcatc

SEQ ID NO: 174429 - DNA, 543 bp, Zea Mays
atgacttagaagcagcacaagatctgtggaagaagcctaaaatattaaaccgccgtcctaacctaccagaagcggcacagtggagggcagtgactctgtaggtataccagcaggcacaagtctatgtatactagcaggcggagggcagcaaggctcccgtaggtggcggcgaccatcagcagagtgtgaagcgtcggcaagaaactcaaaccctagcacatagacacgggagaggagaagggaagcaagaactcacaggagaaaagagccctgatgaagagggcggccagcggcggaagaagccttgcgccgccgtcgtctcgaatcgcgccactgctcgcttccgcaccgtgggcagcgcagtgtggccgggatgagttccacagctgttggtttgttccaggccggggttgaggtttttcgtgtggattgggcctggtttgtaaacacgtgtgggctaagcgaacaactatttctccgtgggctagtatttgatccaggttgggatgacacccatagatcaggccatcataccagccaatt

SEQ ID NO: 174430 - DNA, 817 bp, Zea Mays
ggaacactagatcggtggaggagcgagtaggaggcacgcgcgcgaacgtcgatttcacgcgggaatggtacaaagcatggaggattgggagtacaagcggggccaagatttccgctcgaaaagggtcctttttcgtgtgcgaaggtataaaaagagctgatacagacctgttggatagtaatttttccacttttccctaaattaaagattgagacaggtattaataggtttgttggagatgctctaacaagaagagcatattggagtgtagagtggagtgtctcgaccagagttgcattttgtgtccaaatcacacgtgagttctctttttgaccgtgtttttatggtttgtagatatttctgttgtgattttgattagtttttcttatcaatttggtattataattttagtgtgatggtattagatgtaaatgttggtactgggaggaagagtgttagctacctaggaaggaaggaagaattctgggaaggatacggaagggagggagttcaggagaaggagaagaaggtagacgaggaaggcatttccatagagtttcagatagtgttccttacaagcataatcctgaagacagacatcatctactacatatacttcacacacaccagggacccatcaggcagactaacagatagataaacccaccacacagagacctgcatcaagcccacttcggaccactcgtacggacattaggacgacgcttgcgagctcctcggtgagtggtttcctttgtgtgcaccggcaacggaggtgtaacattccccggctcttgaagacctgcttgaccccaag

SEQ ID NO: 174431 - DNA, 289 bp, Zea Mays
ctctggcgcaagaaaccagagactcagtgaatagcgcccccaggacggcgggttgattcctagattttctagggtctcttctgcaaaccggtagagtgaaggggtacgggcgaaactgagccgcccgatcagaaacggagggctcagattagatctgggttccgcgtgaaccggtacgcaatgcaggccctcggatccaagatccatggccagggaacacacaccctctcactcatccgatcccgatcggatggccctcgcgaatttggccgaatcgttatctcgcttc

SEQ ID NO: 174432 - DNA, 806 bp, Zea Mays
attttatggatgtcacggtagcgagtgttgttcaacctgtgtggctccaagaggttttgaattcttatacttctgattccgaggctcagacaacgctgacgcaattgtgtgcgcatagccctgatgagcatgggtactcactctctcaaggcgtgattaggaagggcgatagaatctggttgggaaacaattatgctttgtgaactaagattaccgcaacacttcatgatagtgccctcggtggtcactccggggtccacgcaacatatcatcatatgaagaaacttttctggtggatgggtctcaaattggttgtggagaattctgcgacgcaatgccaagtctgtcggtaagccatgggggggaaggatccatccagcggggttactgcacttgttacccgtccctcaaggggtttggcaagatataacaatgtacttcattgaacagctacccaaatcagagggatatgataccattctagtggtggtagaccgattttcaaagtatgctcattttcttgctctgaaacactcgtttacagcaacccaggttgctaacccgttgatggatcaagtggtgaagttacatggatttcccaagtctataatgagtgactatgacaaaattttcactagtgccttttggacgtagttgttcaagttgatggggaactaaactcaatctgagcacgacgtatgtaaatcaatctatcattcacaggagaatgtagggtaacctctctaaactgcccttatgttggtaccatttgtacctaggttcaaaacgcatcaagcctacacccc

SEQ ID NO: 174433 - DNA, 438 bp, Zea Mays
cgaccacaggggccgagtcgttcaggaaggaggagaaactcgtcaagatcgaggaaagttaagtgccgcccgtggcctttctttacctgaacctactgtgaactctttgtcagtgctcggtaatgcactcgatcgatgctttcttcttgttttttgccccgtcgtcgtcttgacgcagtggcatcgagggctggtattgagggctgtgctttgaacccttcgtgcaggctgtcgtccggagcccgtgtcgtgatccactacaccgtcccttgcaacgacagcgacgaaggctctgaacgctcggaggagtgacactgctgttcagctagacgacccattttttcttcccgttttttttttcactttctcccttagaaacattaggcccccttatcattgtataagtgcctgttataatgtatcattcatgtgtttcac

SEQ ID NO: 174434 - DNA, 1463 bp, Zea Mays
gtcgtcgatccgagggagtggatacttgtttttgattgtaacctcattcaaggatcggtaatcaatacacatcctcatacttccatcctttttggtgacgaagaggactggtgctccccaaggagatgagctgggacgaatgtatcctttttgttgaagctatgtgatctggagttttagttctgctaattcggtaggagccatgcgatatggtctctttgcgatgggcgcagtgccagggattagatctatgtagaactccacttctctttctggcggcattcctggcaattcttctgggaatacatccatgaattcttctaccacagatatgctttctgctgctagattaaacaccattgggtctttggcgggtggttgagcctgacatgaaactgactttccttggtagtcagtgagaagaacggtcttatttgcgcaacttatgatgcccttgtgtttggttaaccaatccattcctaagatcacatcaatcccttgggatggcaagacgattaagtctgccaagaacactaccccacttaaaagaattctgacttgggagcatttgagctggcatagaaggtctgaccctggggttcgggtgaccaagggaatttctaggtgtgtagagggaatgccatgcttttccacaaaactagtggttataaacgaatgagatgctcctgaatcaaaaagtacagtagcgggagtaaattcaactaggaactcaccgagcactactcccggagcttgctgagcctcttgagcatcgacgtggtttactcgtgccctgccatgatactgggtcttgctctgttggctgtaggaggagggtgccttggaggcgggtgctggggcattcttggggccattcaccgagttggagtaagtaggtcctgatgccttcaactgggggcagttattcttgaagtgactggggtctccgcagtgccaacaggcattagctggtggttggttgcttgcaacggagggagcctgaaaggagctttgaccctgctgactgaaacgtgacggtgtggtccagttggcttattgaagcttggtcccttgggtggaaacccaaagggtcgaattctctggtgccggtcttgctgctgagctcagaggacttggaatttcctcttgaggtgacctttttcttcttcccttgccctttccacttgtatggctttgtttgagaggtgcgaaaagctgaggaaatcttggctggcaaggatagtcttgagttctgatcttagccctttcaagaagcgggccatcttcttggcttctgtgctgacgtcgtcaggcttcactgacagatcttccgccttgaattagttcccaaaattcatcttccttgagctaaatgatcccttggggcacacgatgttcttgaaaagcagcttcaaattctgccaaggtagcatctctgacggtagcactaaaggtatcccacc

SEQ ID NO: 174435 - DNA, 434 bp, Zea Mays
gctgtcgtcgtccgcagccggacgcaggtcctgtgaagagccagcgtgcggcgcaaacagcaggccggctgtcaggtactgcagggagccctcatcctgcaacgcgacctggcactgcaggtgcactccgatgaccgacgctagcagagagacgtctggcggcgtgcttgtgttgctgctactaccacagtgaagctcgtgctgcctgcagcacgacgggtctgggcgatgccactgagagacacaggaatggaggttctcccagtgccttttctggcgcgaatcaagaaacggcgcccacgagcacgacaagtcctgcgcaggcagccgcgtgagcatgttcctgaccgtctcgactctagacccgaaaagcggcgtgtacaggtccaggcattcgacggcgaccccgagaacgtccgtgctctccgagagct

SEQ ID NO: 174436 - DNA, 635 bp, Zea Mays
cgaggagtcccgagcacataaaactactacggagggggtggtactaaaaattgatgctcaacgcttgacatcatgctgacagtgccttgagaggaggaagaagtcactcgctcccatttgagcttcccattgggatttctcctacacaccacatccttgtgatcctgactacagatagagcacctgccactccactgacactcggcacggcgatgcgcttcaccacaacggaaacacaccagccccagcccgggcttaggaacagcacgatacctctaagtactccctcatgaagtacccgattcggagggtttgccatggtaggggtggtggcgctggtgttgtgactttcccctcttatgggctggacccccagtgttgcccctcctcgcgtcctggccacgaggctgatcaacacccgaagacttctgagactccatggtgtactgatgttgcatctccacacccaatgcctgctccaccgtagtacggaaatccaccaacggaaaggcgcctagagcatgcctgatagaaggtttcaggccctaatggaactagcacgccttctccaattcattgtaagccacatgaggaacaaagcggaccattttgttaaagcccacttcatactctgt

SEQ ID NO: 174437 - DNA, 821 bp, Zea Mays
acccagagatcatcagagacgttgaccgactgactgttgaagcagacagaggcagaaggtcggttagggctggggggaatctctaggtagggggttcattcaacagccggccaggcgggacgtgccatgccatgccacccctcctctcatgattcgtacagccacgacaaggagatcgagaggcttgtgactagaatgtgatgtgatccacgcacagcacaggtcatgtgcaaactgcagagcatgcagtgtgtagtgctgcagcccgatggatcggacatgacgagacgttgcccctgtagactattaagctagctggaccggtcagcacacagcgccgtgcccgtcgatagccatgtggctgtggccgctggacgtctgttaatgccgattaataaataataaagtagtgtggggggttaccttacctagtggcaaacaaggtccccgtccccggccatgcatgccgccgagcggcgcggtgaggatagattcccgcggacggagacggagacagagacgcgcggctgccgtgccgaggcgagacgaggtgccacatgctgtgcctcctgccgtagcagcgagcgtcggtaggagcaggagtaaaaaaaaaaaaaatgcatggcccaacagccagttaatgctacagtgtgttgacgttgcaatagtttatggaggaacactcaacagctcatcgctgtattgagaacggaccgctcggcattcaacaccccggccccgtatttcagaaatcagaacgaccgttcggcattcgacgatatcgctggtgtttcagtactgaatctacgtacgggttctac

SEQ ID NO: 174438 - DNA, 604 bp, Zea Mays
ggattccgaagaaaacaacaattttatcttgaatcagtcaccaccacacgtataagtggatggtgagggcctgctcattattgctcttccttttgcatcctcgaattcatagcttggtgcctggacggtacgaagcgttggtataggtagtaggtggaagcttttgccttctatgttacccctctcccctaaattggaggtgaatcatgaatttatgcagtctgcctatttcagaatttaattatattttgaagttaattgcatgagggtttaaaatctagcctttaattttaaattttaaaattagaccatttgaacatcctcgccagaagattgaactgcactattatgccccctttttcatttaaaatatcgaaatccatgcattctgtgtttactggaaaactcgtcgaatcaaatttatagaaatatatcttgtatgcatataacttttccgttatgtgaacaccttcagtgtgtctgtgtgtgtcacttccttctctttatcatgtttgttcttttctaggtcttacgtatggtttggagcaacaagatgtctttttgttggatagattaaaactgataatcaggtgcatcccttcta

SEQ ID NO: 174439 - DNA, 329 bp, Zea Mays
aaagcagatcgagtgcaaagtgcactgcaaatcttaaaaatcaagtgcatcaggtatagtccaacacacagagctgtttggaccgcatcaaaacaaacagagaacacccataggaaacagatccacgcatagttacctccaaactcgatcccaaaatacagataattacatctcgtacaagcattcacatagggggaatcgagttaggaggtatggatcagatgcacattgttagctagaatggtcctgtagttatctcacagcaggcgggaggggctgcagggccgctcctctagccgagcgcgactgcaaggccgctctagccgagc

SEQ ID NO: 174440 - DNA, 419 bp, Zea Mays
cccgctctctcgcgcccgctcttcctctgacggatgggccccagccgtcagccccttcttccccgtccgtgctcagcattgacgcgaactccgccggcagccgtcctttccccccgctctgcattactcctgcgctagtgaatttaggcactgcttcgcccccctgtccactatgctcgcaccctcacacggcatcccgccccgagctgtctcgtcctcagcgctgtgtgccattatcaccgccgtggtgcacctcgccaatgcccgccagccttcgctcctcccctgcccgggtgcctataaaagggccgccctgagctccagttctcctcgcaccggtgtcggccactctccctcccctccccttgactcaatcgagctcagcgccggcgcctttcttcactccggtgaactcttcc

SEQ ID NO: 174441 - DNA, 586 bp, Zea Mays
tccagggtgagcaggtatgcagtgaggtacacgactgtggggtcgtcctcaagcagctgctgcccttccaatgcacgcatcctggccatccaaactggacggtctctctgaaagggcggaaagaatctgagtggtgtgtcggccacttcttcttcatagatctgacacagggtcctcaatgccttgcgggcgacgacttggcaggtgtctttgaatctgtgcccagcagcagtgacactccattccacatggtgcagactggatccaatgtatacagtcacgacacacttctctgtgccatgctcgacgaattcacgaccatcatactctggctgactcctgattccaaggcggactgtgcatgctctcagcaacttggggaaaccatcttcattctagcaaaagctggtttggcaacgaacctccatctgacttctaagagaaggaaaggggaaaacatttttgaaatgaagggataagagcaagaatttttttgaaaatagtttggacccaaaaacttttggatcaggctaagggttacgttctgcggccaacctaacagctctgataccacctgaagcgtccc

SEQ ID NO: 174442 - DNA, 397 bp, Zea Mays
aatgactcaagggtaggattgagcgccttcgaacgcagcacactgaggtgattagggataagttcgcggccgaaaataagagccggaacgtcctcgagaaagtgacaacgctggagaaggaaaaggaggacctcagacgccgacttaatgatgagaaagaggatgcgaagaacgcccgtgcgggggctcaggctgcctgcaagcgtgttgctgacttggagctagagctgaagaatatgcacggccaccgtgagaggatagaatcttccacttgtgctagggttgaccggacgcacacgcttttcgtggatgcataccgtgaccttggcacacaaaccgcccccttcgacaaattggggaggaggtggggaaccgcgtcctgaggtggttgcaaaat

SEQ ID NO: 174443 - DNA, 661 bp, Zea Mays
aagaaatagcaaggagttagacaagacatatttgttggtggccaagagtgaaatgagataaccatgaactattaaagtgaggatgaatgatacaaccaagtatataaagtgagttagggagaaagcattatcaaggagaaaagtagagaggcaaaggtttaatatatcaaggtagatattgcacaaggatggcaatacaatggcaaggaaacaaaagtataagaagtcaagggttatatagcaatattagggattagaaaaccactataatataatttcgccattaccgatctagtcgaaaatcttaatactaaagaacaatcctatcaacctaaccaagaagtctagtaatagatccaaagaatccatagcaaaacttcttgcggagtggggataagacagagaatagggcatcgtcgatagcttcgaaaaggtttcttctggcaatcttcgcttcaagttccgcaatcctagcttgatcatcttgcaatgcttctcattagaaccttctgatagacaaagaatcagacaagaagggttgaagataaaagagacgagttttgatataaagtaagtttttatggagacaactaagtcaagttttgaacgactaactgggctttccatttctaactaatctagcgacctacggtcacatttc

SEQ ID NO: 174444 - DNA, 665 bp, Zea Mays
cgctcagagccgtcagaagagttatgctgatgtgaggaggcgggacttggaatttgcagtgggtgatcaagtccttctcagggtatcacctactagaggagttgttcggttcggtgtctcagggaagcttagttcgaggtacattggactgttctctatcttggcctgggttggcagcttggcttatcgcttgccattgccagaatccatggcaggggtacacatggtatttcatgtctctatgttgaggaagtatctgcgggatccagaccatcaaattgagttggaaccgatcactgtgcagcaagatctaactctggagtgtcggccggtgtgtatcttggagtcctcagagcgtgtcatgagaaggagaacaatcaagtatgtttaagggtttgtggactaatcagtctgagcgcgaggctacctgggagcttgaggagctgatgcggcagaagtaccccgaacttttcattattggtgagttttgtcttcgccgatctttcttgtcgttccattagaagagttggaattcgaggtcgaaatccttttaagggggtagagtgtgatacccaaattttatgaaaagaagttaaatttcttttcccccttcttttgtgctctgtgcctctggagtttcgagttctcggaggcgaatacctcag

SEQ ID NO: 174445 - DNA, 441 bp, Zea Mays
ctccggcgggccgcatgcgcaatggcgccgccgcgatttgggactgtccatcatcgtcggcgacgtctcgggctagggcgtcgtgcaccatagattctttgggaaacggcgacgattaggcgacgcgtaccagttcgggtgaatccggtgtaggtcgtgcgatctagatccgacgtacggggagtgagcacgctacattaaatctacagcgtcggatcttgatccgagggccctcgtagaataccggttcgggcaggtgtacgtctaacagaaccctacattgaggattggacgaccgagattcgctgataccgttttgcctaggtaattttatgtaggagaccccctggtatattggaattaacccgcggtccatagacaggcacactgagtcttgggacttttcgcgcattaacctatgtacttatctgtatttatgcg

SEQ ID NO: 174446 - DNA, 404 bp, Zea Mays
cacattttcaatataataggtgcgtgaaattggatccttctcatacgaccgattcagattcagaagagccaggcaagaaggcggagcagcaagacaacaatgccaccgccagttactggcggaagtgtatggtggttaggccatggagagacagggatacagaatacggagatggtccaacgacgccaatcgagttggtgcggcgaggacaatggagatagatatggtggctaggccatcatcgagaggatagggcaaactgttgggaggcatgagggcgagctcaaagatccatagtcacgcatgctgaacaagacgaccgcctaagggtgaagatgactctacatcgtacaattaagatctgattagtaaggtttgtcgtatgagagaaacataaaaaagac

SEQ ID NO: 174447 - DNA, 651 bp, Zea Mays
gagatctggtgctagtacaaccatgtcagtatgggtgtacacatcacataatcatgtcaggaaccataggtttcttgatgcgaataaggataccatttatatgtgacaatatatatgactattttgtgtcaacacaaatttatttgtagcctcgaccctaatatggtctataagtcattatgaagtttaagatttatcgtctattggtggtatttttagatttactaatatcaccctttgtctcatgcattttgctctttttcttaacctttttatttttcttagttctttctttctagggcatttttgtcgcattaaaatgactttttcctccaaataatgttttacatcatgtggtttatgctataaaagaaaatgatgggacaaggacaattaacatttataactagggttgtaataagaaagacaaacaacatatctattttgcaaatagatacatgtattatcgtatcaaccatataaaagcttgcaaataaaatcttgttaggaggtgcaactaatataaagtaaaaaaacttgagagggcatgtagtaatatagatggggcattgatatgataagtatgcaaaaccaaagttatggtgatgaggttacattagtggcaatgccaaaatatatattagtcataca

SEQ ID NO: 174448 - DNA, 457 bp, Zea Mays
atacatcaaaaatgaagaggagccggatgacaaggctgcggcagagcgcattgcaaggcagtcaacccactacaccatcatagggggcttgctgtacagaagaggagcagtgggagtcctcatgaaatgcatccactcagccaccgggagacaactattagatgaaattcatgctgggcagtgtggcgtgcatgccgcatcaagaactctggtgggaaaggctttcagatctagtttctactggccaactgcaaagggtgatgctgccgagtttgtccagaagtgcgaggcgtgccaattcttgtcaaaacagcagcacttgcctgcgcagcatctgcagaccattcctgtaacctggccgtttgcatgctggggactggacatgatcggacctttcaagaaagattagggaggttatactcatatactggttgcaattgacaaatttacgaagtgg

SEQ ID NO: 174449 - DNA, 1473 bp, Zea Mays
actcggagattttttagcgctcttcggtcctaatacggctttgcccacgatctgctaggaaaaaggcacggttcagtgaatcaataggtcccactgttgacagcaccttgaagggcccaaagaaacggaaggccagcttctggttaccacgatgggcgagcgaagactgaacataaggttgaagccggacatagaccatatcaccaatttgaaaggaacgctcagacctcttcttatcagcctgcaccttcatgcgaagttgggcacgagccaaatgctgtttgactaaatccatcatgactttcttctcctcgatccattcctgcagtgaggaaatcggacagacagcagaagactctactccaaagtgacgaggagcgtaaccatacaagacctcaaagggagaaaaacccaatgctgagtgccaactgaaattataccaaaactcagctaaatagagccaatccacccatttgctggggcaagcattcacaaagcacctcaaatatgtttccatgcactgattcacacgttcagtttgcccgtctgattgtggatgatacgcagaactcatgttgagagaaacccctgccaatgaaaagagtgtcttccacaactgactcgtgaaaatacgatccctgtcagatataatcgccgtaggcaaaccatgcaacttgtaaatgttctgcatgaagacatgagcaactgatgctgctgtgaatggatgtcgcaagggaataaagtggctaaacttggaaaatttatccaccaccactaagacacaattcttgccatgagacagaggaaggccttccacaaaatcaaggctcactgtccgccaggcgccgtcgggtatagccaaaggctggagcagtcctgggtacctgctcctgtcgggcttggcctgtaaacaaatagagcatgccgaaacaaagtcttgtacactcttcttgagacctgaccaggcaaagagctgcttgatgcgcctgtaagtgactggaataccagaatgaccaccgagaagagaactatgcatagcagccaaaatggaacgctgaagagaatcattccggccaacccagagccgacctttaaagcgaagcaggccatcagaaagggaaaaattgggaacaacagtgttgtcaacagccagcttggtgagaatgtctttggattctggatcactcaaatatccatcctgtaacgcctgacaccattgtggagtggatacggaaacagcatacaaggaaaccagtgggtgagctcttctggacagcgcatcggctacaccattttcaggaccctgcttgtacacaattcggtattgcaaacccatcagttttgtgaatactttttgttgccagggagtgttcaaacgttgttcattgagatgcaccagacttttttgatcagtgaggatagtaaattctccttgcaacagataggatctccactgttccacggctaccaaaa

SEQ ID NO: 174450 - DNA, 949 bp, Zea Mays
ggccggcccacttccccaacacgcgccagcctcctcacccgcgcacgagcactgcctcgctgggcccacgcctcagtcagacaccccaccccggacacggtactgctgtctttgccatgtggggtctatgtaccagttagttcttccctgatgagatccccaacggaattccgagcatggcccgcctgcgcgcatactgcggaccggccaaaccgccctgctggaccataaaagcgcgcggccggagcttctcgccctcccaaatcaaaaacgccgacccagctcgtcacccggtgcagagaagagaggaagccgagagccatcggctaggtaatccgccgtcgtcgacgttctccgcttcggtcgtcgtccggagttctcggtcggggtttggggactgattcgcattccctagaagaagttcatggccaccccgagcgtgattggttagcctcgacgtgggaattgctcatcagagcagtccttcgccagggatccgccgctcgccgtgacctgcgccacctgcatgacaatctatggtgagactccttcccccagtttcgtcattgtctccgttgcatgctgcgttgtccgcccgggttatcgatcggggaccggagcttttggctctgccggcaatggcgccgccgctctgggcacctccgccgccactatccgtcgtgggagatcaggaaacaattggggatgtagatctcctaatggacggttaggattgcgcgttgcatacccattcggctaggctcaatctaaaccattgatctggcgatgtgcgagtatgagtgcatcgcgttcattttaaatcgtgtccgttgatcgctcattggacgttaaccagtggataccggttcgggtgcggatcaatctaatccgggcgctcagtttctaatccaacggcttggcttcaccgataccgcttcgttcggcttat

SEQ ID NO: 174451 - DNA, 377 bp, Zea Mays
accaacctactgccgaccccatccccctccccccaccatccacggcatcagcagttcagcacaggccggcccggcaactggatccctttggcctgctcaacactcacccccagtagcagtagtggaaaggcggttcctgctctagtgggagagggaggggggcagggaggcaaaagtggcatggcatgctgaggacacaagtgtcaaaggccgcctgcccgaaatgatcacacacctcatcatcatccacctgctgtgtcctgcgatcgaaaagatcacgcttcatgtttaaacaaaagctgggatcgcgaatctctttctcggcctgacagcctgctcaaatttgccgtggtttgttgcagaggctcccggagatc

SEQ ID NO: 174452 - DNA, 284 bp, Zea Mays
caatggacttaggcaccccgtgaagcctgattacttctttcatatacaagggaaccaactctgaagctgaatttgtggtcttcatgggaataaagtgcatagacttagttaagcgatccactactacccatatagcatccctgccttgaggaaaacgaggtaagccaaccacgaaatccatggtgatatgctcccacttccactctagaatttccaacggcttcaataaacctacaggcctcttatgctcggccttcacgcgctgacacacctcacaggctgcc

SEQ ID NO: 174453 - DNA, 340 bp, Zea Mays
gtaagctcgttttgagtaacaaaacgcggtagcatttaaattaaagctagggcaagtatcactgactcaccagaggtatggtacacacatgaatttgaacggaggaagcataggaggcccagtcgacgtaagggcgctctcgggagtgttctgcagatggcaatgcgatgttctcgatgccctgctgcagtagcgttcaatcggtcgagacagtgagcttcactattactagaggacactaaaacatggctcagaggggcacgagataacctgagaagggcttgccatgatggggtgtctcacggtagcgacggtgaccagttttggggaaatccggtga

SEQ ID NO: 174454 - DNA, 1325 bp, Zea Mays
cacccagctagtacatatgtgaacttcaaatcaaaatcaactgcagctaatacattctgtgtaggataatgcttcctccccctgaatgcagattgcatgctctctggaacactagcataaatgtgagttccatctattgccctaatgcagtcctatgtgttaacaaataaggtgagatcattgtatcatgaatgcatgtctatgtgttaacagaatcctaagaaattaccttaaaatatgggtaccatcttggactgtttctgattttaagtggggtttcaccagtgggtgccttaatcatgtcatcccttaattcaccaatggcatacaaaacttctttaaaatacctgctaactgtctccgcagacctcctccaactttggtgtatgaccctaaaacgctggttgtggccaactacatgaaggaacatggctacttgttcctccacattgttgtggatactatctctaagcaggttcctactcttaagcaactcatagagctagaaaaagggggttcttctcatgtgcaacatgttaacacactccacatcattgaagttgtaaattctattcaagtttctgtgcctctcttcacccattgcactcattagggcataagtgatcctaggtcgtgcacttgacactggacaagtctagaaacaaaatatgcatacacagcagcaacaagtccagctgccttcactattaacatgcgcctctcatcatcatcatccatctctagacgcaaaggaacagagccaagtatcacataaaagctcaccagcagtaacatgatgcagtactagatcataggcatggcaacaaaataagctcagatctagggaccaaatcataggcatggcaacaataagctcagactaaatgctataaaatcacaggcatggcaacttaagctcagatcattcaagaaatgaagggggaaaggggaggggaaggaatggcgtctgttataccgaacaacaacaggaagaaggacgaagcgccgagaggaagcagctacaaggcgtgaggaagcagcaatccggatgccctgtcaagaaattaaaaggggattagaaaccctaggtcgcgaaatagaacaaaaaacgaagctccaaacctacaaagcacgaatccaccacagatctgaaaagagaagaagaaatagggggaggatgggaggaactcggcaccagtcaccggcggcgacagtagagcagggcgcgcagaggaaggggaaggaggtggcggtatataacagcggtcacggtgggaaggagggaggtaaccacatcgttcgcgccatctcccgcgctcgccccc

SEQ ID NO: 174455 - DNA, 531 bp, Zea Mays
cccggcgaccagagagctcctagcgcaattacgtgggtcggcaagcatcgtggagttgcgagaaagctcaaacgagagagagagaaaggatgagctgaccggaaaggggctggccgcggtgaggtgagttttgcggtgccggaaacccggattggggagaaaccaaaattcaagctctcggaggcacggttgctaacgattgttggtggctaggtgggtgatgatgttatgcagctaggggagggctcaatttataggtggagcgagcggtggccgcgaattttggacgagacacacggcggtcggaagtgaggaagaatgctggtgcagtgaacacgtgttcaccgtcgtggcagtaactccggtggtcgacggggagtttagagggagtcacggcgatgcgatggcgtggttaggacacgcggtggccaacagcgatggcacgacgacgttgagcaactttacccgcgggcggtgagccaggggaggagtaccgcggctgaccggggtggcttccagcttgacggcggc

SEQ ID NO: 174456 - DNA, 596 bp, Zea Mays
ttcacatgcaaattttagagaaaatgtgacctaaacatgatctgtcaggcgactgaatcaggtttttaccatggtacggtaactgcagaagataccccttctttccccttcgccgccgatgacccacacgccgtgattcacaccgtcgttgggatttgtgttcgctggcggggagataacttcgatgaagtaaagatctcacggggaggagtggataggatcgcacatcagagcttatcgccgtgattctagtcactgcgacgtgggcggtctgcctgagccgccgtggaaacgccggtgaacccggttgcgccacgtcgaagcttattgctccgcggtgacaagcgtggcacccttgggagcgttatccatgcgctgttacaccggtgaccgccacggttacaaccaccgtgttcttccccgtctccggccgctagcacaacctgctcgaattgaccgtcgccgctgtcgctccctataaattgagcccgcgaatagcttcgcaacatcatcactcactcagccaccgctaatcgctagcagtccctcgccagagcttgcgaattttggattcgtcccaaatctctctccgccgc

SEQ ID NO: 174457 - DNA, 747 bp, Zea Mays
tccctcaacacactctatgactcgcgggtcccagggaccagggatcatttccccaacagcgtggcatagtggcggcaatgataatgccgaagctcttaactgcccacgccgtcagccataaagggcactgccagggaagcccagacgaccaaggcacattcgaacaagcatgattttatcgaggtagaacgctccatttttaccacaacgccgtagctcctttcttaagaagctaccggtagccgaccccaccttgtcctataaaaagaggtaggtcggccacaaaaccaggaggagacacaagaaggacatgcacacacagaggcaaagatggacacaaacggatgaccacactagaagacctagaggaccacggaggtcgaagccaaggagcagaccaccacgacgcccaaggcttagtagagagcaccagatttgtagtccttaggtctaaccaggcataaaaggacttgggagctcctccctctctcgtctacttgtaacccctactacgagtattgagcagcaaaggtgtcggtaccgcgagtagccgaagactggatgtacggacattatgtccgtactagtataaatctcatgcccactgggaacaccatccgaaaacatggaacacacacaaacaaatttacttttcggagctggtttgaaacactgacagttagcacgctaggtaggggccttgcacattctcgacgacttctccaagccccggatggcctattgcca

SEQ ID NO: 174458 - DNA, 304 bp, Zea Mays
atttacatcttcgtcaacaattacaagtgacgaagattagacttgcatattaatgacgaaaatgaaaggaacgtcatagacacaaagtttggacgcaacaagttcgtcacagattagatttgatatcgtcatcgctaatttgccttgatcggctgacgtaatgatgaaataaattggtcacatatgagttttagtaaaaaacgtcccacgtgtacacaccacttgacggcatgggatccttggcctacatgggccgcagttttttgggacacagcccccgcctggcgacgtggccccgacccac

SEQ ID NO: 174459 - DNA, 436 bp, Zea Mays
cggaaagctccagacagaaagactaacaagtccagaggcgtcagggggcaggctcaatcgagcagccaagcaaagctcactaacttgagcatcgtggacggtgcggcacttgcgcgctgacggtctggtgcttaagcagacggtccggctaacatagccgaatagttcacccatggacagaggcatcgacctccacacaaagcaaaaaaagagacgcaggagcaaagcacatataacacacatggtcagctggtcaaagatggccctacttttgatcaattgttctccaaatgcgctagcaagaaggtcattctacacgatcacccaacaaataaaccccagtcacccactaaaacaaaatggttgaataaaacgacccgaaatgtaacgcaacaatcatcacctatttatccagtgataccaggatactttccac

SEQ ID NO: 174460 - DNA, 679 bp, Zea Mays
tggtgcgtgggggtaatcaagggagctgcgcggagtgatttcgtggcttctccgcgcgtgtgagcgaccaggggccccagaatttctcgccgtcgtcaactcctgcgccgctgatccgccatcaccgagactacccgcgtgggccgccataacttcggtaagtggctacccatgtagttcgtcgtgttgtatactgcgcatagcactagtgggagtaggaaatgggccttcgtagcgctggttggacgatctccggtgagaacgccgccgttggcccgggcggcaccgccgtgcgcatctgtccagttggggcgataaccatgcgcccttggatcattggcgcacggccgagattagaaccccgcgtatcctttcgcattgaatcaatctggtccgtcgatctggtttggatggacagggttagatctaggataataaaatcctcacctttagggtcgaatccaacggttgctggagcagcagtgtgtctagccagctcgaattaatctgggcgcttgatctctagtcggacggtagtcagcgactcgtaccccttcggctggtggctttacgcaaaagtccccgtgaaacagagaaataaacccgccatcctctagcgttgtttcctgtgtcttggacatcttactccgaggcccctggccttttatgaatttgacgc

SEQ ID NO: 174461 - DNA, 608 bp, Zea Mays
ggaatgtccctatgtccatttggggtaacttaaccgggtggaatgtccctaggtccatttgggtaacttgcataccctgcactatgtctataacggggatggattacaaactcggttgagggagagcttaatgcccatgcatctggtgtgaagtgtgaatgaagtggagtgctaggtgcggttacatgtgttggctacttatgctagcttgttgagcgtgtccttcgatcgtggtccccccttccttttatagaccaaggagaagggagaccttattacatatatttagaggtcaggtgagatggatgggagcccaaccttaccgtgttgcttcttgtcctccaagacacttgttgatcaaaaggcccattaactgacgtcgttccttcccatcatcttactacagccacacatgccatactacatgccttttcttgttcggtagcgtgtgcttagttatcctttggtcctaggattggtcaagccatggtcagcttccatacagatgatgcacgcctgttcgttactttcctagaatggtcattcaaactatctctgatgtcgaagcccgtattttgacataccaactatagtactgtcattcaaac

SEQ ID NO: 174462 - DNA, 670 bp, Zea Mays
ggctaaaatagtcgtgggacggtgagaccgttccagcatccgccgttcttgctggtattcgaacctgtcgctcgcgatgcccttcgccttcggcagctccattcagagacgtttgaccaaaaggggattcagaatctcacactcgccgtgcatgaccgcccctgaagttcaaacaggtatttttcaggccacgcgcggccagccatggacaccgagacctgagccgagttttctgtcgcgtcgaaaccgttcctctgaactggccgtgccgccgtctctgaaccgaagcaagaacaagtcttgccccagatggctgctcgtgatcggcaaccgacgaccgttggcttgacggatgacaggtccactgcagtgatcactgactttaatttcaagtcgtatgcggtgcgtgtcgtcgctggtcggtctgtcttgccatacaatacaagaacccctgaaaatcggactaacaaataaatcagctgaaaggatcaaagggttcgagggaggctccttaatagcttcaggaaattcataaacgtgttcgctcttcttgtgtcagaggccggaaagaggctaatgctgtctctgtaataaaaatcagcacatgggctcagaacatccaagccccgtcatacatatctcgacggtgtgatctgacatgaaaaaagtc

SEQ ID NO: 174463 - DNA, 319 bp, Zea Mays
cctgctcttgttttagctccgatctgagtgttgcaggaagtaagatcgaattggggctactgagatggtgacaataagggggcgtagctactgtcagtccagtcgttgattccccgaaacggtggagtcataacacccaaccgagcatcgctttcttcaagtagaaacctgtgttcgtttggggaggatttttaacaaaaagcaggcttgagatctagccaagttcctactgaagattttactacggttcctttctaattcactgtttggaaattgtgagttgaagatatcatttgattcttaggagcccatggatttg

SEQ ID NO: 174464 - DNA, 417 bp, Zea Mays
aaggtaataactaaattctcctccatatggaacattggaaacggtatggatctgattggccaaagcactggtagcatgaacgacctctcgctcttgaagtcacgcattacctcagcttctggttggtcaaaaccgcagcggacagttgctgcatcggcggaggagcaccaacttgaggaggcggtgcgactgtagacgttgaacctagcataagcatgtgttgtggccaatatgatccgaccaatgcgatacatgtcaatgtgccatacatggtgtgaaaaacgaaatccatacctttgcagtgaagaccatgggtcacatgatcatagtagtggtagctcctaacactcgatcttgattcggtgaaaacttttgggtgattttcctaggttcgttgcggaacgtatatagtgcgat

SEQ ID NO: 174465 - DNA, 403 bp, Zea Mays
atttgatattgtgagtgggcaacgatttctattcagcaccgttgatctaatctgagctggacagatccaacggaccgcgctcgtcttctaccaagagccgagccacgacgacgcgcacccaaggcgacggaagcccaccagcgaacgcgccctacggtgaatccccgtccgattcacgcacccgaatcggtttccatgaacactcgactactacgagtcacgtggatcactcccaatcatgaaccgttgcgcccaggcccctgcccgcgacgaagcaccgattcacggcggaatcactatggcggcgagaaattagcccacccaagcctccgattccgtcgggtgaggaggagcacatcattccttgcgacaatgcgaagctactcggcccaattcccgaccc

SEQ ID NO: 174466 - DNA, 444 bp, Zea Mays
cctagctataggagtactggagagacgatcgaggactggtcgccggccgtgtatgaccaactgcaacaacggtgtatgcagcagttgccaccatcgctcctctgctgcaaacagaccagaccagaccagaccagctctcactcctgcaaacaaacaacacgtgtgtagctagagtagaactgagccagttggaactcagtctcgggggttcattcttgttgaagaaaccggcccaaatcaggcagcctacatgtgtgtatggggtcttatttgcttcgcatgcagctcatagtaaactgccaagcgctaaaaatgagccgagaatctgcttagggtcccgggtaataaaccagctaatgtcttcaaattagctggctacccgccaccactagacacaaaaactctatagtagcgattgtgaacctatttttaccgacgtttttt

SEQ ID NO: 174467 - DNA, 546 bp, Zea Mays
gcacggtcccgattcgatcaacgtggttatgaatcaaatacgctcaccgaccgttgacggccagatcgacggacgggatttaattatctaagatccgattgtgcccctcggattcagatcaacgcacgatacacccgcagccgaaccgttacggcgcgacttgatcctagccattcatcactaatctagtggacacgagttcgtcttcaacctcaggtcactccatggcggagcgagcacctggagcagcggcccacggctcgccgacgtacctcgcagatgcgccaactcccgcagccccaagcgcgacacgctaactaggaaaaactgagatctgagcccgtattcgacaccgcacggcgctggagtggcacactcgcgccgttcaaatttgccgcgcccctaactcgatgctacgctatggaggagcagagaatcgtaggaaaaactcactgggttacgccgcccaagccccacagaagcgcgccaccagcttcgtgatcccgagacgcgacgccgaccgcccttggatgcctgctacacgac

SEQ ID NO: 174468 - DNA, 363 bp, Zea Mays
ttcgcggccttgcgccacatgccttggcacattaacctcaccaccgtgactcatgttagctcgtccggtggtcgccggggagcttgccacggtaattgccaccaatcgcgcgcgccagtaaccttcttctttctccggacgccacgcgtctccctcaaattcaccggccaccgctgtgggagcctataaattgccgaccccgcctgctccgctaagtaattgtgcacccagtagagcaacccatgcctcgaatcatccactagaactccccaatttgggatttcccccaaatcactcaagaacaccgagcggtgtgacctcgctgtggctagctcacctcaggttcgttcatgcccactgtcc

SEQ ID NO: 174469 - DNA, 294 bp, Zea Mays
gcctaatccccctacggtcagcccacctccaaccgtgcggcccagtctggcctccacgttgggtggcccatctttcccctttggcgcgcaggcaaaaccacctccgcgcagcccaattagactccgtgcttccaccgtgctactgtcgccgccaggtggggccggatcgctgactcgtcgacttcaacggattctgttcacctgttgcgcgaaaccggggcaaggtccgatctctccgccctcccatccggactccctcgcgaaaccttgatctgggccgctataaatggtgac

SEQ ID NO: 174470 - DNA, 714 bp, Zea Mays
tgtgtatgtatttattcacatttcatatacttatgactatgtgactaatatgttctcacctcttctgtcatttcagtgatctcacctgcttgcgtgcccgtcttctgccctgctgggattctctctcttgtgaggtttccaggtagctataacttcatttgagatcctattggctactctatacttctgcttagcttttgactcactcgtacaacactcaggtcaagatggtgcagacgaagaatgtctcatcgtcagggggaggagacgacgaggaccctcctggccccttcaggcatcaaggggaagacagtttatcttgagcagcaggagggcagtaagaagcatcttatggacaaagcctctcgtgcagcacttgcagtggcagcagcggtagagcagcacttgcagcggcagcagcagcagagcaggacatctgcatatctcttctgatcagatagcctatagagttcgtcgcctcgcaccactgctccctccacaccttctgccactgtgtctactccacctcccacttcaccagctcctgtcgctccagagccatccaccacgtctgctatacccaccacctccaccactccagcttccactgttccccctcccactcccatttccgctctgcccattcctccacctcgcttcagggagcgtgacaagattgagatgcgacccctagctgctgatccccatctgctc

SEQ ID NO: 174471 - DNA, 1293 bp, Zea Mays
gtatcgggagtaggcgccgagggaatctttggaaggctctcttccgcaagtttttaggtacaactttcgaaggtcccgcctcagcatgagcagaggtactggcagtaatcatctccaggacatcttcagttttgctgccagaagcttcggaagaaggaggtggcgttttcacagattctagaacagcttccaagacactagccatcctcctcttcctttgagttcctgtggtagctggcagcttcggcagtgatgtcacaatcatcttcggctgctctggcattttttccgctaccttttctggctctagctctttggccgggtctgcaatagcttcaataggtagaacaggaacagtctttgtggctagggggttgtttccaccctttcacttagcttcggcacatcggccgtctcaatgtgcgtgggtctacgtgtcaataccttgattttctttgacttcgacagaccagtagatgccgaggcagcggttttcctttgcctcccttgcttctgggtggtatagcagtagtccgagtaaatgaacccaataacatcaaatactctattcaatctcttcttgtcacgagcgccgaaggcaaccgtcatagcttcatcttttgccttcgagtacgctccaagtatctcatcacttgttgcttctataacatccaaccaatcatcatttggctcctcaaactggtttcggaaccgaaaggtatacttcagataaaccaggccacccaggctggagccagcagcggcctccttcggcatttcccatacgctcgcaagaggccatactttgtaagtaatatgctcttaaactaagtctcttgtgccaatataggtgcacacggtgttgaaagcagcttggcacgcttgcacatcattcccaagtgcagtggatggccttctaatgccgaagcgagaccatataggacgttggataattcctttcacatcttccctctaacccaagtcatttttcacataaaaccattccttcatccaagaacccggccacttcttccgaaacgtgggtacagggtaattcgcctcagatcgaggcatgaagctgtaacaaccaaaattgttatgataccgctccttcccggttgccttcatatgataggacagctcatgaatattgcagaagcatcttgcatctagctctagctcttggctactcatggcccagataaaaactcccactctaataaggaattatttcaaatgttttcaaaacctcgaccagcatcttgtggagtggaaaatgaagcccaactttca

SEQ ID NO: 174472 - DNA, 766 bp, Zea Mays
gacgcagttcacctcaaaattttggaagagccttcagcaagctatgggcaccaagttagatttcagcaccgcctatcaccctcagtcagatggtcaaacagagagagtcaacaaggtcctcgaagatttactaagagcctgtgtgttgacgttcgacaggaattgggagtccagtttgtcgtatgccgaattctcatataacaatagccatgaggccagtatcaaaatgtcaccgttcgaagcattgtatggacgaaagtgccagacccccctaatgtggtccaatgtaggggaaaggatactagaaggacctgactttgttaaagaagccgaagagaaagttgccctgatccacaagaggttacttgaagctcagagtcgacagaaaagttatgcagacaacagacggagagaactcggatttgaggaaggagatttcgtatacctcaaggtctccccgatgcgtggtgtcaaaaggttccaaatgaaaggaaagttagcaccacgattcgtcggtccctatcccgtcattggcagagtgggacccgcaacataccgccttgaactaccagaatccatgtcagatattcacaatgtgtttcatgtgtcccagctccgtaaatgcttgcaagtactagagaaccacatcgaggcagagacaattcagattcaaaaagatctccagtaccgggaaaagccaataaagattcttgactcagcagtccggaagacccgcaactcagaagtaagactctgtaaggttcag

SEQ ID NO: 174473 - DNA, 640 bp, Zea Mays
actccggacaagcaatgcatttccaactcacccgagggcatctcgagagatgctctagaaggtgcccaactccgtcgaccaactttgcaaggccccgagtggcagatgcagtcacgactcgtccaaggccccctgagcaaaagacgtagtcacgactcgcccgagggcaaccctgagcgggagacgtagtcatgacttgctctaggccaacctcgggcgagagaggtagtcacgactcgccctaagccaaccctgggaggtagaagtagtcaagactcgcccgaggccaacaccggatgggagacgcagtcatgactcaccggaagctaggccagcccgggcgggagacgcagtcacaaattgctcgaggccaacctcgggtgggatacgctgtcacggctcgccagtggccaacactagacaagcaacgcatttccgactcacccgagtacttctcgggctccggaaggtgctcaacttcaccgaccaactctgtaaggctcgagcaggagacacagtcatgactcgcctgaggccaaccctgaacaagcagcacatttccaactcgccctagagcttctcgggtgatgctccggaaggtgctcaacttcactgatcaactctgcaaggacccgagcgg

SEQ ID NO: 174474 - DNA, 502 bp, Zea Mays
gcgccaacctgcaggagatgtaggaggtgaacagcacgaactccccggcggcgagatcgccgaggggggcagcgccagcacgaattcttccggcgagccctggcgcactccacctaagcaggccacgcaccaggttaagcgcttcctcagactgaaagcggtcagggtgaccaagagaagccatggcgtatgcggcggcgtgggcgtggagtagaggagcacgaaggcaaaggggcataggtgattgggagagaatgcgaaaaggtaactgctgcacgcggggtgaatcctttttcaaggaaacctgagtccttgttcagggaaacccttccgcgcgcccctgaatcgccgcaggaaatcccgttcgacgggcaccaaggaccaaggcaacccagtctgtgacacggggggccatgtccacaagtcatacggtttgtgtgccggatttcgggtgcagaaagagcgaaccaccgcacgcgatagcgcgccgccttggggccgc

SEQ ID NO: 174475 - DNA, 491 bp, Zea Mays
cgcttccttgagtggctgcaggaggagctaggggtgctaccgacaatcgtgaagggcctcatatcctttgcctccctcgtcacctgcgaaggggccgtgaatgctttgtcccgcgaggggtgcgggcatttcgaggtcttcgaccagtcggacgaaggcttcgaacgcgaaatcttccaggtcgaggacccagatcttaagtggtcggcgggggtgctcttcgacaggatgtggggtcctcacggccgagagacggtccgagagaggtccgaccgggcaatggatcaggtaaaggctcattttgtgtggttatatgtgtgggtatgtgtggttttgctgaatgaatatgctattgcagcagatgacgcatgacgaggaggtggaggaccttggcgatctagacagcacgctgccggaggcctcgagggtggagctggcgccgccgtccgatgcgggcaagggcccctcggcgacccctgcactgactggag

SEQ ID NO: 174476 - DNA, 784 bp, Zea Mays
ggaccctttgctgatcccgcagttcattgaggtggtgattggtgaatgtttatttgagctgcaatttcgggttgaagaaaacatggatggtgacagcccagttccagtggatatggatgactttagctgtggggaagacgaaaataagtcggatcaattagaggatgtggttcgtgggggtaattctctgccccctaataatagtgctccagatagtggcaaatctgtttcaaagggtgctggtaatgatggtaatactggtaaaaagggagcggcgcatgatgttattagctcggtagtccagtatgctgatttgggtttgggtatgcaaggtgttgatcatgctggtaatcccactcaagctgttgtgccagcaacctcgtcgtgtatggctgtttcggtgccgtgtactccggatgtggcagctatggctgctgttccagaagcaactatggggctaaccgagtcaggcaggagcaaaagaagaaacaggagcgggaatggggacagcatgcaaagagcttcaaagttgaaggctgctcgcaatttagatgcggtcctctctacaggtaattccatacgcagcctaccttatgttcttattcctgatgaagtagtgcagcggttaacttctttaggttttgtttgtgggaataatgataaatcttgggacaaattcctagagttgttaaccaataagctgagtggtgagtctggtagtttcgtagatgccaagtcagttgctttagagagagaggaaaaagagaggttagaggatcaggag

SEQ ID NO: 174477 - DNA, 547 bp, Zea Mays
ctcggtgtcaacatgacgtagggtgttacgctttctagcggcccgaacttgtataaacccttgtgtgccctcgacgtgcatccacatgtaccatcgagtcacaatcaacgatgtcgtcatgctcaaaagcatcacatgggaaatcctgtggtgcgcagtcaggtcataaacaccggcaactggcgcgctaggtagggggtgcagcgttgattcacgatgactccatggctatcgtcttcaacaccctgatcatcttcaacgccggggaggttttcagctttggatccctctcttgcatcatggattgagaaggcgtcctgcacctcatcgcggatccatccaagaagaggtcttctccgagggcatcgatcgcggagacaggctcgtcccgcctgacctcatcaaaaactacttcgacgaactccaaggcgcgaagaccttaaccaacctccgccccgtgtaggattgcgcctgcgtcggccgggcctaggaccatggcaacacctggcccgatcgaccgaggttgtgcccttgtcgcagcagactc

SEQ ID NO: 174478 - DNA, 513 bp, Zea Mays
ttgaaggatcctctcaaggatccaagaagcgatcgaggttggtgattcttccttttaacccaaatcgctcttttcctcatccacccgcttatcccttcaagcaaccagtttttatccatcccactcctgcccctactcaaaacaatcagtcgagtgcccctgttactcgttttcccgccttacccagttcatctagcggctgcttcaaccgcgggaagtctggacacttcatcaaggactgtccctatccaaaacaaaataaatccaattcccaacagacttctgggagcacatctcaaggcgagggaaatgtggccagcactcaggctggcaagaatacaaggaaaattgggcgagtctactacactcaagtggctaccaccccggaaggagagcctgtgatgatgggtacgatttctattgccgatcatctcgtcgtcatcctttttgattctggtgcatcccatactttcatgagcaagacttttgttgagaagcattgcatacctagtg

SEQ ID NO: 174479 - DNA, 271 bp, Zea Mays
cacttgcccatgtggcatcggaatatgcatgaagctgaagtgggctatcagaggcatagagtaaacatcttgatcttgtctcgcgtaagtatctaagcacacgaagcaaatgaccgtaatgaacttaggtcggtgtggatacaaattggctcaaaatatgaacaacatgagcaatatcaggtctggtgatagtgtgataaacaaggctacccacaatatggcgatatcgagttgggtctgctagtggtgtaccatcctttggacgaagttg

SEQ ID NO: 174480 - DNA, 1066 bp, Zea Mays
ggtaaactagctcgttaccgagagctgtactttgccgagtgcctcataaaaagtactcggcaaagacgccggcacttggcaaagggtcggattccggtagtgagtttggtattcggtttttaccgaaaaaccgaagtaaaaaacgaaaccgaacttctcggtttttcattttcgagaaaaccgatcggtttctaatgtctagaaaaccaaagttttgtaaaaccgaaaaaccgaaccgaagtttcaaaaaaaaaaccaaatgcccagccctagccaacctctcttctcttgctcgtgacctgcccatcactagcagccacggcgcccctgcgccggactcaacagtgcccctctacgcctcatacctacaaccttcatagcatctctgataggaaccctaatcctatcaacccaccagatcctaatcctaccaacctggtatcgaagatgtccagcgatcctccatccaccacccacccaccaccatcggactccatcgtacctgggacgattgccgccgcgacgatgacacctccaccatcctccgcaccgcctctcacgctggaatatgtggccgctgccgtccacgagctatcctgatccatggcggccatgcaagccttcctaacggtgcccagaatcgcacagccaccaccggccaggcgcaagtgctgtgatcttgacttcgtttgcttattccgaggctccgagccccacgtgttgtgttgctgggttcgactctgaaattttgtagccacgcgcatttgttctgtgtgccagagacttcgagcaaattatgcaatgctactgtgaactgtgatcctgtgtctgtctacttggtgtggacgctatgtgtttttttataggtgcagcactggtaattttacagctgcgctattttagacgtgcagttaaattaggacaatagatgcgacaagcgaggagagaagggaaaaacatccattttagctagcgaaaaaaagctaaactctttgcaccgacatggatgaaaaacaataatacgtcaataatgaacatactacattgctgggactggtgacaggtg

SEQ ID NO: 174481 - DNA, 580 bp, Zea Mays
tcgggagcatcccattcttttatagccgctaagtttgtggaaaaacatggcatcccctctacacccctagctgtccctttggtcacccaaaccccgggatcagacctcctgtgcaaactcaggtgctctcaagtcagaattcttttaagtggggtagtgttcctggcagacttaaccatcttgccatcccaagggattgatgtgatactaggaatggattggctagctaagcacaaaggtatcatcagccgcgcaagcaaaactgttcttctcacagatcaccaaggaaaggcagtttcctgtcaagcccaaccgcccgcaaacgatccgatgatgtttaatctggcagcagaaaacacgtctgcaatcgaagagtttgaggatgtatttccggaagaattgcccgggatgccactagaaagaggagtagagttctatatagatctcattcctggcactgcgcccattgcaaagagaccataccgcatggctcccatagagttagcagaattaaaactccaaattgcagagctgcaacaaaaagggtacatccgtcccagttcgtctccctggggagcac

SEQ ID NO: 174482 - DNA, 621 bp, Zea Mays
atgtagctgggaatattcagagccaatgttacatgagtggagtggcgtatcagactatgtggctgctagtattctttcagtatatctcaacttggcgctggtttccaactacactccaaaatgagttgaggatcatcaactgggcctgggaaaatgattgtgttttcaactggtctgcattccagataggaactagctccttgagcttgaacgcggacggctcggtgacaaacttgtagaagctgtagagacgcagttgtgcttcctcggggatgctgatactggaggccgcgacgaaggcggatgcagcgttgaactcccgctcgtccagaaagttgaagtcgcggcggtggaagttcacgaacctctgcatcgccatgtaggactcgaagacgaaatcggcgtcgccaatgtgccggagcgggatgcccaggtgcacgacggtggccgcggcgcccagaccccacaactgcattgatctcagcattgacttggagaagcagcagattgacttcacagcgtgccacagtgtggtgttgaagtgggcctggttgaggtcggagaggtggagccgtgcctctagggggcgctcggcacgatgctcagcagtgagggaggtgg

SEQ ID NO: 174483 - DNA, 443 bp, Zea Mays
gggcaactcccataatgacttctactattcctgctgcagaggaacgcgaagagacaaacagaggggacatgacgacaccgtccacctactcccctatgcaagtcgataagctagtacgctgcagcctaaactagagccttcacccacacgctgacaaagacggggcgaagacgattctagccagaggtgcccacacggcaaccaagagaagattcttgtccaccgcgagagaagacattggttcaccagctatatctgtcactccgtgcttcatattttggtattcatggggccacatgttggagtttagctcccttgtacattctcctccttagtatataaaagggagggcacttgcgtagcaagggggacacacactagatcgacccttgagcaatccaatgactcgaggatggggacagactcacttgaatccccacgga

SEQ ID NO: 174484 - DNA, 769 bp, Zea Mays
ccccagagtgcaagggtgtttgtgctacttgttgtgatcagaggaggcgtgttcgagccctgtagtggcgtggacgacgggatggctctcgtcctcgtgtccaagccatgtagcgacatggccagtgggatggtccttgtccttgcatcatcttttggtcaggaggacgtctgatccctgtagcatgttcttctgacggggtagagccgaggcttgactcaggagcatgggcatgcgcccgatccctaacatgtacaggggcgcgggtgtcgagttggagtagtcgatacaatgattagcatggtcttctgcgagattcgcgggagagtagatgacatttaatgcgcgtctgctgggtgagttggccgaggccgagctcgggcaaggcggagatttctcctgaggtcgaggccttgatcggatgttgcctgtagccacgctcggagtggttgaaacaatggcagagtgggggaacagtgcctcgtattcgtgccctatgcatcgtcgtgggcggtaaaggtagattagaccttagtcgtgtcgtcctttgttgactttggcaccctcagcgggggcatgtgaacgtatggacgcacgttctggaatcggagtgtttggccgaggcgggtagcttccggcaggtgaatcggaaatatgcttctcgcttgaggttggcctcgggtgggtcgagactgtgtatcccgcctgagattggccttaggagagtcgtgatttttgtctcctcgagcctcgggcgagtcgcgactgc

SEQ ID NO: 174485 - DNA, 362 bp, Zea Mays
acggcatcgagtttcgacctcgcactgcaatcaagactcaagcactagtttatttcatatcagaatggaccgagcaacaagtgccagataacccggagactgcagaagtatggcagatgtatttcgatggctcgttgaagctgcagggggcaggcgcagggatcctcttcattgcacctggaggtgaacaactcaaatatgctcttcagttgctattcccagcatccaataatgcagtagaatatgaagctttaattcatggactgaacattgccatatcactgggcatcaagagactgatggtatatggagattcactggtggtcataagtcagataaataaagagtgggattgctcgaat

SEQ ID NO: 174486 - DNA, 321 bp, Zea Mays
cgacaaaacagtaagttgagagcgcaaattgccttgtcaagtgggtcctgtctggctacaggacgggggtatttataggggcagtcgagggttggtggacctaagtacagttatacctgcgactaccaactatattctcgacatgcactgtacaacggggtaattacaggactacaagaacaagtttccttgttacaccagaactagtaccctccctagccgctaataggtgggcctagagtagttgattgtcgtcccacagtggccgaacggcacgaggacctggcgtctacctcctctccttgccattggagatgtgga

SEQ ID NO: 174487 - DNA, 529 bp, Zea Mays
cgactggatggccctgagacgcggagtaagcacggatactccacatgtgtattcttgtcgacgttcatggtgtcggtctcggtaaggggagtcggtgatgtgctgtctcgaccatcctcagatcaggccactagttgaggctgcagccgactcgactcgggtggcgtgacttcgagccaggacgccatggtcccgatcatactcctctcggcgccttatctcgttttcgtgtcgtcggtcgtgcgaagcgttgatggagctccgcgcatctcgccgactattgatggcgtgtcacaggtcactcgggggatgagcaaggggtagaagatgattagctacccgagtaagcagcggccgatagccttcagcatccgaagtccgtgggaggccatcagctatctgagccagcactcctccgactttgcttggcgtgttaattgcacgagcaaagtcagggttcaggtttcgagcaaagagagggttctctcggcataaccttacaccatgttcagcttgttcttgatctcgg

SEQ ID NO: 174488 - DNA, 570 bp, Zea Mays
ctgatgcggaggtgactaggctcctcggtagtcgccattatccaacgacaagcatctcattctgtttcgtttatgttgctaaagtagatgtagaccgtagggttcattccacatggtgatttctccgtcaatgcgcttttgcttggaataccatccagcattccaactctttgaggggaggaatatgctctcgtggtagcagttgcgtgccgccctactgcacgagtagccaatggcgcccaaatctttttgcgtccagatgcgaggagatagcatcggttccatcgtttatttggccgtccatagcactgcgaaattgatggggcgactgaacctgaccccgcatgtggatgttctgatatcacggacgaacacgaagctacccgcgaatctatctttgcccttgttcgccgcctgccacccatctggatttggtaaagcccaagggaatctcgtcaccggatgcatttatccgagtaccaagaggtaactttccgaaacacagacgcaaaggtgaattgtgaactcgtaaacagatcaaatcttcacggattacctgtaaaatttagt

SEQ ID NO: 174489 - DNA, 614 bp, Zea Mays
gcaagaaattcaacacctgatggccagagtacgttcaactgctagggtgacccgtgacagagaggaggccgaagccaccgaaacagccccgatttccgaagttatgaagcaatctagattggttgtgacagaggggactattgacgaagatgcacatactgctgaggctgaagaagctgatattgaggaagaaaatgttgatgaagaggaagactataacactctagtcccagcaaagcccagccacttagattttgaaaaatctactgtctctgaggcccatgtgccgatgatgatgaagctcggttacttcggggagacagagaagaagcttcttcattttgctagcgaagaaaccaccccagagccaaaaaatgacgaagtagtagttttcaaaagctttttcaaagctggattgcggtttccgcttcatgagatgattggggaagttttgaataattatgaaatttatcttcatcagctgactcctaacgctatcgttaggctcagtatcttcatttgggcccttcaaagccagggaatggatccaaatgctgaagccttctaccgagtacatgagctacattatcagatgaaagccagagaagatgggc

SEQ ID NO: 174490 - DNA, 680 bp, Zea Mays
aagaaaactaagccacttagattatcctccattaaaatgtatctatctcatagagatccctctaatcataaaagactctcccatatcttaatagattcgtcgtatcttataagattctctcttatcttactagatccacctcatctcaaaagattctaacatatcttaataataaacatcctaccctgttagacctatctaacctaaatcagtctaatctagtcatatccaatctgatctagatcttatattacctaatgtgatctgatctagtgtggtctaacgtaatctaacctaatgtggtccacttaaacagattaatgacactagtaaaagagattagaccctactagccatgtattaacttagcacattggatcaactcaaccataagctaacccaaccaatagagtcatgatggattgcataatctgcctatccccacctaacatcaaacaaacttttgacctacatcatgtagtctatctcattcatatctatcttaaccatattccctaaccgatgatatacactaaccacgaatcaatgagaccaggactggagaagaaaagatcaacctcgtcaaagaaggagagaagtcaaactcaatcctcagatgcattaccactcacacggaattctttcccatcataaacttgcttaccctaggctattcttgc

SEQ ID NO: 174491 - DNA, 322 bp, Zea Mays
acccgtgcgtgggccaattctcctcgattcggcccactatcccaagcttccgtcggcccaaactaatgccgcgcgcctacaacctcagcccagcacgccctgtcccactgaccagtgggtcgtccatgtagttcattgatgcccacaccggtgtcacctacacatgggacccaatcgtcagggcttctcctacctcaaacagaacgcgtaacaaacctccgcgaaatcaagctggccgtgaacctcggaaaatccgatcgaatccatcgctatccgcgcgcgggactacctccgatgtgtgcgccacttggctataaagccg

SEQ ID NO: 174492 - DNA, 1498 bp, Zea Mays
ccactttagggctttgtaacttgcaaagtatagggtttttgccctaggtcaccacatcaaaattgaagctcaactataggagaacaactttgtttaaaggtgtgagcattgttgttaaggaaaaactgaagataagtaagcctaaagtcaggctgtcaggttggataagtctgaaaatcagactggcagattgatgccatcaacttcaagcttaaattcaagcatgatccaaggggtttttgtggcatcatcatattacaaagttgtagaggggatattgctctacacttttgctgcagagctcgacatgtgttgacattagaaattaagagaaaatgatgctccaagttcggctgacaggctgttgaatgggatgcaccatggtacagtaactgaatcagataaggtcgccgcacggctgtcttcaccgccggtggctcgtcgccgttgattgccgctcgccatgattcgtgcgccgtggccatcggataaacatagctcggtaaaaatccccgccgccggtgggctggacgccatcccggccagccgcggtacccctccccttgctcaccgtcgtggataaagctgctcaccgccgacgtgcccttgccgttggccaccgcgtgtcctaaccgcgccattgcatcaccgtgattccctactacagtcccatcagcgtcaatgagcctgccaccgcgataaatacgtgttcaccgcacctacgttcttttccagctccgaccgccagcactgctcggtcaaattcgccaccgccgcttaccctcgctataaattgagcccaccattagctccgcaacttcatcgcgtaccccatcgtccagtatcgtccccagtcctgccaccgtgagctccaattcctagttttccccaaaaccgttgaagaacaccgcgaagaacacctcaccgtggccagccttccacaggtctgctcataccctccttgttcctgttctagcatctgtgcatgttagtgatgctcgccgacccacgcaattgaactagaaaccctctggacgccgggaacatggttgtctcgccacaacattctcggtcactgtggccagaaccaaccaggcacccatttgcgaaattgggttgggggaattgatcggggaagatccaatttggcattagctgctcggggatgccagtacttgccccaatcggccggcctacgagctcaccggagctcggtcgcgttcaccgtcgttgtggacctttccccgcgaaggaatagaaatcagaggggtgttctgcaaacagtcagtgactcaacgtaacagtgaccgaacccatctccagttaacaaaaaccccgaggacctttctgtaaagccgccagcgctgcgcgggcgcgcgcgggcgctttcctccctggtcttgggccgctgggctgaattcggcccagttctattaattcttttccttttttctttttcagcagagattcaaaaatatgtagaaaaatgtagaaaaat

SEQ ID NO: 174493 - DNA, 325 bp, Zea Mays
cagccaccaaaaattagcctcgatcgttcaccagggtgtgcgaatttagaactttccccaaatccgcgcaagaacaccgtaggaaagacctcgccgcggccagctcaactcaggtcagtccaagtccctctgttgcttgttctagcgtccctaggccctcctaaagctcttagacccgcccaattgaattagaccaccacccatcgccgagaacgtttatgatcatccgcctcacccgcggtcaccatggtcagggcgtctctgtgtgtcgttcctgaaattaacctaggggaaacgttctctaggtcctgaatctggtttaagc

SEQ ID NO: 174494 - DNA, 331 bp, Zea Mays
aaatttagttactgggcagcacgatgaagaatgaattcttttgagttgcatttggttgcactagcagtgggagtactggtcttatttagattgctgtcttgttgtactcagcatccttaagcaccagtctgctggcaattcgtttaactcatctgtattcattccttagttttgctgtggaaatctccaactctgcgttcgtctgaaatattggcagcaccatttgtgcgcacctggatactaggcaaagttatctggatccttcacaggcatgggctagggagggcatgagtttgtcccatgctcccatggttggaataaataaatactg

SEQ ID NO: 174495 - DNA, 456 bp, Zea Mays
gttcacgcttatcccaaatttagtaccacaaaatagacatgctgttataaaagtatatgtctcgagaaaatggatttttcgtggcgcaatggacaatggacctatacatcacatcgatcttgtgttgatagacaaataggtaaaaaatagacctattatattaaacattttaaatagacaattgattagtagttcttacatttataacattttttatctctattgtacagggtaatggtataagtgctgaaatcccaggaaatctagctgaagagaaaggatctatcatcgaagaaaatgaaatatatgagatcagtagattcacaatatcttcagcaagacaaatgttcaaacctgttcatatagacaaaatgatccacttcacatatcacacaattattaaggcatcacttgattctccgtcaacatttcctagatatgtctatcatctgactc

SEQ ID NO: 174496 - DNA, 676 bp, Zea Mays
tgtttctacacttctagggatctaaatgtaatggttccctagcggccgaggatggcgggttaataataaaagttccctgtggctccttgaaagtttgccacgacggctaatacacaagctcgatttggccattggatctgatatccaaggctagaaatagaccgcgaatcggtatctattctggaccatagcgggatcgattcggttccgtccgatcgtatccgacagtccccatccaatcggtcgaaacgttatctatgtgctaattgtggccgcatgcttgggatccatcggttcctagctcatccccctcccaagcggccaagcgcggtggcgcgcacaatccatgcgacggcgcaccgtcggcacaacgacgaaccaaccaatctatgaacaaaactaaacacgtcaagatgattcacataaagaagatcaaggtgaactcgattgaggccatcctatcttggattaaggcaacacaagctctacccacgtctagaggcggatctgcggtagcagaccaagtccaatgagcaattccttgctcaaagcacaatcatgcaccctgtcatcgacctccacatgatacatgtctattgccgaacactgcaatcaaatctttggacgcagagcagcgacaaggatgagaattgatcgtggcgtccgtggttctccc

SEQ ID NO: 174497 - DNA, 310 bp, Zea Mays
ggagaaacgccaaaaatgtttatcagaaaaaccaggccacagtagcacactggaagtggcatcacatagctgtaggacctcaacaataagctccggggtaaccaagcctctcaagtcactgacccaacacattttgtccatggcttccgccaccgttctcttgttaaccaagatagcaggaacagcagtgaaaacatgtggaactaaatcaggaatgcgttgccccaaaagccacctgtccttccaaaataaaatattgcggccatcaccgagaactgaatccatgccatgaataaacaaggactgaacc

SEQ ID NO: 174498 - DNA, 530 bp, Zea Mays
gtcggatctggccaaaatcgcgcgcacgagggcgcctctcggacgcaagagccgctccggtggcgccaccgcggagacgcaaccacgcccgcagaggcttgggggccggcggcgggaagctgctgttcggaggctggttcccgcgtcgtggatggatcggagaggacgggagcggaagagatggggcggcgagtgcgggcggggtggccggtttgcgtttctgctgcactactgcggccgcggcttggcgggcgagggatataagagaaagaaaagggaagaggaagacaggaggggacgggttggagcaggcttgcgaaggtgggtggggcgctgacaggtgggccacacgcaagttcgggcgtttgaaaattagggtcgggggaagtagtaattcgggagagggacgcggcgcagcttgggccttgggctgtgtgtgggtcttgggccgccggtggatgggtctgtggcagtcgaaaaagcacgtggcgaagtctggcgatcgctacctttgaactgttcgtttgtga

SEQ ID NO: 174499 - DNA, 549 bp, Zea Mays
tggaaaccagaataagcatctaggaaggacaggaggtcgcacctagaggtagaatccacgatttaatctattcgtggaagtggatatgggtccttgggacaagccttattgaggttggtgtagtcgatgcacatccgaagcttcccgttagccttgggaacaatgactggattggccagccatactgggtgatggacctcttcgatgaagccagtgcgcagcagcttccggacctcctcacggatgaaatcctgccgctcaatggactgtctccaaggcttctgactcaccggtttggcgtcagggtggatcttcagatggtgctcgatcacctccctggggatcccaggcatctgcgacggttcccatgcgaatacgtcggcatttgcctggaggaaggcgacgagcgcgatttcctatttctcctccagattgcctgcgatgcgagtggtctaggaggaatccccgccgagctggatagtcttgacgggaccgctgtctgctccagatggttgcaccttaggcaccttggtaggtgttgggggcctt

SEQ ID NO: 174500 - DNA, 496 bp, Zea Mays
cagtaatccccagaacaccgagtgcgacgtcgtccgcaagcttggcgacgtgtcgaccgtcatagtccggccattctagcctagccccgtccaatctagctccccggctagcttccctaaacgctagcaaagcttcccagccgctcggaccgaatgatacctcaccggagaagccagaacacatcgccggacttgttccgtccatccgttccctcggtataggtagtctaaccgtccattctttgatttcttgcacgcacacactccctaccactcagtgaacctccctgtgcagtctgattgagctctaccaccgtggtatggccggtataggtatcgccgacgagctccgccacctggattcatggctagaccacctccgggcaccagagacgtcgaaccgtacctgaacgtgaccgctagagactccccatcctcacccgacccttcgccggaacccaaccaacgccggtaagccgctccgccgtcttcttca

SEQ ID NO: 174501 - DNA, 395 bp, Zea Mays
attttgtattgaaaatcatttctaaaatgaattcatctgtctctggtccacgcacactaataaacggaaatccaggggcctcagcgcaagtgccaccaagaaacagaacccaactacgtggaccgcgggttgtttttaggtaaaccgaggggttcttgtgcaaaattaactggcgaaaggggtacggggtgatataggccacaggatcatggatgaacgatcctgattagatcggcatcaactgcgaaccggtatcgtatcctggccgacggttcgcaatccaacgatccacattttaaataccagaggtcccccgcgatccatccgatcgccaacgaacggacgcggacgaaactctaccagatctaatccccaccgcagcaaaaggatccgac

SEQ ID NO: 174502 - DNA, 504 bp, Zea Mays
gccatgccagatcagccggcagaagatctgctattgtacatctcctgcacgactcacgtggtgagcactgcgttagtagtcgagcgggcagaggaagggcacacatatccagtacaacatcccgtctatttcatcagtgaagttctgggaccctctaaaaagaagtatcctcaagttcaaaaactattgtacgcagtacttctaactgctcgtaagctccgtcactactttgacgaccacaaagtcatagtagtcaccgggtttccaataggggatattcttcacaacaaagaagccattgaaagaatagccaagtgggcctgcgaactgggagctcacgacattgagtttcggcctcgcactacaataaagactcaagcactagttgacttcgtatcagaatggaccgagcaacaagtaccagacaacccggaggctgcagaagtatggcgaatgtatttcgatggctcgctgaaactgcagggagcaggcgcagggatcctc

SEQ ID NO: 174503 - DNA, 723 bp, Zea Mays
cttggagactccgtcgtacgcgtaggaattttcgtggggcgcgtggccaattggggcgcgcgaatttctgccacggtgcttgccatcgccgccgcgatttcttgacgccgtggccagccacctccctgccttcctagccggtaagccctctttcgctagcttcgccatttcccttttatggtagcagtccacgtcgcgcccgaaatagagtcgctgggtctttcgaattgctcaccggagctccgcggcaaccttatgtcgtggctggcattgttcggtcaccaccgtcgtgtagccgtagcccgtagtaatcgccggtgtgggccttaatgaatgacttcagatgatcgccacaccacataggtggcgtatgcgagcttgaatcgtgcgttgggggggattcggccatggcgccgtcgtgggtttgggcgccgtctgggtccggtcggcagggggtgaggaagagattggtgtgatcgtcgatataggcgtggacggctgagggctcgcagtcccgatggggcgatggttcatcgcagccgttggtagtgagaccaacagtccggatcctatcatgtcataccccttcgccatgttcagtcagggccgtcgatttggatctagcggatgaggttaaatctaaggcaataatatccccatcgttgaatcccgatctagcggttctggtcgcatgcttattcctccgcggtaggatgtaatcgt

SEQ ID NO: 174504 - DNA, 886 bp, Zea Mays
gagccacaggattagaaaccaagggctaggattagatcggccaaacactgaaccagttggttttctaggccaccggattgaggatcgacggtctagattttaaagtcacgcgatcgattttcatccgcccgatcgagatctaacagccgcgggtgaatcgttatcgcgcttctaatcttcaccgttcattagaaaatcaacgccacacgccatcacccccaacccagccaccagtagggcggcgctacacccaaccgcggtggagggttggccggagttcagccatcaggcgcaccagtgccccaatttacaagcccatacgcgctacacggtactgagatcaaggcgaattggtcaagggcacacttacccatagttcggacgccgaggtattccgaccacgggtggtgtggatctgcggcgaccctggcctgccggtgagaaattccgcccaacgcgcttcttcgccgactgggattcttccgcgcatccatcccgtaggcaccggcgagcaccatgggccttatttcgtgccccgaactgtgactggatcgaggaatcgcgacggcaacgtgagttctctctctcacccctcagctcacgcgatgcactcggctttggcacaaacagatgagaggagggggtcgcggccggtttataggggcggggagagcccaggcgtgcacggggcatagatccgcggttcccggtggcggataaggatttagttgcaactccgagcggacaggcgagggatgcggaggttcgctccaatggagacgaagctgacaccggggccccatccgtccctaaccaggcatggcgcgctgagcagctgagaagcggtcccaccagcgcagcccgtgagcgagcgagggaaagcggc

SEQ ID NO: 174505 - DNA, 389 bp, Zea Mays
taaggttcctatttatttcaggaacgtgttgcacattcttcaaagagagagtctttccagaggtcaacttcaaatcaactcttcctattctatgtacagcagcccttgacccattgcccatcaagatagcactacaatcgatagcctcataagaagaaaataagtttagatcagaacaaacatgtacattggctccagtgtctaaccaccaatcggtggattgacatgctaaaagaatttgagggacatacccataattcccagcatcagcaatagccacatttgtagttttctaactatcacatttcttgcccttcctattacaacattttctggctatgtgaccagattcatcggacacaaagcaagtcaggtctgcaaggtttttc

SEQ ID NO: 174506 - DNA, 566 bp, Zea Mays
tttatttgtatactgtggtatgtagatgatcgtgatgtaattgaaactttgtcgccctaacatggttttacgttccaggggtaagggctcaaggagtgttctcaagcgtctgaaaaatgggacaactatccatgatgctggctacttcattccaatagagctggatggtccagaggtacacactcctgttctctttcccttgcttgctttgcttgtattttttcccattctctgctagctgttatgagtggcttttcatcttctgatggtttagcaatcttactgagtgcgccactcgctccaggacgccctgttatccgttctcagaatggttctgcgcccatcgcctgcagaaaaaacacccgatttgaagcatctacaggatcaagttatgcgaggtgtttgctatgagaatgctatggtatttacatgttcaccacaagacagtatggggtacaaatgtttgaagtgacaactgtgacttaattgttctttccagctttgggatgttaggagtatgcattctcaaattgttggaccagtaacatatatgtggcgtccattct

SEQ ID NO: 174507 - DNA, 555 bp, Zea Mays
tctagtcgccctcaaacacctcatctcgagaaacaggatgggtcaagtcccgttcctcagtggcattatgatgtcggacgttgtggtgtcagttctgacttgcgttgcgggggctcccctacatggtggtctcgtcatcgcagatggggccatcatctatcccccccgtttatgaagagcacatcaggatagtataggggaggcttcgcctctgctgggttgatggttgcgattatagaccgagtgatcgtggcatcagtcggccatgccttagggctcttgaagacagtgaggctctcaaccctcttcctcctctgaccaatatgagttcatacctaggttggggaggtgagaaacatagtttttcgagttggaatagccacaacgcgtggccgagatgaaggtgttggtgcagctctacgtccaaccgacgcgatgacagttctatgcggtgcgctgatgaacctcggcccctaagcctgggcacgagctggtgcgacttgcatcatagtcacctgaggtttgggcatgatcatcaccggagttgccttgtgc

SEQ ID NO: 174508 - DNA, 634 bp, Zea Mays
ggggatctgaggtaggacggagtagctatgactaggctagtggtggtggactggcggtggacggacgccatgcgacatgcgcgcgccgctggagttgatagggcagtagccggtgacgtcggagggacacggccctaggatgcgtgggccaaactctggatgttgctgcaagctgctgcgcgcgtaaacaggagaaatagctaaccgcgaacggatccttgacatgcaaatgatttctctccgttatgaggggatctgaggtaggacggagtagctatgactaggctggtggtacgtggtggactggcggtggacacacgtcatgtgacatgcgcgcgtcgctggagttgatagggcagtacccagtgacgtgggagggacatggccctaggacgcgtggccccaactctggatgttgctgcaaactgcggcgcgcgtaaacaggagcaatagctaaccgcgaacgggtccttgacatgcaaatgatttctctttgttacgaggggatctgaggtaggacggagtagctacgactaggctggtggtggtggactggtggtggacggacgccatgcgacatgcgcgcgccgctggatccgatagggcagtagctggtgacgtcggagggacacgg

SEQ ID NO: 174509 - DNA, 533 bp, Zea Mays
tgatgcaccacgacgccaccataatccgaacctcgtccaaatttggagccaccgctgttggtccctataaattgacgcccccccccccccgcctgttccgctagtttgttacgaacccagagaactgcccctcccctcggattggccaccatagccggagaatttagtttttcctccaaatcggtttgccgcgccgcggtgagacaccgtgccgtggctagccacccacaggtccgtcctcgtccttcttgtccgtgtcttaacaccctcgtatgcttgtgattctcatcggctcaaccgattgaactctaccgcgctgtgtcgttgggaacgggctggaaaagcttcaaatccacgggtgcctgtagatcaagctctaggatggcattcgtgcttaattgttgatccccagtggagcgccaagggtggaattatgtatagaacaaattcgagcagggattatagggtataacggccggtacaagttcggcggtgtagttgctccgtcgtccttggtcggggacctggtcctg

SEQ ID NO: 174510 - DNA, 399 bp, Zea Mays
tctaaatcctagtccattacttgttctacacatctctttcaatcccctcctaactgacaggccgtgatgaggtgaggtgctgggctttatgacgttctccgcgtaaaccagtaaacaccagattctaaaatcgttaggccagatttgaaagcattgccaccagccatcaccgtgtttgcgtgactcaactcatgtgagctagcactcgagacgtgtgaccagatcagctagcgtcaacacatcacattgtatttccgcgtgtgagacctcacataaatttgaaccggtgttgcaaaacctcgctcgtcagatagtggctatatatggtgccacacaccatactctaaagcattttggaattaggcaggatgcaccagacaagagtgatgaaatcttttc

SEQ ID NO: 174511 - DNA, 626 bp, Zea Mays
gaagaatggctcaccggatatctcggcctacgcgcggtggtgggcgaccgaagtccgacgacggtgatcttgctattccggtgaggcagggctttgatccttgcttggagaagcttcacggctcctcggagaaactgtccaagggcttggttgaggctgagggtctctagaaatggctggccgcggtggccggcgctcgggtggcacagagctcgctggagctacgaacggtgtctagccagcgaaggtgagtgcagagtgaggcgaggcgtgtctgggtggtcttaaaggcacgtgcgagcacgaccgaggggtggctctgacacgcgctcggggtgtgcgcgggccagcgccagtgcacactctggcgcctaggcacggcgtcgagcacaaggcagcacagagagaggtcaagttcaagcgcggattggctccaaatcttcacgattatggccatgatcccgttgagagacctattcccctgacattcctttgtcatttgtgtgtggaggcttatgggttttgctgactggatccaaagatatggagtgatgaagtttggtttgtctcactgctgaactccgagaggaaatcccagatttgacgtgtctagggcacgaatctcg

SEQ ID NO: 174512 - DNA, 621 bp, Zea Mays
gtccccaagtccctgaaactgattgaggcaagtgccaatatcctaagacttagtgagaaacgactgagtgttcgcctgtgtgtctttcttgccccttggaagaactacactgccctatttatacatgttggagatgttttctgtgaatactggggtcgttgaattccaaggggagatgtcttggcgccctgtaagccgacatgactgtgcactacattgttgacttgtgttcgccgatttcctactgagagccgaggcagaggctgaggggttggccatacgcccgagcccccggggaggggttgcccataccatagttgttgtaacagcgctgttgtatgggtaaaagcctacttccgggttgcgtcagcatccctgtgcggggtgacgtcatgattccttgctgtgtttatcaaggttagagccttgctcgggtgacacagaagtgttctcgaggcgttggttgagccatcccttgacgtgtgccacagtcggtagagtggtcactcgcaggattcgcgatggagtaggtatccgaggtcgagctcgtgtgaggcggagaaatcacccgaggccgaactcagcgtcgagcgagacggagattgtgcccgaggccgagct

SEQ ID NO: 174513 - DNA, 518 bp, Zea Mays
gccggggacggtgtcgaccgcgcgggccacgacgacgacgcgcacgtcgggctcatgatgggagccagcagcgtcgggttcggctctggcggcggggcggcgccgtcgtactacgcggcggcatcacggaaggcgtacggcgcgggggaagggtccaaggtgatggagttcgaaggcgaggaggagaacggcggcgtgcagagggggaggggatttgccagccacctccacggcgccgtgcaatggtgaaccaggtgaagggcggcgtagctataactaggtgcgacgagaaacgatatttgcatggtgctggtctgctggtgactaaatttgcgtgcgtacgttacgtactagtaattgattgcagtttctgctctccgtcaaacgttttaatgagatttatttgaatttaaactcaaatgtttctattgaccctggaagaatttcgggtagttgtgcatcgttattgacctcttgttcaacgaggtaaactgatttgatgaagagtgaaatatgaa

SEQ ID NO: 174514 - DNA, 303 bp, Zea Mays
ccacaatctgatctatacgcggcagtggatacgggtccttggggcatgccttattcaggctggtgtagtcgatgcacatccgaagcttccctttggccttcggcacgacgactgggttggccagccacaccgggtgatgaacctcttcaataaagccagcgtgcaacagcttctggacctcttctcggatgaagtcctgccgttccacggactgtctttgtggcttctagcttactggcttggcgtccgggtaaacctttagctggtgctcgatcacctccctggggatcaccgacatttgca

SEQ ID NO: 174515 - DNA, 371 bp, Zea Mays
atgagtgtgtctctcagatggaattgaaggagatgatgcacgcgatgactgaagcttttaaaaaataccaggactctacggcgacatcctatgagcagcttgatcgacgagttgctgaacttgttacacgcatggacgtactggaggctcgtcccccaccaccaactccagccccatctcactctcctgtagaggacgacggcgatgtttatgcaccgctaccacaacgcctcgcacgtaatcgacaaggtatgggtggtaatggtagacgtcgtcttcataatcctaaaccagaccatgatccatttgctaagattaagttctctattccaccgttcatgggttcttatgatgatgaagcttacttagac

SEQ ID NO: 174516 - DNA, 300 bp, Zea Mays
ctagcgtagagagaacgaagtgagccacgcacgaagaaattgccagagatatgggccgccccattactttgctcgctctgctctatttggaccgcaataagacatccagcccacgacgtctgtggcttcgtttttatgggtgttgcaactttaaattagtaccatatggactaccaaatggtgcagaaactggcttataaactcaggtgcggaggctgtagtaccgtttctcagttcgtcgtgtaggcgccccgaggaggcaccaagacagtctgcaacgccacactcctaatctgtgtt

SEQ ID NO: 174517 - DNA, 398 bp, Zea Mays
aaagtatccaaaatcttgatggggtactcagcataagtcaagtcctcttgaacactaaggtcctccattggtaattgctcctcaggtaccctgagacatttcttcagctgagatacatgaaaaacatcgtgaacatctgcaagatgatccggtaactccaattgatatgcaacttcacctacttgctttaagattaagaagggtccaataaagcgaggggacaactttcctttgactttgaatctcctcataccccggagtggtgacacctttaaatagacataatctccttccttaaactcaagtagtcttctccgggtgtctgcataacttttctgccttgactgtgcagttctcaaattctcccttatttgctgaacttgctcctctgcttcctg

SEQ ID NO: 174518 - DNA, 761 bp, Zea Mays
actgttgggctggcccattagggttccaagccgtgtaatagatccaggcgattaggcccagattagcatctataaatacctgtaactgcttctggaagaggacgcgatttgaataaagaacacattccaccaaaatctggaacttatctgagcgtgactgggaagtcgtcttctccagttggtcgacttctcacgctgcgggagctcgccgtcagccacgggacgtcgatccttacacctggtatcaaagctctccttcctcggtgtgggttggtgatcacaagggggctaggttggctgtaggaagaagaggaggtgatcaccacggcgccctctgtcaaaccttcggcgcagtccaggctggtgttggaagccatggcgacagaagctaaacaaggggaagcaaggtgggacaagatgatggtgatgatggagaggttgacagggaaagttgatgctatggagaaggtgcatcaccaactattgggacagtcagaattgactgccgacttggtgaaacaggctgcagatgagaggacaattttatccaggcgcgtggaggagaatgggaaggcgttggccaggatgaggttggaagctatggcgagagagatggaggatgttggcacgggaccagagtcatcggatacaggaggtagaagaggggccataccgaaccaggatcagggaggaagggagttgcaacaacatgtacctaagatgcttttccccaagtttggaggcaaggaaccggcgatttg

SEQ ID NO: 174519 - DNA, 645 bp, Zea Mays
cggatggggctcctgcgcgagtgcgcgacaggtaggtagcaagctttcctcacgagaaacggaatccctccctcctggcacgccgcctggacccggttagcggaatcgctcgtgtagccgcagcagcagttgtcgattggagtcattggacaatggctagctataaaaaggctaacacatcatcacatagtaaccctcccaaagctgactgcaaaagatggcatcctccatctatggcaattaaacaaacacgtagcagcagcttttatatactatactcctagtagtatatctatctctatctacgaaaacgtaccagcagcgaccactgctccgctccgagtccgagcacgtaaatttcacgcgaaaaaggcgaaaccgcctactttccctcaagagtcaagatctactactagttgccactacctcactccctccatgtgcctacgaggctacgaggcaccggcgcgtcaccggatcgccttcgggtttccttgcatatcaaactgattagtgattaccctgaccccagtggcaccgctgcaaccaaccgcgccgccagcggacccgtccttttgcatgtactactactagtactgtactctgccggcccgacccggcccgtgcagcggccgccgcgcgcgg

SEQ ID NO: 174520 - DNA, 347 bp, Zea Mays
ctggccacgggtgagcggttctcggtggcgcggcaatcggatttgggggaaaatggcgtcgcggcgtgctcgggtggaattgaggatggagcttggggctacacggccgcaagaggttctagttttactgtgcacaatcaatttgagaggagggggcaagacaacgcgaatttggcttcgattcaacccacggtgtgtgtgatggtcgtgcctcgccgggaatcacagggctatttatagccgcggcggtccggcgatcacctcacggccacggatagcatcacgagcgcatgccgaccacgtcggtaggagacacagtgagggagatcacgacatgagtgccaccg

SEQ ID NO: 174521 - DNA, 533 bp, Zea Mays
tcctctgcgcaagggaaaaggtcaaaaatcggaaattctcccattcttatagaacatgtgatggccgatgcagttgatcgttacagtcgttcgttgttgaaatccttctcgggtagacaagatggcccacgcagtgcttttgagttaccccccagcagatcatgatctatgcaggtccagaaatgggggttcttgtctcgaatcatgagatcactggtgccagtgaccgatgttctggttaactcaacatggaatttagatgtgaaaaatgcagtatcatagatccataggccattcattgggggaaagtagccagcctcttgcagatgtagacatctagctgacctgaacgccaccaaccccggtgtcccttctcctgatagactcgcttgtcagcagccacagtgacgcttgatggctcgctcacatagaagtaggtaaggtgcgcctgccactagcatttaccgaactgactgacgtgttttaatgtgccagatctaatagctagttggcaaaaatttaagtaaaattag

SEQ ID NO: 174522 - DNA, 712 bp, Zea Mays
cgtgtgccccggcgctggaacctacgcgcttctgctgcaagaatgcgtgaaccggagggacccgaggctcggcaagaggatccatgcgcgcatggtcgccaccgggttccgctgcagcgcgtacgtcgccaccaagctgctcatcttctacgccaagatcgggcacctcggatgcgcgcagaagatgttcgacggaatgccgcagcggagcgttgtcgcgtggaacgccatgatctccgggtgcgcgcgcggcagcggggaggcgcaggagcgggcggtggagctgttcagcgcgatgcgcgcggaagggctggcgccggaccagttcacgttcgcgtcggtgctgtgcgcgtgcgcgaggctggccgcgctggggcacggccgccgcgtgcacggcgtcgcggtcaagtcggacgttggcggcaacgtcttcgccaacagcgcgctcgtggacatgtacctcaagtgcagctgccccgaggacgcgcgccgcgtgttcgcggccgcgccggagcggaacgtcacgatgtggaccgcggtcatctccgggcacggccagcaggggtgcgtcgacgaggcgctggcgttcttcgaccggatggcggcgagtgggttccggcccaacgacgtgacgttcctcgccgtgctctcggcgtgcgcgcacggagggctcgtcggcgaggggttgaggcgcttctcctccatgtcctct

SEQ ID NO: 174523 - DNA, 445 bp, Zea Mays
caccctgactcaccgtgcccccgctcccatcatccccgctgagatgccagccaagtcgccccgcgccgctccattctcgccttcacgccctgcctacgcaccctgtccccaatccctccgtgcacccccacttcgctcgctatggcaagactaccgcggccgccctccacccccgcttcgctcgctatggcaagactaccgcgtccgccctccatttaaagggtctgatttgtggacatcgcaacaatggaggtgctccatcctcccaggcatctccgtcggcgacgggtactgtccatcctgccgcgccccacccgcatcttacatgcccctgcctctgtcaccaatgacgcgccaaacatcctccccacggcggcggcgccgtcgactgcgccctccttccatcctcgctcccacgtctcgcccacgatccaccggagctgcg

SEQ ID NO: 174524 - DNA, 289 bp, Zea Mays
aattattgccgctatgggaagggccgttcatggtgtcggaggtcactcagccaggatcatatcggcttactcaaatggatggcacggaagtagggaattcatggaatatagagcacctcaggaagttttacccttagcaagaactatcggagcaatgttgtattctgtaattggaaaagacgtcttcaataaaagatttcactctcaaaagcattcaagctattggttatccatcgacttcgacttgattaaacttggaatcaaaacacttactcgacatagggtgacc

SEQ ID NO: 174525 - DNA, 1246 bp, Zea Mays
ctgattttctgggcaaccaatggcttccagtttccttttgatcgtgcgcatccaatcgtctgcatcgagggggttgcttgatccggcgaacgtgggaggtttgagtctcaggaaatcccccattctgtcttgtggtcttccaccattcgaccgttgattttctagatttcgagtgaggacctcgatgagtcgggtttgattggctagaacttgggctaggtctaagggtagtggtggaggtgcggggaggtgggtttcactttcctctctaacagcttccccttcagctatcaggggaaaccctgctccaatcccggaggcggtaggcgtggttttatccgaagccatctgccagggaagagagttactattatgcacatgcaaattgttttcagccaagttatttcattcattacaccatcacattacaagcataagactactacaggtggaactacacgagagcgttccccgaggtactaacgaactccttctctaaggtgtccccaaatgccttgagaagatcatcaaggcttgctagggatatatcctcatcgtcggaccaatcatctattctggggggaggtagggctagaggggccttcttcttctctgtttggcatccttggtcggtggtcttcttctggattttctttttgggggcgagcttctttagcttcttgtcatagtccatcttcaaggttcgataggcctcacgggtgttggcttcctcgccttctgctatgtcgagactctcctggagggatgccttctcttgcttaagctctttgacttgctgctctaggctttccacttgggagtttaggtgggtgcagtgggaggagagctcatcgtagtggttgtcgagggtgtggaggtattcggccatgtagacgatagtggggtcatcttctgtgggatctcctcctgacagagcctggagtcttttcatccaggtgggggtgtttttgttgctgggtgggaaatatcggaggggggtctcagagatctctcggctatagttttggcacagttgtttaagggctttttgagcaacgccctggcaagtgtctgggaagcggtgcccgatgaaggtaatttggaagggagggtggtttgggtagttccggctttctcccaagtagaccgccatagagcacttttctattccattttcacagtactccttcgagacatattcgggcttcttgcggatccccatgcgtagtgcgcaactccgaagaag

SEQ ID NO: 174526 - DNA, 624 bp, Zea Mays
gcggagaagtcgaagcctttgacgaaatcttaagtgatcagggagacttctgcacattcgttggtgcacgaggggtcgcggcgatcttagagaaagccggttgtgaacatgttaaggctgcggctcagccgggatttgttttctcggcggatgacaccaaagacccttcgactgaagcttctacgttgggcgagagattttactccgatgtgtggatgaagggcggtcgtcagatggctgatgaagcgattagaaaaaatgagaaagaatctcacgacgctcaataagaagctaagcgagctaaagaaactactgagcgcgcaaggcttataggtatttttactgaggtttagcttcggagttcgttttcagcttcggaattaaccaacatttttttattgtagctgaactttcacctccaccgaaacatataacccggaagctgacccgaccatgaaggaaacgttgaacataataagaatcactaatgaagctgttgacgaagccatcgacagactgctaaatgaagctgctgaaaaagtgctgaaggaagactaaatttttgtatacttgaaagtgtaatgcttgtgtatggctttcgtcttttgtaagaaacaaacatca

SEQ ID NO: 174527 - DNA, 381 bp, Zea Mays
aaggactgcggcacctactgaggtgacgggtagggcagatccgtttccaacaacgatggaagaaggaagggaggggtgggaggaggtggaagacaagatacctacgtccggggtggtgtggtaggaggcaccggagtcagccacccagtcagaccgaggtgggtggggtcagcgtcatcgtggaaaaggagctggcgaaagactgcgtgtcccacccattggtccaggtcccccacacgggctgagccggaggccccaggagagggaggagcccctgctgagaccggaggggagccgaggacgcagccggtgggggagcgacaaagaagacctgctgagaggtggtggagcgaggggccgcagcacccgcggatggctcgg

SEQ ID NO: 174528 - DNA, 969 bp, Zea Mays
ttcttgagcagcaatgagagcataatgagccatactatcagtgtcacgatatcgatgtggcaaaacaatattccttctaggtctatcttgagcaatagagtgattgttgctaataggaggtacagaaacataaactgactttgtaataggagtaatagaatcaatattaataggtacatctacctcaagattctcatcagtagttttatgcatatatgtggatgaggaaccactatcagaaacacctccataggaagaaaatgtacttttatcaaaagtaacatcacgactgacaatcaccttcttagaatcaacacataataaacgatatcctttgatatgagaatcatagccaataaaagtgcatttttgagctctaggcactagcttcccattgttaacatgagcataagcagggcaaccaaagattctgatattagaataatcaactggtttacctgtccatacctcttctggaattttaaaatcaatagctgaattaggagtgcgattaatcaaatagcaggcgacattagcagcttacgcccacaaaccatgcttatcccataaaccagcattagaaagcatgcaatgaacacactctagaatagtacggttcattctttcagcaacaccattctgctggggagtatctggaacagtcttgtgtctagcaataccatgattagcacaaagagaactaaatcgctattgcaaaattctaatccattgtcggttctcagtttcttgatttttctgccagtctgattttccactaaagctttccattgcttcaatgtagtcagagcatcatttttatgcttcagaaaataaacccagactttgcgagagaaatcatcaataaaagtgatcatataatcacaacgtccaatagaagaatgaggagcccgaccccaaagatcggaatgaatatactcaataatgcctttggtgcagtgagtagataaa

SEQ ID NO: 174529 - DNA, 678 bp, Zea Mays
gattgagagctcccgtttagatttcatacgtaagaaccaggatcggttaagggtagacctataccagggcttggtggatagcatgttagatggagatgttagggcacagaaggttggaaagtgaactgtgttatcagcgtcgtttattggcggtcctcgtgacatgagacgtcgatatatggatgttatggctctggtgcggaagtttggtaaaccagacatctttcttaccatgacatgtaaccctaactgggatgagataaggagagagcttctacctggacagacaccgcaagatcgtccggatcttgtagtgcgtgtctttcatgcgaaactataggagctaaatcataggttgactaaataggatattctcggtaaagtccgagcctacgtctacgtcgtggaatttcagaaacgaggtttgccacatgcccattttctactcatcatgcaaaggaagtacaagctcacgtgccctgaacagtatgaccttttgatcttagctgagatcccatccaacaagtaccctgaactacgaaagatggttatcaagcatatgatgcatggcccgtgtaggtcgctaaaccctaactgcccatgcactaagggtcatgcatcatgcaagaatcaatacccccaacatttccgtgaggcaaccttgcaagggaaggattc

SEQ ID NO: 174530 - DNA, 404 bp, Zea Mays
cgagcttgaggaggcaaatgagcacctagagatgcatcaccaggagatgcacaccaacatggaggtagacaaggatgaggaagtggatattgaggaggaggaagatctcgaggagccagagccaacctctagtttggacactgagagtttattcttagggtttgtcaatcattgatttgtcatactagtagtagaggtattaggaagttgtactcctcacggtggcctagcttttggacctcatgatgtaataggctagtgagttgagtccttctgacacaggtgtaacccatggtgaacttcttttgtgggaagagaaagcgtagttctaagtttcaaaaaagtgattcgagtttcaccattcttttagtacaaagtcataataatgctatgtaaactggaat

SEQ ID NO: 174531 - DNA, 612 bp, Zea Mays
atgtgaggtctagacacgttgccatcttacgctggagtctgtcatttagtccactcctaaaacaattcttctttttcaagtctgtatccacttggtcaatggcgtactgggagagatgattgaatttattgagatactgcatcacagaatctcccccctgcttcagtcggatgaactctttccagtttcttttgtagcacgcctttcggaacataatgttccctaaatgccaatttaaactcttcccaactcacttgatgtcccgtaggttggatggtggaaaagtttgcccaccaggtgctggcgaggcctcttaactgctaagcggcaaatatgggcttctgaacctcggtgcatcggattagcccgaatttatgttccattactcgcacccatttgtcggtttccaatggttcctctgccttgacgaagagcggtgggagggtttcggagaactccagataggtagtatctcgtggtccttgagggggaactctccctctgcgttgttgaaattggttgcctgccatttcgcgcagaaagcgtgtgttgtcagtggtggcattgaccaaggcagcgatagcctcggccatggtaggaggtaccggtggc

SEQ ID NO: 174532 - DNA, 425 bp, Zea Mays
tccaacaatatcgagtccccaacgttgtagtggccaggtgtgtgcggtgagctttgtaaactacgaaggggtgcccatgcgaggtgagaatttttgacatacttcgcacgagcggaccactctgttggctatgcacacaatggctagctagtagaaaccttggtgcatgaccttagcagcaagagctctaggtcccgagtgtgatccgcatgttcctctatggaccccgcaaagaagttctatgccttcgacttcagttatgcattttagaatgggttggcttattcccttcttgtatagttgttcgtcgatcacagcgaagtcacgacttttgtgtttcaaccttttggcttcgctttggtcagaggggtgataatgaccttcaaggtataaggtgataggtgcccgccagtcttcgatcatta

SEQ ID NO: 174533 - DNA, 588 bp, Zea Mays
gggttatgattgagaataaaagcatgaaaattaagaacagaaagtttcatcaagtttgaacttgaaatagaaatttgaaaaatgtgaaagggattaaaatgaaaaggagaagaataaacctctcttgggccggtttcgcttctttgcggcccaagttacccccatcccgcctcggcccattaagtgcgcgcccctggcccaactgaccacctcgcgccagtcatccacatcatgcactggcaggcgggtcccacccgcaagtctcacgtatgatgccactggcactgcttgtggacccgtgctgtcattctcacctgcgctcggacactgatcaccggggccgccttgacagtttgtccttcctccccaaaacgcgaatccgcgggcagcgcacaacaaactcaaccaggaatcacggggttcgttcactggaagatcttcccatgggctataaaacctgacctccgtgctcccctctactcatcacaacaaaaccaagaagctagaagctctcgtcgccatagctgggtgtgggagaggggcgaaaagaaagaaaaggtgggcgccgtatgccaaaatccaatcgtt

SEQ ID NO: 174534 - DNA, 445 bp, Zea Mays
ccttagaccatatgttgaactatcctccagtgttcactggcatcaacgcctgctcgctttgcccagggcatgcatattgccatgtctccctacatagacacagatcaagcgtgtctcgtgtaagcccagggtcccaccaagtatcttcgaggttaatgttgatgttgtcgaggatctggacatggctcatattctggttctgaagacctcatgccatgcccaaagctgtctgccgtcaagtcaaggttattagtagtagtattcacattagtccagaatctgaacacgacagacacttcggttacgaagataccaccaccaccttaaaaaccgaagatattattccatgtgcccaacctccatgtttcctgcgccgcaagtagggccgcgccatgtgcccaaagtgttgagttgttgatccaaattatgcatatcagggttctcg

SEQ ID NO: 174535 - DNA, 274 bp, Zea Mays
gaaccgtcggtgctggagtacgtggtgacgaagagctcgctgtagcaagagtcgtggctggattgtgtggtggcgaagagctcgttgtagccggagctagaaagcgtggcgctggagtcggtggagacttgggggctagggtaggcctactcggagaagggtcgactactcccccaactccctcaaattggacgtactcgatggtgaagtcatcgtacgtcggagtcgtgccgtcgtccaccgccttgtcccaggcccatcttcgccctttgtc

SEQ ID NO: 174536 - DNA, 508 bp, Zea Mays
aggactccttgctcatctgtcctaagatccagaagttgctccttgcgagctctttccataagtctggttgtctctgcgtccaggcgttgagccttgcttatgagatcttctagcattggcttaacttccaggctaccgttgtctcccagacatgcatttagctgagctgattctttcttccaatcttctaaaaagttggtccctttaatcccgaaaggtttttggctaagggcgtctgctaccacgttggccttcccggggtggtagtggatttcgaggtcataatccttgatcaattcaagccatcttctttgacggaggttgaggttcggctgagtgaagatgtacttcagactcttgtgatcggtgaagatgtggcatttgttcccaatcagatagtgcctccatattttcagggcgtgtactatggctgccaactccaagtcgtgggtggggtagttctgctcgtgtggcttgagtaagcgggatgcataggtaataactttct

SEQ ID NO: 174537 - DNA, 425 bp, Zea Mays
cgtgtccggacgccacagataaggggaagaaaagggggaaagcgcccttaccgttgatctagggaggtgcggtcaggattagactgtggtgcggggtcgtgtagatagtcgatctcgaaacgaacagtccggattgccctgtagcgtaccagttcggtgagtctgatcgcaaccgttggatgggaatcaaacacgtagaaaaccatcctaaggattttaaatctaatccgtaggtttcggatctggcgattgggatttaggcagaccgtgatctaatctggggcacgcgttttagatctaatggctgacctcgtcccataccgcttcggcatggaagttttactaaagagaccttggaaactttaggaattaacccgctgtccagtgcagtgttaataatattgctattaggtcccgaaattcac

SEQ ID NO: 174538 - DNA, 582 bp, Zea Mays
gccgtataaatactgttttgtattataaattgtataaaattgaagtttgaaataaaaggttagatagcagttagatagtagagctgcttgaggccgcactaggagtgctgtcgtacctccaaccattacatagaggacagacttgatagtttggtccaatgtctcgtctcatagagagggaacagcgcagcagcagcggtccaagcaaggcccagcagcaaggcaaccaaaagctagcgatagcggccgcggctgctggatcgccagctcgatatatcagccagtggccggcgaattgactctccgtttaatgagccgagcaggagcagtcgagcacagtgtagtggctgcatcgagaggggagagagaagggaggaatcgaggtggttgaccccgagattataggccttcaatttgcgtttgcgatccaatccaatcctctccaactccaccccacgacgaagatgcatagtatgcagcctgcattcaactgatcgctgagcgccacctcattgacccggacctcccatccgcccagacggccagaccagcaccattgctttcctagctgcggcattccac

SEQ ID NO: 174539 - DNA, 1063 bp, Zea Mays
ctggatttctttttctttacccctcctgatccccgacggcgatgaacttagcagagctccggtgagctcacagaccgaccgattggggcaacgtctagggtctccaagcgactgacacgaaattggatctaccccgaccttttcccctaacataatttcactaatggccacaaggtttggtctagccacggcgaccgtggacaaggcggaccgatgagcgcgttcccgtggattcatggcgatccagtacaattaaggggttcaggaagctttagaagagcctagggacgctagaacaatcaacagagaagtatgaagtcacctggaacaggctgaccatggggagtatacaccgcatggtgttcttggtggatttgggaagaataaaaaattagtgcttactggtgagggtttggggatacaggtaggtgcagtagatgctggaatccatggcagagccgaggaggtgctcaatttatagttcccgttgtcggtggtgtccaattccacgaagttgtgctggcggccggaggaaagcaggggtactggagcaggggatgggtggcgttcaccgtggcacttcctccggtgagcaccggttgaggagctacggcggttaccggtgagctagtgcggctaggaacgacgtggtgaaaagctttgagcgtggcacaaccgcagtgaggcacggcaactccggtcacggccatgaggccacgtcgccggtgaaaaagggcaggagacagtgaggccacagtatctcatactcatccgcgacgagatctttacctggtgaacgaaatccctacgcccgtggcacgaatcccggcgaagaggtcgccggcggtgaacattttgcgctggcggtctgatccgcacgagcactgtaccatggccaactccatcagacagcctgacagagcattttggagcttcattttctcccagattcaaatggcaactctactaaagctctgcagcaaaattgtagagctataaaccagctacaacattgctatattgtactgccacaaaaagtcaatggagcctgcttgaaattaag

SEQ ID NO: 174540 - DNA, 470 bp, Zea Mays
ctggcattctctctgctcctctggcaatttctcctcctcggcggcgaccctcctctcgccggcggccgagctctagtgatctccctcggtgcagcccttcactcctctctggtaaccagcccctgcttctccctcggtgcagcccttcactctctccctctgtgctgcctccactctctcccacccctctatgcacttcttcaaattcttgtcaaatttagtgaatgaagtgaatccaagtggttggaggtgttcctatgtgtctcttgaatacccctgcaggttcctagctccttagggagggtttcacagccttaattgaccatttctcccaaaccctagaacactgcacgccacgtgctcggcgaaatgcccaaaccagccaaaattgctccgattgaacccaattttttcaggcaccttcacaatacctccagtaacatattcgcaaaatttcacgccaatccgat

SEQ ID NO: 174541 - DNA, 954 bp, Zea Mays
agcgtgagcatatcacaccgccttaagtcgtcgccgacttaagtcgattgctctgttagtagggtatagtggtcaccctgagttatgcgtgagcatgttacaccgccttaagtcatcgccgacttaagtcgattgctccgttagtagggtatagtggtcagcctgagtcaagtgagcgtgagcatgtcacaccgtcttaagtcgtcgccgacttaagtcgattgctccgttagtagggtatagtgatcaccctgagttatgcgtgagcatgttacaccgtcttaagtcgtcgccgacttaagtcgattgctccgttagtagggtatagtggtcaccctgagttaagtaagcatgcaggttgacagtaaacaatttgagcgcctttgagaacgaagtctttttattgatgatatattttccagtttacagaatacaaggccgtcccaatagcttttgaaatatagctaggggtaaaacttcctaagatattctatattccatgagttcccaatttccgtgctgtccatttgagtaagacgatatgatccaggccgagtgacttctgctactatgaatggcccttcccatagtggcaacaatcagtgacgtccctccctcgttagaattcggcggaggacgaggtctcccactgcgaaggatcgatgccatatggccttgtcatgatagcgcctcagagtttgctgataccgggctgactgaatcaccgtatttaatcgttcttcttctagtatatcaacatcctccagtctagtagcctcagcctctgctatgttttcaaagattaacctcggtgccccaaacttgagatcagcgagcagcactacctccgaaccatagtccatgaagaaaggagtgtttccatgcagagctcggctaggttgagttctcaggctccaaacaacatacgacagctctctgatccactttcctgtg

SEQ ID NO: 174542 - DNA, 984 bp, Zea Mays
cctaaaccaaagttttctacgactcagtgaacaatgtcatcaggacggcgggttgttttcaggtaaaccgaggggttctttagcaaatgtgctagggcgaaacggtatcggctcccgtgagccgtccgatccaaacggacgcgcgagattagatctaggttttatcgaaacggtacgcacccacggtggttggatccaggatcaacggtcctgatttaatgagatgtgatacgctctgatccgtccgatcgaaccccccaatggcccagatcaaatcgaccagggagaaggttggtttctaatccgaccgttcatgtcgcatcaaacggcccgcggcactcccacctccgagcagagccttcacggcggtgccgcccgaagcacggcagcgcatggccggaccgcccgctaatcctcatcgccgggccctaaagcttaatctgtgcctcccaacatgatgcccagtgaaaagcggagaggatggtgtaccgtttacctcgaatccgagcggtgacctcactgtccacacggctaggcggttctacggcggaggttgaagtgcggtgaggaattgaggccgtcccgaggatcaatcccgccgaacactaacagagacgtcctcctggtgactcggtgaagccccacgacctttccccaagaccccaacggcgacgacgtcgaggttaggctgcagcggtgttgtctgtgccaacacggcggcgcgatggtgctggtggaacaatggcagcgacaagggctcgatagggtggtccctgcggcatggtcgagtctttattccccctgtgctggtgaaccctggacccggtatccgcgcggtggttggaacggcgcccgagaagcgcgcggagctcgtggcgagttcgtgcggtcgcgagggagaggaaagcgctgacacgacagacccacccgtcagtcaacgcgcgagcgcggcacagaggaagagcagcgggccacttgacagcg

SEQ ID NO: 174543 - DNA, 1949 bp, Zea Mays
gcaaggtcatcgccctataatacatcatgcgccattgttgcatcatctatcccaaggcaagattagttcttcctgtgatgtactgattttgctacctaaattgtttagtaacaacacagtcttcacctttggtattactaaaagtatatgtcacatattttcttggtccacctattcctcatcgggtggatgccaacaaggaggccttctctttgtaccttttcaggttatcttagaggaccagccaagaacaaaaggagttgaacagctggagaaaccatttcacagtattgacagcatgctctttaccaaaacttgatttgagcacacagtgaataaataatgctaacgaaactaaactcatttgccccgcatagtttcagttatacagaatacaactaagattctataatatagtccagttacagaggaggcaaaaagtagttttgtgttaacatttatgttgcttttaccactagcctattatactcgctcccaaaaagggaaacatattttatagagcgaaaatccaaaccttacagactttgttcaacaattaatcaaattatataggagtttaggacatgtagaagcctcgagcaatgtctctgcccggtgcccagatagcaaaatgattgtggtgtttactgagacaccataggccagtaaaaaaatagctggtgcatgaggatttgcaccaccacaacaggttggtatgtcgcacaaccacagccacacaggcatacagtcaagactatggttgttccaattataatcaagataaagtgaaaatgcagcatgttccttatgcactgtatttgtcccattagcccaacaatatgtcacgtcccctctaaactatgaaggcaatactttaccagttgaatgttctgattagcttgaccgttgtagcatggagacttgcaaacataattagggacactattcttcgagtgcctctgttaattatagtgaggaattccctattgttttttttctcagatgttttgtcgatactcgagattgggttgtgtgcctaggattccatgttttttatttgagctttacttcccagttatacttctcattctttgggttttgtacctaatgacctatatcgaaacatctatggttactaaattgttcttaatcggatcaggtacaaacttgtcatcgtggctagggacaaaacgggtgaaactgagtttgctatgtttggtcggataacacagcatgtcagcatctcgtgcggaaaatggctgcagcggtgtatgccctgtcaatagcatcagcggtaatagctgattgggggaaggagaaagcgttttgggctggacatgtgagttttcttgtttgaattcagtattatcagatgcaatagtactatcctaattttgattctcgcagaactctaaggtgggtggtggaggaggaggagagcgagggaggacgacgaggctgcctggcggaggcacgaggggaaggtgagcgtcacctgcaaggccacaatcttggtgagactgccaccacgagcgtgccccacgaccgccaccaggatctcaagctcgccatcgatgacttcgacgaggagttgatcgaccctgagctacgcttctcgttccagcgcaacaacaaggtacaatcctccccctccccacccaaccgaccattctttaggtcacaacgagtgtgtatgtttttttactgttatcccgtaattggaattgtagtccattcagcaaaccttggcgctcctcacctatcgcagcctcttcggcatcgccatcagacttcctgtcatgctgctccaagataggcgtgcctgattttccgacaggtcagtcgatcatcaatcccttgccgatacaacataccgaactactccatcatcctgcacaaactaaactagattcattttccatttctgatatatacacattctgtgttaa

SEQ ID NO: 174544 - DNA, 313 bp, Zea Mays
ctggcattctgaaataagttattagcttacctgtctagtagaggccagagcccatagcccagactgtacattttgtggtaattaatgatggtacagcttcaatagtgaccttgcttcctccaccaacattatggagtggtggtaagccgcgacttccccactaccaaaaaatcagaagcgcacattcaacggcatcgtgatttacacaatgtggaacctctcgaaggagagaaattgtaggattttcgaaagcgtcgcccttccccggtccaattcgccttaagaattaaagaagatgtttcacaatttagat

SEQ ID NO: 174545 - DNA, 678 bp, Zea Mays
tgatgtgtcatattgatgtgtggtgttttacttgagtggacataaacacaatctaggtatcccttgaatagaggggattattggaaaccaggtatcacaaaaggtcattagctagcccaggtatcacaaaaggtcattagctagcccagtggaaaaaggtgccttacaaccttaacatatgtttggatagttctctctctcaatttggctaaattttccatagtctttattttattttgagaaatgatgtggcaaattgatgtgtggtgttttacttgagtggacataaacaccatctaggtatgccttaaatagagggtagtataggaaacctggtatcacaaaaggtcattagctagcccaataacgtcttcatccactagttaaactctaataccctctagtgtgaatacaacgcccacaatatcatagaaacgtcatttgaggtttaaaaggtgatctattgttttgaattctttatattccaactttttatcaactatatggtggaaaaaagttgccttacaaccttaacctatgtttggacagttctctcgtgcaatttggctaaatttcccatggtctttattttattttgagaaacgatgtggcaaattgatgtgtggtgcatccactagttgtactctaataccctctagtgtgaatacaatgcccaca

SEQ ID NO: 174546 - DNA, 591 bp, Zea Mays
cgttagagggaggagacgacgaggaccctcctcgccccttcaggcaggtcaaagggaaagacggtttatcttgaccagcaggagggcaggaagaagcgtcgtacgaacagagccgctcgtgcaacacttgcaacggtagcagcagcagaacagggaggatagttgcagatctcttctgattagatagcctacatagttcgtcgcctcgcatctcggcctcgctccactgctccactgctccctccacaccttccaccactgtgtccactactcctcttcccacttcactagctcctatcgctccagagccatccaccacttttgctatacccaccacctccaccactccagcttccattgttccccctcccgctcccatttctgcttcgcccatgcctccacctcgcttctgggagcatgacgagactgaggtgcgaccactagttgttgatccccgttttctcgaccttcagtgtgccactgcagaccgggtacatcggtttagacatgtacccgtggagtcttggttgccagctcagagggactttgcggctgcgcctctcttcattaccaggactcaggagtccttct

SEQ ID NO: 174547 - DNA, 587 bp, Zea Mays
cccgcgcatacgtgcgtacgcatgcaaattcgaaatagatagctagctacgtacgtgcaggtgcaggtccgggacgcatgcaacgacgacgacgtgcatgtgtcccagcaaaaggaacactggtatggtatctagtgtttttgtcttcgtagattgcagctgagggacaattcaaatagctggttttaatctcacgcgaactgcagcaacagcgccccttgtttttgaactcctcttgcaagtcaggttcctccaatccgatcgatcccaacaaccgactgtgacgtcgatcaaaccaattcattgaatctgggattagtgatgagacgagggaattgacccgtacctgcgtctattcgtttgtcctcctataaactcatcttacccaacaaataccactactaaaaatactttagaagacaatgcatctataattaacagaggcggcggtgacatctaaggatgcgtttggttggatatataaggaggcatggaagggagcagccaaaatttatatagtgtttggatgagagtcacgtgtggcgagataaacactccactgggcaaaagcctggccgaccgcttca

SEQ ID NO: 174548 - DNA, 432 bp, Zea Mays
ggatgaagtctgtgtcacctgtctcatcccctgcagtgagaagtagtttgtacctgaaacacatggtgataccgagtcaacacggtgaaaatggataggccgtatgtataggagatggaaacgttcaatcagggtgacacatagaaaagtagttgttgcatattagatgtgagtgggagtcaaaaccgcaagagctgttgggaggcaaaggtagaatggaggcaattgaagtgaagagatgttgcctaacctttggttgggcgtgccaatggtagcgcaaacttgatcactgcacttgtaggaatccccatgagccacagttgtgcgggtgcattttttgcatgcattgtaccaccacctataaccaatcttttttatagtgactgtcaccaagaattccctatcctgcacgaacatgtaaatatacggtca

SEQ ID NO: 174549 - DNA, 640 bp, Zea Mays
ataactgacctaggatccaacttcactagtttagagttcttcgatttctgcgagcaaaagagcattcagatcaaatatgcttcggtggcgcacccaagagccaacgggcaagtcgaaagagctaacgggatgatattggaggcgctcagaaagaaagtcttcgacaagaatgaaacgttcgcaggaaagtggatcagagagctgccgtatgttgtttgtagcctgagaactcaacctagtcgagctctgcatggaaacacacctttcttcatggtctatggtttggaggcagtgctacctgctggtctcaagttcggggcatcgaggttaatctttgaaaacatagcagaagctgaagctactaggctggaggatgttgatgtactcgaataagagcgactgaatacggtgattcaatcagcacggtatcagcaaactctgaggcgctatcatgataaggccatacggcatcgatccttcgcagtgggagatctcgtcctccgccgaattctaacgggggagggacggcacaaattgtcacctctatgggaaggaccattcatagtacaagaagtcactcggccgggatcatatcgtctcactcagatggacggcacggaaattgggaactcatggaaca

SEQ ID NO: 174550 - DNA, 845 bp, Zea Mays
aaaggcaagagccgatggcctgtacaagaacttcggatgctacaactttgcatatcagaaggacacaaaggcccccgtgatagtctaccgcaccaaatgcctgaccgggtggacaaacgagtggttttatgtgaaagccgacaagaagaaaagggagaaactcatgagcatggtgatgagtccgttgagattgaacttcggcatgacacgacccttgtgcaatatgcagttagggtctccttgccagttggccgaagtggagctcaggggcgtggctgagcacatcaacactagagacttagtgcaagaatacttggtgaacgagacatttccgacctctggcggttgaggaattgtgaagaaagaagaagggaaaaagtatgaacttgttcggcttccttaccggtttaagttctagaaaaggttcagcaaaccgtgcaatgaatggctggaattaatagaaactatgtgcaatgaaattcttggaaattatatgaagaaataggatcaattggtgactgctgccttcggcacccacccaaacgaaggtttaaccgtgtgatggacgctctgaattttgattatcctgattacgagaaacttgatgaaggggacggaggagctaaaaggaaaagaggtgtcaacattctaaataggcaggctatgcggtcagtcaaggaagaccagaaagctttaaagaagcaaaaactgtatcggagccgaaggattcggctcccaagaaatgtaaactcgtcaggatatcttctgtggagacgaaggtgcaagatgcgccagagaagactataggtccttcttcgccttctgctgctgaggtttcagaaatt

SEQ ID NO: 174551 - DNA, 509 bp, Zea Mays
gagattcatggtggccgagcattcctgaaaacggagtcgggtgtgtgaatcggacggggttcaccgtagggcgcgttcgccggtgtgcttccgccgctctgggtgcgcgcctccgtgctctggcgaggcagggaggttggtgacgtgctcgcgaccgttggatctagctatgcggtcgagattagaatcgcgtaccccttcgatttacgaaagcgatcggcccgttgatcatgagtcgtgtgggtcagggtgaatcaggagagttttaaatccgtgtcgctgatcgctgatcaaacggctatactatcgtaccgcttcactttagataggatttaatctgggtcgttgaagtgatcgagcggcccatagttcccgataccctttggccatgcgtatttgcaagaaagcccctccgtttttggcatatcaacccgccgtcctagcgctgtgcgctctgtgtcttaggaagttttgcaccagagcccctgtgttttctgtaattagttcgc

SEQ ID NO: 174552 - DNA, 503 bp, Zea Mays
gcgggcccgattggccatcaccgtcgtcacgtgttcgtcggcggtggaggggtgtcgtcggggaagatgagttgctaggagagggaagaagaagaacgaccgtggaccgtctatctgcttgtgtacggtctggattagatgttggcgtatcgattgggggaagggctgtggatcgtccgatcggaatcggatggagatcggtcctttgggcttcattaaatcctgagcgttggattcaaatctaggggctcttgtcgtataccgattcatcagctcaccgttctaatcgtgcgcgttgccgctcgatccgacggccagaaaacatccataccccttcgcggtgcacttttgcataagagcccctcaggaagtaggaaatagaacccaccgtccaccctcactgcgctctgtgtctatagaattttaccgcagaacccctggactttctgataattgacgcctagtccagagttgtttaaaaaccagagaaatgcatttaaaaa

SEQ ID NO: 174553 - DNA, 723 bp, Zea Mays
taaaaatataaatgaacaaaaattcagtttatgttgtcatgtaaatatagaaaattaacctgagtttgaacttcccacaaaaatagattcaaacttgaaatctaaatctgaaaagggagaaaacaaaacaaaaaaaagagaagcttgagaactcgactgggccgaatctggctggcccagctcggattccctcccgcgcagcccatctccttccctttcccttttctttattcctggcgcttacatgtgggccccatctgtcattcccttcacccaccactcgatgctcctgccgcacgcgcctgtcacctagctgggaacgctaaaccgtgtgtgtgacaggtggaccccccagtgctcggacttatctcctccactcctccgactaaatcgccgcccacctccgcaacggcctggtcgccgtggccgacttctgcgcgggtggcgcggatagcgcggtggtgacgcgttttactctccgtcgcttgggcccgagtcgtccggtcccccttcccaacggaatcgcgcacccaccgtaggaaccgtgccgcaaaacgcacgcatcgtgcgctccgttgaatgaatccccctagaaatcggacttgatcctgagtataagagtcatggcgcaatttactcggggtcttgggtggctcgcttgtgctccacgtgtgtattggtggcggcgaactctagccgtggacccgatacacctccgtcgag

SEQ ID NO: 174554 - DNA, 693 bp, Zea Mays
tccgcacaaacagtactaaaatatctgaaaagagccggtggccctcgtgtttcgcagttcgcccgagttcgacgacaccatcacctctccagctgaagatctccgcataggtttccctttaatcagcgtaatctcggcccagagaggggggtggggggataacggaaaggcgttcgtctttgctcaccataaaagggccttttcgggaagctcccactactttttgttaggacaagactcacccccatgccgtgtcatgccattgccacccatccttgggagctgcagctgcctatataataccaacagtgccgaagcaagaacatccaccctgcaccaccaccaccgggcaccagcgtcgtcgaagctgctcactccatcgccgctccaagctgtgagtccgagcatcagcacaagaagatgcgctatccagctcgtccgagaaatctccgcgctcttctgtccatcgctctgctgctcgcttgtgctctgcagcagcggccggcctcagctaccaaaaaggcgagtagagagtaactcactgttccggggctttgactcgccgctcgctctcttttgggtgccatctctgtttgccgctgacggaaggctggctgctctccgctccgctgtctctctctatctctctcgcagtcgtacgtcgtctacctcggcggccacgcgcacggccgc

SEQ ID NO: 174555 - DNA, 920 bp, Zea Mays
atcccattgaagctgttctagtgagaaaacagaagcccttgtagatcttttatagaaatatagcaaagatgtctttgcacagagcttggtatcaacatgtatgttctcccgaaagagcgcccttctccttttagtaatttcagcattctctgtgttacgcgtatctgattttgaaaaatctagtttcagttcttctctaaatttcggagcagaagctctccacagatgatcaacttcagtaatggtttggcacacgggtgactatatctcatccataaggtgaaatatctccaaatatgtttcactaagggttgcaccataaatagacaaaagcaagaaaactaattctcttcatccactcaattggctattattctgttgtctgctcttaatatcatacagtacccttagtaatctgatggtttcaactcttctcttttctgcaatagaaatttctgccttattttcttccacgaaagaaaaatcaactaatttcaaaatacttggagctggctgtagcatcccccttgtggtgttacaaggagatggatacttagaatcttcattgcatgttattgtcgatacaaaattggagtgacccagtataagttcaagaatttcatcagctgagaactttccttgtgatagcacaacaagaatacatcgaattgcttttatggcgacaagatcattgaatctatgcaagagggacgatctgatgaattgagcaaggaaaggtattgatttcagctgatttagatagctttgaatctctaaagacagttcaatgatattcttgagaaatacatattccagaaaacagatgacctttcgttccttggtagagagtgataagatattgtcactcgatgggaaattcatgagtattttatccatagttctgaccagtatgctaataa

SEQ ID NO: 174556 - DNA, 796 bp, Zea Mays
agatggtgcatgcttcagatggtgaagcatggaaacactttgatgccattcaccatgagaaagccaaagaggctcgtaatgtacgtgttgcgctggccatagatgggttcaatccctatggaatgagcactgccccgtacacatgttggtccgtgtttgttatcccaatcaatctccctcctggtgtgtgctttcaaaggcagaatatatttgtgtcgttgataattcccggacactcgggaaataaaatgggcgtgtacatggagcctttgatcgatgaattggtacgtgcctaggaggaaggggtatggatgtatgaccgagctacaaagacaaacttcagaatgcatgtttggtaccagtactccatgcatgacttaccggcgtatgggctattctgcgcctggtgtgttcacggtaagttcctatgcccagtttgcaaggaagctcttaggttcatttggttgaaaaagggtggcaaatattcgtccttcgataaacatcgacaatttctctctcctgaccatccattccgcctagacatcaagaactttacgaaaggtgtagtagtgacataccgcccacctgcaacgatgactggtgccgaaattcatcaacagatagatgggctcgtgtccaatacaaaaggtggttttgtgggatatggtgagaagcatatgtggacacatacgtctggcttgactcggctcccctattatgacgacctgctccttccacacaacattgacgtgatgcacactgaaaagaatgttgccaaggcactgtgggcaacaat

SEQ ID NO: 174557 - DNA, 713 bp, Zea Mays
tctgcacccttttggggcagcgagcttgatggccgggttcaaatttgtcaccacaggtatagcacaaaccattttgcttccgatactctttcaccaatcgctctttagacaactcgggcaacgaaaccgagcttctactgtcagctttgggcacagtactaccaaatcgaccttgactgctagtcgagaagggtttatggcgctgtttatccaagattccctgctgaatactggctaataatgccgctcgttcaacagaagcaggcatatgagatttaaccggtccttgtaattcttgcttgagtcccttaataaaatgagccacatatagagtctcatccaaatcatgattgtggacagaagtggcatatcttgcttcatcaaacagctttttgtactcctccacagaccctgactgtctaatgtccagcaaagactgcatagcctgagaatactcctcggatccaaacttcaacagcaccgcgtcacaaaactcctcccacgaacatggaccatattgaatcttaaaaatctgaaaccacctcttagcattcccctccatgttcaacgatgctgacatcacccaaactgactcagggacccgatacaaagtgaaataatccacacattgatcaatccagatacgaggttcctcccctgcgaatttgggaaatggcatccgtggtattgggagatgcccaccttcaaaatcc

SEQ ID NO: 174558 - DNA, 841 bp, Zea Mays
ctggcgatttgcacccctctccggcgatcaccggcgtggatctccggcgtggtgatcctgctcgtgctccccttgctccccttctctcggtgagcacgctcttcccttccctctctctctgtttccaggtcagtgaaaaccttccattccaccctttgtgctcaatctcaaattcttatcaattctagtgcatgattgtgtgccctagtgctccattgaattccctgcaggcttcctagctactaagggagggtttcaccacctcaaatagccttttcacctaaaccctaaacctccgcatgccacatcattcagtaacattgctccgattgaacccaaaccactcaaaatttcgcgcaatttcacgccaatctgatattccaggcaccttcacaacacttccgagccgagtcaaaattgctcatatttactctgtttacgcccaaaccactcaaaattgctccgattgaacccaaacatttcaggcaccttcacaacaccttcagtaacatattcgcgcaatttcacgccaatctgatattccaggcttcattttcacacaattccctgtttcgagcgatcaattccgagccgagtgcctaaattctgttttctctgcctaaattcaaaccaagcacacacttcactcatatttacccatataaacctattcgtgaagtatcaactcaattccacgtcctttcatgcctcaacttgaattccaaacctcctatggcactatttctcgttcaaacgccgttttcgcgtcgtttgacctctcgatcgccatatctctcgttttccgtgccataattctctgtgtatgtatttattcacattt

SEQ ID NO: 174559 - DNA, 810 bp, Zea Mays
gggatggcgggttagtttaggacttctcaagggactcttttgcaataagggctggctgaaggggtatcggcattcgtgatccacacgatcaaaggtctacaggccatcggattatcatctaacggtatacactcacccggaccaaccgatatctaggcttctaatcatggtcgtacccaaccattggctagggatccaatggccaccagacttcttccccaccagcaacgccgtacccagcccatggcggcgttcaccaccgcggcgagcaacgccagtgaggaggcgacctagtaacccaactgtagcatgggtaagacctacatggagaggaaaaaggattgaattgatcaagggggctcttaccgctaatcagcatcacgatgacttccgtccatgcgtagtggtggaagaccgaccatggtgagcaattggcagtgcaccacccaaagatcctctcgggcgcggtcaccaagaccttcctagggacgcagcgtcgcgcctaggactgatgctgaggaccagatggccacggtatcccatcttctacaaccatgacaccatctttctttctctgttacctggccgcatcttcaatccttgctccgatcatgcacccaatacgagatgaacaatgggggtgcggccttggtttttataccctgaatcggatcacaacaacccgatgatctcgtaacaaaccgagctggcgcccgcggtatttgcgatgaaatcgcggctgttgcgagcgattttgggaagaaagcactagcaagctggtcccacaaatcggtgagccacccggtccat

SEQ ID NO: 174560 - DNA, 774 bp, Zea Mays
gcttaaagtggtggccagtgaatttggtcttgcacggtggcggccggagaaaaaggagatcactggtgcaagcgattggtggcatctaccgtggcggctctccgacgatcatcggatatagataacctgagctattgcgacgtggttaagggcctgaggcgtggcacagtcgcggtgaatgacgcagactccggtgacggccgtatagccacgtcgccggcgcaagtggtcgagggacagcgaggccacagtaacccaaacccatccgcgacgagatcttttcatggttgagcgaaatccactcgcctgaggcacgaatcgcgacggccggcgcgaatccgggcgcaaaggatgccagcggtgagggggctggacctgggatcatgttcagttcactgtacaatcagactcccttcagacgcctgacacaacaacttgcaacacctacatctcggatttttgtgtaaaaactcacccatccatctgtagcaaacttgtagccctttatatcgactacaattctgctatagcaattaccctcaatcgagcagtgaatctagctctaaatcaagctctaagttcatccaacttcactgttagtgaggattcagacttagggttgcctgacagcccgactttgtgcttatttttctccaatttctattcagcaccagtgctcaatcacttaatcaaacttgttctcctatgatagctctacaactttgctatattgactttgagcaaaaacttcaagaatcctgagatgtagggctc

SEQ ID NO: 174561 - DNA, 364 bp, Zea Mays
cttatgcctatgatgtagcaacaaaagaatgtgtagcaccagtatcaaatagtacttttgctggatgggatgcgactagaaacatacctactgccacatctggtgcatccaggattgcttcggcctccatgtggttcaccttcccacgattgtaggcctgaccacgacctcctgaagcctgctgtggtgctccttgtcttgctggggtgttggaaactagctaatgctgggctgcattcttcgagcattgcatcgccagtgaccttgctcttataagcatcctcggcttcctccctacgctggtgcttcctggttgttctgatttgttgctagaacagaaaggcgaggtgcctaactgctcttc

SEQ ID NO: 174562 - DNA, 660 bp, Zea Mays
gcttatgatgtcgcgtggtctcgacttatcgcacggagtatctcaccggggcgctggatgtatggacatcggttttggaggccaggggcgaccggtgtcgcagggagtagatctcgccggacttggaccgctggacgtcgacgccgaggggcatggctgcacgcttgaaggtaagatgggaactgttggattcacataaattccctgtgcgtatagagtgcttaggatttgagctgtgatcacggggcgcggatttgtgaagtccggcgggccaccactgtgttcaccagcgcgcggccgcagtaaagccgccgccgtgctcggttttggcggaggaggaagacgaaccggggccgtcgatctcgagattagcggttaggattagaagtggtggtgtggtggtccggaccgtaggattttaaatgagcggcgtagatcagattttgtgtaccccttcgtctcgaaggattcgggcggtcggatatgaatcatgtggttcaaatctgggtcctgctttcataaaatcgggaccgtcgattctagatccgatgggcgcggtatattaccgattcggtcatgtgtcgttcgatctgggcgctcgctctctgatcggatggccgaccatgcctggtaccccttcagccgacacgtcttacaaaa

SEQ ID NO: 174563 - DNA, 986 bp, Zea Mays
catcgaaggagaggcaattcagatttagaaggatctgcagtaccgagaaaagccagtaaagatacttgactcagtcgtccgaaagacctgaaactcagaagtaagactctgtaaagttcagtggagcagagaaggagaagaagaagctacctgggagagtgaggactctttgaggtgggaatacccttacattttctcaaacccagtctaaatctcgagggcgagattcctttaagtggggtaggtttgtaacatcccaattttaaccccaaggttagaaaccctaaaactcctaaacccccctaattatctcttaaggaccccatctcataagacatctcattcatcatatgcatacaccatggttgttagtagcacctcacatagaatatttttgacacctcacatagaattttgacaccgtcagtcctttcgtccccgcccgtgacttcagcggcgtgatccccgccgatcacccctgcccgtcttgtcgccataactcctgcgccagtgaagttaggcaccgctctacccctcagctcactgtgctcgcagcctgcccgagaggtctcgtccccagctctatgcgcccccatcgccgccgtggcatccctcgccagcgccagctagcctttggccgcttcccgccccgagcgcctacaaaaagaaccgcccgagctctatccttcctcacaccggcctcggccactccctcccctcccctgagccgaatcgagctccgcgccgccgcgcccttcctccgctctggtgagctccccttctttcctctggtagcctagcgttcaattggttgggctcgcaaggttcaccgctccctcacgaacacgacacaccccttcccttcacctattgcgcccgacagcctcactgacgatctcaccgctgcgggcgcccgccacctcgccgtggaccggccgtctcgagcaccctccaaccaaattaacccatccaccattatcccctac

SEQ ID NO: 174564 - DNA, 1592 bp, Zea Mays
gtgcttcataggtccacatccctcccatataatgtgagaaggacatgcgaccgcttggtttgaacggcaggcctagtgatggcgacgtgattaactcttcgataatattttgtttctctaccttttgttttcaaagtctgcactagatcctccaaaggtcatgtttattacgtcatagacatctggttgcgaaaatcgtcttcgtctttaggtggtggaggggggagttgatgggacaggtgtattatttatgctggtgcctgcgagagggtagaatttattagtgtgagagctaagggaggtaattatgtgggtattatggatatagtggtttgatgtgttggtagcaaggggttattggtgttggactgttggtagcaagggggtattggtgttggattgttggtaggtgtggactatggcctttgttagttgttctggtgccattcttgccattgttttttggcctcctttgtgatcggacaatccttggtagagtgtccgacatcttcaccgtggaatacacaatacaacttacagtcctgtgtggatcccctactacagtcacggtctctaccaccttcactcctctactaggctatggaggttttgctgtgtgcaagggggattcgttgggttgttgtaggttgcttatgttgtggacctgctgctgctaacgatcctgttagcccttatgctagggtctactactggcctgcgaatgctcctttgccttccgctgtgactctagcttttggtagtgcaactcctctgatttgcatacttcttgaagaatcggtagagttcttagagtgtgcttggggtctttggtgcagtgactgaacatgtggctagtgcgaaggtcgctgatggcatagtgaatggagatgtggtcttcaactgaagacacttgggatttcatcaacaaaaatttcttgtagtaatcctgaaggctttccttctccaattgcgtgtagagggatatttctacaaagccattggtttctggtctatagcccttgaagttgagcgataacttttcacgaagggtcctccatgagtcgatgggcagtggtggaaatcttgtgtactaggtgagagctgggtcctccaggcctacgacggaagacttcaccattgcttgtcgtcatctctagatgatgctactaccacttgatagctcatgatatattgcgaagggtcagggttgccattgtacttgggccaattgcctgaccggtaattgtgtggccatgggatatattgaagtctagcggagagcggtcacctttcatttatgaagttgaagttgtggaatgtgccaaagtgttgggcttgccaagcgcttctttcaaagtcatgatgtatgtgttctattagcggaggctattgagtatgctcatactatgtttttgcacttagtgaaggtggttaggtgtattcatgttgctacaagtctgctatttcttgttgtagagtccacaatatgtcttttttcctcttcaatcaacctcaataccttttagaggatctcatcatggtgtcttgtggttgtcaatgcttatatctacttcttaaggtcatcatttttt

SEQ ID NO: 174565 - DNA, 561 bp, Zea Mays
aggggcttccataaacctgctcaccaaacccactgcaaaggataagtctggccttgtgtttactaggtatctcaagctcccaatcacacttctatactgggttgtatcactctctgttggattgcacctgcccatgttgcactgctctacaatcttggctgcataagacctctggcaaatagtgatttcatttgtcccttgccttacctccatacccaagtagtaactgagcagccccagatcactcatactaaaagtcttcttcatctgttgcttgaaatctgcaatgtcacttgcagagggcccacaaatgataaggtcatccacatatactcctataatcagcatggacttcccaactccccttctgtagacaacatgttctactttgcatctactgaaacctagggaggctagctcagaatccagtttaatgttccaagctctcggagcttgttttaagccatacactgctttattcagtttgagcaccagttggcccttctctgggttctgaaatcctggaggttgtgttacatagacttcttcatgaagatcccc

SEQ ID NO: 174566 - DNA, 597 bp, Zea Mays
ccgcttcggccaccaccgctgtgccgaagggcaagaaaatgaaggttttgacgcaccggcctcgatatattgaaacggtcgtagtacctgaatttgatgagagcacctcctccactgccgaagcagaacaagccgctcccgccgctcggagcgctgaagggtctattgtagtgtcgaaggtgcctacagtcgggccaaccgaagccaaaggtgatgcggccaaagagccaaaattggaaaaaacagtgataatgccagaaattatgagcccaccagtagagacagaattgtcgaaagtgctaaaggctcctgccgcaactcccaagagaaggaggatggccagcgtgctagatgctgtcatggagaccacaaaagccttgacccctgctcctactaagaaagttgtcgaagctgtcaaagtccaggccgaagtcgaagctgggccttcaatgcccattgagacgaaggctaccgtgtgtgcggataaagctgagcaacaaactccagataccgccatggcagcggggcaagatatgatagaaaaagctaaatctcctgcccccgaagctccgactgaagatgttgattacattattc

SEQ ID NO: 174567 - DNA, 409 bp, Zea Mays
gccgatgaatgggtgagagtaatggaatagaagtttgggttgattcgatgcacggatacgcaaaatcccctgttcgcagctcagcagctaagagggcctgccagtacctggttggcaaatttctcagcaatccagcctgttggacatcatattacctgggaggagttcaacttggcattccaggagcattatgttctagagggagtactccagatgaaactagaagagtttatccggttaaggcaaggaggagatacggtaatgcagtatctcaacaaattcaaccacctctctcagtatgccattgaccaggtggataccgatttgaataagaattgttttatgagggattgaacgacaggcttcaacgaaaaatggcaacatgcttggacctcacctacagtaaggc

SEQ ID NO: 174568 - DNA, 504 bp, Zea Mays
ctatgcttgaacagttgggcttagttttgtccattaggttttcaagatatcgttgtgttctggactagactccagaattcacgctcgtgccaccgaagaggagctagcactgtcaactctcatgtctcatccttgcacggccggctcgcatccttgcttcgctgctggctatcatcatcaagccgctcaacgctgtctcccaccagatccctccatccctaagctgccgctagattttgctgaatccgttgttctcaagcatctctcagctgtctttggcatgagctggcgggaacgtaaccatgagcgcgagctcgagatgctgcagaaggaccagaccaggaggtggcactgtggcacacacgcagctgctgaacatggaggggttgcgggccataaagctggtcaggcagcggcaagatcaaggcatggcgttgggaagttctgctccttccgtcctagtcaagtcctgatcttgttaccgctcaaatgcaaggtcgactt

SEQ ID NO: 174569 - DNA, 314 bp, Zea Mays
ccgcagtaaaacaaaggacgatggaactgcggtcccatctactttcaccaactacgatgacgcatgcccacgagtaacggacactgctcccccatgccggctactgtcctcgaacaactctggatgggacgtgcacgtgcctaggcacaacctcaccctagggagagaacaccgtctcgaccgaagacgacttcagcctcgagagaaaactctgcctcgcccgagctcggcctcggccaactgccctgcagcaactccccgcgaatctcataggaggccactctagcgaatgttctaaccactcccttcatgac

SEQ ID NO: 174570 - DNA, 568 bp, Zea Mays
ttttcatatgattgcttgcattttgactggtccccaaaagcagggtacccaaagtagatccattactggtggcaggcacacgtatgtacccgctaagcatgaaaacgaggcagacactgttggcctacaccagccatgatgagacatgtcaccgcagaataccatcccgtctaacatcacaacatgtcgggcgaacatcgaggggccagcttagataggatgggacacaccctcatacggccatgaacatctccaacactgcgatatggggcctgctagggtctacgacagagttagagtccccaaatgagacacgacagtataacccaccataccgcgtgtgtgctcacgcaagcaccaaaagacgacgtcaccagaagaacttctgtaaatgacagaccccactcctatcggctgcaaacaacccacctctttgtaaaagtccttccccttgaactataaaaggggtggctgaactggaaccagggcagagggtgagctaaggaacattcaatagaagccttcgtgttcctcgctctttcagtctcacgtgtaccccttataacac

SEQ ID NO: 174571 - DNA, 909 bp, Zea Mays
gctgggctttgtcgcggctgggtatctgtgggaagaagacggtgccgtggacgccaggaaagagagagcatcaaactgcctgtgttgccgccatgccacgaggtcggccttcgtcgcttcaacccgaggaccaatcgccaccgtggcggggtggctactttgtcaggctccatcttttgccgccatgggccgccgtggggaaaacccaatgtgcgccaccgttcgaggtccgacccgtgcggggctgcttcaaggtgatgtaaggaagaagagcgatagaaactactggtgttgggtcatgtgatcgacgcgaatttgccgccgtcgtatcagctccgccgcggatccgccttgatgcgtggtctgcttcgtcggtatactaagcctcgataaggtgtgtcttaccatgatctcctcaccgcctagcgtcgttcggggtattggttgatgggcagaatcacggagtcgtctcacgccggtgaagttgccgctgtgagggcttggcggcggcgcctgggcagtgtcaagggaagtggatgagagctggagcgttgatcggggaacgagcggcttagatctagtggctaactaatagatcggctagggtgcttctctgccgtagatcatagatcggaggagtgagaacagttcagacttcataaaatccgagcagtcggatattgatccagtggtcaccatccattaccggttcgggttatggaggatctaatcccgaccgttgcaatcaatctgacggtcgagattagagcgtacccccttcggctgtgtgattttgcataagagtccctagatttataggatatcaactcgcgctccactactgtgtaaaagtaatttaacttaggtcctgcaatttgcaaaacagaccctgtgctattggaaaatcct

SEQ ID NO: 174572 - DNA, 552 bp, Zea Mays
tctcaaatcatgggatcaaccctgactaccaataaaaatacaaaataaaaggttggtgcatcatattggatttttgtgttgagaatttaatactagccatgttaccatgaacatgctaaaaagatcaaactagggtttaacaaaaatgttcaattgaaggattttgaaaataacctaaaaaaaaggcggtgacaatcctacataatataaaataaaaataagaataaacacctcctacacaggtgttttcaaattgtacatttaaccaagaacaaattcagcacaaattggaaattcaaatggagattcaaagataaaaaaagaagactaaactccttaacagggccgccagggggggaactctggcccaacagcagggctaccacgccgcgcgctgctcctcttggatcaccgccaggtggggcccaggggtcagctgcttcttccagacgtgtgcgttggcctcctccgcatcttccgtcgcgcacctaaccccatccattgcgccagcccaggaagggagctcctgccgcctgatgacccagtcccgac

SEQ ID NO: 174573 - DNA, 544 bp, Zea Mays
gttgtgtctttgcaccacacacatgggcgacgtcatcatgagcggtcgttgcctcggacagggcacacacgtccaccccattaactctaccacaaatcagtagggccagcccctacatacatcagcataccaggcacactccgtggctggcacgaactagcaaacggggtggagaacacacctagtcagaagatccacacgatggtcgaggacaagatctcattcggccatagcctttactgctccatgttgtatatattttataccacattgtctagtcccacttatcgaggctcagctcccttgtacgtgccccttctactataaaaggaagcgcacacacactacaaggaggatggctcactcatgctcttgagtacttagtcttacactcaatctctcaagcaatacagctcacagtggactatgatattgcactccagtggcctaaaccacactaaaaccttgtgctcttctatctccacaggcaaaccctaggtagccccttcattcttaggattaggtaggtgcatttcgccacccg

SEQ ID NO: 174574 - DNA, 338 bp, Zea Mays
cacaagcatgcgagggtgctaaaacacgaataaggagggtgagtgcggacctgagagcggctagccccgacggggtgattcacggcggcgcagatgatcaatttgggggaaaacccaaattctacggctatggtggctaatcggagatgagagttagtgtcttgggttcaaaataacttggcgaagtagagtggggcatcaatttatagaagctttaggcgggggctccgaatttgggaggagtgtggagcttatctccctcgtgaggcaatcaccgaggctcaccgtggagcgcatgcattcaccttgcgcctgtaactatctcggggtgccacaat

SEQ ID NO: 174575 - DNA, 374 bp, Zea Mays
caaaaccatgccgcatcccgcaaggcagaggccaagatcaagtgaaggagatcacgaaggcctacaacatacaaaaacaagaaaattcactaatataattttgcttcttcgggttcgagtggaggggatcatcattgttcattgaggcccagtggccctggcctacaacgtatgaaagcaacaagcaagaataataaaataataattcaccaaaggccacaacctacacgaatcaaacaaaagagcagtgcacctgtacgaccaggggggccagggaggagggcttccgagagaggtcagaggtttcgtgtcctggcggcggcgaggcaacaaacaggacgagtgggcgacaagctcttaggagatttagtttt

SEQ ID NO: 174576 - DNA, 984 bp, Zea Mays
gcaccatctgaagatctaccctgacgccaaaccgatgagtcagaagcctcagagacagtctgttgagcggcaggacttcatccgaaaggaggtccagaagctgctggacgccggcttcatcaaagaggttcatcacccagtgtggctggccaatccagtcaccgtcccaaaggcaaacgggaagcttcggacgtgcatcgactacaccagccttaataaagcttgtcccaaggacccgtatccacttccatgtatagatcaaatcgtggattctacctccgggtgcgaccttttgtccttcttagatgcttactctggttttcatcaaatccagatgtctagggaagataggaagcataccgcttttgtaacattggatgggctttactgctatgtcgtaatgccttacggtctgaaaaacgccttgccgacatttgtgcgggcgatatgtaagactttcggggacctgattagggacaaggtgaaggtatatgtcgatgacatcgtggtgaagactaagagagggtcgaccctagtggaagacttaaccctggtcttcgacaagctgcgggcaacccgcacaaaactgaacccggacaagtgcgtctttggtgtctccgcaggaaaattgctggggttcctggtttcgtaccggggcattgaagcaaacccggagaagatcaaagcgattgaggcgatgaggcctccggcccgtatcaagaatgtccagaagctcacggggtcattagccgcccttagccgcttcatttcaaggctggctgagagggcgctacccttcttcaagctgttgcggaagtctggcccattctcttcgaccgaagaggcagaacaagccttccaggagttgaagcagcacctggtgtccctaccaatactggtagctccagaacccggggagccattgtatctatacatcgcggcggctgcagaagcggtgagcatggtgctggtcgtcgaaaggac

SEQ ID NO: 174577 - DNA, 683 bp, Zea Mays
ggagaatggcccttaacgggaaggaggtcaccaccatgaccctgtgtgcctgaaaatagtggcgcaacttcctggacgcaacaagtatagcatagataagcttgtgcgtctcaagatacctggcctttgcctcatggaggacttcgctgacatagtagactggcttctggatggttcggacccctacggttggtcccgagccctcaaactctttaccttccatcaccatcgtggtggtcggaccaccaccttctcctaggggaactttttgactcccctagggatgttgtgccgtctttcaacgatcagcaccatgctcaccacctctgtagccgctgcaatgtataagtacaacggctcccctggctctggagctactagtatttgtagggacacaaggtgctgcttcaactcttgaaaggctcgttctgcctcctcggtccaagagaatgggccagacttctgtaatagcttgaagaagggtagcaccctctcggccagtcttgagatgaagcggctaagggtggccagtgaccctgtaagcttctggacgtccttgattcgggtcggaggactcattgtctcaattgctttgatcttctctaggtttgcttcaatgccccggtgcaaaaccagaaatcccagcaacttccctgcggagacaccaaagacgcacttttccg

SEQ ID NO: 174578 - DNA, 708 bp, Zea Mays
atttgggatggattttggcgaagctaggtccggcaagagttgatttggtggctagatggggatagacaggccttgttcaccaatcagatggagatgatttgagcgaagtgagagaccggtgtaggatgtgcacctctgcacacggtggactgcggtgacacattggctatggctgtgttggatctaaaagcaaggaaaaaatgcaatcacaactagggatcaattgctacaatcttatgttagttctcacaggtactaacaaaatgattttcaataatcgtactttaatatgttttctttggatttaccacaaaactttgctggcacaggttacaacggctgccgcgacaactcctcggtccaggtctccttgcccatgagccacaggcttcgacgaccaagaacatggtccatctggctcaaagtaggtcttcgctccgaggctactacaatacatggccgcgtggaaagtttttagttgttataaagaagtgaagttatgtttcctctaaatgtatcctcaaactgtcctaaattcttgtttactgttttttatgtttatttaattccccaagctagagtatccatcatatgtttgaattgcttactgagaaacattaggtggaaattatatagttttgatacaggttgttgtatgaattgattactgagaaacattgggattctgtacttgtacttataagtttt

SEQ ID NO: 174579 - DNA, 742 bp, Zea Mays
ggccttccatcaacatcgtggtggtcggaccaccaccttctcctaggggaactttctaactcccctggagatgtcgtgctgccctttcggcgaccagcaccatgctcaccgcctcggaagccactgcaatgtataagtgcaatggctcccctggctccggagctaccagtattggcagggacacaaggtgctgcttcaactcttgaaaggctcgttctgcctcttcggtccaagagaatggaccggacttccgcaatagcctgaagaagggcagcaccctcttagccagtcttgagatgaagcggctaaggggcagctagtgatcccgtaagcttctggatgtccttgatgcgggctggaggcctcattgtctcaattgccttgatcttctctgggtttgcttcgatgccctagtgtgaaaccaggaatcccagcaacttccctgcggagacaccaaagacgcacttgtccgggttcagctttgtgcgggttgcacgcagcttgtcaaagaccagggttaagtcttccactagggtcgaccctctcttagtcttgaccatgatatcatcgacgtatacctctaccctgtccctaatcaggtcaccaaaagtcttactcatcgcccgtacaaatgttggtaaggcgtttttcagaccgtaaggcattacaacataacagtatagaccatccacggttacaaaagtggtatgcttcctatcttgtctagacatctggatctaat

SEQ ID NO: 174580 - DNA, 853 bp, Zea Mays
ggaaaaagcatggttcgatttatacaccggcggcgaagtccgagcggagaaaaaggcacagggctgttgaaggccgatcttccgcgcttctgttgcggctagacgcggaacgaccgcatcgcgaggggaagggagcgcaatccacggaatcccatggttccgagtccgtcactgcacagggagggggaactccagtagagctacggcgcggatttggggaagaagagcgggagaaacgtggccagcgcggacgactgaccaacggccgagaagctgtacgtggagggagaggctaacgcccaaatccaaggcggcggcacgcgattcgggcgaagcatgcgtagacgaggtcgcgaggaatcggccggttggttgtagactgagccgcggattccgccgagctcgtcgcggggtggaggacgaaactggggacgcaggcccaccggcagaggtctcatgcgaggtgggtgcgacaaactaatgggcccagcgtgtcggtgagagcttgtcagtggcgttttgatccggggactggcgaagtggggtcggattgtcagcgtaggcaggcggaaggtgctgttgggctgcgcagtgaaggatccgtaggtgggccgaaatgtaggggttccagcccaggtaggttttattctttttcttttaggttcttgatttatttcatgattatttgaatccaaattttgaacttgaatatgagtttcagctttgggttaattatacaaattcaaaatctagtcttggaataatatatttttaattacttattttatccacacaatactttattttcttttcccttctaaattctagaatttctttcaaaatttaaattccc

SEQ ID NO: 174581 - DNA, 589 bp, Zea Mays
ctacggtgaacaattgaccgttgcaccgaggtcgaatccgccagcaactgccacagctgactcccgaacagctcgcgcaagtccactacttagcccaaacctctggccaacggtgaggagtagatccgcggcggtgcgggtgtactcgacgcggtgcgcagctctctctctctccacttctcggctcagccccaacacgattgcaagaccaaaatcccaggtacggcgcaagcgcttatatgtggaggaagggtcgtaggtccgcccgagccgcggaattcgttagtccgttcagcccgcgcgaaatccgcgctcgccgttgcgttccgaggaagaaggagtgtgctgatgcatgggctccacagcgcagcgagactgggtcgtgagggaggcgcgcagtggctggcaaggtggccccagacgtcggtcggtgaggtgaagacagcgcgcatggcacaggctggcaggcagggccgggcgaacagagattgggttaagcgcgtggagtggtgaatgggccgcgcggttggggttcaggagtgggccgaaatggggtagctaagcccaggtaggttcttcttcttttttt

SEQ ID NO: 174582 - DNA, 344 bp, Zea Mays
gcgataccggtggaagctcaatccagaaaaatgtgtctttggagtaccagcagggaagttgcttggattcattgtcatccaccgaggaattgaagccaacccagaaaaaatcgatgccatcatgagaatggaagcgccgcgatcacaaaagaaagtgcaaagacttactggatgcatggcagccttgagcaggttcatatcaaggctaggcgaaaaaggcttaccgttctacaaattgctcaagaaggtggacaaattctagtggaccacagaagcacaggaagctcttgaagcattgaaaaagttcttgaccacgccaccagtactgaagcctccacgccgag

SEQ ID NO: 174583 - DNA, 747 bp, Zea Mays
atccagaagatgatggaccgaagtttgatgaagaaattcaacaggaagagaatgagatctagccagaagaaggagatcataactgttttatctctcttcgagtgctaagtgtgactgctgaaagggaagaaaatggacagcgccataatcttttccatacccgaggtatgatcaaagataagctatgtcgcatcattgttgataatggtagctgcaacaacattgctagtcaacaattggtggacatattggaattaaaatcaaggcgtcatcctagcccatataagatgcaatggcttaataattgtggagcgttgcgtgttagccacgtggtgaatgctcctttttctattgggatgtacaatgatcatgtggaatgtgacgtggtccctatgcaagcatgtcaattgctgctaggccaaccttggttatatgatcgtgatgtctagatttttgaaagaaccaacaagttgtctttattgtataaaggagagcgaatctctttgcttcctttgacactagaagaaattatgaaggatgatctaaagaagaaacagcgagagagcgagaaccacttgagagtgatccacaaaaatagtaaggaagagtttccaaagccaaataaaactccacagcctctaataactaagacaccgggaaaagaaggattagtcatgatgactaggaagggggatctaaaagaattgagtgaacctaatgccatgttctttgtgctcctgtacaagg

SEQ ID NO: 174584 - DNA, 1077 bp, Zea Mays
acggctagggttcccgagcggcggacatcaaattggacctatcccgagcatttcccctaacctaatttcatctatggcgaactaatgagctctggccacgacgaccgcgagcggagctaagggttgatcgcgttcccagcggttaagggggacttagttcaattgggtaggtcggtgagcatcacaggtacacgagagcactcaaacgagggagcaatcggcatgaactaacctgagctgagctagccgcagcgaggtgtgcttcacggcggcggagaccgaaatttggggagaattggaaattcgcgcgtgctggtggatgatcgagggtgggagcgggtgctatagcttcgggatgacttagcgcaatagcccgagccatcaatttataggaagcttcgtcggtggcgcttgaattgaggatggtgcggtggcggccggagatgaagaagaacgagggtacggtgaatacgtgtccagtgtcgtggcagtaactccggtggtcgacgggaagttagagggagtcacggtgatgcggtggcgagattgggacacgcggcgcaagaccggagaacggcggtcaccggcgaagctatccgcgccagccgcaaagccgaaaaggaagacgacggtgagtcaccggagtgatgtccagcgcacgggcggtgaagatcttttaccccgcaaggttatccattagccacgagcgcgaattcggacggcggcagcacgaatcacggcggcaggtcaccagcggcgatagcagctgcgctggcgatctgatctccctggtagcactgtaccatggcgagtgctccttcaaacaacctgacagagcaactttaggtcctattttctccagattttctatggtaccaagcccaaacatctatagcaaagttgttcctctttaataactctacaactttgttatagcaaccctaggtggattctcactggatcatggtcgaaatggctctcaaacttgggtccaggccactgtcagtctgaaattcagacttaatcagcctgacagcctgacttcaggcttaattatctccaatattttcttaacaa

SEQ ID NO: 174585 - DNA, 678 bp, Zea Mays
ggttctctcgccggagcctagcatcttgttcagctagctctcgctctcgatcctgagcctatcggcgatcacggcggcaggagttacgtctttctcggtgtactcgtttgtcaggagtttcccccatttcggaggcttcgtcccaggacacgggctgcgccagatcccgttccccgacttcatgatgtcgccacacgtttcgacatctgtttctttgtcgccggcatcacgctggggaggttgctccccttgcatggtaggctcatcgtcggagatgggcgctgactccaatctcccctagatgaagaggacgtcagggtagaaaggagccggcatgatggtgttcttcttcccatcctcctttaagggcggaggtatcagaaaggtggcttggtgtgttctccttccccgactcgggatgtttacttccttcttccaagtgatccgtgtccactatttagtgggtgaggtggacaacggagttcctcgggttagtgaagccctgattgattggtcttccttttcccgagggatcctaaatcctagtttccaagggaccatcttcccccgagctatgagagggggagctgtccgcagtcttgccttagcttctcttgggattcccgagaaaggtttcttctcgggtggatccgctatgcagtgcagagtcccttctac

SEQ ID NO: 174586 - DNA, 317 bp, Zea Mays
agtatattttgcttgagacgcacccgcactcgtggataaagcgagtgacgtgtcatcagtcgtcggtgccaaagcctggggtggctttgtgtcgtcttgtccggccctagggtcagacgggcatgcatggcatcgacactctctcggagtccgtggctgtgtgctgttgccaccggtttcgcgcgtaccagtacgactgtacgagccacgtgggctcgatttgtggcagtttggtggccggcgtacgagtagtctcgtgctcgcccccagtcttcagacggtgtgcgtcgaagtgaaatgaatgcacggtctggcct

SEQ ID NO: 174587 - DNA, 443 bp, Zea Mays
ttctgttgtcaggatgtaacaatcatcttgaacgattgcagaagtaaatgaggcgtgctggttttttagttttttcccgacttatgccaatcgcttggctggtaaggcgtagtggttgccctaagatgagtagacgtgagcatgtcgcaccgccttaagtcattgccgacttaagctgattgctccgttagtagggtatagtggtcaccctaagtcgagtaagtgcgagtatgttgccccgtcttaagtcattgtcgagttaagccgattgctctgttagtagggtatagtggtcaccctaagtcgagtaagcacgatcatgcaccgtcttaagtcattgccgacttaagctgattgctctgttagtagggtatagtggtcaccctaagtcgagcaagcgcgagcatgttgcaccgtcttaagttattgtcgacttaagccga

SEQ ID NO: 174588 - DNA, 1557 bp, Zea Mays
aggacatatgtatatgtatataactatatattaactatataaacactgcatttctgcaataatataggcataattagtagcagactagcagtaattcagtaaaagtgtaaaactgaatccatccaaagtccaaagtccaaactgaaagtaatattggaataattacttgcagtaattcagtaaaaactaaaaagtactgcatagtctgcattacctgctggctgctacctagagcagatcagcatccaaacaaaatgcatcagcagcagcaccatcttcgtccaatctagttgcttcttgggtttgttgttctgcttgtgctgcagcaacacgtaccatcttcttgatcatcactatcctcttctccaatatcttgagctgctgtatttcttgaacgcttccttgtcctaacatatgtttgttgaggctgagaagacgaaccagcacctgcaacagctattcttggcaagtttctgcctcgaagagcctgagttgctcctaatgcctcatccacatcatgccatatgttgttgtcaccatcatcttcattttcccacatgaactcttcaagcaccagtgggttgcttctttttcctttggatcctagctctcttagtgtttgaaacctattttccatcttcctgttgtaactgacatagaccaatttattaagcctctggtgttctagtcggttcctcttttttgtatggatctaaaaatgcacaattgcaagacatcagattcagcaaataaagggctgacccatacaaccactcaaacaagtgaacaagaacaacaatacttactgctacaaaatctgaccaatttctctcacaacctgaagctgcacaacataggcttataaccctttttgctaagatttgtagttcatatgccagtcctccatatgcaccccaccataggactgttatagttatacaaaaattagatcagttctagtgccaaacagaaacaggcaaacaaactaactaatgctgcaatagtaaaacttactaggactttttctctctctttctcttattgctccagcctttgaaaagcattccccttctgatctttcgtagtcatctgcttgtttacttatttttgtttgctcatcctcatcactgatcattttccacaaaacatcattgaacatagctcgaagtcttgcagcttgcctcctgtctttatccctcaaggtaaagaatttacctggattcaaataaagggctgccccatataatttttgctccatctgagtatcccacctcttctcaaagcatgagattacttcaacaagtaatcgtggcttctctttcaaagactcctgtatggtagcttttgatttgtccatagctgccattatctctggagctgctggcgtctcatcgccgtcagcaatccttagagcaatgagtagtggttgtgaagcccgaagacaattttcaagagtttgccaaaatgatactgaaaggacaatattttcatcttgttcaccttctttaactagggaaaatttagacccgttccattcatcactaacaaacaagcctt

SEQ ID NO: 174589 - DNA, 568 bp, Zea Mays
gaaagggtcaacaaggtcctcgaagatctattaagagcctatgtgttaacattcgatagaagttgggaatccagtttgccttatgcggagttcacatataataacagccatcacgccagcatcaagatgtcaccgttcgaagcattgtatggacgaaaatgccagacccctctcatgtggtccaacataggggaaaaggcacttgaaggacctgcctttgtcaaagaggttgaggagaaagttgccctgatccgcagaagattacttgaagctcagagtcggcagaagagttatgcggacaacaggtggagagaactcaaatttgaggaaggagacttcgtctacctcaaggtctccccgatgcgtggtgtcagaagattccaagtgaaagggaagctagcaccgtgattcgtcggcccctatcccatcattggcagagtgggacccgcagcgtaccgtcttgaattaccagaatccatgtctgatatccacaatttgtttcacgtgtcccagctccgcaaatgcctgcaagtaccagaaagtcacatcaaagaagaggcaatacaga

SEQ ID NO: 174590 - DNA, 460 bp, Zea Mays
ctagcaatgctatctgtggccagagatcgtctgtcgggtcgccgtggctataaatagcacggtgttccacggtgaggtgtgactatcacacagtgagttgaatcgaagtcgaattcgcgctacctctgcccccacctctcaaattaagtgtgcgcagtaaaactagagttctttgcaaagccgaagcacctgctcccaccctcgattagcctccatagccggagaatcaccaatttcccccaaatcggtcagccgcaccaccgagaatagcccgatcgtggccagcccgctcttgtaagttcctatccaattcaagtgttgtttccgtggctctgcatgctggtaaagctcaccgtggcacccgtttactcaattcggccatgatttggcgacaacgtgtactcatgaacccggtttccgccatgatcgtgggcagacagttcctagtggggtttatgtc

SEQ ID NO: 174591 - DNA, 690 bp, Zea Mays
tgatggaggagggcgggtccccgtgcggcctctttgcgccgacggtcgagagagagagtgcgggggcatgatccctcttcttgcggcttgcggtttcatgcgggaggtgagaggcggcttcatgcgagagagtggaggaggggtggagaacgcggtagcgaggagacggcgcgcgagggtgggggaggggcggagaacgcggaggtcgtgctgtggcgacgggagcgacgacgcgcggggggcagctgaggcgctaaccgtgcttcgacagtgagctttggtttgggccacaacaagcaaatgggcctcctagaaagcgtgtattccgtatttgcaagccaaacttagtaccacatcaggtactaaactgtgcacgcatctgtttataagtgccagtgcggatacaacattatggtcttggttgggcggcaacctgtgtaggcttggctgtgcgcgagcttttattcctacatagctagattttttggtacaacttgctcaggtgcgcggcgcacatgtgggaaacgacgagggtgtggatgggaatgtgggggaataggaaacaacgagagtggggacatgggaatcgacaatggcagaacgctacgggtgggacatgggaatggcgccacgggacatgggaatcggaatgacaacgctacgggtgggacattggaatggcgccacggg

SEQ ID NO: 174592 - DNA, 400 bp, Zea Mays
cttgcggggtggggacacagccatggcagggacttgagctttagggggttccttccttcaagttgagcttccagggctgcaatccttgcatgtgcatcttccagatcctcatgtaccctagagaggtccagggtagcactgtccaggttggtgttaagacctaccaccacaccaacaagggtgttgaggcgatcttctccaacttcacctagaacaacaccgatctggctttatgcatgaagacatagatgaagatgtttgtacctcatgtcatgtagttgctgccagtaagtgtggctgagagaccacagagctcgcctagcagcattactgaccgaagcagcataggtggataacggcgttagagactcatgagctgatagagtcttgaaacctctat

SEQ ID NO: 174593 - DNA, 1452 bp, Zea Mays
gcgggagcttgacaagagcttcggctacgaccgccacttcgccgccaagtacgagctggggaaggaggtgggccgcggccatttcggccacacctgcctcgcgcgcgcccgcaagggagacatgagaggccaggtcctggctgtcaaggtcatctccaaagccaaggtcttgctattcgtgatctcacactgctcttttactggacgcacggcacgatcttacctatttcaatcggctcggttcctccaccggatcatgaacaaactgtgtgggatgacataattgccatcctgttgtgatcttttttaactctcatttagtagatcagtatctctgaagtgccactaccataggtgttgcaatcataagttcatgatttgcttcttggctgacttgcagggtgatcagtttttttcgatggtattggcattggcatttccccgcagggttagaagtacattgcagagatcttgtttcagcaacgccgcatttaatgatgtgcccattttcatgatctgagtgttcaactgttcatccatctatcacctgtttcatgcttttttgttctttctgtaagctatcatggcatagtagtttatgcagcggtagatcactagcttggcagcgacagagttccttgtgagacctcatagaacctgttcccgagtatctccatcatattgttgttcctgccatgagtttaggagtcccttggtccattctgcaccattttattatatgatcataagtagaagaaacatagggaaaagtgtaggaactaaagaaatgtctcttagattcttggtgccaaagctgaggacatgttgatattggggactgctttccactgacattgttctgattgttgaattatttaattttgatctcagttttacttggcatctaaaatgtttgtgcagcaagttgtcgagaaaacctagtgtacgatatgcgacacagaagaattctacgtgcatggctgcattgatgttttcatgcatgtatattgtcgttttttgagcgatacgacattaattaattaatgactattttggcctgctataattttcgcttgtgctactgaaattatttgagcaggagatgtatttattgagtctattgtgtttcttccttctatatagttctttatttgaattgcgtgcaattttattccttgttacaacatacacacatacatggtatatactttttgaggctagaagctaacagatgctcaaggtatcctttcaattaagattaaggtttctcttagacaacccatcagttagcgctactttcctagcacctagctcactgcaccaggggaaaaatatatcttgatctagatttttatatttagtttgcaaaattcacctcattcctttgtttttctcttgcagatgacaacagcaatatctattgaggatgtgcgcagagaggtgaaaattttg

SEQ ID NO: 174594 - DNA, 848 bp, Zea Mays
taactccccattccttctcaagatggtataatctaatcaaatagagggccctcaacaaacaaggaaactagaggagaaaacacaacttataccatctaggcgagggagtagggcgctgcacaaggtcagggcatacgacagctcctccttgggcggcggtggtggctccttgggcagcggctctgtcttggggcaacgacgggagctgcagacgtgttcgccgctggggactgcagtcgtgtgcgccggtggcctggtccttgtgcgctggcagctcctagttcttgttcaccgacagctgtgcgggactggagggcggctgaccggctgtgcgcctgtgagaagacgaccaagcagacttgccgagcaagtctgcgaggcggggcgaacgaccaagtcccccgccaagcaagcctgcgagactgagtggacgaccaagtcccctgccgagcaagtttgcgaggcagggcggacgaccaggcattcaccaagtgagcccaaccactaggccagcgctgcaagcatacgtcaaccacggcaggaccgagggattcaactccttaagagaaagccttcgcacgaccacaataggtcacacaaaggcttgggggatgctgtcaggtacccgggaatgtggtacccaaaacaagcccataaacccttttctagccaacgcgccaaagtcccccgccgagcaagcctacgaggcggagcagacgaccaagtcccccaccgagcaagtttgcgaggcggagcggacgaccaagtcccctgccgagcaagtttgcgaggcaggcaggcgaccaaatcccccgtcgagcaagtctgcgagacggagcagacgacca

SEQ ID NO: 174595 - DNA, 343 bp, Zea Mays
cgactgtagagcttcccttgtagaaaatattggcagcggaagaggatcacctattgtcgagcaaggaagcacatcttcaacctaaaaacattgaaccatgaactaggcaatttcttgggtcgacgcaatgcaatctggaaatctggactaatatatttatcacatctttaaaagtggtattttgaattattagatcgacatgttaacaactgggtgggggtattttatctactatctttactactataatgcaccactttaaatagttccagtcgtgatttttgtgcgtcgcgcccccacccgctcgctcgttctccacgcttcgctatccagaagcgtccgc

SEQ ID NO: 174596 - DNA, 501 bp, Zea Mays
tcgcccacattggccctccagaaccaaagccgtgcagggagaaagggatcctgcctaccgccatttccgaggtgagaacgaagagagagagagaaagaaccgagctgcgccattgccctgcgggctcgtcgttgttgcggccccagtgtcgtgccgtgaagctccacctgtgcgtggagaagtgtgttgtggcctcaccgcgttgaaccggcgcccggggctcgggatttcttcaccgaagaccgcgaacccactgtccaccgtgggcagccatccctacgtctcgaacaacggtgagatatcgagcactttattcaccaaaccctccactgtgtataggtgctaacgggtaggaggttagtcaagggaatcaaggtcttgggtgggcgccgccgctctgatggccggggtggaagacggtctctcagccatccatccggatgtgagcggtggagattagatatctggataccacttcacacagttagatctagggcgtcg

SEQ ID NO: 174597 - DNA, 421 bp, Zea Mays
gatgaattagctaaccaagtatcaagccagtctcagctgtgataagagaacggtgaagttagtgtccctatcaggagaagaagtgttagtggaattggtcttgtctagatcaaggaaagggagttatcaccaagtcaccgctcgtatagaggagattaaaccgtcagaggctatcaaggtagtgtcagaattcctagatgtgtttctcgaggagttaccaagtatgccacctgaaaggaaggttgaatttgctatagagcttataccaggcactgcccccatttccaagagagcttatcgagtgtccggaccagagttggtggaactcaagaagcagattgatgagttgtcagagaaaggctacatcagaccaagtacctcgccatgggcagccccagtgttatttgtagagaagaaggat

SEQ ID NO: 174598 - DNA, 471 bp, Zea Mays
atttggtgtaagttgctgcataaatatctcatactttttaggaccttggcaatcatcgtaaacatcgagagccaaagaccagcccaaaagaagctcatgaacacaactatctcatcatccttcggctctagaatggttttgtcaccgacaaatcgaatcatatcattgtccttttcaccaaaatagccaaccttcttcaaaatgcaaagatcctcaagcttcattgtggatttcccaaattcaatgtggcttggtttgctgggccgaagcacgatgtcatcttcatcgctgactttggcatcaaaggcactctcctccagggcattctccttcttagttgtcttcggctcggctgttgccttcatcaccttagagattggtggtgtctagtgcttcaccctccatttgcgctgcctcagatggagtcggattgatcaacctagtagtagagcataccctagccatatgtgg

SEQ ID NO: 174599 - DNA, 571 bp, Zea Mays
cgacgatgctgaaccggccgtcgtgctccgtcccggcgtcggttggctgttgtattcccggctccgccaccagctcgtctggcaacatctttaactcttcgacgatgctgaaccggccgtcgtgctccgtcctggcgtcggttggctgctgcattcctggctccggcaccggctcgcctgataacatctccaggatgtctatatcgtagtcgtcgacgtttaactcttcgacttgctgctgctggatcaacttgctggctggcgccgcctcggggtggtcacggccacaggccttcctcttcttggccgtcggcggcttggacgaggaggcattctcgttctggccggaggaggaggaggacggcaacgatgacttccctttcgggagagccgttcgatacactttgcagagcacgtagttgctgacggcgtcggcctcggccaagtcatcatactctaccatcttccagcccattcgattgacgacgacgaccgatctagtggagcgctcctccgtcttgtgcttgcgggcgtagctgaaggtgcagaatgtgccgccaccggatccctg

SEQ ID NO: 174600 - DNA, 895 bp, Zea Mays
gtgggcagcaaatttctgttctatcgtcatctcccaatcaagatatccctcagcatcataatgacccgaaaaagatggtatagaaaatttaatcttagcataagggtcgttaggagcacgattgttattaccttgctggcggtgtggtaaaccttccgtgttttgatgaagacgacgacggaggcacaaatttctggtggccgcttcatcataattaccttcttcatcaatcaccgcaaggaagacgtggacgaggaggtggtggtggcggtgcttgttgttgcgtctccaacatagcaagtctgttgacgatctgggacaattgtcgatccagcctctcgtaagtcctgccaaggttcatgttaatgaaggcatcatgcactgacttgtggaccgtctcctccatttgctccttcaggagcttgttgtttgcctcaagatcttggcggctaacacattcatcgaagtctgtagggatccttgcttctttgtcgtcgcctgccatcgaaacacaaaaacaagaaacaaacggtgaacgttatccctaataatctcactacacgctcctctgaggtgaaacacaggaacacgctctaatgtttcttaccaagctcttacaagtgtctatcgaaatacaagcaaaggatggtacaatcggaggctggttcgtgatacttaccaagaggtagtgaaaccgcgattacaaggtcacagctgtattgatcagaagaaagtatgtggagtttgggaggccaaaaattaatatcaaggattaacaaaaatcgagtgcagattagcgaagtccaataagtgtccaaagcacaagtcacaattgctggctaagacgtgtcctatcgaagcacaacaaggtaaaggtaacaaggaatggtggaca

SEQ ID NO: 174601 - DNA, 567 bp, Zea Mays
cattactagagtataaagaattattttcttaaatataaagaattattttgttacctcaatccttgttgcttcatcgaatgtgttttcatctccttgaccaattggaccaatagccaatgatgcttcatctggcactagtgttggctctaacgatgcttaatctgccatttatatcaagattcgatcaggggctgcggcaacggttctatggtgccgtggtggtattagaggatgaggatgctaatgatgtcactaggcggagagatggaggctgatgatccaatcaggggcggcacagttgtgtggcgccatggttaactagtggtaggagaacaggcagccgcgatgccaccaggtagggactcgtacctgctcgcttaggcattatgacggagccgaacgcgtgaaaacaaaaagccaaagacccagcagccaagcggtggtgtctttcattgggcccatcacccagtttctaaggggctgcagcgttcggagtttgcaggctgaatgcacagcattttttccctgagaaagatactgagatgatcttgcataaaagtttctgaa

SEQ ID NO: 174602 - DNA, 661 bp, Zea Mays
cctggagtctggcactcggggcgtcggcagtagaccggggtgcgcattcgagactcactcacacccagtgtggtctcgcttcgccggaattgctcatcagagcagggtcagcgccgctttctgccccacaccgtcaacgtaggaggccgtagcactagaatcggtaatgattcccctataacgttgaccaccgttcgtactacgagtatttcacttcggattagccctagtgtgccggagcaggtgtggatgcttcactggcgcgtctcgccgtgagggatgcgcgccgcctctcgggctgccgtggttgtgggtgatatcccctggccttcggatgtaacgggaacgactaggattagattagagatggagatcgtatcgcccgttgattttgggattggcgactgtgattgattagatgagttggtttgggttcgttgaatcttgggcgtcgatctggaattgtgcggctcaggcttgtccgggggtgtgacgagttttcagccgttggatctagatccaaggcccaaagtcgagtactagtttataatagcggcaatctaatcatggccttcggttttgatcagatggccagatctgaccgatacccctttggccatggtattttgtaaaagagtccatgttcttccatttattccac

SEQ ID NO: 174603 - DNA, 671 bp, Zea Mays
caaaattttcccacggcggagtaactccggcgagcccccgtgggccgcccactgccccaaaaccctaaccgagacatgctatgcgtagtgtgggtcgatacaaacggcagagacgagtaattaccggcctcgagcgcgagatgtagtcggtccccgacgcgcagcggctttgcgactgtagggaagtccggcgagcaatcgccgaggctctggtcttcgagcgcccctggattcactcccacaccaccacggttacccgcgctctcacccggttccaacacgggtcgaatcgatggccggccaaggttgtccactacgcagcgctcccttcgacactacggcggcggcgatttgcggtgcgggtgatatggtgtggtcgcgcgacgagagatggcagggaagggcggctacgggtcagtatttagccaccgagcatgcggggttggcggcacgattctagctaatcccgaagggaggaggaggtatgccgtgacccgccatgcacggagctttcgttggggagggaactgaccaaacgggcccacacaacagaggcggacagccacacgcggtgcggtttcaacggagacggagacccggtttcccccagccccaccatgtcggtgagcgtgaggtgcgcggagataggtaatgggccgagcagaggaaga

SEQ ID NO: 174604 - DNA, 621 bp, Zea Mays
tcagaatcaagccagatggacggcgggttgattcataaaaactttaagggcctctctgcaaaatcgttcggtcgaaggggtatccgcaaacctcggccgttggatcaccagccgagggcacggattagatctggagtgcgccgaaaatggtacgcaatcctggctgtcagatcaaacatcgacggcgcagacacaattaaggcgtggtccgatctacaccgcacatccaccgatctgtggacacgatccgatcccacgaaaaggtactcccaaactaatctctaccgttgaacgagagtcggacgaccctgaggtaaacttcccctgagatctaatcttacccctccgtttaacatccgacggcttagcttcactcgacgcatcagcgtggatggatacgatcttaaccgttgactcatggatctggggccctggcttgttcttcttcctgcgcaccacaggacagcacctagcccacccgaacggcggcgcccaaccccggcgatgacccgcccgccggtgtaacactcccagtacatggcttacccgagctacgcgaaatggagaactatggcatgattcttacctgtgttgtcgcggtggcggatgttcgccatggca

SEQ ID NO: 174605 - DNA, 1361 bp, Zea Mays
aagggtttttaatgtcgtcggctgagaaaacaaattctggctgagcaacagccttggcatgatcacagttgaccttttccagaattgatacaaccccgcgggcatcagcaaaggcacaaaaatcccctctatcactaagaatttcttcaaaagctttggcctcacaactgatccattgaataactccatcggggtcaccgcagatgaatttctgctcggaggagaaggctccaactttagagaaactgttctttaaatttttagcgcactccatggatatctcatagcatttttctatgcccgcgcgaagctcatcaacattattttgtgctcttgatctttcaatttcgcatatctcatgcttaccacttcaacaacaaaattttgagtcgcttcgacaactttcctttgcagctcttgtacttcggctttgtgagcttctgcttgagcagacatcttggcttcactagacttcagcctttcgaccagagatagcaaaatcttatctttagcgagagcttgattcctaaaagttataacctccaaacggagattactaagtgccatttggcaactctcgtcttcaacatccttttgggccttcaaagctttactccggattagaccctaaaaaataaaacaaaagagtaaataacaaatgtaagaactactgaaaaacagtttggaaagtactaaagcacgaagccaaaatttgcaaaccttcaagctattgaaagcaaggttgtccgcaagttgatcctttgacatagcagataaaccgagcttgagcttcggaaatcccatgttgttcatcatctcgcggtagacgttgatttccttattatcaggaaggcaatataggaagtcctctttgtcatcccctccatataccaaggaccctcgagggtactttaggtccctggaataatgctctactttggcaatctgctctgaagacagctgctttccgaagcatgtcgaatgatgaattacaactctttatgaggtgcttcgggggcaggatgtttagatccctcgggagcactctcttccgccagttctattggcctagtttctgaaggcccagcttcggtaagagcgatggcagcgctcgcagcaatagcttctttcacatccttagtttttccgctagaagcttcggcagaagcgggagatggcaccttcgtggattccaaaacagcgtctaatacactagccattctcctttttcttggagtcgctatggaaacacttgatggcttcggcagttctgttgtagttgctggtctcagtaccttcagctattctgctgccttctctaattttggctcctcagccagatttgtatgagtttcgattga

SEQ ID NO: 174606 - DNA, 465 bp, Zea Mays
agatcaagcatggcatttatatccgcatcactagggttcaggggcacctcaaaatgaacctgtcgttcgttatcaggaatctccccaagcgaagcaaccaaagtactaacttcttcagcagagggtcgcactctaaggcccaaattgccatcagtcacaggcggatttgacacaaaaagggtgaaagctttgggaggaggcaggttccaggccgagtatgctactggagcaccaacatttgaaaccttacccctgaggatcatttcaagtcggcctaccaagtctacagaaggaattctcctattggtaacccgagttgagtcggctagccctcgatacagatatgctggataggccctgtctttcagtggctgaatgttcttgaaaacaaagtcagcaaccacagcttcagcagttagacctctctctttcagcagtcccacctcagttagcaacacacctgcc

SEQ ID NO: 174607 - DNA, 478 bp, Zea Mays
aaaacttttgaaaaccactacttcatcgtccttcggtgttggagtggtttcttttccagcaaaacgaacaagctccctttcagcttctccaaagtagcccagtttcatcatcatgggcatgtcagcatcagatacagtagatttcccaaaatctagatggctgggttttgatgggatcaaaatgctataatcctcctcttcttcatcggtattttcttcttcaatatcagtctgttcaactttggcaacagatgtaccttcgtcaatggttccctctgtcacaactaagcccgactgtctcatgacttcagaaattggagctgtctcggtggcctcggtctcctctccttcacgagtcacccttgcagtcgagcatacactggccatatgatggatctcttgcgatttttacgaagttgatgtcttttgcagttttgacgaagctagtcctttcgacgaagctaattttagatgacaa

SEQ ID NO: 174608 - DNA, 1008 bp, Zea Mays
aaagacaccccgtgcaaaagtcgcctaagggtgcagccggacaagcacaacaagtgtgtgatacgaagtcttttaataaaagacactccgtgcaaaagtcgccaaagggtgcaatcggataagcacaacaagtgcgtgatacgaagtcttttaataaaaagactccgcgcaaaagtcgcccaagggcgcagccggacaggcacagcaagtgcgggacatgacacgaagtcttttaaagacatcgcgccaacgtcgcctaagagtacttatgtatctgcacagcaacacgcaacgcgaagtctaccacatgagacaacccctatgcaaggaatcgacaagttgaagatcacaatacaagttgcaaatcacatacactcagcgaagggtcaccaagcccaccacaaataaatacaattgcgagggaaccacatactacatcggctcaaccttcgggatgatgcccgcctccctataattgaacaacattattttcaattcctcaccctcaaaaagattccgcagatcagtctcaccaatgctcgccccaatcagcaaagacagtagctctcattaaccaaaaccgctctactcgaagacggttccgctccatccctatccgcgcggcgcctaccacttcgcgaaaccttgccaacgctatgctttgacaccacccttcgacaccggcactcggtcctcgcactaggaagatgagacatctcggcaacctccacccacagcgaggactccaccgcagccacatctaacgcagcaaaatgatccaagtcttcatccgaagactctttggtccaagaaaacagactctcaaactcaccatcagatgaaaggacccagattcaaaaccagataatttgtcattggcaggcactgcgggtgcggccgccacaaaatcagtatcgtcagctacgattgcttgcgcaggtccgcacgtcgaaacctgcgtagcaaccgagttttagtatcacaaaaataaaatcctacattcgatag

SEQ ID NO: 174609 - DNA, 451 bp, Zea Mays
tagtatgcatgcaggatacgaagcagcaggcctatcgaggttatgatccctggtccttggtgcccatcgatcggcgagcacgctggggaagaggcctcccacaactggggcccattggtcggttggaaaagataggtagcgtctaatctagaaaaacttgcccccaaacgaacctcgcgacatcgtgcctagggtcgggcgtggcgaaaccggacagggggataggaacaccgaagggaaaccactcgagtggatcccgcgcctggcctaagaccgaccgcattaatcgtgactagcgccgagccatagcggaggcgccggtctacctcccactcgtgacctacaaacccctagggccaaagagcactcatgacctatgagccccttggactacgcctatttatgacatgcgtgtaccctagccagcggcgcactcatggcctatcgggac

SEQ ID NO: 174610 - DNA, 343 bp, Zea Mays
catgtggggttgttcaaacacaacagcgcaatcgcagaaatatgtgtagctactattcaaaataacaaatctgaaaggtgcctcaaggtctttgggaaactgttatacaataactacaatgacattcaattggtcgatccaagatatatatgaaatgaaatacaacaatgtaaaactaaccttttgttttccctacaatcagtaaaaacatccacaatagctagctgaacaaaatcaccgcagatgtccttttgtatttactgattgatttatttatgcttctaggtatagtgaagtcatttatcagctaatgatgcacctctaaaaagaatgattgtataac

SEQ ID NO: 174611 - DNA, 768 bp, Zea Mays
acgatagcatcagatgggatatgaggtgctgctgcaaacggagggtcataaccgtacaacactttgaaaggagaacaagccagggaagtgtggtatgtggtattgtacaaaaattctgctagaggcaaccaattcttccatttagaaggttgagcatggactgcacaccgtaggtacatctccacacattggttaacccgctcactctggccgtcagtctgtggataatatgtcgtgctcaggttcagcttagtgcccaacaacttgaataattgactccagaatatgctcgtaaagattttatccctgtcactaacaatagatctcggaagatcatgcaagcggaccacctgatccaaaacaacctgagccacttgtgttgcagtgaaagggtgtttcatagctataaaatgagcgtacttcgagaaacgatccaccacaaccaagattgtatcatagccactcgacttgggggcagtttttctatgaaatccattgcaatatcctgccaggcgccttgaggaatcgaaagcggttgcaataaaccagccgggtgaactcgctctcctttggccttttgacaaatttgacactgtttgacaaaatcttccacatcaatcttcatatccttccaaaaaaacaatttcttcaatctatgataagtggtgtgcacccacaagtgacacctgtggcactatcatgcaatgctgccaccaacttcatccggagaactgaattttggccaacccaaatcaaactgcccttccg

SEQ ID NO: 174612 - DNA, 471 bp, Zea Mays
cgtgcctccaaagaaaggtgttatgaaatataattggaatgcgctaggaaattaaaggacagctttgctagggttggggcatattcttctgagcagagattcatccgcgacgaccctgatggagttgtccagtggattagcgagaaagccgaagcttttgatgaaattctatgtgaccgaggagatttctgggcctttgtaggtgcgcggggggccacgtccatcttggagaaggctggttgcgaacatactaaggttgtggctcagtctaacttcgccttctcagttgatgacatcaagaatccttcagccgaagctgctacccacggtgggaaattttattccgagatatggctaatgagcggtcgagaagtcgctgatgaggccattaaaaagaacgaaaaggagtcacacgatgcttcagaagtggcgagaagggttgaataggctgccgagcgagctaggcttata

SEQ ID NO: 174613 - DNA, 324 bp, Zea Mays
gaagcaattgcgccaacaaggataacgtgaacttaggggaacttcccaagaataccacctccctacctgacggcgcctgcaataacactgtcttccaaaaacaggatataactgcgcgatactgggataaccaatccatacccaagataacatcgaatgcccccaaggaaatcacaaccagattggccgaaaaagacctcatcagcaagaatgacagaacacccctgacaaactgaacaactactaatggagccattagcagaactaaccaaaattgggtgacccaacctctgcaccgaaagaccagcccacgacacaaaatcc

SEQ ID NO: 174614 - DNA, 762 bp, Zea Mays
gtcgtggtggaaggcactaactccggctgccacgcggccatccctcctcccggccgtgtccggtcatcggcgccgctcccctctgttcgtccatgtcgcactgatgtgactgcgttactgtcgcggcggggacgtggcaagcccgtaagaatggttatcgcttgacgccgccgttgatcgccagcaaagaccggcaatggttatcaccatggccatggcagtggcttattgcgcctataaattcatcgcctcctcaccctctccgttcaaatcaactgagcacaactcttcgtctctaaattgtgaagccgtagcactcgcctacaccctcgattgcccaccatagccggagaattcccctttcccccaaattggtctccgccaccgtaaagcaccactccaccgtggccagtccgttctggtaaggcaccatccaattcgcgtgttgttctcatgtccttgtatgctggtgatgctctccaaaccgcccaatcaaactagaagcccaccaatcactgggaacacgagctaatgtctatagctttcgctgtcctcgtgggtagagcgaaatagatcaccagatatgaaattgattggggggaaaccattgataggccgtgaatttggtgtagaccgctcagtagcacctatccttgccccgtttggccggtccacgagctcgccggagctctgccgcgccatgcaccgtcggggactttaaacccagaatagatagaagtgggaggacttttatgcaaactg

SEQ ID NO: 174615 - DNA, 392 bp, Zea Mays
ggttttcccaaaaccatgaacagtgcgtagtataaaaactgcgcaccacacagaaacacaacatttttgcaaccatctctattagccccatggacggttcagcaacttggcttagatggtccctagtactcaattcaaccccttttcaaaatgtgcttctgaataggtttttctttctcaattggaagcgctattagcactcatgcttatgcatcaactatatgacctatgaggcactaagaaatttgtcaataaaccatcattgactcctcttgatagtatcactatctagcctactaacccgatcaatatacttctctaatctcctcttggtcgacaaaagggaaaatctatatttacctttgccttgagctatccatcaatcatcacaa

SEQ ID NO: 174616 - DNA, 479 bp, Zea Mays
gccaaaacccgacggggatttccccgttgccatccctacgcgtggggccatttcgtcagggctcccctctctgtcgcaacagactcgcgcggactcgcccctgtttctcttcccgtgagaatcgcgcgccgtggttgacctcgccgttcggtgcgtgggttgttgcgccagccgcgcaagagtagggtcgtggcacccagagataagtacagccgctacgtttcctcgcgcaagcccagggagtttcttgtcgtgcgcttagccaccattgtcgccgaccctgcgtcccggcattacctcgcgatagccgccgtcaagccatcctttcggtccggggtgctccggatccactctttgtcggtaaccccaagctcgtcgggtggagttggcaattgagagcccacaaatttgtcgccgccattgccgctgagtcgaccgacgccgcaccagtgatcccctcggccctcctcgatggtaac

SEQ ID NO: 174617 - DNA, 490 bp, Zea Mays
ccttgctggcggtgtggcataccttctatgttttgatgaagacgacgacggaggcgcaaatctctggtggccgcttcatcataattaccttcttcatcaatcaccgcatcatcggaaagacatggacgaggaggtggtggtggtggtggtgcttgttgttgcgtctccaacacagcaagtctgtcgacgatctgggacaatcgtcgatccagcctctcgtaagtcctaccaaggtccatgttaatgaaggcatcatgcactgacttgtggaccgtctcctccatttgctccttcaggagcttgttgtttgcctcaagatcttggcggctaacacattcatcgaagtctgtagggatccttgcttcttcgtcgtcgcctgctatcgaaacacaaaaacaggaaacaaacggtgaaggttatccctaataatctcactacacgctcctctcgggtgaaacacaggaacacgctctaatgtatcttaccaagc

SEQ ID NO: 174618 - DNA, 347 bp, Zea Mays
gatggtggaatgcaatcaggaaatgggtttacttctggtggcctaagaggattcctcacaaaattcaaataatgattccagtacatagctgattgagaggccggaatcatggaagattgggaagaagtattccctgtatgcatgggtgcccacatagttgtcggaccttgagcagggtttggaaaattcagatttcccacgaggttacaatccatagcactctgctgcatgtaagccgtgggccacatagggggtggaggaacaaactgctggccaattgatgagtttgacatggactgagaagaagtcgcattgtttgatgggtcctttctagtaagggtggacag

SEQ ID NO: 174619 - DNA, 362 bp, Zea Mays
cagccatgcaagacataagatccaatcattcaagtcaatacactagagcaacgttccatatcaatcaaaacctctcaagtatcacaaagatatagccatgtgcgttgaattgtgatagtgcattgagggagatagaataaagagtgtatttctgcgttgttgtgctcttgttctttgagttgtgaactctcatcctttgtaaaggctagcaagagactccaagtttgtgcagtaccttgcggagacttcgatcccttgcattggttagcgataaagagaggactcaaagagacccggttccttgggatgcctcaacagagacataggttcatttgagcaacaagtggcaagttgaagttcct

SEQ ID NO: 174620 - DNA, 654 bp, Zea Mays
cgaggccccaacactataaatgccagtgtgggcaatcagctttgtgaactgtgtaggcgccatgcacgaggtgagaatttttggtatgtttcacatgaacgaattacgcggtttgctgcacacacaatggctggccagtagaacccttggtgcatgactttggtgcgagggctcttaggctcgagtgagaacggtatatgccctcgtggacctctcggaggagtttgatgccctcaacctctgtaatgcaattgagcaagggtcggttgagtccttttctgtatagttgcccttgtattattgcgaactcgcagcttctgtattttaacctcttggcctcggcctgatcagtgggatggtagtggccctgtaggtacagagttatggcactctccattcttcaatcataattaagtttacaaccctctagcctttaggatcttccatgattttggaccctcggggtttttgaccacgggtgtgcctatcgtatggaagaatacatccgagggcatgggatcaccctttgttgctgcctttgctagcatgtcagcctcttcatcctgctactgcctatgtgttgaagcgtgaatcctttgaattgcctttccaaactccgcacaactgataggtattgcatgaggaccggctccc

SEQ ID NO: 174621 - DNA, 1055 bp, Zea Mays
cacgacattgagtttcggcctcgcactgcaataaagactcaagcactagttgacttcgtattagaatggaccgagcagcaagtaccagacaacccggaggctacagaagtatggcgaatgtattttgatggctcgctgaaactgcagggagtgggtgcagggatcctcttcattgcccctggaggtgaacaactcaaatatgctctccagttgttattctcagcatcaaataatgcaacagaatatgaagctctgatccacggattgaacattgccatatcactgggcattaagaggttgatggtatacggagattcactggtggtcataagtcagataaataaagactgagattgcttgaatgattctatgggcaagtattgtacagccgtccaaaaactagaagacaagtttcaagggttagaatttcatcatgtggaaagagatcgtaatgcagcagcagacgcgttgtcgaaactaggatcgagtcgagctcaggtcccacccggagttttcgtctaggaggtgccacgcccaagcatttcctcagatcaggcagaagagtgcaatgctttgagccaacaagactcagactctaatgactggagggggcctatcatcaggtatataaagaatgaagaagaatcggatgacaaagccgcagcagaacgcctcgcaagacagtcagcccactacaccctcataggggacacactgtacagaaggggtgcaataagagtcctcatgaagtgcattccctcggttactaggaggcaactgctagatgagattcacgccggacagtgcggaatacacgtagcatccagaactctggatgggaaggtcttcaggtctggtttctactggccgacagcaaagagtgatgcagccgagttagtccagcgatgtgaagcttgccaattcttatcaaagcaacaacatttaccggcacaacaactgcagaccatacccataacatggccatttgcgtgctggggactagacatgattggacccttcaagaaagctcagggaggctacactcacgtgttggt

SEQ ID NO: 174622 - DNA, 338 bp, Zea Mays
cgggcaaattctttgtgagtatccctctgacgacttcgcatttaccttcgcctcgggtagctggtttgggtgcggcatttcgggctcgtaatcgaggtttggctgggccggcaatggccgtcgtcgccgctgcggttcgtattgcgccgctggtatcatggaggaagaagactgtgcaccgttgatctgcgaatgagcgttttggattaggacgcgcgtactcatgtcggtgggagcgttctggaccctgggatcgtaatcctgcggttgtggcgcaacccctggtgtcctggaccatgactgttggatcgagatccaaccatcactagcgcatcccc

SEQ ID NO: 174623 - DNA, 432 bp, Zea Mays
ctgacttatactttgctgaaccatattctaagtgttgtgatggcagaggatgggtaaaatttcatgttaatgatggttttttgtaccgagctaacaaactctgcattccagagtgttctgttcgaattttacttttgcaagaagctcatgcaggaggacttatgggtcatgttggcgccaagaagacggagcaagtacttgtcgatcatttattttggcctaaaatgagaagggatgtggagcgacatgtccttcgatgcgaatcatgtcataaagctaagtctcgtttaaaccctcatggcttatacactccactacctatttcctagtgtgccttgggaagacatatccatggattttattcttggtttaccatgaacaaagcaaggaagggattccatttttgttgtggttgatcgatttagcaaaatg

SEQ ID NO: 174624 - DNA, 681 bp, Zea Mays
atgcaatgcttctcaacaaaatccttgctcatgaaagtatgcgatccaccagaatcaaaaagaatgacgacaggatgattggcaacgaaaaacgtacccatcatcacaggctctccttctggtgtggtagccacttaagtatagtagacccttctagttctcctttcacctttgcttgtccgagtgcttgccacatttcccttgccttgagatatgcttccagaagccttttggaagtttgatttatttttcttcggataggaacaatccttgatgaaatgcccagacttcccacagttgaagcagctattagatgaactcggtagggctgggaaatgagtaccaggggcactcggctgaatattttgagtagggacagtagttggatggatgaagaccagttgcttgaaaggataggaggatgggcgaggaaaagagcgatttgggttaaagggacggatcactagccttgaccgcttttcggatccttgagaggacccctcaccaccttcatgtccaaacctttttgtctttccatgtcccgaattctttgcctccaccgaaagtgctaagatcatggccctgctaaaagtgagatctagacaggtggccatcttccgctatagtcgatcattcagacctctcatgaaacaattcttcttttttaggtccgtgtcaact

SEQ ID NO: 174625 - DNA, 518 bp, Zea Mays
ctcaaaatgacctacctagctaataaaaaggttaccagctggcttcctacaaaatatagataacttttacctggaggatttacatacatctgaccaagttaacagctaacaaaatgttgaccgagcagctattatattggaaggcagcggcgatggttcttatcccctgctgcacaagatcctccgcatgtcccatcgcagcataacacaaaagcaacgaacacacacgcacacgcgcctggctagctaggcatgtctgttccaagagaaaggaacaaggaacgatggaaccaaggatggcgatgagaaacaagcaaagagcggcagggtctcagcacagtctccggtcatctcctgctggtggttcttcgtcacttggtagaaaatatgaatgattggcctgcatgcgccttgttttgcacggtagatcatatcgggagttgattgatccatgcgcattgcacagattctgttacttggacgtcagggcagcataatattcttccccggtccatcac

SEQ ID NO: 174626 - DNA, 663 bp, Zea Mays
ggctgaggacaagaagatcacagaccccataatgtttgggttttacgaagctatgcagaagaccaatatagaaaagaccaccaatgagatgctagctgggttgtctgaagattcctgcgatagcgatagttttgatgtggagagtgggaatgaagattttgaagattgaccgtggaggccgagccatgttgtttttgggaagtcaattgtcaaacaagggcaagtcgaagtgatgaagggcaaatattttcatgatgtttctatagtgaggatcgggggagaaagcattgttccccttcccaaagctgatgaggtggtggtctttaagagcttcatgaaagctaggcttcgctttccgctacacaagatgttagttgaagttctgaagacatttgagatatatcttcatcaacttacccccaaagctcttatcaaattgggggtttttatatgggctatgaggggctagggactagagccggatggtaggtgcttctataatattcacgagttatcttaccagatgaaggcaacaggaaaagaaaaatatcataacaaattcggttgttatagcttcgtgccccgctctgaggcaaattatcatgtgcctacatttcggaagaagtggccaggctcttggatgaagcaatggttttatgtgaa

SEQ ID NO: 174627 - DNA, 1163 bp, Zea Mays
ggaaaagaagaagaaaaaaaacaagcagatgttacatggtaccaccccttccctgtacgaatggacggtgcaccagaaatggcctgcgatgcgatggactctccgtggcatgcacgcaagccggctgcctctttacgtcgatcgttgtgtgcctgactgcacgcaccgtgcttccaccacaagtacgtggtcacacctcggccacaatagacaggtcaggcactcaggcgtaatgaattattgccagtccagcactagcacttgcagctgatgagatatatccgtgtgattggttggttgcctgtatcatctcgtcctgcgccacttggatcacgtgtattgactttattagagtttctgtttggttacctgcacgcgcacaacacaaaataagttatatctgtggtgcggccatccaatcaggcggccctatatgagagagtcagtacttggaaaaaaaaattcttagctagtagcaagccagtaataacatgtggcagggcaattagtggcctgaggagatcggagattaacgtactggaacgtcgtcactcgcctgttctttttatatcaaagggttcagcggagaggaggccactggtgcttattctgcacaaatcactagacaatctcaggacgaagaccgaggctagctagcgcctactactagtctactattgattagcgctgctaacgaaccagacattttttttcttcttcttttgccgccaatggtggaagaaggagttacagtttgacaatccaacggcaaggcaatccagctgactttagagaccgatcaaccatccacctttacctgatgtatatattccattcagcaggcgatgacaaaacggcctggaaagagtttctccaggctgatatcagcaggagctcctcctgtcacctgctcttcttcctcttcctcttcttctcagtggcctgcagtcagtcatggttggatgaatgggtggggtcatcagtggttaggttagcgttggcgacttgcgcttggacatttgaactccttaagcaaccgtcggtttcaggaacaggtgaaagaaaacgaccccagcagaaacgatatggcttttattccatccaatgaatataaacatcagattccaccgatacaaatatcccaagattcccatgtttttttt

SEQ ID NO: 174628 - DNA, 495 bp, Zea Mays
ccgcatagggcaaatcttatcccaactgccaccatgttcaagagcacaagctcttaacatatcttctagtacttggttggttctatcagtctgcccatcggtttaaggatggtaggccaagctaaaattcaactttgtgtccaagcactcgtgtaacttttgccaaaaccgagaagtgaactgggatccccggtctgacacgatcttcttaggcactccatgtagacaaactatatgtgccatgtacaactctgccagcctcgtgcccgaatatgtggtcttcactgggataaagtgggctactttagttagcctatccacaatcacccaaatagagtcatacccagtagatgtgcagggtagacttacaatttcttcccacttccattagggtatcttaagtgggtgtagtaaactggcaggtctctaatgtttagctttcatcccctggcaaacatcacacaatgctacatgtgaagctacatctctctttag

SEQ ID NO: 174629 - DNA, 322 bp, Zea Mays
tcactttcaaaagggctggcaaaaatacaagtcatcccaagatgaagacggctttgatttgattcttcttcaaatcaaatcaggccattccgttttcagaggctgtcaaaacaggccggccggccggccgtggaatattaatttctccgtggagcaacggatgattccactacgggtcgctgtcagctgagatgagagtccagttcccacctgttgtatgtatttcgccaatcggagactcgcttctccacctttttgtacgtgcgttgaactgtattgcttcgcacgttcattcgctcccctggaattagacaccgtcacc

SEQ ID NO: 174630 - DNA, 451 bp, Zea Mays
tggcctcgcaccctggactagggatggattcggatgtctggaggtccatagaaagataaacacaaaaatataatctgtaaagacgagttgagcagctagcctgatcaatcgatctgtaaagacggcgcacggtcgacaccctttcctgaagatcgatcgatggatccttcagctttgcagcatcaaatcatcatcaacaagaaccaaacaaggctgaactgaagtttccacgcacgaaaaaaacgaggcagcgtgccttttcgacgatctctgggcaagaactacgcacagtctgcgctatacccaacagatcatgcatcatacagcagtcagcagagcaggcacgtcgcgatcgctgaagaagcagcagcagctagagtagagctaatctgccacgacacacgactcgtgctcatgcatgcagcggcgcaggaggtggaggtgcatccac

SEQ ID NO: 174631 - DNA, 395 bp, Zea Mays
aatcggtatgctcagatagccgctagatttcatttggacggcacagattttatgatggttccactcatccaaaccgcacgatccacgatctgaggtcacgatccgatctcacgaaaagctacacccaaactaatctctaccgtccattgcagatctaacggtcattaacatcccacatcctatcgattcgcttatctaatctagaccctacagtgaggatccaacggtagcgcgttacaccacccccagcccacaagacggcggcgcgaggcatccccacggcggagcgccatcggcacaaactgcacatcgctcactgaggcttgattaccaaaattgacaggcgtaattcgatgtctataacattgcgaatgttgatgaggtattattaccgg

SEQ ID NO: 174632 - DNA, 478 bp, Zea Mays
tcttatcctttccgttctgttgcgtcttcttcgcgaaaccaagctcaacctcgcgcgtgaggttgggatcctccgcgatcctcgcatgcgcgtggtgcgaccgggtcgggagtagttgtggactccttctccagctatataggcgctgacgtcctcctgtagccgcaaccgcacccctggcggccattaccgtgggagtgagaccgtgcggtcggccggagtgagagaggtgcgccgcgcagccatcaaatacgtgggtgaagacgccttggatctcgatgattggggttgtgggtgctcaccgaagatgctcgtgacctcctcaaccccagaacagaatcgtgcgcctttggattgctcaccggagctccctcatcgccgctgtgccactccattgcgtggcccgcactgctgggactataattgttggtaagaatgccgtcatcatgcttgcctattcatcctctctgttaatcgc

SEQ ID NO: 174633 - DNA, 613 bp, Zea Mays
gttgattttttctgtaatgaaattggtggcaataatactcttgcatggtcatgtgaatccttgtatttttttctgatggattaacaccgttgtagataattccaatctgaaatccacactctccaaaaggaaaaagaagcggatattgtaaagccatgaaagctgggtgtaaagcagatattcgtttaagttctctgctctgtgtttcaataattatgtcacgcttaaatgtgtcaagagagaagtcaccaacaactaacattgcgagttcttccaccgatggtaaattatactgtacagaatcaccttctttggctccaattagtctgatgatgagttcttcgtttttattattagctagacgttctcttgccattctgaattttttaactaatggattgtgaagatcaagcatttttattagatcattcactatagtcggatctaaatccatatgtgattcttcactgcctttgatacattgtattctgttttgcacctcatttgcagtatcatagatatatagctgtataaacttcggaggagaaccatctggaggtaacagagacccaatacgatgatgaacttgaccacatattttgaatagcggcgg

SEQ ID NO: 174634 - DNA, 468 bp, Zea Mays
atttcgtagactcaacaaatagtgaatggggacggcgagttgttttctggaaatcgcaggggctctttaataaaagcgttggctgaaggggtatggagagctttgggtcatccgatctgcatcccgtggtgcagattagatcacgcaagggttttcaccatcgaccattagaacatgatccaagggcccagtactgaacgtgaagtacgagccgttagatgggcgatctagggacatgatgtaatggagacatgcacaatccagaccgcccgaaccggatcccatggactagccttattctaacccaaccggtatcactcctttcatcccagccattcgtactagatcggacggtgccgaccccatctcccccatcgcctcactctcctcccaacaacacggcatgccgccgaggaacaaacgccgacgacgaggtcaatcaagccccctactatggtattcctcaat

SEQ ID NO: 174635 - DNA, 399 bp, Zea Mays
cgagcctgtatgcgctgggggatgccttcgtcttgacgatgaaagggccctcccacctgggctccagcttgccccctggactctatccgagctgttcggacgagtacgaggtccccttcgctgaattccctcgggattattgcgtggtcgcgccatgcttttgtctaggcttggttattatttagagcctgtagagcgaagatgtggtctccgtcgataagatccttcgaagtgggttcgtccacatcggggacagctgacggaactgtccacggggacccatgttttatttcttgcggggtcatggcctccgatccatatagaaggcggaaaggggtgaacccagtcgccctgcactcagtctattttagcgcccagaccgcttcaggtaacaaatca

SEQ ID NO: 174636 - DNA, 535 bp, Zea Mays
cattgcactagtcaagtttgttcattagtaaccgagcgcatttgtatttaatcatcaactttcctctgtccaggaggctaaagttcagggttgtgaatgctctcagttcagatgtcgccccctttggtcctgacatgtgcacagacaagcagtagactaatagtagatcgatttgagaatttagactatggtttagcttactccattctactttagctgctagcataatagtgttaactgcccagtatttaaatttatggacaaaaaagatctactactagcataataagatctgctagtagtctgtgcttcatagtagtctgcacataatagtgtcacctccataaacagaattatcaactgaaatgtaatcaactgaaatttaattctgtgatggcaaatattatcaactgaaatgtaagtctgctacataataatctcagctgaactataattctgtgatggcaaatattattaactgaaatgtaattctgttatgtagtataataatctcaactacaactctgtgacaaat

SEQ ID NO: 174637 - DNA, 569 bp, Zea Mays
gaagttggtacgtggaagcaaaatacatttaaatcatctggttgactagttaaagttgctcctacttttgatcgattactctctaaatatgctagtaaggaggtcgattcacatgatcggccaacaaagcaatcccaaccacccacaaaagtatcacggtctatgaaaatggtccaaaaggcgacgtaacaagtgttgcatgttcatccatctctagtgatgacatggtacttttcaacagcttactcatcaccgatatatattgtcttgttcaaacatgggatagtgaagcggtaaacctatatttatatgcacaaataatccctttgtctattcgggctaggggcaccacaattttgtgtctaccgttcatcaagtagtcatggccgagaaagatgcaatcttaaacgacatttatgcattgaaatcttattgaatgattatcctattgagtgaaggagccggtgactagtgacttgcatcgagttgagttcttatttttgggaacaaaatgacttgtgagttctattgtttctcgaaaggtactgatagtacatgtgttgctggtt

SEQ ID NO: 174638 - DNA, 446 bp, Zea Mays
tacttcttcaccagcaggagcagaagggtcagcatcctggtccaaacacgacactcaccgaagccgtctctttttcttcccctcggcaggtgcagttggatgaccggcctggtggaggcatttcaggcgagtaccatcaggcttttgagtattcacggttttttcaggctctgggatagttgtagcagctattgtttcagcagggaccgagtcagaagaatcctcagccaacatgtccatcatagcacttatctctgcatcacccagactcataggcatctcaaagtgaacttgcctctcatcattgggaagatcaccaagtgaagcaaccagaacctcaacttcttcgagagagggtcgcactctaagacccaaaccactgtcactagcaggaggattggacacaaaatcgaaaaaggacttggaaggtggcagattccaagcag

SEQ ID NO: 174639 - DNA, 667 bp, Zea Mays
gacctttcaagaaagctcaaggaggatacactcatgtactggtagcaattgacaaattcactaaatggatagagttcaaacccattgcttctttaacctcagctaaggccgtggaattcatacaagacataatattcagattcggaataccgaacagtatcataactgacctaggatccaacttcacaagttcagagttcttcgatttctgcgagcaaaagaacattcagatcaagtatgcttcggtggctcacccaagagccaacgggcaggttgaacgagctaacgggatgatattagaggcactcacgaaaaaggtcttcgataaaaatgaaaagttcgcaggaaaatggataagggagttgccctacgtcgtttggagcctaagaactcaaactagtcgagctctacacggaaatactccttttttcatggtctatgggtcagaggcagtattacccgctgatctcaagtttggggcgccaaggttgatctttgagagcatagcagaagccgaagctactaggctggagcatattgatgtgctcgaagaagaacggctgaacacagtaattcaatcagcacgataccagcaaactctgagacgctatcacgacaaggtcgtgcgacgacgatcctttgtagtgggagatctcgtcctccaccg

SEQ ID NO: 174640 - DNA, 942 bp, Zea Mays
aactaagcctgcacattaggttttccatatgactaaaaaaatatttatcaatgttttatgctttctttcatatcccatgcaatagtggttgagtgaataactcgtgcagaaacctgaataaaagtccccttttctaagaaagatcccatgcattagtgtggatgtggttttgcatagctaaaggcattatatgcacactatgtatgctcctttctttatctgaggtcagaatactgataaacaaaatctttatgcaaatatatttatgaccaaggaatgtacttcaatcgatgcttaacttttgtatctgaaagtttgaagataactcttccaactttcctctaaaagtcactctaatatgcacactcagattaagagatttttacttagcttctttcattgttttcaaagtgatgcatgagatgactaaactattgaggggtttaagttactaaatggtatgtgtcatgacttgcaagcattatgtttgtgctatatgatcgtttgttactaaatggtatgtgtcgcaaacattatgtttctgctaggtgatccttggagtcagtttacttatagcaatccagacaagactattaaaaaatgacatggttccttttgctctgttcaatagattgaacgctcccgctgtgggttggatccttttgccgttgctgcaattcctacaatggattatagttctgaggccttccattcaaaagatgatgcccagtaagtacataatgcatgatctatagttagtttacctccatgtttgtgaacgtaccattgctccttcaaccaaattgcctattctcagaggcagaggggattacttatatgataacccatttgtacgattgtcaatgaaatttgatgcaaagaatatgtggcatatcatttagtgtccacacgatatcagtctttttttttctcttttccgca

SEQ ID NO: 174641 - DNA, 575 bp, Zea Mays
tgcgcatttagccgtcggattggagacctatggccacgattttaaacaaccgagatcgcactcgagccaccggattcagatccaacgaccccaacgcgaccccgaaccggtacgcgagggtttaatcgcagtcgtccaaccgcgatcgcacggtccacaacccatcctggccgagccgttctccagacccaatctccatcgtcgcctcaaaaatccgagggtcgtgagcttatctcctacctaccgatctgaggacggctgcgccaccagtgcttacgcggcggtgccatggccgatcccccccaaaaatccataacccggacggatcttcaattcggacgttgctacactgagccttgatgatcacgagcacaaagagataagtctcaccggttatcgcggcgtggagggcaccggccacggtgcagcacggcccgcggcggagcagaggcatcgaagagcaattccggcgactacaaggtccttccgtctcccctaacgcccccataagcttccctgcatatcgccgaaccccaccgtgcaccaatcgagcccccagcaacgctatgtctcca

SEQ ID NO: 174642 - DNA, 397 bp, Zea Mays
tgaggatcttccgggtgcgagtactgggcataggcgacaaagggcggtggcgaaacagagagtgagtgagttgtcgcgaagtgataggcgtcatcgtggtgaggtggagggtggtcgtcttcgtgtggacgagactggcaagcaggaattgctggcctcgccggctggggcgagtgtaggtgagggagagctgcaaagtctgtttgagggtgatgaattgaggataatgctattcaactacagggagatgggtatcatcctgaaggttgagccaatgtaatgtgtgatgccctcgctacatgtatgtaactataatttgtatgataaggctgcgtgccttcgctgatccggccgcgcccgtaggcgacttgtgcacttgatgttgcacatttattgt

SEQ ID NO: 174643 - DNA, 855 bp, Zea Mays
cgtggagtcgaacttgaggaggcaggtccagacagactgccacctcgttgatgagctcgaccatgaggtatggcccgtagaaacgaggcttgagcttgccggccattgcctggggcatggatgcagtaggtcgctgatgaaggcgaagcaggacccagtcgccaacctggtaggtaacatcgcgatggagacgatcgtagtggtgcttttgcagagcctgggcctactcgagtcagtggcgaatatcctccaggaactccgtgcgttcctccatcgtgcgggccaccgccggcactcgggagtcaccatgcgcataggagcacagggatggatgaacgcgcccgtagacgacacggaacggcgtgtcgcgtaacgacgactggaaggcagtgttgaagacgtactcggcccatggcagccagcgtagttagtcgcgtggatgatctcctgtcaagcagcgaaggtacatgatgatgactttgttagcggactcggactgcccgtccaactgtgggtggaaagtcgtcgtcatctgtagcttggtgccacggaaacgcatcagctcgccccaaaagttggaggtgaacacggagtcgcggtcggagacgatggactgcgggatgccgtgcagccacgatttcggtgaagaaggactgggctacagtctccgctgagtacggatgcgccaggggaatgaagtgcgcgtacttgctgaaacggtccaccaccgtcaagatgacggacttgccccagacgcgcggcagcgcctcgacgaagtccatggcgatgtccgaccaaacaccttgtggcactgggaggggcagcaacagtccgaccaggtggagatgtttcagc

SEQ ID NO: 174644 - DNA, 454 bp, Zea Mays
ctgttgacgaatttcggtagcagtcatcgttgtaggtgggcggtctgtcactacgacacctttcgtaaagttcttgatgtctaggtggaatggatggtcaggagggagaaattgtcgatgtttatcgaaggacgaatatttgccaccctttttcaaccaaatgaacctgagagcttccttgcaaactgggcatgggaacttaccgtgaacacaccaggcgcagaatagcccatacgccggtaagtcatgcatggagtactggtaccaaacatgcattctgaagtttgtcttcgtacctcgatcatacgtccataccccttccccccaggcatgtaccaattcatcgatcaaagactccatgtacacgcccattttattccccgggtgtccgagaattatcaacgacacgaatatattctgcctttgaaagcacacactaagggggagattgatt

SEQ ID NO: 174645 - DNA, 748 bp, Zea Mays
ttatagtattcgttttgtttggcttcagtcttccggtactcacaatttaatcttctccttaatagtattttcaagtgaagttatcctttaaaatagcactctgactcattttaattattttttcttatttatcattttcttttccatcacctctgaccaaaaaaatccaattgtctgtataaaaatttgaataaacttctatgaactaggtagaaattagctcaatctgggaactacatttgtacacacctctccctccaagatatttgacaacaaatttgatcttaggcaccacctttcaactcatccatgtacgtgaataaatccagaaatttatagaaagagggtgtgaatcagaatcctacctccccatcctagcctccatttcctttgccccgatgaacagctcccaatatcgtcatcttcaaaactgcctcctcgtgagttgcttgcctagcagatctcctgcaattgtgattgactctgattctttacttaccactatcacttgactgcaactctttacttacaattatttgactctgattctttactttccactatcacttgactgcaactctttacttacaactatttgactccgattcattcatagtatgctctatttagatatgagaaataagaaaataaaatgattaaaatgattcagagtgctattttaaaggataacgtcacttgagaatactattagggagaagaagaaattatgaatactagaagagagaag

SEQ ID NO: 174646 - DNA, 605 bp, Zea Mays
gagttgatgcttatccttctttgacgtggttggtctcctttggcctttcttcttggagttgccatccgagttaaggacatatggttaagatatatgtggtaagatagactacatgatatgggtcaaaatctggtttgatgtcaggtggtggttaatagattatgcaatccattaagactctattgattgggtaagttatgtaacttgttatataggtcaagttgttgggtatggccaagttgatataagtctccaaattaggtttaagtaatttaggagtatggccttatttttttttctaccagcattaagtaactcacactagattagaccatattaaattagatatgatctagattagactagttttagttagatagatttatcagggtaagatatatcttgttaggatatgttagaatcttttgagataggatggggtatacggtgtagataggtcaaaagctctattaggttaacacagagggattatgcaactatcggatgggtaaggtagttgcatatgtatattgtcaagttaatctagggcatcaatttagcttaaatcatttttataggagtgaggtctaatccatttcactagt

SEQ ID NO: 174647 - DNA, 1764 bp, Zea Mays
atcctgcaactcagcaaggagcaagcaggtgacgacggcagcagtagcagcatgatggtgacgagcagcgaaacgcaggaggggtccatcggctgctctagtatgtactagtgggtagggtaatggcgattgtgacccaaccgtccctatcgattgaggtggaggtccattttatagcgcatgcaaaagccaggcgctgctgcgtctacatgggtcatccctctctcgtttgatcggggacgtagagcataacaacgcagagcagagcagctagccagcgtccctctcatcactagtagtactatcgtacaaccagcccagctgtagcagactctcatcattatcgtaccactaccagcccagcagcagcacagcctgccggctacgctgctgctgcattcccgcatgcttgagcaagctatagctgtagggagggagaatcacatcactggagagcttaggtggggcgtcgagacgtgaggatacgtgacatctccatttcacccgtgctgatttaattagtatgtgcgcgattgtaatattaattaattcagaaattgaggtatggacatgctggatgctacctcgcgctttggtcgctggagtgcaaaaccaggagtagtagacacaccatctgaggaagcctgcaatggccacacatgctacgaatgtgatggaggctatggcacctgatccaagcccgtcgggagctggctgtggcggtggcggtggcagtggggtcgcacccttcttctccacctgccgagagcatggatttgtaggtgtatgcacataatataataataatacgatgaaatgtagtacgcagtgattaattaaggaatgtccgagacttaccattgcagtttgtagggcgagggatgatgacattccactgcagtacattacttgagtctttacacccgcatgagacataagacgtaggcaggtcaaaggtagtgttccttgaaaccatgtacacacataggcaacaaagacctttttctagttcatgaattggctagatgtcgaaggaatagaggagggcgtcgcagcatgaggaagtagggttttgtggtgtcgtctcctggcaggagagtagcgccacgctgatgaagtcaagcctgcaactcggcgaggagcaagcaggtgatggctacagcagcagcatcatgatgatggtgacgagcagcgaaacggaggaggaggccatcggttgctctagtatgtactagtgggtagggtagtggcgattgtgacccggccatccctatcgattgaggtggtggtccattttatagcccatgcaaacagtcgggtgctgctacgtctgcctgagccatccctctctcgtttgatcggggacgcagagcatagcagagcagcgcagagaagagcatagcagcgcagctagctagcgtcactctcatcactagtagtactatcgtacaaccagcctagcaacagcaaactctcatcattatcgtaccactaccagcccagcagtagcgctgcctgccgctacgctgctgctgcattcctacatgcttgagaaagttgtagctatagggagggggaatcacatcacaggagagctgaggtggagcaccgagacgtgaggatacacgacatctctatttcacctgtgctgatttaaatagtatgcgtgcagttgtaataataattaattgattcagaaattgaggggtggacctgctggatgctacctcacgctttgggcgctggactataaaaccatccgag

SEQ ID NO: 174648 - DNA, 498 bp, Zea Mays
gacgaagacaccgacaaggcaaaacaggagagttctcagcagcagttgggccatcgagccaggcgtccgaacgtgcgttacatgggcccagagtgggttgtgtaagggaaggtatatgtacgagagctgagcggctggcgagggtgtcaagaaaatactgaatattgtaatctaaacctgtactcgcctccttccagctgggggggcgcaacttcctaagtgccaataccctactatcggagtgtgctgctaacaagtggtatcggactaccgatcgctggactggagggtgctatccacttcactcgccggacgaagatggtgggggcatccgatccgagtatcgcgactgctctcgcggcgcagtcgaagcaactggatgcccagtcgcgcaacatcgtcgcccaatccaaaattctccagcaattgtgcgaccgtttcgaatcgcaagacgctcgctggagttctctggagaaatcggtcgcccacaactccgac

SEQ ID NO: 174649 - DNA, 682 bp, Zea Mays
cagcccctcaatataggcataagcaacaagcagatataaaaaagatgtgggctgctcggcaaacagtaaatacagagtatcgaattcaacaaagaaaaatagtaatacattacttactaatcaaacctttcattaatggcatcctctttattgtttcatttgttaagtacacctataacaccaaaaatacagagacatacttagaataacattaagctgaacctactcagccattgctggaaacaaaacacactaatatgaccctacctggctacacataacacaatattcgcatgaataataagaccaaacaaggatacagatttcttagccacccaatcaaacatggaagttttgtctcaataaaacatggtgaagagaatcccaaagaaaaggtaaatgcgctgaatcatccctgcaacatttaagtgacaaatgtgttttacaataataagaaaaaaggccactgcacagcagtgccttcaaactctattgcagcttgaatattttcttatataaaatatagaaattttcattagacagatacacattagattagttaccgaagagcaaatctgagcctagcaatagagtttgtaaactgccaccagatcggttttcctaacaacaaaatagtcactatcctgccattaatctacactaaaagagaggcgcttgcctt

SEQ ID NO: 174650 - DNA, 1293 bp, Zea Mays
caaattttaaatttacaaataaaaagaaaataaagcaggaaatataaaagaaaaaggaaagagcttgctgtgcctgggcccaaactccgctcggcccactccgctgtttcccctgcgcggcccaagacgccagccttccatcgcgccgactactgggacccggttgtcagcctcttttctcctcttcccctttctccttctgagcgacttgcgtgtgggcccgtgatgtcagctctcacccaaactccgtgtggcccacttaccagtccatccgtgcggcgcgctcgctaccagccatatccgacatttggaacccgcgtactagtcacattgtgtgagcacgggctctgccggtggcgcgcttgtgtcaacccaatcttcctaggcgttgttgcaatgccatggatgtcggatctgccgtggactgagcttcaatagagtcacgcaattctaggatcctctgcatgccaggcgatgattccgcgcccattgccccttcccccatgtacacgaccgatcaccccctggttggcccacgtacgggtcatgcccacggcaaccatggatgcgaaatccgcgggaatccttgccaacgtgcgctacctggccggattataggtgtataagtaagcgagctctacggccacctcccccacccgttcatgtcgtcgaagaccctctagacaccctcaattgacacggcgacgtgccagtattaccgccatccgcccctccctgtggccaagccttccccgcagcttcaatcggcggtggtctccatgtttgaattactattccgatagcaaatcacgagttggttagggtcgggatgcaccagcacgccgatctggcatgctccggtgatcctccgccgggggagccctaacgtcgcctccacttgtgccggtatttagaagatgagtccctagccgttggatcgggtgggtgcaggtaggattagatcctgataccgattcggccacgttaacccgtgaccgtcgataggagatccaaggttccggatggggtgtgtggtcaggtggccgatcgcccgttgatcctgccacgggtggctgggatggcgtgggaatactctagtttggcaaatctaatctggcgcgtccaattctgatcggacggccagaactctccaatactctttcgttacttttgcccaggacccctagagtttcgtgtaataaacccgcagtccactcggatgtctccctgagtcttagttacttttgtgctaggacccctgcacttcttgggaattgacgcgcagtccaggaa

SEQ ID NO: 174651 - DNA, 466 bp, Zea Mays
gccagggcgggcccacaagtaagctagctagcgcattggtgttgtcgtccgctgcctctagcgcgtgggcccctcccgccatgagcgtcacctaccgcgtcgtaacaaacctcatcggattgcgcgttcgatcagagtccgatcaatccaaacgtcttcccccacgctataaaacaggtgctgtgatcgcatggcctcctttcatccaaccttgggggagccaatgatgaagccgaatgccatcatcaccgagaactagagcgaagagggtgagggatccgccgccattgaatcatgcgtacatcgtcggcggggcctcgacatcgggtctgggagcctcaactcgacccagggatggtggtcgtagcttcgccgtgcccgattggtgcacggggcgctcggaatttctcaccgccgtggtgcgtcatattagattcttggggcaccatggacgaaactccctgcg

SEQ ID NO: 174652 - DNA, 316 bp, Zea Mays
ggcaacatatgcaggttgatgtcgaaatataatgagtttccgatcaactgaaaattggtttagaaaatgtcgtgagcaaccatcatatttccaatcaccatctgcacccaatcactcgaaatggccacgcgtacacggcaggagctaggttgctttacacgagcgtctagaagtagaacaccgctggcgtgtacgatcacgatccgagcagtagcgagctagctgctgccgttcgacttcgatcaccagtgcaccaaccaaccagcccgaactgcacaacggctgctgctctgcttcttctacctcccgtcccgcc

SEQ ID NO: 174653 - DNA, 687 bp, Zea Mays
caacatcttgtggtcatagacaggtgagcagaagaaagataatttgctagtatgtacaacatagagcaaaaagaccgactcacctagaggttggaaaggaacagcggtagatctagggcaggaggagctggggcatggcttgacaagggaaggtcagcaggaacaatctgaagagcactgtccggggtgacctcagccccaccagcagaaagtaggctccttgcatctagctcgccgacctctaaggcgacttgtccagttaaagctgtggaagctcgtgtttttgtcgctccatcggaccgaggtggggacgactcgatgtggacatccatggaggcattggaaagagaacacacctgaacaccctcgggggctgggttgtagtttgcactacccacaagagctggatcgctaccagcaacaccctcgagggctgggtagctgccagcgccactctcggaggctgggtcttctacagtagccacctctaaggatgaaggcccctcagccacctccatgggagttggatgactcagatcagcgtctctgcatggaagactgccctccaaggtcgacgatgcatgagacaccactcgggttacctcttgcccggcagaatcaagcaacgaaagcccaccatctgggacctctgaacagacggctaggatatcatcttcaggaggctct

SEQ ID NO: 174654 - DNA, 318 bp, Zea Mays
ggacgttgctggggggacgagtaatatggtttgtatctttggaatggatagccaaatgaagatatggagggtagaatttgcagggtcttctgaagatgctctaataacagatagggtgattctagtaggcacccatgaggttcgaaatgctccgtcattttatcagctaatcttacattcagtcagtttcagaaggaatgagatacagccatactggccataaatcccaaaatccctgaaacttggtaacaagcaatcccatgtgtggatataattccaaccatagcagtagaaactaaactagacaccttatccttg

SEQ ID NO: 174655 - DNA, 534 bp, Zea Mays
catcaccactttatcacaaaatggaaatgtatccttgggcttgcacattttgactactattgaggtgacattgaaaggaaacagacaattatacatacattgttagatatgctctaagtaacacatggcaagtataggaacaaggagatattattcatgacacgcttgcacagttatgttccatatccagctacgcaacaaatttcttgatgttaatgttatcaaagtagaattagacggaaacaacaaagatggtacaatagtctctggacacaaggtacttctgaaacctaaaaagtgaaaaatcataacgtttcctcccatataaatatgtaagtttctgttttcagtatcctatagtcctgataggatctggtactactgcagacaacaatcaagcagttaccggctgaatgctagcatatgaacaaaactaaatattcgctttcaatgtaagcacatcttgaaatgatggatatgggaccagaagactggatcacgctattcagtgcccatagagatgcacaccttcat

SEQ ID NO: 174656 - DNA, 508 bp, Zea Mays
gaccccaccaacatcacaaggtactctaggaattggatccccgcctttagctgtgggactatcaactaacatgccaggcgagaggggcagattgtgtcggcttcataaactagaacctccccttgtatctagtggattcgacataagcatggctcgaaaacctcagacctaggaattgggctgaccttgacgttcgaactcactgacatgtggccaagtgggtccaagcaatgagagatgagaacactttgatgcttagcaacacaatgaattagagaaaaacagtgttgttcagcctgttgcgtcaaggtaaagtgcatgagtatttataggtaaccaggagggtagtctcagccttataagtacaattatgcccttggttacctacgttatttccgaaatattctccctcaggggccactataggtcattacaatatggttaagtacaacccggactaacacaccatcaatcctactccgattggggcttacacatggtcccaaac

SEQ ID NO: 174657 - DNA, 828 bp, Zea Mays
cggcgaagcagacagcacaacccctgagctaacaagacggtggcgtaccctccctgagtcagcgagacgatggtgtggccacccttaatcggcgagacggtggcaaagcctcccagagtcgacgagacggtggtgtggcctctctgaatcgatgagacggtggcagaggctctcgagtcgacgatgcgggtgatggcccagcccctgagtttttgaagttgcgagtcggcgaggtgggcgatagcccagcccccgagtcggtgaagcagcgagtcggcaaggagggtgacggctcagcccttgagttgtggaagtagcgagtcggtgaggtgggcgatagcccagcccccgagtcggtgaagcagtgagtcagcgaggcgggtgacggcccagtccccgagctgtcgaagtagcgagtaggcgaggcagacgacggcctagcccccgagtcggtgaagtagtgagtaggcgaggtgggcgacggctcagcccctaagttgtcgaagtagcaagttgatgaggtgggccatagcccagcccttgagtcggtgaagcagcgagtcgacgaggcgggtgacggcccagcccctgagctggtgaagtagggagttagcgaggcgggcgacggctcagcccctgagtttttgaagtagcgagtcggtgaggtgggcgatagcccagccctcgagtcggtgaggtaggtgacggcctagcccccgagctgtcaaagtagcgattaggtgaggcgggtgacggcccagcccccaagctgtcgaagtagcgagttggtgaggcgggcaacggcccagccctcgagctattgaagta

SEQ ID NO: 174658 - DNA, 304 bp, Zea Mays
aatgatttctttaatgtcttcccttgcctttaaatcatttttaacataaaaccactcccccatccaggacccaggccatcttttccggaatgttgggaccgggtggcttgcattgggtcgagcaataaatccataacaactgaagttgttgtggtactgttctttgccagtagctttcgtctcatacaagagctcgtgcatgctgcagaagcactttatgctcggctccagcccttgactccttacagcccagacaaaaatccccatcctaattatagcttcgagggtgatctgatgaagaaag

SEQ ID NO: 174659 - DNA, 1003 bp, Zea Mays
aattatttggggacgaacactcataaagaattttggcggagttgatatgctcaagtaacaaatcatcaacatcgacatcaattgtatcgactaggccatttggatcaaccaagtgcaagcaaagccggacttgtcaatgtcttttctaggaaattctcagcaagaacaacttcatgtcatgcatgatcttaaggagtcccttggtccaagggtaggacctctagataaccatggtccacaattgatgggaccgcctcctcaatttcaacctctaccatctcattctcatatcatgcaggtgaatttacttgcctcttcttaaacaagtgatttgggtttttttattatgcggctgctgtatgcattgtgatgcttgttgggtttactaatgcaagctacggtgggcttgtcttgattttgttggattctgaaaatagtagtcataaaatttgtttccaaaatagatttcttgaaatttggtggggtagatgtgcatatctagtcataaagtgtcatgcatactttacaatttatcaattttctaaagcatttcacatcacatctacctcaatgaatttgttagataggggtgtcgaatgttactggtcttacaagtttgtctcaagggtctagagttagaagtaatttcaaaaggtggtattgtttggatttgaagtaaccacccataggggcaagatgttcagattattgataaaggaagtggattacccaagatgggaggtgaattgggtcactaaaacataacttatggttctatttaaatttctactagataaaccaaaataactaactagaaatatgtgcacttaggtttatataatgttctctaattacctaaatcatgagtttggtaacaaagagctaatcctataaaaacctaagctaataggaaaggtaaaatccacacaataaagcacatgcaaaaacataaatttggtaagtaaggagctcaagtaaggaggtctaaactcttaggtcaggc

SEQ ID NO: 174660 - DNA, 367 bp, Zea Mays
tggaattctctaagacgcgtcccccactctttgttaaagctgaagaccctcttgaagctgatgagtggataagggtaatggagcagaagttcggattaatccgttgcactgaaacacagaagtcgttgttcgctgctcaacaactgagaggccctgctagtacctggtggggaaattttgtgacaatttaaccagccggacatcaggtcacttgggatgaatttaagctcgcattccttgaacactacattccggagggagtgctttacatgaaacaagaggagtttatccgactcaagcaagggggagatactgtcatgcagtatcttaacaagtttaaccatttatccaaatatgctattgacca

SEQ ID NO: 174661 - DNA, 534 bp, Zea Mays
tccgattgtctcccaatcactcctcttttcgtcccctttttttgctcagattatcgtgttgtgatggtgcttaagtgtcagaggaggggaaagggggcaccttatatttggcgttggcggttttattagtgtttgtggagacaagcgcaaagggagtaattttgtttttaatgtaagttcatctcctccgctggcctttccagtcgatcgaaagctcattgtaataaaggaagcaattttgacgtgcgtgtaactctcgcgattaagggacgatggagatttttgatgcgctagtagagagtccaggaactccgattgatacttttggattggtggcgttagagtctacgaggtggttcatctgaaaaaaaaaacaagtaaacaactgcctcctgtccctccctccctcccttaaaggtttgacgaatgaggaaagcgatgcctcagttcggatgttctgttcaccaaatatatccaactcgtctctgtcctgtccaggtccagctgtggttttgtatgtgacgcgtcccatcg

SEQ ID NO: 174662 - DNA, 317 bp, Zea Mays
gggcagtggtatgtgcttgtggttgtcgatgacttctctcgctactcttgggtgttctttatgacgacgaaggatgaggcttttactcatgctcaagatttgattcttcggttgcaaaatgagtttcctaaaaatgccatgagagctatacgaaggacaatggcacataattcaaaaatactcaatttgcaaccttttgtgcatctttgggactcgagcatcagttttcctctccgtatgtgccccagcagaatggtattgttgaacgcaaaaatcggacccttgttgagatggacaggatgatgcttgatgagcat

SEQ ID NO: 174663 - DNA, 1095 bp, Zea Mays
aaggctcctttcggatatttcagtttttgagcataatgccatgcttccgtgatttcatcttcggacaatttcttccccgaagcatgtcgataaatgtaatcaacagcttcggctggcgcttcagaggtaggagattttgccctttctgccatatcttgccctgctgtcagaatggtatccaaagtttgctgatcagtttggacttcagacgtgacagccttcgtctcactgggcattgagggcccagcctcggcttcggctttggcctgcccagcttcaacttcagtttgcgctttggtagcttcggcaattttctttgaaggagcggggctcaagacctttgtagtctctagcacaacatctagcacgctggccattctcctcctcttaggagttgcggcagaagctttttgtgccttcaacagttttgcctctattgaagggctcagaatttctggcattttcattgtttcttccgcctgtggctcttcggccttatcatctttagatatggttggcctgactgtaggcaccttcggcactacagttggctcttcagtgctctgcacaatcggagcagtttgttttgcttcgacagctgaagaggaccctacgccaaattcaggtactacggtcggttcaatataacgcgaccggtgggtcagaaccttcacctttttgctctttggctcagctggggtgaccgaagcgtcaaatttcctctttttctcttgccctcacagcaggtaacggtaatcagggtatacgaagccaatagcatcaaataccctgtttaatcttttcttgccccgacctccaaaggttgcggacagagcattatcttcggccttggagtatgctccaagtagctcatcgctggtagcttcaatacacttcagccagtcgtcgtttggctcatcaaacttctccctaaatctgaaggtatacttcagtcggaccagaccaccatcactagaatcggtggtggtctccttcgacatatcccagctttccacaagtggccataccctgaaggatatatgctcttgaatcaaatcccttgtgccaatgaagtcacaaacagtgctaaaagcc

SEQ ID NO: 174664 - DNA, 636 bp, Zea Mays
gaagaactcaaacagatagattttgccctagtgcaagagtccaaataaggggatagagttccccgctgatttaatagttatcggtaaccaggatacaactatagatgtcatcctagggatgaattcgttaaccaagtaccaagccagtcttagctgtgacaagagaacagtgaagttagtgtccctatcaggagaagaagtgttagtggagttggtcttgtctggaccaaggaaaggaagctgtcaccaagttaccgctcacattgagttgattaaaccatcagaggctatcagtgtagtattagatttcctagatgtgtttcccgaggagttaccaggtatgccacttgaaaggaaggttgaattcgccatagagcttatactaggcagcgcccctatttccaagagagcctatcgagtgtccggaccagagttggtggaactcaagaagcatattgatgagttgtcggagaaaggctacatcagaccaagtacctcgccttgggcatccccagtgctatttgtggagaagaaggatggcacaaagaggatgtgcgttgactatagatccttgaatgaagttactatcaagaacatgtaccccctgcctagaattgaagatttatttgatcagtt

SEQ ID NO: 174665 - DNA, 395 bp, Zea Mays
ctacgggagggcggcggccgggaatttgatcggtgacgcgcggcggtcagagaaagggaaaatttactggcgcaatggcttggtgtccagcgtcgtggcaattgctccagcgatcaacggggagctagaatgagtcacggtgatgtggtagataagcagagacacgcggcggacaacggcgacggcataacggcggtgagaatccttatccgagggcggtgagcaaggggagaggtatcgcggctagccggagtggcttccagctcaccggcggcgatgatcttttaccccgcgacgttatcgactttccccgagtacgaattgggacgccggcggcacgaatcgtggcaaggagatcgtcggcggcgagggactgccgcgctagcgttctgatc

SEQ ID NO: 174666 - DNA, 721 bp, Zea Mays
cacgatcgttgcactgagcagtgtgcaactcacactccacggtacgcagccaatcttcggcgtccatggggtcagtagaatgggcaaagatagggggatggcccctcatgaacttcgccttcttgtctctgggcaccgtggcatctgaacttgcacctggtgggggttgctgctattgcacctgctgcattgctgttaaagtctgaccaattgcttggactgcttaggtttgcatcaggaacatcttctcaatggtcattgggggtggcggtggcaaatgctgctgagctgcctcctcctagggtgtctgatgctcttgctgagcatgccttctacctctgcgcctattctcagacatctgtagaaagcacacacacatcagatatgactctgcactctttcagcacaagaaaagatataaggaaatcttcataatactaaacaattgatcatcttcactgactctcaacacagccaacacaacttctcagataaagaggaaagtggatataaggggattgcccaactaaatgactaactttattaataactacaccaagttatgagggatgcccacaacttagtgacaatcattacaaagatccaacatcatcataagttcatcacgacaagcatcaaaacatatgataagcaaactaaggctaactaagactgactaagactaagacactgaattaagcattattacagactccgactc

SEQ ID NO: 174667 - DNA, 406 bp, Zea Mays
gtcatgtttagcgacctaagagcaactccaggagcttgtgaaaaaagtcggcccgaaaaccagtttgagggatactataatttttttcataggctaaaagtatgtacgctagaggagaggagtgccacttgactcgtctgatccatttgcttctgcatgcagggaggacaagcaccaactgacagcgtcaagagatagagatgccagatagaaagtaggatggcagaggagcaagaagccacgaaagtctagtgttttcgcacgcaccaaagtagcagcccaggagaagctagatgtgtgcgccggaaaaaagattgggggcttcccacctcctgcacaaatgagggtcctcccacacaaatgagggtcgccagggatgttttcggagctgctgaactaatgattt

SEQ ID NO: 174668 - DNA, 688 bp, Zea Mays
cattttcaaatttggattcattacttcttctgtaatgtttttagagtttttcttttttgctactgtgcttctatgggttagtacacgcatatctcttttctggtttttctgtgatttattatttatgaaatcatgtcatcaatatacataattcactcctaccgaatatgagaaacagagggcagcaaatgtgatgaggaataatcagatgttccaaaggcttgggattaatcagttacgcacgctgatgactggtacaagagtaaggagaaaaaatgatggtctagaggaatctgggtctttgtttgatggcgaggagagcaatgactccaagaaagaggaggtaagcaagtttgtaattcgtctatttgtttcctcatgttatatataaatatatcattacacttgcatttgcaaacaaattgatatgcacatgattattgtgttattcctacaggattcccatgttgcaaaaggtgtatgtagccataactctactgatgttgctgacaaacctacacaaggaacacgaggatctaaaagggttgtggcccctgatgttcatgggcaacaaattagattcacgaggcaaaggagtgctgccataaaccaacaatcttctctaagcctaactactactacacataccggttcaagagccaccacaaaccaagaatccctccaaaac

SEQ ID NO: 174669 - DNA, 731 bp, Zea Mays
tctcccaagtagcctcatcttcaccatggtgactccattgcactttgcacatctttatcaccttattccttgtaacccgagtccaagtttcaataatcttgataggatacttcgtgtaagttagatcaccctgcatactaagttcttccattggtagttgttccttagggacaaagagacacttcttgtgttgagacacgtggaacacatcgtgcacatcagacagatggtcaagtagttcaagctggtaggccatctccccaactcgcctaaagattctgaagggtccaataaagcgaggggataacttgtctttaacttcgaatctcctcattccatgaattggtgacaccttgaggtacacatgatcaccctcctcaaattcgagtggcctccttcgattatcagcatagctcttctgccgggtctatgctaccctcaagttctcctgtatgaccgtatcatacggacttgttcttctgcctcttgaataatttcaggtccaaagaactgtctttctcgagtctgatcccaatagagaggagttctgcactttctgccatataaagcttcaaatggtgacatcttcagactagcctagtaactattgttataagagaacttagtatatggtagactcttgtcccaactgcctccatgcttaaggtcacaagctctcaacatatcctctaatacttggttagttctctcagtttggccatcagtttgag

SEQ ID NO: 174670 - DNA, 536 bp, Zea Mays
tttgatattatggctatttcaggatgaaccattggaccaacgtgcctttgttctgcattaccttacctttcatcgcaacaacagggttgcccccttcctgcagaactgctgcctttcaagtatgctccaaggagacgccgctgtttgaaagccaagacctagatagcatagctgaacatgattccctgtgggatccacaaaactgtttatgttacttgttaagtccattatgtcaggcctctgatcatgtgtttgatactccgtgtgccacttatgttcaatgtgtctaatgtctatgctacttcgcatcagtttttatttgaagtgtgtcaaacataagtgttaccagaatgtctatttatgttatctgttaagaaattctatgctgtttcatctccagtttgtgagatggttaatcgttttgcttccaatgtttggcttagttgtattatcatattgtttcaatattcaagttttatgcataatatatacttccttattttatatacactaggttcatcttttatacattttcc

SEQ ID NO: 174671 - DNA, 455 bp, Zea Mays
gtccgttctgcggatagctgggagctcggcttttatggctctaggagcccgcatggttgcgtagcaggcggatgagacggttgcaatagtcaccaagatcaccggaggggggttgttaagcttcgcgcagatccagctcggtgttctgttcacagccgaaccaactcagcggagacgaggtacctgacgatgagggcccacgtgccatcgacagaggcaatgcgcgcaacggggagaatggtcactgaggctgccagatggggctcggttcgacagcagaggggggaaacggcgcgggcggaccagggtcgccagtgcgcgcgaagggaatggtgggctgagggagatttggcctagaatgcggttttctgttttctttctttttattatttattttttgctttattttcctatccaaatttccagttcatttcagaatcaaatttccaaattcc

SEQ ID NO: 174672 - DNA, 455 bp, Zea Mays
ccttaggtgtcgcctaataacaagataatataagccttacctcttacatgcacaaaccaccacgaacgcttcctcctcctcgctgtcgtcgtcatatattaacccgcaacttctcatatcgcctccctcaccctagatcttccgcaccaccatagatgacatcgacctccccctgttgacccagcatctcaaaccgctgccgcaactctcctccgctcgtcgtacgcctctataggcattagggcaagaacaaccaagggagcaaccaaccatgcaaccaccagtccatccaccatgagtgcttcctcctcgtcgctatgtgcctctataggctgcagggcaagaacagccgagagagcaaccaaccatgcaactatcacaagcacttcctcctcctcgttgttgccatcgtatattaacctataacttccatctctttcgcatcttcgcctctc

SEQ ID NO: 174673 - DNA, 292 bp, Zea Mays
gttcgggtcggtgatcgtcgctggttcgcggtggagctgtcagcgggcgagccgagtagagttggacggggaagcagcccgaattgcttgccgaaccttgcatgaacctggagatatgccgtcgccgcggattggccttcctcacggcgataactcgggtaacttcccatccctaggtttcgctttccgcctggcatcacgtagacgcgttcggatcaggctttgggcatcgggggcctggaattggatgtcacgggcggggtccgtcgcgttgaggggcgccgccgccgtg

SEQ ID NO: 174674 - DNA, 4307 bp, Zea Mays
tggctgttccagcaccatgcttgcaggacagtcaggggaatgtccagatgcaattgttttttaacgcttgctaccaatcctaattttctgtgtttggaaaaataaagaacatgtgggtcatggctgcatgatacttgtatgagacaatacatgcagtatggtgcaatgtgcctctagaagcatgttaaggtttctatgttattgttgtggatcttctgaataatttgatattggtccatagaactttgggcttaacttggtagtttgctgctgacactactactactacagtaagttgttgtaagcgcacacataccccaagtgccaacctcaaatgtgatctccctccttgacctgtcactgcagttgcttccttgtgatttgggattgtatcagcctctccttgatctcaccgatgaactcatccctatcccgcaactgtctgtctactgctgcaagttttgaagaacctgcgccatatgataataaggtgggtggttctcggccatacaaaactctgaacggggagcacttcggtgcagtttgataggaagcattatagcaaaattctacccacggcagccgctgcagccagctcttcggttcatcgcctactgaacatcggaggtacacaacaattaccctctttaccacttcggactggcctcctgattgaggatgaaaggctgaactgaggtttagtttgactcctgctagccaaaacaatgcaacccaaaatacactcgtgaagactgtgtcacgatggctgacaatggaacaggaaaacccatgaagacagacaatgtcctcaaagaatgctgccttaacaacggaggcagccgtgtacggatgaccaagaggaatgaaatgtgcgaacttagaaaaacaatccaccacagttagcaccactgtcttgccacccacttttggaaatccttgaatgaaatccatggctatatcactccaaatttcagagggaactggaagtggttgcagcagtccagccaggtgaagattttctgacttatagcgctggcaagttaaacacccctgaacaaattccttcaccttggctgcactggatggattgtagaatgatgccctccagcgatgtaatgttttatggataccctcatgtcacgtatcatgtgcttgagtgagcagctctttccaataatgacgatgcatccggcacaaaaaacttttcctttgaacaactgcaggccatcaacatcagcccacctgactggagctgagccggctgtcagctgctccttaatggacagcaccagcgggtcagtagcagattcaacccttagggtgtcaaacagctgaaaaattggtgctgaaatactatgcagtgctgctgaatcctcatcacgtcttgaaacggcatcagcggcaccatttaatttgccaggctgatactccaccaccatgtcatacccaaacagcttactcacccatgtatgctgtggaattgtggacaggcgttgatcaaggacgaatttcaagctatagtgatcagttcgtactttgaatgggcgcccctagagatatggcctccagttccactgctttcaccaatccaattaactctctttcatatgtcggcagtttcaaatggtgatgggctactggtttgctgaaaaatgccacagccccatctccttggtgcagaactgacctgaagccagcgcccgatgcgtcacagtccacaataaatggctggttgaaatcgggtagctgaagtagaggggctgagatgagggcctgtttgaacagaacaaaggctgctctaaatgcttcccgcttcagtagcttggttagaggcactgctacaccatatcctgcaataaacttgcggaagtatcctgttaagcccatgaaacctcgcaatgctcgtatggagcgagggcacggccatgcctctattgctgcaatttcatttgggtccatggcaactccagaaactgatataatgtggccgatataggccaccaatgtcttgccaaaagtgcatttggacttcttcagagccaatcggtgatccctaagtacttggaaaacaagtttccatagtttcacaggcgtcacctaggcatccatgcacccaaaaattttaggcgtcctcatcgcctagctaataatcagcaagaggggaaggggaagaacggaaggagatcaaccaataagcccagtagagacttaggggagcgagagcggcggtgcagagactcagggagcggtggcacaaagcatgggggagcaggagcggcggcgctaagacagggggcgagcgacacgcagagacaagatcaggtgcaaccctaaccaccaccaggggaaggatatatgggctggctggtgggctgggcaatttcttatacatctcctaccccttccttctttttccttgttctttttcttcatcatctatgttgttgttctgttgtttctctaattggtaaggtgtcgccttgctcgccttagtaagcatctaagcgttgcctaggcctccaggcagtggtccaacgccttgcctcgcgttaccgccttaagaaccatgcatgtttcatatggtgaaggtgtgctacccaagtggtactgaggaccagaatagcataaaaaccagaatggatttatgatgaagggcttgaggatgtcattcatcagtgactggaaggtggatggtgcattcgtgagaccggacggcattaccaagaactcatagtgtccgtgatgggtgcggaacgccgtcttgtcgatgtcgttcaggtgcattcgcacctagtggtagccgctgtgaaggtcaagcttggtggagaatgtggtgccgtgtagctcgttgatgacagggatcagaaacatgtcctcggctgtaatagcgttcagctagcggtagtcaatgcagaaacgtcacgagccgtctccagcaacaccggtgatgagaacgctgatgtgcactccctgatggtaccctgctgcaacatgttctcacattgccgttcaatttcattcttcaacagttgtgggtagtggtatggccacaccaccattggtgttgatccaggcgtcaacctgatgtggtggtcatggcggcgttgtggtggaagaccgtgtggttctgcaaagatgtcggagcaagaatccaataggggctatagaaggtcgcggtcccttgtcaaggctgagcagtgaggcagtggagcgcctagcctagtccacgtcacaatgtgtccattacactaaattgtcatggctcgagcatcaaaattccatagtatgagaccaagagagtggagccactaaactcctagcactatgtcaaagccggcaattggtaaaacatagcagatgtggtagaataccttggtgtacacatggaaacgaagcttggggcaggcaccgggactggcaaccccgtcgccatttgccaccttcactgagaggcctgagtgtggtgtgatttggaggctgagatctcatgtgatgtcctcctggagaaaggaatgcatggactcggaatccacaagtgccaccagagatgcagagctgatgcacaccttcagccacatcgtgacaccaacatcaattccaacgagggcatgtaagatacccaaattagcagccgcaatatcttcttcctcatcgtcgtctagtgctaataagaacacccctgtggatgcgcatttgtgctcgggtgtgaacttctcgttgcagtgatataattcaccactagctcgtttggctgcaagctcctctgctgacatccgtttaaactgtggatggttggtctaggccgactttgctagtactgtttgtgtgccgaacttgaatgttgatatcgttggcttggtgttggcctttgtggctttgtccatcttgttgggtccgcgtcccggcgttcataggctcgtgtcaaactcatggttgtctgtgggagcaatggggactgaagctccatgtctttgcgcaatggttcgcccagccctgcgatgaagagattcacatgctgcaatgtggaaagatcatcgcagcgacacaggagcaccgagaattgtcgtatgtagtcgtccaccaatctcgtacgtcagagatccttcaattcggccaggacgtttgtgcgtagggtggtccgaatctcatattaacgaagttggtcaaacgggaccacgagagaatgccatggtcgtgctccagagtataataccactctacagcaatgccttcaaggtgtaatgccgccatccaaacacgttcctgaaagtgcattcatcccttttgtgagttttggtgatttggat

SEQ ID NO: 174675 - DNA, 598 bp, Zea Mays
aaagaatgcccgccacggatcttcatcgagcgcggggtgttgaattggatgggctcggttcgttgctcgccgagggaaacaccatcacgaccactgcacccgcgggcgccacggccacgtcggggaaaacgtctgatgcggctctatttcctcgccggtgcagtaaacaccgccgtgaatcgggcgtacgccatgattagggcatagcgatgttcaacgtcggtaagcattccctcatctagctcgcttagttcgtctcatggtgtggattggattaatctccggtttggcttgcctgggcgcgtgcgcctgttcgccggtaatggccaccgccgctcggcagctggggtcgccgcggtctgggcgggtgaacggcggggtcttcagaccgttgatctcgagctgactggtctagattaaacctatgtaccacttcggggtaggcttgtggtggccgttgatctaaccgtggacgcctcagattggatcgcggtcatttaaaatccaagcccttgatcgctgatccggtggtccagatcgcgtaccccttcatagattaaatcaagccgttgatctctaatcctacgatcagtattgc

SEQ ID NO: 174676 - DNA, 489 bp, Zea Mays
tggaagaacgtcaggaatttctcgccgacatccacactcgtctcgagcaagctcaggcgtttcagaagcatcactatgacaaggcccatcgtgctgtttcgtacaaggtcgatgattgggtgctgttacgacttcgtcaacgcccggttgcattgctgccctaggccacttccggcaagctcaagccacgctacttcgggccctaccacatcaccgagatgatcaacgaggttgccatccgccttgctctcccacctcaggctcgcctgcacgacgtgttccatgtgggcctcctgaagaagttccatggcgctccgctagaggctcccgaccacttctgccggtccacaacggcgccatcactccagagctggaacacgctgtctgtcggcgcgtcgctcgtggcgtcgagcaggtcctggtccattggaagggtccgtcctctgcatcggccacctgccacctgggaagatattgagttgtttcgtg

SEQ ID NO: 174677 - DNA, 946 bp, Zea Mays
caagtggacacaagcattttctgtcaatgtaatagaactagcaagcaaaaagtcttggttcggtcggaaatggccgataaaggcaaaaacattgtcattggtgatccttgcatgtcgaatatattacaaggagggattgcttgaaaagctccgaacaggaagactaacaagtccgcagacgccggggggcaggctcaattgagcaatcgagctaagctccctgactcgagcatcgcggacggttcggcacctgtgcgcggattgttcggtgctcaagcagacggtccggctgactcagccggacagtccgaccataaccaggggcgtcaacctccacacaaagcaaaaaaggggacacgggggcaaaacacacataacacacatgatcggttggtcaaagctggccctagtcagccggacagtccgcccataaccaggggcgtcaacctccacacaaagcaaaaaaggggacacggaggcgaaacacacatgatcggttggtcaaagctggccctacttttgatcaattcctctccaaatatgctagcaagaaggtcgttctacgcgatcagccaacaaaaaaaccctagtcacccgctaaaacaaaacgacccaaaaggcgatgcagcagacatcgcctattcatccagtgatgccatgatactttccagttgcctactcatcgtcgatatattatcctgttcaaatgtggaatggtacgacgatgaacccatggcacatgcatagtctctttgcctgttcaggctaggggcacctccactctataccttttgatccattgatcggatggtcatggccgagaaagatgcaatctgaaatggccttatgcattagagctctattgaatgatcaccctgtcggattgaaaagccgatgacttgcatcaggcttagttcttacttcgggaacaagatgactcgtgagg

SEQ ID NO: 174678 - DNA, 338 bp, Zea Mays
gatattgacgtgttggaggaagagcgattgaatacaataattcagtcagcgagataccagcaaaccctgaggtgctatcatgataaggctatacgacatcgatccttcgtagtgggagacttggtccttcaccgaattctaacaggagaagggcggcacaagttttcaccgctatgggaagagccattcatggtatcggaagtcactcggccaggatcatatcgacttactcaaatggatggcacggaagtggggaattcatggaatatagagcacctcaggaagttttacccttagcaagagctatcggagcaacgttgtactctgtaattggaaaa

SEQ ID NO: 174679 - DNA, 1257 bp, Zea Mays
ggcaacaccctcgggggctgggtaaccgctggcgccatccttagggactggattctccgtagcagccacctctaaggatgaaggattctcagtcatctccatgggaatagagcaacctagaccagcttcttgactccgaagaccgcactctaaggtcgacgaggcacgagacgctgctcgggataactctaatcccacatctggattatcagagcaaacgtccatcataccaccatctgttggctcggacaacagatcttcaggtaccacatcctcgagagcctgatcaaagttagctatggacaattcctgcagaccaacaagagcagacaaagctggagaaggaatatcgctacactccccactaactatgtaacaccgactgttcttccgaattaaggagatttcatcctcttcttcctcatcttcgtcaacaatacgaacaacacacccattggggtcagctctggccggatcacacccattgggatcagcatcatcaaggtcacacccattggggtcagcttcagtagggtcacacccattgggatcagcatcatcaagttcacacccattggggtcagccccagtaaaaagttccacgggtacttcttcagcagcaggaacagaagggccaacatcctaattcaagcacgacactcaccgaagcctcctctttttcttcttcttcccctcggcaggagcagttggatgactggccgggcgaaggcgctttgggcgagcaccatcagatttttgagcattcaaggttttttcaggttctgggatagttgcaacagctatggtttcagcagggaccgagtcagaagaatcctcagccaacatgtccagcatagcacttatctctgcatcgcttgggtttataggcatctcaaagtgaacttgcctctcatcattggggagatcaccaagtgaagcaaccagagcctcaacttcttcgggagagggtcgcactctaagacccaagccactgtcactagcaggaggattggacacaaaattggaaaaggtctcggaaggtggcagattccaagcagaatatgcaatgggagcaactacattcgacactttgcctctaagaatcatctccagtcggcttaccaaatccacagcaggaatcctcttgttggtaacccgggtcgaatcagtgacaccgctatacaaataagccgggtacgctctatccttcagtggctgaatattcttaaaaacaaagtctgcaactacagcttcagc

SEQ ID NO: 174680 - DNA, 297 bp, Zea Mays
atcaattggatagcggaccttatttcccgttgacgcgatagagcttgggatggtcgaacccttggtggaagccggctgttgagctgctggaattatttgcatctatggagtggtcatctgttgaacagacatcgcactcgccaattgctgcatcaattctagaggaggattcgatagcatttcagacatcaggcctttgaactctttcttggcctcctccttaaaataattcgccatctcttccttgtatcgatcatgtttcttgtacagaccttcgcattgtggttcgaatccttc

SEQ ID NO: 174681 - DNA, 658 bp, Zea Mays
cggccatgatacttaatgaccggtgctctagacctaattcaacacttaacaagcgtttcccctcaatcaatttcactagcggagctctaaatcgtccggtccatggagacagcgcagacaatggatgaacagaagtgttcccggtgatctagggcagtctagctcaattgaatgggtcgaggagcatcaggagaaccaaaggacactgaaacgggagagcagagagcacgaacagacctggaacaagctagccacgacgagggttctttcacggtggcggaaacagatttggggagaaagaaaaattagagagctatggtggctaatcggaggcaggagcgggtgctctggctttgtgattacctaacggagctagcggtgtgcttaatttatagtgttcaagagcggtggccttcaattttggaatggcgcgctggcgttcagagaggaagaagatcactggtggcgcaatcgtggcgttcacaggtgcagtggttcagagagggtaagcctaagtgtgccacggttactaccgcgtagtgaagagtcacggcgtggcataattgaggtcgccggagtgtccacgacgacaccggcggtccggccgtgtcgcaacagctacaagcacggtgataagcttcccctgtgaccacatctg

SEQ ID NO: 174682 - DNA, 1007 bp, Zea Mays
gccgactttaatgacaactcggtgagcctactcctatttgcacctactcagtggcagaaggttgcgaagtccccgccacgtcaaggttattgtggctgacctccgcaagggatgactactccgtgcctgccttaacaccaacatctagagtagccatagatcactccaaggcagcaaggtcctcaacctcctcgtccctcagcgcttgcggaaagaaaataacaaagcatcaaaaaatcaaacaacagtattcaccctcaacaaaagaaaaggccttcacctgcgctagtgcccaaccaaccctctcctagacgataacatgaccatgtggcccctacatctaatcgtacagtgccccagctaaacgcttcagcgcagcatcttaaacctagaacacttctcggtcgaagtcctcattactctggtcgaaggtctcgaagtgcctatagccctcgtgggatagagcatttgcagctccttcacaggtaacaagggaggcataggacatgaggcccatcgcgataaacgggagagaatctagctcctcttgcagccagctaaagaagcgggtccccacctctcccccccagacttattgaatcgggttgtctccgcacccaagtcatgatgggcatccacaaaaagcgtgtgtgcccggtccacgtcggctcgcgtggtagcctccaccctttcatgatgagttcgtgtattcttcacctccagctccaattcggcaacacgcttctgggtgacttgggtctccattcgggcagcctgggcctccgactgctactgggctatgtcatcttttagttcgctcagcaaacggctgagcccctcattttatttctcaagagagctgaccttctccagaaggtttcgactcttgttttcagcagcagatttgtccctaatggcctatgtgttttgcgtcaagagacgctcaatcttgtcctccgaccgctttctctcggagcgcaactgtaaggtcgctacgtccaccagcg

SEQ ID NO: 174683 - DNA, 636 bp, Zea Mays
cagacaggggaacccagttcacatccaaattctggacaagccttcagaaagctatgggcaccaagctagatttcagtaccgcttatcaccctcaggcagatgggcagacagaaagagtcaacaaagtccttgaagatctattaagagcatgtgtgctagcttttgatagaagttgggaatccagactaccctacgcagagttctcatacaacaatagctatcaggccagcatcaagatgtcgccattcgaagcactatatggacggaaatgccagacccctctcatgtggtccaacgtaggggaaaaagcactagaaggacctgcctttgtcaaagaggcggaagagaaagttgcactgatccgcagaaggttacttgaagctcagagtcgggagaagagttatgtagacaataggcggagggaactcagatttgaggaaggagacttcgtctacctcaaggtttctccaatgtgtggtgtcaggaggttccaagtaaaacgaaagctagccccgcgattcataggtccctatcccatcattggcagggtaggacccacaacataccgtctggaattaccggaatccatgtccaacatccacaatgtgtttcacgtatcccagctccgcaaatgcc

SEQ ID NO: 174684 - DNA, 635 bp, Zea Mays
gccgcccttttctcaacgagtggtgaccgccgccggcgataactggcgctggggggccacacgcgagaaccaggagaagctccagcctattctctgtgccctgcagaagctccaagccgaaggccttaccgccgcgggggtcgtcgccgctatccaccgccggagggtgctcccattggcagagcggcggttgcggctttcagaaatgaagccggagtcgatttggagggttcacggatgtccttgaccaccctctccaccgacgacctcctcatacggatagcgggcacggtagggaggctggacgctggcgtccttaactagcccccgatgcgtcccgaccacgggtatgtgtccctggtaagtgtccgacccttcttctgttttgtgccgtgtttcttacgtttttagcccttacccttgggatttttgttcgtccctaggggttgaagaactttaaaacctcccggccaccggtcccggaggacgcggcaggccgaaccgcgcgtaggctcaccgcggagaaggataagcagaaaaaagacgcggaaaaggcccgagctcgcgagaggatgcgggctcgggaagccttggagaagcgtcgtcggaggcaagaaagggacgggctcccgttg

SEQ ID NO: 174685 - DNA, 609 bp, Zea Mays
gcatcggccgattacagacgttggatgggaaatcgagcacccagattagtttcatcagattcgaatccgacgatctacaatcccccaaacttcgaatccatctggtcgcccgattacgatcctacggtcgagatgggtctcgcgaggggttacgctaagttctaatcgtaggcgcccacggagatcgaacggccgggattcgcttgcaacggggcgattcccccaaacacaccaccgccaggccgcgcgcggcggagaaacacagacacgtcggcgccgtgaccgggaatggcccaaaccatgctcctgcgaccaaactctccccgagcctgactttgcgtagaataggcaacatggaatacgctctgcgctcccacatcgagtttcccggcaagtagcgggctgcccccagcccgcagcggactccggcgagaaatcccggtgcaaccagcccaccattcgacccgaaactaagcgctatacaacgtatagaggaggacgaaaacatggcagaggtctcaccttgattaacgcggtaaaaggcctagcccacggcggcgtgcggaaactgcggcggcgacaccttcttcccccaattccccctctcac

SEQ ID NO: 174686 - DNA, 336 bp, Zea Mays
ttttgagttcttgtttcaatgtccttaggaatgatggagtgtatgaaccagcatgggatcaagatggattcaagcctctggacatttaaaccaagaagcctatggtgtgcatgaataaaatggtggttcatcaccttagcatgggaatgcaaccagaagctagatgactgacacatggtatgaattccaagcatcactacggacagaatacaaggagttagactgtgttctataagtgtatggaagcgtcttcaagtctactttccagcccatcaaacggttcattatttggacgtcccaataaggagttatgctcattttagtaactgttgccag

SEQ ID NO: 174687 - DNA, 567 bp, Zea Mays
ttcgaatttaaattaaaaaatgaatccgaccagaatctatactgagagcaatgttgttgaaaccacaaggtactcgcttcgtttgtatcggtgcttccagcttcctctagactcttagcttgttggactgtcagtagggagaggtccagtgtcaggcatcacttgaattcagcctacagccgcctactttgtctcaggtcaagcgtttcgttttcttgatgtggtgccggcctggtcctggtactctggcctccgggggactgggtaaggaagacgcacggacggactagtttaagtagtgctatgtgttgggtgtgtcgtcattagtgaccagattaaatttaatctaactgtctctttaataagggtccttgattaggagagcctacgctaacctcgattggacccggtcacacgatgctatataatagattaagtagtcagtaagccccaaaccctaatccagagatatgacccatcgtctaggcgtcggagtgactagaagagtgacaaccaacgacgggttagatctccgtgcctgagggctgaggattgttcctctgtaga

SEQ ID NO: 174688 - DNA, 773 bp, Zea Mays
cgatcaacgacatagattagatctggcctcttcacaatgggtaggcaatgtgaagcctcagatccagatccgacggtggcgattttaaagaggtgagacgggctctggtctacccgatggcgatcgaacgcgccagatcgccccgaccgaaccggcactcaaaccctaatcccagccgcccccagggaaaccaacggccaacggccttcttctcccaccgcacaccagggcacgacggcgctctcgcgcgaaggcggtgccaccgctggcaaccatgggatcaacacccaagcgtaccaaactatctatcgatacgtgctaaatgcaactaaggacataattaactcgatgagggtctcttaccaatggatcgcacggcgtaggagcacagaccacgatggagggcggctccgcggtaacgaaaagctccggtgagcaattcttcgtcacccgatcactccccacccatgctaatgcaactcaaatattccttgatacatggcgcaccttccagaccaatcatcagccccccgagcaacggcgtgaccgaggactagcccgagcggccatggcaacctcgaccctacggtggttcactcccctgcttccccctccacgacaatggcggctgcacagcccgatcgggtggcaaagggaagagtgccctggccctcatttatatagaggagaggtcaggagagaggggaggtcgttgtgccagcaagagccgcgaacctgggtgcggctgttacggcgtcgcccgtcacacgcgc

SEQ ID NO: 174689 - DNA, 548 bp, Zea Mays
cctcagtatactacccgcaatccaacggagttgtggaacgcacaaatggcaaaattttcacagctgtcaagaagatgctcctcgacaataaaaagggcaagtgggccgatttgttacctaaagcggtctgggcattaaacacgactgagtgcagggcgactgggttcacccctttccgccttctatatgggtcggaggccatgaccccgcaagaaataaaacatgggtccccacggatagtcccgtcagctgtccccgacgtggacgagcccacttcgaaggacctcatcgatggagaccgcgtcttcgccctacaggctctaaacaaataccaagcccaaacaaaagcatggtgtgaccacacagtcatcccgagggaattcagcgaaggagacctcgtactcgtccggacagctcggacagagtcctggggcaagctggagcccaagtgggagggccctttcatcgtcaagacgaaggcgtcccccagcgcgtacaggctcgcaacgccatccggcgaggacttggagcattcctggaacattgat

SEQ ID NO: 174690 - DNA, 864 bp, Zea Mays
tcgacgaggctccacagcttgtgctatggcacttcagatcctcctcgtctccctcacgacggagtagcccctgccactactcatgtcgtcgccctatctcgacctctgttcacagatgggtcgcgacgttctctagtagattttactccagtagtgaagtttctctatgagctcatgaggcgcacactactacccaggatgggatactgagaggccaccactcatgttcagctctggctcctcggtgccttgatctcacactctgagtttgacgttgttgattttctgatttgtgagatagaggacacagttttggatggtctccgtgctcggtgtcaactgttgtatactcactatctatgccacatatttgctcatctgatccagcctcctcagttccaggccaccctcgaggcctccagtctgcggtttggtttctaccgcccaactcctaaggaaaccactctagcactagttgatccactggcaccagatctcagggttgaggaagaggccatccgacagtttgaggatgagggtgcaattgttgatacttcttccgatgatgatgaggatctggggattccgccaccacatcctatgccacctcctgagccagcactagtgttgctcctctagcaattgaccctgctttggctgccatcctttagtcgctcactcatcggcaggctcacatggccatagagcaggccaggcaggccgctatccaacagcagttgtccgaacgaatgttgtcaatgttctagaccattcaggaccgctaggacactctacaacagcagcttctagcagacagggcaaagcaccagacgttcatgacccatattctccagcataccggtg

SEQ ID NO: 174691 - DNA, 711 bp, Zea Mays
tatgagaatatcatcaataaataccaccacaaacttgtcaagataatccatgaatacactgttcatcagattcatgaagaaggctggtgcatttgttagaccaaaagacatcacagtgaactcatacaacccatacttggtaatgaatgctgtcttcggaatgtctgaaggtcgaatcctgagctgatgataacctgacctcagatctatctttgagaacatgctagctccacttagctggtcgaacagatcctctattctaggcaaggggcactagttcttgattgtgacctcattcagagctcgataatcgatacacatccttctggtgccatccttcttctccatgaataggacaggggcggcccaaggcgaggtgcttgaccggatgtaacctttctctgacagctcgtcgatctacttcttgagttcaactaactctggtccagatactctgtaagctctcttaaagatgggggcggttctaggaagaagctctatcgcaaactcaacttttcgctctggtggcatacctggtaagtcctttggaaacacatctgggaactcagacacaaccttgataatctcaagtggatctgcttcactgctaacaacatccatctgataacaacttcctttctttggctcaggcgggactaactcggtcaccacttcctctcctagtggggacatcaacttgattgtcctctt

SEQ ID NO: 174692 - DNA, 641 bp, Zea Mays
ggataaggtaggaggggaattttggtcatcttgggcgggagatgggaaagtgaatgcagccaacagaaaggggtacggttcgttttttggaaaaaacataaagtgacgccgccaaatcatcacataaagccacatctaagcgtcataaaagtaaaaccgtctaccaactcctggcgcctgacaatatatgacgaatcttcgtacccttatgtgacaacaaaaacactaccgtcataaaatcttcatggcctcatgaaattatgacgactcaaaaaattccatcatattatgtgacattatatgacgatagctgaccttgtcattaggtattttgtcataaaaggacaaatttcttgtagtggatcgacatcacctaaaccattcattggcgactgagagtgcggtgatcactcagagagcttttgggtgacccaactcaagatcgtacatggttgtgagcggttcgctgtgtcggagcaacaaaaaatcagcttgtagtgagcacttgaacattgcacataccagggggtgacacccttctgcgggtgctccaatgaggattagtggagagtgttgagtctctgagaccttggcaaaattgaggagtcttataatccttactttactatatccattcacct

SEQ ID NO: 174693 - DNA, 420 bp, Zea Mays
cgagaggtcaaacgacgcgaaaacgacgtttgaacgagaaatagtgccataggaggtttgaaattcgaattgaggcatgaaatgacgtggaattgagccaatacttcacgaataggtttatatgggtaaatatgagtgaagggtgcacttggtttgattttaggtgaagaaaatggaatttgggcactcggctcggaaacgatcgctagaaatggggaattatgtaaaattgaagcctaggatatcggattggcttgagattttgcgaatgtgttactggaggtattatgaaggtgcctaaaaagtttgggttcaattggaacaattttggctggtttgggcatttcgccgagcacgtggcgtgcggtggattagggttttcgagaaatgctcattcgagaatgtgaagccctccctaag

SEQ ID NO: 174694 - DNA, 624 bp, Zea Mays
ggccgataagcacccatagcacacaagggtgcgagaacaaaagaaatgagggtatgaacagacctagggacggtggtccacgacgcgatggctcacgacggaacggagagtggattgagggaaatccgaaattagagctcggtggtagacgatctgaggcacgagcgggtgcactggcttcatcacaacccaacggagctagtagtacccccaatttatagtgtccaagagtggtggcggctattttttgcgatggcgtgttggcggccggagaggagaagtcactagcgcgagtgctatcgtggctttcaccgtggcaaggcctccggcgatggacgggcttgctacaagggttcactgcgacgtgttaaacctcccaggcacgtggcgcacgattggtaagcggccaacgccggtgaagatcattccggccggccgtagaccaagtgggtatggtgaactcaatagtgaccgagtccgagccaatccgggcgctaagatcttttattcccctcagttatccactttgcgcggggcacgaatcgcggcgaggtggaacgcacctaagatctacttcagttactgtataatggccatcttcatcagtgtgtctgtcagagtgaa

SEQ ID NO: 174695 - DNA, 635 bp, Zea Mays
ataggaaatgacatgagataataggatggatgagagaggagtctccccttctcattgcctctttattacgtcttagcttagacacccggacattgacttagatgcctcgggagaagcagcagtgggatttaagaccgttcctccctttaattagctgtacagaccgcagagagacaaaggtacacaagctaactagatagaggtcaagagcatgtcatccaagaagaagagggccgccatagatctctccctggaggcggagaggagtggtgaaggccacagcggcggcggaggcaagggcgatcggcaccggggcaaggataatggtgaggtggacaagaaagaagagcagttcaaagagcaaagagaggcaccggaagagggaactggagaggagaaggtggtagttgaagtggttgtagaccaaggaagggacgacaccagggagatcaaatataggactcaacaagaagaggagatggggaacgacaagcaaccggcagaggacgcgcacggtgacgatgagagcgatggcggcgaaacccgtgcccaagacaagcacgtggtagaggccgccggcaacggtgacggggacgatagctacaccaccatggtgcaagacgaggtaattaagc

SEQ ID NO: 174696 - DNA, 297 bp, Zea Mays
agatactctacaggctcttttagaaatgggggcaattccaggaagaaacactagggcaaactcaactttccgctcaggtggcatacctggtaaatctttcgggaacacatccgggaactctgacacaaccttgatagtcttgagtggatttgcctcactgttatcaatagccatctgatgacaacctcctttccttggctcgggtgagactaactcagccaccacttcttctcctagtggggacaccaacttaattgtcctcttatcacagctgataattgcttggtacttatctag

SEQ ID NO: 174697 - DNA, 567 bp, Zea Mays
gttgactgttgcagatttctttttcttcgtcctagtacggtgggaattagagatatcacaagtgcctgtgcctgttgactgttgcagatttctttttcttcgtcctagtacggtggaagatcaagtctagttcatgttagaccatgcatgttctaatttgtcgacaagaataaacagaaggaattggagggggaggctatccaaatgatgcacagatctgccacgcatgtgctattgctctggctgcccgatatctggatcatagtcatcatatatgtttttagaagttatggctttattaaatttggatgtattaattgcctttcaactggaaccacacatcgatacaactagaatatgtgtatatatattatacatgattcacttgtatatagatactacaatcacataacagggagaaagtggaaaagataacgtaagatgtcacaagcgcatagggcctgttgactactactggtttattttaaatcgtcctaataatacttagtgtaagaaagtctggtccacaatagaccatctcttaattagtctgtgtgacaagcatat

SEQ ID NO: 174698 - DNA, 731 bp, Zea Mays
gtaattgcaatattcctgatgtaggccttttttatagcttataatcaccgacaaggcctgcaatggctcctaggattagccttttactattctagtattcacacttaacccccatgaggaggatacccctgctcacatcatgtccttctgcttgtatttggcctaaattgcaaactgtgcatggtcactattcctggttgagataagctgcaacctatgtgtcttctctgctccgtcaatctgcacgttcatgcttacattgtgctgtgtaactaattgtacactgttgggattgtgaggagtgggtgagcagctatatttgagaacgatgaataggatagctgcaacaatggatttgctcatgacagctttgttagtgaatacatctatggaagctgagaggataagctgataaagatgatgagaagtaatggtgatatgtggaagttattggatattagaatgaattttcttaaggtaattcatttgtcggtgagtttttctctttttgttggaggtttttggagatgtgaaagggaggcgtgagattgtgaggacatgacatacacataccatcactcaccagccaggttttttattgtaccattgtagtaaaggcacatcaagccggcatctataaagcccgctatgtccctggaaatttaaggtgaagccagattgttgaagtttggtcaaatctttcagtctgttggaataagtgaatcttgaaa

SEQ ID NO: 174699 - DNA, 597 bp, Zea Mays
gataagtaaaacaccgttctcaatttgggataggagattggagattttagataacagaaataatgtcatcaccaaggtatggtcgagagttgggaaaggtcaaggcaacgctagacagaggcacaacaagggatggagttgaagattcgcaagcgatgaggcagaggatacgaccaaggaaagactaggtaaagtacaacactcagattgagatggaaaagaggagattttaaagggccactataagataaacatcaaggtaagttatagaggtgataagggtaaatgtgataatgatgaaaagcaaaatccatggacagagtcaaggcaagactcaccaaatggcaaggtggagaaaacaatcaagaataagataagtgaggttccgacataagagttgaagtaaaaattctttaccgaagaatgttacaaggaaacaacgagattaccacatgtgtgcaagataaaatgaccactcatgaatcattgagaaacaagggtggtcaagggcatgttaactgaaatgtctcaaacagatattgggatataaaggtaagcatatataaaaataagagtatgcaagattccaatggtacg

SEQ ID NO: 174700 - DNA, 316 bp, Zea Mays
tggagaagttgaacctgggaatgattcaacatggaactttaaatcacttgaagcttgagtcggttcttctgcaaagaataattgatgcacaaagaaataatgagggtatgaaacacattcaggaagaaatggaggccggtaaagccaactgtttcagaaaagatgatcaaggcgttgtatggtttgacaaccgcatagttgtgcccaagaatgatgaaatccgccagcaaattttagatgaagcacatcttagtcgctattctattcatctcagaagcactaagatgtatcatgatctaaagcagcattattggtt

SEQ ID NO: 174701 - DNA, 731 bp, Zea Mays
cgccctgcgcgcgcaaccaggcagatccgccaccgctcaccaaagtttgtcgcccgttccgcgaccaccatcgagccctcgtcgcgcccgttgcctcagtaagctccgccacattacccatagctcgggacacccattgcttcgtcctttccccatctagttcgcttggtccacgctcaccggttcactgccgcagctccatcgccgtcgacccgtgccctcaccgtgccccagccaccgttgtgcgttcctaaggcttccctcaaggtaaccatcctagccccgcccttattttcccctgtgtcgcatttacttgcccgcgattgctcgtcggagtattccccggcccaccgaggactcccctccgtcgtcaggtcgcctcagtcccatccacacaaacctgaccccgccatagtgtttatcaggtcctccccaacctctccagctacccggactgacctctcgtgacctaggagacccagtatgcctcgcctccgacgacggcgccgccgtgcccatggggagcgccgcccctggctaaccggcaatgttgaagtcccgtggcacgcatcctgttcgcccaaccctaatcggatgacccaattccaattatgccagatctaatcccaactgcccgatccagatctgaccgctgtcctctcactctctctcacccgtgccctacaggtggggccgaccggtcaggctatctcgccccaggcactgacaac

SEQ ID NO: 174702 - DNA, 480 bp, Zea Mays
gtttgcttcaatgccccggtacgaaaccagaaaccccagcaacttcccagcggagacaccaaagacgcatttgtccgggttcagctttgtgcgggttgcccgcaacttgtcgaagaccagggttaagtcttccactagggtcgaccctctcttagtcttgaccatgatgtcatcgacgtagacttccactttgtccctaattaggtccccgaaagtcttactcatcgcccgcacgaatgttggcaaggcgtttttcagaccgtaaggcataacaacatagcagtaaagcccgtccactgttacaaaagcggtatgcttcctatcttccctagacatatggatttgatggaaaccagagtaagcatctaggaacgacaataggtcgcacccagaagtagaatccacgatttgatctatacgtggaagtggatacgggtccttgggacaggccttgttcaggctggtgtagtcgatgcacat

SEQ ID NO: 174703 - DNA, 636 bp, Zea Mays
atcatgaggaattattagtggcagcattgactttggatatttggggtagctcgtcaagtagggtacccagaagaagcatggtcgaaacaggtatccaatgggttgagcgtacattggagaatagtgatgattgctatgacatgtttcgcatgcgccgcactgtgtttcgtcgtttgcatgatatgttggtgcataattatggtctgcaaccaagtcgtggagtaagtacaaaggaagcggttgcaattttcttgtgggcatgcgggggtccacaatcttttagacaaattaagaacaagtttggtcactcgttggaaacaattagccaaaaaattagtgaagtccttaacgcaatttatatgatgtcttcgaacgtcatcaagcataaggacacatatttcaatgagattcatcctaggctgcgagagagtagattttgcccacacttcaaggattgcataggtgcaatagatggaagccactttcccgcttctgtcccggcctctgagcaaccgaagtatattggtcgacacggttatgcatcgcaaaatgtcatggccgtttgtgacttcgatatgaggttcacatttgtcgtcacaggttggcctggatcagtgcatgatactagagtattac

SEQ ID NO: 174704 - DNA, 572 bp, Zea Mays
gttaaaagactttgttgacagggactaactagtttcctacattgaaaaatccaaagccaaaataaataaatattaataataaaaccagtatcctacagacaaaaataccaaaagtagaactactttggtcagttttggcaacctagcggaaagagtaatttacaagggaagtgtaatatcataaaccttagataactaaactgatgtacctaactcaaagcaatacacagttttggtacatggcactggagggtagcaacagaagattaaaaccaaactcgttttctgtttagttgaatcgtaattgaaatgatacattgtcctgtgagacaatgcttttgggaactgttctgagcttactaagacctaatctggtgcctgcaacagtaattttgatagcttccagttcaagacttgaagtttgaagcaggtccacgtttaggcctttagtctgaaaaagatctacaggcagagaagtgtagctcttaatgctaagtaaaaatataaagacacttggaactgatgagttgtttgtcatgttcagtatttgcactctgcgctactgagaaaac

SEQ ID NO: 174705 - DNA, 977 bp, Zea Mays
cactgacgtgcgtaggaattaatgtgatatctctggcctgcaaagtatcaggcgtatcgagaggctgagcggtgcctcatgatggtgttgcttgcacgcttaagataaatgcctcagtaacttgtattatcctgagcgggcattaaatgcgtgcggcgtaggctgccgtggagcacctcggtaacgcgtggggcagtcttgtcggcctttatagtctatcatgctttgcagttgcagagcacgcttcgggcaccctgcattaaatgcaggcagtgtggctgcaggcggagggttttcttctagatgaaggttcgtgcttgaaggattggtgaggcgaccagagagggggtcaatgggagccactacaaaattctcgaactgcgagagctacacttgtgacttgattcccaaaattaccatgaaaacccaagtaactcacaaagaactagatgactgttgttagacacccgggaacggggtgcctaaaggaagcccaagaaactccttgaaatggcccactgaccaactctccgtcgagcaaccccgcgaggtagagcagacgaccaactatatgccgagcaacaccacgaggcggagcggacgaccaactatccgtcgagcaaccccgcgaggcgaagtggatgaccaaccctccgtcgagcaagcctgcaagaggggagggcccaaaccacagaatcacatcgacacgacaagacgcatcaacaccaaatcatgttcgaaccatgggtatagagctgaaaggactctgtcatacatgacgatacgccctcgcgcacatcctcaggtatgccctcgctgacttgagggatcaatcaaacccgatcacagggacctcatcaccagggtctctacagtgacccgcataccgagagggatgggatggtacaccatactgggtgtatgcctgcgtatgctaaaaagtgatgtgaggacatgacaaaaggcagagttgcacc

SEQ ID NO: 174706 - DNA, 434 bp, Zea Mays
gttgccaaactcgtcatcaactgtgtcgcgaccgagcgagagaggcggttgtgaatacgacgagggtaaacacgagcaacatgacgtttgcgaggaaatacattttaattatcctgcgaaaaggacacgagatctggaacaggctcgacgagaggaagaaatatatgtatatattatcgagttttcgaaatactaaatttaggcatttaaatattataaaggctaaaaattcatatttaatactcgaagaaagttccgaagattccaaaaactctcgggaacatcctcgagatattttaacatgtttcgataacattttgcactcataaacactatgcatcggcatgaatgcaacactcaagcacctctgaggttttattttactaagcttacacctagatataaaataaaataattctccacttttaggaaaa

SEQ ID NO: 174707 - DNA, 419 bp, Zea Mays
ggtatctcaggggtgtaaatgtaatgtaggtccattcttaggaacattttatgaccatttcacttaaacttcagggtttactctatttgggtcttgctttacccttcagatccctgtttagggttaagtatcctatactagggtcttatttgcaaaatgccataacaatacaacttgtttgaaatttttacctagtgaatgcatcctaggtgtatcaaacatatgaaatgctaatgatgatgatgtcatgctcgagttttagtaacagtaacaccaggggtgttacattcttccccccataaaagaatctcgtcccgagattaaaagtcctagggcaagtaatggaaaaggaaacacggcatgtctttatttccttattcttggtacatggcaggggtggtttggggctcactccttta

SEQ ID NO: 174708 - DNA, 382 bp, Zea Mays
attcgagtctattcggtggaccgaatagaccgaaccgaaattatgagtctattcgggttcggttcctaaaattattttgaaaatttcggttctcatttttcaaaatccgaaatttcataaacccgaatacaccgaaccaaattaccctaatagatcgaatgcccagccctaggtacaaagaccagacatttaaatcaaatccaatagccaagggtgagacgggtgcaggcaaggtcggatgcgtggcttaggcccatcttgcggtatggatgcgcgtgattgcggagaggtgaccagaccacatagtgctatgccaaaaggggtcgttgggctccacacaagatctgatctgacttcttctccaattcccccttggctctag

SEQ ID NO: 174709 - DNA, 742 bp, Zea Mays
caccggcaacaccctcgggggctgggttgcagctcgtgctacccacccgagccggatcattaccggcaacaccctcgagggctgggtaaccgcttgcaccatccttgaggaccgggttctctgcagcagccacatctaaggctgaaggattctcagtcacctccatgggaattgaataacattgaccaacctcttggctctgaagaccgcactccaaggtcgacgaggcacgagacgctactcgggataaatctaatcccacatctggaatgtcagagcaaacgtccatcataccaccatatgttggctcggacaacagatcttcaggaaccacatcctcgagagcttgatcaaaatttgctatggataattcttgcagaccaacgagagcagacaaagctagagaaggaatatcgctactcccccactaactatgtaacgccgactattcttctgaattaaggggacttcctcttcttattcttcttcgtcctcgtcaataatacgaacaatacacccattgggttcagctctggcaggatcacacccattggattcagctctgataggatcacacccattggggtcagctctgacagggtcacacccattgagatcagcatcagcagggtcacacccattagggtcagctccagtaaaaagttccattggtacttcttcagcagcaggagcagaagggccagcgtcctggtccaagcatgacactcgccaaagccatctc

SEQ ID NO: 174710 - DNA, 322 bp, Zea Mays
cgaggacatgtcaagtcacgatacagaagcaaaagaaaatagctgaagccgaagcacgtcagaatcagctgaagcaggtcctgcataccacttcgtgctattctccattcattcctgagtatgtgggcaatcaacaacccacagtatcagcagcttcggcaagccactccccaactgcatgggccctaccaccaccaccactcatggctccaacttcatctcataatcaacagctagaagggcaccgccaagttcaacaacagcgcgacacatgcgaagagtctgaagctcggacagtcaacaacattgtaccagagtcgag

SEQ ID NO: 174711 - DNA, 461 bp, Zea Mays
aaactgataatttctacgcatgtatgcaaccgtatctaatgctaaagtcatttggagaaagctaacataagaggtggggtcggtggtacggcggcggcagctactgcactaaggcacaactgagcttgaggaggaagtcggcgcagctccgaccatagtccgtcgcgatggccttgatgttggcgatggtgagccgtgcgcggaggtggtcccacacagggacggagctagaccagtttgccggtgtcagctgacaccggtgactttttaaaaaatcaatggaaaatctttgatatgtactaatcatctatagagctgacatcagtgtctagtagaactaacaccgttggtttcttcagctgggcagctggcttcgcctctggtcccacagccgctccagcacacccgtccagtctaggtcaggtgtaacaatttcgttttgaaccatccgaattttgttt

SEQ ID NO: 174712 - DNA, 687 bp, Zea Mays
ttttagcagcttcatttagcagtctgtcgacgacttcgtcaacagctccattagcgattcttattatgtctaatgctaacttcatggcgaggtcagcttcggggttatatggctccgatggaggtgaaagttcaactacaataaaaaatgctggttaattctgaagctgaaaacgaacttcgaagctaaaccttagtaaaagtacctataaaccttgagcgctcactagcttcttcagctcgcttagcttcttcttgagcgtagtgggattctttttcattttttctaattgcttcatcagccatctcacgaccgcccttcatccacacatcggagtaaaatctcccgcccagtgtagaagcttcagccgaagggtctttggtgtcatccgccgagaaaacaaatcctggctgagctgcaaccttaacatgttcacaaccggatttctctaaggtcgccacgacccctggtgcgccagcgaatgcgcagaagtctccccagtcacttaaaattttgtcaaaggcttcgacttctccgttgatccactggacgtcaccatcggggtcaccacagatgaacttctgctcagaagagtatgctcccacctttggaaaactgtcctttagagttttggcgcatgctaaggatattttgtagcatctctctttggagtcgtgaagctcttcg

SEQ ID NO: 174713 - DNA, 971 bp, Zea Mays
gtttcactgtttgaaaccgggctgaagctgaacgccggtctgtctgcctgaaactgggcagtggtcactggccagccggtctgttctagtgttctctgttgtaacttgtaagcactaagcagagcagcagccagcaggtccggtctgctccagcctccaggcctccagctgccgtgcgcagtacgcccttgcttagttgctttttgcttgttggctgtttgaggctttgatcccggtttgcagttgccagatggccagttaggcagttatagcaggggcagccgagcagccgtgtgcatgacagcatgagtaggccaaagagctaatgagctatagtttcatttttttactcctggtctgttgcaagccgatgtgccatatgctgctttgctgctgctatacaaatacacatgtacacatacaaggatacacctgcacattcttccattatttgttcactactgtgttgtgaaattcggttatttttaggattacccaaactcgtacctgaattttcggatacccgcttatttcgggtacacttcgggtagcggttctcaaaaccgaattttagaaaacccaaattatccgacccgaattttcgggtaacctggatgcccaggcccgccggcaaccaccgtcgccatcaccgtcgtcgctcgcgtcgtacatcctctcgtcgacggcggcgccacaattcacaatggtgacgtctccaacgccgactgcatcctccgtccccaactacatcgaggtgatctacaagggagtggatggcacccatgccctatggcgctgggccacccgctacctacaccgggccacaccttgacctgccgccttcgcgattctacaagctcgacttccccacgtacgacggtgccctggaccctcccaattggctcaaccaagcgcaattcttcggcgggcagcgcaccctggcatcaaatcacacatggctggcctcctac

SEQ ID NO: 174714 - DNA, 690 bp, Zea Mays
ggggggtcgaagagcttaaggaggatctaagaatgctagaacaagcagcagagggacttgagctcacctaaaccgagctggccatggtgaggtcttctttgcggtggcagaaagctgatttgggggaaaacggcgattctccggctaggggggctaatcgagggggagagtgggtgctatggcttcggtatgacctagcgcagctgcccgagggctcaatttataggaggcttcgacggcgacgcttaatttggtccagcaacgcggcggccggagataagagagaaccgtggcgcagtgaattcgtggctaacgccgtggcaacctcaccggcattgataagacagtggtagggagtcacggtgacgcggtgtaaagatagagccacgcggcgcacggccgggaggcggcggtcaccggcgagcctatcgggttccaccacgacgagctagtacggtggtcggatttgttttaccggccggacttatccacggcgacgtggcacgagcgtgaccagttcaactcgggcacaaatcacggcgacgacgacacgaatcacggcggaggaagtcatcgacggcgaggacagtcgcgctggcgacctgatccgtttggttactgtaccatggggaaatggtattcagtccgtctgacagacaaagtttgggcctcattttctctcaaattcac

SEQ ID NO: 174715 - DNA, 472 bp, Zea Mays
ttaatagatctaattgacctcaaaagattctatcttatccttatagattaatcttgccctaattcgcatatttatcccactctagaataacaaccatgagcagaagacctaacccaaatagtagagtcatgaaggattgcataatctgcccatttccatctaacaccaaacaagattttgatctatatcatgtaatctatctcatccacatctaacttaaccatattccccaatctcgatgatatacactaaccccgaagcaatgataccaagaccagaaaaagaacaagatcaaccacgtcaaggaaggagggaagtcaagcacaatcttcaggtgcattaccacccaacaaggagtcctttctcaccataaactatcttgccctaggctattcttgccctaacctacccatcttttatcctacataatatgtggttgtacctacgtatacccatgctctcctaatcaccc

SEQ ID NO: 174716 - DNA, 502 bp, Zea Mays
gagaggatctccatcttctcagaaggcacatttattggatacatatttgatttgttatagtcaacctttaggccagtagaagatgcaaatgagttgagaattgccttaaggaagaaaagttgctttggacaagcctccagaatcaaaagagtatcatctgcatactgaacaatcgagaaatcctggtcaccaatagcaggtaaaggaagcttaagaagattcaaaagcctggccttattaataatgctctgaagaaggtcggccgccaagacgaacaacagtggcgaaagagggtctccttgtctaacacctcgtttgcaatggaaggatttaccagggacgccattgagtaacaccgaagaagtgccagaaagtaggatgctccgaacccagttaatctacttaggaccaaagcctttgtggatcaaaacctgaagaatcagttcatgctctacagtgtcaaaagccttttcgaagtctagtttaagcacaatgatttctt

SEQ ID NO: 174717 - DNA, 551 bp, Zea Mays
atgggacactaacgtgcctatgggaggacaaaaaggagcacacgcaccatatgtgggaagagatctatatgagggagagaatgcaagagatgcaccatatggaggagcatatggaagaggagcatcatacaatccataaggaggagcaccatatggatatccgtacgggtacaaataagtaaaaggtcgtggaggagcatcagtggaagaaactccagtgatagacatatgtgtgttggtcataggaggtttaatagtaggaggaggaggagcgtcgacacgtggtcaatatggatatgggaggaggaggatatggatatagaaacaaaggttgtggagtcagggaacaaggatgagcaggaatgtcctggcaccaataatgaataggagaaagatcatcgaagaagacctgcctcacatttcacatattctaggatgcctccacgtcctggcacgtggtggcacgttggaggggtgggagcctagaaagcgcacagttcgtacctcatgaaaccattctatgcataggtttaattttgatgggacccaat

SEQ ID NO: 174718 - DNA, 666 bp, Zea Mays
aatccatggtaccgatgtagctgcacacggtgttgaaggccaccaggcatgcttgagctttttcagtattcacaatggtaggcctcttaatgccgaaacatgactgcatgggccgctgaatcacatccttgatatcctccctcgtagccaagtcattttgaacatagaaccattgcttcatccatgatcctggccacttcttctgaaaggttggaacgggttgcctctcgttagagtgatatgtgaaggagtagcagccgaggttgttgtgatattgctcttttccagttgccttcgtctcataagagagttcatgaatattgcagaagcaatcggcatctggttctagcccttagcttctcatcgcccagttaaaaactccaactttaaccaaagcttcaggagtaagctgatgaagaaatatttcaaatctctttagaaattcgactaacaacttatgcaggggaaagcgcagcccaaccatcataaaacttagaaaaaccgctacttcatctgcctcaggaagaggaacattgttctctcctctagctctcgttatggtgatatcatgaaaacacttgcccttcattgtctcaatatgtcctttttacaatagattttccgaagataacatggcttggtctccatggacgatcttcggcatca

SEQ ID NO: 174719 - DNA, 317 bp, Zea Mays
ttgaaattctgcataagagttccaactagtatcacgtgaggactagggcataaatcatcagattgctcatgccagtttcttgcttggttaagcatacattcccatgatctgtgctgagaaagttccacaaccttactatgttatttgtttattttgagatcgttcttctttctagaaactaaattatgaattttggtgtttacttatcaaaccaaagtttgttttaaaggggttttcctgccaatctgcagcagattttttgttatgtcagtatgtcactcacttcagaagtgtttttatatctttccccaattgca

SEQ ID NO: 174720 - DNA, 752 bp, Zea Mays
gaccgacgctaatctttagtttacaccagattctacctctaaggagtatttcccctcactcaatttggctaacgatcaactaagggactctggccacggtggccgtgaaccttacgacaatgccgtcgtgttcccggcgactagagggtctctaactaaattaaatgggttgtcgagcatcaccgagctatgagaagacttaaacaatggagaaaaggagatgagctgaccgggagggggctggccgcggtgaggtcgagtttcgggtggcggagaatgaaattggggcgaatccaaaattcacgagttctagcgaaggactgctagcgattagcggtggctgggtggatgatgaggttacgcggctaggggagggctcaatttataggcagcttcgacggtggccgggaattttaacggcgacgtgtggcggtcggagataagtaaaaaccgtggcgtggtgattgcgtgtccagtgtcgtggcaattgctccggcgatcaacggagagcttaggagaggtcacggcgatgcggtggcgaggttgggacacgcggcgggcacagagatggcacaacggcggcgagcggctttatctacggcggtgagcaaagggaggaggatcgcggccgaccggggtggcctccagctcgacggcgacgacgttctttctaccccgcagcgttatccggttaccagtgaacgttaatcttaacacggcggcgcgaatccttgcgcgggggagggtcaccg

SEQ ID NO: 174721 - DNA, 949 bp, Zea Mays
tccggggccgccacatgtcccagagggggatacgctcaggagatgcgcccacaagtccggactcctttaacgggactaatgacgtcagatccgtacccgcgcaagagtaggtccaggaccgccacatgtccgagagaggagacgctcgagaggtgcgtccatgagcctagagccctatttgtgccattcccgcgcttcttgactctcggacctcctgcgaatagggcctaggtcctcgattccttttgagatttcaatccattgcgtgatgcacccaatgggtgtatccctcgagcttcgagccgacttgagtaacaaacgacttgaggtctcagaaaaactcacttcactggatcatcctgctatcttgacgcgtggttgtccggctaattgaaatctagtcgtcctatttatgcttgagggaggatcgaccgtttgagacccgaccgactgaagcttgattcactaaatgtgctcatcaaaagctgttgagtattgagtttgtcaactgaaattcaaccgatagaggtctggctaaaatttttcgaaaaatctgtcgtggcacccaatgggtgtgtccagtgtcaggttttgttgtctcttccataatacagtttcttgagtggacatagaataatgatgtgtgttcgccgcgttatgctagggatgtgctgcttcttgtaaatcggaacgacccttggttacttgcgactgcttattatatgggtgggaagcgaaagggcaccctctcgttttttaaatagtttgatcagctgttgtgtgcttcttcattaatcttcacctctatctccttgctcccttccaaaccagagaaaactccattcttctagcaccatggtcggcaacaggaaacgcaagagggcgcccacaccttcctctgagtcctttggtgacttggagtacttcgaggaggagtacttaggctccg

SEQ ID NO: 174722 - DNA, 359 bp, Zea Mays
agaaaaatctcaaaggtctttagcacttcaactagaaatttactcaacggaaaccgaagccctgccttcatgaagctcctgtaaacaacaactttgtctacttcgggcataggggcgacactgtccccccagttctcataatggaaatgtcacggaaatatctccctttcatagcatcaatctgactttgcttgatggacgactttccgaagatggtatgactcggccgccagggccgatcttcggcatcttcgtttccactttccaaatcaaagctttcgctatcgccagaatcttcagacaacccagctagcatttcattggtaatcttctctgtgttcatcctctccatagcctcg

SEQ ID NO: 174723 - DNA, 327 bp, Zea Mays
gtcatgtcacctatgtgtcaaaagataatgccacctgtcttttcagtggcatccttggctccatgcccgatagttctacgtcttcggcttggaacatgtgggtatggaaattggaatggcgcgtgtagtggaagcaagcggtcgagctatggtcgagtgcatattgtgcgcgagatcaatacaggatcaagagccgcctgtgatcctacatgatggtgaccttgtgtgtgttggacttggaacttaggagagaatgattttcttgagttgtcataacaggttttaaggacaaaagtgaatctcattatacatgctaggtttaaaatc

SEQ ID NO: 174724 - DNA, 622 bp, Zea Mays
attgctttgcccttcttttgcccttttacctataatggcaagggagaagattctatcatcttaattgtgttgccctgttatggttccttactaaagctttaaccaacatgcactaagtggtgagggaggctaaactacatcttcctctcatatcgcttgttttaaagaattagtcacgatcttctaaaaataagttaattacggtggagatctcgacgttaaccatttaaggctttgagcgaatgacttatcataatcaatacaccactactccattagttatcacccatgccactcggattaccacaccaagaaaacttatccatataggagcaatcaagaacatcaaaaagaacagaaaacatgcaatcaacggtattcattatgaaagtggggtttaacaaaacgataatcgatgatattgttcttgacagattgaatctaagctaaaatctgaatcttaacatgggtgacgaagactaaatatatagtctaaagagcatgcaagggcccctattcatgcatctaagagctccaacacgttaggctgactccagtagctctcctatgtgaatgtgtagtatgcaaagtgtgtggctgcatgcgaccacgtaaaaatgta

SEQ ID NO: 174725 - DNA, 392 bp, Zea Mays
ggctagataagtcaaaggaaacattacttggggaaacaagcacgatgccaattccttgccctttattgcaaatcgatccatcaaaatataaagtccagggagtaacagtgaggtatgatatgtctagtttatgagtatcattgatccgatgttctacaataaaatctgctacgacctggcctttcatagatttcaatggttcataggccaagccatactctataagtgcataagcccatttaccaatcctaccactcataatcgggttttgcaacatgtatttaatcacatcggtttgactggtaatggtgccatgactagacagtaaagaacatctacactcggtgcatgcataaaataggcataagcataatttttcgataagagtgtac

SEQ ID NO: 174726 - DNA, 1859 bp, Zea Mays
gtgtaagaaaaaggagtttcctagagattcacattatatatgttgctatagctctactactactgctaccaagttgctctcctctcctctactactactagggtgtttggtatgacccgcttcactacaaaaatagatctattctaggtgtttagtatggctatatagcaaaacttcaagagggagctagtcacagccaatcaaacactcttaactacaattgtctgaaattcagatttaaactcctattcataatatgaaaattcagacacattggcagccccactttgaatcaccttttctccaagttcccttattgatggaaccagtatatcagactaacagtatatcctcggtcgacccccttattgatggaaccagctgtgcactaggtacctattaggatggatgtgttctgcaccggtgcgtctaacagagttgatgaagacgcgaccaaacttgaatggcagacaacgagcagctccggtgaatgaagcggggaggatagttctagtgacgacaatccttttcctcctatacctccaaggaagaaaaaaacatcagatgagcttgatgccgactatattcccaacgatgaagaggtaaatagaaatatgccgactatattctaaaataatgttcatatatgaaggccattaattgttttaatatatagatttcaaatgaagagaagaaaaagtatgcatgttctacacgaaacacggaggatgttccgatgcctgaatcatctgtttcacataagcggaaacgagggcgacgaggtcccaatcagatgaaagaaggtgcagttatgtacgtaacaaaactcaatgcagagggtttcctgaagaaccacttgacgtggttacaaagtttcgaaattcatgcgggtctactgttagagatatagtgccaatcacatttcagaaatggaaggatttagatgaagacacccgcaataagctatcggctaagttgtctgagtcattcaaggtcccaaaaggcatagaggatgcagtaaggaagtcgatgctctctgctatggtcaagatgtttcgtgggtggaagaccgagatgaataaggattttgttaagaagaataaggttcctccgcccaagaaaatggggaaaatcactcaagcttagtgggaggaatttgttcgtcagaagaccgaactgaaggccaaagaactgggcgaaactaattctcaaagagcgaagatgaacaaacacccccatcgcctggggtcaaccgtatatcaccataaagttgtgcagtggaacaggataatcgagtaagctatagctaacggcactttggacccaatattaaaagatgtcgattagcgagtcattcgttggatcttaggtcgggcaggtttgactgagaacggcaaacttttgcacccagaattggtaggcgaagtttcgacaaaaattcaagaatatgcagaaaagagaaagaaaggcgaatttaagcgtcggagggagaatgacatactaactgcagcactaggcaatcctgaacacacaggacgggttcagggaatctcttctaagatttcctggagaaggcgtttccagagtatgcggcgtcatataggaaacacgagaagtcgaaaagaacccttgaagagactattgatgaaagggtagaaaaggctattaatgacgtgataaagaaaatgaagaaaacagaatgcatatcatgtgaactcaagtcaggccacatgagtacacctctagtccctagcagcgtaggatctgtgcaagacttcgtatcgggcaccaagtaccctgtagacgatattgttgaggacaagccttgctttcttcatattccaatcaatcgatctggg

SEQ ID NO: 174727 - DNA, 485 bp, Zea Mays
aatatgcttgtgtgggtgttttctaacctttgtgtgttttacacttgaaattgcacctgcacaacttatagaccaccacaacttgaccgctagaccaacccaagtctccttgtgcacttgttacgtcaaaaaaaaattgttgtttggtgtctagttgcgcaaaccctatcaaggccatgttctttccgtaaatccttaatccaaaacttcatagcatttctgttgatcatcctagctgatcctatttgcctacctctcctttcgcttggatctggtaatctttctccttgtgaatcatgttgtggctttatcatcccaatctttgaatcctttaatgattctgccctattatctggttatctgctataacccgttctcaagtatcgaatgttgatctcgcctaaatctctcatttctgatcattctcatacccccttctctgaggatcatgacgttgttttatcgattttatctctaagcagtgc

SEQ ID NO: 174728 - DNA, 458 bp, Zea Mays
cactataatccttgcccaccaatgcgagcaggtgtattatatgacatatccatctaagaaaaagggtttggttgattggagggtagtgtacaaagttaatcctcgtgaacgactatatgctcctggtgatgctggttatgttgaaagtcaaatcaagcaggaagtgggggctgctgagattttccaagacgaagaacaccagcacgtttaatgtacaaactaaaatgttggaagaatctttattaggcgatcaaaatgatgtagaggttcctccaaaaagaaaacgagtgacgagaaagaagaaagctacttggcgtccattaaatcgacgaaagcaactagatcctgattttgattacgattacgattgacgagtatggatcatgattttattgaatattttattattttattgtcgatttatgtactaacttgtttttgttaaaataggatgtcaa

SEQ ID NO: 174729 - DNA, 460 bp, Zea Mays
attcttcaattagaaatgtaattgagaggtcatttggtgtcttgaaaatgaaatggaggactctattagatctccctagatatcctatggcaaaacaaagtagaataattatggggtgtatggcacttcacaatttcattagggagagttttttgggagataaggattttgagttgtgtgaccatgatgagaattatgtgcctgaagttggtgagtcaagtacacaagaacaagaacaagtagcaggttcagtacaaggtgaagaagatcggaatatgaatcaatttcgtgattggatagcagatggcttgttcaacaaactgtaatatttttgtgtgtaataaatattgcataaatgtactacttcttgtgctttgtgctttgtctgtgctttgtaatattatggtaatcggtataagcgactacaatttataatatttgcctgtgcttactacagttt

SEQ ID NO: 174730 - DNA, 585 bp, Zea Mays
agagagatcctatgacttagaaaaatatctcaagtggttttccatctagtctaagtcatggattataaacattttgattgtttcactcatatttcttcttttgctcaaactagcttcaaaatagcgatatgttgattttgagctttccaacctttctagaagtgttgaatacgttcctcagcgtattttgaacttatccaaagagtagaactattggtagttcatctatctcatgttttacccctatttggttgagtctgagttgattctgacttagaaactgaactattgaatcttatgaacctgtgaatcaaagactgggcaaactagttagtccgaatggttgtgatggtcatcaagcaccaaaatataagaaatggtttaaggccatttccctttcaacaaccttccaagacatgtccaagtaataaagaaaaagtattagtttctattatgaatttgaacacataatatgaaaaagcagcgacaacatctaaagttacatgcctctacccatcaggtcgaattagcggttgcctgtcacgaagtatggatcgctgagggagactcgtgggaccttgcaag

SEQ ID NO: 174731 - DNA, 824 bp, Zea Mays
gttcgtgaccgaccgtggcgattcgcgttctcttcctcgacgaactcctgcggaggcaatttgggtttcgtttcgggagaaagggtgggggtcgggcggctggcctggggcaggttagtagtatgggtggtggccgattgcgttggccgttggggactagttttctcgtaggtgggctttgctgcttcgaccggatccgtcattggagtcttctgcactccgaattccccaaatcaggattagctgatgcttgcatatttgttctgttcaatttgctgcgcgtcccgtgtggtgccagtattttgcattcctttgtgttgcggaaagctttctttcccatctgtaagttcatcgtggagtcgtgcttgctggtttcggcttgcaaggatgatggagaataatacttcctgtatttagatatctctctctcttagcatgtgttctgatagaacagatcaattgcatgctggacattatgtttgaaatatgctgtatggcatattggctacctaacgatcacaaaggaaccttgaattttatcgtctatgtggaagagcatatgcacatggtaacatggccatggatacaaatcattcacatgacatcgatgaaaactacaaaattacataatcagcgtacactttttttgttgcagtatgctgtaatctgttgtgctaactcagtctttgttatactcatttagcgtatgagataattgttccaaatcaggaatcggtattttgtcaccattggatgtgctaagaatatcttaccatatgatgccctgaggaaccatggctttggacaactgcgctagtatcctc

SEQ ID NO: 174732 - DNA, 394 bp, Zea Mays
cccccaactgacatcgtcggactataaaggggtgggtcacgggttcttccttccctccttgtctttcccttaatcctgatcgccaccgttaccatgaggaagaaggacgaagtcgcgaccacctccattggaccgtctccgtgccgccgtaagagtaccccgggctacggcgtcaggcggtcgaggaagcagcagggaggcatctccgtcgtgtggggaatccaggcggagtcttattgaatcagatttaaaccatatcggggaagaatcgctcgccggtgcgggcgccctgcctccagcgtcgcgcttgtcgtggtccgtgatttctgtgccaccattgtaggtaaggattctcagtaaagttccaccttgctcctaggatggtgtaaggctt

SEQ ID NO: 174733 - DNA, 514 bp, Zea Mays
gtggcccctagggcttcatctgtaaggtgctccaagacatagggagcatagtgggcttaggctggtaggaagcccatggcgcaaaaaggctccgaggtttaatttcgtacgtcatgtcatgtgatctagtaggtttagctaggaggacccttgtatgagcaataatgagggccgaagatcttcatttcctaaggtcgaggatgcccctcgtcataggatgcaaatagtggtgattctttcataattggcctaaaatcagtcttcttggtgggtagaggagggtatgctcattcttggacgctgataggccttatgtcggatcatccaccaaataatcttgaaaatcctttggtggtcttcttctctatctcaatgaatagttgtatagaatgggacagaaacactatgtctttctttaccattcgaatatgtttatacaattcgagctgctcacaagatgaaatagtcatcatcatcttatgatgaatcatctaattatttctctagaagtgat

SEQ ID NO: 174734 - DNA, 513 bp, Zea Mays
ctcgggttgccagtgattgtggcccaccggttggtaccctccccttcatcatcgtcaaactagtgcatgcacccataaccccctccgtggatctcggtaacaacccatggaaaccgggggatccgttcatcattgccctcatccggactccgctgtggttgtataaatacgcgtgtgctcgccacgatctctttgccaacccagcgagggctccattgatttccaagtgtggtgggtgtgctgggaaggatggagctaggggccaccacggtcgcaagaacagggggagaaagagagatatgtgccgccgtgcaatccgacgttcgtggccaagtgtttctgccagttgatctagcgggttaactgtgatgcaaggagccaaatctgtgacactagggcgctgggaggaccttggagcggtttaaattctacaccgacgcaccaataccgctcaccattgtggtgaggtatccctgttccaaaatctctagtgatgtacctcctgttctgttt

SEQ ID NO: 174735 - DNA, 494 bp, Zea Mays
gccttaggcatagagggagaaacaggtgactaattaattaggccccgtgggccagtacttagactttttaaggatgccctaagagcaccctattgtttggagaggagacgttactttcagcatgcatgcattataaacacaaagaggaattaaaacttgagctaacccacttcctttaaaagaaccattcaggccctctttcttttttccttccaccataatctttacctttgattcccttccgcagatgaattcacccacccccgctagtggaggagacactcgtttcagttctgacttcctttctcgcgatggctttccttccatcttgtgggaagtgcttaactccgtcggttaccctacgccccctttgtacacggtgcagttgtatgaggagcatcgggtacctcgttgtcgggtctggctgactttggaagctcatccccttcagccaggttggcgttctcttgattccgagacaattggactcagga

SEQ ID NO: 174736 - DNA, 306 bp, Zea Mays
cagtagagtatgagggataacttccccttcaacccaatcccccttccccacggaaccgccagccagcaaagaccccgccacgcggtcgacggaaccggagcccccacggtcgtcgccacccgacgaacaatctctccgaatcgcccagaatcaccctcactccactgaccggaagctcggtttcgtgcagcggaagagagatacgcagacgcacctgaagtccagtgcccaccgccgacgaacggcggaggtaccggtgaagcccctcggcgcgagcccgtcctcacccccgaaaacgctggcccg

SEQ ID NO: 174737 - DNA, 666 bp, Zea Mays
gacaccttgaggtgtgctggccacagtgggatggagaggcggccggcgtggtcaccaaaaccagggagatggcgcgcgatgaactggaaccaagcacagacgtgactgaggagggtttgacaccaacgcgagcacgagaatcaccacgctcactggctagacccgaagatagaggtagggctttaccgaaccaagcttatggcaatatggaataagatcagatgctggccgagctcgatcagaccatggcaaggaaaggactctgagggcgttagtggctgcatggccatggttacgtggctttacttacaggccccacgccgattcacagcataggagatcagtgcacctggtcgacccaccccagccaaaatatcagacttgtccacgacactaacagaagaaggaacatataagaacttcagtgtggacaggccttaatgggaccaaaactagatattttcagcaggggggtgaagcctctagacccctttgccgtccattcaatacttatctctattagtgcacatcggtggaatacagcagggtgaagagatcttttctacaacttcaagctgattctagattcagtgaactgaatcactctcacctttaccccactgcacccccctcctgtttacacccttggatctcacaaattctcac

SEQ ID NO: 174738 - DNA, 383 bp, Zea Mays
gaagattgtggaccctgctcttgctgggttttatgaagctatggaaaaaacaaacacagaaaagattacaaacgaaataatggctgatttgtctgaagattctgacgacagtgatgactatgatgtggaaagtgaagacgaagatgcggaaaatcggccctggcgaccaagccacaccatcttcggaaaatcatccattaagcatagtcagattgacgatatgaaagggaaatatttccgggatatttcaattgtgagagctggaggagatagtgctgcaccttctcctgaagacaatgaggtggttgtttacaggagttttatgaaggctgggcttcggttcccattgagcaaatttctagttgaggtgctgaagaccttcg

SEQ ID NO: 174739 - DNA, 1041 bp, Zea Mays
acttgggctaggtctaagggtaggggtggaggtgcggggaggtgggtttcactttcttctctaatgacttcccctttagctcttcggggaaaacctgctccaatccttgaggcggtaggcgtggttttatccgaagccatctgccagggaagagagtcactattatgcacatgcaaattgtttttaaccaagttattttattcattacaccatcacattacaagcataagactactacaggtgggactacacgagagcgttcttcgaggtactagcgagctccttgtctaaggtgtccccaaatgccttgagaagatcatcgaggctggctagggatacatcttcttcgttggactagtcatctattctggggggaggtagggctagaggggccttcttcttcttcttctctgtctagcatccctggttagtggtcttcttctagatcttctttctgggggcgagtgtctttagcttcttgtcaaagtctatcttcaaggtccgataggcctcacgggtgttggcttcctcgccttccactatgctgagactctcctggagagatgccttctcttgcttaagctctttgacttgctgctctaggctttccactcgggagtttaggtgggtacagtgggaggagagctcatcgtagtggttgtcgagggtgtggaggtatccggccatgtagacgatagtgggatcatcttctatgggatctcctcctgacagagcctggagtcttttcttccaggtgggggtgtttttgttgctgggtgggaaatatcggaggggggtctcaaagatctctcggctatagttttggcacagttgtttgagggcttttcgagcaacgctctgtcaagtgtctgggaagcggtgcccgatgaaagtaatttggaagggagggtggtttgggtagttctggctttctcccaagtagaccgccatagagcacttttccattccattttcacggtactccttccacacatattcgggcttcttgcggatccccaagcgcagcgtgcagctccgaag

SEQ ID NO: 174740 - DNA, 655 bp, Zea Mays
cactggccggccttgaccccttttacgtaccaaggtgcatagaaaaaatggcataaccacatttagtgttccaaccccgatgaaagcctgagcaggtaaggaggcaagcgaagcagttgagcaaaccaagtttagtgacatgcgcgtgactgatcctaggtgagtgcagttaggcaattttttgcaatttagccctttttcaaaaaatcacgtttaacccctggaagaagaattcatgttttagaccctttacttggtgtcataggcatggcgccaaggtaacacgacttgatgatataggttatggcgccgaggtactgcccgtgttgacgcacgctggttgtcaggtggctgacctggcctagcgccgagcaagggaatatgggctagaggccttctttctcacacgtgctttgtcttctctcaaactcgtcgtgcgccaagctagggaatatgggccaaaggccttcttctcacacgtgcttcgtcttctctcacactcgtcgtgcgcctctgtctctgtcctgtcatcgccaccgccaccattggacgtcgtcatgcctgtgcccctgctcactgcgcctcgcgcccggtcgccgcgtgcacgtcgtcgctcgctgcgcccatgcccgccacacaacgctctcggacttcg

SEQ ID NO: 174741 - DNA, 727 bp, Zea Mays
gtggccttcatgtcacctcccggtgaactaatgtgtaatatcttcttaagaggatacttaggtatattgtgtttttccacaaatgactcagttataaaggaatgcgatgctccagagtcaaataaaactgatgcatgtatggagttaacaagaaacataccatacactatgtcggcatcctcaggcactgattctgcagtgacgtgattgacccttcctctgctctggttttgcgatgtcttgttcttagcagatccacgagcgggggtgttctggtcattcttctgagtattgctcctttggggtgtttgctggttgcgccttgggcagttgttagcatagtggcccagttcaccgcacttgaaatatccattgggttggacaggtgcgttgtttctggcctgcgtgttactggcgccaccttgacgattctgtgaatttccaccagatctctggttggtctgagagttactcctttgttggttctgattttgattatttctctggctttgctgtccagagcgttgcacttgataattacttccgcctagatttccagagcggaactacgaaccttgagcgttgttagggcgggtattcctgctggactgaccttgaaacttccttttgtggtcagatagctcctttcttttactttcaaggccaattgccttgttcaacagtgtctggaagttgggaaatgtatggctctgaagttgatagttca

SEQ ID NO: 174742 - DNA, 444 bp, Zea Mays
gtcgaccacaatgcgagagcgagaagctgtggtggcgccatgaaggcggagcgagtggaggagacaccgcgcgagggagaagggattggcgggagcggcgttgaggaggagggatgcatgggagttgtggtgacgccatggtggtggagtgggtggaggagccgcccgcgcgaggggagaaggaattggcggctgcgacgttgatgagggatgcaaacgctactcccgtgtgtggatggaggatccaccaagaaagtgggggagtggagacaaaagcttgggatcgagaggaaattgaggaacgaaggaggtttgaagcgtagccgtggcaataggacggacgatgcagattgataggaggcaaaatcatgaaatgctggctacccctgcagtcttaatatagtagtatagattgcttcaaccgtattctttattatacaacaa

SEQ ID NO: 174743 - DNA, 954 bp, Zea Mays
gtttatggcgacattgagcataaatgcctcggggccgaacgacctagggcaaagaagatttatgattagcttgccaagagtagtgacggggcacaatacttcctcaaccctggtggctacaaccatgatgcttcggtccatccccgagcctaacgaactagaggcgaaggcgatataccgaaacctctgcaacctagtggagaaggctacggtatagcaggctgagatcgatcggcaagctcccatcggcgcggatagctacaacacgcgcacgacctcgtcttagagcagggggcacaaccctcccagtccgcaaaatatagcatccccgcgaagaaccatatcggggagatccgcaacgctcgacacctcctcaacaaccaccgctggaagtaggaggaggttgagcaggcccacgagcgaagccctatccctcccgggccagggccacgtgccttcgagcgcgtgatccacaagcacagttccctgtgaaggtgagggcgtcaaagaatatttccaagtacgacgggtccatgaatccgggcgtatggttagaagattaccgcctctcctatcgcatggcgtggatcaaagatgaccacctcatcatccagttcctccccatccaccttgtggaggggcaaggacctagctcgaacatttgccagccgacaccattcacaactgggctgacctcaaaaaggccttcgtcaaaacttctagggaccctacaaacaccctgatagtttataggacctcaagaggtgcacccagaaaagtggggaaagcctccgggattacatcctgatgtttcccagaaaaggaatgaacttcccgactgaaagggaaatagggttaacattttcctataattaattttggtggtttatcgtcaacacaaacatatgaactaactagtttgctctagaactcatgtattacaggtgtataagg

SEQ ID NO: 174744 - DNA, 1485 bp, Zea Mays
gtttctaatgcagtcagtgggatgacagagtctgctcgcaccgcaacaggcgacggactgatgggtcctggtcctcccccaattccattaaggaatgctcaggtattgaagaacactcctcctattacttccatgcatatgggaaatgggaacaatcactcggacatggacaccagggtcggtcctgagatggaggctcaggggaggaaaagttggctacccaagttggagtttccgttctttgatggggaggatgtcagggtttggatggataattgtgaatcctattttgagatgtatcagattcctgcaggactgaaagtttgtgcggcatctatgcatcttaaagggaaggcggccttgtggtttcaggcttcacgcgattacctatatgtgctaagttgggatcagtttaagggagctgtcatgaatgagtttgaggccaactcgcattccgacaggatgttggaattgctgactctcagacagagtggatctgttatagagtataagaatcagttcgacaaactggcatatcacatcaaactgtttgacagggccactagtgaaaccttcttggtaacacagtttgtattgggccttaagaatgaactaaggatgaatgttgaggtgcaatttcctcagactgtcgcgatggctgcacaattggcattgaaatatgaaggttggcaggtcagacaatcttcaggaggaaaaaggtttactactgtcaaagcaaatccatcactcagcatcaaggagtctggtgaatctcagggagagttatggaaggcaagacagttgaaggaatacagaaggagtaatgggttgtgttttaagtgtagggagaagtatattcctggacacaaatgcaagactgcaggtataccacagctaaactgtatttcggtagacgagggaggagatggagggcccttgttgtctgatgaagttctggatttccttgaatctagctgtggaaatattgatgatgagatggtggtgtctttgaatgccttaagtggaactgagcattccaggtgtatcagaattaaggcattgattcagaaccagacgattttgcaattattggattctggcagctcgaatactttcattagtgaattggcttctatgagaatccagtgtgaaacacaagagatcagtcctgtcaatattaaggtggcaaatggacagactatagtttgcaacaagaaggttgtgcagttggaatggtggtgctctggcaagacctttgttgcagatgcgattgtgttaccccaagcagcctatgacatggtgattggtatggattggttggaaaagtttagcccaatgctttgtgattgggataagaagtgggtcgaattcagatatcatggagaaatggtgaagttacaggggttgattcctggaaaggtgaatgaattacaggaaacctcttgtgaacaagtcatcaagtggcacaaaggtaatgaagtgtgg

SEQ ID NO: 174745 - DNA, 506 bp, Zea Mays
gcggcgccggtgaccattttcggggaaaaccggtgagctcgagctacggtggatgaggtgaagtagtgagaagtggattgaatgcataataggatggtggagagaggggagtacccaatttaaaggaaccgatcgtgcacttcacgaatgtggggcgagtgtgttcacgacggcgtcgagatatttgcaccgagacctgttcttcatggcacgccgtgaaacaatggcctcgggtagtaactatctacccgccacaactcccagcaccgtggtgaattggtctatggcgtggcacaaccaaggaagacggcgaccaccacagcaatggccgctcggccacgtcgccgtgcaagtggatacgacagcgcaaggctcaatccactcccctatgatattttcacctcccccggtaatatccagccaaaccaagcaaaattttcatggcaagctcgaatcacagcgtggagatcaccggcagcaaggttcactgaacctgtgatctaatt

SEQ ID NO: 174746 - DNA, 911 bp, Zea Mays
cagatagcttatacaaaaaggggtacaaatgtactggatggaatgcaaatagttttggcacaaaagactattatattagttgattgctactgcttttatgagtctaaaagatattgtgtagtgtcggattgtagagaataattaggtactcaaggatggatggcttacttgagatgacatcctgtatagttgcatcaagtcgttgtcaattttagatttcaaggctcatagtatgatcagtcttcctagaatctatatcttcagtctgacaaatcattcactctttgtcaaattgaagcttggaatgtcgaatatgtgcacaggcagagtaatgcatgcagtagaaaagtggaagtaatcaatgaaaatgatgatgcttgtggtttatgtggagatggtggcaaactgctttgctgtgataactgcgcatcaacatatcatcaatcttgtctattggttaaggtattctaatttctcatgttatacgattttcttaaataatttatcaagcaatgaagtgcaacttgcctctagccgaatcttatatttggcattctaacttttaagggaacaaataatgtatattgatggagcaaatttcttcattttggatgatgtagccatgtagtatgaacaaattgcattcttacaaatgatttagctaagttatcctattacccttctttctaatgttggagcacctagatgataggtggtactgccataactgtatatgtcgtgtttgtggttgtccacttagtgaaaaggcttacttccatagtgtcatcagcatagtctcaagcgtagaagcttagccgatgccgcgatggcttggatcgtgctgtttagtctgagtgtctgttgtgaatggaagcagatctcacacttgaacttgagtgccttccaatccc

SEQ ID NO: 174747 - DNA, 906 bp, Zea Mays
gggaattaggaccctgtcatgctggaggtcaaggagttggtgcccgccgtactaagaagaagtcaagtgcttgcttgatctagctagtaaaacgtgtacgacacatgttggtttggtggaactgacacatattatattccacaagacgaacaagcaaaaatgctgtcaaaagaaaagccatagtggttgaaggacgaacctgcctggtgagttgaaggaacctgcccagtgcacaactcaaaagaaaagccatagttttcactatgtcgatgtcgacaagtaaatagagattagattatattaaactggacgtggttctaccacagtagcatagtggttgatcggcatgggaaaaccttctacggggaagaacgctattatcgccattgccattagaacaggaggtggaggatcaacgtagttgcattgcgacggaacataaatattcaatataattttaaaacacagcaattacataaaatgaacaatttatataatatcacagacctcaatatctcataaattctctgcaaaaaaccactacaaaattaaattcgggatcccgagcgtctcctcctatccctcaactgttcagccacacatcgtcggtggtggcgtctcctcctgctctccctccgttgttcttatctcgttacctacagatgcgtgtggtggtagagagtcgcggcagtggttcgaggcacttgccgatagaggaagataaagacggcaccgcgtgcgggatgcgacggtgatgactagtgagttggactctaaaaagatgatctctacttgatgtcttctatggtggtgtgaaagaatttggatgagggtggtggagacagagaaagagatggaaagttgagggttaatatacgacgacaacattgaggaggaaggcgtgat

SEQ ID NO: 174748 - DNA, 878 bp, Zea Mays
gaatgcatacgcagggcacaattattcgtttcctgtgtgtgcgcatgcatggtgcccccgtatattagggccggacaaaatacttgtcagtagtcgtcagttcactcggcttatggtaagcagctcatctcaattctttcacaaattgagctaacatctcgtgagctcaaatgaactaacattttgccagcaaaaccgtttggcggagatgttctaaataatgaggacaagaagtgactgctactagcctgattaattggtggctactttctttttttttgcgagtttcatctgccactagtgttcgaacttctatatactagctaggttgctgcattgcgttgcatttcatttgcccatgaactaatgaatatattacacgtatgtgtctgtggcctttgggggttaaactcatgattaataactgtgtggctatggctgtgggttaaactaatgaatatatatgttggatgaactcatgagtgatgaaatgtgtttatttggtgttcaattgatgtgcatggcacgtgaaaatgttagcattattattactctctcctggcattaaattggtttgaaattaactaacaattaattatgttgctatatatatattgttttctttgtattggctcgcgagctaaacgagacaaaccgagttggttctctagctctgtttcttaaacgagtcgagccgagcttgtttgatatctagcccaagatatgtgtatacgttctaggtgcaattagggatgaaaaaaaatgggacccataaaaaataggatcgaaaacgggactagcgctataatgaaaatgaaccaaaatgaacagaacaaatcgataatgggtcagaatcagccgtaaaaagcagaaacatc

SEQ ID NO: 174749 - DNA, 614 bp, Zea Mays
gtggttcctcgccttagagcgactcaggtttgcctcatcccaccaaatgtcgttggagtccagcgtcttatcgaccgtcgcggcgcccattgccacagcgatgcctccccatgggcgcaactgccctcgcactaggggtgtgcgagtgggtggcaacggagagtgaacggcggcataaatgggcggcacgttagggtttagcactaggggctttatatacttgtaggtccacgggttgatttcaaagagatgcaaggttttttttttgcaaagtgatgacgtcgtttgaagctgatgttttataggagtagagattgctatatcgtgccacgtctcaagcaacttactagaaacttggatggcccataaataattaataagagttacaagaaaggttttgggccactactagggcctgactcagttgtgtccctctctgcctcgctcccacgcacctagaaatgagatgagatcagatgagacagagatgcagactatttgcaaacccacccttcttctaattttacacatccatatatgcaaagcaataattcgttcgctgaaaacgcagaaatacaccgacatacgtatcacttgcgaaagtcatatatccc

SEQ ID NO: 174750 - DNA, 911 bp, Zea Mays
ctaaaattttgagaaccagttgaatatcagattcttttggatgcaaaaacatgatcacatcatcagcatacaaggacactctgtgttgcaaaggtctagaagccaatggatgcagcagattttcgagatcagcttttgaaattaaccatcctagcacgtccatgacaagtatgaacagcataggtgagagggggtctccctgtcttaagccctttttgagctgaattttttcgccagcaacaccattaagcagtacttgtgtggacgaagtagatagcagtccacacagaacattcatccaaatctgcccaaaccccagtttttgaagaacttcaaggaggaaaggccaagatactgagtcaaaagctttagtaatgtcgagcttcaaaaggattcttgcttgtctttgctgatggagaagtatggcagtttgttgcacaatcataaaattgtcttggatgaatcgacctttgatgaaagcactctgcctttgggagaccataaattgcagcttattccccagtctgttagctaggattttagtgactagcttggccatgctatgcactaaactaataggccgaaagtccttgacttggtcagcaccctccttttttggaataagggtgatgagagctgaatttaatttgtgaaagtgaccaaacttcctatcccaaatggctgccaaaacttgcatcacattttctttaatgatagaccagcaggctttgtaaaatcttcctgtgaacccatcaggtccaggggctttgtcaaacggtagctctttaatggcttcaaaggcttctttttctgtaataggtaagtccagatcctccaaattatgagagggcagccccaggtagttaagattaatagtgacagttctatccagtcttgttcctaacaagctt

SEQ ID NO: 174751 - DNA, 554 bp, Zea Mays
atctgcggctgagggcgcgcgcgcgagcgggcgagcgttgacaagcgggccagagagtgtcagcgacagaggggacgagcgtgctgaccgagcgggcccagcgctagagggtttggacgctgataggcgggccagggcggcagggcgcgcgtgcgatctgaatcggacggaggggatcagaccaggggaaacggacggctccgggcggcaccgctcctcttcgtggtggtgaggtcaccggagttgaggctggcgtgggctagggtggctccggggtcgctggagttgggcagagagggagagaacgccacggcgaactcaatggcggggacgaggccatgaatccacgggcagagaggggagaacgacgatgaggaagcctcgggcgggccggagtaactccggtgagccattccggccacggggaggggacttaaggcacgctaaggccttggctaacttcagcagaggcaggggtgacatagggacctactccgatgaactagaccgggctaaatcggccggccactgcgcgagcacgacggaccgccgcg

SEQ ID NO: 174752 - DNA, 636 bp, Zea Mays
ggcacacgctatggcggttggtcgcggtgcactgcctgggccacgtccctgtcggtgaggctagcgtgtttgtggtcgcggtgcactgctagagggaatatgggggtctaggaggtcgacgttgatggacggcggcacctgggtcttctcttgctccatcatggtcgcgatccatgggattgccccagtgagggtttcatgaaatcctctatgctactcgatctcctcatgatatagtaaacaacaacctctgctatttccttctccctcgcacatcacccactatacgtagaagaacctcgattcgatcttgcctcacccatgtcaggccgaccgacgacggccgcaacctctctctccttcccagtcctcctgctcgcctctaccaacacctttctcttataggagggggtggagcccttacatgaggaatttattgataaagaaagtgttatagggagttccggtctgtttgtgggtgatgtttgtgctaatgtagctgattcaagtttcattttttgtgcagtctctatggtttttagggagagattttgtgttccttggtattacggtttgatgatagacagtagtactatttctccaagaaagcaggtgcagagcgatctcaaggtccgc

SEQ ID NO: 174753 - DNA, 845 bp, Zea Mays
ggggatgcatgcaagcgtggactcactccaaatggtggatcgtggtgatccgagctgggaactgagacaaggagttatactggttcaggctgtggccctagtccagcgtagtattgatcgttgtattgctcaggagcatattgcatcaagtgtgcttatgttctgaaaagagggagagggactcccttttatacttcaagggatgatccttacatatgagagagagagagttttgcagctaacgtctcgcgcggtagtgcgcggcgggccccttggggttcagtcttggggtgtgcttgcacacgacatggctccttcttacgggttgtgcgctactgtactcttggtatggcattccatctcgtccgtccgatgtatgagtcactgtagcttctcaatgtcaacgtagtcgtacctgatgggtcctgcagagcatgctcacagtgaggttgagggtcgtgttcagtacggcttcatcttcaagtcgtgacccttgtgtcaccttccagcatgcgtgggtatgctcggggtatagcatgttgtcctgtcctttttcttgtacatgggtcgttatgtggagactctgatgtcgagatcccccttggtgttgcatacatggaccggacatggtttggtgatgttgcgtctttgtcatggtcgttgtgggtcggtaatgtcagcctgggttccctccttgcgggtctgctcggcggggacttgatcgtttgctctgcctcgcaggcttgctcggcgaggacttagtcgttcgtcccgcctcacaggttttctcggccgagatttggtcatccgcccgcctcgcaggtttgctcgttaaatgggtcgga

SEQ ID NO: 174754 - DNA, 479 bp, Zea Mays
catggccacagattcacagagcttcgatgttaaggattgtgagcacaaagcccatgttggcccatgttgctacgagaaagacaacaaaggaacagcgtggtctcaggaatggacatcgaatatttcagagaacacaaacctccttccttcggattccagaagccacctcctctactgttcttcttcttcctctgcgtagtgatcttcttcctgcagatctcctcatgaatatctaggcctcttcaattcccttgcttctctacgtatcccaaactctatttcaccccatacttgtatcagccactattgtttcagtttcctggttgttgcattggattagaagggggttgttaacaattggaatcagaggagcaattctcggaaccccagcaccatagatttctctaccgagatctctcagtccacctagttcctcgtccaagagatccgtaagatgttggacgcggccgaggctcggc

SEQ ID NO: 174755 - DNA, 414 bp, Zea Mays
gtggaaacgatggaagaggtgacagcgagtggggcatggggatttggtggattggtaatgggttggatgatggtggagctgtagctggtggtggcctggtggaggtcaatggtgcatgtgtctctggaatgccgccataacctgggagaccgtaaggaaaccctggatggttgccggcggcggacactatgggagtcgtgcgcccatcgatttctgtcacatgcagcgccagattggacaccctggtggcgagatctgcaagggccttcgtcatggtgtccagcttctgctccagggctgcgctggtggtgtttggcgccgcagcagatgcgacttcgctggcagtgttgtcgtcgttgcccgacatctctgataccagattggtatgccctcttctccttaggttgtagctgt

SEQ ID NO: 174756 - DNA, 703 bp, Zea Mays
tcgcgtgccccctctgttagccgctgactgtgggcccctatcgtcggctctatcctcaccaacgggacgcacgaaccgggtctttcgcaggcgcttccggaccttcccaaccacttccgctccttgccgcggaatactagggagcccggctcaaccccgtggagtctataagctggtcagctggtttccccttctctgccctcttcgtaggttcgactaccatagccataactgtgcgcaggagggaaggaatcgccgctgcaagaccccagacatcgccgctgtcgctcgagcttcgtcgcgcgattcggtcgtgtcagtcgagtcatgcgggcccatgcgtagttcaaccgaactggaagtagccctgggggacgaggatccttcaccggagtgggacttcggcgccgtgctgcgatggggcgaggacgctcttcctggcgccatccttaactctggtaagtaccctggtctgttcagtacattcataggttcatgtgacaccggtagtgtagtagtgggatcaacggtttgccggtgattgctcaccggaccttgtccgggccgtggggccgccatgggaggtagatcgacgccggcccattgcggtttagcgcgcgaggtggtcgcccagcttgggtgcagtcgtagcttcgactagagcttgtccaatcggaatttgggggctcggtgtgtggaacgg

SEQ ID NO: 174757 - DNA, 299 bp, Zea Mays
ggctagggcggatggccttcacaagaactttgggtactataacttctataccgaaaagacaccaaagccccggtaatcggctgccgcacgaagtggccaactgggtggacaaatgagtggttctacatgaaggctgacgagaataagagggagaagctgatgaccatggttatgagtcctatgccactaagcttcggaatgacaaggccattgtgacatttgcaactcggttccccgtgccagctagccgaagttgaattcagagtggtggctatcgaaatcagcaccagagatttggt

SEQ ID NO: 174758 - DNA, 1093 bp, Zea Mays
acaattacataagtaactagaaaaccaaagaattctaagcatcctgaacatatcaatgttgttaggatcataatcagcaccattaagatctctggccgtgcattaatatcatcacccagtactgatgtttgatcatttaattcctctttcctaccatcagtagagcattgttgcagaaatagaagcctcgtaagcaacaagagatggccaccagatggaagaacctaaaacaaattgaggagtatttcgatggccctaagttgtctggagatgcacaaaccttggatttctcttcttgaggagtatttcgaatagagaaaattcttggaatattcgacgagcggaaccggcacctgaaccatcttcagcctcagcgcctctgccaggcgggcgcgctgagccctcatgccgcgccggactgctggtgccgaggtggtggtgtcttgggggagggggatgaagttccgctcggagccgcggcggatccgagccggcagcatgatggcgggttcggggagattggggctcggtggcctaagcagcacgacgacatttgagggagggaggggagcggcgaggagggggaggagattgggtttggggctcctcgcggtggcccaggcactatggcatcttgaagcatcgtgccctatcgtgggagttggatggagacttcgcgtggtgcgtggatgagggagacatgtaccattagcgaacaatcttatggtcagtattttagaagggacatgtaccatctcaggaggcagctttaatttgctcccacgattaatataccgtaggattacaagcttttactagactctacataaagatggtatagaaacatggaaaggcagaaacataggaaacactagtaaaattttctttcgaattactagaaccaataaaaatactcccccaatctcaatttataggtcgtttggcttttttcacaccaaatttgaccacctcgtcctattaaaaaaatatgaaagtatggaaaaaattaaaccacaataaaatcaaatacttattatgatttttttgaataatacgagtaagtcaaacttggtgttggaaaaatcaagcgatc

SEQ ID NO: 174759 - DNA, 515 bp, Zea Mays
ctttttctgcgcggtttaactgttcactctgacgcaaaaccggttgaaccggttttggtccgctgaccagccgacgccgcctcctttttcttctctccttcctcctttcacttcttacccattcatttcttccagccgtcgttgcctacacttttcctctctctccctctcactttcaccacaaaccaaagcccatttgtgccatcaaatccttgggagtttgttggagattcgttcctcttggcttcctccatcaactccctcactttcgttgggatttctgtggttcaatcttcagatcgaggtattaccttatttcctcatgtttttactcgatctcacttgttcttgattatctagtgtatcgtttcaaggatacattttagtttaggtgcttgcaacacttaaattatcctcttttgtctcgaacattgtttgagtttagttgtttggtattgttcgttgtagttgaaccgctcgcatgaacggttgaagtgcatgctcaatatcatacg

SEQ ID NO: 174760 - DNA, 386 bp, Zea Mays
ttcgcaccggggcattgaagcaaacccggagaagatcaaagcgattgaggcgatgaggcctccagcccgtatcaaggacgtccagaagcttacagggtcattagccgcccttagctgcttcatttcgaggctggttgagagggcgctgcccttcttcaagctgttgcggaagttcggcccattctcttggaccgaagaggcgaaacaagcttttcaagagttgaagcagcacctggtgtccctaccaatactggtagctccagaacctggggagtcgatgtatttatacatcgcggcggcttcagaagtggtgagcatggtgctggttatcgaaaggacggctcaggaccggctacagaggtccggactgttcagaggccggtcta

SEQ ID NO: 174761 - DNA, 570 bp, Zea Mays
tgcctctccgctacagctatggaagggaggagggaaggcgcagggaaaagggaagggcgagtggaatgagtcggcgaccgaagcttttatgcaccagcgtggtccacgcggtccggtcctggcaggggaagttcgccggagatatcggaggtcgccgcgcggagtttgttagcgtgagcgcgatcgatctgacggcctggtcccaccggtcatggacggagtgacgaaggcgggcacaagaggtaccgacgggtaggcccggcccgtcagtgaggcaggaacccaggcacgcgcgagataagagcggcttacaagcggggcccgtgtggcagagagggtgaggcaggcgcgtgcgggctgaagacttgggccgcggaagaggaggaaagaggagatgggccgaatacgaggttggggcccagttagggtagttttgttttattcttttcttttccatttctttttccccatttcaaattcaatttgaattcagatctaattcaaaccttttggcccttccttacaattttatattgtgccattaaagtactgactttaaagatattattt

SEQ ID NO: 174762 - DNA, 279 bp, Zea Mays
ctttcggtgcagaggatgggtcacccaattgtggttagttctgctaatggctccattagtagctgttcagtatgtcagggttgttctatcattcttgctgatgaggtcttttcagctaatcttgtggtgatttccttggggcatttgatgttatcttgggtatggattggttaactcagtatcgtgtagttatatcctgtttttggaagacagtgttattgcaggcgccattgggtagggaggtggtattcttgggaagttctccaaagttcacgttat

SEQ ID NO: 174763 - DNA, 530 bp, Zea Mays
cgacagtttccagagcctcaaggttaatggttatatttctgtctttactagccccaagcagatcaaggtaaaactaatccactgctgcagctttgtcattatgagcagtaaggacttgatttcccacagtaagtttggatataatattcttctttctgtagccaagaaatccttaatctaaggcgagccatggtacgcttggttgaggccaaagccagagcgtgtttcttcaatttattcaacagtcatctctcaagcacagacaaaatacgaccatcctgcgcaatctcaagctgatggatcaagtctctagcaagatgcagctgagtctcaatgtgtctcaccttcttgctgctccatccttgaagggctttagctgtccctttgagttttaaatcaaaagtggaaaatggacattggccaacaggaaccgaactccaggcattgtgcaccacttcgtgaaacccttcaatctttgtccagaaggattcaaaatgaaaacgccttttaacgcctttgctatctttgag

SEQ ID NO: 174764 - DNA, 582 bp, Zea Mays
aaatgttcccaagaatgaacttgaatcacatttatacccctgagataccaaaaacccccattggaaccctggaaaaccctaaatccaaaccctaggggtctgtgtgcaaaattagtccactcttgtactaaagtgcaaaaaccatgacaataaggtatcttaagccctttggttcacaaatatgtgaatttgcaagctaaaccctgagttttggacttacttgcaaaagagccacatttgaactcttttgactaagtctgaatttcagtgtagtgtgctcatctttgtgaccttgtaacttctaaacaaaagggattctgccctaggtaaccacatcaatattgtagatctatggaaggagaataactttgctatagaactcatgccttggtaccatgaagaattctgagataaatgagcctgaagttggactgtcagactgcttgaaatctgaaattcagattaacagtgggatggcatggagttagggctcggatttaaacatgatccagtgcaagtttgagcatgattcccataacaaatttgtggctggtatgtagcactacaactttgatgcagaga

SEQ ID NO: 174765 - DNA, 586 bp, Zea Mays
ggttgaattgctacaaaatttgctcaccaagtactggcaggtcctcttaactgttgcgcagcaaacagtggcttctgcatctccgtgcagcgaatcaacccaaacttctgttccatcactcttaccactcatcaacttctaatggttcttctgctttgatgaaaagcgggggtcaagtctcagaaaattccaaatatgtagtttcacgcggtccttgaggaggagctctcccaccatgctgttggaactgattgcccaccatctcgcgcaagaaacgcgtattatccgcagtggcatttaccagggcagcgatagcctcggccaaagttggtggttcgggtggcgggttaggagtatcttcccgaccgcaggaagtccccgcaccatcatgtgcgcgagtccgtgatggcatctgaggcaaagaaacatttggaaaaaaatataacatgccagcatacaccatcatattacattaccaaaatgtaataattatacagactccagcgtacaacttgacttcattacttattttacataagtataacatctaaactatactattctagtcttcgtcatcctttgttgc

SEQ ID NO: 174766 - DNA, 534 bp, Zea Mays
ccgagtagagttttcgcccccgagtggacccggggggtatttgtcccccgcagaagtggttctagagccaagagatgatgaagttgttgttttcaaaagcttcttccgagcagggcttcagttccctctgtatgaaatgatcggtgaagttttgaagaaatttgaaatttatcttcatcaactgactccaaacgctatagtcaggcttagcgtgtacatctggactttgcggagtcaaggaaaaaagcgccaatgctaaacgattctgcagggtccatgagctccattatcagaccaaggcaagagcagatggtctgcataaaaacttcggatgctacaacttcgcataccgaaaagatatgaaggctctagtgattgggtaccacaccaagtggcctaccgattggaccaataagtgttttatgtaaaggctgatgagaagaaaagggagaaactcatgagcatggtaatgagtcccttgaagttaagcttcggcatgataaggccattgtgcaagatgcaactcggctcccc

SEQ ID NO: 174767 - DNA, 704 bp, Zea Mays
gggacagggaaaaacaaagagatatgggggtgaaggatcgtctcaagggtccgagaagcggtcgaagttggtgattcgtcctttcaacccaaatcgctcttctcctcgtccacgtgcctatcctttcaagcaaccagattttatccgtcccactcctacccttgctcaaaacaatcagacgagtgcccctggtactcgtttccctgccctaccgagttcctctaatgactgctttaattgtgggatgtctggacacttcatcaaggactgtccctatccaaagcagaataaatcaaattttcaatagacttctgggaacacatctcaaggcaagggaaatgtggccaacactccagcgggcaaaaatacaaggaaaactggacgagtttactacactcaagtggcgaccggcccagaaggagaacctgtgatgatgggtacgtttttcgttgccaaccatcccaccatcatccttttttgattctggtgcatcacatactttaatgagtaagacttttgttgagaagcataacatacattgtattgaatcaaaggagggttatgttattcaatcacctggggtcaaatctttactaaggaagtagtcttccacgtacccgtgagattagtcggacatgagttcccaaccaacatgatagttataagggaacatatcgaatgcaaaccacttttttgtgcaaact

SEQ ID NO: 174768 - DNA, 344 bp, Zea Mays
aatcagttcaacatgggggctatgatttatagggcgaggaggtagtaacggcgccgcagaatgggcagaggacgcgagcagtctgtatatccaataatggcgtagagaaatcttcgtaatgcagcataatggggaggaagaggaaatgttgcatgtccattacggtggaatatggaccggcgagcagacgtcatgaataagagaactgatggcggcgtacggcactttactacaggcgtgcgagcagcatctatggagaagaagtatttctccaatgccatgcggtgtgggtcccacaagcaagtgagacaaaaagggagggagagaaaacgtgactgcaggaa

SEQ ID NO: 174769 - DNA, 427 bp, Zea Mays
gaaagttttgatgaacatagcagtgtcttcatcacttgaactttcttcctcactagaactttcagccactttgtttgacttatggtccttgctcatcgaacccttcgtggaagaatcttgatcatttgtaaacaaggcatgagaattccttgttttggttggggctttctctgactcatgttgaatattggccaaaagttgatgagaagtcatctcctcacagtcattacggtcccttatcatccttgccaagctcttgtctttctccttgtagtctctcatgaatagcctagtgaccttagagtcactccaatcctcacttcccaatactcttatcttgttcaccaaaaccatcaatcgatcaaagagtgattggagagactcacccttattccaatcataccttgctagctcactttctaaggcc

SEQ ID NO: 174770 - DNA, 1332 bp, Zea Mays
ttcatgttgaaaacattacctaattaaaataataataaattaaatgaagaaatactaagtagaaattgtgcatcatgtggagtttttcttgtgcataaatttgaaatttagaatttaaaacttggtttgatttgaaattgaaataagaaaggaaaatagaaacaataaagaaaagaaaaaagggaaaaaaactcaccttgggccgaattctcgtgcgcctcggcccaataccattttaccaccgcgccagcccagctcccttcaactccactagcgcgcacttgctcacttaccagtgggccccgcaccgaagactcttctcctacctcgtaacgaccccccaaacagactgcggagctctcggcagggtccttgatccaaattctgtgcttcgccaaaacaaaccggagcatcgggcgggcgtaacaactttcctccccttcggactctgctttcctcggcttcggggtataaagccgggggcatgtgtggaagatccgccgctgggaaccatagaaggggtcaggggcgttcgcctgcaaccaaggagcgtgcgcgggcttgcaatcgggcgtgggcgtcgccatgttccaacgaattcctcgccgtcgctcctacgccgccgcgggtccgctcctcgccatggctagctctcgtcaccaaatttctagtctggtaagttgcatccctaggttcgcctttatcctgtagtcgtattgcgcgcgcatgtggtcggtttgggtagcggagtgcggggttggacgttcgccggcgagtacgccgccgggcgagctctgtttctcgcgcggggtgtttcgtcgatggagtggggcgtatcctccgtcgatcagtgaacgaacgggcgcgattagttcatcttactggtgcgaggggaacaaagtttggtcgttggattgtagatgaaggagtgggatcggatctcgcgcgtattaaatctggggccttggatctagatccaacgatccctggcacatacagattcctcgacggcaggatctaatcctggccgcaggatttagatcgtgtggctcgggttatctcgtaccccttcggccgacgactttgcaaaagaatccctgaaccttgtagaattaaacccgcagtccaccgcgggtaggttctgagtctatggaacctttgcgttttaaccccgaactctctgcaaattatgcacgccatccaggactcaaaagaaagaaataaatgaatatagaaaatgaattcctagtgtaaaaataatcctaaaacttgtttaattcatacaaaactcattttaactcctttttagtccattcaagttctcataatttt

SEQ ID NO: 174771 - DNA, 862 bp, Zea Mays
caatgcttgaaaacaagtactggtcagcaggaggataattaatgtacgacgtgtttgatgctggcctgcgccaggggaaggatgcacggtgatgccgtccagtgttcggtgacgtggtcggttctagggtcaagaccgacgagagcgcgcattcatcatgccatcacaatcccagggttgtgcaagctacgtgatgcagaccgggcactcaaggtgctagggacgaagagaggatggaggcagggttggagccgtgcgagctaacgtacaattctgtggtggatgtgcttgtgaaggtggggcaaatgggtgaggcaactagactcattcaagctgattgatggggtgacacaagaacagatcaaggtgtggctgggttctaacaaaagtatttaacagaaggtggtcagtgccttacatgatcgggcacttggatgtcaaatctatcggtgtgtcaaatctactttcagctggcctggaagggaagaacagatcaaagcatatgtgcagtcctgctaccatactgtattgggcaaatctccatttgaagtgctagatgttgcagcaagtcaaaatgcactcgcagcatgctcaaactccgatgaaacaccagctgatagacaaaagggcgcacagatcgtacatccgatgtgggtgatcgggtgtgtacttgaaattcaccctttactgtcagtcctcagtggctgaacgccagaaccacaagctagcgttccggttcttcgagccttacaatatgcaggcggctcagttcatccggtgtttcacgtttcacagctaaaactgtttgttaacgctagtcttgttgtcagttcttcggtgttagacttgtcccaggtttacc

SEQ ID NO: 174772 - DNA, 423 bp, Zea Mays
cctcagccatggcgcccaagcccttcttcctttccccaaccagcagctcgacgcccctctctgctggccattcttccccatcgcgcgcatggctgttggtaggagcgcggcatggttgaagctctgctcccctagctgagcgccccttgctgttctccttgacgccctttggcttctcaacaaactacgcagcaagccacgcactgcagcagccctcgctcgctctgtcctctagttcatcgcctctctgttgcagaccagcgccccctgcacctcttctctctactgcgcagcagcactccctcccatggcgcccctgtttccctctcccggcagcgcagcaccgcgcagccaagttttcccccagccccacaacatcgacgcgccgtgggtgttcgacaaaatgcccatggaaagtcttgc

SEQ ID NO: 174773 - DNA, 614 bp, Zea Mays
cacttaacgaaatcgactcctatttaacatgagttggctaatcacagtagaagacctagcgaaccattttagacatcgtaactcaagaacatgggttggggccgattgatcagtgtttctcaaccattgctcaacttgaattagttaacacacaagtcacctaaatagcacatttttggggtctatcgtggaggcatttacacatggcgtaaaactccataagactacatttgctactggcatcaacaatacctaccgacctattattcaccatacgaacgcaggttacccgccgcttactagtttttaacataatcctcatatagctcggaattccaactactcactaacaataaattacgcacgaccactaccacatcgacccggttaatttatttggacaccgcctagcgtaccactagtaccccacattttgattcaaggtcaataatacatcctttattcgattataccacagtgacctaagcgtcgtgttacccaatgtgtacatcttttcttgttgcgagtataaccatatcacggcatatacccgcacacctcaaacaaatatctcacgccaccactaccatatcacaccacagcacacacacaca

SEQ ID NO: 174774 - DNA, 502 bp, Zea Mays
ccgccgttctcccctctctgcccgtggattcgtggcctcttccccgccattgagttcgccgtggcgccctcttcctctctgcccaacttcggtgaccccggagccaccgtagctcgcgcctacctcaactccggtgacctcaccgccgcggagaggagtggcgccgcccgcagccgtctgtgttccccggtctgatcccctccgtccaattcggatcaaacggctcggaccgcgggtaccgcttcgcgcacgtctgtttccccggtctgatttcccccgtccgatcttgatcgaatggctcagaccccttcggacccctttggaccccctcggacccctccctccgtccgatcttgatcgaacggttcggaccccctcggacccctgtagccgtccgtttcccctctggcgctggacctgctcggtcagtgtgctctccccctctgtcgctgacgcccctggcccgcttgtcagccacgcctgctcgcccgcgcgatctaat

SEQ ID NO: 174775 - DNA, 632 bp, Zea Mays
caaaccatgaaccttcaactagaagctctcaaaatggaatctgcgcttacccttgttggccacattcaaaccaagcaggagcgtacaatgatcagagaccccagccgccatactttgcaagactgcatcaggaaaaatgccattccagccatcacaacagaaggcacggtccaacctcaccagagtaggagatcgcctttcattggaccaagtatatttccgacccaacaacggaatttccaatagatcattatcatccaaaaaacgtcggaatctccccatcatagccctatccagattggcattcttcttgtcagcggcttggtaaattaagttaaaatcacctgccacaagccagggcccattgcaaagagccctaatatttctaagctcctgcaggaacaacactttttcatcatcaccttgaggaccatagactccagttagccaccaattacgaccttcctgctcagcgaaaagaacagaaactgagaaattatcaacccttgaagcgacggcctgacaagaaccccccttccaagcaaccagaactccacctctagtgccaacaacaggtaaagcaacaaagttatcatagacagtcccaaaaactgaaaggagcacctgctggg

SEQ ID NO: 174776 - DNA, 648 bp, Zea Mays
tggcacgagggatttgattcaagagcatatagcctttagggtatgaccgcttgtggaaagctgggatatgccgaaggagaccaccgccgattccagtgaggatgatctgatctgattgaagtataccttcagatttagggagaagtttgatgagccagacgatgactagctgaagtgtattgaagctactagtgatgagctactcggggcatactccaaggccgaagataatgctttgtccgcagctttcgggggtcggggcaagaaaagattgaacagggtatttgatgcgattggcttcgtataccctaattaccactacccgctatgagggcaagggaaaaagagaaagactgtcgtttcggtcaccccagctgaaccgaagagcaaaaaggtgaaggttctgacccaccggccgcgttatattgaaccggtcatagtacctgaatttggcgaagggacctcttcagctgccgaagcaaaacaaactgctccgattgtgcagagcgctgaagagccgactatagtgccgaaggtgcctacagtcgggccaaccaaagctaaagatgataaggccgaagagccacaggtggaaaaagtgataaaagtgccagaaatcctgagcccaccggcagaggcagatttgcc

SEQ ID NO: 174777 - DNA, 1570 bp, Zea Mays
tcactatgtcttgcttcaagcatgtttacctcaaggtttagaatctgcaactttgaaaggtttccaaaagaacttgggattgtgccactgaaaaggttgtttggtaggtctacgacttctagatttgaagcattgcctagggaagttggaattgtaccaaaaaataagttgcttcctaagtatagtccttgcagatgagggagcacatcaccaatgtttgatggcaatgtgccgcccagcatattgtggtcaaggcctaatatcataagagaagataagttagtgaaagtatctgggattccacctgataggttatttattgctagatttaccatttgtatgttcggtatttgccaaacttcattaggaatgcttccatttagttgattgtttgaaagatcaactaacaatagtgtggagaggtttcttaaggttggagggatgaccccactgagataattaccataaaggttgataccttctagctttttaagaaaggctatgttcggaggaatatgacccgtgagatggtttttagagagatctaggtagactaagttggaacagtttgtaagccaatctagaataacatcctccaaatggttgcttcccagaaagagtaagtccaggtttcggagcttgttaagaagaggtagggggccaatgaagctattgttgctaagatcaagggtatgaaggaaggtcaggtttccaacagaggagctgatttggccagccaagttttggccggtgaggttgagctccgtgactcgatatggtcgcgtggaactgcagttcacaccatgccaatggcagaagtggatgctggggttccaattgctcaaggctccgtgcggatcactggtgatgcccttcttgaactctagcagagaatgaaaatcttggctgttgttatggtgcgtcgagcaatggactttgtccactgcatgacatagcagcagcagcagtactacaaccatggcgagtttcgacggctgcttccagagactcattaagacacgtaattgacaacctgcaaaaaataatgagtgatcttggcggcgtattacggagaaagtactacgctgagttcaaggagtgaccaagcttactacaaacttactatcgaattctcttaacaagtaacaaactgaattggataattatgtacggaaggagaaagagagaccggggtacctctgctcgctcggctacccttgatctgcttcctttttgcttggtgctgtgagattgaactctgaactttaaactggatactcagctggctgacctcctatggggtttataaacccttttacagcaccgttacatccacagaacagcactaggcttagcttgaccgccggtgaagagaagaccgtgagtccgtcaaactcgtcatttacttgccgtcacttttctgcttccatcccgttcgtctattagcgcaccgccgtcgttgtttgattgaatggtctagcagagctggattttcatttccaaatccccgtttggttctttgtgattatcaatcaatcttgcggaatgtgttgtgtgggcatgattcgtt

SEQ ID NO: 174778 - DNA, 956 bp, Zea Mays
acacttttcaattggggaagtcatgataaatgcgtgcaacaaaaactttaatccatgcacagaaaatcattaagattgatgaaagtagctgagtaaacaattagtcgcaattacaggaaacatattagttctaatcaaacatggtaggcaaatgtagagacatcacagctgaaaactaccattctcgattgagaaaatcatgctaaacgggcatgacaaactttgatctaagaacgaaaatcttcatgattaatcagcattaattaatccagcaaactgaacaagtttcaaaacccacaaaacaaccagttatagtccctatcgaaattgagagtaggaaacagataagtcgcataatttgctggcgaatctattagaaaaaagtgttaagaaatcaacatgttgtcatatcggggctcacaacgtatcattctccattgacagaccatgaagaaatgagcacaggaaactttaagattcaatgccttcgatgaataggcattagaaaaaaaaagttggaagataaaactagctaactgaaacatgtgtgaagatactgaaggctctgaaattgataaacctacattttccagggacaaaaacatgagtaaatggagcatggcatggcagctttaatctgtatgcacaaaacattcaagtgattaagcagtaaataaaggttgctaacaaaattagctcagaagctagtacaattgagcataaaagcaatagctaacttccatagataaaagataggctagaaccagaaatataatcttattaacacattaagtcatagtcctaataatgagagaaatatttgccaaattctgaaatgcaacaaacagacatgtcgtttcactgatacaaaagtactgagacggtgagaccccaagctaattttgtagctacctcgagatttcaaaaacctgttcgccttcctgttatcacatgaa

SEQ ID NO: 174779 - DNA, 661 bp, Zea Mays
ggaggagaagaaccgatgtggacatccatggaggtatgagaaggggagcccgctcggacaccctcgggggctgggtcgcagcctgcattgcccaccggagccggatcaccaccgacagcaccctcgggggctgggttgtagctcgcgctgcccacctgagccggatcattactggcaacaccctcgagggctgggtaaccgctggcgccatccttgaggaccgggttctcagcagcagccacctctaaggctgaaggattctcagccacctccatgggaatggagcaacctagaccagcttcttgactctgaagaccgcactccaaggtcgacgaggcacgagatgctgctcgggataactctaaccccacatctggaatgtcagtgcaaacatccatcataccaccatctgttggcttggacagcagatcttcaggaaccatatcctcgagagcttgatcaaaatttgctatggacaactcttgtagaccaacgagagcaaacaaagcaagagaaggaacatcactactctccccactgactaggtagcgccgactgtttttccgaattaaggggatttcctcctcttcttcctcatcctcgtcaataatatgaacaacacacccattgtggtcagctctggccagatcacacccattgg

SEQ ID NO: 174780 - DNA, 576 bp, Zea Mays
ggctactagctgtttgccaagactagctctggaggcgccaaactcacctgtagtgcctagaccagaagagacatccctgctgcaggtggccgaacagcctaaagctctgaaggagcaggagaaggagaacgaggaaggtgctagccaaacatgtcaagcatcatcatcgtcgactaaagcagcagcagcagcagcagctagcacaaacacacgacggaaagcaagctccagccgattgggggccctctggatgcctgtgatcggcactttgctcagggcttctgctataaattagcttggctgagccatggtggcaattttgtaggtcctgctagaattggcaacgcagtgccaccagatagctcgaaaaacgatcaaaactatctagatagggtgaaggttatctgcattggcagcgaattaagatttgcattgccatcttacttgtcttaagggctttagaaactagagacagctctaattatagtcacttatatgactcacgttctcccagtcacagaactccccagcccagataaaaatacatcaagctgagggtacctgcagtcttgttac

SEQ ID NO: 174781 - DNA, 600 bp, Zea Mays
gtcttagtctcaacggcaaagtgggtttctttttgcaatagaacgaaatggattggggaacgcgacgatgtattttactcacatatagcttatagatggggtatggatgttgaccgacttcgaattgagaaaaatacttggcaatgcgcggaagcttcagaggatttggtggtcgacggagatagcggagcttggcaaacaacaatggcgatccaatcggggctccaaaaccctagtgcagtagttggatggacccaatgctgaagatgaaaggcagtggcagaagtagaatgggcaatcgccttggttggagccgcctcggttgccggatttcggtggttttctttcctagcttgcggcaaatggtgatagaaacccccggatactcgcacatggatagcagactagattgagcagagacagttttagacgacgttaaacgtgtgggtctcgcgacgcggttcggcagacgtggggcatggggttacgctaacctagttggattcggtcgcgtaatatattgactatcctaggcttactcttgttattggaatcccaaggctcataatatatattgttggtgagatgtctatggtgtat

SEQ ID NO: 174782 - DNA, 787 bp, Zea Mays
ccgatcatgcaccaagcggctttggcatggctcatcagtcccgggaagcggtttcacaagattctggtctacctcggtgctatggcagccatccctaatttctggtgtcccgcacgcctccgaggtaataggaagtgttgcattgggggtagcagggtcggccgcggtgttgctcgggtttctcgctggtgattatgagttgtcttgggaggatgcattgtcccttcccacgcattccatccaccggaaggggaagagtgagctgtctcttgctccttttttacgacggaggttatgacgagcctccctttttgtggggcgagcccctgggtcccctgatcgttacggaggatcctctagggggcgtgtcccgtttcttctctgtttcttcccacgcataccattcacatggaggggaagggcgagctgtaccgtgctccccttagtggttgagatcatggggctcaatgggccaggaacgactgatccaaatgggcccttctttttgtggggcgagcctccgagtcccccgttcgttatgggggatctgtctaggggcgctccgtattttaataatcttcccacacatcatgtttaccggaaggggaaggttgggtcgtaccatacttccctcgatggttgagatcatggcgctcgatgagctacaaacgggtaatctgagtgacgccctagctccttcagcgagagccagacgcgaggtctgctggtgaccatcctcatgctcctaggttctgactcatatagttgttggccccgatcgaccggg

SEQ ID NO: 174783 - DNA, 698 bp, Zea Mays
tcaaaaggaacccatccaaacacaagggatgccatgtgtgggtgattatgaagaagtggtggatggtggagcctcacaagaacaagagatgatgggccaattcaacatcaacctttaatgtcatatcctcttgtggtgatcaaccacaagggactttggttcttacttccccagcagaccacaatttcctttttgtggtgatcgctttccttctggccggggatgggtggtgtttttcctaacaatttttatgggcagatgccacaacactagaattattctcagtatcctaacctaagtactgtaccatttcctcaccccgtgcctttctattgatacgggatggaggcctcgagaacatatggttcatggattctggctattcacgccacatgatcggaagcaaaaaaatggttctccagtctcgaccccgtgattggtaaggaatacattacatttggggataagtcgagaggtaaggtaatctcttgtggctctgttcgagtgaacgagagttttgttctcaaggatgttgctttggtttcaaatttgcatttcaatctattttctattttctaactccttgaggatgactattaagtgcactttaaaaagggcatgtctcgggttttggatgcccacggggatcttgtttctcatatttccccttttggccgagttttctgtgctgattttgg

SEQ ID NO: 174784 - DNA, 543 bp, Zea Mays
tgagaaaccatctattgccaaactgaagcggacatttcgcaattcaacagcaaagctggaatcaaaggcatctagtaccttccatgcatatgtatcagctgggtgctccatgacatctggattctagcgtaccccttctttgtgccacctcatgtgtctggttgtattcttggagatgaacaaacgtttcaaccgagttataagaggcatgtaacgaatttgcttacgtgctatctcggttgtcacggtcaagccatcgtcgttttcaacctctacgaatctacgctcaccacatactgtaaacttcttctcactcatagtctccttctagaaaatcatatagttattgtcatagacatcgatttttttgtagtccataccgagaccagatagcaacttcttggactgatacatgtcctttggcatcttgtgattctccggaagtacatcactgatcaagttcagaagctccttgtagcagttgtttgagaatgcaaacttagacttaatagtcataagtcgagtcacgaacacaaggacggt

SEQ ID NO: 174785 - DNA, 950 bp, Zea Mays
agccaagttaacacctgcaggtgcaaaggacattatgaacaccaacccaagtagagcatggttcaacattggcttcaattgtgatagtgtagacaacatgtgtggaaccttcaacaattggattgttgatgtcacggctcttccaattgtttacatgcttgagggcattagaactaaggtctgggtaggatgcaacacaacaggcctaaatctgtcagtttaacttcaaggatttgtccaaacattcttaagaagctccacaactgcatcaatctagcccggaaatgtactgccgtttggaatggaaggctttgaggtgaaagaatgggacaagaggtacaaggttgacacagataagagaacatgttcttataggtaccggcaactagcaggtaacccttgtgctcatgccaccactgccttatatctaagctccaagtctcctgaatatgtagaatgttattctatttagcattagaataagatctatgatcattgcataatgccaatgacggagctgcaccaatggcaaaaggatcaacgcaaaacaaagcctcctgcatatgtgaagatgacaggcaggctaaggaaagagagaagggaacaaggcgaacctgccaaggccaaaaagcaggtgggcatcaaaattacatgcagtaagtgctataaaataggtcacaactcaaggacatgcggcaagagtaatccaaaagcaggcaagtgccaatatactatggaaccgatgtaaactgaaccattgcttatggtgtaaagtgaaaataaattattgtgttacctactaaaacttgcaggtactagatggaagggcacaaaagaagacacaaataattgaagatggtgttgtaggtgtgcgttcccagagcagaactcatggtgatgttgcaactgttcttttccaaagcagcctgatgaccactccagagcaggac

SEQ ID NO: 174786 - DNA, 395 bp, Zea Mays
cccttttatagctcaaggggggcgtgtacaagggtgctgagcctcgacatgtgggcccaggaatataatggatgtaatacttggagttgctggagcaatcttcttgcaccctgacatccgcgatctgcgtggtattggcgtgcaggggaagcttccctggcaacgcataagtgatgatggacataatgcaccttgcagcacgggcctactatttggaaatggacaggacaggcacgccgcctgtaggatggcctggacgccgcctgccagctgagtggataggtcacaataaatgctgagatgacacatcgcctatcagcagggtggacaggcggcgcgtcctctccgcaataaatgcagagaccgcgcgacccagaggccttacgtcaggctcc

SEQ ID NO: 174787 - DNA, 484 bp, Zea Mays
tccaccgctgatctaggatacctcgctattgtcagttccaagggggaatcggctgaagtgccggaagtaatagggcaggagaaaaccgaatcggttgaagcgccaaagcatcctaccgaagctaaagaaaaagaggccgaagagctagagctaggagaatcaacaggtttacgaaaaatcctgagcccgccatcggaaccggagttgccgaaggtgcccagagctcctacaataactcccaagagaaggaggatggctagcgtgctggacgctgtcttagagtcgacaagggcgtcgactcctgcttctgcaaaggagactgccgaagatgctacagctcgtgctgaagccgaagttgggcccttagtgcccattgaaacagagcctgttggaactagacagagtattgaacaaggaccttcggacgtcggtctgatgccagagaaagaagaagcgcccaaggaggttgaatctccgactcccg

SEQ ID NO: 174788 - DNA, 471 bp, Zea Mays
acgtcctatcatcaagagtttctcctgcttcggatgcctcatcccgggatataggatgagcagggtactgttcttcggcctcgtgatgacaccgaatgctatgacgcctgttccgatgttggcgtgcctcacacaacgggggctcctcccctagtacaatgggcttgtcgtcggagatgggagcgtcctctactcttccctggataaagaggatatctgggaagaaagagctcgaagtcgtgtcctctgtttcggctgtcccccatgtgggtggagcaactgggataatcattggtcttgctctcacggctacgccgtgttggagctgtctgctccttttcgccgagtgatctaggtctacacccgagtgggtgatgtggatcgaggagtttgccgtgataagggtgcttcctcagtcgaccgggccacaggcgctgctatggtcctaggccgcccaacggtgcaatccta

SEQ ID NO: 174789 - DNA, 556 bp, Zea Mays
tctcgattcgtgtgctctgggtgcggatatcggccagcggtgaaaagatcttgaccgcggatgaggccatgagctgggtgtcgtacccacttgccctccggccggtcctgatgacctcgccggagtttgctgcttgccgcccagatgccacgtgccgagaagtgttaccacgtcatagtaaactgccttaggtagtttgtccatcgcctaaggtgcaagccatgttagcgctcgcctgtaactcacccctctctccggtcgcccgcgtgtcttccccaaattggacgccaccactgttgatctctataaattgagtgctcagtatgctccgttaagttgttacgtaacctgtgcaccagccctcgcctccgattagccaacgtggccagccctctacatgttagttcaagattctctgcttgatgttctagcctcccttaagtctcctgttgctcgtagacctgtttgattgagctaaacctccctgaatcaccaagaacacctcggtttgtctccggttttcaacgtcgtcgtgagtagacaaaatctgagccgg

SEQ ID NO: 174790 - DNA, 412 bp, Zea Mays
gtacgatcaactgcaagggtgtctcgtgagggggacgaaaccgaggccactgaaacggcaccaatttcagaagtaatgaaatgatcaggtctagttgtggctgacgaaggtacttctaatgtcgaagctgagcagactgtgattgaaggtgaagatgttgagagtgaagaagactacagtattctgatcccaacgaagcctagtcatctagattttgaaaaatctattgtgtatgaagatgacatgcctatgatgatgaagctaggctattttggagaggctgaaagcaagctcatccgaattgctggagaagagactaccccaaagccgaagaatgatgaagtagtggttttcaagagcttcttcagagcggggctgcggtttcccctgaatgagatgattggggtagttc

SEQ ID NO: 174791 - DNA, 423 bp, Zea Mays
gtcttatactagaaagctgcaagacacgtcaatctactttgtagacattcacagagaatgaggatctccattcataaggaatgcaggaattttaactgagcttgcagagcttgatggtttagctgtgcatggtggttatgacaaaggatcctccaaaagctaataaataaaaaggtatgtcaagattgtcatttagatttcatttttttgaggtatgggaggacggttgattatgcacctcattttcataaccgtaatatggtagaataagtctcgtgtctatcttagattttagcttatagtcaaacggtagttgatgcatatgacaacactagtgcgtcaccctgctcccccatatttaaatgttaacaaaagctaaaattatgtgtaaatgggaattcaagccgtggttgttggttccaa

SEQ ID NO: 174792 - DNA, 493 bp, Zea Mays
aaccggcggagttaagcacttcccacaagatggaagtaaagccatcgtgagaaaggaagtcagaactgaaacgagtgtctcctccactagcgagggtgggtgaattcatttgcggaagggtatcaaaggtaaagattatggtggaaggaaaaaaataaaagagtccggatggtttttaaaggaagtgggttagctcaagttttaattcctttttgtgtttataatgcatgcatgctggaagtaacatctcctctccaaataatagggtgctcttagggcatcctaagaaagtctaagtactggcccacggggcctaattaattagccacctatttctccctctatgcctaaggcctttcgtcctaggtctagctgtctagtcctaacgatccgtagcagtttctaggcaagttttaattttgaaaatggtattcatggtttattgtccttttctgtggtagaatttgctccgataccagctgtggcagaacca

SEQ ID NO: 174793 - DNA, 657 bp, Zea Mays
caaatattacagtcttattgcagcgaagttacattgatcgtctaaaaatgtttttacaataactactagtcttccttcaggaccttctccgcaacttcatttagcaatttgttaacgacttcgtcaacaacagattcggctatattaacaacctccagtgcttccttcgtctctggatcaaacggttccagtggcggagataattcagctacagtagaaaacgttaattagttcgaagccataaaatcaaatgccgaagctaaaggccatgaaacaatacctaaacgtctttcacgttctgcagcttcctcaggttgtttcgcttccactcgggcgccatgaatatctttttcacttttcttcataatttcgtgagctatttctcggccaccatttatccagatgtcattgtaaaattttccgcctattaaacttgcttcagctgagggatcctttgtatcatccacggagaaggtagctttggcctaggccaggatcttgacatggttacaccccgccttctctaggatggctgaaatccctcttgcaccagaaaacgcgcagacatccccacgatcacttaaaatttcttcgaaagcttcagcttctccacttatccatttgataacatcttcagggtcaccttgtataaaatta

SEQ ID NO: 174794 - DNA, 480 bp, Zea Mays
gtgcaattgccgaagctgaccgagacgccagtaactattggaaaaattattgggagaagacagttgtagaacttcggtcttcaaaagagaaatgttacgaaaaatccatagaatgtgtgcaaaaaataaaatctagcttcgccaatgttggcgcattctctagcgaggacaacttcgtaaggggcgatcctgaaggcccaattgattggatcagcaacgaagttgaagcctttgaagaagttttgagtggtcgtggggatgtctgcgccttctcaggtgccaggggaattgtggctattttggagaaactaggttgtgaccacgtgaaagctttggcccaaaccgaagctaccttatctattgaagatacaaaagacccctcgatcgaagcaagcttagttggcgggaaattcttcactgacatctgggaaaatggcggccgagagatggcgcacgagataataaaaaagagtgaaaagg

SEQ ID NO: 174795 - DNA, 600 bp, Zea Mays
gcgaaggtgacgacgatggtgagggcaaatgtgacggcgaaggcgatggctacaacaatggccacgatggtgatggtaagggcgacgacggtgacggcgagggcgacggtgacggtgacagcaagggtgacggggacagcaagggcgacgacgacggcggtgacggcgtcaagggcgacggtggcgacggcaaagccagtggcataatgctgctggtttagatattagtatagatagcagtagtagtagtagtaagtagcagtaagtagtagtagattagagtagtattagtatagcgtagtgtaactagtagagtagtgtaatgtaatgactaggggtggaagaggccgactcataaagagtcggtttcaagtttgtgacgaactccccttatgaataaaaaatgcagttctttgcttatccattgttgcatgcttttatttgcacattaccagctcgttggcattttagaggtaatgcctgagtgacgattgtgatctccgcttttccgagttatgatctagcattttctgtgcctgacttatcgagccaactcatatttatgctgacgtatccccttgagttccgaacgctatctct

SEQ ID NO: 174796 - DNA, 271 bp, Zea Mays
cggagactacggacatttgatcgtgttcccggcgattggtggtctctcagtttgaattggtgactcggtaagcatcacagagctataagaatgctcaaacgagggagagaaagggatgaactgaccggaaagggggctggccgcgatgaggttggtttcgggtggcggaagcttgatttggggcgaaaccaaaattctagctctcggatgcacggttgctagcgattcttggtggcggggtggatgatgaccttgcggagctggtgggggc

SEQ ID NO: 174797 - DNA, 767 bp, Zea Mays
gaaactcacccataacgaaaagttcggggtacttctgccgcatcagctcctcaagttcccaagtagcctcgcgctcagactgattagtccacaagaccttaacatacttaattgatctccttctcatgatacgctccgaggactccaagatacgcaccggacgacactccagagttagatcctgctgcacagcaatcagttccaactcgatttgatggtccagatcccgcaaaaacttcctcaacatagagacatgaaataccgggtgcaccctgccatggaatccggcaattgcaagtggtaagccaagctgccaacccgggccaagatagagaacggaccaatgtatctcgggctaagcttcccagagacaccgaaccgaacaactcctttagtaggtgataccctaagaaggacttgatcccccactgcaaattccaagtcccgcctcctcataacagcataactcttctgacggctctgagcggccaaaatattctgacgaatttcccgaaccttctcagatgtctgctgaacccaatcaggaccaaccagagatctctctcccaaagtatcccagcacaaaggggagatacactgcctgccatataaggcctcaatggtgacatcttgatgctagcctggtagctattgttataagcgaactcggccaaggcgagatgatcctcccagctacccttccaagacagaacacaagcacgcaacatatcttccaaggtttggatagttcgctccgactgaccatc

SEQ ID NO: 174798 - DNA, 1024 bp, Zea Mays
acagcttcattggcagttttgatgatctcgagtgcctccttcaggaacaggtcgacttcttgattgtatggctccggaggcggagatagttcagctgcaccgtagtatatgtttgttagttccaaagttaaaacagattacgaagctaaaccgcaacaaatgcatacctataagcctagcccgctcggtagcttctgcaacccttcttgcctctttcgaagcatcatgagtttccttttcttttcttctgatggcttcatcgacgacttctcgtctgcccttcagccacaccttggagtaaaatttcccacttagtgcagaagcttcagctgaagggtttttcatgtcgtcggctgaaagagcaaactctggctgagcaacagccttcacatgatcacagtcgaccttttctagaattgatgcagccccacgagcaccggcgaaggcacataaatccccctgatcactaagaatttcttcaaaagcttcggcctccccgctgaccaactggataaccccatcggggtcaccatggataatgttttgctaagaggaaaatgctccaaccttagcgaagcagttctttaaactcttagcacggtccaaggatacttcataacatttctatttggtagcacgaagctcgtcagcattctttttcgctctcaatcttttgatctcagaaatttcatgctttaccacttcaacttcaaatttttcggttgcttcagcaaccttcctcttcagttcttccacttcggctttatgagcttcggcttcggcagcaagtttagcctcgttagatctcagcctatctactaaggaaagtagtatcttatccttttcaagagctttgttccttatagtgtgatgagttctgaacgaagattcccatgagctattcggtagctctcatcttctgcttctttctgggcctttaaagccttgcttagaattaagccctgcaaaataaagagtgagcacataacgatggcaaggaaaaccataaaaatagattatttta

SEQ ID NO: 174799 - DNA, 481 bp, Zea Mays
cctggcgaccacccgcaaccaggtcgtgtacaccgaacgccagtgggggcttggaaccatggcggctacccattttctctctcttctctcggttgctccctttcgatctccctctcacgttcctctggctcggagttcatggagacctgtgggtatccacggccggggcttgcttttatgctagcggatagatgagggtccggttcgggaatcgggatccgcggagttcgcgcggcgcacaggtttgaccgcggtggatgcgggggatccggtgaagaagatgagcaccagacagagcggccccgcgtggaagcgacggatggcgcacgctccgccgtggtacgtctgacccgtggggtccacctgccagcagtgccaggcgcgtgcgcgcgagtgaacccggcccagaggaaactgtgagcggcggagtcaagttgggctggtacaggattagggagatgggccgcgggtggaaaatttg

SEQ ID NO: 174800 - DNA, 690 bp, Zea Mays
cttcttcgttgcatcacgcgcacaagctcttaggcaattgactcaattccaccgaagaacccataaatccctcgtttcctgttcttagctccgccgcaaggactccaccgtggtcatcgctccacgggtcagtatctaccaaattacttcctgttctagtttgtctttgatctcctattgctctcaatactgaccaattgaagcctgaccaaagcccttcaccggaacgcgcacctgctctgtaagcgccaccgtgacaccctctccggagccccgcgtttctattcacgtctagttcaaatttgtgtatgtgcatcaccactggttggcgtgtgaagctttcccaagcttcaattgggtcgttcgcgccatcagttggccggaacacttccatccatatgaccatccgccctgtcaccatggaccggtatattcgtagtcataacgatgaaattgaattgggggaagtgttcggtagaggttcaattgtgttcctgtcgcccgggcgctccagccatggcggcatctagtcggaataggcccgtcggagatcgaccgggagctgtccaccgtcaggtacctcaccttgtgaaggattagaacgtggaggggttttctgtaatacgtcagtgactcattgaatagtgcttcgattctgcttctggttattcaaaaaggcaaggacccctg

SEQ ID NO: 174801 - DNA, 706 bp, Zea Mays
aattagtgtagcaatctgactcctctttagtagcacaataaaaacttattttatctataccacagactaattcttggcatgtatatactcattattgatcatgtgtccagggcaactctcactagaagaaactaaagaaaggacctcctggtcatgaagatctgctacaacagttgtttgggggcattattgtggatggttctggtgcctgtgctcctggtgaggagttgggagttgatgagtttgctgcagatgataatgagacatatacctctacccctagttcatctgtatccaagaggccctctcaccgtgcaagtgctagtactacaactagtccaaagaagcgcactaaatatccaatgttgaaagttatgcaaggcattcatcagaccttaaagaataattgtagaatttctgagagggtcatgcttggtgagcatttggatgaacaaatcaaggaggttctacaaatagcaatttggtgtggggcacgggaagcatcagtagaacatttcatggaaactgaattattcaagaaggctgaaaatagggcaacattcaaggcatttgagacagatgaaggaagtcttttatggttgaagtgtcattgtgctaatgcaggctacatttagctgatttgttacatgctactattacgaccttttagttatgaaacttactatgttataagtttttgaacatc

SEQ ID NO: 174802 - DNA, 698 bp, Zea Mays
atcgcaccatcacgaagacatccaccattgggactcagatctttatgctcagcgcgtcagctaccgggagtggacgatgttgatgcaggtaaacttggtgacgacaatgtggtacactgtcgagccaaaggaagaccaagatatcgtctacctccatgaccacctgacgtttgtcgtgatcctgtgtttcatgacactcgacatgttggccaatcttcgggagaggggaacgacgacaataacgtagaccacaaccaattaagcagatcctcgtcgggtccagtagatgtgtgaggcaaacatgcatcagctttcccgtgagtttagctacttggtgtggaaggtggaagagaacgtgaaagattttatgagttgtatcactcgcgttgatggtccacatcttcttagcgacaatgtcaccgacaatgaggtagtgcgaaatatgttgcagaccattctagaacacctaccataggtggtgattccattgagaccctgctagatgtcaataacatcttcgtccagaaggttgcacaatggtgtaagttagcgcccgtcctcgataatctgggatagctcctttgtgaagaggaccggcttttcacacttaagctccataagtctgaggagaggaatagcgtcacgcaatggccacgggtgatacttttggcatgtcaaacgcgagagctctagctcta

SEQ ID NO: 174803 - DNA, 652 bp, Zea Mays
cttttcaagagatttactcaaaaattttgtgaggccaaacaacaaccattattggtatcaacttttttgagtatttgatcatatttgcacattgaactttctatatataagattctttaccattcttttttatagattggtttgacatttgatattccaatcagatcaaaacagaacatgcctttgcctttgtatttatttaactaactgaatcatataaaattctttgagtgacattaggatacatgaaaaggaattaggatactagtggaaaccaaaaatcgaacaataggacaatataatcatggccatcgtgtcgtagacatatatggctacaaagatgaccactgatccaccagggtatatattgttagagtgctacttcatcaatcatgtttgacttctttggtaggcttttttgtgagctcggtgcacaacacttcgcaggtcttcttgtcgtcgggagccttattttctttggtgcactcctcgatgcaagcacctcttatgtcattcgcatttgagggttcttctggaacccacaacgatcttgccaccacaagaaaggtggcaaggaggagaaccaccacaatcatcttgttttgggccatcagtattgcttctatttagaatggcaaacgacgactctttg

SEQ ID NO: 174804 - DNA, 833 bp, Zea Mays
aatggaacgaggatcgtctagataccatagcttcgtcgacagtcctggtaggatgggacgttgcgcatggtaggaccagagaaaacaccggatgtaatgccgatgacgaaagagaccatagtagatgaccgcccggagcagatccgcgccttctttgtaaaacccccaaatagttataaataaaatgttgtcaagaacgctctttgccacaagcacggtaagtgagggagagagcctcggtcgtaccttggtctcccctctcccatttttttcctattttcctttccctcctgctcgtttcccattggtaactttcgagacagaccaggaaccagacgaggcaagacgaatgaacaacgaactcaatggagtaacgagcggaagcttcaatcatgaaaccaactatgtcgttttcccatattctataacaacgtgctttgagtctttgcaactttctgtcgaagagtcctaagcaacaacatcgcacctctcgtgcttcccaagggcaccctcgatgggaaggggacctcacagcaatgtaaccagagaccccccctgtggtcaaaccttgggggaaacatcaagcgggacgacttcgttcccatcttcgctagaaacgaaccaatggggtggggaacgtgaacggaaggcactaacggggaagctggtcaggactgcgaatacctatgcctcaaaggctatggtaatgtcaccagtggaactcaagggaccgaaaatttgtgaacacctgtcccggtggaatggtcgctagcaaaggcgaacaaaaaaatgcgacaccaaggaccctgacgacgtttattaaacatatcgat

SEQ ID NO: 174805 - DNA, 499 bp, Zea Mays
ctcttggtttggggtgcttttcgtgtgactttctcccatttgccatacccgtgcgagacgagcccctatgtctctgcccctaactctcccacgtggatcccttccacgacaatgggggaggtgagatgaaccacactttctttgatgggctagcaatggcgctcggtgagttacaaacgggtaatctgagtgaggccatggttccttctgcaagatccaagcgcggggttcgcaggggaccgtcctcatactcccaggcacccactcatatatttgtcgactccgttcgaccggacccgacgccttgctacctctcttcacaataaaccatgagtcagacttttctatgactcgaacacgagctagtgacgcccttagcgcttcgcgcatcagggtcttggctgctagtgtacccatcaccagctgcccctcgctcttattttccttgggcagtcacgagccctttacggaccagcctttcgaaccccagagtccacaa

SEQ ID NO: 174806 - DNA, 595 bp, Zea Mays
ttaaaaaatccctctctgcccgagccctaggcctggctcagttttctcccctgcccgcgtctgctctcggtctcaggtgatttccctcccttcgtcggcgatctgcctccccggcggcgatcctccggcgccctgtgcctacgcttctctccttccctctctggtgagcatcctctgctctctctttccctttctttctctctgtctatccctgcagtgaagcactcaaatttcctccctttgtgcaattctccaaatcctgtgaatcctagtgaatccaagttgtgaaatgtgttcccttgtggccattgagtgtccttgcaggttcttagctccttcgggagggttttcccacctcaaatagccgtttcactgaaaccctagaactccgcacgtcacgtgctcggtgaaatgcccaaaccagccaaaaatgctccaattgaacccaaatttttcaggcacttttacaacacttccagtaacatacttgccaaatttcacgccaatccgagattccaggcttaaatttcaccaaattccccgtttcgagcgatcgtttccgagccgagtgcccaaatctctttttcttcgccta

SEQ ID NO: 174807 - DNA, 521 bp, Zea Mays
caggacacgggcgcggaatgcacggcccggttggaggccgtggcgcggcgagacccaacccagctggccctggcacgatgactccggcatcgggcatggatggcacaacggggactggtccggttgcaggtggaagtattggcacagctggggatcaggcaggaatggcagcggtgttgctacagcaagcactctcagctctccagggtatgaatgccgacaagggagggggtgctgctcaaccttctgctgctcaacaacctgtgatgccggtacctagtgatgggaagaaggtacacccgaaacctgctgttgtggaagagaagaaaaagtccgatcaagagaaggagggttttgtggatgcgcctaagaacaacaagagctactgccataggtgctacggcaagggacatgtcatgagtgagtgttcgacggcgctgttttgtgaagtatgtggcactgatacgcacataaagcacaaatgcccggtgttcaacgctccgaaggtttatgcggttccg

SEQ ID NO: 174808 - DNA, 463 bp, Zea Mays
gattacaccccgcggtcacatcaagttactactccaggacactgtggtaaacactctgcgtaccaagacaccccttgggcacacccattgggtgtgtcgctaagaattttcaaagattttctgaagaagtcatatccgcaaaatatacgcaatgaatgtactacgacaaaaggaagagatcggctgagatgggaggaagtccaaatgtagccactgaactgcaagtccaatcagcagaagcattgaagcacaaagcggggtgatgtccagctgagagccatctgcctcaaccagccagacgtccaatctgtcaccgatcgaattaatttcagacctaataaggcgtggacatataacgttgtttgaattcgcaagatcataagaagaagacgaaatgctgatttctaaagcataagatgatgacaaaatgttgatctctaaagcataagatgaagactgtaac

SEQ ID NO: 174809 - DNA, 381 bp, Zea Mays
ataaaacaaaaagggaaaacgcacttgggctgattctggcgccttcggcccaactccctccgcgcctacagcccactcaaccctctcgcattttcccacccgcagcgactggccttcggggcccgtgtgtcggccacttgagtgccgcaccgtcctatctctctctagcgcttgggacccacttgacaggtttccttcttcctcgcgaatagacctgaacaaacccggtcacactcgctgacccgcgcgtcggtgccgtgattcccgggaaagtgctccgtgaatctctctggatggttgggatccgaccgcgccttggggctatataacctgggctcccctcaatcgatcaacagaagaacacccgcgtcgtgtgccagg

SEQ ID NO: 174810 - DNA, 738 bp, Zea Mays
gcggaatgtgggtgtgtggcatatgtaatgtttgaattgattgtaagtgagttgggagtgggccgcgactgcgggtgtgagtgggctggaccgtttggacgcctgtataggctgccgggatgtaacaacgaaggtcatgtaatgaataagagaaacctttccagaatattgtcatccttttcatcctgagtctttctcaggtacggcaacgagctcacgtcccgacgacaatcgccggtggccaggggcatgacaatttgccatggttcccttgtggacgagtgggtcgattttggtgcttcgggtcttggtaagcacaagccgtcctagtttgtctttttgcccggctacgtgtagagcacacccggtgtgagtgtagggcaagaggttacatgtttggagttctacggtcatggcgtccactgttgttcggctcggcgccgccgttgtatggtttggaggagggagaaagcccctgcgccatccatccatggatgggcagtcacgattagagccctgaatcatgaagccgcgaccgttcgatgctagattggacgcttgtgattgaaacccgcataccccttcttgttttaattccatgcagcagatcttgagatcaacgacaccagttcgatcttagtgaataaagccacatgtcgtagatctctgatccaggggccagggtcgcgtacgggttcacgtaaatcaggatctaatctgaccctttgatttctgatc

SEQ ID NO: 174811 - DNA, 564 bp, Zea Mays
ggaaggtgtacgagcttgcaaaattaggaatgaggtacattgaaccaatgaggagaagctactagtacgagctagctatcattttggtgaacgctcaaagttctggtatgttcttggttgcccgtctgttgtcttttttttgtttttagatgtgctcacaataaaagaatatttttattagccaggaagtagtatttccagtagtattcttggatccatcctgtaatgtctcgattggtcttcatcactcaattttgaaagccaaatctgctacccaactatatcaaaactggtgttgcatcctggtgttgccagcagcacggagaagtgccggcgcgggcactgctcttcgtgcgagcgggcctggtgcacactgccttctgggcctgcggtgctgtcgatcataggcaagttccattgatagggttgcacggggaggatttttttctttctttacttcagtgcaactccatcggctattctgttgtctgcttttcgctgacagtgatggcatggaatggctgcttttttgtttgttaattaatcataggatcttcgatggta

SEQ ID NO: 174812 - DNA, 354 bp, Zea Mays
ggtgatccgagtacgtgctgcttgtgatacgtgtagtatccagggtggtgcccctctgcctgtgttcatggtttagatcagctagtttgcccctgctccagtttctatgggtgctcgttggattgtttccgttccgtcgctgtgtcttgttgttcccttttcgacatgatttgtctctcccgacggatgtcctgcgccacttcgataccccacctcgtagcttccaagtgaatcaccatggatctgatttgctctagcagtggctcttctttctttcttggtcctgttgttcgagggatgcagctaatctgtatccgtcgttctctcaacgccacaaatatcgttgttctctcc

SEQ ID NO: 174813 - DNA, 441 bp, Zea Mays
ctgatgagtacttggccctgcttgtgatgatcatgttgcagctccggcggagatctccttgagaagccgatcgcgctccggccgtccaccaagctgatcaaggaagggttcgagttcaagtacaagacgctggagcacatctatgagaacatggtggagtacggcaaggccattgggatcctgcacaattgatgtgatgctgaccgatcctccgtgtgtgctttggatcttcctgtactctggtcgatcgcgtcacgtcgtcgcaagaggccaaaataactgcgggtggtttgaagtttgaatgtagctgctcagttcccctttaattttctgtatcgcgcgtgtttgatctaagaattacgtaggacgacgggatgatcttgttcttgttttcctttagatggaaaaccgtcctatttcataatcagttgtgaagaatag

SEQ ID NO: 174814 - DNA, 586 bp, Zea Mays
ttctgttggaaccttaccgatcttacccttgattgttttctccactttgtcgtttcacgagtcttgacttaactatatcctttgttatgctttttaattattatcatatgcacccttgacacctctatatcctacattgatgtttgtctcatacctgccctttaaaattgcccctcttccgtctcatatcttctttctcttggtcgtatcctcctctttggctcgcgagtttgtaacctcatcctttgttgtgcttttgcttcttattgcctttacccttctcatctctcaatcttacctgggtgagtacgctatgttcgttatctaaaacctccaatctcccaccttagttcaagtgtggtatctcacccgtggttatatcctatactttacctcttgcaagacttatcttatttctatccttgattgtacctagattcctggttttttatgcacatttacctcttcctttatatccttgcctattatcaccattgacccttgacctctctccatatttaccatgatgtttacctatttttcttagcctcacttattccatttcaatccaagagtgttgttttcc

SEQ ID NO: 174815 - DNA, 568 bp, Zea Mays
catcggatgccccgaaaaccagcgcgtccaactggcagctcatcagctttcaggaatggctttagcatggtgggacaccttcagtgaggctgtcagagatgctacctgggcagaattcgaaacagcctttcgtgagcaccatgtaccccaggggatagttcaactcaatgaggatgaattccgggagctaactcaaggcgggagaacagtcagtgagtatgtgcacaagttcacagagttggcccgttacgcgcctgacgatgtcagcatcgagtccaggaagatggcccgttttctgaaaggactaagacccgagcttaagaccatcctcgccagccaagacttcctcaacttctctcacctctccaacaaagctatccaagtggaaagggcaaaagaggaagaaaaagggcacctcaagaggaaattccaagttctccgagctcaacaacaagaacgtcaccagagagctcgaccttttgggctcccacccaggggaccaagcttcaataaaccatctggacccactccatcgcgctatagtcagcagagtcagagctcccttcag

SEQ ID NO: 174816 - DNA, 357 bp, Zea Mays
ggaagcatcggaaatgcgaggtatagtacctcacaccttggtgaagcgggagatgaacgtccggagagtctccccgggctcctgccttactgcgtggaggtgggcctccacaccatgttgctggtaagcgcctgccttacgggtttgacgtttgtcgtacttttccggcaggtgcgactagaacttggatggccatgacgtcgtgcggagatgatccgcgagagcggcgcagcccacgccggccaaggggacaccagcttgggaccaggtgcccattggggcctgcggcgctaccgcagtgaagtcttgatcgaggttgcgacccttgatgttttgctggcgctcgcgcgccctctc

SEQ ID NO: 174817 - DNA, 401 bp, Zea Mays
tcaattagctacacctgcataaatgatacgctttatcgacgttcaagtgacggcattctactccgttgccttgccggagatgaagtgatagaggccttaaaagaagtccatgctggagtgtgcggagcgcatcagtccagacctaaactacattatcaacttaaacaattaggctattattggcctaccatgttcgatgattgcatgaaattcgcgaaaaggtgccatgagtgtcaaatacatggcaactttatacaccaaccacatgaaccatttacatcccactaacatgtcctagccatttgaaatgtgggggatggatgtagttggaccgattcacccgccatcatccaaaggacatagatttattttagccgccacgactatttctccaaatgggc

SEQ ID NO: 174818 - DNA, 375 bp, Zea Mays
ctctgcctcatgtttagttctgactgggtaaaaatgtacttcaagcttttatgatccgtgtatatatgacagatattccccagcagataatgacaccatattttttcagggcatgaaccacaacagctaattttaggtcatgagttggataatgttcctcatgccggtgcaactgtcttgaggcatacgttataactcggccctcttgcatcaagacacaacctaaaccactgcctgatgcgtcacaatatacatcaaaaggcttttcaatgtccggttgagctaataccagagcagtggtcaataacaccttcagctgctcgaaggcctcattacatcttgaggaccagttaaactttgtatcgttctttaata

SEQ ID NO: 174819 - DNA, 541 bp, Zea Mays
tatttttggcacaaatcatggcctctattttttcttaaacaaaaaatatgctgataaccaagtattgatatgtgaaactaaggttttatttatgtgttgctatcaataccaccaaaggagttttgcaacatagggtctagacttagtaactagcatattactaagttagtaagataaaccacacaaccaaatgtggcaatataaatgcagaagcttaaaatgatagagatacaaactcccattgatgcgtcgatattcttaaggaggtatgaagaagtgtgcaagcttcttactaatccttgtcgaagctctaacaagggtagcccacattagggcgaagctcttggtctagtaactcaatagatagtcgtgatccttctccatgtgcaagtggttcgttcaacctctcagatcttggatgctccccaccatccccgctatcaagcttccaactaaaaagtcacgtgccttgttcccttttgtacatggtggcaactataccacaaacgcagttgatgtgatctcacaagatacatcccca

SEQ ID NO: 174820 - DNA, 870 bp, Zea Mays
cgttaaagcactcgaccagacgtgaggatagcaaaaatatattccctccctgtgatgtatggctacctgcctgctccacttgcccccttcgcccctcggttacatcgcctcattctcattgtctcacgcaaactctatgaaagctcctccgtttctcttgctcgtcgctctcctcttgctctagggatcttccttctattcaatggtgagccgatgacaagtagccactatcggcgtgacagtggcctactcgctctgtcgtcgctaacctgttttgtaactataagtccggctctggcttaaccttaaaccgatgaccctcgataatgacttttttgtggtgctcctgctactttggcgctcttgatccggttggtctcgtgaagtccgatttggctattcccctagatctaccttttttgctcgtcatgttgttcttagtttgatgatttgttcttagatctcttgctttcgtcgcatctgtgtatatctcttattctactactgtcggcgacaagtgtttctcattttaaccttaactctaagcctaacctactatgttcccctctctctcgactatcctcgctaagatccatgttctgctccactcctcccttaacctcaagcaacatcccctctagtggcccctcgtcggtgactctagtgttttggtcggtaaggtgaagttattcccctagatctactatttctgtgtcgtcataatgttttattttgctttcttttttcatttatgtgtttcgaaggttgttgaggagccaaagacgtcgtgaggagtcagctaagaattcctagatggaccttgattcagccgctaaggaggcggagcatgagactgtggatcacaatggg

SEQ ID NO: 174821 - DNA, 582 bp, Zea Mays
ctcgtgctgaagtcgaagctgggccttcagtgctcattgaaatagggcctgttgaaactaggcagagtattgatcaaggaccttcggataccgctctggtcctggaaaaagaagatgcacctaagaaggttgaacctcctactcccgaagcgtctagtgaagagctagactttatcattcgacacgcttcgggtaaaaaattgtcagaagagaaaattgctgaagctaaacactatgcccggaaactgaagtacccgaaaggatccttggtgtataatggctctgatgaagatgactttatgtattgccttccggacaacaaggaaataactgtttgccgggaggttacaagaaatatggggtttccgaagctcgaggttggcctctctgcaatgtcgaaggatgaccttgcagacagcctcgcttataacagtctgaaggtaaagatgttttaacataatcagattattttttgtatctcttaccgttgtgttgatcctcttgcgccccccctttttttgtagggcttaatcttgagcaatgctctaagggcacaaaagaatgtcgaggacaaaagttgcc

SEQ ID NO: 174822 - DNA, 763 bp, Zea Mays
gccagtgcctgcatttgctgaagctgaccccaatgggtgtgacccgactgctgtggatcccaatgggtgtgacctagatgacattgatcccaatgggtgtgatctggccaaagctgaacccaatgggtgtactgtccgcgttgttgatgaagatgaggaagaggaggatgaaatccctctaattcggaagaatagccggcgctacctagccagcggggaaagcagtggtgttccttctccagcattatctgccctcattggtctacaagaattatctctagcgaattttgatcagactcttgaagacatggtcccagaagatctattgtcagagccagcagacggtggcatgatggatgtttgcactgatgtgcctgatgctaggctagagttatcccgggcggcgtcccgcacctcatcgaccttggagcgcggtcttaagggtcaggaggctggtctggattgttctgctcccatggaagtgggtgaaggtccttcagccttagaggtggctgttatagagagcttggccctcaaggatggtgctagcgcttacccagcccccgagggtgttgccggggatgacccgactcggatgggtagcgcgagctatgacccagcccccgagggtgttcgagtcagttctccctctcacacttccatggacgttcacgtagggtcttctcctccgcattctggttgcatggcaacagcccaagcttcgggtcagggagtcgccttagaggccaacgctcctgatgac

SEQ ID NO: 174823 - DNA, 967 bp, Zea Mays
caacgaaacatggacctccgttcatccctttcatacgtagattatccaattcctttggtgtaggtttgtggccagctaaatatatggaatcaaacatttcaaagtatggatcaagttcctccatgttggtgtacaagtagagcatggtgaaattacgctctcttatgtcaacataatgtgcagtagaagccccaacccctttccccttccagagaaaaacactaaggtcggtcgaaggaccttcttcttcagtatgataccgtgttgactgagcattcacattgttagtgtgtgataaatactgacttgagaagattgtgatctctttagctgcaaaggcctctgcgatacacccctcaacccttgctttgttccgcacagtagctctaagttttttcaattctctttcttgactatacatccatcggaactgcactggtcctcctaccaatgcttcataaggtaagtgcactagcaaatgttgtatcacattcataaatccaggcggaaatactttttccatcttgcatacaagcaccgtgatttgtttctcaaattgaatcctcaatttatttgagatatgcttagcacatatatgtctatatatgtatctaagttcagcaatcatcttccacagaggaggcttcaaatagccacagaacattaccagcataagtctttccatcaaaatatggtaatcgtgagccttcaaaccatttaatttattagtgtcgaggttaacagtacattttatgtaagctgcatagcggtctggaaacttcaacattttcaaccatcgaaatacttcttttcgctcttccggctttagacaatatggagctcgtggtgtcctctcctttccattaggatttaatttgacctcaaggctagggcgatcgcaaagattagctaaatctttcctggcgttgatgttgtcttttgttttacccttaatgttcagacacat

SEQ ID NO: 174824 - DNA, 452 bp, Zea Mays
atcggtggcttgggtcggactggcagcggggtcgcggcagggacgtcgggcgtcggcacggtcgggtcgctgcctggtgcggcgttcggctggaagggatcggagagagcagggaagagaggagacgaacgagacgtggttgtgatggctccaccgaatacgaacaggtgctgcagcaaggaggcgaggagacgtgcctggcgactgttcacatggctagcagattggcgtacagaagacgcgaacaggtgagcgactgactgagcgtcgaacaaaaaaaaagaattgcttcctcctagctagtgggcccacacgccatatgaaggggagtagcgagtaggaaggaaatgggcgccaggtgaactaggaagctcgtccgtttcttttgcatttttgttttgttttttttgtttttttatttcgaaattcattttctcttttttaaattagaa

SEQ ID NO: 174825 - DNA, 924 bp, Zea Mays
tcaccaaggatgacaagatcagagcggagtgctgctggcgcagcacccgaatcaatcgcaggaagtctccagtcacaatcagcccaaagatcgacgacatgggagcaaggagcggttggcgtaggcccaagcttgcaatcgcccaccagtctatcgatgttggaagtgggagcacatggctcagcccccatgccgtcgatgtgggagctgggagcgcatgacgcaggcccaagttcatttacgcgattctgagattggaatcgcccctaatgacgacgatgtgcaggtagcaagtgtccctcccatattagttttgtgttctgcggatttaatgtactcctacaatttaagcatagtatttatgctattgtaggcgtgtgtagattctgatgcagagactaaggatgggagtgttgttgaggtacgacataaggtaacacctactgtgattgaggataatacagaccaagataaggcagaccaagatctggagtactacatgagattgtttcaacgtaatttacatgacctgaatcaaaatatacagaatctagagcatgacatacataagtttgatagaatagtgaaacaaaagattacgccagtacccaaaagacatgacacataaccttcctgcgtcaccttgtttacacttgcatgaccatttcctgtaaacaaaagccatgatatcttacctagcttccactagcatgctcactggacaaggagtgaagagtagtctcatataattgtcggtcacaatcaagtctgtttggaagaatgcctaaagcctccagcctctctttgttcatatgggggatcttatacctattacctccacctcccttcattacttcaatcaagcagccttgcaatgtcaggtacactctatttagaagtgtagggtcataatcttcgaattcc

SEQ ID NO: 174826 - DNA, 345 bp, Zea Mays
gtcattgtttcgagtaagcagtgacgagtaaatttatgtatgtgagtttttggcccggatggtgtgctcgatggatgcactgattgtttgtagtagggggttacaaatgggcgagagagggatgttcccaagtctctgtggggtgtgagtgcttctagcgtattgcatgtgttgtgttcctccttttttgttagagggcctcctctcccttctataggtcaaataagaggggttatggacttgtcgcgtagtgccatcgtggtgaaaaaggagttggtacgcctataaggtggtcgggttcctttttccaatgccatctcctgccactattgttgcagctttgtt

SEQ ID NO: 174827 - DNA, 631 bp, Zea Mays
catcttaatacttccaggatgaatggaatatcgactaagatgagcttcatccaaaatttgttggcggacctcagcatctttaggcaccactatgcgatcattgaaccatattattccttggtcatcttatctaaagcaatttgctttgtcggcttctattttctcatgaatatgtttcgtgctcttgtcagttctttgggcatcaataattctctatagaagaaccgactcaagctttaattgtgtcaaagttccgtgttatatcatacccaagtttaacctttccatttcttgacatagtgtggtgtcagaggcccttgcggtaagacaatgacaggaagctttgcaactcaatgcatctgccaccacattggcttttcctaggtgatagtggatttccaagtcataatctttaattagctcaagacatattctctgcctcatgttcagttctgactgggtaaagatatattttagacttttataatctgtatatatatgacatatattccccagcagataatgacgccatatcttgagggcatgaacaactgcagctagtttcaaatcatgagttggatagtgctcctcatgccggcgtaattgctttgaagcataagctatgacttgg

SEQ ID NO: 174828 - DNA, 722 bp, Zea Mays
gtgagggtggacggcgggttctatttcctacttctcgaggggctcttatgcaaaagtgcctggccggaggggtatcggccatcgtgagccgcctgatcttctatggacggcttggattaggtttcttctacaatcaaaccggtacacaccagttctaacctcagccctgcgatggagatccaacgaccgagattttattaagcgtgatgtgatccagttcacccaaatacgatccaacggctacatccacttctattcttatccgtccatcaagatccgacggtgcacgcgattctcacctcacacaactccgacaccgatggctacggcggtgcaaaggccagggcggcggaactccggcaacccaccgagatggcccaccgacgcccaaaactcatcgcagactagtgtaagagaaagcgggagctagcacgaactcgatagaagcgtattaccgaggatatggatgaagacggggccgattgatggtgcagtgcggcacggcggtggtgcttccgcaccggcgatgaattgctggaaatccggcccataatcccacccggcgaggtcacgcacaggtgcagcgggtcacggcgatgaaccggtctggcatcccaaggccccagctccgatgggggcgtgcaatcacggcggcggctgtccacggcaattggtgcggcaaggctcctagcgatgttccgcgcgagttgaccatggcggcc

SEQ ID NO: 174829 - DNA, 537 bp, Zea Mays
cttatatggcactgctaggtcgtggttgttttatgtcaggcattatgtaaatgtgggttggtgtgaggggattttcttcccatcttgttgtattgctactttctttctcaataaaatgacgcgtaaatctcttgcgtcgttcgaaaaacgacatgagatagttttcatggagtatgagatagttttcatgggatatgagagagtttcgtgaggctgaaactcatggtacactgtttcttagacaaatgttgacatgagagtcttgaaaacagggtgatgaaactatacattgagaatgacctaaacaagtgacttagaaccatcgaacttttttgtcgtctccctcggggccaaccgcacgccctctcgtattccatacaattatgctccacctccttttctctgatttccacatgaagatatggtcgtcgaagatgatgtgttgtgccacttcctccctccctagctatcacacagatttcaatccctccaagattgttatgtcgcatcctcccctcccggatttctatgccactc

SEQ ID NO: 174830 - DNA, 562 bp, Zea Mays
gttacagtagggggctcgaccgtggagcctgaacagcagaagccgatggcgcggacatgacgcgcttgcgcgcgcaagtgccctgcggactgagcagtcgcgaccatgcgcgcacaacgccagatggaggcactgcctgcatcggcctaggcgagcatgccgacggcatgccgcacgggcgcaggctgcacgggccgcgcagacgcgctggagaaaggagggaggacgcgcgtgatggatgacggcatggatgggctgcgctacgccgacgaatggggtctctggcgcatggcggataccggccagcaggagcgcagggtgcgctggaggtcaccgacggctgggctaggcgacggcgaggtcgagggctggtgattagggaaatgaaggaggatgaggagatgatgtgcagatgtcggataggagaacgtgggcgcggacgtccggtttctcggagtagtgggcgagtgccgcgcgagcagcagggcgtgcgacggttgcaggagcgtgcatggggagaagtggaggccagcgctctggcaggtgggcctcaggccgtggc

SEQ ID NO: 174831 - DNA, 533 bp, Zea Mays
aaaagagtgcgggccagaataaaattgttttttgcgaattacaagggcgagctggccctgatgagtcaaacaaaaaatttgcggagattatcaatgttccaggaatgctccaagtcttcgccgtttggcgttgcgagcctgtatgcgctgggggatgccttcgtcttgacgatgaaaggccctcccacttgggctccagcttgcccctggactccgtccgggctgttcagacgagtacgaggtccccttcgctgaattccctcgggatgactacatggtcacgccatgcttttgtttgggcttggtatttatttagagcctgtagggcgaagacgcggtctccatcgatgagatccttcgaagtgggttcgtccacgtcagggacagctgacgagactgtctgtggggacccatgttttatttcttgcggggtcatggccttcgatccatatagaaggcgaaaaggggtgaacccagtcgccctacactcagtcgtgttcagcgcccagaccacttcaggtaacaaatcggcc

SEQ ID NO: 174832 - DNA, 1110 bp, Zea Mays
tgactggagggcagcaccagcttgtggggggcgcgagtttggagatgcgccgtgggaggaagactgactatctcgacatcccactcaaggacagcatcaagggatggtgcttggaatggttcatcatgtagaatcatggggattctttccccccacggtcagggagacagccagatgtttgcactccgagctggaccgaatcccccatggaccaggaggtggctgaggcaggggctctgcttgctgaggttgggctgctgaaagagaggggtttgactgcagaggctgtggttgccgacttcattttcaagaacattcatccactgaaagacagagcataccccgcatatctgtatcgaggcctggctgattcaacccgggtaaccaacataagaattcctgctgtggacttcgtgagccggctcgagatgatacttagaggcaaggtgtcgaacatcggcgctcctgttgcatactcggcctggaatctgcctccttcgaaggcctttaccagtttcgtgtcaaatcctcctgctggtgatagcggtttgggccttagagtgcgaccctctcccgaagaagttagtgctttggttgcctcacttgaagaaattcctgacgacgagaggcaggatcattttgaggtgcctttgaatccaagtgacgcagagataagtgtcatgctggatatgttagctgaggattcttctgatgccgctcctgctgaaacactggtggtggcgcccatccctgaggctggcaatgctttggatattcagaggtctgacagtgttcgcccgaagcgttctcgccgagccaatcaacccacttctcctgctgaggggaagaaaaagaagaagagacgtcttcgtcgagtgtctagcttggatcaggatgccggtccttctgttcctgctgctgaagaagtgccagtgcctgcatttgctgaagctgaccctaatgggtgtgacccgactgctgtggatcccaatgggtgtgacctagatgacattgaacccaatgggtgtattgtccgcgttgttgatgaagatgaggaagaggaggatgaaatccctctaattcggaagaacagtcggcgttacctagcca

SEQ ID NO: 174833 - DNA, 836 bp, Zea Mays
aagccatgctcaaattggatatcactgtttaggtctaattaaagggtgaacatgttggacaatgatatcacagttaggaagcccatcgccaaactacgtaactttagtttaagaattggtcacgaagacgtgaacatgatatatcaaaggaagatcagcaacgaaagtatacaatccaaaaagggcttaatcatcattcaaggattaacaacatattatctaatgtcatatgaacaagtatctgcatttagcatgtacgccaatacaaatgtcgaccaactgatacttgacacctaggcatcaaccatatccaatgtaacatagaattttttttaaatgcatggtctagcatatacatcaccttctggggagaaaattcgtcaggtaataaggcttaatagaatgaaaagaagggatgggcatggattcacacactgtgccaattgccaaacctcctataaattgctactgaaaaggtagcacattccgtaaaaaacagaaggaaagagtcggtatggctcctagtatgagatagagattatagttctgaacctagcagaatgaccaattatctaagagagatagtaatccactatgcgattgaattctttcataactaaattttgtcttaaagccttcttaaaaaatatctgcaaattattattcaataggcgcttacaacttactaacaacgaaaaaatgatgcactgctacaccagttcagcaatctaccagaacatacttgatattttttcttcagattttcgctattctgaaaaaatagatacacgacagttgttcatgatcttcaaattttttgacaggttcatctgatc

SEQ ID NO: 174834 - DNA, 380 bp, Zea Mays
gaaagctatgtcactatttcaacgatcacaaagtcatagtggttacaggcctccctataggagatatactctgcaacaaagaaggagtgggaaggccaaccaagtgggcgtgcgaactcggatctcatgacatagaattccaaccccacacggcgatcaagacccaagctctaatggatttcatatcataatggaccgaacagctgatccccaaaaaccttgagtcagtagaggtttggaaggtgtacttcaatggatcactaaggttataaggagcaggggtcggcgtcctcttcatcgcccctggaggagatcaacttaagtacgcaccacaactcttatttcctgcctccaacaacgctgcagaatatgaagccttg

SEQ ID NO: 174835 - DNA, 395 bp, Zea Mays
caagcacgatgccaatcccttgtccttcattgcaaaccgatccatcaaaatataaagtctagggggtaatagtgaggtatgatatgtctagtgtatgagtatcatcaatccgatgttctacaataaaatatgctacgacctggcctttcatagatttcaatggttcataggccaagtcatattctatgagtgcataagcccacttaccaattctaccactcataattgggttttgcaacacgtatttgatcacatcggtttgaccagaaacagtgcaacgactagacagcaaataacatctacacttggtgcatgcataaaacaagcataagcataacttctcgatgaaagtgtacctcgtttcagcatccaccagcctccgacttagataagtc

SEQ ID NO: 174836 - DNA, 383 bp, Zea Mays
actccagtgatattcaaatgtcattggttcgaccctcaagtgactcaagaatggtttgatcataactcttatcatcactatcaaccatttcatagtcaacaccatctgaaggcgcaagttcgccattaatgtcattgccttcaaggattactaagtcattctcattttgcacctcatcatcctcctcatcaacaaccatttcaatatctacgtccattctgatagcttcggttaagtctatctcaaatcgcccttctagcccatcttcttggaagaactctccatcatatgtgtccgggtctaagttataatcttcatcgttaggaacaggtaatctcccgtgcggcgatgccttatacataacatcccaacccttaagatgt

SEQ ID NO: 174837 - DNA, 537 bp, Zea Mays
ctcgccagcgctcatttcctccactctcactcaccgtcactctctcgctctcgtctttcttccacctgacgccgaccgccatggccgtcgcgagctagctcacacccgcgctcccactacccgccattgcccaaaccaagccctgcaaccgcttcaccgtttcatgcaccgatctcggcacctctttcccgagtcgaaggatgacaggagcaccatcgtcgacgcacgcggatcggacatctccatccacgaaccgccgagccaagaccactatcaagttcgccttcgtcgatcgcacctgtccgccactcgcttagccatcttcaccaccggtaagccatcacccgagccgcgcactcgtatctccctctctttgatctaaggtagaagatggatctcacgcgcgattaagccaaaacccaatgccttttctgtaaactgtcatagactaggcgaatagtgccgaggaccttgtggtaattgtctgcggtaagttgaaacctgaggggctaacatgcaaagtgggttttctggttt

SEQ ID NO: 174838 - DNA, 646 bp, Zea Mays
agaggagaagtggtgctgtgattgcggggttctagtcgtgttgattggaagccggatcgtctgtgtgacatctccaccaaatcgatagttatcttcacctgacggaagatcgggcaccccccgttcctatcactcgccgttcgaccggcagtgctggatgtgtgattgtctggccagtcggtgagagcaatcctaggctgagcaacatggtcaacttggtcgccgtgctcaacacagagttggaccacgcccttgacgagttgggcaaggttcgggcggaggttgcagaattgtgtgctaaatgcgcggcacaccactatcttgatggtggttctcccgcccctgtagggattcagcacccttaccgttcaccgccccgtggtcgcttcgactatggtaccccagactataggacccgcatagatttagatccatagatctgtggagtcggagtctgtaataatgaattcagtgccttagtctagttagtcttagttcgagttagtttgcttatcgtatgttggaatgtttgtcatgatgaacatgtaatgaagttggatctttgtaatgattgtcaccaaggggtgggtatctcctgcaacttggtgtagttattaataaagtcagttatttagttgggtaatcc

SEQ ID NO: 174839 - DNA, 633 bp, Zea Mays
cgcggcagaagctttttgtgccttcggcaattttgcctccattggagggctcagaatttctggcattttcattgtttcttccgaatgtggctcttcggccttagcatctttagataaggttggctcgactgtaggtaccttcggcactatagtcggctcttcagcgctctgcataatcagaacattttgttttgctttggcaactaaagagggccctacgccaaattcaggtaccacatccggttcaatataacacgaccggtggatcagaaccttcacctttttgctcttcagctcaattggggtgatcgaagcggcaatcttcctctttttctcttgccctcgcagcgggtagcggtaatcagggtatacgaagccaatagcatcaaataccctgtttaatcttttcttgccccgacctccaaaggttgcggatagagcattatctgcggctttggagtatgctccaagtagctcatcactggtagcttcaatacacttcagccagtcgtcgtttggctcatcaaacttctccctaaatctgaaggtatacttcagtcggaccagaccaccctcactagaatcagcagtggtctcctttggcatatcctagctctccacaagtggccatac

SEQ ID NO: 174840 - DNA, 894 bp, Zea Mays
gtcgaggttcctagaacagacgattgctacgggggctcgacatcatcacggcctgccatccagattcgagagaagaaaattatcaagaacgagcaagccccctacctggcacgccaactgtcggcgtttcgaaccttcgctctgacagttaaatttgtctgtgcgtgttctgtggtccggatggtgtgctcggtgggcgtaaggtttatactagttttggcaaaatgtccctacatccagttttcagtggctcacgctaccgacacctttgttgctcaatgctcgtagtaggggtttacaagcaggcgatggagggaggagctctcaagtctcttgtgcatggatggacctacagactatgaagctagagttctaagctaagccttggacgtcgtgccttggctctggcctccaggtcttctggtctcgtcgagtgtgtatgtttgccttccatcgagtgtcatcttgttgttcgtggccagcctcctcctttaataggccaaggtgggtcggctgccggtaggttccttgagaaggagctatgatgtcgtggtaatactgggtgttttagcccggtaaggctgtgtttgtccatatacacctcggtcgtccgagtgtctctaatagggctatttatggtgggcgacgtgggcggatgagggtcttgatgccatcattaccgtccttgtgctgcgtcgacccctggccatcgttgcctgggtcttggtacaactcgttgtatttgcggggcctataggcgtccagtgcgcttaagtctaagctcggtaggtcatgagtgagccataggtctaggagcctgtagatcatgagtggaaactagaccgattcgccctctgtgtctcggcactagacgtagttaatgcggcatgtttg

SEQ ID NO: 174841 - DNA, 923 bp, Zea Mays
cgagaaccgacgaatgtactcatggaggctctcgtcatgcttctgccgatagcttcggagatccgaggagtttcctaggtggacgtatgtgccttcgaagttcccctcgaagaccctgactaggtcctcccagtcatggatttgtgctggtgagaggtgcacaagccaggctcgggcggagttagacagaaagagggggaggttacgaatgatgaggttgtcatcattcgtttcctcgagctggcaggccagtcggtagtaggcgagccagagctccggctttgtttccctgagtacttagcgatagtagtcagggcccaaaaccggggaggaaacgatgctctttggatggctttgctgaagacctgtggacccaacagcttgagagaggggctctaatcctccttgctgtcgtaacggttgccccgctaggagtgctagcagttgtcatggagtcgatcgcgcaccatgggtgccctctccctggtgggtgcaggatggactgaggcctccctcttgaaatgagagggtcacgcctggtgactagaggtgggcacccagagtcgagaggctgagctctcggcctgctggacgtggcgcattctaggagctcccgaagttcgccatggatgcggcatacttcggtggtagagggatctggcatggtgtggagtaagatcgccgcctctacgaggctttgacttgcccgattaagggtggggtgcggtggcgtcggcgtcctccatgatgtgacgctcgacgtctcgtgccttcgcgcgcgccctattgagggttttgccggtgacctccctctccagtgcttgctgtagatattgtagttgttgttgttcctctccgagcttgtcgtgtagctctcagagctactcgaggtgagctacgtggctcctaggaggggtctgggc

SEQ ID NO: 174842 - DNA, 643 bp, Zea Mays
acgtttgggagctctgcaggcgcaagaactcgggcagattaacacgaccacgtgttcgacacgcccctgcaacgccagagcacgccccggtgcttggccccgcgtgagtcgcgtcgcgctgtgtcaaccccgcgcccacggctataaagccaaccccggtctcgaccgtacaccgccgctcactcccaaccccacccgagcacaagttcatcggcgtttgcccagagaacggcgtgctagcggccacgcgagccccgaccaccgtagaccggccacgctagccctcctccaacccgtctgacccctcggctagcttcctcggagcttagtaaacctccccgagtccacagaccgaacaccacctcatcggagacgccagatcgacgtcgccggacttcaaccggtcaccgtcgcacgtagaccgagctacacggtaagccattcgtcgtttccttgtgcctacgacatccttgacctccagtgaagtccccatgccatttaattaaactataccgccatgaacaggccggagcgcacgccaccgacgagcccgaccgcctgcgcatgcggccagccctattctgaccatcaccgccggcaatccgcccctcgacgtgaccgccaggacctcccggacctcgcc

SEQ ID NO: 174843 - DNA, 908 bp, Zea Mays
agaaatctgcgttggtccagaaattggcctgctcggcccactagcatctccctctgacgacccgtttagctcactcccacgctacggataccttcgtggcgccgacaggtagggacgccgtgtcagcccctcgcgcgcgtgtccgtcctctccgtgagcgccgcttctgtgtcactgacatgccgcccccgtgtgtcagctctcttcccccaactaaacgccgactatggcgcggtcaaccacggatctcgggctcccctccccttctctccccgaaccaacccacctagtctataagtgtgtgcggtgtgcgatcggccacccccctttctgccagagacctaccactaccacgccgccgtgcgagagagagcgttccggggtcggttcgccattgccgccaaccccaccgtcgacagaatcacgcagtcatcgccattgcgccatccatatatctccgtgagcttcgtctcagcctgccatatgtgtccgcggactctacgtggcggattactagctggggaatcatcgattcttcgtcagagtagttgctccgccatgggcgcatccgccgtcgtggccgggtcgattcacgccattgagcttggtgagaaatcccttcccagtcttgctttcaactctacttcgaattaccgcaaccggagagatgattcgtgcggggtttggggtggtattagtccggccgaccatggcgctgccgcgggaggagcttaactccggcgtcgcgagatagaagatgccaggatatccctagatcttagaattgacggcttaggttagttagcgcggccactcggcggaggttaaatcctgaccgtcgatcagtcatcctgggcgcaagattcaacctcagattggagagctcgcgaccgtagattgtgaatcat

SEQ ID NO: 174844 - DNA, 349 bp, Zea Mays
tgatgatactttcacttatgatgccactttgtatgtgaaattgatctagcacatgcatagtttgcattcggttgtctccttgaatccgtgtgtgccaccgtcgcaactacatctctctcacatacaccccatatccatcacacgtccaaagccatgctatagtttgcattcggttgtctccttgaatccgtgtgtgccaccatcgcaactacatctctcctacatctatctctcacacacccccatatccatcacgtgtccaaagccatgcctcccctttcttcctcattatggtcgtgtcttctcccctctccctctcccttctaaccataagaaactctagctgccc

SEQ ID NO: 174845 - DNA, 732 bp, Zea Mays
ctcagtttgggcgcacgatcaggcaagtccaatgcgataatggtcgggagttttacaattcctctactcgggctttctttctcaccaatggtgtgaagcttcgcatgtcttgcccttatacatcacaacagaacagtaaagttgaacgcatgctccgcaccaccaacaaaatgatcgcaccttgctgctccaagcgtccatgcctccacgctattgggtagatgctcttcatacagccacttatcttcttaatcgccttcccaccaaaactgtccgcgcctcttgtccctttgctgccctatacaacacacctcccacatatgagcagcttcgagtctttggatgtgcttgctatccaaacctctctgccactgtgccgcataagcttgctccccgctctactgagtgtgtttttctagggtattctcatgagcataagggttatcgttgtcttgatctatccacaaatcgggtcttgacatctcgtcacgttgtctttgatgaagcttgcttcccttttgcagcctcgccccctcgaactaatgattttgatttgttgtctgagatggatccgatcacttcacccatcgaaacacgtcttttacctgtaggtactcgctctgttgcccccgtggttgcaccgccagcaccacctacgggggttgctcccacgggtgctacctcttctcagtcgggccagccctcacgggtcctagcaccagctactcggac

SEQ ID NO: 174846 - DNA, 399 bp, Zea Mays
gcagtctatcgtttagcttcacttcgagctttttcctgatatggcttacattgagatgaccgcttcggttcctactcccacccacctcctccgaagccctctagtaggatagtgtaagtagcatcatcgaggaggaggatcgtgtggaagaagttgttaacaacccgacatagactgtagagaaggaaggcctggtgggaggaacctaacctaacgacaaagagtctagtgtcgaagagaacaccaaagatgatgaaagcaccctaaggccctagaaatcgagctatgtagatatttggaaatcaatagtgaaagagggacacctaaaggtgtacacaaagctcagctatattgacagtaccaagcttacctgccttagcaataacgacgagactccat

SEQ ID NO: 174847 - DNA, 1235 bp, Zea Mays
agtgctcaacctccggaacaactcgttcgtcggggacatcggcctcgacttccgcgcgctcaggggcctggtgtacctcgatctcggcgccaacggcttcacggggcccatcccggcgagccttcccgagtgcaggggcatggccgcgctcaacctgggccggaacaaactcaccggcgagataccggcgtcgttcgccaacttctccgcgctgtccttcctctcgctcaccggcaacagcttctccaacgtctcgtcggcgctgcagacgctgcagggcctccctaacctgaccagcctggtgctcaccaggaacttccacggcggcgaggagatgccgtcggacgacgccggcatcgcgggtttcccaagcatccaggttctggtcattgctaactgcgagcttcacgggacaattccgtcgtggatcgccggcctccggaaactgagagtgctggacctgtcatggaaccggctcgccggcccgatcccaccatggctggggcaattcgaccgcctcttctacctcgacatatcgaacaattccctgcagggggagataccgggtagcttggcgcagatgccagggctggtcgccgccggtgctcatggtgacggcggcgacgacgaggcgcaggtgcaggacttcccgttcttcatgcgccggaacacgtcggtgcaggggcggcagtataatcaggtggacagcttcccgccttcgctggtcctgggacacaacaacctcaccggcggcgtgccggccgcgctgggggcattgaccagggtgcacatcgttgacctgagctggaacaggctgtcgggacccatcccaccggacctgtcggggatgacgagcctcgagtcgctggacatgtccaacaacgcgctctccggcgtgatcccggcgtcgctgacgcagctcagcttcctctcccacttcgacgtctcgttcaacaacctctccggcgaggtccccgtgggcgggcagttctccacgttctcgcggggggacttccaggggaacccgctgctgtgcggcatccacgtggcgcggtgcacgcggaaggacgagccgccgcgcacggtcgacggcggcgggggaggcaagcaggagcggagcgccggcaccggcgtcgcggcggcgatcggcgtcgcgacggcgctgctcgtcgccgtagccgcggccgtgacgtggcgcgtgtggtcaaagcggcaggaggacaacgccagagtgg

SEQ ID NO: 174848 - DNA, 483 bp, Zea Mays
aaaaaatgtgttaacctaaattggtgccatagactaacttgaccatatacaactacttggccatatgcaactaccttaaccatctgatagttgcataacccctcaattttaacctagcaagagattctatcttatcataacatatctaattaatcttaaaacatcctaacatatcttaacaatacatattctaccctgctggacctatctaacctaaactagtctaacctagtcatatccaatttaaatctagatcttatcttacctaatgtgacctgatccagtgtggtctaatgttatctaacttaatgtggttcacttaaacagattaatgatactggtagaagtgattaaaccctactagccatgtattaacctaacctagagccatgatgaatggtataacctttctattcccacctaacaacaaacaaacttttaacctacatcttgtagtctatctcacccatatatatctctcat

SEQ ID NO: 174849 - DNA, 526 bp, Zea Mays
cgagaatttccctgagtacgtaccttgtccgagggcaagctcgggtgaggcagagttatgagttcccgtcgagaggggtctcaggcgaatcgtggtttactctttcttgtcctcggggaatgagttcgacgtttgtcttagggttaagcgtgttttaggggcgtaatctagttacccctaattacgatacccgacagaaaggttcactccggaaggactagccttcggttagtcctaagacatcgagcccggggtcatacgagacggagacaaaagggggtcaagagggtcgagaagaaggcacatgactaacccatcataaataaccgaccacattaattgcgcttggcaccgagccacaaagggacagtcggaccaccttccactcatgacctatcgagcctagacttgagtgcgttggccatcaacaagacccgtaacacgacaagatgcgtcgagacccaggctacgacagctaggggtcggtgtggcacatggacgataatgttgatgtctgagctctccg

SEQ ID NO: 174850 - DNA, 356 bp, Zea Mays
atttgggggcaatggagggcaatcaaatggtagatagggattgcaatgagaaccgacttaaccaatgtagctcttccagccggactaatgatagcagccttccaaccaagaagcttgtcagcaattttatcaataagctcatggaaggaggacctaggaagtttcctaactgacagaggcaaacccaaatacttacaggggaaaggcataaccttacaaggaaatgtgctcctaatctccccaagctctggatcgtcacactgaataggagtcatactgcacttgctcaagtttgtgaccaatcccgaagcttctccaaaaattctaaggatttctttcaccacaatcacttcctc

SEQ ID NO: 174851 - DNA, 515 bp, Zea Mays
gcgacagaactgttggatcggtggcagggccgccgtggtcggctgtgcagcgcctctaggtgctaccatgggctagagaggcaacggacgtgcaggtttctaggggcatgacgggaccatcaccatgatgctgttggcgcgtagctcgaacgcctgggccaagtacaccgtcatcggaaggtcttgcggtgtgcgcatcgccacgtcgacacagatgtggtccagaaggcctcccacgaagagctccgccttctggagcgtcaagattgcgcgcgtggcacataacaacgttgaaccgctctgtgaattcttgcaccgtcgaatggaactgaagccgaccaagttctgcaaggcgtgaatctcggacaggtggcccgaactgcagatggcatagctccttgaagcgctcccacgtcagcatcctgacatcttgctcgagggtgtagtaccatgtttgagccgtgccctaaaggtgataggatgctagacacgtccggttggaggccaacatcttc

SEQ ID NO: 174852 - DNA, 271 bp, Zea Mays
cacacacatttccatcatttcagaggctactggataaggctcttgctattgaacacaagcgtgttcaactgggtgatttgaagaggaaggctatctcacagggacacggtagcagcagtgttcgtccccgctacgtttcgccacagagtacaccgactcgaccaggaggaccacgcccagttcagtatgctccacagggatctccacggacacctcctactcgtcaggctactcccactggcaccccgacgaggtctacaggacagaagac

SEQ ID NO: 174853 - DNA, 612 bp, Zea Mays
gcaacagctattgttccagcagggaccgaatcagaagaatcctcagccaccatgtccagcatagcacttatctctgcatcactcggacttataggcatctcaaagtgaacttgcctctcatcattgggaagatcaccaagtgaagcaaccagagcctcaacttcttcgggagagggtcgcactctaagacccaaaccactatcactagcaggaggattggacacaaaatcaaaaaaagacttggaaggtggcaaattccaagcagaatatgcaacaggagcaccaatatttgatactttgcctctaagaatcatttctagtcggcttaccaaatccacagcaggaatcctcttgttggtaacccgggttgagtccgtaacaccactatacaaataagtcgggtacactctgtccttcagtggctgaatattcttaaaaacaaagtctgcaaccacagcttcagcagtcagacctctctccttcaacaaacaaatctcagcaagcagaaccttggtttctgttatctccaagtctgcgggggactcaatccaacttggagcacgaacatccggctgtctccctgaccgagggggaagagacttgccatgattt

SEQ ID NO: 174854 - DNA, 934 bp, Zea Mays
agaaattctactgtcctacgggtgaatgtttctcacaaattccaaatcccaaaacgcatcacccgaatgagaaaaaaacaaaaaagaataacctccaacttctcttctttgcgaaccgggtatcacactctaccccccttaaaaagaattcgacctcgaattctgacgcttctatcggaacgacaaaaggaaagattaatgaatcaacaacacttacccacaacgaaaagttccagatatttctgccgcatcagctcctcaagttcccacgtagcctcgcgctcagactgattagtccataagaccttgacatacttaattgatctcttcctcaatacacgctccgagaattccaagatacgcaccggacgacactccaaagtcagatcctgctgcacagcaattggttccatctcaatctgatggtccggatcccgcaaaaacttcctcaacatagagacatgaaaaaccgggtgtacccacgccatggaatccggcagttgcaagcgataagccaggctgcccacttggtccaagatagtgaacggtccaatgtatctcaggctgagctttccggagacaccgaaccgaacaactcctttagtaggtgataccctgagaaggacttcgtcacccactgcaaattccaaatcccgcctcctcacatcagcataactcttctgacggctctgagcggccaaaatattctgacgaatttcccgaaccttttcagaagtctgctgaacccaatcaggaccaaccagtgatctctctcccaaagtctcctaacacagaggggagatacatcgcctgccatacaaagcctcaaatggtgccatcttgatgctagcctggtagctgttgttataaacaaactctgccaatgcaagatgatcctcctagctacccttccatgacagaacacaagcacgca

SEQ ID NO: 174855 - DNA, 520 bp, Zea Mays
agaaaagattctagaggggaatatcctaagtttatattttttttatatgctcttatggccatcagaccattgcactcaaacatatcaaacatcaccatcacattgttgttattattatagtataacactattttatcgtctactgcgtctagcttatttcaataaactatcctatcaacctaaaggagtatggtgatagacttaggggttccataacaaagccttccaaaagaatgaggataaggtagagaaagacgtttcttcttcatcatccaaaggtggggtaaagggtgctggccgatcctgagcaacataagtaatacttttgtaagcagttcttctgatagcaaccttctcatagatgagagaaaatcatactagaagagttgaatataaaggagttgagttttgagataaattaagtttttgaaagactaactaggctttccatttctaactagtctaacgacctagggtcagcatagctttgataccacttttgtcacacccggttccaggg

SEQ ID NO: 174856 - DNA, 448 bp, Zea Mays
gtgggagtgaccaccctgtgtgatgagttgtgcaagctgagcctggaagttgtttcttcgggtaacctaagctatatctcggtggagcccacattgcaagaacagatagtcagggcacaggttgagaaaaagggtgttcaggtcattaaagatatgatcaagcaaaaggcagaaaaatacaagtgtttccgacaggatagcaagggaattctatggtttggagatcgattgcttgttcccaaggaccctgagcttagaaagaagatactagatgaagctcacctttcaaaattctccatgcaccctggtagcaacaagatgtatcatgatctcagatctctatattggtggactagaatgaaaagggaaattgccaagtacatatcggaatgtgacacctgccagagaattaaagccagtcacttgaaggcagcaggccctttgcaac

SEQ ID NO: 174857 - DNA, 850 bp, Zea Mays
ttgcatctgttgacttgtctatgctaacttggattctttcaccttgaggacttgtcaacataattgttccgttggcacactgtatcactccatcacaacttttcaaccagttgcatccaagaatcacgtcaataccgttggatcctaggaccactgggttgactgaaaaatctattccttgaatcttgatattaacatgagggcatgagtgtgtggccttcatgtcacctcccggtgaactaatgtgtaacatcttcttaagggggtacttaggtatgttgtgcttttccacaaacgactcagttataaatgaatgcgatgctctagagtcaaataaaactgatgcaggtatggagttaacaagaaacataccatgcactatgtcggcatcctcaggcactgattctgcggtgacgtgattggcccttcctctactatgattctgtggagtcttgttctgtgtagatccacgagcgggggtgttctggtcattcctctgagtgttgctcctctgaggtgtctgctggttgcgccttggctagttgttagcatagtggcctagctcaccgcacttgaaacaaccattgggttggactagggtgttgttgcttctagcctgcgtgttactggcgccaccttgaagattctatgaattcccaccagacctctggttggtctgagagttgctcctttgttggttctgattttgattatttctttggccttgctatccagagcgttgtatctaataattgtttccaccctgatttccagagcagaactgcgaaccttgagtgttgtttgggcgagtgttcctgctggactgaccttgaaattttcttttgtggtc

SEQ ID NO: 174858 - DNA, 397 bp, Zea Mays
cgccatgaagctgtgcacagtaactgaagagaaaactgcggcagggtggacatggcccgaggcatgcggatgtggctcacaggttggcaggcaaacgcaaggtcagcgacgtggtctggtggaaagggagggctggccggcgccattgatggcagtccccaagtggggaagaagaagagttggaaaccattaatggaggtagaagaaactgccgaatggcatagagaagaggaagaggagaggtctcggctgctacgacgggtgtgcacggcatttgaccgtagcaagaggccaagcgcaggtgggcgcagagcatcgtggcatgcgacaacgacatgcacaggtgagctggtgggaggcgtgcgtgctttttttcagttcttgatttggagaaaga

SEQ ID NO: 174859 - DNA, 677 bp, Zea Mays
cctctatccaactcggcacacgaacatttggctaccttctagagcgtgcaggcaaggacttattataattctccatggtaagtcactcaaagcgccatcccttgatgctacccttcagagggatatcaaggtactcagcctttctaccgcgatggagttcaaggttggctccaccaaccactccatgttcccccattcctggtttgcaatggtacaagtacttccacaatccaaaatgcgggctaatctcgaggtaggcctcacagagatgaacaaagatagcaatttgaagaatagagttgggattcagattagtcaaattgagagagtaaaaattaaaaaggtcgcggaaaaatggagaaacaagtaaacctaggccccgaatcaagaaaggaacaaagactacagattcatgagtatcctccataagtacggtgatcccttgccaaacccgccaagagcacaagtccttcgatggaagaacaccaatctcaactaagtgaagcaagtcggattcggagacaactgaggcataattaccatagaaggaagctgattgttgtgattgattgggggaatgatgggtgcagcgctcccctacttcttcttcctgggcaccatgggacttcactaaggcacgaaatcaagcacggacccgtagaggaacgagaatttca

SEQ ID NO: 174860 - DNA, 434 bp, Zea Mays
cacgcgcgtgaaggctgccaggtggttgaggggttaaagccaagatccacccgcatcccacgcaggttgttgggatccaaatccgagcggacagcatctacgggtgtggcggatagcagctggaggatagggatgacgaggtggtcccacacgtcagcgagctgagcacacaaccgaggcaacggagacaccgacagagatggcccgcgtgtcggcgccaaatggagaattgggctgcgcgggagataaaagtggagatggccgacgcgggaattgggccgaggtgggttagctggccggcccaacacgtgaacttttcccccctttttattttattccccatttctttcctttcttattattatttttttatttgctatccaatttcaaaattgagttcaaatctgcagctgagattttaaatttaggttttt

SEQ ID NO: 174861 - DNA, 505 bp, Zea Mays
ctccggcgacgactccctcgggagcccatccctcgcctgcctctgacgacgcttctccaaggcttcccgagctagcatcctctcgcgagctcgggctttttccgcgtccttcttctccttctccttctctgcggcaagcctccgtgcggcttggtccgccgtgtcctctgggaccggtggccggacaggtttataaatcctcaacccatggggacgaacaaaaatccccatagtaagaatcaaaggcgtagagaactcggcgcaaaacagaaggaggatcagacacttaccagggacacatacccacggtcgagacgcatcgcgggctggctaagggcgccggcatccggcctccctaccgtacttgttaccctcttgaggaggtcgtcggtggagagggaggtcgaggacatccgcgagtcctccgaattgacccctggcttcatctccgcgagccgcaaccgccgctcgaccaaagggaacaccctctgacgatggatagcgg

SEQ ID NO: 174862 - DNA, 460 bp, Zea Mays
cattcaaagacaattatcaaaggtctcggtatggattatgaaaagattgatgtgtgcaaaaataattgtatgcttttcatgaaggagcatgcaggagagagaaaatatctgaaatgtggacaatctagatttgtggaagttgttaatgatgagggtgacaaggtgatgatagatgttgcacataagcagctctgctacttgccactaactcctcgagtgaaacggttgtttctatctaaaaaactgctatgcacatgcgatggcacaaagaaggtgtccgcgataacgatgacctaatcgtgcacccttcagatggggatgcttggaaggctcttgacacgtttgatcccgactttgcagctgattcgaggaatgtttgaatcggcctcgcgaccaatagcttcacaccttttggtcaaatggcatcatcatactcatgttggcctgtctttgttattcc

SEQ ID NO: 174863 - DNA, 728 bp, Zea Mays
gctgctgctgccattcagtagctctggtgccatccatggaagagtgtcgcgtacaccaccagaaaccagagtgttgcgcttgaaccttgtcaacccaaagtctccaacctaagaattagcaatgaattattaatgtaacagttcaacgagagttggaaggccaaaccaaggtgaaactttgctgttcactgacaatgaatacaaactcctaacaatcgtaagttcgctactgtactgctgcgtatgatatgctaacagtactgtcccagctgcgaagctgcagttgcagccatggttattaaggtggtaaggcgatataaggcgttaggaccaccgtatggacgtctaagacgagcaagacgacaccttatcagtctcaaaaccagcaatatggaggaagaaaaagaaaaaaaagaagggaaaaggggaagggttaggaggcccagcccactagctagcccatataatcattaccctggttgcctaggttgactctctactccacagttcagccgccggttgccttctcctccatggtttagccgctaccgccccgattgagccgtcgttgcccctagttcgccaccgcctccgtcgattcgaccgctgccgccctgatttgacaccgccccttctctttcccctctgctctcttgctgattcttacctagacggtgggagtgccttggaccttttgggcgcctggatgattcttacctaaacggtgg

SEQ ID NO: 174864 - DNA, 725 bp, Zea Mays
ataatcccagcgtagcagtgcgcgttgtgggcaagtggctacaaaagcagcagaaccttctgcaccaaaatcagctaggtcgccacgcaagcaaacacactaggcgatgctccgaacaagcttgcgctgcgctgtcccagtcccggcagctgtctcgcttgcatgcagagcgctgcaataattcggcaaggaacgacaaggctctgcgtgagacgcgagcgtgttattttaatccagtctcggtggcctggccatgtagtagctagctcctagctaggggagtgaggaagcaacttgcgaggcatcgcccatgccgatcgtcaggcaggcaaagggcaactcgctcctgcaactgctgtgtaccagttcatcctcagacatcgcccatgctgatcgtcaggcaggctgcacccaggggtaggaatgagtgcgatgatcactgcaaatgatgcggcgtgactgaaatcgaagcacatgaggccacacgccggggacggagcaagcgttgtttacggggacgacgacggctggtttgataattgcaggcactgattctgttctgctgcccactagtactaatcagctgtatatctatagtctgtgaatgcggctgtttgccgcgcacacacagctttctttatcttttttcttttcttttttgctccgaatcgatccttagtttaaagtctttgagctcacgctatgcgggtggcagcatagtttta

SEQ ID NO: 174865 - DNA, 595 bp, Zea Mays
gggaaatcctcaacaccgacagggagggagctcggtgaggcggcgagtgcagtagtagggagctcgatgaggcaagtgcagccaggcagtcggagggtacaagcgagacatcgcgacggcaataggtgtcgggcacaggagagcggcggtaggtagcggctccaaacagggcacagtgactcgttgaggcgtgtcatgactacgatggcacgagtttttgaggtgtcggctagaaacagaatcgacgacgagcagctggggcagcaggctatggctagcagctgcttagcggcgcgttgcagtggctgtgggtgagagagcgcacgaatctagcaagtaagggaaaaggggaagggctcacgggcacagaggaagaagagaacgagtgcaacaccatttataggctaggcatgggagctaggacgacgccgaggatagtcaaggaggtggcacgaacggcagacattaatggctagagaagaaacaataggaaacggctgctgcgatgggaggagaagcgacgtgatgatgctctacttgaatgacgcaatatggagaggcgagggggttgcaggcgtgaagcggtgtttttttt

SEQ ID NO: 174866 - DNA, 435 bp, Zea Mays
atggaaaggagaaggtagttctcaccagaaatcctgtgcgccggagttgaagctcttagccccgcgaccacatcaccaacggacaacagcacggaccggagcacacgcggtaggtcttacctttggtggggatgcaggcaaacccaaccacgacgcgacacgacagggcgactccgaggcgacatcaaggtcatacaagcaattcgtcacgctcctggccgcgagttcgcaagaactggccacgagcggcatcaaagccatcttgcaacgcccctagagctccttacaaaaactctagcgccgagtacccctggatccacgccgtgacggagccagagctcggtgaggtgcggcaccactgcggagttggattccggcgagcccaatccaccataccaccaccgcgccacagaaaaccccgcccaggtcccagcg

SEQ ID NO: 174867 - DNA, 780 bp, Zea Mays
cgcctggaatggttcatcgtggagaatcatgggaattccctccctccacggtcagggagacagccggatgttcgcacttcgagctggactgaatcccccacggatcaggaagtggctgaggcaggggttttgttagcagaagttggattgttgaaagaaaggggtctgacttcagaaattgtggtcgctgactttgttttcaagaacattcagccactgaaagatagagcatatccggcttatctataccgaggcttggctgactcaacccgggtaaccaatagaagaattcttgctgtggacttggtgagccggctcgagatgatactcagaggcaaggtgtcgaacgtcggtgctcctgttgcatactcggcctagaatttgcctccctctcagacttttactagtttcgtgtcaaatcctcctgctggtgatagcggtttgggtcttagagtgcgaccctctcccgaagaagttagtactttggttgcctcgctcggagaaattcctgacgacgagaggcaggttcattttgaggtgcctttgaatccaagtgatgcagagataagtgccctgctggatatgttagctgaggattcttctgatgccgctcctgctgaaacattggtggtggcgcccatccctgaggctgacaaagttttggacgctcagaggtctgtcaatgttcgcccgaaacgttctcgccgagccgatcaagcctcttttcttgctgagggggagaaaaagaagaagagacgtcttcgtcgggtgtccagcttg

SEQ ID NO: 174868 - DNA, 687 bp, Zea Mays
cggatccatccttccgccaccgcgagcgcgtcaccagaagtgactgacacgcgggaccatgttgtcagggcagcttcttccccaacggcctcaccatgcatggcggagcgcgaagatcttgcaaaatccgttgaagcacctcagccacgtcgcgcccatatagtgccacgacccccggtctcgcctactcctccccttattcttgccctcgcggccgccacgaaccccactgaaaaccgccgccatgtccgcttggggagaagccgccaccggtgaaactcatcaccgcgcgttgcctgtcctcggtattgggccaggaagatcgccttcacatgggaaagccgtttgtgccctcaattcgagtcgaacaccgctaagactcatgtaattgctcgccggacttcggagtccgccgtgcgccgtggggagctgggttcgcctcttcgattcacgatgagtagagtcctacgcaacaccctattgttatcgcttcttgctgccgcgttcagattagagtttaagggcgaaaatcgccgtaacgcgtgctccagcgatggcgccgccgtccctgtttggggcgccgccggtgtttgagccgtggctggggcgaagcggattgaccgtcggattggtcctggatggctgtgattagaacctagaatacctcttcgtttgattaaattgtag

SEQ ID NO: 174869 - DNA, 1137 bp, Zea Mays
gagatttggatttggaaagtaaactagaaaataaaaaaacaaaatagaaataggaatacaaatggatatggagaaaggagagctacgtacggcctaaactccctagcgtgcaagcccacatcttgtttttttatatttctttattatttaaccggatgtctatgtcaccataacatcatggatgatgtcaccctggctcaatgacatgtgggaccattgggtggagcttcattctccctccagtccgtgcgtagcgatctcgcgtttttgttattttctgttttcggtgattcaccaaactggtacgccttccttccgcgataaccgcgcgtagtaaccaacccagccgcgagctagctgacgtaacctccatccccgattgctactcctcgtacgcggggatataaccacatgccgcccctcatctctgggccatatcagccatctactcgaagaccttatgccatgaacacaacgagcacagaagagattaccgccgcagaggaacccggttacaccgttgttgaaagcctgctgacggatcagggagattcgccaagaccacaggaagattctcatggcctaactgagcattattggtgattggtgtgctcaagatctagtggacgtcgacgatagccgcggggctactgcgcgacatggtttccagcatctacgacgtgtcgctcggtaagaacctgtcccactaatttgtctggagctctagagcatttagcacttaatcgcatgatgaatcgagcaccagaacgccgacgtgcagacagagcgccgcctcaggtcggagcaaaaaggtaggagaagatctcagcgccgttggatatagtgaacggtcccgattagagatggggagggaaatagctttagtccgttggatcctttttgggtgatcgtgatcaaaacactgataccgattcggctcggggatgtttgggtcgttgatcttgaatcggagggccgcgggttgattccggattcggatgatgcccgatctaatcctgcccatcgattctagatcggatggccgatactcgcctgtaccccttcgacctgtgcattttgcagaagagcccctgctatttctgtgaatcaacccgccgtccaactcagggatttttg

SEQ ID NO: 174870 - DNA, 631 bp, Zea Mays
atctaagcttgatcgagtgagcaaatgaccaaggttcctatggttgaattggagctggtatataggtgaataactttgttgtaatccggtcggtagcttatcacatagaaatcgaagaaaaacacccctaaagatgctttgtcagacagactgaagaagatcctgatggtacagtgaacgaaaagatctacagatgcactgaacgtgccaccggtgaaatccgcgccacgaccctcgccgacgtcgcgattcgtgtgcccaggtgttcggataacagcgggcagtgaaagatctcatcgtagggaagagttggagccttatcaccggactgttcaccgcgccacttgccgcgcggtcggtcgaagtgtcctcgtcggagttcgccgccctttgtagccatgccacgtgcttacgcttgttatcgtgtcgcaagacatcgcagtggacaacccgtttaccgcctgggtctttacctcgttgagcgccacggtaggtgcgctccggtgactcacctttgctctgaccgcaagttcatcccatctcaaattcgcgaaacctttgagtggtctctataaattgagtgttcagtgtgctccgctagtttgttacgaaccccgagcaccaaccctca

SEQ ID NO: 174871 - DNA, 840 bp, Zea Mays
cggagttttgccgaaggcgagggcacggccacgacaagggtctagggtgctaggaaagggctcaggcgagttcgaggtgactcggtggactcgactgtgcgcacgacaccggcgcagaggcaccatagggcacaggtccacggcgaagtggcccaacgatggtgcagctcaactccaatgagcgattgcacgaacatcaaggtagaaaatggggaattaaaggcatggggagattagatacctcgagagacgactctggagcgcttgagcgactgcgaagatacaacgagggcccttgtcgatggcggcagagacacggctgcgcggcgagaagtttggtgagcacgaacagagggaaatagggggatgtgggcaaaccaaagggtgtcttgagttgctggcgaggaggcggagctcaccggggcaattgacgcgactggagctcgatggcgaccgtggaacggacccgaggtcacgacagacggcagtggtgttccatgggcgcacgcggagtgtgagggggtctgtagaatagcgctactaggtgaggggagtgagtgagtggatgcaggctcaaaaggaggtcgggcgtgtggggggagtggctgggaaacgcacgacatgggcgcgtccacaatgtggtgcgagggcaggaggttagggaaggggaggtggctgacaggtggggtccgtgggccagcgagagcgaactcacgaacagacaatcagcgttgacagggcggacccaccgggcagcgagagggagcgagcgcgggagcgaaggaatcggtgccgacaagctggccccatcgacagagagagagggagggggagagcgcg

SEQ ID NO: 174872 - DNA, 504 bp, Zea Mays
ttatgcatcacaaagagatatattacattaatgtacatacaaatacttgatgtttgcttcttacacaaggcgacagccatacacaagcattacattttcaagcatacaaaatttaatcttcctttagcactttttcagcaacttcgtgtaatagtctgtcaacgactttgttagcaatcttcattatatccaaagtttctttcatagccgggtcggctttggggttgtacggctccggtggtggtgaaggcccagctgcaataaagaatatgttggtgaacttcgaagctagaaacgaaagacgaagcaaaactttaaataaaagtacctataatcatggcgtgttcagcagcttcttcagctcgtttagcctcttctcgggcgtcgtgacattctttatcattctttttaatggcttcatcagccatctcacgaccgcccttcatccaaacatcagagtaaaacctcccgcctagcaaagaggcttcggccgaggggtccttt

SEQ ID NO: 174873 - DNA, 743 bp, Zea Mays
ctaattgtttcaagtgtatgcacatgagaagggttctaagggtagagtttaagggagaagaataaagtaaggggggagatttggaggttagggtttcaaaccttggttgggattttgggatgttacaaacctaccccacttaaaggaatctcgccctcgagatttagactggatttgagaaaagataagggtattccctcctcaaggagtcctcactctcccaggtagcttcctcttctccttctctgctccactgaactttacagagcttcacctctgaggtgtgggtctttctgactgctgaatcaagaatcttcactggcttttcacggtattgaaggtttttctgaatctgcactgtctcttcttcgaggtgactttctggtgcttgcaggcatttgcggagctgggatatgtgaaacacattgtggatgtcagacatggattccggtaattctagacggtatgctgcgggtcctaccctgccaatgatgggatagggacctatgaatcgcggggctagctttccttttacttggaacctcttgacaccacgcattggagaaaccttgaggtagacgaagtatccttcctcaaatctgagttcccttcgcctgttgtctgcataactcttctgccgactctgagcttcaagtaaccttctgcggatcagtgcaactttctcttccgcctctttgacaaaggcaggtccttctagtgctttttcccctacgttggaccac

SEQ ID NO: 174874 - DNA, 387 bp, Zea Mays
atcggtcaatcaagcgaatcggcaaccatgggccagtgcgtgttttccggccatggcgctctgccgcgatacacgcgccgtcgtgactgggttcgccgtgggggagaggtcgggttttgggcgttgatcggcaaccggacgcgagggattagatcatgtcgtgcacatcccagaaccgttggtgttctgatggttggacgcaattagaagccgtgttccccttcacgcgatcagtttgtgccgtccatcctagaacatgcggccaccaggttttaccggttcagttattgtgtggtttaatccaggaggtcggcgtgtgatccaacggtcaggagttcccgataccgtataatccaggtaattattcaaaagagcccctctgttccc

SEQ ID NO: 174875 - DNA, 1181 bp, Zea Mays
tacgacgacgacgtacagggccgggcactcgtgccgcccaataatctactacacgtacttaggtacgtacacgcacagtacagtgtcgcgtctgtacgtacgcgcgcacgtacgtacgtgtgtgatacgttacataattagcttgcttgtcgtacgtatgctgcacgtacgacgatacacagatagatgcaaaaaaaaaatggtccaacactccaaaacatggtctctggctgaccctcgacgacgatcgacgcagtgctctacgtactaccactacactactgtgtccattgctgtacggacgacggaaacttgtggccttaatttgataacacgactacatgtacatcagctagacggacctagctagacgatgcccatcgtcacatgcatgctttggaagctatacctttgcttgtttctgcgtggggtagtagtgtacggcgtacatgccaggccatctcgatcgctgtcacgtgaaatatgaatgcgccaagatagagtttgtgcatatgggagagaatcgtgtatcaatgtcagtcaggtgctagctagcggctaagatagcatgcatatacattatatacattctagttacagattgtaaatgcggtgcatttatttgaggtcagtcagcttcttaagtactaattagtagccgacgatggcgatgaacccgcgcgcgcaatgggagagactgtgtgtgggagctgagacgagaggcgtacgtacgtagagaaagaaggtgggcaacgtgtccatgtccaaaaacttgtgtgcagctagctagctgctgcaacaacacacccaatgaaaaaagatctagagagagaatctgatgctagctgggtatacaaactgaatcttggaaggtccgatgtagctatacgtacgagcgagagagctggtcatgcatgtacgtacgtagataaacgtagtagctgcgagcctccaaaagcgttcgttgctttcgacccccttcaattgattcgagcgacgacgacgacgtcgtcgtagtcgtcctcccctttccaacccaaccgaatcattcacatcctctccttcgttacacaaggaataatcacaattcgctgctgatcgagcagctcagattctcggagctccactcctccctgtatgccaagaacaaatgcatcacgtacgtctgccaaagctaaagc

SEQ ID NO: 174876 - DNA, 475 bp, Zea Mays
ccggaggcggtaggcgtggttctatccgaagccatctgccatgggaagagagtcgctattatgcaaatgccatttgtttttaactagttattttattcattacatcaagccattacattacatagcataccactaccacaaggtttatcacacacgagtgctacctaaggtacccccgaactctttctctaaagtgtccccaaattccttgagaaggtcatcaaggctggccagggacatgtcctcggtgtcggactggttcctgggagggttttcttcctgccgctcagtctgacatccttggcttttggtcttcttgcggattttccttgcgggggcgagcttcttcagtaccttgtcgtagtccattttgagggtgcggtaggcttcacgggtgttggcctcttcgccttcagctaacgagaggctctcttggagggacgctttttcttctgaaagttccctgactttctgc

SEQ ID NO: 174877 - DNA, 393 bp, Zea Mays
cacagagaagtgtgtcgtgactgtatacattggatctagtccgcaccatgtggaatggagtgtcactgctgctgggcacagattcaaagacacctgccaagtcgtcgctcgcaaggcattgagggccctgtgtcagatctatgaagaagaagtggccgacacaccgctcagattctttccgccctttcagagagaccgtccagtttggatggccaggatgcgtgcattggaattgcagctgctgcttgaggatgaccccacagtcgtgtacctcactgcatacctgctcaccctggatgcacagtatgatttcttggctcggcaccaccgtcagatgattgcccaagcagaagatgcagagaagcgcaactgtaagctccatgtggatctcac

SEQ ID NO: 174878 - DNA, 327 bp, Zea Mays
gtcgtgagatggcgttggtgagacgacgacagctaggaggagcgagtgcaggaagcaaggtagcgatagatgacggtgacagcaagcgacacccattgtcgtgttgcaacggcgcgatgggactctaatgagttagcgagggacaggtgacgccacggtcccaccaacaacttgcccatctgctggtgcggactaggagacaaaatatcaacattgtctgcaggatcccgacgagtcgacaagctgatgagtgatgagaaggcaaggtgcgctgcagcgggcggattaggtcaccgacttactggtcagtcgatgaccgaagaagcg

SEQ ID NO: 174879 - DNA, 848 bp, Zea Mays
atcatcttcgaatcttgtggaacggaatctaaaaccattgacatcataccgaccataacgtctgccagtcactgctcctagggataattgtcgaaggtccgggtgtatattgtcatttttatctacataatctcgaaaccaacacaagaaattaagtcccccatcttttccctctcgacgaatctggtcacgttcacagccagagatgcaattttgagaatcaaattccctgttagtacaaggaaacaaacattttagtctcacaacaaatattctagcggcaatgactaaaataaagtttacacttacaggagaaactgactcatctcttccatgttgttatacatgtagagtaaagcagtcttccattcgtcgttggtgaaatagtatgttgtgctgggtcctacaattttgcccctccattgaaaaatttcaatatcactgatagggggctcgtcgacatgataccgcaacgtatgggcattgacattgtgttcctctgcaaagtacaggcccgtgaacgatgatatctctttagagcaactccaaaagaacactaaaaatttgtttgctaaaacgtcttattggggctgatgaaaaaatattctcgctaaaaacaatttaaatctacatcagactgctaataactaatccctaataattttgaaacagatctcgtaggtcatggcttgcctatttgggccagctcgtttgcgtcatgggctcgtatgtgctgcaggtcggtagtcatcgttgttcatagctcctgtgcatcgctgtcatccctataggctacatctctactaaacaaaactgaaattgaccacaagctggcattgactaaaact

SEQ ID NO: 174880 - DNA, 1090 bp, Zea Mays
tggatacatgttttgacccgtgggtcagacccgaatccgacccaaagtcgggtgggcacagattaggatattacattctacccgcgagttatccgttgcatatccgaaatcgacctatagtgtatttttttagcctagcccttactacatagtaaagaacaaactctaacaccttgaaccccacgcctaacgctcctaatttccagtgttggccgccccttatagccttgctggcttcctgcgttgtgtcccatagccccttccaagtctcatagaccgtagcaccgctgacggctggctgttgcaagctctagtgcccataaccgaggcccacaggcccataataattcttctattaagttctaattgtgtatgatggtgaactgggaagaaatttgactaattatgctattgaattgttgaataaatgattttatctgtcatatctgatggatatccgaaacccgtccgaaatccgatgggcacaggcatggataaaaatttctacccgcgggtatggtcgcggaccgatattggttgcaaccacgaatatggttgcggacggatatttgcaatatccgatccgttgcaatatccgatctgatccgttatattcttcagcctgctataacgtgtagtagttaccgaagagaagcactagaacgtagaacttgcttacgccagcgagaacacagcgaaggcagtgcgtcgccgtgccctggcgtgcggtggaaggagaacggcacgggaccacgagataagaaatggacggctaggattaaatctgctgcttaccccttcgtccattgaactcgggtcgtggatcgtccatccgatggccagggtggatcattgtcgtgggcaactttcggctgtggatccttaatcgtgcgtcgatattgtgtaccgattcgtaataaacacagatcaaatctgtgtcgtcaccttttaatcggacgactctgagcgcacaattcctcttcggcatagcaaaattgctaaagagtccatgcccttttgacaaaataactcgtcgtccttccacagtgaaagagaaccacaagaaggtccctagaatttgaagtttaac

SEQ ID NO: 174881 - DNA, 457 bp, Zea Mays
tgactattcgagctccggactgttcccttgcatcccgctatgattgatcctgaaattgccctttatgctgctagttatatgacaaaggttgagctgatgcgggtggttgaggcagggcccatctggccgaagaatggcttgctgaagcgactgaagatgaaggctgctggattggctgttgattgtgtacatactctgggatgtatggagaataatatgaagtagtatggaggacctgtttcgactaattctgccttgcctcagcttcggcaatttcaatctgcttttgaattgtaacctggcaggttcttgttgtgtgccccttatcttgtccacaaaataagcagaataatcttcttggctgagtgttgtatctccctccgaagcttcttcctcccttcctcctcttggggctggtggtctgaaggaactttgctgagtccctgttgattgggag

SEQ ID NO: 174882 - DNA, 819 bp, Zea Mays
catttttcccttgacaaatcatggagcgaaacactgaagctcacattttgaccaagatttaattgatctcgagatacttgtggcaggacgtcacgcacaaacactttgctctagtcaagaattcaaagatcatgggcacatggctatatactcacctttacctggttagaacctgcctgtggtagcactaatccttttctattgcttctgacctactactgatcactgcctacactcctatttctagtttacaaacaatgagctactcctggtgctagtataaacagaaggggggaaaaagaaagatctagtgtggattttgtacagaagaacctaagtttgtgtggggtgagctttgtacagtgtcatgagatacatgcatggatgttgaaccaaaagcatctggaaaaagggcagtgaatatatgttaagagtggtactggcaagtatacatatttcgcctgttacaacagaacattacacatatatgaaatagatcatttgttaccttgtcttgtaagcatgactgcatgagttgtccacatggtattatggatttgcattactattgatgcttgtgaaattgtgccgaggccagaaaaggcagacattctttgaggaagaaatgatgatcatgtgaacttttgccgtatatcatttgaaggttgatggtgatcttggtgatttatctgcattcccattttttgactttacaggagttttgtcctgagttgcctccttttcagcttctttctgggctttcttcttctcagcctcaatttgcttgaggttctcatcatgggctttccgaaacaaccc

SEQ ID NO: 174883 - DNA, 407 bp, Zea Mays
gccaccactagggtttctttgcgggagaaaagaaacgacgccacagatgactctgacttagcatccaacggcccacaacccttttcccacatccacgcaccgaagatcaacctttggcaacattttttggggatattacactctaccccccttaaaaaatattcgacctcgaattcgaccactccaaacaaaacatccaaggtaccccatatagcaccaccatttaaaacatgggtccattattggacttaattgacacaagaacttctacctcggactaattgtctaaggaaactacaccacctgacatcaagcatgaaccaacatgtaatgaagctcaaaacaagtcatagatgcaatcaacactaagatttcatttcatcaaatttggatgcagccatacatca

SEQ ID NO: 174884 - DNA, 647 bp, Zea Mays
ggtggctctggcgggtcgcggggaggtcgccggagctgcgggcgagctcgggagagttaggcgtggtacagaggaggcaacggggaagatggccgtgcactagggtgggctttatagccgcggtgcgggtgtgggcacggtgcggctgagggcgtgtgggggttctcgtgcgggcgtgctctggacgcgcccccgagtgtcagcccacgtcgaacacgtcggggtttacttctgccagggttcaacggccgatttggttgacttagcgtgcagatcttagcaaaacccccatgtacggtctcttctctgcaccaaatcctacgttttttatgtgagttccaagcaaagatatggtcggggtagagagatatggggtgagaagtcagctctgtccgagctgtccacaccgagacaaaagccatgccaagtcgtgtcaaatggcttagggttgggttcaaacttttccagggtgttctaggggtctttgggcgccattttgtcaattgggccataaggttttgaggttgggaacaacgtgaacatgtttgatctttgaaagagggtcagttttgaacttgagaaaaacctgatttttcttttatgttcttctctttggtgacctttttggggtttttctgaaatctttt

SEQ ID NO: 174885 - DNA, 833 bp, Zea Mays
cggctcgacggccgctcaaaacctcgccttgctcgagcttgtcctcaggcaaaggtagcgctaagggtaatcctcgtcctgcccgaggtcccctcttcacagaatggcaatttatgcctcacccgagcccatctcggataggagaatagcttcgagcccagcctcaatcaaaggtcacaggattcacagagacatgagcgtttattgtgaatacctaccgcacatgacgccacaaatggacaagaagcgatagtaccatggtcccatccactttcatcaactacgatgacccacacacgggaataacgacaactgctcccccacgtcgtctactatactcaagcaattccagacgggacgtgcgtacgtcagggcatggtctcacccttgggagagaattgcgcctcacctgaatcgacctcagcctcggagaaaactctgcctcgctcgagctcaacttcggccaactgccccagcaacaactccccacgaatctcgcaggaggacacttcaacaattgtgctacctcctccctgtacggctgcatgccccgaggcaggctcgaccaaggccttaggaggaacctccgcctcacccgagctttgtgtcggcctaaataacattgcccaaaggacgtcacctactccttcgtgaaggctgccaacaatcggatggctacatatccacgtcaagtctgctttacgccatacatgacagattattatgcactttttcaccatgcttactgtcggtaccctgaatcagtggtaccctctactacagtataaagacgctgtacacgtacgacgtctcctggccgcacgaagaatggc

SEQ ID NO: 174886 - DNA, 618 bp, Zea Mays
cttttgtcaccttcggtagttctgcctctaccggtgggctctttggcaacactattgtttttttccaactctggctctttggccacaccatctttggcttcaaatcacccgactattggcaccttagacactacagtcgatccttcagcgcttcgagcgacgggagcagcttgttccccttcggcagcagaagaggtcccttcaccaaattcaggcactacggccatttcattatatcgtggccggtgcgtcagaaccttgatctttttgcccttcgacacagcagagatggccgaagcggcagttttcctcttttttccctgccttcgcaaggggtagcagtaatcagggtatatgaagccaattgcatcaaaaaccctgttcaatcttttcttgccccgacccccaaaggctgaggataaagcatcatcttcggctctggtatatgccccaagtaattcgttgctagtagcatcaatacattttaaccagtcgtcattaggttcgtcaaaccggtccgtgtatctaaaggtatatttcaaacgaattaatccaccttcactggacccggcaatagtctccttcggcatctcccagttatccacaagtggccatacc

SEQ ID NO: 174887 - DNA, 2006 bp, Zea Mays
aacagctcccacagccaatttcttcttcttcaaacgacgctcagataagtcatcatctgacaggttgcagaacctgctccccagattccgcatcaccttggaggacagcaggggtgggccatcaaagttatgttggcacatgagacaattcctttttgggcaggccccctgtctgaacccagcacgtgattccttgaagcgcttactccttctgagttctaactccacaatgataggtgccatggcattagaacttaccgaatcattggagttctcagaaaggacatcatccagaattttgacattcggacattccttagggatggcaaaaggtaacgctttcattcccggttccagcagagccaagggaatcgttgataacagaaaggactttgaccaaccgaaggcctcaggttgaagcaactttgaaagaaaaaaaggtgcccagtccttttgcgatatccaccgaggggtcagttgatccagcaggagcaaagaacctggtccaaagcctggagaactgttcagtccttttcctctcctcgagcatctgaaacacggggtcaggttgccattcctaattgatcatgaaattcatctcaaaattctggaaatggttattgtttggatccccaacatgggcctaaagcggcaattcatcaataccaggcacagggttcacttgaggcaccggtccatcaacctcctgaggcccattgaatgcagcaatattaacagcaagcccatcatctagcaaaacaggtccctcctcaatcacatggccgttctgaaggggtgcaacttgaccagtgccaaaggaactatccgacgacaagcctgagtgttgattgctgagttggagctcatccggttgaacgggttgcaaatcaggcgggaagggctgcagaatctgttgattgggttgcacgtttttgatccactggtcccaatccccatgggcgttgtcatcccgaggagctggcatatcaccacccatatataggccccggtgggaagtttaggtcaagcccagccgagggcattggctggcccagaccgaagaaaaccaatggaagctgctgaccatctttcggagcaggaggaatagggtcctcatcctgagcctgccccccaagcatgttctgctgaataatctcacactgaacagtccaagaatcaccaacgaagccctcagcctcggaaaaaacaatgaattgagggacttcctcaagggaagtgacacggacccgaagcagggttctggaaacattaccccgatcctcctcccaaagaattagcctaccaaacgacccaatggctgcttgcaagtactccgaggaacggtgatccaagggaaaactgagaagcataagccaacactcatggttgaacaaaagagcccgatggttccaggtgtcattgtggcggaccgcggtgaaagtagcatctaaatattgttgggggccaagcagaaccaaattgtctcgctccaagacactgcgaaactgcactagcacctggcccaaatgggagcgttgaatggctctaaccccaacccttcgatgttccataaggtattctctgaccacatctctgaccgcagggaacagcacctcatgctcaggtaaaggatggatattgataatcgcccaatcttcatgcattggcggtaacctttgcgagactgacctgaccatgatttcgcgatgctgcaccattgaagcgtggaatcctggcgggaggaaaggccccgggtcaacgcgccggtacgccatagcaagattttccgaagatcgcccgagagccgaaggcaaggtagcggtttggggttttggtgaagtgacacctagcgagagctccaaggacgctacaggcgcatgttcgtattttttaataagacctctctggcgaactcctcgaagcaggcaaaaatgggaggggccctggccgtcagggaccccggggaagggcggaaccaggagctgtgaaccgggaaatgagacgtc

SEQ ID NO: 174888 - DNA, 829 bp, Zea Mays
ccgaactccttttctaaagtgtccccaaattccttgagaaggtcatcaaggctagctagggacatgtcttcgacgtcagacaaattctctatcctggcgggaggtggtgctggagggctttcttcttccgctcagtctgacatccttggctcttggtcttcttttggattttcttcatgggggcgagcttctttagcttcttatcgtaatccatcttcagggttcggtaggcttcacgagtgttggcctcctcgccttctgctatatcgagacactcttggagggacaccttctcctttttaagttccttgacctgctgctctaagctttccacccgggagtttaggtgggtgcagtgggaggaaaggtcgtcatagtggttatcgagagtgtggaggtatccggccatgtagacgatggtggggtcatcctcggtaggatctctccctgacagggcctgaagtcttttcctccaggtgggggtatttttgttgctaggtgggaagtaacgaaggggggtttcaaagacctctctgttgtagttttggcatagctgtttaagggcttttcgggcaacgttttggcaagtgtctgggaagcggtgcccgatgaaggtgacttggaagggagggtggtttgggtgacttcggctttctcccatgtagattgccatagagcacttctcaactccgttttctcggtattctttccagacatattccggcttcttgcggatccccatgcgtagcgcgcaacttcgtaagagatgagggaatccttcctcctctgagcagtaggatgttctaatgacccaagagccttccatctg

SEQ ID NO: 174889 - DNA, 307 bp, Zea Mays
ctcttgatgctacccaggatgttgtccaccggatgatctctttgaatggtatgatggactcgaggatggggcactgatggttgtctttgaatttgctcctcctcaacatccacttgatcaagaggcacttcactatcaacactttcatgttcatcttctaccacggttggcatcctttggggttgatgaccttcttcaagacttggatgacttgaggttgatgggtttgcttgggtggaggatttatcacccaccacctttgcgcccacatcaaaaacctcattggtcatccacaaagttccttcct

SEQ ID NO: 174890 - DNA, 531 bp, Zea Mays
agaaaagaagaaagatgctacaattttgggctcatttccgaccgagatggcccacaatgggtagaatgctcctgcgcgcgcgcccgcgcggtcagttttgcgcgaagatccttggttatttaaacaattggtgaagaaaccttggctactatttactgtctcactgacacttgcaaatacacccccgcgcttctatttcttcgcaactcgaagtccacgatgttgcacggcggagaaccgagcttcggcgagcttataccggctggatcactcaactactggtgctctaattcgactgagaactaatctagcccttaacaagtgtttcccccgcttaattgctggattggagttctacatcaccctgtccacggtgacagcgggcacaacagacatcatgaagtgttcctggtgatctaaggggtcctagcctaattagcggggtcggggagcatcagggacacacaaggacactgaaacaaaagagcagagggcatgaacggacctagagtaggatgaccacgacgaggt

SEQ ID NO: 174891 - DNA, 405 bp, Zea Mays
gttaatttgactggcgggggcctatggcggccggtccgcggcaaggtggcgggtgtccacggcggcgaggtcgccggtgccgtagttgggtgcaatagggggcggggaggtgtgcctcgtgaccgtgatcatgtggcggagctcaagcactagtttaatttgaccaaaactcacttgggagggaagagcggggctcaccggagcgacggggaagtgcggcggcgctagctcgattggctcgggggaaagcggaggagatggccggagctggtgtggagggaacggggctcgggcgggtccttttataggcgcccgagagagggagagggatggaggggacggcgagcaccgacgagctcgccatgatggcgggaatggcgctaacgtcgattgagacggctcggg

SEQ ID NO: 174892 - DNA, 282 bp, Zea Mays
tcttgcttcatgattttttagtacatagagaacagaaaagacttggtggtagagaatgacgaaccaaacaaaatccttagtgatatcaacaattccaatgtacttagttggttgttattcaatatcaccggtccatttaaaacatatagcaaaattccatttcaacttgatacatgtatttctattttcccacatgcccctcctattgcactgtctaaattcatactatattttagcacttccttatgctacatagaaactgagatctgattgcagacacag

SEQ ID NO: 174893 - DNA, 590 bp, Zea Mays
ttggggaaatagcgctatgtatttaactaaaatgacactatcaaaccataggtcattggtctaatctaagtgtcactacagtttttacataagttagttcactggagaatagacttatccgccttcagtaatgcatttgttgtgttcttcccactaatactggtactaagctttttgttatgctgatgtcataattaacgatagggtggtcacttggtcactgcgtgtgggccacgaaattttgtcatgcagatgtaagtgaaaacttcgtcacgtagatgtgagccatgaaacgcgtcgaactcaggtggcatttggttgagcacttgtaatggtaacattaatataaataaataacattggtatctgttaccatgggaatgaaaagcgctaattgtttggatagatatggtaacgttttctatgggcagtgcgtgcggccacgcttgccgtttgcgttgcaggccgtctttgcgttgcgtcgatctgtaggccacgcgcttgttgtttgcgttgcaggccgtgtttgtgttgcgtcgatctgcaggccgcgctctcgcttccacgtgatctatagcataactgcataa

SEQ ID NO: 174894 - DNA, 439 bp, Zea Mays
gggagaggttgcaaggtacctgctgccttcaaatgactagctttgattttttggcacgtgtcacactcaaacacatatttagcaatttccctcttcatcttggtccaccaatacaaggatctgaggtcatgatacatcttgttacttccggggtgcatggaaaacatggaaagacgagcttcgtccaatattttcttcctgagttctgggtttttaggaacaaccaatcggtcttcaaaccatagaattcccttgctgtcctgccgaaaacatttgtacttatccaccttttgttcgagcatttccttaatgacttgaacacccttgtcaccaatctgcgccaggactatctgctcttgtagagttggctccacggagatataatccaaggtacctagggaaacaacctccatgttcagcttgcgcaactcgtcacaca

SEQ ID NO: 174895 - DNA, 778 bp, Zea Mays
tgaagcgtaaggcgggcgcgccaatcttcacccctaccaaggtcatgaagaaaggtgcggggttgtcggccggggccacggcccactcactttcctgggttgatgtcgcccgggaggcccttcagcgaggcgccgaggaggccaggcttgccctgggtgggtaggctgggcaagatatttccactaccgaggggctgcggcccctcccacaacgctggtcgaggccatccccgtcccttccatggagggggcgagggtggctgacgcgacgtcaacgcggtgtcgccaaccggtttggagatattgctctccctcctcgactcccaggctgctgaccgaggcccaggggtggctgatgctgaggaggtcggtccctcgaggcggcccgaggagctggtcctggagcgaaccgcactcctccctggcgatgaggcgagtagtggtgtcgtccgcgtcaggagggaccccttgcatggggaggcacacgcctttcatggctggatgaggacggtgagccattgttcttcctcgacgacgtggaggagcaggagatgtgctccgagttttgaatcatggcccgggtaagaggatcgagcatcttccattgtgatgtattccttttcgcagggcatgtcatgatggtgtcctctttcctctcaggtcctcatggcaaagtcagcggccaagtctgtctatcttcgtcgcgagtgtgatgtctaggatgtgctacagcaccagaagggcttattggatcgttcgaacgagcaactggcctaga

SEQ ID NO: 174896 - DNA, 679 bp, Zea Mays
attttaccttttcttcattagtttcgactgatttactgtaggtcatcggtccttcattattaccactaacaaggaccgttgttgtgccaccagttgttatcctttctccctccttggaacttgaatttggggccaattctagagatgtgggagttttctccccatgtcccctgcttgattggtcggttttttaggccgagtattctagcaatcttgttggaactgttcttgatgtctagattggggaggacccattcggtcatgtacttgtggtgttagcctttcaagcacaaatgtttgttgtatccccaaagacgagtgtggtggcatcccataagtgtatggtggcatgacccatatgtgatttgggacatataggtggggcatgcatacatgagggtatgagaattgaggtgggtatggcataggtgaatatggaggtggaggtgtccatggtggtgaagtgggttgtgggttggggaccaactgaacaacattgtgggccaatttatttggccttgtttggtgggaagacccaactgatttcgcatgcctccctcgggcgggtgaatagggtcgctttgccaggcgatcactgtgactggcctttttgttgacatatttggacaacaattggtcgaacataaggcctgctttaattagtcgaccagaagctttt

SEQ ID NO: 174897 - DNA, 563 bp, Zea Mays
tgcaaaaggcaaggttatagtgatagtttgcagttgctgggctggtaggtgctgctacttagataggaactggcatgcttcgcacctctggactagatcggctgcatctttcttcgctgtcgaccaatagaaacctgccctaaaggccttccctaccaaggtcctcgatgtcgcgtgtattccacattgtcctgcatggattgcttctatcatatgtctccccatacccgaatggatgcatttcatgaggacccctgctgcccctctcctatacaacagagctcctatgatgatgtagtgagttgactgccttgctatgcgctctgcagcagccttgtcgtctggctcctcctcattcttgatgtatctgataattggctccctttagtcttttgggtctaactttgcatgatccactaccttgcattcttcggtgggccctagtgtggtgctcagctgtcgtatttgctgaacaaatatgtggggtggaacctgcgcccgactggaccctagctttgacagtgcatcttctgctgcattgcaatccctctctatgtggtggt

SEQ ID NO: 174898 - DNA, 1127 bp, Zea Mays
cttttactgtggcactaagtcgctgacagtttacaagaaagacctccacgttctattcctttaccgagcgaggtcctcgacgacgacgagcgtgacagagctccggtgagctcgtagaccggccgattggggcaagaactggcgctcccgagtggcagacgccgaattgaacctcaccggcacatttccccaacctaatttcatgaatggtggtctaatttggtctggccacggtgagcgcgcggatgaaccaaaaaaaccacgcgttctcggcgattggcggtggtctagttcaactgggtgtgtcggcaagcaacacggacgcatgagaatgcttaaatgagagagcaggcagcatgaactaaccggaattgcgctggccgcggtgaggtcgttttcacggtgttcttgagcagatttaggggaagttcaaaattcgcgctcactggtgatcgactgagagcaatactgggtggtgtggtgcgtgatgatgttgcggagctaacagcgggctcaatttataggcctagtgagcggtggccggaaattcgagcgatgacgcgcggcggtcagaggaggggaagtttactggcgcgcgtgaattcgtgttctatgtcgtggcagtcactccggcgatcaacggggagctaaagcaagtgacggcgatgcggtggagatgcttagacacgcggcgcaaggccgaaaggcggcggtcaccgacgtgcatatcagaatccaccgcgacgagctgtacggtggccggaatattttactagccgtagcttatccacggcgacgtactccgagcgttaaccacttaaccagagcacgtatcgaaacggcggcgacacgaattgcggcggaggtcgtcggcggtgagatgcgcggttgatctgatcttgttcaggcactgtaccatgggattcctcattgagttggcgtgacagatcatctttgagctcaattttctcccaaattcatatggcaacataaccaatgccctgcagcaaagttgtagccctaccaaccatcttcatctttgttatagcctccctagatagattctcactggatcatggtcgaaatggctctcaaacatggttctaggccactgtcagtgtgaaatt

SEQ ID NO: 174899 - DNA, 303 bp, Zea Mays
gggtcgtgctcgacacaagatggcatcgaagaggacgtccggggagtgtaccatcggtgctagagtacgtggtgacggagagctcgctggagccagagtcgtggctggattgcatggtggcgaagagctcgttgtagccggaactggagagcgtggcgctggagttggtggagacttgggtgctggggtaggcctacttggaaaaaggtcgcctactcctccggctccctcaaagtggacgtactcgatggtgaagtcatcgtacgtcgaagtcgtgctgtcgtccaccgccttatcctaggc

SEQ ID NO: 174900 - DNA, 765 bp, Zea Mays
gtcgccatgtgaccaagggaaaggatgtgctccggatgtacgcagcaggtctggacctgctacgtggaaagcaccggaccccgtgcatgacgagcggacctccgggacagatcccggacccttccgagtgaggtccggacggttcaccaccgggtcccagaccctggggcaggaaatacccggaccctgccctggaaggggtccggtgctggcacgtgtccgaggcttgcaccacgctccccaccaaggcagtgacccgctactgccgcatggcttgtggcccatgacgtgagccaacgggaggagtctgacgtcgggccactggagccgcgcagccactgcatttattgcagaaaggacgtgccgcctgctaccaagccaacgaacgatgtgccctctcggcatttaatgtgtccagtcctctccgctggcagacggtgtcagacggcgcgcctatccaatctatcatcaaacagtgcgcccgtgccatgcggcggactgtgctcgttaccccttctgcaagaaacttcccctacacgtcgaggatacgcagatctcggatgacgggccccaagaagagtgccccagcagcacccatttgtggctccaagcgctatattcgttatgtccctgggcccacatgtcgggactcggtacctttgtgtatgcccccttcagctataaaagaggaggcatgtgacgttgcaaagcagatccaactggaggctcccttagacactcacaagttcatacaagctctcaaac

SEQ ID NO: 174901 - DNA, 945 bp, Zea Mays
ataagtcatattgaagaatttcttaactgagtataaaacattggtcaagtaaaactttccattggctacatttaactttaccttgccactttattttcagcttccttgtctatattttgcatgctgcatacattggagtagaatgtgcttttgtcaagcaactcatgatgtgtcccagtgtgtgctactcttccattttcgacgacaactatagtgtcagcatttacaattgtggacatcctgtgggctatcaagataacagtccttccacgcattgctctctcaagtgcatcttgaactagcttctctgattctgaatcaagggcacttgttgcttcgtccagaagtaggattggtggatccttcaacattgcccttgcaatagctattctttgtttctggccacccgataactgcacacccctttctcctacctgaaacaatttaattgtaggaagtcccagtggggatcatttttaaatctttgaatgtctaataatgtggaaaaatccatgattctcctatgggaataaattgcgactatctgtaattttaaagttctattattaatgcattactcagtcgactttggtccttgagagatcttgttggaatttaacaaatcatgagtcaaaagtcaaaaccctgatccatatttggttaaataagatgatcgacgaccccaagtatttataagtttccatgggaagtggtgaagtactgaagtacctcggtcaagtactcatttggtagtttggatatgaatgaatgaacattagctgttcttgctgcttcagttatctccttgtcacttgcatccattttaccaatcttcaagttgtcctttatgttaccagaaaatagtgatggttcctgagagactgaagctatgtttctgcgcagcgatttcagatcaattttcttgatactgtggccatcaatgag

SEQ ID NO: 174902 - DNA, 529 bp, Zea Mays
ggaagatgcttcgggagtagaagtgacagttttttcaggcagaatttgttttgcagcttctttttccatttccttttctccggtttccaaggatttctccttggcgggctctgaaggcccagcttcggtctcgacctagctctttacagcttcagctttggttagttttgtctcagtctgcgtttttgaagcttcagcacttttccctggagtagagcttgaagtctttatcgtctctagcacatctagtacgttgaccatccttttcctcttggggttgctgtaagatcttttgtgccttcaacactgtcacttctgccgaatggcttataacttctaatatctttgttctttcgacctctatctcttcaatattatcggccttctgcttagctaatttggctgaggatgtcttcggcattgcatccagctcttcaatcttctgcgtaagcgcaggttctttggcttcagtagccgaagaggtctcaccgccaaattcgggcactgtggccggttcaatatagcgcgg

SEQ ID NO: 174903 - DNA, 601 bp, Zea Mays
acattatattaagaagaagaccttctcacggggagtcgaacacaagacctgaggagtgctacttagggcctgcttggcaccaaagtatttttgcagttttgatgaaatactatagtatttgagaaaactaaggtattgtaagctatgaggtgttttgtttgattttgcaaactacagttttcaatattacagtatcttaaaaactgcagtatttttggagttttggatactgaactcagagccaaagtttttagctcaatcgcatctcgttctcctccctggcgcatcgtccatcatccaaccagctagcttgtttcaatagaacaaagaaatcaaacaacatgcggttttaggaaataccacggtttaacagaaaaggaaaaagagacgtctccggcgagtatctagtttggatcgggatgttggtccttcggttcctgctgctgaagaagtgcctgttcctgaatttactgatgctgacctcaatgggggtgctccacctgctgctgaccccaatgggggtgctctacctgctgctgatccccatgggggtgctccacctgttgctgaccccaatggttgtgctccatctgctgctgac

SEQ ID NO: 174904 - DNA, 809 bp, Zea Mays
ccctgagtcgtgtaagcgtgagcatgtcttaccaacttaaggtgtttccgccttaagtcgattgctgatttcgagttgagcccgatctaggtcaattgttgatcaaaaacttgtatgccttggaaaatggaagctttattgataatgaaaccttctgcttataaagtacaactcgtcctcaagagttttgaggcattgctaggggtagaatttcctgaggtgctcaatattccatgaattctccacttcggtgtcatccatctgggtgagccggtaggatcccagtcatgtgacctctgcgaagatgaatgatccttcccacggtggtgatagtttgtgtcgtccctcccccgtcagcactcggtggaggaccaaatctcccactgcaaaggatcgatgtcgcactactttgtcgtggtagcgcctcagggtctgttggtatctggccgactgaattaccacatttagctgttcttcctccagtacatcgatgtcctccaacctggttgcttctgcttcggctttgctttcaaatgttaatctgggtgctccgaagattagatctgctggtagcactgcctccgatccatacaccatgaagaattgggtgtttccgtgcaaagctcgactcggttgggttcgtaggctccagactacatatggcagttccctgatccatttccccgtgaggttctcgcttttgtcgaacacttttttccagagtgcatctagtatcatctcgttggctctttccacctacccattagctcttgggtgtgccactgatgcatacttgatttggatgctcc

SEQ ID NO: 174905 - DNA, 846 bp, Zea Mays
tctttggatcatagttgacattgttgactgaagatgggctggctattgattgatgagggtgttgttacagtgttgctggcttgctgcatacaaaataggagatgagggacagagggagagcaggcgagcagcgacagatgaactgaggaagagcagaggaagaggaagattagaggaagaggaagagcagagtaaagcaccagatggagcagacaacagaggaaagcactagatggagcagcttgccgcttggcagcggcggtgcgtcggatggaggaggtcggccactagatggaggaggcaacggcgcggtgcatcagatggaggagtggcggcgcgccagatggaggagaggcggggctgcaaaccctaaaactaaaaccctgccctatacgcgtgcaaagccgcgaacctaaaaacctcccacgttcgtggcgtccgtggcgaaattggacgccatggtgatgcctagccgcgccgggcgacgccatacccatccaagacgcggcgagatcgacacctagaacatagaatcgcctggacgcctaggcgtcgctacgcctaggcgacgccataataaccttgattttgtcattacctaaaatttatttaaaagcgactagcgtcgacaagtcgggtttagaaaaactgaaatagatacctacgagtgtgtgagtctagttcccaatagcagcctcgtcgaactctcgaatgtgttgagtgttctactcgttaagtcaaataaaatgtgtggtttaattggttctatgtactatacaaattaacgtagaaaaagtattatataaacgctaaataactcgctttcgcctacacttgtgttctagc

SEQ ID NO: 174906 - DNA, 969 bp, Zea Mays
ggcttcttcgcttccttgcagtcccctacactaaacacgatctcaaggaatctagatgagttaatttacaatgttagcaaggaattcgaagattatgaccctacacttctaaatagagtgtacctgacattgcaaggctgcttgattgcagtaatgaagggaggtggaggtaataggtataagatcccccatatgaacaaagagaggttggaggctttaggcattcttccaaacagacttgattgtgaccgacaattatatgagactactcttcactccttgtccagtgagcatgctagtggaagctaggtaaggtatcatggcttttgtttacaggaaatggtcatgcaagtgtaaacaaggcgacacaggaaggttatgtgtcatgtcttttgggtactggcgtaatcttttgtttcactattctatcaaacttatgtatgtcatgctctagattctgtatattttgattcaggtcatgtaaattacgttgaaacaatctcatgtagtactccaaatcttggtttgccttatcttggtctgtattatcctcaatcacagtaggtgttaccttatgtcgtacctcaacaacactctcatcctcagtctctgcatcagaatctacacacgcctacaatagcataaatactattcttaaatcgtaggagtacattaaatccgcagaacacaaaactaatatgggagggacacttgctacctgcacatcgtcgtcattaggggcgattccaatctcagaatcgcgtaaatgaaccttgggcctgcgccatgcactcccagctcccacatcgacggcatgggggctgagccatgtgctcccacttccaacatcgacaggctggtgggcgattgcaagcttgggcctgcgccaaccgctccttgctcccatgtcatcgatatttgggttgattgtgactggagacttcctgcaattgattcgggtgctgcgcc

SEQ ID NO: 174907 - DNA, 1242 bp, Zea Mays
cgagggctgggtcgcaacctgcattgcccatcggagccggaagcaccctcgggggctgggttgcagctcgcactacccacctgagccagatcattgttgacaacaccctcgggggctgggtaatcactggcgccatccctggggaccgagttctctgcaacagccacctctaaggctgaaggattctcagttacctccatgggaatggagcaacctagaccagcttcttgactctgaagaccgcactccaaggtcgaggaggctctagacgctgctcgggataactctaaccccacatccggaatgtcagtgcaaacgtccatcataccaccatctgttggctcggacaacagatcttcaggaaccatatcctcgagagcctgatcaaaatttgctatggacaactcttgcagatcaacgagcgcagacaaggttggagaaggaatatcactactccccccactaactaggtagcgtcgactgtttttccgaattaaggggatttcctcctcttcttcctcatcctcgtcaacaatacgaacaacacacccattgggaacagctctggccggattgcacccattgggatcagcatcgtcaaggtcacacccattggggtcagtgtcagcagggtcacacccattgggttcagctccagtaaaaagttccactggcacttcctcagcagcaggagcagaagggccggcatcctgattcaaacacgacactcgccaaagcctcctctttttcttcttcttcccctcggcaggagcagttggatgactggccgggcgaaggcgctttgggcgagcaccatcagatttttgagcagtcaaggtcttttcaggctcagggacagttgcaatagctatggtttcagcagggacagagtcagatgaatcctcagccaacatgtccagcatagcacttttctacatcactcgggtttataggcatttcaaagtgaacttgcctttcatcgttggggagatcaccaagtgaagcaaccagagcctcaacttctttgggagagggtcacactctaagacccaggccactgtcgctagcaggaggattggacacaaaactgaaaaaagtcttagaaggtggcagattctaggcagaatatgcaacaggagcaccaatattcgacactttgcctctaaggatcatctccagccggcttaccaaatccatagcaggaatcctcctgttggtaacccgggttgagtcagtgacacc

SEQ ID NO: 174908 - DNA, 317 bp, Zea Mays
gttgcataccaattggagttaccagatcaccttgcagatgttcacgatgtttttcatgtatctcagctgaagaaatgtctcagggtgcctgaggaacaattaccaatggaagaccttagtgttcaagaggatctaacttatactgagtaccccatcaagattcttgatacattgactcgtgttacaagaaataaggtgataaaaatgtgcaaagtgcaatggagtcaccatggagaagatgaagcaacttgggaaaagataagaagaggttcgcatagattttccccatcttttctctagtccttcctaaatctcga

SEQ ID NO: 174909 - DNA, 916 bp, Zea Mays
gaaagatgcagaggatgaaagttgtcgaatagctcttgggaaccttcgttcataagttattacattgagaaacgaagctcctgaaaaggataaggtattgctctctttagtggatagattgaaatctagcgaggccaggcattccgctcaagccgaagctcatgaagccgaaatacaagaactaaagaggaaggttgttgaagcaactgaaaagtttgaagttgaagtggtgaagcatgagatatgcgaaatcgaaagatcaagagcacaaaagaatgcccatgagcttcgtgccgccaaagaaaaatgttgtgaaatatccttggaatgcgctaacaacttaaagaacaactttgcaagggttggagcctattcctatgagcagaaatttattcgtgaaaatcctaatgagatcattcaatggataaatggcgaagttgaagcttttgaagaagttcttattgatcgaggagatttttgtgcctttgctggtgctcgtggggccacgtccatcttggagaaggttggttgcgatcatactaaggttgtagctcagttagacttcgccttctcagttgatgatatcagaaacccttcagccgaagctacaaccctaggtgggaaattttattccaaagtatggctgaagggcggacgagaaatcgttgatgaagccatcaaaagaaatgaaaaagaatctcatgatgcttcagaagaggcaaaaagggctgaagaagctgtcgagcaggctagacttataggtatacatttttttaactcattttcgtaagtttttcagttttgatactgacagatatttgtgcctcaatgcagctgagctctctccacctcccgaaccaaacaatcctgaagctgacccgtccgtcagagaggcactggacattataaaaattgc

SEQ ID NO: 174910 - DNA, 393 bp, Zea Mays
gcaatccagcttttccccgagcctgttggccaagatctttgtcatgaacttagcaaaactgtgaatcaggctaatggggcgaaaatcagcagcaccatgagcgccctccctttttggcaacaatgtgataaaggcagagttgaggaggcgaaggtttctgaagtgaaggatgaaagatcacatttggccacagtttctgaagacaactctgaaatccaacaagattccccgagcattttgtctactgtagacttactccatgcgtgagctgggatgccacaaagttccacatccaccaaaactggcaaggaaacaccagtggaatgagcaaaccgtgaccatttcttgaacttcaactcaaaatccgggcagtgaagcactcttccattatca

SEQ ID NO: 174911 - DNA, 687 bp, Zea Mays
tgctggctttgctacgacgattcctgcaaaccaaaagagggaattcatccacatctacttcctcctccgaaacatgcccaccatctctgatgccaccgcaactctcaatatcatctttgagatcagcactcgctgggtcaccaccaaggtctggagcggcagagtcaccctccacctctaggccagacgagtgccgaagctttcttttcctcttctttgtctcggcagacatagctggataacctgctcggcgtgtccgtttgtgacaaacaccgccggggctgcaagctccctcctccccaccaaatgcacgcccagcagcagcactcggcgactcagtgcgagcagatacgaacgactcatcagccagcatactaagaacatcatttacttcggcctcgtcaacgattgcttgcatccagagattagtctgttttccctcttcaggaagaacccggtacgtagcaatgaaggcttcaatatcctctgaagaaggtcacgctctatggcctggactaccgtcttgaacagatgggttggatacgaactctgaaaaagacctctacagcgaccaaatgacacagtaatgacactatgtatgacaaatacaggaactcatatgcaacaacgtttaccacatggggaaggttccaggcagaatacaaacggggagcaccagcattcgaa

SEQ ID NO: 174912 - DNA, 1285 bp, Zea Mays
ggtcgcaagcatagcagagaaaagacagggaagttggactgcaactggataatagggtaggcgggttgggtttggggagaggagcagaaaattaaagagtgaatccccttttgcattgctgcatctgaaagcgggaggggagcggcctttcgttgtcttctatggaggaacttgggggcatccatcaccagcaggggctgcaacctaagtatgaagaagcgtgagggtctgagggagggggcacaggagagggacgagaaacaacccccatggcggatgtcctcatcacacgttgcaactccaatccgcaactgaggcccccacggtcctcagcacatgctccaacttcaacctataaccgacagggaccgcaattgaggacgaaaaattgagagggaggcaggaggggtgcatgggggagagaggagaaacatccgaacatcccccatggccgtcccgtgcggaccgccccacagattgcgataaggcaacgacagtttccccatggcgggccctgtgccctgcaaatttctcaagacaaaggctgcgacggttactcatcgccccgctataatcacatcaacgcacacgaactagcagcaaaggagcaaacctaacaggctaacagcaaggaatttgagattcgagaaaaatacggtgaaagaggatggtcgtacctatggggaaacaggaagatgaagtttgtggatcgcgcacgtgaagagggggcacggagggccgtctttccccaccatcgttgtgaacgcgtcgtctctcccgacgtcaggaacacgcgtgtaaagaggaagaggaggctgctgcagcagctaccacttctgatttcgcgcccgcccgccattgtcctccacgcgacgcttgatgcggacgcactggccctcggcggtggtggtccatccaccggcagcctgatggcggaccatcctcaagcgcgccaggtgggccgtcttactccacgcgaggagccgccgacttttgctgctggtgtgtacagggcgtgcagccgagacgccaccgctgcggttatctacctgtgcggggcggcggagaggacgaagacgacgaaacgatggagagagaggacgaagaggacttgcagcgcagggagaaaaggaggcaaggaaggagaaagtaccggcaagaaggttcgaggggcgtccagaactaaagaggttcgtgatgcccctaaagaatatcgtgtcgtagtgttgtggccgttgataggaaatccaacgcctgagaaattttcagccgacgtggacacgca

SEQ ID NO: 174913 - DNA, 569 bp, Zea Mays
ccatcgcgcaagcggacattttcccgacggtttgcgaggggtttttggggattgaaccccactgggacctgtggacccatctcttctccgcggagttcttcgccgtgtcgacggacgtgaagaaggtccgtatggcggtgcgggctggaggctgtaccctccagctgaggtcggggcatgcacagcagtacatccctgcctcccttgtgtcttcaaacaaggggtggcagaaccggtggttttatctccggaatgacgactggatgcttccaccgtattctcaatgagtggtgaccgccgccggtgataactggcgctggggggccacacgcgagaaccaggagaagctccagcgcattctccatgccctgcaaaagttacaagccgaaggccttaccgctgcgggggtcgtcgccgctatccaccgccggagggtgctcccattggcagagcagtggttgtggctttcggagatgaagccggatgttgatttggagggttcacggatgtcctcgacccccctctccaccgacgacctcctcagacgggtagcgggcacggtagggagg

SEQ ID NO: 174914 - DNA, 606 bp, Zea Mays
gctatggacaaagccgttcatgcgaggtggatcttgatgaggaggcccggcatagtggttcctgacgacattgtcatcgacgtcaatgttgcgcctgatgctttgagtcgtccttcttcctcgattgctcctacaaaaaacattgccgacaaagatgtttcgatgcagtgaagtcctatgaaacacttgatgtgctatgaattctatgtgcgtgtgatggttgtgttcgaatattttgtggacagggcatcagaacgtgtccttggagctgacaagtacaacgttcttttttcctggagtaataattgttttgttgatagggtataacagtcaccctgaacaattgtgagagtaaatgtggcatgctggtttcgaaactttttctaacttaagccgatcgcctagccggtaaggcatagtggtcaccgtaagatagataggtgtgatcgtatcgcgccgacttcagtcatcgccgacttgagttgattgtcctggtagtagggtatagtggtcaccctaagccgagttagcgcgagcatgttgcaccaacttatgtcatcgccgacttaagctgattgctctgtttgcatggtatagtggtcaccc

SEQ ID NO: 174915 - DNA, 475 bp, Zea Mays
gaaggccgacgttatgtgtagtttggtgcccatcagccacatgagctcccgccaaaatgtggaggtgaacacggcgtcacggtcggacaccatgtactgcggaacgccgtgcaagcgaacgatctcggcgaagaaagcctgggccactgactccgccgaataaggatgcgctagcggaataaagtggtagtacttgctgaatctgtccaccaccgtcaagatggcggacttgccgcggacccgaggcagggcttcaatgaagtcgagcgctacatccgtctagacgccttggggcaccggttgtggaaggaggaggcccgcaggatgaaggtgctcagacttatgacgctggcacgtcggcacgccctcacgtagtcctggacgacctgcttcatattaggaaaatgaaagtcacgtcgaagccggtgcatcgtgcgttggacaccctcgtgcccctcctcgtggatggccgcca

SEQ ID NO: 174916 - DNA, 1088 bp, Zea Mays
tgaaggtttcaatggggtttcctggactgttcagtgtgacatagtgcagcagttcatgcttggtaacttgcctgaggatgaagaacctgtgcccccgtaccctcataatgggcatcaacttctggtggaattttttgggttgggacaacctgtgcctaatttccaattagatctcaacttccctcccaatggtgaaatcgaagtagaggctgctaatgccaacaatgctgatgatggttgggatccttggctggttgagtaggttcagcaagaccctccacctgcacctgtaccaattgccaacaatgaggaggaacaattcagctatcagttctcgagtcttgaggacttaccctcagacaattcagtcggttttttcaacgatatggttattccgcaagttgttaactttccgcaggaggatgtccaagaccaagaagttgtcgtgctagctctaccagccctccccccccagcggaccctttttggagggaaataacgatctgaacgaccaggccgaccaaaatttgaacttgattgcagatgaaaacatcattgtgggatgcataacgcatctggatcagccctctcaggacccggcctacgaagatttcatggctagaaagtgtttctcctcctgggctgagctttgcccccccaatgcaaacctcatctctgttccaaaattatgggcagctttctttatgggcctgcttatgaagccggattcttttgagtgggccagaaaatttctattgtcgggggccctttctgctttcatggagcccaacatggaaacggtgccctttaagattccccccaagtgcttgctcccccctagccaggatccacctgtggaggctcagtcccctacgacttctgaagttgtcagcaggaagaaacgttcaaccttggtcgatactgaagtaagaaggagtgcgaggctccgtgaaaaggctaatggctttaaaccttgctttggaaggaaaaatagttgctcgtgttgtgctgggacttctccaccgccatctctctcccataagactataaagaaattgggcgtcgacttctgcaacgtggacccccaa

SEQ ID NO: 174917 - DNA, 723 bp, Zea Mays
gcccataaaacagtaccacacccaaacaagaacaaattaataattttattcttaggacctttcatccaaatatcacaatgctctttaatgttttttggaatgaaatccaaacgtaaagcaacttgaatcaccctccacacatatctagcaacggaacattcaaagaataaatgatcaaccgtttcattacaaccacagaagcaataatcacaagaaccatgccaatttcttttttcagattatcctttgtgagaattttgtttctcacaaccaaccagagaaaaaccttgattttatgtggtaacttggatctccacataaaccgataaggcacagaaacttgatcacacattttttatacaaagagttaacaaacaaaccttttttaccaagggaccaaactatcttgtcttcctgctcagacacaacctggctgttgcaacaatccatcagctcctcatacatcaagttcaaattatccatgatccttctcctaaatgagagggccacaaaatttgaagacaagaccttgctgactgaaatatctttatcatacgccaggtcaaataaacacgggaatttggtaaccaaaggtgaatcaccagtccaggtgtttttccaaaaactaattttcttgccattaccaacaatcatcctgcagcgattataaaacatatctctcaggtccaacacttttttccaaaaatgggaatcattctgtct

SEQ ID NO: 174918 - DNA, 656 bp, Zea Mays
ggaaatcgggggctagcgtgtaaaaatgtccaagactcagtcaacagtcgcacggatggcaggttggtttcttaataactgaggggctcttacgcaagatggcacgacgaagaggtatcgcgggatccgacgggggcgccctgcacttgggcttgagggagctcacaggggaaggtcggaggcctgtccatggagggagctccgcagttgaggccgtgcatgcattgtggcgcttgcggtggtctattatggccatggcgacccgcacagagggatgaagcctcggtgttcgcacaagatgggagatgggaaagtcacgggagatacttggctataaagccgcaaggaggtggggtcgaccacgcaacgacaggcgacgttttcgggcggttctaacggtgggcgagagagagtccggcagcctagacagagaaaagatagggagggggagaagacagacccggagcacgaggccccacaagacaacgatagcacgttagtgctcgcgacggctgggacacttgcaacccgaggagctggtcccacaggtaagtgacccacgcaaaaaggaatggagaggggactgatgggccgcgcgcccgtggtttaggcccacgcaggtatagttctccctttttctttatttatttctgtat

SEQ ID NO: 174919 - DNA, 616 bp, Zea Mays
ggccaaccctccttccggccatgtccggtcaccggcgccgctctcctctgttcggccacgccatcacggatttgactgccttacggtcgtggttgaacgtggcaagctctaggggagtgccgtgctcggtgccatcgttgatcgccagctagggtcggcaatggttatcaccgtgaccacggcagtgactcaccgcggctataaattcaccctgtcctcgcccccttttctcaaatcaaccgagctccgaccttcgtctccaaattgcgaagctgtagcaaccattcctgtcctcgattagccaccctggctggagaattgccattttcccccaaatcagtccgccgcgccacccaaaacagcccgcccgtggccagcttactctagtaagtcactgtccaatccatgtgtttttcttgtgcttctgcatgcttgcgaagctcacggtggcgtctgtttgctctattcgaccatggtttggcgggaacatgtgctcacaaactcggtgtccgccacgatcgtgggcagacggctcccagaggggttcctgtccaattaacggttgttcatagatcgtcttaggtcggtaaagcctccccgatagttagcttgagca

SEQ ID NO: 174920 - DNA, 740 bp, Zea Mays
cttacacttttgctttcgtgccattgtattgccccctttgtgcaatacttaccttgttatatattaaacctttgcctctctacttttccccttgataatgctttctccctaactcactttatctccttggttgtataatttatcctcactttaacagttcatggttatcttatttcactcttggccaccaacaaatatgtcttgtctaactccttgctatttcttacctgactccttgactttataatatctttcttattccaaaccttgtctcaccttttgttttggttgaatgagtagaattggattgtgttgtgctggtatgcttgaattcattgtcctttgtgttcatgtttgatttgcttctttgaaatgatcgttggtgtattgtgtgacttttgtccacaatgacatcaattagctaggaaaaaccttagatagatgagttttctctgctctctataatctgtctttactcaaccctttcgtcccttccattcttccatacccatacagatgtcagaccttggaatgtcaactacaagtgatgtcactaagtgcaaagaatgtggtgtgttggcaagtcaaaacaacactataaataaaacagctgatgaacagacattcaagacccaaaaggatgcaccaccaaaccaacagacaagtgaccttggaacatgttgttgtgagtactatggaattccttgtcgccagatcagtacaaacgaaagtgaaactac

SEQ ID NO: 174921 - DNA, 654 bp, Zea Mays
gctaggcacttatacgcctcaatagaatagtgtagttgagcgttggaacggaactatatcctctctagggcatgttgcatgtggtctaattcgggtttaaattggtgttttgggctgaagctaccataccatgtgcacaaagagagaaatttggtgtgcaaagtggagcacttagctgatgcactagatatcaataatgtcgttgtttcttctctctttgtgcttacgctgtcatcagaggtggtgcttgtttaacatgcattttcagtgtccttggctggctgctgctgcggctagctagcaggagaaaaatggacgaagaagcaagcaagcaaatcgtcgtccggcctatgtcaccaataatcattaggctatactctggccggtggcaggccagagtgtcgtcaagaacacacctccatcggtgccggtgaacttaaccaccgtcggtagctagcatgcactcgctcttttggttccgccagcagcaataatgcaacgacaagtacgttcgtttttcacgtgagatggatgggtcagtttaatttgcaacatatatatatataataattcctcgtcacttttggtaggggaacagcgacaggaaacgatccatgggtcgcccgctgctcgctttcgaatctaaggtgctag

SEQ ID NO: 174922 - DNA, 533 bp, Zea Mays
acttacctgcggcgaaatagctccgacgaagtggtcgacgacgtaggggaggtcatggtggtcacgttggtgtgcggggatggccggagttggtcggacctcgtgcgcaggtggggaagctcgtcgacggcgagaattatggcctaaccatggcggcaaagctcagtccagtgagtcggggagcttcacgggaggtcagggaggttgtaggcgcaagcaattggaaaatggtttacctggtagcctggtctacgcgcgatggcgggtggccgaactccgacgagggtgatcccactgctccagtgaggcagggtctcggttcttgcttgaaaaggctccacggcacctaggtgtctacgggaatggctggttgtggtggccggcaatcgggtggctcgggcgggcggcgtagagcttgccagagctaagagctgggtctgggaagttaggcaaggagcggagggagtacggccgaggccgcactgctcttataggcgcgggcgcggtgcacggtcgggcgtggaccggtgcgg

SEQ ID NO: 174923 - DNA, 712 bp, Zea Mays
agtatttataacacgctcaaacaaaactagttgttgccctgctacatacacatgctggactggtcctgtatgcaccgtagttcctgttagctacggaaaagttcccaccctgaaaatgttggcaaaatgtatcaatctaattgaggtaccactgctcgaaaattccttaaaccaatccagtatcgccacccacaacaaactctgttaaaatctcgtggcactctcaaaaacctcgtatggattgaacttcagcacttatagacaatcatgttgcatctctcttaatagtacggcatacctatcagctcaagtttagatgaaaactgaattcaaatctcttgagttatactccattgatcaacgccataactttcaatcttcatcatacaggatgccaacatattcatcttgattgtagcttgagcatagccatcttgatcatgtgatttgatccaattcaatccatatgaattaatctaatggcatgaaatcagtttcttcaaatgatccaacaatgatttaatcctcctcacaatataacttcttctaacttgaatagtgaaaaactaaatgcaagcactttcttcttcaccacaaccatgtccttcgtttctatatgcccaagccgtcgcttttcctttatcttcacttggtccccacggaagccatttccttgctaccatcaccctttcaagccattccaagtcatatg

SEQ ID NO: 174924 - DNA, 523 bp, Zea Mays
ggcaaatccagaggagcgccaacctctcgaataaggatccatgatcattgaaatcagtggaaatcttctgcttctaaatggggatgctgaggtgcaaagatcagcgaggcaaatccagaggagcacctaataactctcgaataaggatccaatatcattgatctcaggagttccggggtgtggagatcatggaggtatcaacctaagagaattgttttgtttgaaagcagaggagagatttttgcaatcttggcctcaccatcggttggcaacacgaatcacgcaattgcattcttggcattataacggggagcggattgaagaaatagcaacgactgttgctgatcgccattagcattgccatctctggacttgtagcaaatcatcagcaccttcaaatccacactgcccggacgtctagcagggtaagtttatttaggttgttatatgtttgtagatcctcaccttgttagtttagtttgaattaaattagctacgctttgtatgtatttcagtgagttca

SEQ ID NO: 174925 - DNA, 672 bp, Zea Mays
atagactatccgtgcaaaagtcgcctaagggtgcagccggactagcacaacaagtgcgcaaaatcgaggtcttcctcagaagactatccgtgcaaaagtcgcctaagggcgcagccggactagcacaataagcgcgcaaaatcgacgtctctctcaaaatactatccgtgcaaagaccaactacaggtgcagccggaccgacataaaaaacgcgctagacctagtgcacaagtcccctacgggcacgatcggatcagcgaaggcacacagcctcatcatacaaattatagttacatacgtacagcgagggcatcacacctcacattgcttcaaccttcgggacgatacccatctccctatagttaaacagcattatcctcagctcctcaccctcaaaaagacttcgcaactccccctcacctacactcgcaccaactggcgaggacaacaattcccgcttgccagccctgtccacacgaagacgaccaccctccacctcactcactctacgcttcgccaccgcccttcgtcacctacgcccagcactcggaccgggaataacttcagtatccatcagacgcggagaagcctccgcctcagccacatccaacgccgcgaaataatacaaatcctcatccgaagactcctccgtccacaccaccgaactcccag

SEQ ID NO: 174926 - DNA, 726 bp, Zea Mays
ggggacaggagattttgctttttctgccatatcttgctttgtcgtcttgccggtatctaaaatttgctgacctaccttatcttcaggctcggcggccttcgtcttagtaggcgctgaaggcccagctttggcttcgacttggattttggcagcttcggcagttttcttggtaggagcaggagttaaggccttcgtggtctctataatagcatctagcacgctggccatcctcctcctcttgggagttgcagcaggagctttttgcatctttggcaaatctgcctctgccggtgggctcaggatttctggcacttttatcactttttccacctgtggctcttcggccttatcatctttagcttcggctggcccgattgtaggcacctttggcactacactcggctcttcgacgctctgcacaatcggagtagtttgtctcgcttcgacagctgaagaggtccctttgccaaattcaggtactacggctggttcaatataacgcggccggtgggtctgaaccttcacctttttgctcttcagttcagctggggtggccaaagcggcagtctttctctttttcccttgcccttgtagcgggtagtggtaatcagggtaacgcagccaatcacatcaaataccctgttcaatcttttcttgccccgacccccgaaaactgcggacaaagcattatcttcgacgttagagtatgccccgagtagatcatca

SEQ ID NO: 174927 - DNA, 724 bp, Zea Mays
aaggtgcgcgttagacactactaatatagcaaacagtttatagttgcagccgcaacctttgtcaaaccgacagccgaacaattttaaatggtgaatggagctgtacacttatcgcgtgattggtagccggtacatcaagcgcccgcctcgcaccagcctggcccactggaaacacgggagaactgtgtttccacgcatacaggcaagcaagctaaaaaatgccaatgactgcacgcgcgggtgcaggctccagccttgttctacaggcaaccaaacacccgctgtgtgcggtcaacgggacagcgcgagcctaggcacagctgttcaatgaaccaatcatgtagttagattagctatttctaaatgttgaaagaagttggcgtacacttagattagttagattagtgattagtggtagaaggtttgtttttctttagtgatactataaatggtgacatggatggtagcttgatctaggtaagtctattgatgtgtgactatatatacttaacatctagcactagttagttctatggaagttaggagaaaattaaaatcaaatctaactcaaaaagtgtgaaataaacgagtggtggtgcaccttaaaatcaaatctaactcaaaaagtgcaaaataaatgagttgggggtgttgcaagtgcatcgatgtgcaccaaatatggacattaggtatagatagtgctttgtttatagagcaaaaatat

SEQ ID NO: 174928 - DNA, 1196 bp, Zea Mays
tgtacgtctacactatcgtcttatagagtagtaaagatttgcttctttggtctgccatccttgtcacttggagcatatattctcccatactcttcaaacagctttgtgagtgtttcgttcattttaatccaaaccacttctccatggacctcaccaaacatttctaaggtagcgatcttggtgtaatttgaaagtttgtaccttggatcaagtgcaacagccacaaagatgagaatattgaaacttgtatgatcaccccaatacttgttgtactttgctaacattctttttgccatttcgttgcgcaaaggatcacttctttcacaccaagaccgcaataatatgttaagttcagcaacctcatgaaagaatatgtgagatgtagggcgaagagtggcagaaacacgaatggtcaacttgtggaagtgctcaagaaaatcggccatcttcactgcactagcccaatcatcagaatctggcactccaggctgtttttcaccatttaaatcaattgcatagtatggatcatcttctgcatacctctcaaacaccttctcttatgctactgctaccttgagcatattatatgttgagttccagcgtgtgacaacatcaagtgacaagaaagccttggtgttaaccttctctagctccacacacttcttaaatttggcaatcctagaaggggagctcttaatgaatttaatagctgcacggacacacttgatagatatgtcaagctctttcaaaccctcttggactataaagttcacaatatgggctgcacacctcatgtgaagtaacttggattccaagatgctagtctttgatttgttagtgacatttgccatgtaggaaactgtgccattattagctgaagcattgtcaacggtgatggtaaacaccttatctaatccccactcagctagacacttctccatgtattttcctatgtcatctgctctgtgacctttcaccataaaaaaccctataatcctcttctgtagtacccatgatttatcaacaaaatgagttgtcacacacatgtagctttgctgatggctagatgtccatgtatctatggtcaagcatactctttgacaatttttcttgaagaattcttttagcttctctttctcattgttgtaggcactaactacatctctagttgcagtccttctagatggaaccccaaa

SEQ ID NO: 174929 - DNA, 842 bp, Zea Mays
gagagaggaagcaacagggaacacgacagaggggtgtattacctgcaatgaaccgcgcggaccccctggccatggcatcctgcggccaacggtgaacggaccgttccggcgagcaattctcaatgcgccacccattctttttgcccggccatgtagtgtgaactatctggcgatttgcgtgacaccccaggttacccagcacgcaccgaatggccattcaagcgagttactcgcgcggtggaatctcaccccaatcttcgcctgctcgatggcgcgagggagctcaccatgggtctggtttgggttcaagggggcacggccatggatttataggcccgagcgcgacaggattccgacccagttttccccagctcccgcaaccacctccggagatcgcgtgcttctgtttcgagcccaacgccgcgccatccgcaaggatatagcagggctttgttgaggaagacgcctgaaggtggggcccacgcgtcagcttcccacggaggacacaggcgcgaacgcaacatgttttgactgccaagcgggacccgcggcttagtgagaacggcagtgagaagttgggccagggcaaattcggcccaataccagtcccagcgcttttttattttcctaattcttttctattcctcatttgaatgcattttaaactctactgttcaaatttgaattctttggtgagtttcacacagaggttacatgtacaatcatattgaaaaattatatttatttgtctatattttacttatagtgcacatggctttcctttttctcctcttttcaaattcaattctaactcaaaactcttatttcaattttcaaatttc

SEQ ID NO: 174930 - DNA, 739 bp, Zea Mays
agcaaggatttgattatgatgacgatctccaggctgctcttcatcaatcatgagaggagcactaatttagacaaagagctggtacaaggtatgatagaggaggtggatctggctggacctagagggcaccttaagggttggtcccactccctatgatgatggcgaggacctggtcataagtacctaagcaagtcaaagactacaatcttggtgcaagctctggaccacaacaatagaggatagacagtgggccatggacaagtaagggcaagacttcgggagagagcttcttggtaaggcttgccattggcatacctagcacaaatgaccctagtgaaggtgatggtgattacgataatgatggtagctacagggatggtggaggtgagcctggaacaaatggtgttgggggtattcatgtaggagggagtgatgtaggggattggagattcaccggagagagttagttcacccatgccacataggattcagatcataaagcgccacattcgtaacacgagactagaagcgaccgacgtcatttcgtttgccttcttgttgatgatggaagccacaactcaatgagctctagttacaactatccgactcgcacgatcaaaacttagccctttatgcaagttcatcgcctcttggtccagtacgaccatcagtcatgtatgggtatggagaaccacccactctacctgcatatgcatattcacttctggcgcccgctccg

SEQ ID NO: 174931 - DNA, 418 bp, Zea Mays
atcacagatgtagtgaacgttgtcgccaatgaactctgcgccgcgatcctcgtcggcattgtgattcgtgcactctggcgtgcggataacggtcgacgatgaaaagatcttgcacgaggatgaccttggggcactgttttgccctatcgacgtacccacttgcaccggcgatgtggctgcacgaccatcaccgtcgtgccgccgtctagctcggttgtgacacgccttaagtcatctcaccactcgtcgcaagccatgaagactcggcagtgaccgccgtagaccgtaaaccagtgagggccacgttagcaactccggtgactcttccccctttctcaccacaagcacttccccatccaaattcaccctcctcgcgtccgtcctctataaattgatgcctcggcccgttacgctagat

SEQ ID NO: 174932 - DNA, 445 bp, Zea Mays
agtgggatgaataacccgacgaaggcgttttgggcgagtaccctcaggtttctgggcgtccacagtttttcaagctctggggtagttgcaacagccaccgcttcagcagggacaaaatcagaggaatcccccgccaacatatcaagcatagcacgtatctctgcatcactcggattagtaggcatctcaaagtaaacttgcctctcatcattgggaaggccaccaagtgaagcaaccaggacttcaacttctttgggagagggtcgcactctaagacacaaaccactgtcaccagcaggaggattggacacaaaactaaaaagggcttagaagatggcaaattccaagcagaatatgcaacaggagcaccaatattcgatactttgcccctcaatatcatctccagtcggctcaccaaatccacaacaggaatcctcttgtcagt

SEQ ID NO: 174933 - DNA, 283 bp, Zea Mays
gtcattatcaagaccttccgtgtgtgtcttcactagccttacaaagtgttgtatgatgcccttggtgcgaggagagtgtggcatattacgagaagcatcatcaacctccaatcctgccatggttagacgaacagaggcaacaagataaaaaagtgaaggaataaaaactctacaactattaggatgtagctactgcaaggcgctcactctcaacctgccacacaagctcttaccaattcttaccttgctcaataggaggggtcagcaaccaacaagtatgcaa

SEQ ID NO: 174934 - DNA, 567 bp, Zea Mays
ggcacgccatggatattcgcggggaggtagctttggacgtgtcgcgatctcgtggacctagcccgagcctagtcggagataattcaccggcagccaccgtggctcggtcatttccgccgccgtgtcgtccatgcctcgctcctccctgactgtgtcccttctttacgtggtaaccatgcacgaacggtgtaatccgcggccgtggatcatagctggactaccgcgcctttaaatagccccgccacccacggcgaggtattcacatcttcaccagtgaactcggttgaagcgcaaattcgcggaatcctctccacctctccacatcttcaccagtgaaaccatagtcctttgtgaccgtgtagccccaacctcacctcctaattccacccgaacccgtcgcggtgccattttcccccttttctatcaccgacgagcgaaaatcctccgcgctcagtggccagctactcccaggtctgctcctgctagttttaatcgtgtttcagcacctatatacgctcgtgatactcatcggctccaccctccctgcttggccacgctcaatcacct

SEQ ID NO: 174935 - DNA, 694 bp, Zea Mays
tgatccactttcctgcaagtttttcatttttgtcgaacactttcttcctgagtgcttccagtatcattccattggctctttccacctggccattggctcttggatgcgctactgacgcatatttgatctagatactccgttgttcacagaaatcgaagatttcagagttggatcctaggtcagttatgatgttatttggtatcccaaacctgaatattatttcttgtatgaactccactgccttggctgaggttaaagaggcaacagacttgtactctattcatttggtgaacttatcaatggcaaccagcacgtgagtatagcctccctaagctttcttgaagggtccgatcatgtccagcccccagcatgcaaatggccatattatagggatggtctgcagctgctgtgtaggtaaatgttgtttatttgataagaattggcaagcttcacacctctggactaactcggcggcatcactcttcgctgttggccaatagaaaccagatctgaaaactttccctacaagagttctggatgttgcatgtactccgcactgtccggcgtggatttcatacaatagctgcttcccagtagttgaggaaatgcacttcatgaggactctagtcgcaccccttctgtacagtgcgccccctatgagggtgtagtgggccgactgccttgcgatgcgttc

SEQ ID NO: 174936 - DNA, 1419 bp, Zea Mays
acccgggtgtagtggaaaatgagcaagggtctttgcatcttcctcggcgggtgcgaagggtaaggaagctagtcgagccaactagggtccgtgtaggtagttggaacgtaggttccttaacacgtaagttacgagaagtagtcgatgttgcggtgaggagacgggtaaatattttatgcgttcaagagaccaagtggaaaggatagaaggcgaaggaagtggaaggtacaagcttcaagttgtggtacacggggactacaacaaacaagaatggagtaggcgtcttgatcgataagagccttaaggatgggggagtagatgttaaaaggctaggagatagaatcatcctagtcaaactggtcattgggacttggttctcaatgttatcagcgcgtatgctcctcaagtaggccttaatgagaactcaaagagggagttcttggaaggcctagaggacatggttagtagtgtgccagttggtgagaagctcttcataggaggagatctcaatggccatgtgggtacatctagcaccagtttcgagggtgtgcatggaggcttcgactttgggactaggaatcaaggagaggaaattctgaactttgccctagcctatgacatgtttatagcaaacactttctttaggaagaggaaatcccacctggtgacctttagtagtggccaacaaactagccagattgatttcgtcctcttgagaaaagaggacaggcatgcctgcttagattgcaaggttatacttggcgagtgtgtggtaacccaacataagcttgtcgtagccgacttccgttttaagattcgtttacaacaaaataagcataacaaggtcactagaacaaagtggaggaagcttaaaggggatgtggcccaaactttcaaggagagagttattgaggagggcccttgggcagaagagggagacgcaaacatcatgtggaggaagatggcgacatgcatcctaaagatagcttcagaagagtttgggttgagtcaaggaaacaaaagggaagttaaagacacttggtggtggaacgaagatgtccaaaaggctatcaaggagaagaaagactgctacaaacgcttacatcatgacaagtgtgcaaacaacatagagaagtacaggatagcgaagaagtctgcaaagcgagcgattagtagagcccggggtcaagcctatgacgacctttatcaacggttggacacaaagcagggagaaaaagatatctataggatggctaagattcgtgaaaggaagacaagggatgtcaaccaagtcaaatgcatcaaggatgaagcaaaccaactattagtgaagaatgaagagatcaagaacagatggaaggagtacttcaacaaattgttcaatggagggaatgagagttctacaatagaattggacga

SEQ ID NO: 174937 - DNA, 445 bp, Zea Mays
tcgatagagggtgaggctgaagtgcgcgataaaatgagcagagcacacacactcctatgcgatgtctatcatgaatttggatcaactatagcttcatttgatggtgaggtagctctgtttggtaaggagaaggcagtcttaccatggtgtttaggggcctgatggggtattttgtgttggttacctacgaaggcacctcaaacgttcttgcgcgtaggggttgctgacactttgagccgcttggatatatcgataaggatttcgatcacagtgtgtataatgttggggtaatcgcacggtggagttgactgctgatgtgttgtttgactgcatgtggggaccgcatggtgtatccatggtgaagcagaggtccggtcgaggcatcgaacaagtgattaatatcgattttcgcttttcattgatttacttttagggacacacttgt

SEQ ID NO: 174938 - DNA, 970 bp, Zea Mays
ctcggcctcgactctcagcgggaactaggcaggcgcaagtcaaacaacaagtataagaccatccctcaggccataccatctacagggtcatggagacgcctcctcacagtacacagccaactcccgtcctccaggcagctccccctggcctataaataggataccctacggcttcaggagggacatgcgaacacttcacaagttttctcctccacacggtattggcactagcctcaatcatccctagggacttgggattcttctctctgccgctccgcttgtaaaccctactacaagcacttaggtgcaagtaatataagtttcatgcccctctgttggaagtaaggcctctgtttgcccgaactagaataaaagatttgtgtcatcttgcatcaccatctgggtctgagcacgcgacattatttcactagttggttaggtccacggatgcaaacaccgacagatacattaccatctagctaacacaagaactcgcgcattacggtatcattatttatactttgacatatatgtatggttcctaaccgttggtgccaaacatcaatgatccctagagtttgcaaaccggcactagcgtgaggtgaggagtgatattccaaccctcttctcagcaaaccggcactagcccccaaattaactctaaaacacatttccacccgtctaaacaatacccatatcaatacccacccacaaaacccagtacaattcaatgcattagtagggatatgctaaggggaaatagatattacagtacaatatatagaagaaatctgcgctattggatttggatcaggtggatcaaaattcagttgttgggagtgcctgaaacactccaatatgtgtcagattgtcggtccattccaactagttatagccttctagttgataactaattatatataagacagtcagcaagccacagtctctgtcattatatctagggctcgtt

SEQ ID NO: 174939 - DNA, 479 bp, Zea Mays
tttttgtgtagccaattcatccctaggatgacatctaacccttgagttcccattactactaggttagcggggaagtctatcccccttatttcaatccttagattcggacaaatcctatcggactgaacttttcccccaactgaattaactcttacatgcgggatcattggttctatggggatgttatgtgattctacccaagatgtagaaacaaaagaatacgtggcactagtatcaaataataattttgctgggtaggattcaactggaaacatacctactgccacgtcctgggcatcctggattgcatcagcctccaggtggttcacctttccacggttgtaggcctatccacggcctcctggtgcttgctgtggtgctccttgtcttgctagggcattgactgctggcggctgctgagctgctttctttggatagttcttcgccaaatggttttgttctccacagtagaaacatgc

SEQ ID NO: 174940 - DNA, 303 bp, Zea Mays
gtacattgcttccgaacacgccgttagattacatggagagtatataacccgtgtgcaacatgtgtttgacactattgcttacagaacatttctgtggcatgtgtaatcaatccatattcacacacacaagataaattctattgttgtatacatgacaaatgttatacatcttttttgggggtagcttacagtgatgttagcatgttgatacacattcaatgatactacattttcaaattttattttgaagtttaccttttcaatttatgtggacaagtggtgctactatagtgtttcagaata

SEQ ID NO: 174941 - DNA, 966 bp, Zea Mays
caagactgcgctctaaagtcgacgaggcgcgggacgctgctcgggatgaccccaacccggcatcaggcacatcagcacaaacatccatcgcgccaccatctgccagttctgataacagatcctctggaaccatgtcttcaagagtttgatcaaagttcgccagagataattcttgtagaccaatgagggcagacaaagcaggagaaggaacaccactactttccccactggctatgtagcgccgactgttcttccgaatcagagggatttcatcctctccttcctcctcatcttcatcagcaacacggatagtacacccattggggtcaacaacggtcagatcatacccattggggtcagcatcagcaaaggcaggcattgacacctcatcagtagcaggaacagaaggaccagcagcctgatccaagctagacactcgacgaagacgtctcttcttctttttctgcccctcagcaggaggagcgggcggattggctcagcaagggcgcttcgggcgaacactgtcaggcctctgaatatccgaggctttgctagcttctgggagaggcgctgccaccggtatttcagtaggggccgcatcagaagaatcctcagccaacatatccagcatggcacttatctctgcatcactgggatccaaaggcacctcaaagtgaacctgtcgttcatcatcaggaatttcttcaagcgaagcaaccaaagcactaacttcctcggcagagggtcgcactctaaggcccaaaccgccatcaccagcagggggattcgacacaaaatggtaaaggccttggaaggaggcaagttccaggtcgagtacgcaacaggggcgccaacatttgataccttgcctctgagtatcatttcgagccggctcaccaagtccacagcagggattcttctgttggttacccgggttgaattagctaggcctcgatacagacaggc

SEQ ID NO: 174942 - DNA, 567 bp, Zea Mays
agcagcagcatctaataaccgcgtggtggcggcaggccacttgagttcgttcgttaggcttgtgggtgagatcggtcggtcgccgcctagctagctgcagatggagatgcatgggaaggagcgatggaaggtggagggtttgttgccgctctgtccatctccatgcccggatgccggcccggatgctcgatccggcacgccggagtggacggtccggtcatgagttttctcctgcagctgcagaggagcacagcgctgcccgactgcatgccggaggggatggaatggaatcatgggaagtggacgcatcttgaagccatcctcggcgactgcataccagagcaccatggagtttgttttaccagttcaacttaattatacccggattgccaattcgtgcacgcgtaccatggcagactgaacacacaaattcaatcgttcgagttcaggacaaatgtgcccagatcccctccactcattttttctgcagggtcactggttggtatctcttctctctctctctctctcagaaaagaggaccaggacacggcacatgggctacacaac

SEQ ID NO: 174943 - DNA, 676 bp, Zea Mays
atttattgaacttcgctcatctgcactcgattttgttccacattcacatacatattgtgcctgtcctacagctccacatactatatcttctgatcaatacagatttgaccttgcaatcgcggtttcactacctcttggtaagtatcatgaaccagcctttgattgtaccatcctttgcattgtgtttcattagatactagtaagaacttaataagacacggtagtgtgtgttcctattcacccagagagcgtgtagttgcttattagggataacctttactgtttgttcctgttttggtgtttccaatggcaggatccgatgacgagattgaggtagtcattcccacacaattttctgattgtgtcagccgtgaagacttcgatgttatttgcaagcgtatggaggaaaatatggaggaaacggtccacaagtctatccatgacaattattgcaatggatcttggcaaagtgctaaatagggtggagagacggataaccgagcttgtcgatcgggttgccacattggagacacgtccactacatcagcagcctcctccaccaccacaaccccagcagcatccaccacggcatcagcaacctccaccacaggctcaagatgatgccattttcgatgcacgtggcaattttgatgaggcagctaccagagacgcccac

SEQ ID NO: 174944 - DNA, 776 bp, Zea Mays
gccgaatgcaccagctccactatgaggtgatgtagtcagctcttgagatgcgtacttcaatgatcggatttggcatctcaagtgccagtgaattgctgacgacaaacaccccaacggttaattttagggtgatctatgctgaaactaaaaactgagcgagtggcaccggtagcagattagtcattaagaaggtgcagccatactttttgaagaaacaatcgtagcagaagcccagctctcctcgataatacatgtctgccagttgagactggaatgtggcgatgtcatcggtgttggtggccaccgtcttctctattgtgctccattgagcgtcctatgccttgagccgatcacataattgttggggaagtttggattgtgtggcgatgttcttcgattaagcctcaatctgcttggactgcactgccaagcattgtccatcttcgccttgtgtgtcaagtggatcggatctgccaaatctatgatcggtagtccaataccaattatcagcagttgcagcacgatcgcttggggaagaagaggaggatgggagcggcagtagtcggttgcgcccttggttccaacgttagagttgggtagttgccgcttccttggtaaccatatgtatgacgaggctgtcatcacatctgttaccggagccgctagtgctttctccatgatagcatctcgggggtgacgtcaaacgatggtgaggcatggcatagaggggctgatctacgggtatgtaagtgtatgccatgtgtccggcatgcgcg

SEQ ID NO: 174945 - DNA, 431 bp, Zea Mays
gttttttctcatctcatcagcccaacaaccgagttaaacaaaatcagaactactcttgtataggaaaaaatgataatatctggcataccaatattaccaagactgacaatgttactataattgctagtgcgaggtgcactaattaacagattgtgttctggatcaaacacctttaaccaaccatcaaatagcctaatatcacacccagcctcttctagttgatcaagactgacaatgttactcttcagctttggaatataataaacactagtcagtactttgtttcttcgcctgcaacagccacatttgcttctggctgtttcttttctttcttctctcttttctaactagctatccactaaagaaaacagcaagaataaaaagctagctatccaacgagattaatactaactagtgaatcttattcagac

SEQ ID NO: 174946 - DNA, 480 bp, Zea Mays
tgcaccgtgagcaaaagaattaaccgtccgaacagttgcagccgtgaagaagggagagaaaaatggagcggcatgtgcatgcatgagattaggagaaggagaaggcaactgctctcttcttgtaatgggtgttgtgcggctgaacaaaagaaaactgcatgcaggaaacgttctccattaccacaccaaatcccaatcatttgatttcctgtggcatctcctcatgtggccctttgcttagctctatttctgaccaataaatttgcaccatgtcgcttaagttcatgaattatgaagtaattaatgtattttgcatcctaaattaggttcaactcgttttagttgcgttaagtttgcaatagtgtcgattacgtgttaataacattattttgtcgcgtcataagtttaattaattattttatctgttgattattaaaataagcaatttagcgaaagctaatttatagtgtttaacccgcg

SEQ ID NO: 174947 - DNA, 659 bp, Zea Mays
gaaagtcgctggggccccagaaagtccaaaaggcatcactcgaaactcatagtggacgtgatgagtttgaaacgtcgtcttgtgttggtcctgtggattcatgcgaatctgatgaaatctagctctaagatccaaagtagtaaaccaagcagttcctgacaattcatcaagaaattcatcgatgattggcactggaaatttagttttgactgtcagggcattcaagtggcgataataaacacaaaatcgatatgtgttgtctttctttttaactagaatgactgaagaagcaaattcactctgacttggctggataattcctgtcttcaacatatcagcgacttgttgttctatctcagtcttgagggcaggagcatatcggtatggccgcatctggacaggtcgagcccctggaagcaagggcaccttgtgatcacaatcccgaacaggtggcattccttgaggcacctcaaacactgtcgaatactgatgcagaagctgctgaatatcatcagggagtcctttaagaattgactgctccttatccaacaggtcttgaatactgcagacttgaatcagggcagtctgcatgaccgaagcttggattcctcgcaacatcacagtagaattccgaagaggaatgcacaaccatttatgtg

SEQ ID NO: 174948 - DNA, 712 bp, Zea Mays
gctaaatggtgaccaagccaacgaacgcctacccaccacatcctggggacacccgggagttgaagagatattgccatagcttccaataggggtcgatgcccatgaaggcctcacaaagcataatgaagcacactatgtggaggatggtgttggggtggaggttctgtatctctagctttgtagtagtgaagcagcccccgaacaaagcgatgtagaggcaggccgaatccgcactcgtaaaaggatgcaagcacaaccacctctttgttcctcgtctgtgatgcttcaccctcatcttccaaccgccatcctgagactttcgttggtggatgaaccccttcttcaacccaagcaggcgtctctagcaaatcgagcaaatcaggaatgatgccatggatgtgggaaggaagtagttcgggcgcagaagcagacaaggagccataggggcaggaaggctttagagcagaagtgaaagtaggagtgcagggagacaataagcataattgacctcacaaactcctcctctgtttttatagacaaagcacaaagaagcagagcggtgctgagtgaacaggccaccatgacctcaacaagggaggatccgccactctggcccaccatgaccgaggcgtgaacggggccaccacttcaactcctaggcgtcgtgggcctcaggcaaggacccttcgcctaaatggcaacaccccttggg

SEQ ID NO: 174949 - DNA, 353 bp, Zea Mays
atatttcaactctttcttcgcaaaaacacacttcttatgcttcaagaaaaacttatgttctctgagcttggacaataccatcctgagatgtttgtagtgctcctccagactcaggctgtagattaatatatcatccaagaataccataacaaacttccgtagaaacggttctagcactgtgttcatggcacactggaatgtcgctggtgcatttgtcaaaccaaaaggcataactcggaattggtaatggccatgatgagttttgaacacagttttaccctcatcctcctctgccatcctaatctgatgataccccgtagtcatgtctagacttgtgaaaaactgagttcctg

SEQ ID NO: 174950 - DNA, 714 bp, Zea Mays
cttcctgagtgcttccagtatcattccattagctctttccacctgtccattggctcttgggtgtgctactgatgcatatttgatctggatgctccgttgttcacaaaaatcaaagaattcagagctattgcagttggatctcaggccagttatgatgctattcggtatcccaaacctgaatattatatcttgtatgaattccactgccttggctgaagctattcggtaaaccaaatgtattctatccatttggtgagtttatcaatgacgaccaacacgtgagcatagcctccctgagctttcttgaagggtccaatcatgtccagtccccagcacacaaatggccatgttataggtatggtttgcagttgctgtgctggtaaatgctgttgttttgacaagaattggcaagcttcacatctctggactaactcggctgcatcactctttgctgttggccaatataaaccagacctgaagactttcccaaccatagttctggatgttgcgtgtattccacactgtccggcgtgaatctcatctagtagctgtctcccagtgatcgaggaaatgcatttcatgaggactcctgttgcaccccttctgtacagtgcgtcccctatgagggtgtagtgggtcgactgtcttgcgatgcgttctgctgcggccttatcatccggttcttcttcattctttatatacctgatgataggt

SEQ ID NO: 174951 - DNA, 1405 bp, Zea Mays
caacgaaggggtacgggaggatcgtggccgcttgatctaacacgtgcgcctcagattagaactaggttttccccaaaccggtaccgaatcccagccgtcagatcaagatgggcggctacgatctaacacacccaatcgttatccccccttctaatctcggacgttggctatccaatcgacggcgctgaagccatctgcgacctcaggcgaaaaatacacggcggcgtgctcacccgcggtgaacaccatcgccggtcacagtcgattccaccatccacgcccccattcacaaatcgaacccgagctacagcattactagcccatggcggagctataggagaagttctcaccggctgttgaggaggttgcgagctcgcccacgctgcgcggcggctcggccgcgagagtcggagtgcggcgacaaattcgtgggatccccgtcgaattggtggccgaagtagttcccacgctagggagggaaaagggaaagccgagtgtggccatggggaggcggcggagaagcccgggcgcaggagggagctcgccaaggaggactggccgagcggacctggcagggagccacccgccacgccatttatattcgggtgcagggagaggaagaggattacggaacccagctggcgcgaggatcggtaggtagttcgggcaggtcgttaccgctgcgaggaatcggggaagaagatccacagggcgcgcttggatggaacgacgaggaggtgaggccgagttcatattgccgcgaggtgacggctgattcgcgcaagctccgggcagggtcgttgaacccgcgcggtttttttgcggagggtttgttagcgaggaggattgcgacggagatcttgagcggcttgcaacgaaccgagcaaagtgacggatccgacgagatagccccaccactcagggtcagcgagtacgcaggtgtctgcggaacagggatcccaggcgcgcgccccgctcgcgggacccatcagccagaagcccaccgcacagaaacagggggaaaagggaaagatgggctggccgagtgggatctgggccgacgcagttgttttgcccttttctcttcttttttctgttttctctcccatttcttttcaaattccaatttcaagtattcaaattaaacttaaatccttattttgaactgcagattcccaaatatatccaataaaaaaaatcctaatatgaagataacacctattatttataatatttttattttctttatagtgtatattctttcctaattctatttcattctcttttcttgattccttttctattttaaattctatgtatgtatatatttttaaacttaccttatacatctgaatacaaatcatacaagaaaactttagcatgagatgtctatttatttatttat

SEQ ID NO: 174952 - DNA, 490 bp, Zea Mays
gtcattattgcaatagagagcatgaacaaggtgatgtaactaggtggagacccaagtgaagatgttggtgagggtgtgaaaggtgtcaaacttgagctgtttaggaaaagtctagagaaaatgagagaagtcatccaggatgactagatagtgccgataaccgaagatgctggacatgggatgtcctaaggtcatagtggatgaagtcaaaggggtgagtaacttgggacatagaagaatagatgggtaagcaagtatgatgcccaatgtggcagtcatggcaaagcgagattgtgtcaccacgagggcaaggaatggccaaggtggctgaaagtcgagagaggacgtcatggtagggatggtcaagacaacggggccaagttgaggcaggggcagtggacgcacgagcgcagggttggacaaaatgggcggaggaaggtggggtggggaaaagattaggttataggggtcgaggctatcatagagagca

SEQ ID NO: 174953 - DNA, 869 bp, Zea Mays
gcgctgacaggcgggccagcggtgtcagcgactgaggagggaggcgggctgaccagttggacccagcaccagggggcgcaggcgctgaccggcggggccctggggtagagcacgggtgagggtgcgaatccgagctgtcgggtgcgaaccggacggttggtattagattacgtttgattagatccgggccacccgatctcagatggacgcctgggatctaatcggccaggtccctcggccgctagcggtggcgccgctcgcgtccacgattgaggcccaccggagacaagggcacgagcgctttgaggcatgctgggacaccgagaagagctcggggaattcaggggagtgtggcgaactcggctaggggcatagcacgggcacaatggcgctagagggggcggttcacagcgaggtggctcggcggtggcacaagactactccagcgagcaatctcgcatggttaaaggcaatcaaggggaaaataggggtgaggctgggttgcttacctcgagagaagactctaggacccttgaacgacggcatggacacgataagggcttgggtcgacggcgacggctctccggctgcgcgtggaaagctctggtgagaacgggcagagggaactagagagggagagagtaaattgaggtgattctcaagttgcaggcaccgaggcagaactcaccgaggcaaaaggcacgataaagccccaacggtggcggcggaacgggcgtgcgggcacggcgagcggcgacggtcttccgagagctctgagaagagacaatgcacaagcgaaggcgagctagggtgtctgcgagtgggggaatggcagagcagatgggaggggcttgagtaggggttgggcg

SEQ ID NO: 174954 - DNA, 416 bp, Zea Mays
cgccagcccgcgccacgctctcccctccctcgctgcccgcttggccccacttgtcagccatgccccgctctcgctctctcacgcccgctcctcctctggcatgtgggtcctgaccgtcagccccttctacctcgcccgtgctcggcatcggcgcgatccccactggccaccatcctccctctctctccaccattactcctgcaccagtgaagttaggcatcgcttcgccccctcttcactgtgctcgcaccctcacacggtatcccgccccgagccatctcatccccagcgttgtgcgccattagcgccgtcgctgtgcacctcaccggcgccagctggcttcggttgtttccctcctcgggcgcttataaaagggccacccgagcaccacttcccctcgcatcggcctcggccac

SEQ ID NO: 174955 - DNA, 694 bp, Zea Mays
ctcaaaactggagaggtccagacatcacaatgaacgagttcaaaaggtgtagatgtattagaaacagaactagtaaaaggcagcctagcatgttttcttagctggaaggcatggcaaatgcggcgagctgctttattacactatatagctgaaagcttatttagggtttgaacgacggctggtgctggatgaccaaggcgagcatgccacaactctggagcaacgacagcaacatggcagcgaggcgacagacgatgtggaatggtgtagagatccccgttgctattgcaccgaaggaggaccgttttggtttggagatccttaacagaaaaactagaagcgtcaaactcaatggaacagttattgtcgtgagtaagctgtcgaacagataacaaattacgagcaagctgaggagcgacaagaacattattaagatgaaaataacgatcagctataggtaagagagatgtgccatggccagatgaagggatggactgcccgttaccgactgtaatggagcacagtggggaatgacaacaggagaggagtataccgtcgttggaggacatgtgggatgtcgcttcgctgtccataacccatgaaggggagtccggcaccgccatttgattaagggcagcaatcaaattggttatattccagccgcctgaaggagcacctgcggcatagaactgcg

SEQ ID NO: 174956 - DNA, 348 bp, Zea Mays
cctttgtgaacaaaaattgtatgctaaccttgagaagtgcaccttttgcaccgacaaggtagtgtttcttggatttgttgtatcaggacaaggtgtggaggtagatgaagaaaagatcaaagttgtacgcgactggatgcctccatagaatgtgagccaagtgagaagcttccttgggctcactgggttttaccggcggtttgtaaaagacgtcagtactattgctactcccattaatgaattgaccaaaaaagaagtacctttcaaatggggagaagcacaacagaaggcatttgaagaattgaagacaaagttaacaacaaccccagttcttgcactcctagactt

SEQ ID NO: 174957 - DNA, 819 bp, Zea Mays
catcttagaagtcatgccttggccttatcatgcactaaagagaagagaatgactcaaaccctaattcaaatcccttataggcaaatggagccctagaggggattatggcaaaaagtctatgtaaatcacattgtcttgacttggactaattataaaagttgtagtacacttaataccctacaaaaaaagaaagagagtgaccccaaaaagatttcataaaaaccccaaaaaggtcaccaaagagaagaacataaaagaaaaatcaggtttttcttaagttcaaaaccgaccctctttcaaagatcaaacaagttcaccttgttcccaacctcaaaaccttatggcccaattgacaaaatggcgcccaaagacccctagaacaccctggaaaagtttgaacccaaccctaagccatttgacacgacttggcatggcttttgtatcggtgtggacagctcggacagagccaacttctcacccccatatctctctaccccgaccatatctttgcttggaactcacatcgaaaaggtaggatttggtgcagagaagagaccgtacacgggggttttgctaagatctgcacgttaagtcgaccaaatcggtcgttgaaccctggtagaagtaaacccccacgtgttcgacgtgggctgacactcgggggcgcgtccagagcacgcccgcaggcgaacccccacacgccctcggtcgccccgtgcccacacccgcgccgcggctataaagcccaccctagtgcacgaccatcttccccgttgcctcctctgtaccacgcctaactctcctgagctcgctcgcagc

SEQ ID NO: 174958 - DNA, 578 bp, Zea Mays
gtcgagctgacatggcgctaacatggcggagtctggtggttgatcagaccggttcgatgcaactgacaagacaacttttcttcagaatggtcactaagtagacaggcatgtcgaaggttcggtggtgcaccggaccggtattgttggaggtcgggtgtactcatagacatagaaatttttggggtttgtccccaatggctacttgggtggttgagagctataaatacaccccaaccaacccattcaatatacaagagatgagcattcatttatacattcaataacaatactcccaaagtgatcaagtctcccaagtgccatatctgagtgatttgagccttgagatagtctagtgcctcgtgagaaagatggaaaagagtgtgtgatgtgttcttgagcttggagttttgactcacgtttattgtaaaggctagcgagaggcttcgatgtgtgaagtgccttgcagagacttcggtctcccgtttaagaaaatgtagaggactatcgatctttggaatcacaaaagatggttgaaaagatctggtcctttgtgttttcttgtttgcgatttgttttcc

SEQ ID NO: 174959 - DNA, 667 bp, Zea Mays
cggagacataatcttcacttcactcaattccataaccttcgtcttgctagactcaacagctgagaagtcaggcagttccgctgccctctcggtataatatgactttggttggtgggtcagaatctttacttttttctgttttggcatggcggaagaagtcttcaaggcactttttcttttttgcccatttttccgtgcagggaagcaataatcaggataaatgaatccaatgacattaattcaatcttcttttcccttgtgcaccaaaggtagtgttcatagcttcgtcttcagccttggtatgagcccctaacatctcatcactagttgctttgatagcttcaagccaatcatcgtctagctcaccaaactgatttctatactgataactatattttagataagccaatccacctttaccagtaccctcgcttgaactagcatcaactttcttcggcatatcccactcgttaataaggggccataccttgtaagctatgtgttcctgaacaagatctctattactaatataactacatacatcgttgaaagcaaccaggcaggcttgggtccttttgttattcacaatagctggcctcttgatgccgaagcgagattggatgggccactgaatcacacctctaatatcctctctcttatccaagtc

SEQ ID NO: 174960 - DNA, 604 bp, Zea Mays
gtgtaacgtcgaatgcctccccttttatagctgaaggggggcatgcacaaagatgctgggccccgacatgtgggcccaggccccgatatgtgggcccagggacatcaagaatatagcgcttggagccactaatgtctgctgccgaggcaatcttcttgcgcctgacgcccgagatctgcgtatcctcggcgtgcaggggaagcttcttgtagaagggatgatgagtacagtgtgctgctcggaacgcgcgcattgttctccaacagtccggtcaggcacgtcgtctgctggatgaccttgacgccgtctgccaacggattggacagggcgcatttaatgtcgagagggcttgtcgcctgtctgccggtggcaggcggcgcgtcctctccataataaatgcagaggttgcacggctgtatgggccttacgtcaggctcggcccgttggcttatgtcacgggccactagccttgcggcagccgcgggactccgcctgagcgggaagcaaggggcaagggctggacacgtgttggccccgaacccctattcgtgccggggtcctcctggtcccggaaccttgccaaggcccggtccttacccggagg

SEQ ID NO: 174961 - DNA, 792 bp, Zea Mays
tataagtcgagtctatacgcgttaggagttccttaaattgtgcttcacatatagtgtatgattgtgtttatgacttgaatagatgccttcgagtgaactaataggttcctaaggaaattaggtgtaaggtgtttatcgtgacgctttatcccgaaaggtgttaagtcggcgcataaataagagatacgtgtattttgtgtagtgtggattgattttgagtgcatggtcgcaagaaacgaattagtgcgcatatagacgaggaatgagtgggatgaaatggtgacatgccttcgtagtcatcatgtcgtgtgttcgtgacctaactgaaggtcgtagagaaaggtcgattacatgtgtgttattattgtcaccttgtggttctgtatgaattgcaaggtgaagtagtaggctctctgtgtgatgctagatgtctaggtagacgttcgtgaattgtggtgctcggaccgtcgagatgaaggttaagtcggtcgatgcctattaagtagttaaaatgattaatggaataatcttggggttaaaactagaaactagtgttctcgcacccgtttgggatgttgtagcccaattgcgcatggttatgatcgcgggtaaaatctgtagtgctcatgtggtgtctaaactaaaatgcaaactagtgggtgaaaagcgctttgatatacatgtatgccgaaattgatgattgtggtgaatgcgttgattaaatgtgtatgttagttctagcgcgcgaaataacttggatggaaattagtgagtctacttgttagtccttat

SEQ ID NO: 174962 - DNA, 534 bp, Zea Mays
aacgtcccatacggtcacgcttcggcatcaggaggccatcgatcacaagtgggaacgaagtgcaagcatgtttgatgtccttcaacacggtgtgtacttacattggcaccagggatttggttcaagagcatattgcttacaaggtgtggccgcttgtaaatgaccgggagatgctgaaggagactgctgctggctccagcgaaggtggtctggtttatctaagatacacttatcgctgtagaagttaattttacgagccgaatgatgaatggcttgagggtgttgaggctaccagcaatgagctgttggaagcttatacaaatgtagaggacgaagccatgacaattgccttcggcgttcacggcaagatgagactaaatagagttttcgacgtgatcagttttttttatcctgattacttctttcatgtccgaaaacaagggttgaaaagaaaagtggcaacttcatcctcttccgccgcgcctaaggcgaaaaagctaagatttttactcataggctgaaaccaggttgttt

SEQ ID NO: 174963 - DNA, 347 bp, Zea Mays
atacataaggcaagacggagtgtaaaactgctgatgtgaaggatagtgactaacttatctaactactgagaattagtgataaacctgggagagagaatgcaaggagacagctactactctgctactgcatcaaaacactgttcagatattttcttttctagaggaatacatttccatatttgcgggcataagtgagttgacaggattacagtgtgaactttactgtttatgcttgttcttaatgttatattttaagaagtttaacaaatttgctcgttttctacgccatgcctgcaatctgcattctctgtgtttgtttgctagtataattagctaaagaagactgc

SEQ ID NO: 174964 - DNA, 408 bp, Zea Mays
atatttctttgttgtccgggagacagtataggaaatcatcttcgttagtgccattgaacactaaggcccccttcggatattttagtttctgggcatagtgtctggcttctaagatttcttctttggataattttttccctgaagcatgtcgaataatgtaatcaacatcttcggtcggagcttcgggggcaggagattttgctttttctatcttattttgccccgctgccatgccagtacctgaagtttgttgctcagctttatcttcaggcgcggtagccttcgtcttaatgggcactgaaggcccagcttccgcaacttccttagtaggagcaggggtcaaggcttttgtggtctccttgacagcgtctagcacgctggccatcctcctcctcttgggagttgtgg

SEQ ID NO: 174965 - DNA, 469 bp, Zea Mays
cagcgccccatctggtctcgcttcgacctccgaaggccaaaggtgaatactgatagcgatgttgaagcgtgctagaaggcctttagtactgtgtgcgccttcattggcacgagggatttaattcaagaacacatatccttcagggtgtggccacttgtggagagttgggatatgccgaaggaaactactgccgagtccaatgacagtggcctagtccgattgaaatataccttcagatttagggagaagtttgatgagccaaatgatgactggttgaaatgtattgaagctaccagcgacgagctacttgggacatattccaaggctgaagataatgctctgtccgcagccttcggaggtcggggcaagaaaagattgaacaaggtatttgatgtgattggttttgtataccctgactaccattaccgctacaagggcaagggaaaaagagaaagactgccgcttcggc

SEQ ID NO: 174966 - DNA, 570 bp, Zea Mays
ctgagtgtctcgacgttggggaatcccccgggcttccatcgcggggcggatttcggaccggcgcgccgagctcgccttcgtctcgacgggcagtatgttgcgtctctctggaaacatgagtgaattccacggaagcgtgtgtcgtcgggagggtagttgtggtcgttgggcgagttcttgatggcggtgatggcgccgtcgcagctctctcgcacgccggcatccggaggaggaagacggcaccagagtcgtggattttgtgatgaccggtcaggattagataatgagttgggagagagatagccgttagatggtagatgcgcggtgcaaattttatcgtagatacccccctggacgattcaatctgggtcgtaggtttaatcggacggctcagagtgtaggaaactttcataaaatatggatcctagatctcgaaacaaacggttggcgttgtgtaccgcttcgcgggcggccaaatctaatctgggcacttgattttagatcggatggtcaaaaactctagataccccttcgtggcgccattctttctaaagagaccctggggatttc

SEQ ID NO: 174967 - DNA, 504 bp, Zea Mays
gaaacctcaaagccagagggccatcaccaatccagaaatttttccaaaaactagtacgacgaccattaccaactgccatcttacaatgtttaaagaaactctccctaagctttaagagttttttccaaaaatgagagtcagtctgtctttgattaacagaaataaggggttttcccttaatatattttcagcaattattctctgccataaactattagtattttccaaattccaaagccatttggatagcagcgcatcattcatagaacccaaattcaacacacctaaaccacctaagcttttggaggagcaaactatctgccaattaaccaaatgcatttttttccctgggaaccccttgccaaaggagactttttctgaataaatccaactttctaataaccgatttaggagccggataaatcgataacatgtacagaggtacattagaaagagaactgttcaaaagggtcaatctgcctcccagactcaagaacctcctac

SEQ ID NO: 174968 - DNA, 548 bp, Zea Mays
ctgccaaaatattgaccaaagccgaagcttgtttgctgcatcctcaaccgaagctatttactttgctcaagcttcgtaacaagaaagagcttcggcaaagtaaagaaaaattttcaacattcaaaaaacaagaaattcaatcatcaaatggccagagtgtgttccatagctagggttacgcgcgacggagaggaagccgaaggtgctgaaactgccccaatctccgaagtgatgaagcgctcagggttggtaacatcggaggatgcacctgccgctgaagcagaacaggctgatgttgaggagactgaatctgaagatgattacagcgatgtgccaagtaaacccagccacctagatttcgggaaatccaccatctccaaagatgatttacctaagctgttgaatttgggctatttcaatgaagcgaagaaagagctggttcgttttggtggggaagagactacgccgaaaccaggaaaggatgaagtagtggtcttcaaaagtttctttaaagctggtttacgatttcctttgaacaagatgattgc

SEQ ID NO: 174969 - DNA, 460 bp, Zea Mays
ctcgtgtccttttcgcgggatcattaaaatgtctttcctcgcaaacatcgtgctgctcgtgtttaccatcgtcgtgtttgcaaccacctctctcactcggtcgcaacataattgacgacgaattcgacaaccatctcccgcgctcgctctttttatataaatccaccccgccgtcgcacaacctcctatcttcccccagatccaaatcgtgcagggcagcggttactaggtacgcagacatccctcttgtttcccatcaccaatccgcctccaatttcgcgagacccaaatcacacgagcatgctccttcggttcctagcgacacaggtaagccttctcctcttctcccttttcctcccggcggtgtgcaacagccatttttccccaacaaatcccctcccacggatgcctgccttgaagcccatcaccgacagatccgtccagccaaatcccccgtagc

SEQ ID NO: 174970 - DNA, 871 bp, Zea Mays
aacaatgttcacgaaaaagccgtgatttttcagaactgaaatacatttcgaatatagaaggtgagctataatatgcttttgaaaagagaagtcacattctaagagaccaagaggcttgtttacactttgcaataggggaaaaatacattcagagaaggcgctagtgtcgcaaatgattgctgctgacaagtggggttcgtgcggctagcgtggcatgtcgagattggttaaggcaatgcacctactatggaatggcaatgtggaataaatctatgttgtagctatagactgaaagggtacatttccatctatactatcagatctaagatggagggctagagaataaagaaggaactacgagatgaatgatgacaactgaatgatgacaacgagcaatggcaccatggtcaaaacatcaacatcacacatggaaagatatataaaccatagtcttatagaggaaagcacatggagcaataattgggatcaataaacttagttgggtcaaggaggttcactagggtacaaagagggcacacaacatggaggaggagcctaagtacactgatgaaatcatgatgaggttgtgagagaaagagaatgagagagagaggaggaggagagttgtgcaaactccttccttaccatcaagtagtgattgacagatgcccatgagaggtgtggtagcaatcgatacatttgatggtggaggctcttgctccgatcatggctaggccacgtaatggatgaagggcgaggctaggggtgcacacggatgcatgatggaagacattggtgcctttggcctcttatagggtggctacatgcaatgaaaacggaacaaatcctaagtgaaataggattgtgccag

SEQ ID NO: 174971 - DNA, 609 bp, Zea Mays
ggtagttccccgatggcaccacccttttgacgactcgctcgacgacacactcgaatccgccttcctggttgccgcgcgttcccagtggcggaggcgatctcccacggcgtcgctgcgtcggggggggggatagagtgctcgaattgccctctaccagggacgctactcgtcatctccgatcgaaaacgacctgggctttgatgccacttgttaggtccctagagcttgggattggcgagagctcaacggagaggatgatcaagacctcgcaaggaaagcacagaacgcacacatgatgtaattttggatggtctgagcaaaagtgtagagagccgccacctttttggtcctttttgtttatatagattattcagtctgccgcccgatcgacctgcctctattgcgaacggcgccctgacgagcacgacgcgcgcaccgttcaggagcgagaggatcgggcacgatcacacgcgcaagcacgctttatgtgggcgcctaacttggcgatcaggaaaagcccctgactcagccgcttattacaactatactgaaataaaacgtaagccaacagagaactaaaactaactaatagacgatgccgttgtatcc

SEQ ID NO: 174972 - DNA, 673 bp, Zea Mays
gctaaaggcacctttggcattatagtcggctcttcagtcctctgcacggcagtaatagtttcttttgttttggcagccgaagaggtcccttcgccaaattcaggtatcacggccggttcaatatatcgcggccggtgagttaagaccttcagctttttttcccttcggcacagatttgtctggggtggccaaagtggcagctttcctctttttcccttgccctcgcagtgggtagcggtagtcggggtaaacgaagccaatggcatcaaaaactctgttcaatctcttttttccccgacctccgatggctgcggatagcgcattatcttctgccttggaatatgctccaagcagttcatcacttgtagcttcgatgcatttcagccagtcatcgtttggttcatcgaatttatccacatacctgaatgtatacttcagccgaaccagatcaccctcgctggacttggtaatggtctccttcggcatttcccagctatctacaagtggccatactctgaatgatatatgctcttgaatcaaatctcttgtaccaatgaagaagcagacggtaccaaatgccttttgacaagcttctgcagcttcatcaatttcaaccttcggcttttggaggccgaagcaggaccaaatggggcgcataatgacttccttaatt

SEQ ID NO: 174973 - DNA, 569 bp, Zea Mays
tttcctatgaatgctaggggaagaggcgggccaccagcccatgtgggaggtgaagccgcggctcagctcgctctccaccaccgtgaggctaatgaacacccttgaagccaagcaccggtggaagagcgccgctcctacaaggtcgcgcacctctagtagaggaaagacaagaccggtagcaccggcccgctagggaggacaaaaggcacgaactctctagcggcaagttcatcggggtggatgacgctggcgcaaacccttccgccgagcgccggcgcattccatccaagcaggcggtataccattttgagcactcactcagtctgggcgcactcgggatgaagtcacaaggccatggcaaactacggcaacgcgaagcagagaccttgaaggcaaaggggcacagagagctcggaggtgaaaggacaccgcgagtgggagagaagcaaggcatggctgctactcgagggatgaacccctctttaaaggcagactcccctgctcccgcctcgaagcgccacgagaagcctcccccaatgcacaccggggtatccatcccatgacacgaa

SEQ ID NO: 174974 - DNA, 443 bp, Zea Mays
tgcgtgcccagatgcagcaagaacgccaggagatgcgtcaggaaagagaagatatacgcccggagttgtgccaggagagaagggcgcaacaacagcagctgcaacaacaacttcaacaacagcagcaacagcaacaagtaccgctgcctccaccaccaccaccagttccacctcgtgataagcaccgggagtttatgaggcagaagccaccgaccttcgccagctcgccgtatccactagatgcagatgattgactgaaagcaattgagaagatgctcaacattgcccaatgctcagacagggagaaagttctttatgcctcaggtcgtctgacaggtcccgctgctgactggtgggattcatatactactgcccacgatgttgctgatactatcacttgggcagagttcagtacacagttcaggaactaccatattccagct

SEQ ID NO: 174975 - DNA, 306 bp, Zea Mays
cggaggcggaccagtgatataccaaacccaggccgcgaaacaaaccagtcgccgacctccctccatccttccctctcaggcacgcagctcgcgtggcattgcgttgcgcggcctgcttctctccggtctccaccgcgccgcgatcgacagcccggccagcgagctcctctcctccgccttctcctcttctaccgctcccgatcacgcggccgcgacatggaggacgacgaggggaagaagcagcaccaacggatcatccccaacgccaacggccacgtcatgatcgtggtccccgacgacgcgcac

SEQ ID NO: 174976 - DNA, 1117 bp, Zea Mays
aatagagataaaggaaaaatagaagaaaacctaagtgggcctcgttcctcatttctggcccaggcgtattctcccacagcgcggcccaaccccttcccttgaaacaacgccggtgggcgggcccggtctgtcggacgctctccgcgcgctcggtgctcctttcgttgacatgtgggccccgcttggcagaagctccttccctagtcacttactcgtgggccctcgtggtcagtgcgccccccccccttcgcgattctgcaagcggtcactgatctcctgcgccgtgggatctagctgccaggcgcaacaaccaccaccgccatggccgctactaacctcgtgccaacttcctagctagctcaacgactcccactcggactttcctttctcctccttctgtgcatataagcttgagacgcggctcccttctcccccacaaaccatcgctaggcaaatagtgttgtgaggagagagccgcagatttccgccgtgcggggaaccttgggcctggcgcaaccctgccctcaacgattaacctggggggttcgctcggtcgtgaggagggtggtcggcgccttgccaggggcgaatcgagatccagcgcctcggaatttctcgacggcgttcgtgtgccacggttgtccgcccgccgcatggtcgaccttgttcgcaacttaatcgtccggtaagtcttctcccaatcgggtcgccttgatcccttgtgcaccttgcgctagatggagagtaggttgatgcagagactgcctggtggacacctccagtggggagcacggtcgcaggctgttcaacactgtgctgggtttcagcagggggaagaagacagctcagctgtcgtcgattgtttctcggacaaccctgattagatcccaggataacccttcgtggtgttaaatccaagccatcagtcagggatcgtgtggatctggttaggtctaggggtcgatgatgtttagccgttggatcgtgatcccacgatcaatattgcataccgattcgttttaaaaagaaatcagatactggcgctcggtttttaatcggacggctagctctgctcgatactccctcggctgaatctttttacacatgaacccctcgg

SEQ ID NO: 174977 - DNA, 379 bp, Zea Mays
ctacaattgggccaactgggccaattgcgtctttgccaacgggtaatagtggaggatgtcctcatcattcccaccttcttaaaatgggccttacctctgataccagatgatacacccagcccaggtggggttggccgaggcccaacaaattagggttgcccggagcccaacagtttattatgcacacccaactcagggaaaggcccaatcgccccaaaagactagtccaatgggggaagggtggctctcccttttaaagtggcttcctcctcccaagttaagcgaggtgggataattcacacggtcaccgtccgactacaattgggccaactgggccaattgcgtctttgccaacaggtaatagtggaggatgtcctca

SEQ ID NO: 174978 - DNA, 575 bp, Zea Mays
caaccaccatgatagggttaagcatgcttgcagaacatatgcatttttagcatcatccagagaaattgcactggccataaatgaatcaatgaaatggggaaataaaaagggtacttgttcttgcatctgaggacctacaatccttgtagagctttaggagcatgggagggcggcgtccagatctgcaggcggaggactagctcgcccgattagctaggagaggctaagccaaggaacctttacaaggggaatcaagtagagacagaagggtggaaaggtggatggattgaggatggacgaagcagcaagaagagggacgaggaggagaccaagcacgaaggaagagacacgaagcaagcaaagtcgatgtcaccattcccttggccttgatcgtagtgtcggtagcattgaccacatacctccatctcctcacgtcgatctcctctaggcataacaccacatccctagttatctccaccttcatagtcatcgacgctagaaccttagcgcctagggtggtatccttcatcattccctcgacctccctcaatagtgacatgcacagtatctcgcac

SEQ ID NO: 174979 - DNA, 1310 bp, Zea Mays
catcaggagtgtctttacattcaagttgacttacaaacagtttcttcatagcctttttatcggcgatgatcgagctctaacagatcaaacgctctggtatataagtatacaatgtcaagggagtaaaatgaattaacttaatgccgatttaataagttatactaaccttttcttggtcgtgcattgttgtatgtcagggccgactttaggcgtatctacactgattaatgaggctacatgcttggctgcattgtgtccgtgttctgcaatattgtcctacacatatgaaacataataataagatatgacagctgcaagtagcactcattcaattatatcatggaaggtgatgcaccttactgtctctctagagggcatgacaaccatcggtgtagctagtggctgtaaatctgatttagaaggcaattgcaactgtaaatacttgtatcctgcagtttcttcacttctcctacatttatcccccgaaaaatcactgcaccaaacagatacatgtgccacaaattagtttgaacacaagaattatatatcctgaaaactcaaattaatagcattgcatgacacaaatggaaaataaaacaatgtggatactgcttcctaaaaaatacaaaacagtagcacataatgattaaaacggtctaaccgcgcaacagtcgtcgtggaagccatgacggctgccagtccccacttcatctctccccccctgcggcgtgtagtggttggcaaagtcgattgaagcgtatcatgtgtcgtcgatgactggcagactcccaagctaaaatagaaccatgttcaattcgtgccccagacctgccctgtgttcggatttgggcaagctgaaggggacgcctagtgggagttctagcaaaggggaggggagcaatctcaccatatggtcatggaggatgtcggcaatggcatcgatgtaccccttgatcgcgcggacaatgccgatgcggccaccggtctccactgcctgtctcaccgcgctaagacatctcgatgaccttagggggcggctacagctagggcttgggtcttttggatttggaaggcgatgcgaaaaccaaatagtggagaatgcgatgagagggcggaaggagcaggtgtggggcgacaggagtagcgagtggaccggagggcatcgtctcaggcgagcatcgcgcgcggcatctcagacggacgggggaaaggcgtcgaggacaggggcacaacgggagacgtgggagggagacagaggcggagcgggggcacggagctgcggcccgaggtgcgctccagcatggcgagat

SEQ ID NO: 174980 - DNA, 875 bp, Zea Mays
ctttcttcctcgcctgtcagtgcctcaggcacaccgccaaggtctccgcctctgcctccctcttctgctacgccttgatggcagcgtcctcatgaaggtgcagaatacaaggcgccataggctcgatcttctgcagagcccagtcgatcattactaacaagaaaagtcgaagcagcaaaagaagacaagggagaaataacttaccaaactacttgcaatatctttggacagggggaggggtgaattctcatccattaagaaccccgacgacaacaccgtgatggccttcacccgagcctcgatctcggtcaatgtaagcaactcgagggaatggcgctcagggtcattgatgccagaatacttgtacatcggcttctaacatgccatcagaggctaaacccgatgatgcataaatgtgcgcaccagccacacgccagtgaggcattgttgcttcaacgtattgatcgcttttcaaaaggtgctccagcttgctcttgaagctcacctccatgccataataccacttctctgtcgataccgactcccgtccagtgaacggtagggcgctgccgaccacattcttggcgtagaaccactcgccctcgtaccacacagaggaggggagcgagatcttgaagtactaagcctttcggtcggagcgtagttggatgttggccaacccaacgtacaactgactgtcatgcctcagggtcacccatgcactgaagaaataatgccacaacttccagtagggatcgatccccatgaaagcctcacatagtgtgatgaagcacgctatgtgaaggacactattggggtgaaggttctggatctccaattggtaataatgaaggatccccgcacgaagggatgca

SEQ ID NO: 174981 - DNA, 420 bp, Zea Mays
ctggtttccatcagatccagatgtctagacaagataggaagcataccgcttttgtaacagtggatgagctttactgttatattgtaataacttatggtctgaaaaacgccttgccaacatttgtacgggcgatgagtaagactttcggggacctaattagggacagggtagaggtgtacgttgatgacatcatggtcaagactaagaggggtcgaccctagtggaagacttaaccctggtcttcgacaagctgtgggcaacacacacgaagctgaacccggacaagtgcatctttggtgtctccgcagggaagttgctgggattcctggtttcacaccggggcatcgaagcaaacccagaaaagataaaggcaattgaggcaatgaggcctctggcccgcatcaaggacgtctagaagct

SEQ ID NO: 174982 - DNA, 613 bp, Zea Mays
tgccactatgacacctttcgtaaagatcttgatgtctagttggaatgcatgctctagagggagaaattgtcgatgtttatcgaacaacgaatatttaccacccttctttaaccaaatgaacctaagagctcccttgcaaactaggcacggaaacttaccgtgaacacaccagacgcagaatagcccatatcgggaagtcatgcatgaagtattggtaccaaacaagcattttgaagtttttctacatagctcagttgtatgtccttacccctttctcctaaacacggaataattcatcaatcatatgctcgatgtacacgcctattttattccctcggtgtccaagaattattaaccacaagaatatgttatgtctttgaaagcatacgctgagggggacagattgaaggggataacgaacacggaccaacatgtgtatggggtatccatcagtccatagggattgaacccatctgtggccagcacaacacgtacattacgagcctcttcggctttctcacggtgaatggcatcaaagtgggaccatgcatcaccatcgaatgcaagtacaattttgttaggattgtattgtttcactacaggaaactggtta

SEQ ID NO: 174983 - DNA, 1012 bp, Zea Mays
agactgcattcatcaccctgtttgtagctttctgctatacctccatgtcgttcggcctcaagaacgcgggagcgacctaccagagagctattcaaacttgcttagccaatcactagggcaagcgagtggaagcctatgttgatgatgtggtggtaaaaatagaaaactcagaaaacttcatcgaggatttacaactggtcttcaacagattgaggcgataccggtggaagctcaatccggagaagtgcatctttggagtactggcagggaaattactcggattcattgtcagccaccgaggaattgaggctatcatgagaatggaggtgccacgatcacagaaaaaggtgcagagtcttaccggatgcatggcagccctgagcagatttatatcgaggctaggcgagagaggcataccattctacaaattactcaagaaggtggacaaattccagtggaccacagaggcacaagaggctctagaggcactgaagaagttcctaactacgccaccattgctcaagccaccacggcgagtcaaccggaagaagatctgttgctatatatatcctgcacgactcacgtggtaagcaccacgttagtagtcgagcgggtggaagaaggacacacatacccggtgcagcatccagtctacttcatcagtgaagttctcgggccctcaaaaataaagtatccccaagtccagaaactgttgtacgcggtgcttctaatcgctcgcaagctctgtcactactttgatgaccacaaagtcatagtagttaccgggtttccaattggggatatccttcacaacaaagaagccatcggaagaatagccaagtgggcctgcgagctgggagctcatgacatagagtttcggcctcgcacagcagtaaagactcaaacgctagtggacttcgtatcagagtggactgagcaacaagttcctgacaacccggaggctactgaagtatggcgaatgtatttcgatggctcgctaaagctgcagggg

SEQ ID NO: 174984 - DNA, 293 bp, Zea Mays
ctgccaccaggagatccacgggaggcattggcagaggagagtaggtgggattgcaacagtgtgagtaggtgaaggtgccatggcaaggatgcttcaccaatccctactggaaccaaccatggcacagctcaagcaagtttgaagtgatttaattcaaaaccgattggatttaggtctaattgatgattgatatcgagctgcagcagcagcttgggagcgattcaatttcttggttgtacctatgtttgcggattcaatttggaagagagatttagttgacctctgaactggat

SEQ ID NO: 174985 - DNA, 417 bp, Zea Mays
cgaaactgaaacgagtgtctcctccattgatgggggtgggtgaagtcatctgtgaaagagggttagatgtaagtgttatggcagtggaaagaaaaaacatgtgctcgggttgttaaaaggaggtgggttagaatagattcgttcactccaactcatattattatcccttattaacaatgcttgttaggcttattatctgatgcacttgtttccttaacttctagtttataatgcatgcatgctggaaagacgtcttcccaccaatcggaggggtgcttctagggcatccctgctattctaagactggcctatatggcctacttatttagccacctatttcccctactcctaaggcctttcgtccaaggtctagcgttctagccctgacgatacaatactggtttctaagcaaattgt

SEQ ID NO: 174986 - DNA, 939 bp, Zea Mays
gcacgaatgataaagctacagtcaattagagaaaaggaaacatatataaaagttagaaagagaaacataaaattgtcagatgaacagccacatgagtagttctctattttgtaaaccaagtctgtttatgttttcgagaggtgtggtgttcatatttgagcgctcagagaggtttcttccatcttatactcgatcatcgcaagatctaggtggggcaggtgcgtagaaagggaagtacttgagcatcgcaagatccgggcggggctggcgtgtagaatgggaagaatgagatggtagggtggtcctacacttgcaatgggatgcaggccgatggtggttctgtgctagatggcgacgaggggattgggttgtgattcattccatggcggcgaggcgtggattgcatttggggcgtggaggatatgggcggggcatccgcggtgcatgggaagaacgattgggcagtgtggtcctgcgcgcgggggtcgtcgacggtgggatttttgcgtgttggattgctacgaggcgtggatagcggcgaggggatgtgtttccttctgtggcagtggcaggatttttgcttccataaccgaggcattgatcggtgaggggattgcagcgaggaccatgcacatgcagaggtagaggggagagggtgtgcacggggaagaaaggagacactaacatgtgggccatatgcgtcgtgaggaagcagaaccatgcactgcaccatggtctacattagattattatagagtagtatagatttggacagcagccccaagtcttcaacacaatggcatcacaggaccgcgataaacgcccaccgcccagctccctctaaaacttaacttacgcgccagtgccctgctctagcgacgcgatcaggaagtaaattggcagagccccgctcgagcgattatcgacgcgcttcccgac

SEQ ID NO: 174987 - DNA, 1018 bp, Zea Mays
aaaagaaagagtacatcggcaacaagatataatattttagtcacttacattacaaaatatgattctcacgcgcgcaagacgcgcataatacactatttatgtccggtgttgaaagtatttgtgatatatgtggtagcaatacttaacgccggacaaaagccgttttgaaccggctttaaagaataggaatatataagagataagactccttcagtttccactactatcaccacctgacatttattcagaaggcgtagtcaatttctaacttattcatgtacatatttactgttctgtaacaattactgtccataaggtatacttactttcatcactgtctttcaggtcataagaagtgatattctgaatttttgtgcagtggcgtatgtcaaatgtcctttggcgcttattacatgtgtgtttgaccacctctatcagttatgagttcatcatgaacttaaaaaatcaaattaatgagaacacaaatgaagctaaaattattaaaaagatgtcagaccatggcatgtactttaggatgttttacacttataactaccatgtttacacgttaaaactgagagtccacgttgaaggttcctcttttggagaaaggtacgagtagtcgcaaccattttaaattgggttgcactacagtgcctaaagtaattttagtatgcttaatccactattgaaataattcagtgctaaattaatttagagtgtatggccaataaaactatctgaatgtatttttttcaaactgcttatgttgtttctggtgtataatctaaatttggttcttgacatcgctaaacatcttttctttgttgcctttgcaggcgcaagaagctttgtcaaaacaatctaaagtgtttgcctggtagtattctagcactatttttttgataagcttcaatttattttaaaaaaataatctgatataaggcttgtgttctgattcgaacatcagtttcaagaaggcgaccaagaggaacaaacctgataagtgaagaaaata

SEQ ID NO: 174988 - DNA, 486 bp, Zea Mays
taagtcactacatgcataatccaagaaaaggacatgcagaagcggtgtatcgaatcctgaaatacttaaagagtagccctaggagaggcctttggttcaaaaagaaccaacacctagacatggaggccttttgtcatgctgattaggcaagtagcattgatagcaagaggtctacttctagttattgtgtttttgtgggaggtaatattgtatcctggagaagtaagaaacaagaggttgtggctcggtcaacaattgaggctgaatacagagcaatggccttgggccttagcaagatgatctagttgaagaatctattggctgaattgaaactaatgaggaacgacaatatggtattaaaccgtgacaacatatctgcaatgaatattgcaaacaatctggtgcaacatgatcgtaccaagcacatagagattgatagattctttatcaaagagaagctagatagtgggaaattaaaattgaaac

SEQ ID NO: 174989 - DNA, 554 bp, Zea Mays
aatggtgtcaccgcggcgcgccgtggacctagccttgcactcgacgatggtagaaattggtacgggaattgagctcataacgtcattagttgggcggggagcgagtgaattagaaaatggtggccaggttggccggatttgcaactccggcggacttgccgctgcgcgatgggccacattgtcgtgcgatggctcggttggggaagacgggtccgtggccgtcggatcgttgacggacggtcccgattaggtccagcgtatcccttcgctcgaaataaatccacaccgttgatctcgcgtcgtgcggcaggatctagatctagggttaattaaatccagaccttcgattctgaatccaagggccatctcagcatactggttcagacagccccaaatctaatctgcaccgtccgttttggatcgggcggctagtaaaccccgataccccttcggccatgctattatgcaaaagaaaccctatagatccctatattcaacccgcggtccactgggttgttccctgtgtcttaagaatcttaccccgagcccccctg

SEQ ID NO: 174990 - DNA, 780 bp, Zea Mays
caggcgctgagccgttgcccacgcgccctctcttctctctctctctgcaccgtggaccctccctgtcagttctgccctccccacgctcgccgtggaccagcgcgtgcgcacttgcgcacatcgccggatttctcgacaacgacgcccgcccacgcgcctaggtcccttcttaaagccccgccagtgcccgcactcgctcccccgcctcatttcacacagcatcaccctctctcacgctctgccctcgccgccagacgtcgccggagacccacgcccgcgttcccgatcatccagctcaccggagaccgcgccaagcctccccgagctccgccccgaggtgagacacctttgcccgtgcttaatttcactagtttcgctctatgctcggccaattttggatcgctggtgctcgaccgtggcggtccaccgtgctcacgcgatggccggccaatttagcccggtctagttccccggtgtaggttcctgtgtcacccctgcctctgctgaagctttccaaagccttagcatgccttaagcccctccctgtcatcggaatccctcaccggagttccttcggtccacccaaggccttctccccaccgttctcccctctctgccctcggattcctggccttttccccgccactgagtttgtcatggcattctctccctctctgcccaatcccggtgaccccggagccaccctagcacgcgcctgcctcaactctagcgacttcaccgccgcggagaggagcggcgtcgcccgcagctttacactcc

SEQ ID NO: 174991 - DNA, 516 bp, Zea Mays
tttgtgtttgtagatggacaaatattggatcaacagtaggctttttagcgagcaatatatcgcaggagtgaggggttttatgaagttaatttcagagcgatttgatgatagtgaggaggtactatgtccttgtagaaagtgtttgaataggcttgccaaacctatgtcacagatacaggatcatttatatattcatggaatggtgagcacatacactacgtggatacatcatagggaagaacaattggatgttgaactgagtgaacaagtcagccatctacatgaacattatagtgtgaatgaggatgttcatatgaatgagcctgaaaaccctgaagatagattgcctgatatggtacaagattttttcacagctgaagagggaggtgcacaaaattctatgtttgcagctgtattggatgcgatgaagcaagaacttcacccaggcgcatcatacacaagattttcttttgtagtgaagttacttcatatcaaatctcgttaccggatcagtaa

SEQ ID NO: 174992 - DNA, 628 bp, Zea Mays
ctctccattaatcggatcgctcccgttgagtcagaccgccatcgctgagtcgcgtattttttgcatgccctgtaggcactgtctgtctgccacgagccacaattgcgtctgttgcgcacgttgcatggatttatcgtgtacctcaattaccgagccataattgtgcctgttgcgcttattacgaaggcttgctatactgtcgtagccctgatggccacacacgcgttgacaccagacactagagcttgtactcgtgtggattgtggtgggttgttcaagcccctgaagtcacattatacgcaaccttcgtaaacaattttgttttcactttatattttgtttgattgtgttgtgtggcatcgtatatttatatatatcgccacgtggccataacaaatatattaaatctgggaaattaaatcgaaatacaatgaaacacagataagttaaatctctgctctctcctcgtgcataaagttttacccgaagtaacctgaagaaattcaatattaatgcatgaaagtctttttggtatagaagatatcacaaattgggattatattagtaagcaaaaagaccttaccaaatgatttaagatcagaaatctcagtcatacattgctcaacca

SEQ ID NO: 174993 - DNA, 500 bp, Zea Mays
gcctccattgtcctgcagaggaacaacaggcaccaggaaccgggttgccgttggttgtcgcgcttctagtcattccgacgcttaggcgatatggtctctctatgggattaggatttagggcgaggtacccacgtttgctttttctacgaccttttaataatccttaatatgtagcatcgtgtgaccaagagctcgaaccgaagttagcgtaggccctcccaatcaaggtccaaattaagcctaatatagtcactgatgatcggctgtagaggacacacccaacactgtaatctcaccagagtttcaccatccgcctgcatgcacctctttagccagcaccatctccaagatgcccgaggtcaagactcaagagtatctccgtctaccccatcattatgcatggcctgcaatgttgatctgttaacgagcgcgcgctctgcccttgttcaacgccaccgagacacagcatacgatcataatctcgcacatcaaataccacg

SEQ ID NO: 174994 - DNA, 700 bp, Zea Mays
caacggcggcgtgggcaccgacgccggtcaattcatctctacaacgcactacccctagttctaacacccgcaaattcaaattagcacatcggcgaacttcagaggatggttcataccgacaatcgtagggcgaacgctcctgtcctcggcgcacggcggatccgatgttgatgaaggtactccggtgagcaattgtcagagtcgtggtgccctttcgcttcactgacggccacccgcactaccgcgatgcccaaccggatgctccaaggccacacgctgtgaccaatcagcgatgtgggcgcgattccaccggcgactggaccacgttattccctaatcctagcggcggctagagctttggccaccaggttgtcgcggaggaggtggggatttggtccttttgtaggcctgccgcggagagtccgatgtggcgcgagttttgcggagcaaggcgcggtcaacggccatggcggaggatccgggagttcttcaacggccgagcgtgaggggaaggagagagctgactgcgcgggacccgcatggtggtgtctgggtgcgtgcgcgagaacccgttgaggctgcccaccagtgaagcccacgtgcgcccacgtagagaaactgacccgtggggtccccacgtcaactggatgaggcgcggcaggttaaggaaatggaaggtgggccggcgcgcggtaaaggg

SEQ ID NO: 174995 - DNA, 501 bp, Zea Mays
aggagagagatctgcagccgcggtgtcgcgcttgctccatcggtggggtctcggtggcgggccagggagttccaacgggtacccaagttggtgttcgtagcctcgccgtgcgtgattggtgcacggggagttggcgattgctgattggagcttcatcgtcgcctcgggtctgcttcggtgcgtgggcaagcacgtctccgtctccgacgccagtgagcaattcctcccttactcgtgtctatctatgcgttccctagtgcgtagccgtgctaaacgtaggttccgttgggccgaacggccgggcaccgccaccaactaatccatggtcgcggtcagtggtggtcagtacaataacgaccgcaatccgaggcaaaacttatctcaatcaattcgggtggcatcgaatttgggtctgcatagttatgggcgcgattcatccactggcgtggcgatttggattgcgtcggcgaggtccgccggttggggttggctgcgccgccc

SEQ ID NO: 174996 - DNA, 1007 bp, Zea Mays
aagaaactcgtcgtcagagtcatccgtcacacaaatcttcaacgacgatgtcgttccacttgcttgattgttttgcatttccttcttcctttctcttgtagtaagctgcttctgccatatctgcaacctgggaaaatagcttactctcaccctccacttcatcagccttttgcttgtaataagcggcctttgcttcattgacggctgagacataaactcgtcctcctcctcttgcacgtgtaatcctgtctcagctagcgcgatgagcacacacaaccttgatgtgttgtcctcctcccccatcagctccaccctcaccattttttccacaacgtatcttgcacgagcctcgtctgcgatatagttcacggtgtatccaatctttgcaaataaattaagacaagtaagttagcaacgacaacacaaatacaatgtgcgagcgaaagcaacacatgtttttctcactcacttgcaatcagacaaccaacaagattccccaacatctatttttcggctctagcggcctccatttcccttgcttcctgtgctctcttctcattatccgccttcattctccttcgctctacacgcatcgggctatcacaatcctgtgattcggtatacctacacatttcctgtctgcgatatttgatgtaggaatcgaccagctgagatccacatcacatcttctctcccacgagtctcttcgacctaatcgtatgcatcaccttgtctttaccaaagaatgtctcccaattgcattttctggtctcctacacaaaacaaacaataagtacggatgcaacaatacatctcatgccatcaagaacaaatgtcaaccccttcgtaatctaccatatggccacaaaaataccctacatcaagctccgaaggaactagtccatacttagtttcaacacaacatttgcagagtacaggattggacttgcactcttccgcccgctcattctttttcttctcctttgcctctggctcaggccaatggg

SEQ ID NO: 174997 - DNA, 1081 bp, Zea Mays
cttgagttgtatttagcatccaactctttatctcgcttgcttgcaaccaccctttcaaaatgagtgaaaaacctagcaatgtccaaatcacattttaaaacatctttcatatctttgtttaggctttcacttaattgtgtgcttcgcattccaagagtgaatacgttcttcatgtaacattcagcccatttctccttttgttggtagagaccacccaaccaagtatcatttttcactttacttctcaaggtgctgaaacttttctcaaatgtgttcacatcctcatattcatacatacatgcacttaactcagccaaggcactagattcatctcttcctatgcgagctaggtgttttacagcattttgcataatgtgaaatgaacacaagccatgccaagattccggaaataccactgatattgcatttttcattgccatatcttgatctgtatagatagttcttggatgcttttgcttttgtgcttctagaaatgcttcaaacaaccatttgaaagaagattctgtttcatcatacaatagagtagctccaaatataaccatttctctgaattggttcaatccaacaaacacaccaagtggcctacaatctttgtctgtcccaaatgtggtgtcaaaagtaataacatcaccaaaataagcataatcaataagcatcttagcatctgcccagaacaagtttgttattttctcatcgcaatctagctgaatagctgaataaaatgaaggattttttgcagctttctttgtaaaatacctcacaatacttcctgcctctccatacatcatatttctttgtctttttgtcctcaaataatttttgtgatcaattcttgtgtaaccaaggttacatgaaccaccagcttgtctactagctaactcatgagcatctttagggctaattccacaatcatctgccatatcaatttgacaagcttgcacacttgaaattttctgttgtgaaggcattaggtggcatgtttcatgaagttgaagaatatggttatgttcaagtactaaatcatttaactggtaatttccctcttctctgtttgatataa

SEQ ID NO: 174998 - DNA, 363 bp, Zea Mays
atccgcactcattctaccctatttctctaccctaaaagcaatattctgtcctagtcagcgagattctctaccctatactacaatcctccgcactcatctctatcctatatttccaccctataccgactacccttctcttttttctccacactctccctaccatacggtgacctggcctgccacgtgaagaaagagaagcggtaggggagcgacggcagcaactccatagctgaggtgagagaacgttcaccctaccatacggtgaggtttagagcacaccgctgcagcattcgggttaccctatacctcactctaaagctttagggagagcttcccagtacctcactgcgcccagccttacac

SEQ ID NO: 174999 - DNA, 1587 bp, Zea Mays
cgttgacttctccggcctcggcaacctcaccgtcttcgacgtggccgccaacaacttcaccgccacgatcccgcagagcatctactcctgcacgtcgctgaaggcgctccgctttggcggcaaccagatggaagggcaggtcgcgccggagatcggcaacctgcgccggctccagttcctgtccttgaccataaactcgttcaccaacatcagcggcatgttctggaacctccaggggtgcgagaacctcaccgcgcttctagtgtcgtacaacttctacggcgaggccctgctggacgccggctgggtcggggaccatctcaggggtctccggcttctggtgatggagaactgcgagctgacgggtcagataccaacgtggctgtcgaagctgcaggacctcagtatcttgaatctcggcgataaccgcctcaccggcccgatcccgcgctggatcggcggcatgaagaagctctactacctggacgtgtccggcaatctgctgtccggtgggattccgccgtcgctggcggagttgccgcttctcacgtcggagcaggccatggcaaacttcagcacaggccacatgccactcaccttcaccctgacgcccaacaacggagcggcgagcaggcaaggccgcgggtactaccagatgtccggcgtcgccacgacgctcaacttcagcaacaactacctcaccggcacgataccgcgcgagatcgggcggctggtgactctgcaggtgcttaacgtcggcaacaacaacctctccggcggaatcccgccggagctctgcagccttaccaagctgcagtttctgatcctgcgccggaaccgtctgacggggccaatcccgccggcgctcaaccggctcaacttcctcgccgtcttcagcgtctcgtacaacgatctggaggggccgattccgacgggcggccagttcgacgcgttcccgccggggagctttcgggagaaccccaagctctgcggcaaggtgatcgccgtcccgtgtacgaagcccaatgccggaggcgtgtcggcttcgtccaaactagttagcaaaaggactctcgtgaccatcgtccttgcagtttgctctggagtggtcgccatcgtcgtcttggcaggatgcatggtgatcgccgtcaggagggtgaaaccgaaggggtcagtcgacgacgccggcaagtttgcggaggcgtccatgttcgactcgacgacagacttatacggcgacgactccaaggacacggtcctgttcatgtcggaggccggcggcgacgcggcgaggcatgtcacgttctcggacatcctcatggcgaccaacaacttgggcccggcgagcatcatcgggtcgggcggctatggcctggtgtacctcgcggagctggaggacggcacgcgcctcgcggtgaagaagctcaacggcgacatgtgcctggcggatcgcgagttccgcgcggaggtggagacgctgtcgtcggcgtcggcgcggcacgagaacctggtcccgctccagggcttctgcatccgcggccggctgcggctgctgctgtacccgtacatggcaaacggcagcctgca

SEQ ID NO: 175000 - DNA, 563 bp, Zea Mays
cgttcattaatctcatgaaagtgctaggtgcattagttaacccgaaaggcatgactaaccactcatataatccgaacttagttttgaaatcagttttccattcatctcccaatttcatacgaatctgatggtacccactacgcaaatcaactttagaaaacacgatagcaccactcaattcatcaagcatatcatctaaacgtggaatagggtgtcgatactgtatggtgatattattaatagctctacaatcaacacacatacgccatgctccatctttttaggcactaaaataaccagaacaacacacggactaagagactcacgcacgtaacctttgtcgagtagttcttgcacttgtcgctgaatttcttttgtttcctccggatttgtcctatatggcgcacgatttggcaaagatgcaccaggaataagatcaatttggtgctcaatccctcgtgtaggtggcagcccctctagtatctcacttggaaatacatcagaatactcctgcaaaatgttagcaacaacaggaggcaaagaatgttgtatatcttgaattg

SEQ ID NO: 175001 - DNA, 732 bp, Zea Mays
tccacatgccttgttagcagagagggagctgtgtggtggcaatggtgcagtgaagagagtgcatgagccctatctcaaaggattcttggggtggcaccaacacgctctagtcaataactttgcgctggcgactccaaggcatttcccaatggcggcaatcttatgttgagccgagacattgcagtgctccggcgtgtgggggcggcgacacagacaaggaaggtagggggtgaaaccctagctacatgcgggcgagagaaatgatgaatgggaggggtaccggttcaattgtgtgcgggggaatccacctgcttctcaaatcaagtggaaacctcgcttccaagagaatcacttcgagaatcggctccagaagcaatgtgtttgaggaaaatctgcttctagtagtcacaaatcagccaaacgtcattccaaacacagtcttagttttctactttttcaaagtagagcaagctaaaccaaacacacagttattgacgaggtcaatcagattatgacatggttgataatcaaaataaacgtgaccctgagaatacaaggttcagatctttataatataaagccagatcgatgtgtcactttataataaattaatacttgtcatgaacttgatgtaagattaaaaaccaacgtccttatcatgaacttgatgtaagattaaaaaccaatgtcccgtgcatgggtcaacttttgaatgtcatccgtaacactccg

SEQ ID NO: 175002 - DNA, 748 bp, Zea Mays
ctcaccatcgccggtggtgctcgacgccaaattggggcctcgggtgcggacagaaggcttcgcccgcgcccctggtccgttccggtggcgattacggggccggaggatgaccggagcgcgcccagttcgtcaccaccaccgcgcgtttgcgactcgccgtggaccgaccgaagcagctccgtacttagggtaaggacccgatctcctggctcgcgttcatcttaatttcattccgcgcccagcgtattagagtttggcgcgctggagcttgggattgacttcctccggcgaggcctccgccgtgcactgggcgccgtctccgccgtgtgtgcgtcgggttgggggagaaagtcgcgcgccccgcatcggccgttggatggtgagggaacgactaggattaggccgagccataccgagtcagggtggggatgtgagccgtagatccataatctgatgggtgcgagtcgatctcggttatttagaattcggaccgtcagatccggatccgagcgtcgtcgtagcgtaccggttcgttgagtggacaatctaatccgagccacaagatctagatcctatggacgataatagagaataccccttcgcgctggcacttttgttaaagagctcttttgtttatagtaaatagaacccgccgtccgcgcctgggtctgtctgtgtcttggaccttttgctccgagccccctgtgctttcaaggaaatgaggcgcagtccagagatagaaaatcca

SEQ ID NO: 175003 - DNA, 390 bp, Zea Mays
atgcacaaaagaacttaccgtggaagtggttttggcacgcttcttgcgtaggttgtactgaataggtgcagttctcttgtcacgcgtaggtttgtccggggaacaagaatcagtgaatgaatgtgctaggttgggcaaacttatgcaggaactgcgccgaaaaagaagagtgatttaatacattaaaatggaggcacgagggcagatagcaacagtaaaatggaggaactaagcagttcacctagatctggtgtttggcgcgtggtgtgcagagtcaatggtcgagcccaccgcctacttcacttcggctaggacgacggagggagggcggatccggcaacgacaacgaaggagagggacgtcgacggctggagtgacaacggcggctgg

SEQ ID NO: 175004 - DNA, 502 bp, Zea Mays
gcgtggggtatgtatgcgcattgaatgttcctgtctcctgcagacttcgactgagtcttgcctcggggttgtctttgttacatgagacgagcttgggcgaggcggagacagcggttcaggggagaggggacctcggccggaacgaggattctcccaagaacataccctatccaagggcaggctcgggggaggcggaggcgcggagctatggtgacccctgaggggggtctcgggcgaagcgttgtttgtgatcctttatcctcggggaatgtgtcttgatggtggtcttggggttaagcgtgttttagaggcataatttaggtacccctaattacgataccagacaaatatgtttgcatttatgccttttgggatagacctaatacccatctcactccatctcggttaatcttaatttctaggacatgagatgtctctccaagatcctttatatctaattgtgaggacataaaacttttgtttctaatagcatatttttatc

SEQ ID NO: 175005 - DNA, 511 bp, Zea Mays
tgaccattgataggtgataggtctgaaaatatcaatatgcgtaatatgagaatgatatggcttatggttaggtttgtcttcaataatactttcaaaagtttagatttatttgcgtatataataatatagtgatcaaaagtaagtagtcaaagtgatgtctcaaaaaacaataaaaacaacaagatggtgataaaggtcaaataagaaaccagaaagtattttgtgaacttgaattctccctctagtgaaaatgcattttatgagtaaaaggttggtctagtgttgaaatcttcattttggcctaggctcccctgtctttcctattttttgctaccaaactttgatacatcaacctcaactcatcgtttgtatgctgttgtggttccagaaggttcagactgctttggtgtcaattttttttaatctttagaggaacggaaaccatccatactgggtcatcctgtttcgtcactttctgactctccagcctttttcattttgctcctctgtt

SEQ ID NO: 175006 - DNA, 628 bp, Zea Mays
gaccttgcgaaattggacaccaccgtcgatgggacctataaattgagccccccctcggcttcgccatgtatcccagcagctaccgcacccacctgcatcccaaatcccccactagcgagcacaaattttggattctccccaaaccggttctagaacaccgtgaactcaatctcgtcgtggccagcctgttctggtaaaactctgcccaattcaaccttgtttaagtgctcttgtatgcctgtgatgcccatcgacccacttaattgcacggagtagactctggtcgccgggaacacgacggtatagccgttatgctcacggtcaccgtggccagagcaagccattgggccatagatgaaattaggttgggggaaatgctcggggtaggtctaatttggtgtccgtcgctcgggagcgccggtcatggccctgttcggccggtacagttgctcaccggagcgcggccgtgctccacgccgtcgaggaccttcccccgcgaagaaatagaaatttgaggacatttttgcaaactatcagcgactgtattaaatagtaaatgaacctactccggtttagcttgaaacccgagggtccctgtgtaaagtcgccagtgcgcgcgggcgtacgc

SEQ ID NO: 175007 - DNA, 833 bp, Zea Mays
acttcattttctccaggaaggtgaccgggtagaacctcctctcaaactgcctgatgaaaatatcctaggacaggactcctagtgaagaggagtgagctgcctgcacgcctctccaccaaatttgagcctcaaccttcagcagctatgtgccaaagcgaagacgatcaccatacacaatctcaaagacattcatcttatcctccacataagtcagccaatctgctgcctcgaccggagtaccactgccatcaaaagtgtccaacttcatgcccatccactgcatcagagaaagaccactgacgggaaggggcacctcagccctgccacctggagcagcacccatagggacagcgcccccgggcactcctccacctccagcaccctgagcagcacccgcaggggcaacaggaatagcttgcctcagaatggccaactcctgctgcatgggcctacatcgcgactaacattgccgccggactcatagaatccccactaggaacttgcgggctgccacgagccctacgaggcggcataactgcagccataggagtaagtaaataagtaaataagattggcatagcacctcatcaaatattgtcaaaccagcactgacaataatataatatatcaatagtaaagcaggaaatccatcctatatgtgcagtgtgtcaatttatcattattccacttgctaggacctatagcctatccctctgataccaactgtaacaccccattgctcccacacaatgaatgttaccaaagacccttcccacaaaactgaaacaacataagaaaagaaatggagacagaaagtaaagaaaaatccggca

SEQ ID NO: 175008 - DNA, 525 bp, Zea Mays
gttaaaacgttgcggtggcactgcccggttaatcagcggtcgccggaccatcgccgtggctctgcccgcgcgggtgaactcgccagtgcgtttatagctccgcgagcctcatccaactccggccatctgcctataaattaaccccaggtcctgcttcttcaccacatcacacacacgagcacttgagcaatcgactcaatttcaccggagaactcacatagtccacaaatccattccgccctgttccgaacgccaccatggaggacctctccgtggccagccctcttcgggttagtactcactcaattgcctcatgttccagcatgtccttagcttcctgttgctctcagcgctaatcaatcaaagtttaccaaagtcccaccactggaacactccgttgctccgaagaacaccgccgtatgcaccctctctgtcgatcagcttctctatccccgttcggcctaaactcaatcatgtacctagttcctggtgaacctgtaaagccttcccaagcttcaattttag

SEQ ID NO: 175009 - DNA, 346 bp, Zea Mays
aggaagtcccattaattcggaagaacagtcggcgttacatagtcagtggggggaatagcgatattccttctccagctttgtctgctgtcattagcctgcaagaattatccatagcaaattttgatcaggctctcaaggatgttgttcctaaagatatgctgtcagagccaactgatggtgatatgatggacgtctgctctgacactctaaatgtgggattagaggtatcccgggcagcatctcgtgcatcgtcgaccttggaaggcggtctttggagccaagaggttggtcaaggtcgcttaattcccatggaggtgactgagaatccttcagccttagaggtggc

SEQ ID NO: 175010 - DNA, 641 bp, Zea Mays
tgcataagtccattccaatgtttctattgcttgtgtttgggctctaaacccttatgtagagaaaagtgcttcttgggtttgagttgagccacattgcaaatcatgatgaatcaatggtaaggcggtatggtcccacacttagtcaattggattagatgataattatgtgtttctaagtcgtaggaaatctaccaaggacaaccaaaaagagttggaggagatagaatcaaaagagccaagtctgggatgctttaggactcaccggaccacgtccacaggggctcgggacttggttcttccgcggcctgggtcaccagaccgttcagtggcacaccggaccgcttgtacgaccaaagttggaggtctcgagaattatttttatgatccaccagaccgtgaacaacacccggtttggtgtgcatcagaccgcttctccaacgactatcttcaacggcgcgtgggcgacacaacgactagctgacgtggcacatggtccggtggcgcatcggattggtctggtgccactcagctaaggaaggctccaatcagaatcctgagtgtgaggctacaagacccggttcagtgtgcactagatcagtccagtgcgttcgtagtcagacagattttggctgcttttacaa

SEQ ID NO: 175011 - DNA, 390 bp, Zea Mays
cgagtgggagggccttggcgccggcgcggccgaggaggtcacgcgggcgctctcgctgccccgcgggcctgcgggcgccaacggccacaggatggagaggcgcctgtcgctggtcaagcaggccaacgtcaaccagtccggcgagttcgatcataacctctggctcttccagaccaagggcacctatggctatggcaacgccatctggccccaggatgaagcagacgacgacaccgacggcggtgccccggctgggcatcccaaggagctcttaaccaaaccgtggcgcccgctcacccgcaagctcaggattccagcagccgtcatcagtccttacaggtccttgtcgtcgtgaattcttatacgtacattaaaatagtagttatttct

SEQ ID NO: 175012 - DNA, 1408 bp, Zea Mays
ccgaatttcgtctctggcccatttcttcagccactgctcgacccaaatacaccgcgcttacctcaaccctagccgccagcccaactttgtgtctagccgcgcgcgcaccgcagctcagcctcacactcggtaaccttcaccgccaggtgggccccgcttgacaggtcttcttctccccaaaacggactcacgcatggtgggcggtaacaaccccataccggcgccatgggatttctccggatgattcgctaatatcgttgcaacaaccctgcggactccatcctacatctatataagtctgttgcggggttccttgcctccaggaccatgcgtgggaactagcgctcgccaccgattctcttgtcgccgggggcatgtgcggaagttccgccgccgtccatcccatccgtgcgccgccgctgggagccataggaggggtcaggggcgttcgcctgcaaccaaggtgcgtgtgcgggcttgcaatcgggagtaggtgtcgccatggtccaacgaattcctcgtcgtcgctcctacgccgccgcgggtccgctcttcgccatggctagctctcgtcaccaaatttctagtctggtaagttgcatccctaggttcgcctttatcctgtagtcgtattgcgcgcgcatgtggttggtttgggtagcggagtgcggggttggacgttcgccggcgagtacaccgccgggcgagctctgtttctcgcgcggggtgttccgtcgatggcgtggggcgtatcctccgtcgatcagtgaacgaacggacgcgattagttcatcttactggtgcgagggggacgaagtttggtcgttggatcgtagatgaaggagtggaatcggatctcgcgcgtattaaatcgggggccttggatctagatctaatgatccctggcacatacagattcctcaatggcaggatctaatcctggccgcaggacttagatcgtgtggctcaagttatcccataccccttcggccgacgactttgcaaaagaatccctgaaccttgcataattaaacccgcagtccaccgcgggtaggttctgagtctgtggaacctttgcgttttaaccccgaactctctgcaaattatgcacgccatccaggactcgaaagaaagaaataaatgaatatagaaaatgaattcctagtgtaaaaataatcctaaaacttgtttaattcatacaaaactcattttaactcctttttagtccattcaagttctcataattttgtattaatattgcctactacttggtaacactgttttgacatgaaacctatactagaattgattactcaataaattttgtagcaagcacataaaatcttcggaaattcataactcctccgttttaaatccaaattaactcgttcaagttgcgttagtctcg

SEQ ID NO: 175013 - DNA, 354 bp, Zea Mays
ctcaagcaaaaggttaacaaaagggtaaaacaagcacgcacaggtgctagccaagtatccagaagtcctgcaagaaccgaatctaaaaccatgcacacccaaaagttagtggggccaaaaccagagcccagaccacccgccttccacctagtgcttatcttgcttatcttcatcagttgaatcatcagtcctttcatcatccaaatccttcctgcctaccctctgctgaccaacagatcccgcagccgatttcttcttcttcaaacgatgctcagaaaggtcgtcctcttacaagttacagaacctggaacccagattccgaagcaccttggaggatagtggggggcatcgaag

SEQ ID NO: 175014 - DNA, 539 bp, Zea Mays
taaaaaaatcataaaatggctgcaagagaaggtactacaaaagggtaacaaacataacaaaagtgttttattcatgaataaccatttcatcaaattgatcagactgcacagaattcccaagttggagttcacaatacttgggaccaggcctaaggccaagggcagcagccttagatggatcaaactttcccttagatgcatttcgatcagcaccaaagccttagatgcatttcgatcagcaccaaagctatgtgtgtgaagcattgctctattgggataaaagatctcattgccccagttcataactcaagatcagaaggcccccatatgttcacttgatttcaagttagcaggaagaagactacagttagttggtcgaaacatttttaatagagaatgcataaatgcatctgttgatagaaaaaacacataaaaagaaaccatgtcaacataccaacatgccctcacctccaatacttgctagagttatttggttgtgtactacaatatcaaaacaactaacactgccctctggtttg

SEQ ID NO: 175015 - DNA, 551 bp, Zea Mays
actcaaatccagtatacatgtatatcgaagcgcatttcaaccaataatttgcattttaacttggacaacacatgaacattactatttttcatccacgaccataaccatacgcatttagaccacaacaaacaattcatcgtgattacgatcttaaccaaaccatctaacaatttggctaactagagcaacgacatagctgctaaataacatacacgtcggctagcccattattatcgcaatccgagacactacatgtatattcgcacttcgaccaaatcatacgatccgtaaaccactaatctccaactcacaatcaccatgcatttacttcccaattcatgaacgcatacatgtttatcatacaaaccgagtatttcaataattatcctaaaacaactaactccattacacacttgtatcacaaacctacttgacttacttgaagtgtctactcgaaatcgtgagcacaatcatacactatatgcgaagcataatttaacaaacgcataatacacatcgtcacgactcgacttataaatatagagaaagcg

SEQ ID NO: 175016 - DNA, 567 bp, Zea Mays
aagatgacaatcctcataaaactgaaacgacatgactcataaaactgacacagctaacataatactgaacataagcctctgttgtcggacgagcagcatctaattggactttttaagatctatctcggaagctttgcgaagccaagcgttccttccttcttttgtcttcagggatgcaaatacatctctatactttttctcaatcaacagatgagtggcaaacaaatgtaggtcgctgccttctggtgatccatcatcgataacttgttgcaactgcgcaataacctcaacacgaactgggtccgtgtcagcagaggtaatggacttgttagtggtcattgaacgcgactcaaaagcctccactaggcgtttcatgtactcttccctcgaatcttttttcttctttggtttaggagaatcatgccgcatcttacgcttcccaatcgcatttgtgcatgggtcaggtgtgctgttttcacccccacctaaagtggcttccaaatgatcatcagatgatgaattagcatcctcgacgccaggaacaagggttctttcatttgtgcagac

SEQ ID NO: 175017 - DNA, 640 bp, Zea Mays
tacctacatttaatgcttcatacacgtgtccaaaagttcgatgtgacggattgaccttgagaaacttcgcgatttggtggtagctggagtaagcatcgagaaaacgtcgaacgacgtcggtgtgataaaggatgtcacgagttgatcaactagatccatcgtgatttggtggtagccggagtaagcgtaaaaaaaacaaagggtttcacaccgagttgtggagtcaaccacctgatctatacgtggtagtgggaaagagcctttcggacatgccttgttaaggctagtgtagtcaacccacattctccatttcctactcttatttttcacaaggactggattagctaaccagtcaggatggtacacttccttaataaaacatgcactaaggagcctcttgagttcttcaccgatggctttacatttgtccttgtgaagcgtcggagccgttgcttgactggtcaagagccaggcttgatgttgagtgtatgctcgatgacctcccttggaatccccagcatgttcgagggcttccatgcaaacatgtcgaggtttgctcagaggaaatcgacgagcgtgctttcctatttaggatcgagcgccgtcccgatacggagcgtgcggccatcatcagagacgg

SEQ ID NO: 175018 - DNA, 950 bp, Zea Mays
ctttgaaaccctagcttcctgtaatcctgttgctttcccgtcgcatccacttttttctcgtttgtctcgtccggtcgtcctagcgtcctagagacccagacggacaccccctcgccgccgcaccaaggctccagtccaggccaagcatcaccgactcgccgcactagttgcagtgcaggagcacatgcacatcccatcatcgctgcaaggatcgctcaagcatttaaggttcaagctctagattccacgcgatcaccaaaagtattccaggtttgcggccacatgttcgcctacaggctacaggtatctctcaattcctatctgagtacctgacacatcacagatggtctatagtctaagttcagtatagatgcatattcaaacataaacatagcgttgtaaaaataaacgtagttggatggcctatttgatcaatacaagaatctcagtcttcaccattcgattagctgtcatatttattgatccctcataggctcgaactagaaaatccatgctattgtgtttatttattgatccatgtattccgtctaatttagcggttgtggccgctgtagatccatgcctagctccagccaccgcccattgtcgtaagcaccatgacttcctcctcaccgcctcaaagttcaggcaacaacggcgacacaggaaggtgagaactgagaacttagttcccactccatatttactttggatctacctgtataatcttatatgattgtggtcttccatggaccatggcttaattgttgagtgactaacgctaacccaccggtgatcctcacaaagggacaccttgaacaagaactggctaccacatgctaccagtgatgcagcagccgcaacccctattgtgtcttctgctactcccaaaactgctgctggaactactgtcatgccatacgctagtgtcggtaattcctcgatgtctg

SEQ ID NO: 175019 - DNA, 392 bp, Zea Mays
tctccgctgagatccctgacaagaagaagtaccctgaactatacaagatggttatcaagcatatgatgcatggaccgtgcgggttgctaaatcctaaatgcccatgcactaagggtcgtgcttcatgcaaaaaccattatcctagagcttttagcaatgcaacgtctcaaggaaaggattcatatcctatttatagttgtcgtgatgatgggcgtaaggaaacggttcgaggttgtgaattggacaacagatgggtcgtcccttataacccttacctcctccggctcttcaactatcacatcaatgttgaggcgtgcgggagcatcaaggctgtcaaatacttgttcaaatacatatacaaaggccacgatcgtgcgtctgtggctgtgaca

SEQ ID NO: 175020 - DNA, 552 bp, Zea Mays
cacctcgatttcagagcactcttgaggcctcacgccttgtatttggatcttaccgtcctgctcctgagattccagtgccagcttctgcttctgtgtttgacactcaggccgaggatgcagctcttcgacagtttgacactcagggtacagccgctgatgatgatgatgatgatgatgattttggggttctgcctccgcctcctatgcctccacgctcacatgatcatgaggctgggagttctcgtgctgcccctgctcctcctccggctttggaccctgctcttgcggcgattctggccaacctggcagctgagcaagcccggttatccgagacaatgctctcgatgtttcagagcatgcaggacaggcaggatgctcttcagcagcagctcattcaggatagggcagagaatagggcattcatggctctcatgcttcagcattctggtatctcagctcctccggtttagtctgctccgcctcctccgcttcacgctccagtggtgccttcgattttgtctggaccccctgttggtacctctccgctccggc

SEQ ID NO: 175021 - DNA, 597 bp, Zea Mays
caatgatgttgtcgatggaaaccttgcgtcgaagcatggatggaatgttacgccgcgtccaaaaactcgtcggccttccatggagagcagatcggttatggggggagtggatcgagctgccttccatcggttgggcaccgtgggcgggattggcgtgcacagtcgtggatcgcgacgaggaggagaccgtgaccccagtattccatagcacgcagatcagtgggggagtggatcacgccgagtttttggatcgcgggggagaggcgacctcgcctcggtattccatagagagatcggtcacgggggagaggccgaggaggacactgcaacacgggagtggatcgcgccgatctacgtgccgaggaggagatctgcaccgtaacacgggaggggaccgcgtggatgggtgggggactggatcgcgccgatctacgcgccgaggaggagatctgcaccgcaacacgggaggggaccgtgcggatgggtgggggactggatcgcgccgatggagagcagatgggtgggggagtggaacgcgccgatctgcgcgccgaataggagatctgcgccgcgccgaggaggagaactggatcgcgc

SEQ ID NO: 175022 - DNA, 566 bp, Zea Mays
cgcgtgttttacactaaatttcgtactcatttacgctgttttagctcatgttttacgctgaaatcattcgagccagaacctgcgcatgatcggctgcacgcgattttcacgccgtaattttgggccctgtttgctgttacaaaacaaatatagaatttacgataaattgtactcatttacgttgttttaaatcacgttttatgctggaatccgctcgagacagaacccgcgcacgatcggctgcacgcgattttcacgccgtaattttgggtcctgtttgctgttacaaaacagatataggatttacgctgaattttgtactcatttacgctgttttagctcacgttttacggtggaatccgcccgagctagaacccgcgcacgatcggctgcacgcgattttcacgccgtaattttgggccccgtttgctgttacaaaacagatataggatttacgctaaattttgtactcatttacgctgttttagctcacgttttacgctggaatccgcccgagccagaacccgcgcacgatcggttgcacgcgattttcacgccgtaatttt

SEQ ID NO: 175023 - DNA, 791 bp, Zea Mays
gagtctcacggcacgtaacaaatcccggccatggtggtgcgccccgcaggcctcgggacccattgcacgaccccgctaacccacgcgtatatgatgcaccacgatcctaagcctttcccctccccaatttctcatctgccattacgaaattgcgagtgtgtcggtgctgggagaacgtgattgcgtcgccgccgtggagtttcggtgcccttcgttggccgtggagttttgcctgggtccggtgaatcgtgctgcggcgtatcggaccgagaagaccagtgtggccacgggaattcgtcgccgtgatcttcttcgccgcctcgttgcgccggttgccagggtcaggcttcgtcatggtgcgattgcgggtaactatggaccaatcccattcctaatatcgtgtgcatcgcattagactactgggagttaggtattatgacccggagcatcctgtgggagctcgccggagtttactccatcgcgggtggattcgtcgccgtcgctcggccacggatagaggtgggagaatggggttaggccgttggatgcgtgttggacggtgatgattagagcgccataccccttcgactaattgaatccgcatcgtcgatcttcaatccaaggggtgccagcgagattagctaatataaaatctgcgccgtagatcgcggatggggcggaccgcgctgcgtacaaaggacaccgtgtgtgtgcttgtcgatctacaatacaaagttattgcttcgattctctccaacggctataattgtggggggaggctataaataccc

SEQ ID NO: 175024 - DNA, 692 bp, Zea Mays
ggggagatgatgggggcataattgcgatgttacggttccctccaccagtgattagcagcagctggttcgtcccagcttacaccgtcagagctgatttggtgatccaggatcctaggagaattggacgggattgagggggatactggccacgccattccgtcatccatgttgcaatttgatgactcatgctggttcgcggtgaaaatagagctataatggccgtcattagagcggaatccacgaaattaaattatgacacagggggagatgatgggggcataattgcgatgctacaattctctccaccagtaatttgcagcagctggttcgtcccagcttacaccgttagagctgatttggtgatccgagatcccgagagaattagaggggattgagggggaaactggccacgccattccgtcatctaggttgcaatttgacgacccatgccggttcacggtgaaaatagagctataatgaccgtcattagagcggaatccacgaaattaaattatgacacggggggagatgatgtgggcataattgcgatgctacggttctctccaccagtgattagcggcagctggttcgtcccagcttacaccattagagctgatttggtgatccgggatcccgtgagaattggaggggattgagtgggaaactggtcacgcaagtccgtcatccaggtt

SEQ ID NO: 175025 - DNA, 805 bp, Zea Mays
acattcctctcaaggacagcattaaagggtggcgccttgagtggtttatcatggaaaaccactgcaagtccctcctcctcggtcggggagacagccagatgtacacacttcgagttgggttgagtcccccactgctttggaggtgacggaggctagggttctgcttgctgagatttgtctgctcaaggagagaggtctgactgccgaagctgtggttgctgacttcgttttcaagaatattcagcctttgaaagacagggcatatccagcttacttgtacagtggtattactaactcaactcgggtcaccaacaagaaaattcctactgaggatatggtgagtcgactagacatgatcctgagtagcaaggtatcaaatgttggtgctcctgttgcctattccgcttggaatctgccacctcataggtcatttttcaatttcgtgtccaatcctcctgctagtgatagtggtatgggtcttagagtgtgaccctctcctgaagacattgaggctctggttgctccccttcgtgatcttcctaatgatgagagacaagttcattttgagatgccgacaagtccggatgatgcagagatagatgttgtactcaatatgttggctggagaatcttctgactcggcccatgctgaaccgatggctgttacggttggacaagagcttaacaaaacagtggacacctgaaagcctgagggtactcgcccaaagcatcctcgccaagttagccgtccgactgcgcctgttgaggaaaagaagaagaaggagaggcggctccggcgactgtca

SEQ ID NO: 175026 - DNA, 614 bp, Zea Mays
gtctatgtgaagctcttcttctctctcccacgtagcttcgtcttctccgtggtgactccattgtaccttgcacatctttatcaccttgtttcttgtaactcgagtcaaagtgtctagaatcttgatagggtactctgcataagttaggtcatcttgaacactaaggtcctccattggtagctgctcctcaggaaccctgaggcacttctttagctgagacacatgaaatacatcatgtacatctgacaggtgatcgggtagttctagctgatatgcaacttctcccactcgctttaagatcaagaaaggtccaatgaagtgaggggacaactttcctttaactttaaatctcctcataccccggatcggtgacaccttcaaatacacatgatcaccctccttaaactccagtagtcttctcctattatcagcgtagctcttttgcctggattgtgctattctcaaattttctcttatcattcaaacttgttcttctgcctcttgaataagctcaggcccaaagaactgtctttctccagtctgatcccaatatagaggagtcctgcattttctgccatatagagcctcaaatggtgacatcttcaaactggcct

SEQ ID NO: 175027 - DNA, 459 bp, Zea Mays
accagcaggaggatttgacacgaaatgagtaaaggccttggaaggaggcaggttctaggccgagtatgcaacaggggcaccaacatttgataccttgcctctgagtatcatttcgagccggctcaccaagtccacagcaggaattattctgttagtgacccgggtggagtcagctaggcctcgatacagataggccgggtatgccctgtccttcaatggctgaatattcttgaagacaaagtcagcaaccatatcctctgcagtcagacccctctccttcaacaatccaacttcagctagcagaacccctgcctcagccacatcctggtctgtgggggattcggtccagctcggagtgcgaacatccgactgtctccctgaccgtggggggagagaatttccgtgattctcaacgataaaccactccaagcgccatcctttgatgctgtccttgagggg

SEQ ID NO: 175028 - DNA, 534 bp, Zea Mays
gcgacagtcacgatttgcttttatgctgtcggatggccgagggttgggttcgggatctccggagtccgcgcaacacgaagcagtatccgttccgaattcggcgcgagatagatggaggacctaacatacggaccccacaacaccgcggaggcaggggtgacactaacctagcgggcccctcatgtcagcgcacaacgcaatcgggttgggttagcgcggaggagatgacgtttcggccccactcgtcagccgaggtgagtccgcgcatggctgaggtgtggtggcgtggtagtgactgacgagggcccccacctggcagtcacggcaagcaaggcgcggttgtgggtcggctgagtggagaagttgggccgcgcgaaggagattcagcccaagacacaggtaaggtttttcatttgttcttttcttttctatttcaatttccgatattcaaatcaaattcaaattcctcttttgaacttaaattttccaagtgccaaaattaatactaatgtgaatataatccctattatttac

SEQ ID NO: 175029 - DNA, 462 bp, Zea Mays
ataatgaattgattgattagagagacctctgtgtatatgggagaggagatctcatggcttatgaaaacagaaccaaacaagatctccccgtatctctctgacccatatataagggccgacctgctatacatggcacgtgcccataccttatacacacacacacacacaccatatattgcagtcgaacatatacaaggtccatgctgctatacttggcagttggcacgtacccataccatatatcacacaccatatatggcagtctaacactgagcattattaccctgactttttatatactttacattggggcaaactatttacagacaaacaatgcttcattttgcaagtattacctccgtaaaattagaaaattatccccacaaactttacatgtatagaatgaatgccagcttgatttatggattgagctggcaatatgttgatctgcttttcttttcc

SEQ ID NO: 175030 - DNA, 905 bp, Zea Mays
gtaccggccggattacttgatgacgggtgctctacttcagttgaaaccaaattcaaggcctaacaatcgtttcccctcaactaatttcacgaacggcgctctaaatcatctaggccacggggacagcgcagaccacaagtgaacaagcgtgttcccgacgatctagggggtcctggtctaattggctgggtcgaggagcatcagggacacacaaggacactaatgagcacggggtatgagcaaacctggaacaagctagccccggcgagggtgtttctacggtggcagaaaccgatttgggggaaatcccaaattggcgagctctgttgatcaattggaggcacggtttagtggcttgggtgcttgactaccttacggacccgacgacacacttaatttataggctccgggggcggtggccagtgaatttggagttgacgcggtggtggtcagagagaagagttgcactagcgcaaagattagtggctttcactgtggcaggctcaccggcgatcaccgggcatgcctaacacgagcgactgcgacgtggtaattgtcgaggcacgtggcgttcggtcagtaggtggccaacttcggtgaattatctgaaccagccgcaaagcagaaagggggtgcgacggccagccggaacagtgcccatactcaacagcggtgaagatctttctactctggggtgttatccgggcctaagcgagcacaaatcacctcgccagcgtgaatccacgcgtggggttcgcctatggtcaagggatctaaatctgctgatattttcgttactgtaccattgcgaacttcttcagtcagcgtggcagagcgaatggcagagaggtttgctccaaattttatgtattgacttgatcatatctccacatcaaagttataac

SEQ ID NO: 175031 - DNA, 564 bp, Zea Mays
gttgtactcttttttcctttagggttttgtccccatgtagttgaaatggggttttacctaaaggtttttaacgaggcaaccaatctaaatagctctttataaagcatggtgatctattttttgatgtctcatctcatgtatggctgattgtctgattttgtatggctggtggtgtaatactgtaatgcttgtatacttgtatggcaatggcactatggctgattgtctgattgtatggctggtggtgtaatgcttgtatacttgtatggcaatggcactatggctaattgtctgattgtatggctggtggtgtaatgatgtattagtgtattgtatggttgtatattgtggtgacagtaatgctgtattagtgtattgtatggttgtatattgtattcttgattgtcgaacaaatgtattacgtacatatttgctatttgcatggatgttcatgtttgtgatgtgggtatagggccagcacggcacggaagcccagaacggcactacggcccggcacggcccgattaaagtcaatagtgccgggcttgggctgcggcgcaggcc

SEQ ID NO: 175032 - DNA, 355 bp, Zea Mays
gatgaggagagagctgttgagaagctcttctgttgcatcctcgagaagtacaagcagattgctcgctcgatcgaggctctgctagacctctccacgatgacaattgaagaggcaatacgtcgtctcaaggtggtcgatggcgatgaaccacaggctccctctgggcctatcactatcggtgggaagctacatctcactcgggagcagtggaaggcctgccagggtgacaagaagaaggggagtcctcctcgacacgaggccgcaaacgcggcaagccgtgcaaggcacgtggaggcacccaggccagggcacgaggccatgctgagcgtggtgcacatggaggtgcccaaggcgg

SEQ ID NO: 175033 - DNA, 485 bp, Zea Mays
tctggaggtaaactatgatcctctatccaaaatgatcttcttcggtacaccgtgtagagactcattccgagacatgtataacttagccaattgtgatcccttacaggtagtcttaaccgggatgaaatgactcattttggtcagtctatccaccataacccatatacaaccatatcctttcgaggtgcgaggtaatccagtaataaagtccataccaatctcttcccacttctactcgggtatctttaatgggtataatagtccagctggtctttggtgttcggccttaactctttcacacccatcgcacatagccacatgtgcagccacatctcccttcagtccacaccaccagtacttctccttcaaatcctgatacatcttggtactcccaggatgaatagaataatccgagtcatgggcttcgtacagtatagtcccacgaaggctatcattctcaggaacacatatccaatccttgaact

SEQ ID NO: 175034 - DNA, 541 bp, Zea Mays
gtcatctttgtcggtgccattgtacatcaaggcccctttcgggtacttaagtttctgggcgtagtgtttggcttccgcaaattcctcttcagacaaccttttacccaaagcatgtcaaataataatgtcaagtccttcagaaggtgcttcaggagtaggagattcaatcttcttcggcatgtcttctttctccagaacaagactgatgtccgagggtccttgttcaacactccgcccaatcccagcaggctctgtttcaatgggcaaagagggcccagcttcgggttcagcacgagctgtagtagcttcggtagtctcctttgcaggagcaggagttgatgcccttgtcgactccatgacagcgtccagcacgcttgccatcctcctcctcttgggagttattgcaggggctttcgataccttcggtaattctggctccggtggaccactcaacatttttggtagctctgtcgtttcctctcgctctggctctttggctgcctttcctttggcttcggcagcatgttttggcgcttcggcc

SEQ ID NO: 175035 - DNA, 546 bp, Zea Mays
gctgccggcggccagtcactactgcaagtccttgtcgtcgctcatccgggagacctacgcgcactgccatgtcccctgcgtcaggacccccgccggcgccgggtggagctccggcgaggacagcgacgacgacaacgtcctcgacgaagcgcaagacaccaaacaggtaataagattggtatatatacgttgcgcgtagcccccggtcccagttctcggtccgttcacgcggttcgctaaaagcgctgcacccgtcacgttcttgcgcaggtgatcctccacgagatgaggagccggcagatgaagaggcggtccaggtgcggcgtggacgtggactcgccgacgctgcctctgtcgtcgagctctgctttcgcctggtcgtacaccccgctcgatccaagaaccgtcctcgacacggtgtcaagtcccaagacgtgcacgtgcgtcgtggtggagggaacggccgcggaggaggagcaggaggaggaggcagccgacgggggggactgcgacgcggacgacgagagcgaggcgttcttctccgtg

SEQ ID NO: 175036 - DNA, 750 bp, Zea Mays
tgggacccaggtttagggagcttgaggactttctcgatgaatcccttgaaataaaaaacaattcttggtctcatggtagcaatatggatgataaatacatgtcctatgattttctaggacttatcttggttagggatgaaagattgtcaccgagccccttgttcgactgttgttgcatattgatgttctgtcttgcgcctcttatctcctcctttgtctagtttgatctttcgctctttcttctccttgtcccttcaagatgaggacatatgctgaaggaatttctcgctcatgttgtacttatcgacaatttggaatagagaggccagagtggttggagcttgtgcacaaacttctgggatagttcttgattcttgagtgtagtcatttcattgggcatgttagagatgtcgggtaggctttcatgtcacgtcgtccattgatgtaactatgtaaggacttgtcttctttctgaatgacttgtttgggccatgctgagtcttcctctggtcataggtcatactaaaattgttgataaactggtgggttaactcaccccaaaagtcgataaacttcgctaggagaccaaataaccacttaatgggtgaggtaccaaggcacatgggcaagtagttggccatgatgtaagagtcacctcctgcaatagtaatagacaaatagtaaactccaagccagacaaaaaggtttgtatgaccatcatatgacttaatcggtgttgacttgaaattc

SEQ ID NO: 175037 - DNA, 496 bp, Zea Mays
acactcgggtggatgttcagtgatgaacagtgacctgacgaagaacgccaggttcagtgcactgtcgccggtgagcttgcgccaagatcagagttcgccggggagattcgtgcttgccacgtagtgaataactgtgggggagtaaaagatctagcagggggtggatttggtcatgggtagaaacttatcggctgcacttgatgctcgtgcgacgtggccgagcggccggtgtcgtcgtggtacgccggcgacctcaattgcaccacgccgtgactctttcaccacgtagtgataaccgtagcacgcccggaattaccatcttggagcccttgcaccggctggcgccacgacgggctcgccagtgaaatatcccacctccgccatgttggttctagccaaaattggcgtgacgcgtagccgatccctttaaattgagcactgacctcactccgcctctctattaagccttcattccaccccctgatcagcgttctcg

SEQ ID NO: 175038 - DNA, 474 bp, Zea Mays
ttaaacacgacggggggcaataaaaaggacgagagagggcgggagaggttccttacctcaaggcgaactccggggacccctcgatggcgacggagacgcggcggccgcccgagtcgacggtggcggacctcggcggctgcgcagagaacggcggtgagcgcgggcagagtgattcggggagggagaggggaaattggggcgcgtcccgggttgcggacatcggggcgaagctcaccgtggcagagggcacggcggggctccaacggcgacggagaaacgagctcgggcggcggtggtttaatggcagcggcgctttggcgtgtgtgcagcgtggggggaggtggaagggggggtctgcaggtgcgcaaatgagggagggggagagggcgagcgaggttctgggctcaagtggccgaggcgaggtggttgcgagctccacgcgcgacgtgggcgcggagtccgcggcacgcgcgg

SEQ ID NO: 175039 - DNA, 358 bp, Zea Mays
ccgctccatatgcaagctgcaaccatacagatgcggcgaagtgaatatcacctacccgttctacctttccgacgacacggcggacgtcctggggaactcctcctcctactgcgggtaccctgggctggccatcgactgcgtggacgacgagtaccccaccatccagctcggcggcggcagcagcacaggctactcctacaacgtgacggacatcgactatcccacctccaccatctacctcgccgacccggacgtcctcgacgacgcgagctgcccgcgggtcgaccacaacgtcaccgtctcgccatcgccgaccttgtggctcaacctgtcggactacaccgtccgttacctgctc

SEQ ID NO: 175040 - DNA, 521 bp, Zea Mays
gggtggtcttaaaggcacgggcgagcatggctgagtggtggctctgacatgcactcggggtgtgcgcgggcgagcgccagtgcgagctctggcgtctgggcatggcgtcgagcacgaggcagcgtagagagaggtcatgttcaagcgcggattggctccaaatctttgagattatggccatgatcccattgagagatctcttcctcggacattcctttgtcgtttgtgtgtggaggcttatgggtttcgctgactggatcaagagatatggaggggtgaagttgggtttgtctcactgctgaactccgagagaagatcccaggtttgacgtgtctagggcacgcatctcgatgccatcttcacacacattgcagaggggttagtttagaacaaaattgtcaatgggggcttaaggatttgagctagggatcaaggtgaacgcgctcaagttctaggtgaaggctgaaattcagaaatctgattttgagattccccctagggagctttcacttggagggcct

SEQ ID NO: 175041 - DNA, 510 bp, Zea Mays
tattgaaccggccacagtgcctgaatttggcggtgagacctcttcggctactgaagccaaagaacctacgcttacgcagaggattgaagagtcagctgcaatgccaaaggcatcctcagccaaattagctgagccgaaggctgataatattgaagagatagaagtcgagggaatgaaaatattagaagttctaagcccttcggcagaagtgacagtgccgaaggcacaaaaatgtcttaaagcgacccccaagaggaaaagatggccagtgtactagatgtgctggagacgataaaaacttcaagctctactccagggaaaactgccgaggcttcaaaagcgcagactgatacaaagctgatcgaagctgaagctacaaagagccaggccgagaccgaagctaggccttcagagcccgccaaggagaaatccttggaaaccggagaaaaggcaacggaaaaagaagctgtagaacaaattctgcctaaaaaagctaccactcctactcct

SEQ ID NO: 175042 - DNA, 463 bp, Zea Mays
ttctgatgcacatgcatcatcctgcgtctttcttttgtgtgaattatgcgctatgccaaaaaaaatagtgatgcatttatacaagagataggctacattgcacatgaatttctaagattgtaacttctataaagtttctttttacaaaaaaagcaacataaaaattcattttcccaaatattttttttacaggaaaacaacttttgcagagaaacaagaaccaaaactatattgaagaagacaaaagccctaggaaagaagacctaacacagacgagacctagcttgtcgggtcacctgaccctccagaggccgcccactgttctcccagactgaaagcggtctgggacgacccgtactcaccgccgcaataagcccatacgagcccaacctggaacccgttggcgagcattgggcaacccatgcatacctcccccgagctgatttggtggagggatcacgat

SEQ ID NO: 175043 - DNA, 665 bp, Zea Mays
gcatactccacaaaggaagaattcagcgtggaaaagagaagaaagccttgcagaggtggtatctgaaacttacgaagaagattttaacagctttgtgataacattttggtgcccttccccttcttgaggacacacctcgctcaagctaccaagacgcacatcaaatttatcatcaagaaggatgttgctggcttgcacatccctgtagtagagaaccaacaaatttagtcaacagcaaaccttcacattgcatctaatttactggccatggaaggaaacatctatgcagccagaacccttcgtgttgacataaaaaactgacaaaacgacaaaacaatcagaatcgattgtgatctactattctactacgtgcctcatttgataacaacacaaggaaaaaaacttcccagtgaaatcagggtgacaaagaacttcctgttattctgtatggcaaaataggtgaatgtttaaatgatataggccaggagaaacatctcagcaaaaatattaaatgaaataacaacaacgttcacattgaatttccagtacccagataatgcatggaacatgtcgcatcaagcacgggatactaaatttccgagtcagcaattgctgacacacattagcgtatgttcaacgtattcctagtctatggggaaagctta

SEQ ID NO: 175044 - DNA, 609 bp, Zea Mays
atatggggaatggatgggatgcttacttgcccatgttagtggcaggtggcgtacttccccgcattaaatgcgtgcgacgcgtccagtctgcagtgtatggtatccactattgccccgcacgtttccaaggcaagggcattgactcaatgcgtcgctttggcacccttcattatgacctccattattcctcgtgcattactgaggaatgaagagacaggcgaaggagactgaatgacaccgcccattgcaccgctatgcatgacagcatatcatgctacgtcgcaacctacaccaagttctgtgtttgggacaaggtaataggataaggatgccaagagatcacacaactgccaagaggagatacgagctcaagaagatctagcaccaccagtcctatccaaacacctcacacttcatattgtaacgattcatgggccctcctgccggggcccagctcccttgtagcaagcccccttggactataaaagggagtgcacttgcattgtagcaggagaagcgacacacacacagactctcgactctcaagcaatacaactcataatggttgtagggtattacgctccagtggcccaaaccactctaatcctt

SEQ ID NO: 175045 - DNA, 1940 bp, Zea Mays
cataatgtataagtcctgatatcagatttgcttcttcctttcgacatatgaggtcaggcttgattgtatagttaaacaattaccttatgggaaaaaaatccaggaacgaatgctatgttccattgccatcctcatcaagttgttgtgcaaatagtattgcaggaaagcacaaagtcaccaaaaacccccacaggaaccttttccactcctaaagtgatggaacctgttggtatctctaacagatatctccctctcctcaaggaaagcacacataaagtcaccaaaaatccccacaggaacattttccaccactgaagtgatggaacctgttggtatctctaacagatatctccctcccctcaaaagatgatataaatttcattgcctcatggcagtcgccacaaattcggaggttctttatcacccgaagggttgttcctgggctagtgcttatgagtcccaaagcgacagctagcttctcactgtgaacagcaagaatatcatctttctcttgttcctccacatcatgtaggacaaaatctgtgcttggtacaaagcctagcttcctcatctgaatattaagctggtttattttctcaattatcgcagtcatcatagggtgtgaatcatcaccagccaacaacatatgcaccttgttcttgatctcaatccagctacagcctttttccttcttcaagcctacatccttcatcatctctctaaccctattaacccgatcccacattttcttagaagcataaatgttagagagaaggacataattaccagcattttctggctctagatgaaagagcttttctgctgcaacctcagccagatccacgttgccatgaacccggcaagagcctaataatgaaccccaaatataagcatctggctcaaagggcatgtcacttatgagatcatatgcctcatcaagcttgccagcacgtcctagaagagtaaccatacatgcataatgttccatcctcggagaaacaccatactcattatgcatttctttgaaataatgacgcccttcctctgtgaggccagcttgcgtgcaagcagcaagcaagcaggtgaaggtgaccatgtcaggcttttgtttgcacttcagcattgagtgaaacatccaaactgcattcacagcctctccatacatagcatagccaccgatcatcgcattccatgacaccacattccgagataccattgtatcgaatattattctcgcatccttaaccctgccacactttgcatacatgtccaccaaagcactgctcacataaacatcatggagaaagcccttcctgagagcaaaacagtgcgctgacctcccatgcatcagagctgcaacattggcaaacgctggcagcacacaagggatcgtgacagagtttggttcagtcccttgtgcctgcatctccctgaaaaactcgacagcttccaaatccttaccattctgcacacaacaagcaacaatcgaggtccaggacacgacattcagctcaactccccggtcaacaaactctttgaacaaccttagtgcctcgcagacttgcgcgttccgagatagtcccgcaataagggcattgcaagaagcaacatccatgtggctggactcatcaaacacccgaacaacctctgcagcctggccgcacttcccgtacatgtcgatgagggcggtgaccacgcaggcgtccgccctgcaacctgccttcacagcgtatccgtgcagctgttggcccaccgaaaccaaaccgacgtccccaacagcagacagcgcgcacgagacgcccgtggcgtcaggacgcaggagcccttccccgtgcatggtcgccagcgcaacgaccgcgtcccgggcacggccactgcggttgagcccggacacgagcccgttccaggtgatcacgttcggctccacgccgccatcccgc

SEQ ID NO: 175046 - DNA, 2850 bp, Zea Mays
tggaaaacagaaaattactaatccttaagagcatctagcgtaatggttgttaaggcccattaggctcaggcccactgcctatatatataatagtccttaggggctgatgatttgtggttaatcctaaggttagtgacacggtaacagaggaggttttgattagggttttgtcaattgcacgagagggctagtgtgagaacggtgcggatagtcaccagcttcacaatcaggatgaaggtcttgtcgtagtcgacaccaagccactgggtgaacccgcagagaacctagcgcgccttgtaccgcttgaggttaccgtcagcgtggagcttatgcttgaagatccacttgccggtgacaaagttagagccaataggatgtggcacgaggtcccaagtgatactggacagcagtgcctcaaagtcctccatcgtgtgtcaccagttggggtcagtgagggcagcgcggcaagaggacaaaatgggaaagacggttgttgacgaagcagccatgatctgagctggttaacgaaagcccagcttcccccatgtggtcatgcggtgatgatttaccataggggaacaggaacggcccctatggcaacgcacggaatggagacaaggccaaaagagcgtactgcagtgacgaagcgtcagctttcagccgctgtcgtcgattgttgaccagcaacggccgaggggtgggtgctggggcgagggcgacgaggctggctggagtcaaccgaggcacgggcatcggcgtgaaggagccaatgcaggctggagttgactgggacaatgtagagcaggctggagggctagcactgaggcttggcatgaccagcgggcctagtagggggccagcggccctagcagggaggcaggtggtgctattagggagggcactgagctcgaggtgtcgggcgtgctcgccggaggtgcaaggacgcccgtcgccggagcaggggcactagcagggccagatgtggctactcgtggggcaggagaacctgcaaaggcaagcctagtcctggtcaacaaggggactatggccgactcaaaaagaacatccaaatcattaggagaatcagcaatttcaaaaaagcgaaagttgtctcgtcgaagccaacgtgatgggagatcacaatacgacttgtggagaggtcaaggcaacaataccccttgtgatcggataaataaccaaggaaaacacaatgggaagaacggagagaaagattttatgggggtggaggcggaaaggctaggatagcaggcacactcgaaaacccgaaggtgcttgtaggacaaaatcgtaacagggcaacgtaagggttgggcgtggtgatggccttggatggaaagacgattaagaagataggtggcggtgtgaagaccttcgacccattaccgggcaggaagggatgcctaggacaataagcaacaaatgatgttattggtagtccgaataatacgttcgggcttaccattttgagcggaggtataaggacaggacatccaaagaataatgtcgtgggtgaggaagaaggtccaagtagacgagttgtcaaactcgcgaccgttgtcacactgtatgctcttgatagtgcacccaaactaggtggacacaaagccacaaaggaaaagaagtgtgacagagtggtaaaaatggcagactttagccgaagcagaaaggaccactagtgcgaaaagtcatccaaaatcaccgagtaatatttgtaattggacacactagagacaggagatgtccacaagtcacagtgcacaggatcaaaccgaggcatagcacgagaagacaacaacgaaaagggaagttgtacatgacgaccgagctggcaagtgtggcagagggaaacatccgtgtccttatgacaagagatagccgacaagcaagctagacgaaatagaacatccgagctaggatgaccaaggcggtggtgccaagtggaggttgagacaacagtcagcgcacgtgcaggtccaggcaacaagaagaggcgtaggcgatcacgtccttggaaaaaagatcttcaacagaatcaccaagcagatcaaattccgtgcagcagtgattatcagtagtaacgcgtcggaaagaaaggagattagcgataatatcaagagtaagtaaaatgttgttaaggtagaacggattggaaagaaccgaatcgcctactgaggtgcagagaggatccgctaccaacaaggatagaagaaggaagagcagggcgaggtggacgaagggtaaatgtaaaaccggcgatggaagcaatgtcgtcggtggcaccaaagtcaatgacccagacctctaccgcgatagacggctacaaaagagccattgtgccgaaggagttcgccagggactgctaatcccagggctagtccaaggcgtccacggctactgtggcacccaatggtacttgggcgcaggcgtcgatgcaggaggtgttgggataggcgccgggggcatcatccactatggctgaccacctgcagatccggcgaaggtctgttggggacgttgctgctgctgaactgcatcatgatgatgtgatcggtccaggggttgtacaaggagagtcaggcaggagagggtgtcttggccgctggagtttcctccagagccattgctgttaccactgtggccgcctctgcagccttcgttcgccccttgttgcgcccaccggagcggttgggagcactagcaccaacaggaggggtggcagtagcctgagcgaccttggcggcggcttcggcgcgctgcgtctagagggcagcagcgctgagatggtagggggcatggctaggaaggaaagcggaagcggtaggagaaacc

SEQ ID NO: 175047 - DNA, 373 bp, Zea Mays
gtgattggccacgagaaatgtacccatcaaaatcggctctccctccagtgtagtggccacttgtgtatagtagattcgcccagtcttctttatatttttgcccgctgcattatttgccgtgttccccttgccttggcttgaactccccaagttctgctgattattggacttgttctgcttcagatatgggcagtctttgataaaatgtccagacttcccacaattgaagcagccggttgaagaactcggaagggcggggaaacgagcaccaggggcactcgactgagtagttgaagtgggggcagtggcagggcggatgaatacatgttgtttgaaggggtaggagggtggacgaggtgaagaacggttctga

SEQ ID NO: 175048 - DNA, 588 bp, Zea Mays
gcaacctttaacgagggagatgaaaataaagagtactgccttaaaaattgatggttgcagttgtcccactgcccctaggaattattcagctaatcagcttatgctgcggccagagggcaagatgctctagtcaagtgaacaagcaaaggagagcgcagaatgctagttcactggacatcatatgctgatctcaacatatatttcacacaacagtaaaagaatatgcgctttatgcaaatttataagactagtcttactagttcaaatatccaaaagagagaatttaacctcttacaatcaactggttatattttaaactagcacattattttcctacaaaaccatgcatcaagaagtgattattgtgcagatagaagacgtaacagctaaaaaccttatgcataatacaaaagcttccaagcatttaagtttaggggcagttgtaattatacccctggtaggaactgtgttttctaggctgaccgatcggaggttgtagtgatgagagattggtggtctagagtttaatcgcgggggacggcggcctggcgccgtggttgaggctgcggctcaataggaggcggctag

SEQ ID NO: 175049 - DNA, 700 bp, Zea Mays
cccctacacaggatccttgctaagatatgcatgctagggcagctaaacaggcgcttggacaggggcagaagcgatcctccacgtgttcgaccgaggctggcactcgggagcgcgctctgaccgtgcccgcgcacgccacgagctccggtcggctcgacctcgcgcctagccccgcacccgtgctcgaactctcacatataagaagcaccagcccctcagccttgccctcccgcacaccccatactttttgctggcaattggacgccaataatcgctagaacaccgagtgcagcaccgcccgcatgcttgtcgaagctttggccaccgtagcccgaccactccaacctatcctcttccagtctagctccccggccatcttccctagagactagcgaagcttcccagccactcagaccaaacactacctcgccagagatgccaaatacctcgccagacttgtcccttccaccggttccctcggtccaggtaatctacccacccattcattgattccttgaacacacatagtccctgtcactcagtgaagcttcctgtgcggtctgattgaactattcagccgtggtatggccagtacagacatcgccgacgagctccactgcccgaatccgtggcaagaccagctctaggcaccattgacgccgacccataactcgacgtgaccgccagaggctccccatcc

SEQ ID NO: 175050 - DNA, 559 bp, Zea Mays
gcaactgaatggggggatcgtcatggtacagtagctcgaatggatcaggacgccagcgcagccaccttaccgccggcgaccgattgccgccgtgattcgtgcgaccgccggtccactttgtgctctggatagttggatatcgtcgcggggttaaaaatcttcgccgccggtgagctggacaccactccggctagccgtagttcatctcctctggctcaccgcccgcgggtaaagttggtcaccgtcgtcgtgccgtccccgtcgtccaccgcgtgtcctaaccgcgccatcgtgtcgccgtgactccctaccactgtcctgtcaacgccggtgagcttgccacggcgttagccacgaattcaccgcgccgccttcttccccatctccgactgccagcgttactcgaccaaattggccaccaccgcttgagggctctataaattgacctcgcccgtagctgcgccatgtcgtcgtgaagctgtagcacccgctcccaccctcgatcgtccactagcacgcacgaatttccaattccccccaaatcaagtttccgccaccg

SEQ ID NO: 175051 - DNA, 713 bp, Zea Mays
aggatttggaggcaggaaagcaagaactagggcacggaaaggcggctgaaagcgcagtacatatgggatattcccgagtcagataccgtttccaaaagtgcccagtcagcacccggcagttacttctaaaacaccggcgtgccacgttgtcacccggcggttacttctaaaaccccagtgtgccacatcatcactcggctattatcctcaaagtggccgacacggcccgttctaactcggctattatttctaaaacgccgacgttatcaccagtcgctcgacatttatctctaaagtgccgacgatgtcttcagtcgctcggcggctatctctaaagcgtcgacgatgtcctcagtcgctcggcggttatctctaaaaaacgctggcgtcgttacaagtcactcggctgtcacctctaagatcgccgacgtggtcaacagtcattccgacgctgacatggtttcgtcatcactcggactctatttcaaatgcataaatgttgacaataatagctcggccatcacccctgaagcggcgatatgatgcccgagttatttagatactattccgaatgaatcaacttcacaaataagagatcaacttactatgaagtaaagtaattggtacaggaggagataaagtcattcttcattaagggaagtaacagtacttacaaatcaactcattatgagttgatacttccctactgctac

SEQ ID NO: 175052 - DNA, 1152 bp, Zea Mays
taagtactggcaacacgctacgggggtgggcacatagtgcttttttgaggaaggcgacgacaatcgcaacttgattgtatgcaaaaagcacgtcggagtcacaagtgattgctcaggtttgggccacacggtagtctaataccctacgtcatgtggtttctgtctgtatgtggttgagttctctagagtatagggactatctcaaggaaaaaatgaattatatggatgtctgccacattttcgtagggtcccctctcagccttattgtcgactgaaatgggggttacagagaaaactacctaagtccatgatctccacattctgcttgttctgcccgttgcgatgggctacggtaaacgagtcgtctgtcgattcctacatgctgcacgtacaggaggcgtcgggtttctcttgtacgagcacttgcatctttcttagactccaacagcttttgtccaactgaggcccatctggaggacttcgggtagcccatcaagggccattcggatggcccatgaagcgtcttcgggccatggtgacctgggggatatcaatcccccacatgggcctacaaacaagggcaacataggaacacagaggagatggcaagaatggcaagggcaagaccttcagagcaacctacaggcagtggcactagaggcaaccatttataggcgcacaagtacgcttagtgtcacacgttgtctccaagggccaaccactacctagttaccagcaccccttcgcttgccaagcattaatagcacattggctcatttcgtgaaggatcgaacgacacatggatcgacaacaacattgactcatgtgctgaactcaccaactcgtgttgcctccctcgcataccatgacatttcagctctaggaggacactcaccaggtaaccagcacttttcgtcccccaagctacattaaatgtccgacaactcatttcctagaatttgacaaaccatgtcatgtgtacatgtccccttatgtagcaaaatgattcacagataccaaccacctcgactcccacatcacacaggtagcagtcacggatgggtccacaacttattacaaatacaactcccaaacccctaccttttccaatacccctacttttacacccatgtgttacagggaagaggccac

SEQ ID NO: 175053 - DNA, 443 bp, Zea Mays
ctgccatctcccgacaaacatgaatctctttattgtcaagcagacaataaaggaagtcatcttcatcatccccaccatacaccaaggaccctcgagggtactacagatccctggcgtaaggttgcgcttcaacaatttgctcatttgataatttttccctgaagcatgacgcactatgaattccaattccttggtaagggctccaggagcagggaactcagattcttcggtagcaccctcttttcctaacattaatggtccctcggtagcctccgaaggtcttgcttcagcaccctcctcagcaccctccgaagatcttgcttcagtgggggctgagggctcagcctcaaccacatcctgcgttgtgccagctttggcagatctctttacaatctcgccttccgtactaggtgcttcggtagaggcaggagttaacgccttcg

SEQ ID NO: 175054 - DNA, 622 bp, Zea Mays
aatcggtggacggtggtagggcagaaaggctggctcacgacgtacaaggggcacgccgcacgcgcagctcaaatgatgcggccgggcgactaggcgatccgcaaatgtgtacgtcaagtgattgctggttttgtttggcacgcacgcacgtactccaacgggccacgggcgtacgctcgcgcggcatggggcagcccgcggcaggcggtggaacccagacccaagccaggggggattcgttcggttggacgtcggcgtcgcgggggcttttcgaaattccgggccgcggcgggcgccgacaacgccttgattccgagcgcgacgccctctcgattccgacggcgacgggctgccctgcgccgctgcgcgccgtgccagggacgggtcgggtcagggtcaggccgtcagtcgccgccctgtactgcggccgggacgtgtgtcggggtgcgattcgtgccgcccgctcgtgctcggccccgcggttcacgccagcgattgcggtgtggcttccccaaattccagaagaccagaacagcgtcgtttgctcgtttcgaatggagagatcgatctcactctcactcactgtctccgcgcctaaacaatcgtccgtgcggccatcagt

SEQ ID NO: 175055 - DNA, 648 bp, Zea Mays
cgcagatcggcaaatttatcaccgatatgcgtgggaggctgttgttgcccagggtacatgtctatcgatggaggccaagtcatgttgtttttgggaaatccactgttaagcaaggggagattgaagcgatgaagggcaaatatttccatgatatatccatagtgagggctggaggagagaataatgttcctcttcctgaggcagacgaagtggtagtattcaaaagttttatgaaggccaggcttcactttcccttgcataagatgctggtcaaagtgctaaaaacatttgaaatataccttcatcagcttactcctgaggctttgatcaaagttggagtttttatttgggcgatgaggagccaagggctgcagctagacaccaactgcttctgcaatattcacgaattgtcctaccaaacgaaggcggttgggaaagagcgatatcataacaactttggatgttatagttttgtgtatcggtctgatgtgaagtgtcatgtgccaacgcttcggaaaaaatggccgggctcatggatgaagcaatggttttacgtaaaaaatgatttgagtgagagggaggatgtgaagggcataatccagggccccattcgttcacgcttcggcatcaggagaccttcgatcgcgg

SEQ ID NO: 175056 - DNA, 447 bp, Zea Mays
cccgaaaactttgcgaattcaggtattctggtcccttgtgggtatgggagccggtcaaactggctatcataaggtctccgatatgactgccccccagggactatactaactccgagcttatctcggaacgccccagctatttcctcccttactatgtcaatggcagccggtgggagaccaccgactctttgatccaatatgggtgagtttgtttggatgttggtatgttgttttccttcccattggtttgggttttgtagcgcgttaatgcatgccccatgaggttcataggactggccattcctttctggccttctaggggccggaaagtactcactctcatgggtttgatagattatattatggtgctggtgtgtcatatggtgagatggggagtctagctgggacggatacggagttggatatccatcctcctttaaaaactct

SEQ ID NO: 175057 - DNA, 398 bp, Zea Mays
cgactacttcaacgttcaggagacacatggcggtttggtgccagcctaagatggaagggcccaatcaagatcccagagtgtctgctactattcctagtccagtgcgaccgcagatggcagctttcagcaatcaagcaacgaatcttttggccatttgggctataaatagagcccctagccggcctctactagtacccaagcatcacaagagctagtgatcattctcatactcctgcgcaacaccccgattccattctagagagatctgagcactgatatgagctgtgttagtcattctagtgtgtgtgttttttagatctatcttgtgttgtgttgctgtgttttgctcttgtgtgtgttctactcctccctctttctgttctttagagttgtaactc

SEQ ID NO: 175058 - DNA, 782 bp, Zea Mays
tgctaggacttggggaacaatcccacgatccgcgctcggcttcacccatgattgggtataaaatgggacccccagcccttgcgccctcctcgtgcccaaagcagccaccaagatcaacatccgagcaaaacaccgaagcacctgggcgtggtggtgaagagagaagggatgccgctgccgtggtgcctactttcctgggttgtctagccttagctagtggatcgggggtgttcaccgacctgggaggagtatgtgcgtgtgtgatttggagcacggaaggcctgggaggcatggcaattcctcgctagagctattgctccgctgcaggaccactgtgcgccataggcagggaacgacacaacataatcacaggtaatatcgctcgcataatgtcgcccttctctccacaatgtgtagcactaattagatttgagtttgcggctttggggtgcttgtggccattgccggccatggccctgccctacgctctggcgagggcagagatgagaggggggaggttgaactaacgtgggccattgatcttaagatgatcggtccggattagattagaatacctcttgatcggtggtcgttgatctgcggataaacgtttaggatcgcgcccgtgcataccccttcgcgcttctaatcccgatcgtggatctaggatccaacggttgtaggcctataccggttcgcggggcttgggttataatctggatcgttgaaaatagatcgcgtggcctagataaaatgataccccttcggcctgtgcattttgc

SEQ ID NO: 175059 - DNA, 464 bp, Zea Mays
tgcgggagagcgagaacttgggtatcaatcacccgagtgtgacctcaaagacgtattcactggggattccgactccggggatgacagagaccgccgcaagaagttgtacgtcatgtacggcaggagctgggaactcacctcccacaggaacgtcaagtccctgcgccgtgaggtcctatcggcaactccaggggtcccgaaggctgccccacatcaacgatggaggagcaccaccatctccttcggagcatccgactgccccgacaacatggcaggggccagcatactgccactcatcaccgccctatcatcgccaacatgcggctgcaccatgtgttgattgacggcggggcaggcctcaacgtcatcagccatgctgcgttcaagcagctgcaaatctcggggtcccgtttgggaccctcacgcccattctctggagtgggcccacagccggtgtatcccct

SEQ ID NO: 175060 - DNA, 740 bp, Zea Mays
cggcaggctgccgcggctccagtacctctacctctcgtacaacaacctctccagccacggtggcaacaccgacctcgaccccttcttccgctccctgagcaactgcactcgcctgcaggagctcgagctcgccgggaacggcctcggcgggcggctgccgccgttcgacggtgggctcccgcatggactccggcagctccacctcgaggacaacgctatctcgggctccatcccgcgcaacatctccggcctcgtcaacctcacgtacctcaacctctctaacaacctcctcaacggctccatcccgccggagatgtcgcagatgcgcctgctcgagcggctgtacctgtcgaacaatctcctctccggcgagatcccgagatccatcggcgagataccgcacctcggcctcgtcgatttctccggcaaccgcctcgctggagcgatcccggacacgctctccaacctgacgcagctcaggcggctaatgctgcaccacaaccagctctccggcgccatcccccccagcctcggagattgcctgaacctggagatcctagacctctcctacaatggcttgcaaggcccgatcccggcgtacgtcgctgccctgagcagcctcaagctctacctgaacctgtcgaacaaccgcctcgaggggcctctccctctcgagctcagcaagatggacatgatcctggcgctcgatctgtccgcgaacaggctcgccggcacgatcc

SEQ ID NO: 175061 - DNA, 544 bp, Zea Mays
cacgaccacactcccctttgctcatccgccgcattcctcctcaggtacgcggttcattccattccgtttcgtatccgctcgtcctcctcctccggctgcctcgtttcgaaaagggccctaaccgttgccggcgccagggttttgcccgcgcctctgcaagtccctcggcaaggttgcactcctcccgcatcgcaagtcatcgtcaaggttgcactcctcccgtatccgaacttctcgtcttcgcaggtacattcgtaactaccatttgtaccgtgtcttctcccccatgtgctgttacggatccgttcctcccccatgtagtgattagggtttaggtagcatcgacggccgtggttaatagttcccccctaatcaatactatttcataactggttactaacgattattgtgtgacatttgctgtttagatttcggcgactcaccggttattccctgctgcatcacaagctccactcctacaaaggtgatgttcacatcattttctttgtcccttatactgctttacttgttgtgtaagtattcg

SEQ ID NO: 175062 - DNA, 443 bp, Zea Mays
gtctctacaagatcttcatatttctatcacaaattatcatcactattagtgtagcggacaaaacttatgctcttccagcgccaagaaccaatgacaaaataatgcccaatttagcttcaagctctgtagtgatgtgggattttatggctattttctactcttcttacttctagtggatcagagatagattacgataagcatgtcaaaaggtggaatccaatgtagttctgctacataaactccaggtatatgtccattcaggactgacctttaccatttggcttaaaagtatatcataccaatcaaaggactatacctagtcaattcagcgactataagtatttacaattctgagagatgtatgcaacacaagcatagaggtcctagataggacgagtaaagtggttcgacgagaacacacaatggtttttcacacaaacatt

SEQ ID NO: 175063 - DNA, 616 bp, Zea Mays
cgtggataagcatcaagccccatggtcccttctccccgccgacccgacgcctccccactcgctgcgagctccgtcttcgcctcgagtccgcgcctgagctccgtattcgccgggattcggttaccataggacctattctcgcggggaaggtgggggcataagactacctggcatcgcccgtcctctggcctcgctaatcttctgaaatcgcacgcgcaaagaaaatcttgagcctcgcccaagctcggatccgccgccgccatcccccatcacctgcgccgtcgtcgggcatcagggcttgtgcatggggtgatctctggattttgccgccgctaatcctgggctgtcgtgtgtggtggatgggacactgattcttgtgccccgtcgtgaacagagagagggaggaaagcacgccgccgcatctaaccatgggcagtgcccttcgcgccgcgctatctggtatgacacgttccatcaaattcgcaagtgcctgaattttgttttgcgcgtttctaggggcgatttggatcgtcgggcagtaggcattgatttccagccatggcgccgccgttcctcagtaggcgccgcctggagttcgctgggaagtggaaaacac

SEQ ID NO: 175064 - DNA, 911 bp, Zea Mays
ctttccagtccctccattttagttagccctttctgtgatcccatagaactcaacatttctggttccatatggcgcaacatctcttcgcaatcaaattctttaaaatctttattggcatccacagaatccactttaccatccaccttatcttcaattccgacagctctctcgtcattaccaggcacttcacacggatccaactcaccatgttctgaccatatcgtgtaattgtttttaaacccctttttagcagatgtgattgaattactcctgtatctctccaagctatcttattatcacaatcgatgcacggacataatatctccttactctttcgcaaattcgcgtgcttgttggccgcttcaataaagcttctcaaattttgaatgtacgacggatgtggtcttggcacattgtacatccaacctcggtccattacctatccctatattgattaacatcaataaaatcattaattaattgaattcatccctaaaacatgaaaaataaatgtacatgaaagtgaaacaagatcatatcgagaggtacctagcaaatgaactacaaaaaatatttaaaatatccctaattaattgaatttaatccctaaatcatgaacgaaatgatgtgcatgaaaatgaaacaagattgcagcaataggtaccttgaggtgagacaactctttatgaagaatctttaaattagatcaactacaagtccaaatcttagaattcctaagtttttcttcaattctggtctatatataacatcacaggcgcttttttattccgaccgcttgtgaagttaatctatcacagacggtcgaaataaaaagcgcttgtgatgttatatatcacaagcggtttttctaaaaaaccgcctgtgattgtctacaatataaaaggtctcgc

SEQ ID NO: 175065 - DNA, 694 bp, Zea Mays
tgggggcccaggcccatgtgtcatacacccgacgcgctggttcttgggtacaagaaagttgcaccgccgctcgcgccaataccgcgcctcctcgtgaccgtcgtagaaggctaagaagataaattttcaaaaaacaaggcagcgactcgaggcaccccgcacacggtccaacaaaggaattaagtgcggaggtcacgggctagtcagctgcgggaacaggcgtggcagttggcatgaccataggcgagccggcactaactacgtcaacgggcgcacagaagcagcgagccgatcgccagtcaaactctggccccacctgcaggctcgcaccctcccctgaggtgggcccggtggccactgtcggtaccctggattaggggtaccccttactacggtataaaggcatggtgcctgtgcggttacccttagccgcgcggagaacagcctcaggggtatcttgtgggcagttaaggtggcattctctgagacaacgccattgggcctagaaggcaccggacccctgtgcgcacgacccggacccccggagtaaagcagctcgaagccattggatagggttcggaccccaccaagtgagctccggaccgcccataacaaggtcccaggaaagggagtatcatgacctagacccgggtccaggactgacacgtgtcctggctctatccgcggcgcctcc

SEQ ID NO: 175066 - DNA, 365 bp, Zea Mays
ggagaagaaaaatcatgaggtaatccgccatgaactccatcttgcatactctatgctgtcgaaacggtacacagagtatttcgatgtgcaggatgaagcacaaagactgggagtaaagattcaaaacctgtcggacgaggtggatcagcagaagaagcatatccacaccctgatggcttcttgcgacagcctggatgagctgtataaggatgttgtcggctctctcaccaccctttagaacaaccacgatctgacaatgaaagagcttgagaaaaagagagatgagctggtcaaatcccagtctacaaatggttggctctcaaggatctgcgtgcctcatcaaagactcaatccaaggaattgga

SEQ ID NO: 175067 - DNA, 416 bp, Zea Mays
  misc_feature (405)..(416): n is a, c, g, or t
cgctgcagccgccgctgctgctcgctcgcgttcttgtgccgcggcgacctcggcctcttgctggcgccgcgcactcgaagtgaccgagcgtagggacatggtgggctactgaggggtcgctgcgtgtggaagaggctgtctcagacgaaaggttgctcgtctgagcaagagaggaaggaacagttggagctcttgctgccgactgagtgtggggagaggcgcgggaatgagatgagcaagagatgtttaggctgcaggatagtttggctttgataccaattgtaagtagagggactctaactctcatcaagaggatgtctctatcgttggagcaattttctgtttattcctcaaacactacacaatgccgacgatctctgatcgtctggctaaatcaggtaaacnnnnnnnnnnnn

SEQ ID NO: 175068 - DNA, 1220 bp, Zea Mays
aaaatataaattaggggcacatgggatgaggttctagcagcatcactaattaaactaaatattgtagtatattttgatctcaaccacaactacaatggtcgtaattcccatttgatacaagtaatttttgtatacacttctcatagatcagccactatgcctcacaattaacatataaacttgtggaatctaactaattaacatatattctctgaagattacagcaggaacacccttttgcttgaacgaactgtcttgtgtggttccaaaatataaattaagggcacatgggatgaggttctagcagcatcattaattaaactaaatattgtagtatatttagatctcaaccacaacgacaatggtctaaattcccatttgatacaagtaatttatgtatacacttctcacagatcagccactatgcctcacaattagcatataaacttgtggaatctaactaattaacatatattctctgaagattacagcaggaacacccttttgcttgatggactgccttgtgtggttccaaaatataaattaggggcacatgggatgaggttctagcagcatcactaattaaactaaatattgtagtatattttgatctcaaccacaaccacaatggtcgaaattcccatttgatacaagtaattaatgtatacacttctcacagatcagccactatgcctcacaattaacatataaacttgtggaatctaactaattaacatatattctatgaagattacagcaggaacacccttttgcttggacaaactgccctatgtggttccaaaatataaattatgggcacatgggatgaggttctagcagcatcattaattaaactaaatactgtagtatattttgatctcaaccacaaccacaatggtctgaattcccatttgatacaagtaatttatgtatacacttctcacagatcagccactatgcctcacaattagcatataaacttgtggaatctaactaattaacatatattctctgaagattacagcaggaacacccttttgcttggacgaactgccttgtgtggttccaaaatataaattaggggcacatgtggtgaggttctagcagcatcactaattaaactaaatattgtagtatattttgatctcaaccacaaccacaattgtctgaattcccatttgatacaagtaatttttgtatacacttctcacagatcagcc

SEQ ID NO: 175069 - DNA, 496 bp, Zea Mays
cagcttcggtctcggcctggctctttgcagcttcgacttcggttagttttgtctcagtctgcgcttttgaagcttcgacagctttccctggagtagagcttgaagtctttatcgtctccacagcatctagtatgttgaccatccttttccccttgggggtcgttgtaagacctttttgtgccttcgtcactgtcacttctgccgaagggcttataacttctaatatctttgttccttcgacccctatctcttcaatattatcggccttcggctcagctaatttggctgaggatgccttcggcattgcagccggctattcaatcttttgcgtaagcgtaggttctttggcttcagtagccgaagaggtctcaccgccaaattcgggtactgtagtcggttcaatgtagcgcggtcagtgagtaagaaccttcacttttctcctcttcggcgcgggctcactcggagcagctgaagtaacatccttcccagaagttgc

SEQ ID NO: 175070 - DNA, 487 bp, Zea Mays
atgaaatgcaaccattaaacttgttgcccttccaaaaggctagcatagactgaacagcaaaaacataagctttatggctaatgacaagttataagcacataatattactgcaatgctaacgctgatttataatgctataaaaaattgtcttataaaaaattgttacagaaacattacctctgctgactgtcgctggccatgaaaatcactcccactcctagcaaagtcccgtgtcccgcatgtgtatgtgcgacatggagtccttcagcttgcagtcacaaccaccacaaccatcgccacattagcgtgcaaggacctatactaatcaaaaggttgatgtacctagaatagatgtagcattttctgaaattttagctatatatattgtatcccttcatggttctacaatctgtgaaagatcatggcatatatagtatctaatttcatacattttttttgctacagacctagtcctacagcccatatg

SEQ ID NO: 175071 - DNA, 431 bp, Zea Mays
atgtcagtgtttcactaaaaactttaagaaataaatgaggtatgttgtctagtaacctatgttgccttgattttgggatacggatatgtgatacccaattttttatattatagcactcgttttgttgggcttctttcttctgatacctagcgattcatctgcgaggaggtcgaggattgactttgacacgtagttgactgcccacaaactctatgttcgcgggggtggacacatacattgtggggatgtcacaaatgtttcccacgaagacttctgaggagaataatgctacaccaaagatttggggccacacattggcgagcgagatgtggacgagacacaaatcctcttgaaacagtcgaggccctaggaagccgaattaatatcaagatcttccatcaacctctagatagattcagccaccccttaag

SEQ ID NO: 175072 - DNA, 612 bp, Zea Mays
tggcttttggctttctatgaaattcaacggctcttggaccgtactatggtaagttgacaatgttttatcttaaaaagatctataaataagagacaacattactacattggatatattattgttattggaagtaatgttaagcacagctaaaaaaactatgaattaccatggtctatgtttagggacggagttttatataaactgttgctctccatattgtatccctaatccctatagttttagctaaatgtgaagatcagctatccacatatagtttatatatgtttaaaagttattcttttttcatcagctatatgatgtattggttgcatttatctcttgtaacaaaagataccttcatacctattccaagcagtcataataaagtaaaactgaaataaatacagaagacttgggctacaaaataacctacaaattattatgcatgttattaggggctaaaacacaaatttagtgaggatatcatagttacatatctacaaagcagcattgatgcaaatgatttttgaataaatgatttccatccaaattgtagtgtcttgcccatatctttgcatttatttactgttgcacatagcagcaaccattcgt

SEQ ID NO: 175073 - DNA, 1279 bp, Zea Mays
cccgcacaatggtacgcccgatttcggttttccctcgtatattaaacctcctgagttatccaatcatccagattacgagttctctccggagcctgtgcatggatctcagtttggtccattgccaaaggttccatttccacagtttgatggggaacaccctcgtctatggcttggtagagcccaggattactttgacctctactttgttgatcctaaggtgtggattcgtatcgcgacaatgcatttcacgggtgccgcagcacgttggtttcagtccatgacaactcctgtcaaacattgtagctgggttgaattcagtcacttggtcttagaacgctttgggcgtgatcaatatgaacacctgatccgccagctattccatattagacagacttctaccatagctgcttacattgaagaattttctggattagtggatcagctagcggcatacgagagaaaaactgaccccttattctataccatgcgtttcatcgatgggttgaaggaacatattaagtcttctgtaattttacatagacctcctactctcgatactgcttgtgctctcgctcaattgcaggaggaggtctcggagccacctcggatggaaactcgcaagttcattccaccctcattgccaaagcacacacaaactcctctacctctacctcgtcctcccccaacagaggctgcacgtccccgtcaactggacgaaaagcttgcgtctatgaaggcctaccggcgtgcgaggggactgtgcgacaggtgtgcggagaagtggtctcccgggcatcgttgctcccctacagtgcagttacatgtgctcgaggagatgtggcaactcttagaagataatactcaatcttctccagtggacgctgagaccaccccaacacaagaattgctgtctctatcattgtcatcggtcaccggtccgtccaggcggcacacgatgcaacttattggtgaatgccaaggtcacatggttatcatccttctggactcaggcagttcccactcgtttgttagtacatctctggctactaaactttctgggatgtcacttttgcctacacaagtgttggtgcacgtggcagatggaggggtcgttccttgcaatcaagtattcaagtcaacacaatggtcagtccaaggtcatgtgttcgtcactgatttccgagtgtttccactacaatcttatgatatagttctgggcatggactggcttgaaaagttcagtccaatgaagatacattggtcagaaaggtggctgtca

SEQ ID NO: 175074 - DNA, 675 bp, Zea Mays
tcaacctattatacaacagtacaacctacaatacactactctacatttattacaccattagtcctgctttccattactcttggcgacctcattgtcaggtgtgggagtccagacatcaaccaacctcaaggaaggagggggctcaaaaaggtctaactccccacccagcgcgcgtcccgcaacgtgagagggtccggcttccgcctcagcagggtgtgcaggcacactagggtgtaattgtgagtatagtacatggacttcctcatgcaacgtattgcagtagacctgcaggttgtcgacagttgagctaagttctttaattcgggcctgagcccttgcttccttagcacatgccagcaaacgggactgtactgcccagtcaagtgctaagtcccgatcagcaagctgatcctgcaggtgacggatgtcccttcttagttcatttattctatctccgtcggtgacccaagcatcggtcctgtgttgctgcgccgcttgaagtcgactcactcgagcttcaagatctcctatggggtcattactcccactgctactgctttcatgtcgaggggccagttgatgccggggcactccaattggtccagttgacttgcgtgccgttagccttgtgcgtggcggcatctttctaaggggaaaaatgttattagtataatt

SEQ ID NO: 175075 - DNA, 1443 bp, Zea Mays
cccacatggtgcgaagtcttctacaaagacagcttcagagcagaagtcgcccaagggtgcagccagaaaaccaaagaacacaacactcgcggtatgcgatctccactacataaacaacctaccgaacagatgtcgtctaggggtgcaactggataagtgaaaaggctgtgcagtcacctatcaaaagcgaagtcccctatggcatgtacgtgattacaaatcgaagccaactcgcaataggcacaacataattacatagcgcaatcacaaataaacaacaagcgaagggctcaacggcaccatcgcacaatagggcacatcacagtattcaccctcgcaactctattgcgaagagggggagggcaacgttttcactcaatatcacaacagagcagcgagggcaacaaaaatgtcacataggctcctccttcggaataagacccacctcccgaaaattgaacaacatcatcctcaactcttccccctcaaacaggtcccgcaagtccccctctccaatgcacatcccagacgtcgatgaaagtaactcgcgctgagcaccccgatccaatcgcagaccaccccgaagacgagacctttccatacccattcagcgacgtcttctcccacttcgtgacgactcaacgatgctctgtttcaacacacccattcttcgcctccgtgagtcttcagctctcgcatcagccttggttgccagcgccttgcgagggacagatcgtgacggagactctgacgcagccaaatccaacgcagcaaaataatctaggtcatccttagaggattcctcaacccgcgagaaaggactcccaaattactcttcacctccgtgagtctttgtgaacttattatattgtgaactattaatttgtgatctttgatgtattgcacttttttattgagatatttttatattgatatgtgttggggcgaaggcgaacatgccccctcgctcgaagatacccattcgacgacatcttctcccacttcgtgatgactcaacgatgcaatgtttcaacacacccattcttcgcctccgtgagtctttagctctcacatcagctaaggtcgccagcgccttgcgagggacagatcgcgacgaagactctgacgcagccaaatatagcgcagcaaaataatctaggtcatccttagaggattcctcaacccacgagaaaagactcccaaattactcttcattcgaagaccacgacccaagctcagacgcctcagacacatttccaccaagaaacgttgcatttgcagccatcgaaacatcattaatatcaacatcatcagggtttgcttgcgcaggcccggacgtcgaaacctacgcagcaaccgaccttcagtatcgcaaaaagtaaaaccaccaaccctaagcccctagcgcatctcttcaacctgcgcaggagcagacaccgccgc

SEQ ID NO: 175076 - DNA, 483 bp, Zea Mays
accccccacaacttgtctacaacctttgtacactagttatactcaaatactcagcctcgacaggaagtagggtgttatgcattctagcggtccgaacctatataaactcttgtgtgattcgatgtgcatctgcacgtaccatcgagtcacattcaaccacaccgtcctgctcaaaagcatcaagtggggaacccagtgttgagcaggtgggtcataaacaacgacaactgacacactaggtagggggtgcgacgttgattccagatgactccatggctaccgtcttcaacaccttgatcatcttcaacgttgggcaggttttccgcttcggatccctctcctgcatcgtggatcaagaaggtgtcctgcaccgcatcacggatctacatgcctcgcttgactcatgggtgacctctaagcccttacttacatgaggcaatcaacttgggcagtgaagtccgaccccagttcggtgctacataa

SEQ ID NO: 175077 - DNA, 694 bp, Zea Mays
tacttgggacatattccaaggccgaagatgatgcgggtctgcagccttcggggggcgggggaagaaaagattgaacatggtgtttgatgcaattgccttcgtataccctgactatcactacccactgcgaaggcaaggaaagaagagaaaaactgccgctttggccaccactgttgtgccgaagggcaagaaaataaaggttctgacccaccggccgcgatatattgaaccggccatagtgcctgaatttggcaaagggacttcttcaactgtcgaagcaaaacaagttgctcccgtcgtgcagagcgctgaagaatcgattgtagtgcctacagtcgggccagccgaagccaaggatgatacggctgaagagccaaaagtggaaaaaacagtgaaaatgccagaaattctgagcccaccaacagaggcagaattgccgaaagtgcaaaaagctcctgccgcaactcccaagagaaggaggatggctagcgtgctagacactgtcatggagaccacaaaagccttgacccctgctcctatcaagaaagttgccgaggctgtcaaagtccaggccgaagccgaagctgggccttcagtggccattgagacgaagcctgccgcgcctgaggataaaaccgagcaacagacttcggataccggcaaagcagcagggcagatcgtaatagaaaaagtt

SEQ ID NO: 175078 - DNA, 835 bp, Zea Mays
gatgccacacaacactataaaaaaatatataggcaaacaaaattgtttacgaaggttgcgcataatgtgacttcaggggcttgaacaacccaccacaatccacgcgagtacaagctctagcgtatctggcgccaacgtgtgtgtggccatcagggccacgacaacacaacaagccttcgtaataagtgcaacagacacaattatggctcggtaatcggggtacacgataagtccacgcaacatgcgcaacgggcgcaattgtggctcaatgatcacgacaaacagacagtgcctacagggcatgccaaaaatacgtgactcagtgatggtggttcgactcaacgggagctgtccgaataaacgagagtgctacatagtaatcacatgacgcagccaatactcagctaatgccataacacaaccgattagcaacgcagtctgatcggcatgaccgagtacccactatacaatttgatcgctcgacgtaagtataaaagttcaacataatatagatatttagagcgatttaaatattcacaatatagactttacatatattttaatattttctactaaatctcctactagaaataaaagcagaaaaataaacaccaaaattaatgcatgagcataacacatgaggtgtaactatcattttaccatattcaagcatgtatttttcttactaattatttgcgatagaaaagtaactaattgagattgaaatcatgtttaattattttgtttctccgtcggtcaagccgcatgcatcttttcctcttttgactcatacaacgcccctcctattcctttggcaggagatgcatggaatcat

SEQ ID NO: 175079 - DNA, 350 bp, Zea Mays
ccccaactcgctccctgaccgcggcgcgctggtcgctagtcccggacgaggtctgtaccggccatggccggcgatgactgctcgggataactaacggggaggcttcaccgatctaagatggcctcggaacaaccattaaactaacatgaaccctactgggagtcgcttgcccacgatcacggcggacaccgaggtcgggatcacgcgttcccgccaaaccaaggccgagttgtgagaacggataccacagtgagcttcacaagcgcacagggcaatggaaacaacacatgaattgggcagagccttaccagagcggttcggccacggtggggtgtgtttcacggcggcgg

SEQ ID NO: 175080 - DNA, 654 bp, Zea Mays
ctcgaggaatgtgttttgcggtagtttaggggttaagtgtaattaggagtgtgacctaccctagttacgataccggacaaaatctaacgtgtagtagctccttactagagagaggatagtacgacgcacaaaaggcgcatgcagagaggcttcaaaggctatggttacacctcggcactacgacaaccttggctttggcttgtactggcagctggtgccaagtgccaacagctcttcaggggtggaaactggaaagtatctatacgtcgttctgggtggaccttggcctgctttcattcgtctgctgtttcgaacttgtacaggcattggtcgtagccgtagaacttgtggttcatctcatcaggttgcagaaatcaaagggggaatctatgcctcgttttaatttagcccggacgcaaaaagcacacgacaggccttcagcttgagaaaaccctacgggcatggcttgcttcagctttctcaaaagtcgatctcaaagcattggagctcgcgcgagaaaggttaaggtcaaggctcactcaacaagaacaaaatctcgtcagaattgttttttctctatcatccaaatgcctgtagctctgcactaccttcctccgggcattatattgatggctcagagtttgtcctgtccgc

SEQ ID NO: 175081 - DNA, 599 bp, Zea Mays
gctgaaatctagcttggtgcccattgcttgatgaaggcccttccaaaattttgaagtgaactgcgttcctctatctgatactatcttccgtggaatgccatgtagcctgactatctctttaaggtatattcgggcaagggctgctgctccaaaagtggtctttactggaacgaaatgggccaccttggtgagacgatcgattattacccatatggaatcatttcctctttgtgatctgggcagtccggttacgaaatccatgcctatttcttcccacttccattcgggtattgggaggggttgaagtaggcctgcaggcttctgatgttcggcctttgttcgctgacaggtgtcacatcgggccacatactgtgctatttccttcttcatccctttccaccaatatctggccttaaggtctaggtacatcttggtggtccctgggtggatagagtaagctgagttgtgggcttcatcgagcagggtttctcgtgcttttcccactggcacgcacaggcggttcttgaaccagagggctccttgcttatctgtcctgaggtctggaagttgctccttgcgtgctctttctataagcttgg

SEQ ID NO: 175082 - DNA, 485 bp, Zea Mays
cgggattggtgaatcatccggtggccggccagggtcggatgtcgccggtgggttacgccgcgtccaggtgtatagcgccgccgcgtttggactcaggtggaagaaggccctaggggcgttgatctgttgtgggacggctaggattagcccgcggtaccgttcggctgagttaacctgggacgttggattcggatccggcgtgcgcgagtcgatctgggtatggtggaatctggggcacccaccttgaatccgacgaccaggatcgggctcgggcgtgggcagatctcggccatggatcccggatcctagggtcgtgagtgaaagtagtataatggtccaggtcaaactaatccgggccgtccgtgcatgatcggacgtctgtggaaccgccataccccttcattgggttgatttgcgtctgaacccttgttctttttgtaaatcaacccgccatccactcgtactgtgcactgtgtcttagaaaa

SEQ ID NO: 175083 - DNA, 313 bp, Zea Mays
cgccatcttcgaaggtcttaaaacagcctcaagcacattagccattctcctacctttttaggcgttccaactagagcagttgtaatttgtggttgtgctggcgccttcggcaactcttgaaccttcggctaatctggcagttctgaatgaataggattagaggcattcactgtagttgccgggaggaccccttcaatttttttggcagtctctatttctgaagtccctatggcaggcagttgagtagccctttccaagaagtacgacttcggtcggtgggttaaaaccttcaccctcttttgctttggtgcag

SEQ ID NO: 175084 - DNA, 525 bp, Zea Mays
ccaggtgtgacatgaggggagccgggatgagcggttggattcgcatcggacggtgacgatcatatctgttttaattaaacccagactaccagatcttggatggacgtccgagatccgtcggtcagcatggtcgggatggagggtccttggcacgatggcgccgctcgacctcgcggcgggatctcgccggagacgaggggattggccacgacacgacgctaggtgcttggggaatagctcaggtgcgatcagggcgaccctgcaaactgagtgttaggcacaataccagcgcgggggcactagagagcgcggaacacggcgaagcaggctaacggtggcgcggatcaactctggcaaggaattgtgcgggcactagggcagtaacgaacgaattaagtgcatagggaggttgctgaccatgagtgcgaacccgggagcacctggaggacgacggggaggcggtgaagtctcgggtcgacggcggctgtcacacctggaattaagggacaaagccgggtgaatctc

SEQ ID NO: 175085 - DNA, 476 bp, Zea Mays
aaaatcttgaaaatcctaggtgatacacccaatgtgtgtcttggtgcgctgagtgtttatcgcattgtcctgaagtagtaacttgatgtgatggagaggtgtaatcatttgcctgagcaactgacttgggtccaaccagtgtcgtgttacgcaaaacggcgccagttgcctgactcatttttaggcggcttgaattgcttattgaattcttgcgactgttcggcgagcgggagaggaggtggacggtcacccctcggtccctttaaatagtccgcttgccctagctgttttcttgactcgttcttaatcacttgctctcttcttcttcttcttcacttctccactttctacatgaccatgggtaggggcaagaggggcaagggctggcctcgccgcactgatgacaagcgcaagtgtcccccaagtcctcccttggaggattttggtgactcggagtactcggaggaagcttcctc

SEQ ID NO: 175086 - DNA, 478 bp, Zea Mays
acggggccactgtcggtcgcaagtggggcaccaagattcgagcaacttggcgaggcgggatggaagtggagtcacgacttggatgctttgacggagagacggtggccggtggggccatgggtcctgcattcttgcccctaggcggtggccggttggcgaggtctgagcgacatggagtgacatcggggcaaagtcgggcaaagggattagcatgtcatgtcgcttggagcttgggaagaacgaggtgtgcggggtgcggcatagggttcctgagggctagtttgagagtaccggaagattaacccagggtagacaatctcccccacgggattattttggacagttggatcccagggcaggtttccacctagtgaggaatttccacgttgctgtttggaagctttttctagggaaaagaaccactacacagttcaggaacaagatctaaaaatcaagaaaaaaaactccttgagcaagg

SEQ ID NO: 175087 - DNA, 744 bp, Zea Mays
atcgaccagctggccatttcggcccagccaggcccattagggcatctgtgcgcgtgagcctcccctgtgcccagccgtcctttgctggcgcgtgggcccggtcccgcagtcgtcttccccgctggcacgaccgtgcggctagggcgccaccgcctcagcccgctctcgcctggctggcaatccggaccgtttgccgccctctccccttcctcggatcggaaattggcgccttctcctctccctctcctccccactcccctcttctccgggcagtaacagacgtcgttatggccaacgccatcaatggcgttttgattcccgattgccattgatgaccgatcgttctcctcctccctcggtgttctctcggtttcccctctctctataaaaaccgccgaccagagctctctcttctctcccctgcccgagctctccctcacccgcgaccgcgccacaccgccggatgcccacgagcccgccgcctcgccggagctcgaaccctgcctccagtcgacgccagagtcactcgccaatcctcactgcctcgccgtccgccttgctcttgctcggccgtcgcgctccccctcgacgagcccctccctgcacactaactagcccgaggtagaagatgatcgttttgcgttttagtctctagattctgtataaatttttcagcccataaaccattaaaaagacatccctgtttatttcttgctaggcccgaagtatacgtttaattgtgaa

SEQ ID NO: 175088 - DNA, 374 bp, Zea Mays
gcgtgttatggaggcaagatcattgactcattgtgccacgcatggatggccctcatcatgacttctactattcttgttgcaagacggatagactgaggggacatggtggcatcgtccatgtacccctctacagacgccaatgtacctatttacactgcagcctacaccaaagccttcgcccacacactaaaaagacacgacaaaggtgaatctagccagagaaccacacgatgaccaagaaaatatatctacccaccgcaaaaagcatcatcaccaatgtcgtcgttgaaaccaccatatctcggatcacttgtgaatctaatcactagagctccctaagccgctcttaaccgtgagcatgactgatatatcag

SEQ ID NO: 175089 - DNA, 373 bp, Zea Mays
cggaaggggagtggatttggtcgcgggatgaagcttatcaaccgcgcctatagccggcgacgtggccggaccaccggtaccgtcgttgagctgcggcgacctaaattatgccacgccgtggctctttactgtgcagtagtaaccgtggcatgcctaggcttaccatctcagaactgctgcaccggtgaacgccacgactgagccaccagtgacctttctctccggctgccagcgcgccattccaaaattgagtgccaccacccttggacactataaattggtgccccagcctgctccgctaagtaattgtgcacccagtgaaccagccctcacctccaatcgtcccccataactcctcaatttgggatttccc

SEQ ID NO: 175090 - DNA, 883 bp, Zea Mays
ctctgattttccaaatctccggactgggcgccaaataccagagagaacaggggtctcggtgcaataaatcccaagacttagaataatccctgctgtggactgcgggttattacccctaaaacccaaggtctctttagtaaaaggggcacggcgatgggtataagcagcccctggctgttggatcgcaagcctagcgcctagattagatttattacccagcgaaccggtacgcgattccgaccctaagatccaacatcaacagtgcagatcatatttgccccgaaatcaccctgatccgcacgatctgacctgaacggtcctgattcccttgcctccaatcgttacgccaggatccaattacagccgtcgatgaacaatcctatggtacccacgacttcttccctcccccgcgctacggacagaggcgccatgcccgcatggcggcggatcacaccggcgacatggtacggccgcacccaccaagactatacctaggtctgatagcgtctactcgaagcggaggttaaagcggattcatggatgcactacataccgccactgatgccgatgaagtacccagtcacggaagaaggggatccgcggaggattccggtcgacggcgagaaattgacgttgctccacagcctcacgacccaattgcttggcacatacggcttccccaggcgaagacaatactccaaaagccaactccgagagcagagaccccccagcgacggctatccctggcggcggcgcgaatctctctctctctctcaccggcgaggctctcagtaggcgatggcggctaggttttcggtgatttggaacacggcgagcgcggccgagggcccttccccaagttttatatgcaccaggaaaagcc

SEQ ID NO: 175091 - DNA, 580 bp, Zea Mays
catgttcctgatgggatttttcaaatgaaacttgaagagtttctgagacttaggaaagcgacagatactgtcatgcagtataatgggaaatttaaccacctttctcaatatgctattgagcatgtgaacacggatatcaagaaaagagattgttttatgagaggcctcaactcaaaattgcaaaataagatggccacttgctatgatcttaccttcaatcgggcaataagtgtggctatagctgtggaagaaaaggcacaagtacatcaaaatgtgaagtagacatggaaaggttctaggtcagggttttctcaatcgacggcgaagcaccagaaggtggtaatcaggactgctggttctacaaatgttctttatcgttcaactacctatccattcaagaacaccacttatattcgtcccaccaactggccaaaccaacttccacccacaaacacccaagttccctgcttgcctgctcccactggcactaaatatccttgttacaactatggagaagtgggacatttcattaaagattgtcccaatcctcgacaaaataactccaactcccatagaccag

SEQ ID NO: 175092 - DNA, 957 bp, Zea Mays
tttgagaccctttcctattctattgataagtcactatctttttggcactttgtactttctaggtcttggtatgctcgtaccattggaatcttgcatactcttatttttatatatgcttacctttatgtcccaatatctgtttgaaatatttcagttaacatgcccttgaccacccttgtttcctaatgatccaggagtgatcattttattttgcacatctgtagtaatctcgttgtttccttgtaactccactcggtaatgaatctttacttcaacccttctgttggaaccttaccgatcttacccttgattgttttctccactttgtcgtttcacgagtcttgtcttaactatatcatttgttatgctttttaattattatcatatgcacccttgacacctctatatcctacattgatgtttgtctcatacctgccatttaaaatcgcccctcttccgtctcataccttctttctcttggtcgtatcctcttctttggctcgcgagtttgtaacctcatcctttgttgtgcttttgcttcttattgcctttacccttctcatctctcaaccttaccttggtgattacgctatgttcgttatctaaaacctccaatctcccaccttagttcaagtgtggtctcttacttatctcacccgtggttatatcctatactttacctcttgcaagacttatcttattcctattcttgattgtacctagattcctggtttttttaatgcacatttacctcttcctttatatccttgcctattatcacctttaacccttgacctctctccatatttaccatgatgtttacctatttcttagcctcacttcttttatttcaatccgagagtgttattttccctatcctgctcttgtttgtttcctttccctttgtcgctttgcaagtcttgtcttaccttaacttcatcctttgttgagcttttg

SEQ ID NO: 175093 - DNA, 693 bp, Zea Mays
gtgaagactatatggtgtatacctgaatcgctctaaatatttatgatgtgttgagcttttggactcatgtcgagcgattaaattgtatagtgggtactcagacacgtcgatcagactacgttattaatcgatcgagttatggcattggctgagcactgactgcgccctggcaacacgacgcggtatttgtgtcgtacggacttggctgcgtcatttgattgctatgtcgcactctcgcttaatcggatcactctcgttgagtcggaccaccatcatcgagtcacacatttttcgcacgccctgtaggcattgtttgtctgttgtgatcatcgagccacaattgtgcctgttgcgcatgtttcatggacttgtcatgtaccccgactattgagccacaactgcgcctgttgcgcttattacgaaggcttgctatgctgttgtagctctgatggtcgcacacgcgttgacaccaaatacactagatcttgtactcgcgtggattgtggtgtgtcgttcaagctcccagaaatcacgttatgtgcaaccttcgtaaacaattttatttggctatatgttttatttgattgtgttgtgtggcatcatatatttatatatatcgccaagtggccttaacaattataccaagcctatagtgcttagaaaatctgggaaattaaattgaaatacaatgaa

SEQ ID NO: 175094 - DNA, 375 bp, Zea Mays
cggggagttcgccgcacccacttggattgcggtcggccgaattggtcctcgccggtgctggccgcttaccgaccatgcgccacgtgcccgggcgtcttaccatgtcgcagttggtcacattaagcatatccgatgatcaccggtgagtccgccacggtgaaagccactaatcgtttgcgccagtgcccctcctcctctccgaccgctgcacgtctccatcgaattcaccggccaccgctcaagcacgctataaattgcgcacaccctcggctccgctaagtagtcaagcacctaatccagcaactcgtgcctcaaatcatccactagagcgcgccaatttcaaagttcccccaaatcagtttctgccaccgtgaa

SEQ ID NO: 175095 - DNA, 982 bp, Zea Mays
aagttatagagctattatagaggaacaactttgctgcaaagccttgaattagttgctatgtaagtttgagagaaaatttagctccaaagttggctgtcaggttcatctgaccgaaattcccatggtacagtgcctggtcggatcagaccgccagcgcaaggagtcctcaccgccgatgaccgatccttcaccgtgattcgtgtcaccggcgactggatccgtgcctggagttgatggatagcatcgcggggtaaaagatcatcaccccatgcactggacgccactccggtgactcaccgtcgtacccccctgctttgcggcttgagcagataagctcgccggtgaaccgccgtcttccggccttgtgccacgtacttgagtgtttccaccgtgtcaccgtgaatctttgctactctccgtggctcgccggagtaactgccacgacgttagacaccaagccgctgcaccagtgctcttcccctcctccgatcgtcgcgcgtcctctgcaaattcgcggccacccctcgcaatccctataaattgatggtcgggcctgctgcgctaggtcatcgcgaagccgacgcacccgttctccccctcaattaaccaccgtaggtggagaattctcctcttcctccaatttggtcgactgcgccgccgtcaatcacctgcttgcggctagccgattctaggtccgtcctcaccctcgttgttcgtgttttagcaccctcatgtgctcgggattgttatccatgcaaccccgggagctttaccttacgtatgcaaacggaacgtactgatcgatgttcggtgtccgccatcgccatggtcaagcttgtcctggtccgggttagtcaaattggaacttgttctattgttgcctcgggtcggtgctgcttacccagcaactggtttgggtagctgccgaagtttttggccggaccgagcagcgagatagccgacggcgagcgcggcgtggtca

SEQ ID NO: 175096 - DNA, 621 bp, Zea Mays
aacccgagcccctggaatttcctcgctggtgttagtcgagccgccgcactcggtcgcgaccgtggccgggctttcccttgacttgtcgaccggtaatattcctattcctgagttctcctaatctagttcaacgattacatcggatttgggttggattgtggtactaggcaccggtaattgctcaatggagcaatttctccccgccgcgggtgcaccgtgccgtgggccggcttcatcccataacctaggccaattagtagtggctcatcggattcgccgcgatggtctctctatcaccgcatggacgcattggattttgggttcgggtgcgtgatttgggggttcccggcgagaccgccgccgcgcggtgtgcgcacgccgccgccctgggaaaacagaggtaggtgatggcccctggtccgttggatcgggcgtatacggtcaggattagaagcggacgtaattggctcgggtaccattgatctcgaatctaacggtggtggttagatcaggtttcataaactctgggccatcggattccgatccagcggctggtattgcataccggttcagggataatcgatctaatctggggcgtccagatctaatcctgcggccgag

SEQ ID NO: 175097 - DNA, 378 bp, Zea Mays
tgcagctgcaggttcttatggtggcggacggtgtttcagcagatcgcttttcttggtgggcgagtttggggtcaacgactacaccttcctatggacggcgaacaagacggagtccgaggtgatggcgttcgtgccaagagttgtgagaaccatcgcctcggccgtcgaggtacgtacgtaacatatcgccgccgcagtgatgtacagtcagtatatggagcgagcgagagctttgatttgcgtggcatgcgtgcgtgcatggcatatatcatcagaggctcatcgtccgcgacggcgcggcgcacgtcgtggtgacggggaacccgccgatcgggtgctcgcccacgctcctcaccctgctccgccggacgagccgcc

SEQ ID NO: 175098 - DNA, 844 bp, Zea Mays
atttgattgtaagctgaggatcacaactctattgaaattcagattcaaataaaaagaaaaaaagaaaacagggaaataaaatcatgaaaaaagaaaacaaaggaaaaatagaaaagaaaataaaaagaaaagaatgcatacatgtgttgggctaagacccctagccttggctcaaatgaccattgtcgcaccggcccatgctcgctgatagccaagcccacctgtcgggtagccttcgcacgcgcttccctctgtgttgtgacactgccatgcggggtcagacgctgggaccctatttgactgggcgaccactgctccccatgccattgactcgtgggccacccggtacagggggtcctcaccgcgccataagcgctaagggtggttgcaaccaccgccgggatcgctgcctgggtctagctggcaggaagaccgacttgtcgcgcccataaagggtgagggagcccatcgcgcgtggcagcctggaccttgtcacggcatccatgccacctcccaccatgtgccgtcgtcgagacgtagtgggtgtcgagggagccaccatcgtcgttcttcgccatcgtcgccgctcggtgtccgcggtgtgatcccgggtgatcaggagagtgtgtagatcatgagtaggggagtaatcgggtgcatggaccctcagtgcggtggggacttcccgccatggtcctttctccaccgcagataatctggtcccatggcctggaatttctaccacgccactgccggtaagtcatccctccatgtgttcaccatcaattccgcatcgcgtcgatgttattggactaggggtagtgtccttgaacgccggatcgtg

SEQ ID NO: 175099 - DNA, 480 bp, Zea Mays
ctggatctggacagggtcgtggtttggatcagggagtggctggcttggtggcggcgtgggtggaggcaaagcctgatgaggcggtcggtgccaaggtctcatgcaaccgccgccgttaaaaccctagttatctcgcacacagcagccgtcgcacacagcagccgtcggggaaggttggatagagtagacggttttatacgatgatgttatgacgaaataagcataaacttatgtacaataaagcgtaaaagttttactgacaatattggatgacgagtaagcggtcagggctttctccaactaaagagagcccagggctcctaatacataaactatatatatatatacacgcgctagaaaccctagctcagtcttagcaaatccccaatccagttcccactcatctgttgccccgccgcattggccatccacctcacacggagccacagtcgcagtccacagcctcacatgcgcgctttg

SEQ ID NO: 175100 - DNA, 537 bp, Zea Mays
agaccgattggttgttcctaaaaattccgaactcagaaggaaaatattggatgaagctcatctttccaaattttccatgcaccccgacagtaacaagatgtatcatgatctcaggtccttgtactggtggaccagaatgaagaggaaaatttctaagtatgtatctgaatgcgacacttgccagagagtcaaagctagtcatttgaaggtagccagtaccttacagcctcttcccgtacaagcttggaaatgggaggatatttgcattggttttattgtgggtttacccaacacctcccgacaccacgattttatttgggtaattgtggataggttgaccaagacagctcatttcttgccagtacataccacccatagggcagagaagtatgctgagatctatgttgaccagatagttcgtttgcatggaataccaaggactattgtgttagacagaggagcaccgttcatagcacatttctgggagcaactgcaagaatcacttgggacccatgtaataagaagctcagcatacca

SEQ ID NO: 175101 - DNA, 480 bp, Zea Mays
gcccaacacgagtcccgcagcggcgatgtagagacgagtcctcggcagcgacggcgaaccggtgttgcggcgctgccagggaacaacggggaggctcggggcggtgctaggtgatgggatagaggaggaggtgcggcgcggagtagttgaggaggagacggccgattcttcttatgcgcagggttggtcagcaacggagcccgagatctccggcgagctccatcgcgagacgggcgcgatccgcgcggggcttgggcacgacccgtactgacgcaggggccccgccagccagcgaccgagcgaagaatgaggacgcgagagaaaagcggggaaaggacggtctcttacacgcgggtcccgcatcacagtggttagcgcgcgcttaagctgaatgacaggtggggccgtggtgtcagcgccgtgttaccgggtgggctgcgcgagttcagagttaggtgggccgatttcaggagattgagc

SEQ ID NO: 175102 - DNA, 439 bp, Zea Mays
acgtacccgagacggtggtgagcagtaagtaagcattcccgagccattgcgcctttgcgtgtcacaacgactgacctcagtgaaaaatctgagcgttgccgtgggcacttctgtcccaaattagcgaagcaagcgatcaatccttttaaattgagtgccctccctgctccgccctcttgttacgcacctagcgcaccacttctcacctcagatcatcaaccatagctcgtgaattccagatttccctagaatcggccggaacgacgtcatgagacatctcgtcgtggctagcctttcctaggtcagcttgtgtccctctagttctcagtttagtacctctttgacccctagatgatcccggtcttggtcaattgaacggtaccgtgctatagctcttagaacacgatgttgacacaaggaacgccgccgttgacactgc

SEQ ID NO: 175103 - DNA, 343 bp, Zea Mays
gtttaaccatgagatctattgatcgccctccaactaatgcaaaaagactaaccattgagtcaagtcaggaggttttttccgttgacatttccagacgaactcgatctagcagctcagcacatcaaggtgataatccacataaccagcagcagactgatccacaaccagcaccagttcattgtgttcgtagaaaggcactagcttgtcgtgtaaaaagaaatcctccttcagctccatccacattgtccgatgatgatttcatggatgctccatctttgaagcgccaattcagatcagcctcaccttccccttcaggaaaaaaccgtgcaaagaagataaaagt

SEQ ID NO: 175104 - DNA, 730 bp, Zea Mays
ggcagccagatgtccggactccaagctgggtagaatctccaacccattcgaagataacagaggcaaaagtactgcttgccaaggtctgcttgttgaaaaacagaggtctgactgcggaggctgtggttgctgatttcgtcttcaagaatattcagcctttcaaggacagggcatacccggtttatctgtacagtggcatcaatgactctacccgggttacaaacaagagaatccccactgaagatctggtgagccgactatatatgattctgaggggcagagtgtcaaatgtcggtgctcctgttgcctattctgcctggaatctgccaccacataggtcattttctgaatttgtaaccacttcagagtcttccagatgatgagaggcagactcattttgagatgccaggtagcacagatgatgcagagatagatgttgtgcttagtatgctggctggggaatcatctgactcgacccatgccaagccaatggctatcacggctggacaagaacttggcaaagcggtggagactcagaagcctgaaggtgctcgcccaaagcgtccacgccgagttagccgcccgacagcacctattgaggaaaagaagaagaagaggtggcttcggtgactgtcatgcttggaccagggtgcaggtccttctgctccggttcgtgatgaagtgccagcagaggtccttcctgaggtgtatgccaagggttgtgatcgtg

SEQ ID NO: 175105 - DNA, 747 bp, Zea Mays
atagatttggagtctcctttcctaacaaacccaaccctctttcctaaacaaattgtatcttatttcctaaacaaactttattttatttattccaaaaccaactcttggttttcatctattccagattcccctgatgggaaggaactgagggggcaacaggggtcgtgcctccctggccacgtccagggagaggccgctgctggccagggcccggtgttgggcctcactcggccagagcaccttagattttaatttacttgattcaacatatggagtggctgtggcttggtgccttcgctgttccacaccgggcccaattttgagatttgcttagatatagatgttgtatatctatggagaatggatattgacaaacatgttggtgcttcagttcaacattgtgatggcatacatggctaggagacagagggagggtgggtgggagggcttacgacctcagtctcaattcttgaacctttatcactagattcaagaaacataagatatgaatcacataaatctgtagccccgaaattctagaggttttagatgataggataggattccaaatacttccaggaaaatctaatattataatgcatttaaaggttctttgttgaattattgatatgtagtatctttattatgtgtacacagtttgggacactgaaccctgacaatcccttgttcagtgttcccactctttacatttgggctgcttctgttttcaacctttgcatcttacgt

SEQ ID NO: 175106 - DNA, 591 bp, Zea Mays
cacgatgatgacaagtgttgtgtgaccgaacgaacgcccagggcccagggagcagcgccagcaagcacccgtcgcgttcaatgatggctagctagctaccgctaccgctgctctggtggtccgcgcgctgccatggctgctggtggtgttatcgtcgtgctagtgctacaccacagcgcctatatagagccacaccgccaccgggagcgggagccctgctgacctgcctgtgcctcgcacgacaaggcacggcaccaacagaacggagcgtgcgagcgtgcgtgcatgccctccaggccacttggcatcgcggtgtgcacccgtgggagagcgacggcgaccccgaccgactttcccgaggccgtacgtggctggtccaagactccaaccaagtccaaaggatgatgcccctgccatgccgctacctcgagtggaaggaagggaagtgtggaacgaccgatgcatccatccaccaaagctctcgcacccacccacacccacccatcgacgacctcctgtcggggttccgaactgaacacaggcgggcgggtccatgcagggcgccgatccagcggatagcgacgctgcctc

SEQ ID NO: 175107 - DNA, 377 bp, Zea Mays
aatctgcagagcatcagtggggaccaattcagcgtcaccagcagaaatcaaaactctgtcatcaggcgcaccggcctctaaggcgacctcctgacccgaagcccatgttgctgccatgcaaccagaatgtggaggagaagacccgacgtgaacatccatggaagtatgagaaggagaacccgctcggacaccctcgggggctgggtcatagctcgcactgcccacccgagccggatcatcaccgacaacacccttgggggctgggtaaacgcaagcgccatccttggggatcgagttctctgtaacagccacctctaaggctgaaggattttcagccacttccatgggaacggagcaatccagatcaacctctcgac

SEQ ID NO: 175108 - DNA, 711 bp, Zea Mays
caaagtttggagaaaaataagctcaaagttgtgttgtcagacactctactgactgaatttagggcaccagtggcattggtcagaattttgggacgaattagagtgagatctattgctcgattgagggtagttgctatagcagaattgtagctggtatgaagggctacaagtttgctacagatgtataggcaagttgttgcacaaaaattcgagatttgggcactgcaattcggcctgtcagtcactctgaaccagatcaaagcgccagctcaattaactcaccgccggcgaccgtgcgcccggattcgcgctcgccacggtgattcatgttcgacgctgttggataacatagagggagtaagaaatatcacctagtggatgaactccggccactgttcactccggccgccgtgtccgcttagctcacggccgcttcagatctaccctcgctggagttagacaccttgcatccttgcgccacgtgcctcggcactttaaccacactgtcgtgactcatgttagccaatccagtgatcgtcggtgagcttgccacagtaattgccaccaatcgcttgcgccagtgcacctccttttctccgaccgccaccgcgcgagttcaaattcactcaggtccgatcttgccctctgctctcttgtttcagcactcttacatgccactgatgctcctcgacccattcaattaaactagac

SEQ ID NO: 175109 - DNA, 551 bp, Zea Mays
attgccttcccactaaaactgttcgcgcctcttgtccctttgctgccctgtacaacacacctcccacatatgagcagcttcgagtttttggatgtgcttgctatccgaacctcgctgccaccgcaaccgcaccacataagcttgctccccgctctactaagtgtgtttttctggggtattctactgagcataagggttatcgctgtcttgatctatccacaaatcgggtcttaacatctcgtcacattgtctttgatgaggcttgcttccctttcgcagcctcgccccctcgaactaatgattttgattttttgtctgagatggatccgacgccttcacccatcggaacacgtcttttacctgtaggtactcgttctgttgcccccgtggttgcatcgaaggcaccacctacgagggttgctccgaccgacactacctcttctcagtcgggccagccctcccaggtccttgcaccggctactcggacttccacgcttgctgcgccggctagtcctggtgtgcctactacgggtgcaccccctagagaccgg

SEQ ID NO: 175110 - DNA, 1066 bp, Zea Mays
gctcctgtgcgaggtggtgcgggacacgtcgagctccttcacctcccggtatggccccgtgaggcactcctgtcacctcttgatccacctcctcttcgtcgtccgagtgggcacgcacgcgtgacgtccccttcaccaccgctggccctactcccttagctcctattcgattagccctgcaggcaaatctcgaccgttgtgtacgtcctcttcgtcgcgtctgtggggatagacgagtctcatgcctcatttgcgacgacagtatgatgccgaagcttgcccccccaatgaatgcacctgaggttacttaaattgacgcatagcagttaaatgctctgcagtttggtgtagtgttgaagtaatgtaatgcgaactgtattttgctaggtttgtgtcagtgcagtttctgtggtatggaaaaaaattgatgggctaaattggagatgcaatcctttttgatgaatttacttcatctactatgttttgtcctgagagttgcctcctctaataagtttctgtcagaacttggaagcattttggtatctagattgatcaactttgcctctttggtgtatagtcttatgtgctaaaatgtgcaaggaactggtacttctacccttttgtgtgtaatataaaatgttacctccataagttgtgaattagcaatattttactttagactaatcaaaataagattcaacattatgatgtacatcaaaatactttcgctgaattgctgcctttaattcccttatcaaattgtcaatccaggttttctcacttgaggatggccatgtggtaacatctggtgagccattggagtaccagtgagcatactacctgaggacgcaaacctacctatttcagtagattggttagagtaagtttcagaaattatctctcctgttgttttcttctaggttacagtattatatgtcctatcctgcttctactgataagatatgtggcctcaacctcactttctaattatttcctcatcaggtttgtttgcattatttctgtagctatgatggcatacttgtcaattctattgaggcaagaccag

SEQ ID NO: 175111 - DNA, 293 bp, Zea Mays
tgaagtgcgttcattcagctactggaaggcactttctggatgaaatcaatgcggggcaatgtggcgtacatgcagcatcaagaacattggtagggaaagctttcaggtccgagttctactggccaacagcgaagaatgatgcagcggagttggtttcgaagtgcgaagcatgccaattcctatcaaagcagcaacacttgcccgcccaacatttgcaaactattcctattacctggccctttgcatgctggggctggacatgattgggccattcaaaaaagctcaagggggat

SEQ ID NO: 175112 - DNA, 513 bp, Zea Mays
tagctccaacaaagtgttttgaactggcatcaaggagtaatttatgtatgcggatagtgtgcttagtggatgcaagatttatattggttcgggctaaatattcctactttcggtctttgttggcatacgctaccgacacatgattgctcgtagtaggggttacaagcggacgagagagagaaatggtcccaagtctctaaggattgtgatgctaagggttctacgtatcgtgttcctcccccttttatagactaggaaggggtcagttacaaatggtttctctcggaagggatcactacggctgtagaacgagatagctctcactcggtaaacgccttcccatgtgttgttatccgtcccatatcttccttctaaaagactgctggtgaagcatgccgacgacgggagtctgatcgtcataagtactccgcctgcctgtctctacccgcgtcgacccttggtcttcatagcttgtcctcatgtcttcccttcgtcctcttgcatgctctatag

SEQ ID NO: 175113 - DNA, 368 bp, Zea Mays
gcatgattggggaacggtagatctaaacagtgaatctggaccatacatgcatgaacaacaccgtccagatctagaactaccaccagtaaaaactaccgcaagtgggaaggaaataaagggtgggtagtatcgttgcctcgcaggttgggagaacatgtttaattatgctgcaatggctcgatttagttgcctagtagctgggactggtccaccaacttaaaatatataaggtacatgtccacacatatataggtagtggagaagatgatggcagaaacaggagttgaaatcagtcgcaaccgtccgcttcactctcgctatgactgatgaagatgttaggaaataaagatagatatggttagacatat

SEQ ID NO: 175114 - DNA, 661 bp, Zea Mays
tcatacgaaactcacacaacaataaccacactcagcgtcaggcggcagccccgtctgagcgtcgaacatgccaacaccttcaactaggtagtcatccacagacaactcccggccagtctcaacccccttcacctcggccacctcatcaactcgtgatggtgagggcaccctcctggccgccgccacaggcaccaccggaggaggcatggcagcagccgcagtagggcccttcgcgctgggatgcggcgccttcgcgtcgtgccagggatccactagccgtagcggagccttccgcttcttccgtgtagactcttgatgatccttttccaccacttctgttagaacaacaccaatgtttcttccgtaaggaaagattttgaagtctcgagccaaacaggacattgagtaatcttcaccggaggccagagggatagggtcatttttatgccactcaccctcggtcaccttcagcattcgcgaagatgatttccggaggtcgggcgaagtcatgacctccctaggctcagcgcacgtctccgccaactcctcaacaaacccccttgaggccctcaaaaaccctgatgccttcattgtacctttcacctccacttttatttttctggttgtcgcaactacatacttccccttcaagcagcctttg

SEQ ID NO: 175115 - DNA, 580 bp, Zea Mays
gcagaagaaagtcctgtactgccgaaaaaacgaagaattattcaaatagcagatgtgattcatcagacgccgccaccggcgacagtgtcgaaaattgcttttgtcgagaccgccgaagccgaaggcgccgcagccgaagcttccagagtggagaccaccgaagctgaaaccggcgacgccgaagctgctggggccgaagttgagatcacggaagatttgaatctggaaactacccttgaagttattgacaatattctcctgaaaatggctgaggaagaagctgctgtggctgtggtaaccactgcaactgggaagggaaaggagcagatcgatgacacttcagaagaagaaagttttaactttcaagacttgcttggacaagagctaaaagttgccgaaaaggaagagttgaaaaaatatgtcatatcttgcgggtataagccaggggctacgctatttggtggggtcaacgaagggaagttaagatgcctttggaaccgcaccgaggctaaagttgttagaaccctctccaaaagcgttggcctaccgaaactagaagctgacctctgcagatatcaac

SEQ ID NO: 175116 - DNA, 804 bp, Zea Mays
gctctagttcatgaggacgttccagcccccgagggtgcggctaaagatgatccagccgtcgagggtgtagctgaagatgattcggtccccgagggtcctaggaccgggtctccctcagatgtctccatggatgttcatgttgggtcgccgctggttcggtctgaggaagctgtggtgatgagttctagttttcctgctagcccaactggcccggccaccttagaggtcggtggtcctggcaccaaggatccgatgggcgcttttggagccgagatcccactgggcgtcatgcttagcatgaactacaatcttcctttgaagtctaaccctgctcctgatactgcttctatcagtgctttttcgtctgatagtatctcgatgcccccggccctaggatttcccttgttcctttccaacctttaggtacgtgcacccctaatcatctacccttatcattggatgttttccctgttgactttcatatttatagagtatcctagactcagtatcggctcagctgaagtcatgtggcattcttgttcctaatcagatttcatctctatcctagtggaaccctcttcttcttcaaaggcaaatagatgatctgaaagcttcgaatgccggttagtgggttgataactccttttttgcttgttgcttttctgcttatgtcacggattacttttgattttttcagcattgagtcggcggtgttctgatgctgaggaaaggtgtgcgcagaatcaagcagatcttgatcaagtaactacattccttgacgttgcccgtgctatgaactcttcc

SEQ ID NO: 175117 - DNA, 309 bp, Zea Mays
agcgagcgcgcacgggcgtgcactggggagagcgggtgcgcgaacgggcgtgaaccgggggtgtcagccacggtcgaacacgtggaaccgttgcctctgcccaagttctaacgccgattgggcgcaaatcttcgcgaatttgggcaagatcgctgtgaaggatttgttcccctgactttgctttgtcttttgtgtatggacgtcacgcggttttaggctagggacagggagttgtagcgtcaccaaggtgccagtgtcagaatgcctggtcccgaggtcaaacggtgccaaaaccatgccaaatgaatt

SEQ ID NO: 175118 - DNA, 619 bp, Zea Mays
gcggtgagtctacccccaatgctcccaaaccaacctgcttctgacccaaggttggatacttaagggctcaggagcaggaggggagcaatacctaagaactagcctgtattgctaacatttttctccttgcagtaggtgtgacgtttatacccttctaagccaatgcagccacactaatacctcttttttctctttgttgtctacccgactcatgcagggtctcgagaaatttgaagggggcctaaaccgaccgagccacccttcaagaacaccctaacctaaggaactagactaacaccaagggatcactttctggaaaggacccgaacccattcacgaacgtcaaaggtccacttttcaataaggacccaaacccattcaaattcctttggcaaggactgaagagaaaaaactcatggcaagatagccatgaattatggagttcgaaggtcggtccgtgaagggcttgtagtcgctctagcgaaaattgagtaaggggcaaccagagatgggcatactagtggcgaggaccctagcgtatgaaacgggtgtcaccaactcgtgtttgagtcctgggagagtctgactcatggtttattgtgaagagaggcagcgattc

SEQ ID NO: 175119 - DNA, 566 bp, Zea Mays
ccgagaatctctcccccttttatcggttgtgagctctgaaagttgaatatgccctgtttccctccaatccatccagttggcagcttgtttgccgcgtggtggagttcgtactgatgtaggtgagttggtccaacttttcgattttatatgggtgttcaactgagcctcttatagccctcgttttatccgcccgccgctctggaatgtaatacactccgaatttgatgtgaacacaaactctgtgaattccgacatgtatttatgatccgctgtgctggggctgccttgtgcaccgaatcagtgatcgggcaacgtaatacaaagagggagcgcttgatcatctgagctggttttgtacagaatgtcaggtatagccaggtgctcgttgtcgttgcttcagttttaacgagtcggtcatgcaatgcagctaacgttctggcatcggccatgctctgttgcagagagtaatgtggatagcatccagatatctgttagtaacgatgagaagaggaatagggcagatgctaagatctcgcaggacgagccgaggcacaccatgatgcggt

SEQ ID NO: 175120 - DNA, 735 bp, Zea Mays
gcccagccagggcagaagcgcgcccgcgctgtaggttttgcagaaaggccctgaccatttgaataatctaaagcgggggtcacagcactgtttctgtgagtcgctgacacttgcagtaaaacccctgaacttctaattcttcacagcgatacgtccacgacgtcgcacggcggaggtccgagcaccggcgagtctagactggtcggatcacgcaaagactggtgccttactttgaccgagaccaaattcaagacctaaggatcgtttccccccactcaatttcacaaacggtgatctaaccggctctgtccacggtgacagcggggtatcgcggatattcacatgcattcccggcgatcctagggactccagcccaattgggttggttggggagtatcaggggcacacaagaatgttgaaacaagataacaaggggcatgaacagacctagaggtcgctgaccacggtgaggtcaatccgggcggtgctcttgagtgagttgggggaaatgcaaaattggagctctctggtggaggatctgaggtacgggtgggtgcgctagctgcttgaatacataatgaagccgatggtgcacttaatttataggctccgggggaggtggctctcaatttgattacggcgtgttggcggccggagatagggaagaatacgggtggctgtgaccatggcgttcaccggtgcaacagcgcaaggataatactcctaaggggccac

SEQ ID NO: 175121 - DNA, 440 bp, Zea Mays
tgaatgttgttgctgctgtgcgcctgtgcttgaagtatggccgtatgggtgtgcttgagccttgaagtatggccgtatgggtgtgcttgaagtatggccgtatgctgtgttgtcctgggctcctggcgacatgtgctggacagctagagtgtataagtgtatttgctgctgtgctatgtataagtgtatttgctggtgtgctagatgtagctatatggttctatggataatcactgttggtctgtatttggtgccgtactgccgtgtgatgtatttgtgtgcacttgtattctcgtggggtgctttatatatttgtaatttgtggactattgtcagtactagcatgtgtattgctgttttttttctgacttccaattatatttttgctgaacatgctatattgctatgtaatggaaaacccgacggggacccgaaaccca

SEQ ID NO: 175122 - DNA, 302 bp, Zea Mays
cgtaactgttgtgccgcaaataagggcttctgggtcttcgtgcatcggagaagcccaaacttttgctcgataacccggatccactcatctgcttcaaggggatctttagccttgacaaatagcgggggacgcgtttctgagaaatccaaatatgaagtttcgcggggtccttgcggataggctcgcctgccttgctgttgcatttgttgtcccgccatttcccgaagaaagcgggtgttatcagctattgcattgactaaggcagcgatagcctcagccaaagttgggggtactggtggcgg

SEQ ID NO: 175123 - DNA, 448 bp, Zea Mays
aatgagcttcggtgagcgacgaacaacggcgagcttgagagcaagagaggagcgcttagtggcggagtggcgtggttcactgccgatggacaggagagtggggagcgttcctgggatagagaagagagtgattgagttcacggaaaggagagggggcgataacgtccaaactccaaagagtgaatcgactagatgtttaaagcacaacatgtgatttgggcttaaagagagagagtctgggtcctattttttggaagcgacaatggcacggttctgtagttgaagcaagcaacgttggcattctcattttcagcatgcatcttcatgcccgttagcgagaatggcgttggcgaatgatgcacactactcttgcttctttgtgtttcatcgccccgtcgatttccatctgtttacacgatatacatacttgttttgtatatacttgtgt

SEQ ID NO: 175124 - DNA, 1314 bp, Zea Mays
ctggttggaatttcttacctcggcccacttcgttcctcagcgcgcgcgcggcctactcccctcttcacccgcgcgttgccatcacttccacgtgggccctaggggtcagtctcaccaggtcgtgtgtacaatgccttgtgtctctgatatttgggccgcttgctagtcacagtagtggattcctgctcggtcgcaaaatcatgctcactggtggtgggcccagtgcgcagtgaccatcccctttttttttctcttcttctctcccgtccgcaacagatcgcggcgtgctcgccaccggaaatcccgtacgcgccatggccagatccccgccgaactcggagttggttacaaccgttccaccgatcttggtgatctacgccctataaagcttacccctctcagccatcttgcatcacgaagaactagagaaccacgcgtgccgctgccggagggagagaagggagctttggaacgccgcttgggggagttgtcgtcgtgccgcgcccagtgcctcagattcttcctcgccggtcgctgcggagcttcgcttgggcacgccaaatgggttgggaacacctcgccgtcgtgcggggtccatggcggatcgttgccgccagcgttccgcgcatgtacccatggcagggtccccatgaccagcccgggagcttcatttcgtcctaggaatggcgttcgaaggaattgaagcagtcgcgatgcagatcctgggctcaccgtacatgtgtgtggtcttgcccggggtgatgatagtcgtgaaccgccgtaatttctcgccggcagtaaagatccggggcatggcgagaacccacggcctcgtgacgttgacgttggtaagatttaccccaccttgtttgcattaatacccactccgcgtagcacccttcggattcgaggattaaactagggagggagaacgagctgctccggctgggtctccaccgtgggctggaggtggcgccgccgcatgggtggtgtctgaggttggggatgatgtcgtgaccgtcgatcgaaatgtggacgactcagattagagcctcgcgaacccattcgcttgatggaatctggatccttggatccggatcgggtggactggagtgcgtaccgcttcatcaaaacccttgtttgatcacaggcgcaggatctcgatcctacggatcatatggaccgagacctttcagtgcgcgtgttttacattagagcccccgaactccttacaaatgaacccgccgtccatctggcttgattctgagtcttaggacttttatgcgttagacccctgaacttctctgaaattag

SEQ ID NO: 175125 - DNA, 720 bp, Zea Mays
ctctggttttcctctctggttggtggacccgtgctgccaggattgtcttccccatgggctgcacgtgaaacaggaacccgaagtcaccgtaggctattaccatcggaacccgcgaactccgccgttgatctcgctgctgctccgctcggactcgccctgcccctataaaacccgaccgctctaactcccttaaccatctcgacgaacacccagtcaccaagtgaaccgtaggcggaagggagagagaagaagattgccgccgctttgtgcatcggtcggggctgcgtctcttgtcgtggaaagaagacctggagcatcgccgtgatgcggggatgatgtgtgtgcccccacctggcggaatcagcggctatggcgtgcgaatttcctcgccgacgttgatactccgccatggatggcacttcaccgtggtcaggtgctccccacgtcgctacaaccagtaagacttccttctttatgctcgcaaacatcaaagcttcgtgtagctccattcgatttggggtttggggctctggctcgtttggggggggaaccacaatcatggcgccgtcgtgcccgtgagcgcgccgtcgctcctcggccgtgggtggaagataggctccctgtcgttcgatcgtgaacggacggtggagattagtcatgggaatacctattggggggggataaaccagagctgtagatctagatccaacggctgtggac

SEQ ID NO: 175126 - DNA, 1394 bp, Zea Mays
tgagtgtgcatccatggttgctggctcttgttaggatcgaacacccgggtgcgtgcaagcgcatctcctagattgcttgagggtttatttggtgtatgtgcagtttgggtatggacccttcgtgtgatggtcataagcgctaagtgtacatccatctaataccgaaaccgagcgtaccctaggagatgggcccttgagctagttgacattgaacgcttgatcctcgttgtacatgcatccccctcagaaggtttttttaaggtccttttgagggaagggccgccctccatcgacctagtcggcacggggaaggaggtcattgagctacaaacgagttatccaagtgagatccgaccacccctcggtagggtttagtcttggcgagtggtcccactaggggctcgacccgctgaggcatctcattgagtctttccttattcgaccttatatcagggcctcgttgtcacccccttcagctaggtaaccatagaggaatgtgtggtacgaccttggacgtgggtacgagcaaataacctttatgatggtcacctagcttgaggcccactaggggcttgctcggtccacccctcgctctacgtgagaagttggggtgactttcattttttacctggttggtgtgagacaatttcgggtactatggtggtggcgtagtaaaataggatcatgacgctgcttggcgtgggcggcttgaaaggacgtgaaacgtcctatcctctgtatcatgtgtgggtggcgtgacggggtggataaccatctcgcccgttgctggcacatcccgtgcggcatgccctcctggcactctgcctgcagtagtgtgaaacctgtaggacgcacagtttccccgctcgaggctcgaggcagctgagagctagagcgacagattctcccatgaagcagtaccgttcacgggtggcccacccgtcagttgcagaacgattgaggtctcgttcgaagaccaaggcggctagaagcggaggcgacatattatgctgcactattcatggagggcttactttctgggcatcggattgtctccctgtgcctgcatataaatagaaaggggaggttccaggggttggttacacttaccgctttctcgcgctccagcctctgcttcctcctttactcagaatcttttctgccgccatgctcttttctcaccctagcaattcgcctctgcactcatggatgccttcccttagcgctcaatctctcagagccatctcaaggcattagagaggctaaagcgacttccggttggcggctggaggagcaaggcgatgttcccacactgcgagatggcgaggtggtcgtgctcgcttcgttctatgagcacggctttggactcccctgcacctgttcgtacagggttg

SEQ ID NO: 175127 - DNA, 712 bp, Zea Mays
gccttctcagataatggtcgctgatatgtggtaagcccataaatatggtagctagctggtttctccatgtataataacatgcgccatcggaaaatatagttagtgagaaagggtacatgtagaagattgttgactgcttttagatatgcctgttgtgataagattgaaattgcgaaacttgttacctacgagtgggatgaacgtgggatggacggggaataggagctagattgctagaatggagctgccgagtccaacttggtttcaccggctaggacaccaaagcaagtcatgcgtgaccacaacaccgtgctcaaaagcattatatgtggcacgacttcaaaagatgctctcatacagacacaacaactagcattctagaaacaacactagacataatagtgataaacatgacctagcagtaaccaccaagtattacttgttgctagcctagctactggtctgggtttaagtgctttacatagtttgtcctttgcttggggttgtgtggacatttcactttgcctcctacttgctaaggaatagcgcaggggaggttaagggtcttctctcactggaacgggaagagatgaaggtgacatcagaacaagacaacaatatattcataagtaaaagatctacgactttgaagttgtccatttcttcacctgagtttatttcaataactaaaaaaataaaatatgagaccttt

SEQ ID NO: 175128 - DNA, 286 bp, Zea Mays
ccgctgctgaggctccgaagcaacagactgaagttggaactgggccttcagaaccaaccaaggtaatacctttagaagcagaagaagcaaaaattgcaaggtcaactgaagaaatgaaaatgtcagagcctagtttggtcgaagaaattgatactgctgtccccgaagcaacttccaaaatatatgattatattgtgcgtcatgcttcggggaaaaagttgtcggaagaagaagcttttgaagctaaccactatgccaaagaactgaaatatccgaagggggctct

SEQ ID NO: 175129 - DNA, 577 bp, Zea Mays
cgggtatgagcggtatatgatgccaggctccgatgcgagaacccactccttcctcagattctcatgcccgactttgctcgagccctgaacacgctgagggaagtcggcagagactaggattagatcgccagcggcctgccgtgtaccccggacgcggaaggctaccggcagatcctcacctaggtggcaaaccatcttcttcccctcgcccatccggtaccggacatgcactacgtcatcaacagtcagcgagacgtgcggagcaacatcaacacttcacacggtcgacgacgcgaagatgagatgaggtggcggcaagtgtatgactgagatcatggtgcaccggcacgcaaccatgcaaccaggacaaagtgagcagttgcctctatgaatagcatggcaccacaccggttgctagggagaggtgacacgacacacggtgtcactcgccgcccaaggactaccaccatgaccacactcgagaagaacgccgggaggaccggggtacatgcggaatctcagtccttttcccccggttccagccaattcaatggccacctaacttcatggtctcgaa

SEQ ID NO: 175130 - DNA, 880 bp, Zea Mays
cggtgcatagagacctagaagcccctgtttgttgcccaacaactgagaggtcccgccaatacctagtgggcaaactttgtagttgttcaacctgagggtcatcttgtgacgggggcagagttcaagaaagcgttcagggaacattacattccaaatggtgttctgtagatgaaatgggaagagtttgttcgcttaaagcaaggaggagactcggtgatgcaataccttgccaaattcaaccatctctcccagtacgctatagagcaagttgtcacggacctgaaaaagaagaattgtttcatgaaatgtatgaatgaccggctatagcgaaagatggccacttgtctagatctcacatacagcaaggccatgagcacaacacttttggtggaggccaagaattcggggcagggaaagacaaaaatatttgggcatgaagggggtgaaggatcctctcaaggatctaagaaggggtgaaggttggtgatccgtccctttaacccaaatcactcttttcctcgtccacccgcctatcctttaagttacatccgtcccactgcccctgctcaaaatattcagccgagtgcccctggtacttgtttcccagccctacccagtttatctaatagctgcttcaactgtgggaagtctggacaattcatcaagaattgtccctatccgaagcaaaataaatcaaacttccaaaaggcttctggaagcacatctcaaggcaagggaaatgtggcaagcactcaggcaggcaaaggtgaaaggaaaactgaatgagtctactatactctaccaacctagaaggagagcctgtgatgatgggtacgttttccattgccaatcatcccgccgtcattcttttcgattttgg

SEQ ID NO: 175131 - DNA, 735 bp, Zea Mays
gctgcttggaacttgatccgaggtgttagtttaatttctgagatatgatcgggaggggatcagcggtgctgcattttctcgggagattgtacggcgcgcccgaatcctgctctgcactgctgtttcctgaagtgcaaagagtgggtgtctattgtcttgttgcaatgcaactcatgtgcatatccagttctctttctgtccctaatgacttgtttgttttcgggggtatggttgccatggttgattgcgatatatggaaatggagggtggaatttatctctctactatctgctgtgtagtgggccattgctgctgttgacactcgacggtaggatcggccgttgccctatatatttgtgttattaggtctgtataggaggtgatgatgtttgtttaccttattactcgccgttagcgggagcgcgagtgcaaacagttgttagtctatcgccattagactccctattttaaactccactttataaccaatatcgtctacagtacaaaacagtgttttgcacacccgtttacacacccgctggagttggccttagcctcgtcacatctgttctacatttgtgtgcctgaaactctgaacctccctactggttactactcctattcatggtgctgtatttaaaaaaagaatctgagacgtcactctaacttgagaaattaggaatagagaactgctaaatctgacatcgctcataggtcttctgttttctgttctcc

SEQ ID NO: 175132 - DNA, 838 bp, Zea Mays
ctggcaaacttcaattggtcggctccgagagcaataggaagctataaacaagctagaacaggaagcaatcggggagttactgacccgaggagtgctggccacggaggagttcttcacggcagcgcgaagaatagggcggaatggttttgtggactgtgtgagttcttctggtgaaattgagtagattgctcaagagcttgtgtgcgtgatgtggtgaagaagaaggatccgagctcaatttataggccgatggccggagttggatgagaatcgcggagctgtaactgcgctggcgagctcacccgcgcgggcagagccacgacgatggtccggtgaccgccgattaaccgggcagtgccaccgcaacattttaacaccacgtcgcggatgatctttaccatggccgcagacccatccccaaccgcggtggcgttcttatcgccggcgagatctttctgaagttcgatgaacagtgtgccagtttcgattaaaaaatcgtttgacagcccatctttggatcaaattatctccaaattcctcatggcaccaagacttaacacctgtagcaaagttgttcttctacaatggctctacaactttgttacattgacctaggtcaaattctttgaatttctcgatctacagagctccaaagttagccctgatcaactgttttcagacttagctatatggtcacaaaagtggtttttttgcaaataggcccaaaacttaggttttcatttgcaaatccccaagtatgtgaaccatatgactaaagacaccttaatttcatggtttttgcactttagtccaaaagtgcactagttttgcacttagc

SEQ ID NO: 175133 - DNA, 533 bp, Zea Mays
ggataaccttgggcaagcagaaaggtttgttgttgaactatagggacagggtgacatgcattgcatagtggtctctgacggccatactacacctccttgacctcaatattgtccatcacaactgatatgatagatgaaattgcttatcatgtctgcctagtatcaagtgatcgtactatgtagaagcatacatggtacaagggccataccatctggggttgtcctgctctaggaggcataaccaccaggcgtcgtcctgccttgagggcgtatactttcgaggctgctttgccccagagatattttgaaggatgcctgagaagtctacttatagacatatcttgttgtgaggggtctagatttgaacgagcatgtaggttagctcctgacatgtagggatccgagtgacttgaagagccttgtactctgagagggctctaggatctagttttccgatgtagagggtaccgaaggcggaagagctccggagaccgagagggcccttggccctagtccctcggtgtggggtcctt

SEQ ID NO: 175134 - DNA, 489 bp, Zea Mays
ttcaagtgaaagggaagctagccccacggttcatcggcccttatcctatcattggcagagtaggacccgcagcataccgccttgaattgctagaatccatgtcagatatccacaatgtgtttcacgtgtttcagctccgcaaatgcctgctagtaccagaaaatcacatcgaagaaggggcaatccagattcagaaggatcttcattatcgagaaaagccagtaaagattcttgactcgtcagtccgaaagacccgcaactcagaagtgagactctgtaaagttcagtggagcagagaaggagaagaggaagctacctgggagagtgaggactccttgaggagggaatacccttaccttttctcaagcccagtctgaatctcgagggcgagattcctttaagtggggtaggtttataacatcccaaaatttaacccaaggtttggaaccctaatctcctaaccccacttaatctctacctagactccac

SEQ ID NO: 175135 - DNA, 528 bp, Zea Mays
gctggatgtggtggtggcattaggtccacgaggtgggctattgaggcttcaacacatttgtgcttgtccctggctttatggaaggatcctagtcacacatgatcttttccatctttgtaatgattttggctaagattggtgtcatcgaagttaagaaagatctcttaagtattgttggggcgaagtgtcaaccatggtaggactctgaaccaagacatcaacatgtccaatgctcgaggcatacgtgagggcatgcttcacatttgaatgccacaagtcggagcacctacaacatctggcaatccggatatcaatgtggtccaatgtcatgatggacttcatcgagagacttcccaaggttgattacaaattaatgatcctcaacctcgattggtcaaggacttcccaaggtcgatggcaaataattgattctcaaccatgattgatcggtggagacggtggcatgattcttctttgttgaggtcatatacttgaatggcatcccatcttccattgcatcgggtacac

SEQ ID NO: 175136 - DNA, 1501 bp, Zea Mays
tttttgtgcgccctaccagccaaaatttcgagcgttttgtaggatagtgccatcacatgtcacttttatgacttttccaaataaaaattgatacacattgctcaagtgaaataagaattctatggttatgtacacaattgtcactgtttcgttcagctgcaaatcatttgcacaaagagtacagcagagatagggggtgacaatgatacagcgatgtgagtatggagataaaaaaggcttttctaccttagattgtctgtaaatatgttgaacctcaaaacggtcaaatgagtcactgcaaaatttagtctttgatcataattagatttttaatcccatgtcaaacagatcaacaagtttaggtacagggtgtaaacagtaaaaaaagttatatatcgctcaagaaaagcttacccagtaatgaaaacaacatatgcagctttagctctagtaatgatctccaagggtctccaaaactgtaaatatccaaccaggctgctgtggatgcgctcaaagcaatctttggtatgatacatcctaaagtccaaatgctattgcattaagatcatcctcagttggaacaactctagcggacctgaaatgtgagatcatttggcttaaagtccctgattaacaaaatattgtgtatcattatatgatgtcctcatggatctttggtcgatttgcatgatttgaagcccctgtggatcctaggtcgattgaatcggaggtggagttcctccagatccttacaccgttgcaattttcattcaatataccactctacatttggagcacactcttacgacaaagttgctaaacacatccacctttttcttttgatatgcactacatccacatgttcacacaatacataacacaacatattttcagttttattcgtagagctacattttttctaagcaagcaaacacggttctattttaaggggcttgcattatacttagcagttagcactacagctagaaatcaaaattgacctcacaagcgaactctgcacaaggaagaacaaaaggtatatatgatgaggaatcaagtggtttaaaattttggaattgtctctatattgcccatgagtttatgaggcaaacaaagcaaccaagaaatgaaggaactgattgcttacattaaagaagttagacaatggaagagaccaccgagatgcctaaaatgtccatttatcaatatatatgcactatcttgtcccattttattttcaaaaaagttgtgtgtacaaagacgtttttatctatgtatcggcactgtcaaacaaaacatcagaatagctagatgctgttaaatcctgattaatcaaatgcagcattacttattgaaccataggtacatgtgttctgctttgataaatctatgtttatatgttacaaagtatagacactactgaatgtaaacttctacttgccggcatgccttgctagagacgaagaagatgatccctggaccactcaaacacacagaactc

SEQ ID NO: 175137 - DNA, 319 bp, Zea Mays
aacgtacaacatcctgacgggccgagccattaagaccccgcacgttccagcacacaatttttgacggatccatttggaaaaccagtgaaaaaacgaccatcaatacacacggagacgatcaggcctgcaccaccgcaccctgcaagtcttctaggatagtccagttgaagagagccacaagagctttaacttgcaaatcagtcaaccgctcaccgaaaaccttggcataattatcgagaacttccagggacagcgattcagatggatccccaccaagaaggccgagctcattagcaatcctccattttcctttcgaaac

SEQ ID NO: 175138 - DNA, 670 bp, Zea Mays
caccgatttgccgtgcccgcgcgatgaccggtcgattcaaccccgtctcgagaccttgctttggtcctagcattccccttactctgccggagctagccctagccttagcgcacccaatttctccttcccgtggccgggatttcttgccggagtcaccccgacccgcccgaagcactccgtccaccgttctctcgtcctcggtcccattctcgtggccggagccccacaagtgtgttcgccgagtcctcctcatcagttccagccaaccctaacgaccctagacccccagtggccgtatgctctacctctggtggcctcgccgccgtgaacaggagcggtgccagccactgagccataaacccttacgcgctagatcctaaccgcccatctctgatccagcggtccggatctacggataccgcttcgcgtgagtgtgccctgcccctgggccccacccgtcagttgcctgcgccccctagcgttgggcccgactagtcagcccatcttccatccccagtcgctgaccccctggccaacctgtcagcgctcagccgtgtacccgcgcaggcgctcagatctaatcatagccgtcgaattgtgatcgggcaatcgagatcacccggtactcgttcgtttggaaaacttgttaaaagcccccatcaactttctg

SEQ ID NO: 175139 - DNA, 686 bp, Zea Mays
cgccgcgggttggtgtctctcgggtggtttgcagatctgaaatcctagtcattaattgggagagaaaatgggaggtttgttgcaattttaaaagggaagttagttcgatcccatctgaaagaaatgctttgcatctacttttagaagagcgaaatcgaatcggagttctctgatgtgacacaaaggctaaaacttaaattttattgcagtacacaactggtacaacgacgtacagctagctgggggtgcaactgcaggaaataaaccaaaatttgcatgactaaattcacacaaacgcttaaaccctgtttattctgttttgtcaattaccttccgcccctgtttgtccaattccccttttaccctgctcctaggacggagccacagtttcagcattattgttgtccagtggcagcaatgcttttgtgtgtgtgtgtgtgcaagaaacggtccctctgtttctatgtttttttgagcaagattatgctatcgtgacatgattggctccacccctgcctgcttggtcctacccactaagccaaaatggactactacaccactatagcatatatatagtactggtggtggcacacgtcttggtagcgacgggacaatagagctcgtacgtggaagaaatcaaaccaaaacttgccatgtttaactgaaaatggatggcacacttagag

SEQ ID NO: 175140 - DNA, 473 bp, Zea Mays
cggggttcacgttaacggtcgtcatcgccggcgccgcgggtgttcttgtgcacgtacgcactctgatggtatttatgagcctggttggtgtgcctttggtagctaggtcagtggccgtgaggaggaaggaggatggatgaacaggagcgcagcgagccttcactcattctaagctttttcctgagggcaagaaaaatctaatcgttgtcgatttctttgtgatctgagtctgaccacggaggagagcaccaaatggcttggggtgaaggatcggacaaaggatctcggctctggcggagccaccacggcagcaccaccgtacccaccagtgaatgagtgaaagggtgatgggcatgtattgtacgtgctccgttccgttgcctttcggcgcgcggcacggtaacgcactgctttggcttggctacctcgcctacctgcttcactacaacgttttccgtttgtccaaccaattc

SEQ ID NO: 175141 - DNA, 802 bp, Zea Mays
acgaaggccagatcggatggccttcacaaaaaacttggttgctataattttgcgtatcgaaaggataccaaggccccggtaatcggctaccgcatgaagtggccgaccgagtggacgagtgagtggttctatataaacgctggtgagaaaaagagggaaaatttgatgactatggtcatgagtccgatgagattaagcttctgaacgacaaggcccttgtgccacatgcaacttggctcctcgtgccagctggtcgaagttgaatttagagtcatggctgccgagattagcactaggggcctagtgcaggaatatttggcaaatagaacatttccaacttctagcggttgggggatgccgaagaaaaaggaaggtggaaaaagtatgaacttgttcggctcccatgtcgcttcaaatttgagaaacagttcaagaagccttgcaatgaatggctaaaaatgatcgaggccatgtgcaatgagatttttggcaattatacggaggaggaccagctaatgactactgcctttggtacccggccgaaacgaaggctgaaccgggtaatgaatgcattgaacttcgaatacccagattatgagaggcttgatgaaggggccggggtgtgaagagaaaaagggttgtcagcatcctaggcaggcaagctactcggtccgtaaaagaagatgaaaaagccctgaagaaagcaaaaatagcaacagagccaaaggcaacaatttctaagaagcgaaagcttgaccaggtaccctctactgaaccgaaggtagacgaagcagcagagaaa

SEQ ID NO: 175142 - DNA, 552 bp, Zea Mays
cgcagaacaaaattctaggtggggccgacagcgcaacaccggactagaccataaatgtagattaatgataataacacgaatattaaatgataatctagtgttcccaaaaggatatgaataccaaaaatcctttttggctcccgaaaggagagctagagggagaaaataggtggactgactgaggacgaggcactagggcggagcagccgcatcagcgcgtcgttctggcgagtcatcgaatttgtcgtgagatagcgttggtgagacgacgataagtaggaggagtgagtgcaggaggcaaggtagcgatagatgatggtgacggcaagcgacacccattgtcgtgttgcaatggcgcggtgggactctaatgagttagcgagggacaagtgatgccatggtcccaccaataacttgcccatgtgctggtgcatactaggaggcaaaatatcaatgttgtgtgtaggatcccgacgagtcgacgagctgatgagtgatgagaaggcaaagtgcgcagcagcgggcgggttaggtcaccgacttactggtcag

SEQ ID NO: 175143 - DNA, 402 bp, Zea Mays
atgatctcaagaaccccatctggcagcaccgaagcgaattcttcgttatgtttgaggcactcagcactctgcatttggggttgatgatctgtccctgccagagtcaagaggagttggtggtgtattctgatgcagactgtgcttgatgtcccgatacttgcaagtcttcttgggtgacaacctcatctcatggtcgtccaagcgccaaaacacggtttcttgttccaacgctgaagttgactattgtgtagtcgccgaggcatcctggctacgacagctcctcaccgagttacgaacaccactgcgtcgcgcctcagtggtcttttgtgacaacatcagcaatctacatggcctccaacccggttcagcatcaacgtaccaagcacattgagattgaactcc

SEQ ID NO: 175144 - DNA, 406 bp, Zea Mays
tgaagattttcttcttggatattcatcaaatagtaaggcttatagagtcttcaacaaaactcatggtattattgaagaagcatatgatgttgagtttgatgaaacaaatgggtctcaaggtgaaagtgacaatcttgatgatgttggtggaagttaattgaaaaatgtaatgaaaacaatggccattggtgaaataaagccaaatgaagatgatgatgaaaatagtgtgcttgtcattccttcatcttcaactctaaatgaaaaagatcaccaaagccaacaaaatgatgaaattatggatactcatgatcaaggtacttcaagacattcggttcctcctaatgcttcaactagcaattatcaaacggtatcaagaattcattattctattgtgaaggatcatccg

SEQ ID NO: 175145 - DNA, 387 bp, Zea Mays
gcaacatactggagttaatccgcagtctggtgtttctctcgctcagcctcagcagatagcccacgtggtggatggtggcctgccttcaacagcgattgatgaaatcatgatcacgacaccaaacaagtgtaacatactgaagtcaacccacagtctggtgcttctcatgctcaagcctcagcaggtagcccacgtggataaagtgatgaactaagccctatgtttatcccaaatttgattctatattttcttaattaactcaaggatcagcacagttgtgtgcttgtgtatatctacaaatcatggttaagcagaaagtaagacacagacactttattctttttgccacaagattgaaggtacattttgtggtgtgcaagggtaaaa

SEQ ID NO: 175146 - DNA, 337 bp, Zea Mays
accaattcggagcctacggattcagcagagattccctgctgctcgctctcgggaattcggtttccctttttgaaagatccagcaaacaatattggtttccttgcagcagaaaggccggccggagatagacgaaacgggaggcgacagaaaagaagcgagacgaaacggggagaaatgatggagagaaaaaagaagcgatcaaagcgtgatatggacgggaagcggaggtgcaggtgcagcaaagaaatagggtgggagcccgagtccaggagggagaaacggagagagaaaaaacaacgagctgaggttgacatctctgtcccaaccccactctcac

SEQ ID NO: 175147 - DNA, 542 bp, Zea Mays
acgtatgtaaatggccaaagcagtaaacccaggaatttcgtgacatggtgatcgggcgaagtgtccaattcctcagccctagggtttgggcgaggcgaaacctcaaggtgggaacatatagaccatggccctctttgcatggtagagggtcgagcaaggcaaaacctcaaggtgggaacatctaggccttggccctcttgccatggtcgatggtaaggccatgcataactctgagtcaaggacatctaagaaggacatctaagttttggtcccccttctcgaccaggagttggggtagggtgagacgaaactctgagtcgaggacctttgagttttggtctctccacgatcgggcgaggtagaacccttttatggtgatatcagagcattcgaccacacacaaccggaggtcaaccgagtcagaatcccctcatcaatcagttcaccaaacttggaggagcttggcgctcctttggaggtttgtttagggtcgtcgacgtcaaggatgagtgagtgaactcagtgagtctagctgagagcac

SEQ ID NO: 175148 - DNA, 1258 bp, Zea Mays
gatcagagagacgcacgcacttgcagtagtagcatagcaacccaagctgtcgccgcgacaggcacgcacatcgcacgcgcccctcggttaagttcttggcagacagccacgcgtttcttcagagttgcagtgccctctgctcctatcatgccgtcgtccattattctagcctgacgggtagcttagctagctgcagtccagtccaggtggcctcgttgttcgttcgatcggaacagaggaaggtctgctgtgaaatccctgcagattcagaactctgatgaagactgccggtcgtattgctcgccttgctttgctttgctttgcagcgattcagaacgctccggtggctagctagcagctggtgtgcgctgctctgctggctactgaactctgaagaggcgcgtgcgtgcgttctgaaacttgtcaagacagcagactagcagagcacaggcacgcagcagcccgacgcctgggctagcttaccaccgaccaccgtcgcccgcacacccacgtcgacggcgacgactgagcttccacatgcatggcgcccgaactcggtcgcccgctctcggccggtggctcgtcgccgacgtcgttgacgcgaatcattgcaggtgatgagagagggagtgagacagcaagtacaagcacgtacaggtcatcatcattataatttatccaccggtcacgaactgattagacaaagaaatgaatgaagccatccccaactaatcgcacgacgactaaaaccatgaggcatggacgccggctgattgtaatactaataaaaaaaagatatagggtactcaccttgaatgattaattacagtgcacatccactcatgaagacgcccagaggagtcacaggacagagaagaagagtgaagtgtagcagctgtactcccacacatgcatccatggcttcagattcctggctttactgggtacgtactgtacgtagcttgtgatcataaaatatggaacatgctggtgtgcatagtttcagctcacaaaatggtcccggcagaacgtcgttatgccattgccattcatttcaatttcatccatcgaaaatggcacagctagagatcatcagctatatatatattgactggaagatgacagcgcgcgtgattacaaaatgcttgtgcagaaaagcaaaagtatcgcgccatgcatgcaatcaacaacaaccatcgctgcatgccccacgatgaaccgtcgccgtcgtgtctgcccgcgccgcgccggagctccc

SEQ ID NO: 175149 - DNA, 619 bp, Zea Mays
caaggtgttgctctcttctgcctgatctgagagaatactcgggtgtgatacttcttggacgaagatcccggatgggacctgggcccgactggatcccagcttcgacaacgcgtccgctgccgcgttgcaatctcttttccacgtgatggaactccaacccttcaaatttatcctctattttttggacggctgcacagtacttgcccatagaatcagtcgagtaatctcagtccttatttatctggcttatggccactagtgaatctctgtataccatcagcttcttaatgctcaatgacacgacaatgttcaacccatggatcagtgcttcatattctgccccattatttgatgctggaaataattactggagtgcatacttgagttgttcacctctaggagcaatgaagaggatccctgcacctgctccctgcagcttcagcgagccgtcaaagtacattcgccatactttggtagcctccgggttgtctgggacctgatgttcagtccactctgatacgaagtcaaccaatgcttgagtctttattgttgtgcgaggtcggaactctatgtcgtgagctcccagctcacatgcccacttggctacccttccgacagc

SEQ ID NO: 175150 - DNA, 651 bp, Zea Mays
aacgagctcgtagaccggccgattggggcaagaactggcgctcctgagtggaagacgccgaattgaacctcgcccgcacatttcccccaacctaatttcatgaatggtggtctaatttggtctggccacggtgagcgcgcggatgaaccaaagaaccacgcgttcccggcgattggcggcggtctagttcaattgggtgggtcggcaagcaacacggacacatgagaatgcttaaacgagagagcagacaacatgaactaaccggaattgtgctagccgcggtgaggtcgttttcacggtgttcttgagcagatttgggggaagttcaaaattcgcgctcactagtgatcgactgagagcaatactgggtggtgtggtgcgtgatgatgttgcagagctgacggcgggctcaatttataggcctagtgagcggtggccgagaattcgagcgatgacgcgcggcggtcggaggagggggagtttactggcgcgcgtgaatccgtgtcctatgccgtggcagtcactccggcaatcaacggggagctaaagcaagtcacggcgatgcggtggagatgcttagacacgcagcgcaaggccggaaggcggcggtcaccggcgtgcatatcagaatccaccgcggcgagctctgta

SEQ ID NO: 175151 - DNA, 926 bp, Zea Mays
cccggacctacctactccaactcggtcaatggccccaagattccctcggcacctacctccaaggcatctccctccaacagtcagcagagcatgacccagtaccagggcagagcacgagtcaaccacgtcgacgctcaagaggcccagcaagctccaggagtagtgcttggtgagttccttgttgaatttactcccgctactgtgccttttgattcatgagcatcccattcatttatagccactaagtttgcggaaaagcatggcatcccctctacacccctagaaattcctttagtcacccgaaccccggggtcagaccttctatgccagctcaagtgctcccaagtcagaatccttttaagtggggtagtgttcctggtagacttatccgtcttgccatcccaagggattgatgtgatcctaggaatggattggctaactaagcacaagggtatcataagttgcgcaagtaagaccgtccttctcaccgatggccaaggaatagcagtttcctgtcaggcccaaccgcccgccaatgatccaatgatgtttaatctggtagcagaaaaaatatccgtaatagaagaattcgtggatgtatttccgaaagagttgcctggaatgccaccagaaagaggagtggagttctatatagacctcattcctggcactgcgcccatcgcaaagagaccataccgcatggcccccacagagttagcagaattgaaactccagattgcagagctgcaacaaaaagggtacatctgtcccagtttgtctccctggggagcacccatccttttcgttaccaaaaaggatggaagtatgagaatgtgtattgattaccggtccttgaatgaagttacaatcaaaaataagtacccactccctcggatcgacgatctcttcaaccagctgcagggagc

SEQ ID NO: 175152 - DNA, 636 bp, Zea Mays
tcaaacggcgggaacgccacataacagtgggagcacatcacggccaccaggagtcctgggaggtcttcgacttcgcctcctgatacataaaaccaataatcataccagttgtcccacttgttgcgggcgcagggaaccagttccacaacttccgtcgaagtcttcccagtcctcggcggtaaagttgcacgatccaaactgtgcaatcttgcccccgatttttctcttctgcccagtgcagacaataattcttggcgaagacctctacggagggctgaccaccatacgaagtcaccgcccagacatacttcgctagggccaccacgacattaggtgtcaattggtggatctgcacgtcatacctctgcaagacctccgccacaaaacgatgcgcaggtaggcgaaggccggcgataaaaaacgcctcgaacacaactatctcaccctccggctcaggaatctcttccgcccccggaactcgtccaactccattcccaaaataccccaattgctgcatgtcttgcacgcgaaccgaggagatcctcgaaacaccgaactccaccgtgtggcccgggtgtaactccaccgccgccaaatcgctcatggtatcctcggacgacgattcgcccaacggcg

SEQ ID NO: 175153 - DNA, 789 bp, Zea Mays
gggcaacgagcagaaagcaagaagactagggttttttccgcacgaagatgggtaaaaacctcgcagcgccgcatgcggctttttatagacaagggaaaacgcctcgggaactcaacaatcccacagtaaaatgtcaactttcaacggttatgtttcaaaaacccccgcggggccacttcaaccgagcgagggcagtgtttcggccatctctcgacaaagacttcggtaccagctcacttagtcaaactggccccttagagggcaagtgttggagcgaaggcgtaccgccccctcgctcgactattttgggacatggataaatcatgatggaggaaaagcgaaggcagacgaagactaatggagcgaaggccctgagacggagggagtgtacgaagcaggcgacggccttgtcggtccccattagagccaggaacggtgaaggcctcaccgactaccgaagacctggcgcatggagcacgaaggactctgtcaccacccgcgcgttgttgagacggtgggtccatgtaaaaccgctctggcccgcctggtcctacttgcaagccactatgtgggtagagttaatggtgtgcccgtccttattatacctaatcacgttgtaatgacctataataacctttaagaggggaatattccagggataacgttgtatttgacatggtgaaaccatcccctggttacttataaatacctccacactgtaccctattgcaggtggctgaaaaacacttgcccaaatacactgtgttgacaagcatcaaatcatccccg

SEQ ID NO: 175154 - DNA, 496 bp, Zea Mays
ccggggacccgtgttcgtgcgcgttgagaattagggtggttgggcgcttcgggactcggcaattgctcgccgtctttagcgttccacctggatccgcgccacgccatggtcagtggtgttcgccctgctattgtcggtatgaaaccccctccgaagttcgccgtcgggctaattacatttttcgggtagtagaactagtggcggtgcaccgtaggggcggattcgaccaacgccgtagtcgcgggtgtagcttgccgccacgtccgaggtcgggttggggaagacaggtctcggtcgttcctcctggattccacagtctagattagtcgatgcgcatcggtctgtgtggtcgtatctgggccgtcgattgtatggcgggcgatgcagattatagctggggattttaaatcttagccgttaggagccgatcggacggtcaaagatccctcataccccttcggtcggtcgatttatcaaaagaacccctctattattt

SEQ ID NO: 175155 - DNA, 313 bp, Zea Mays
attatggtccccgacaccttgtaactccacttggtaattaattttctttacttcaaccattttgttgaaccttacctatcttacccttgcttgttttctccactttgtcagtcttgccttaaatctgtccatggttatgcttttcatcattatcacctttacccttatcacctctatatcttaccttgatgtttatctcatacctgccctttaaaatcgcccctcttccgtctcgtaccttctttctcttggtcgtatcctcttttttggctcgcgagtttgtaacctcatcatttgttgtgcttttgcttct

SEQ ID NO: 175156 - DNA, 549 bp, Zea Mays
ttggcgtgtggagtgtgtgagagagagacaagcgttgaaagtgacactctgactgcctctgcccgacttatctgcctgtcgcggacggtccacgaggggtttgcggacggtccgtgccctgccaattcagacggtctgctctgctgactcggactgtccagatcctaatacgacggacggtccgtggcctgatactcaactctccaaactttgtccactttctgattttgaatttcaaattttgatttgtcgctcatatatggacattttgaccaatccaagggttagtatgcatgcatatacacattatgtatttgaggaatacaaattttcatataaaactatttagatcaaacaagaataaaaaattcatcaaaaatacccaataaatagcctagagagcatatttagaagcgaaatgcaatactacacatgtgtattcaacctcaagccacgtttgagagatctatcacattcatttcacttcttaatgtgcaaaacctcgtttcatctagtggctttgtgaatatatcggtcaattgatcatcc

SEQ ID NO: 175157 - DNA, 643 bp, Zea Mays
caagagttgcttttcttttatctagcttctccatcaatttagtaattacattgtatccattcaaaccaaattctttaatcattttatttttcatgtcaatttgttcatcatcatcattagtgaagtcatcactaaataaagttaccttatctccttttgccatgaggcaagtaggggtgtaggagtcgtcgaagaggttggtgaagagttgagaggtcgaagtggattgaatggcgacattagccacctcttcttcttcctctgagcttgaactctcttcgtcggagttccattcttcacctatgtgggcttggccatacttcttcttcaagtatcccttacccttgcctcccttcttcaacttgtcccttttgtaatctttcttggcatcttgttccttcttgtttggacaatctgcaatgaagtgaccggtctggccacattcatagcatgccctcttctttccttttctctgatatttgtcattcttccgtacaaacttcttgaaagtcttgatgaacatagtcgtgtcctcatcacttgagctatcttcatcgcttgatgtttcaaccaccttctttgacttgtggtctttgcttttcttggaagaatcttgctcatttgacaacaaggcatgtgagtc

SEQ ID NO: 175158 - DNA, 365 bp, Zea Mays
tgtaagaaaataatagtatcataattgggagaacttacatggctttgaagaatatgaggtgtgtcctgttcatgcgccccaatatgtctcatggggatgtgcttatctgtgccgaccatgtctgtcgattttgtgtgctcatcaatatgtccaggtgccctcaatgccgcgggggagtaacagatacaccctctgtgtaaccggtgatcgcagacgctacaggatgcatgtccattgaaatagacgtacatgttgatctatgcacaggcgctacaggttgcatgtcatcgccagcaccggtgctggacattttctcgccgttaatcgtcgcccggtgctctcccttccgccgccgttaaccgccg

SEQ ID NO: 175159 - DNA, 777 bp, Zea Mays
accctgtcgagctccatcagctccacctggagtgcaacactcatagccgccgcgaggatctcggggttgtggatgcaggagtcccccgatgaagagttggacgcgttgggcttccaccaaacgaccagcacgcgaaaggagggcttggaagcggttggagtactctaccgtctccgtgtgtcggcactccaacaactcgaacaagggcgccgaacgcaggggcggcccaaacctcaaattgaggagctctttgaagcagtcctagtgaggcgtgccttcatcttcctggagctggatgtaccatagttgggcgacgtcttctaagttgtaggatgccatccaaatgcgctcctccgccatggtgcgctgttgtctgaaatacgactcacacttactgatgaagagcatgggatcagtcttgccattgtagcggggaaaaccgagcctctggaacttgagtggacgatcgagatcgcgctggccctcggtgtggccgccgctaactggtgacgacgaggtggcctgttccttcatgcccgccatgtcggccttcatggccgtcatgtttgcggtcaagtccagcagcttcttcatgacatcggcaagggtgggctgatctcccatggccgacgatgcaatggaggacgatggggaaggaggtgggtgcggtgggtggacagagggtgtgtatgcggtggcggattgggattgagacgcagatcgccggactcgtgataccaggttgtcaaggacctcggggcccaaggtagcagggcc

SEQ ID NO: 175160 - DNA, 861 bp, Zea Mays
ctattatcacccagatggagtcgttccctttttgggtttgggtagtccggttacaaaatccatgcctatctcttcccacttccattcaggcactggaaggggttgcaataggcctgcaggcttctgatgttcggccttagttcgctaacaagtgtcgcaccgggccacatactgggctatctctttcttcatccctctccactagtatctggttttgaggtctaggtacatcttggtggttcctgggtggctggagtaggctgagttgtgagcttcatcgagcagggcttctcgtgcctctcctttttggtacacacagacggttcttgaaccaaaggactccttcatctgtcttgaggtccggaaattgttctttgcgagctttttccataagacttgctgtctccgtgtccaggcgttgagccttgcatatgaggtcttctagcattggtttgacttctaggctgtcgttgttccccagacatgcgttcagctgagctgattccttcttccaatcttctaaaaagttggtccccttcatcccgaaaggttttcggctaagggcgtctgctaccacgttggccttcccggggtggtagtggatttcaaggtcataatctttgatcaattccagccatcttcgctgatggaggttgaggtctggctgagtgaagatatactttagactcttgtgatcggtaaagatgtgacatttgttcccgattaggtagtgcctccatatcttcagggcatgcactatggccgccaattccaaatcgtgggtgggataattctgctcatgcggcttgagtaagcgtgatgcataagtaatgactttctcattttgcatcagaacacacc

SEQ ID NO: 175161 - DNA, 530 bp, Zea Mays
tttctagggaaattgttgacgcaagtgggtaagtgcttgcctgctcttctcatctcggtcccaacattgtttatttactctgttcattgatagtatttgaaattgaactgatgacgccttgaaattgcttcagctaaccagatggaccagtccctgtcagatttatgcttggttaatttcttctattggattcaagttgaacttgcatcaatgtatagatcactcagttgaattgattgatttgtatttggccatttgggtgtgcaactgggcctcggcttctccagatgtggtgggtcaacgacagagacaccctcttgctcccatcggcggcagcggcgatggcacctccttccatctgcaacaacccatggaggccgacgatggtgcatttggggtttggaacgacggtcgcgtggatgcccctacccctcatggatgtgcggtccaccctggctccctccctggatgcagctggcgctcgctgcaggtgccggtggacaagcgatcgctcgagatggcggtgtagg

SEQ ID NO: 175162 - DNA, 820 bp, Zea Mays
tggtgatctattctcttctgtccacgagaacagcggagacaacggacatttgatcgtgttcccggcgaccagaggacttctagctccattatgtgggtcggagagcatcgtagacctatgagagtacttaaacggggaagaagatggtatgagcggacctgaatggtgctggccacgacgagattgagttcacggtgttctagaaccgaattggggagaattcaaaatttgtgctcgctagtgggggatttgggatgcaggtgggtgcggtagctgctgggatacatggcgaagccgaagggaggctcaatttatagatcaattgagcagtggccgggaatttggggttgaatgcggtggcggtcagagaagaagcgagtcaccggcggggtgattcgtggcagttcacgggatgagaagccacgacagtcactgggtaatgatcatagttcacggtgatgtggtcactgatcggaagcatggcacaatcgcggcggaggacgcaaactccggcgacggccgcacagccatgttgccgatgcacgtggtcgggataccgcgaggccacggcagcccgaacatatccacgacgcgatctttccatggctgggcgtaatccactcacccgcagcacgaatcacggcgatcggcgcgaacccgagcatacggctcgccggcggcgaagttatccactccggtgatatttccagcactgtaccatgggatatgttcattagtgttcctgacagccgaacttgaggctaagttttctctcaatttccaatgatcactcatgccaagctctgcagcaaagttgtag

SEQ ID NO: 175163 - DNA, 2502 bp, Zea Mays
tgattttgcagagtagctaccattcgaagataagctgaaaatatgtctatcctcagtgttaggctgcagcacaaaatttgcgagaatattccagaggtgtagataatctacaatggcaccaactgtaagagctcctttgatgtctgcaatccatcgtctgttcaatagggcctgctgcacagttcttctgttaataattctttttggaataatgctgaataatcttggagcaatatcagatacccttttgccatggatccatttatctatccagaacatggtgttggtcccattccccacctcagagatcaacaccttggagaagaaggaacgggccatgctaggaacttgaatggacaggctagaccaagggcgtcttgggtcagttttttgcaaccaaagccatcgcatgcggagggcccagcagagctcaggaaggctagcaatacctagacctccaagctgcaacggacgacatacttttccccaagccaccaagcaatgccctcctttcacctcttttcttcctcgccagagaaaaccttttcgtattttatcaattgcttcaatggcccagtgagggagatcgattgccattgccatatagaccgtcatgctagtgaggacatgctgcactaaaattcttctccctgctctactcatcagatcggccttccagcttggtaggcggtctgcaattttgtccacaaactgctgagcctgattcctggataacttgtgtaaagacaaggggagacccagatatctgcaaggaaaggttgcaatctcacaaggcagccagctccggagttcctcaatagtctcctcggggcatttgatagggtacacatttgatttctgtggattatagcaaaggcctgacgcatcgccaaaaagctggaggatgtcaagagaagttgaaatatctgtagctgtagggtgtaagaacaacgccacatcatctgcatccatcgagactctgtgaagccttttccttcttgatagttgctggagtaggccagctccctcagctttggaatacagaaggcccagaacatccatagcaaggataaatagcatcggggagagaggatctccctgcttgagtcctcttctatgcgtaatcagtttacccgggacaccattgagcaacacctgagtagtggaagaggctaataagccacatacaatgtctcgccagatatgtccaaaacccatttgctgcattacttcaattaggaagggccaagagacagagtcgaaagcattggttatgtccaacttgaaaaacagtcttggcatgttatgttgatggaacaaccttgaggtttgttgcactaacatgaagttgtcctggatgaaccttccttttataaaagtgctttgacttggggaaaccatcgcattcaatctttttgccaaccgattagccagaattttagtaatcagctttgcaaaactgtgcacaaggctgattggtcgaaagtccttaacctgatcagccccatctgtttttggaatcaatgtaatgtatgccgtgttgagtttactgaaatgatcaaacttcctgctccaaatagcagccaaggcagccataatatcatcttttatagtgctccagcagaccttatagaaccgtctagtgaacccatctggaccaggggccttatctgaagggagctcactgatggtttcccaaacctcatgctcagagaaaggagagtcaaggtctgaaagcgcatgtcttggcagaccaagggcttcaagatcgattgtcctttctctgatcccattctgaccaatgagagtggagtagaagtcatccaccgccgaagctttgtcagtatggtttacaaggatgcgatctccatccaccaatttagtgaccagattcttccttttgcgatgccttgcgtgcacgtggaaaaactgagttagcatctccttctttaagccatgtgattcttgatctcagtcttgccatagttcgcttgaaagaagcaagcagcagggtctgttttttcagtttatttttgagccagacctcagccggggagagggttctaatatcctgcgccatctcaagcctgtgtaacaactcctttgccaaagccaactgagatcaaacatgacccacccgcttctcactccagccctgcaaccgtttagctgtcaccttaagtttcttgtcaagtgtcaggaaagaagaattgtcattttccaccgagtcccatgctgcctggacagtttcctggaatccttcgattttggtccaaaaggactcgaaatgaaatctacgtttcccaaacatgttatctttaagtcccaagatcagggggcagtggtctgagtccagagaggctgcactctgaaggagggcatttgggaacattatttcccaatcaactgagcagaacgctctgtccagtttaaccaggacaggattatcctgttgataagaccatgtgtatttgcgtccatgaagagggatttccttgagag

SEQ ID NO: 175164 - DNA, 635 bp, Zea Mays
aaaacagaggtagtataatataaccaaacacgatagctcgaatatatgatgctcaatgttggagacagactatttgtcacacactatcctcgttgtcagctcgacgagggtggccacccatcaaccttctcgcctttatgaaaccattccttctctgcaatcacaaaccaaatgcagctgatcaagatatcactccaattgtactacccaactcataacactggttaacaatattctgggagaacataaagcagaaagaaaccataacgaacatctaataatagaaaattcatttcataagtacgtgaatcagatggtaagaatcttctaaacatccctgtatcatagtgtattaatataaatcgacttggctgatggatcaaattttatattgtggctaatctagacctaaaaccctccccaaagattatctccccaagcgatggcaacaaaaaatcctaagccatcaacatcagaaaaagtccaaagccgaccgatccatcgacccagaaatagccactgcaaacccctaggccctagccggagataatgcgcactgaatcaaactcagcaattcaacggtaatccagcgattcggctgaccatcggcaggtccgtcgtttgctagagtccct

SEQ ID NO: 175165 - DNA, 601 bp, Zea Mays
gaagaaggttggtgcattcgtcagaccaaaagacataacgatgaactcatatagcccatacttggtaatgaacgtcgtcttcggaatgtctgaaggtcgaatcctgagctggtgataacctgacctcagatctatctttgagaacacgctggctcctctcagctggtcgaacagatcttctattctcggcaaggggtacttgttcttgattgtgacctcattcagagctcgataatcgatgcacatcctcctggtgccatctttcttctccacgaataggacaggggcggcccaaggtgaggtacttggcctgatgtaacctttctctgacagctcatctatttgcttcttgagttcaaccaactctggtccagataccctgtaagctcttttagaaatgggggcggtgctaggaagaagctctatggcaaactcgactttccgctcaggtggcatgcctggtaaatctttcgggaacacatccagaaactctgacacaaccttgatagtcccgagtaaatttgcctccttgctatcaatagccatctgatgacaacctcctttccttggatcgggtgagactaactcagccaccacttct

SEQ ID NO: 175166 - DNA, 810 bp, Zea Mays
gtagcgcctcaaggtctgctggtacctagccgactgggttactgcgtttagtcgtttctcctccagcacatcaatgtcttctagcccggttgtctctgcctcagctatcctctcgaaggttagcctaggcgccccaaagatcaaatcggcaggcagcactgcctccgaccatacaccataaagaatggtgtatttccatgcagagctcggctaggctgtgttcgtaggctctagaccacgtatggcagctctctaatccacttccctgcaagcttttcgcttttgtcgaataccttttttctgagtgcatccagtatcagtctgttggctctttccacctagccattagctcttggatgtgccaatgatgcatacttaatttggatgcttctttgctcacagaaatcgaagaactccgagctggtgaagttggatcctaggtcagtgatgatgctattcggtatttcgaacctaaacactatctcctggataaactccactacttttgctgaggtcaaggaagcaattggcttgtactctatccattttgtgaacttgtcaatggcaaccagtatatgagtataacctccttgagctttcttgaaaggtctgatcatgtccagcccccagcatgcaaacggccaggttataggaatggtctgcagctgctgcgcacgcaagtgctgttgttttgacaagaattggcaagcctcacacttctagactaattcagcagcatcactctttgctgttggccagtagaacccggatctgaaagcctttcccactagagtccttgatgcagcatgc

SEQ ID NO: 175167 - DNA, 1000 bp, Zea Mays
caaacattgcagggatggcgggaccaataactgaaaatcctagggactcttttataagcttgtctcgactgaacgagtacgttctattctgagtcgtccgatcaaaatctggaggtccagatcagatcgcacgaaggggtatgcgcgccctaatcctcgccatctaatactcgatcaacggatcagattggacgatgttttctacgcccatgatataatcctatcattcacaccccatccgatggcacatattctaccaacgaagggataaaccaggacctaatctagaccgtcgatttcgccatccacgacctgacgccttcttctatctctcgtttgtggaaaaactgggcagcggcgctcggccctcgacggcgtggtgtgttagcatcgcggcatgacggcccatgggcacccacccatactgccgcccccaacagcatgtcgcaacggcgtgaccctctggggcgagccccaccgcacccccgagtgtcaacatcctacagcggcgagtgggattatgaagggacggtgaagcaatggtatgaggtgttccttaccgatggcgatgaggtgtagattccagcccaaggcgctacgtgttcacgcggcggaggactttcaccggcgtaggtcgatagtggcagccatcaaactggcccgtacccaccgcccccgcaatggtcgcgctccagcgagcgatgacatccaaggtggcgtagctctcttcttgtggcgatggaaggtagaggagtctagggttcggtgtcactctttatggcctccagggagattggttggggcgccagctgcggacttgctagcggcaatcttggtggagggtggttacaggggaggaggaagatctacagggcgcgcagcggctgacacatgggacccacgggcaaaggcagcggcagactcgcgcgcgagagcacgcaagcaccgattgacgcgcgtgccccttttgtcggagaacgagggtgcgcgatcgtccgtg

SEQ ID NO: 175168 - DNA, 556 bp, Zea Mays
gccaagtcatattctatgagtgcataagcccatttaccaattctaccactcataatcgggttttgcaacatgtatttgatcacatcggcttgactagaaacgacgcaatgactagatagaaaatagcatctacacttggtgcatgcataaaataggcatagacataacttctcgataaaagtgtacctcatttcaacatccaccaacctccgacttaggtaggtcactacatgctcctttccttcggtttcttgcgtcgggaatgctccaataactttatcttcagctgcaatgtataatctgaacaatactcctacccgtggcgcttttaatacgggggccgaagataaatattttctaatgagatcaaatgcttcctgctgctctgccccgatgtgaattcgacatcatttttaagccgaaggatgggagtgacggcatcaattttcccggcgaggttagaaatgaacctccataaataatttaccttgccgaggaacttctgcatttcaagcttacaggtcggaggtcccacattccgaatggatttaattcg

SEQ ID NO: 175169 - DNA, 729 bp, Zea Mays
ggtgataaatcttttagctctggtgcgtaccttagaaataaaaccgatgtaccacatggtgatgtatggggaatagagcacctttattagcttcttaggcactcgtgcgaggtgctacatcgtcagccccattaaaaaaccttactcccctttataaggaaaaaggttgtcgaagcatgttaactagacataatacatttagagctcatctgcattccatgatcttcgaatgtcatttccttccatgtctttgagcttgtatgaccctggtctgttcgaagctattacgagaaaaggtccttcccattttaattgcaattttactgttgtatccgggttagctacccttcagaggacaagatggcttggtgctatgttcttgagttttacttttctatcttgccacctcagtgtctctgcttgatatttccttatgtgctcgacttctttgagccttgactcctctatctcatcctttgaaacttcctcatttttgtgatcctgggtcgatgttgtaactcttgtagaacccatctttatttcttcgggggtgacaacttcgtccacaaagagaagcatgaacggtgtaaagccagtggatcttgatactgatgtgttatgattccacacaacttttatgagctcttctgtccatttgcccttcgatagtccaactagaatttcgtaactcccagtaagattatgtcatttgctctttcaaccaatcca

SEQ ID NO: 175170 - DNA, 284 bp, Zea Mays
acaccacatcccagcctttatgccatgttctcatggcacttggccacactgcctttctagggaggctaggacaagcaagagggggacatggtatggtagcatccatcatgccaaacacagttttcatggttccatctatttatgggaccgagtacatgggtggatactccctggacatggtagcatccatcatgccacacacaaaaagttttcacggtttcatctatttatgggaccgagtacatgggtggatacttcctgcttgtttctaattttgacttggt

SEQ ID NO: 175171 - DNA, 451 bp, Zea Mays
cgggtcgatgagcatcaagggtacataagaacactcaaatgagggagcagaaggtatgagcagacctgaatcgagctagccacggtgaggctaaaccgagcgggattcttgagcgttttggggagaatccaaaattggagctcactggtgatcgattgagagcaatacttggtggctgggtgcgtaatgaccctatggagctcatggtggcctcaatttataataggcaagagcggtggctgggaattcgagcgatgacgcgcggtggttggagaaggagaggagcactggcgcagtggattggtgtcctattaccgtggcaatctctccggtgatcaacggagagttacaacgggtcacggtgatgcggtggagataccagggcacatggcgcaaggtcagcaggcgaccgtcgccggtgaacttatctgcgccgaccgcaagacaaggg

SEQ ID NO: 175172 - DNA, 706 bp, Zea Mays
ttcttaatgactctgactttctcctctgcttcaaggaccaggtcaggtccaaatatttctctttcttcagcttgtgaccaatttagcggtgtcctacaccttctcccatacaaggcctcgaaaggtgccatctttaggctggactggtagttgttactataggagaactctgccaatgaaagacacttgtcccaattctttccatagtgcaacacacgtgccctcaacatgtcctcgataatttgattcactctctctgtctgaccatctgtctgaggatggtaggctgagctcctaatcaaagtggttccaagtgacttttggagctgctcccaaaagcgtgccacaaacagtgctcctctgtcagatacaatagtcttcggaattccatgcaaacgcactatttgatcaacatagatttctgcatatttttctgtcttgtgggtggtatgcactggcaagaaatgagctgtcttggtcaatctatccacgatgacccaaatagaatcgtggtgtcgagaggtaatgggcaatcccacaataaaatccatgcaaatctcctcccatttccaagatggtatgggaaggtgctgtaaggtgcctgctaccttcaaatgactggccttgactctctagcaagtgtcgcattcagatgtatacttagcaatttccctcttcattctggtccaccagtacaaggatctga

SEQ ID NO: 175173 - DNA, 523 bp, Zea Mays
ggatatgaactaggagagtgggagcatgggtataaagccgataaatcctcgggggagccttgatgtcgggttgggtgtcgccggccatggccaccaccagatgtcggggtggtgaaggcacgagcaaccgttgatctccgcatagacgtcctagatcagaataaggaataccccttcgcccattttatcggagtcatttgatcgcgggcgaatgatcgagatcagatcgtgccatactggattttgggccgtggatcttgaatccagtggctgcgatcacatatcgtttcattacagtaaaggtcttatctaatccgctgatgatagatcggacggttcacatctctgcgtgccccttcgcgtggcaatttggtaaaagagaccctcacatttttttgcaaattaatccatcgtgttgcagttataaaggattgaatctaagtcctagcacttgcagtttaaccccttagctcctatgaaatagaaaccgtcgtccatcttcagttaaaagaaataattaaat

SEQ ID NO: 175174 - DNA, 673 bp, Zea Mays
ttggctgtcgaactatttgccgttgtcaactatgagttcggacaggactccgaagcgacaggcaatgttttgccagaagaatttttgggcggtcttcgatgttattgtggatactgccctggcctcaatccactttgtgaaatattcgacagcgacgaaggtgaacttgaggttcccttgagctgtaggcagtggtctaatgatgcccagcccccagcgttgaagtggccatgtatgggcgatgagtttggtgaattgcgaagggctgcctgagtgaggggagaacttttggcatgcttcgcatgaccttgtgactcgattggcggtgcaaattattgcgggccagtaaaatcccagacgaatcaccttggcagcgagggccctaggtcttgagtgggagccgcaagttccgctgtggacttcgcggaggatttttatgccttcggtttcaattatgcacttcagcatgggctggctgatcccctttttgtacagctgaccctcggctaatgcgaagtccttgcttctgtgctttagttgtttggcctcattgcgatcagttggatggtagtggccttgcaggtacagtcttattgaggcccgccagtcttcggccatgatgaggttgacgatgcggtggccttcggtgtcctgagttatttgcagaccttcg

SEQ ID NO: 175175 - DNA, 613 bp, Zea Mays
gcgcggtgggagggttcgtgcagggcatcgtgacgtacacggtgctggacgacctgacggtgacgcccatgtccgccatctccagcatcaccctgctgaacaccttcgccgtggcggacctcggcgacctggaggagaagaaggtgaagctgggctacaacgaggtcaaagcactgcactgctagatctttcgttcgcacgtttgtcatctattgttgttggatcttgtcatcttggcaacatcgtcagcttgcatgtggatggatttggtgcagggcttggcggtcctcaaggcctccctgcagtccaagacggtgctcacggatgtcttcatccacggcaaggctgcgtcgtctagtgctcgcgcttgaaggccaccgtgctagcgggcgcgactggctcctggcgtgaacgaaataagtaaggtttggtttgctcttttgtgatgggatggatcaacttgctgcgacgacgtcgtccggccgttttagccttttggtttgggtttgtactgaactgatatcatctggtagcttttggttggcggatcgcatggggtcttatttggttgcgatgtcggtgccggcgtgccgcaaagggactgaactttgta

SEQ ID NO: 175176 - DNA, 526 bp, Zea Mays
ggttttgtatgtattaacaaatagcaactcccaaatggcataaagaatagggaaatggagacattagaaaagcaccatgtcgtgaaatctcagtcgcatgtgaggtgagttatttttgttgttcatgtatgtcattaatatgtatgtacaagtttgtactccaataatcatgttttacattatgcggggtaattgtaaggactacagtactttcgttttgattaaatggggtctatattttttctatccttgtctttccatgttcttctgaagcaccattgaatctttgcacaagtaattgtcgcctaccttcatgtgccaagtgttactttatgtagctcattgtgtattaacttgctgatttccttaagaaaaatatgaggacgaagcacaagcaaataagtactacatggttcaggtgcctgtctctcaccttgttgaagtctagaagatcatgcttttcctagatgtaaaaatgtccagaaatttatgtatggctaggttcacagatgaattacgaaatatt

SEQ ID NO: 175177 - DNA, 466 bp, Zea Mays
aagaagctcatgggtcagttaaatgtacatgaattcgaggatgactgaccaaattcaggcatgggctacagaaaatgatgtattgcaaactgggaacaccaccagggggtcaggaaacagacaagccacacctcaggatccgatgctatcaccttaggatccacaggagctcttccgcctggatccgtgggccttcctcaaggtgtcgcgatctgctttctttgcagcttgctctttgcgtttgttaatttctttctcctgtgattctgtgtgtgcaatgcggaatagaggatccaggattcagctctccagaaagtttgattcacgctgttcccttttacgatgtttggcgtttgctgagcagatgcaagtcggtttggatccattaaagtttcgtagccatggaccatgatatgcagctactgatctgcaggtgcttgtcaagaatactgacaataatgttggg

SEQ ID NO: 175178 - DNA, 323 bp, Zea Mays
gcggtggtccttgtctccatgaccctgtgaggaagctagcgcacaccaccgcgtggagttgctctcgtcactcgattgcgccgagcgatgagagagattgggagagatgccgggtcaacaacgtcgactcttggccgtgcggtcgctcggtgttcgcgcgtgacctgggtgcggccacgatttctcaccggtgttgggcgatgtcgtggatccgcgtcgtgaccctgggcgccgccgcggtataaaactgggaatctctgcgccttcccctatcaactaccctgtgcttgtaaagcccaagctcgtggccgccaccagaagag

SEQ ID NO: 175179 - DNA, 620 bp, Zea Mays
aagatgcatcatcaccaagccacgtctagacacgcgcgcagcataccaaatcggcgccagggaatcaccatcagcatgactgtatgcccccacgaacagtcctaggcgtacccccactaccctgtggggtcagtctgcctcagtcatagaagactttagcaccagaatctcaacagtgacccatatatatgaaaagacggaacaacacgccgtaccaaacatatgtgtctgcgtatgatggacggtgaagcggggctcatgacgtcaggcaaagccacgccgtgtacgatcgcatcatgagactaactcgtgggacccatcgtgcactaccacgaggacatcagtaatggactcgctacaaggaccggcatgacggatgacttcataccgagagtacgcccacgcacgaccctacaaaagacccactacatcaacctaggaaaggaaatctctatctctctccctctctctccctctccctttgtaaggttcctccctggaaatataaaagggaaggccctcccccttctcatacatgagcacaccagctgtaacacaccccagagcaatactaggatcatcactacactggactaaggcacaaacctgaaccagtataa

SEQ ID NO: 175180 - DNA, 887 bp, Zea Mays
cggctggagctcccgggcgacagggacacaattgaacccctaccgaacacttcccctcacttaatttcgcaaatgggtgtctggttggctctggccacggtgaccgtgggcgttgcggacagacaatcgtgttcccaacgaccagtgggtttctagttcaattgggcgggtcggtgagtatcaaggacaagcatgggtgctgaaacaagaacacaattggcaaaatcggacctaatttgagcggaccatggcgaggtcagaacacgcggtgttcttgagcagattgggggaaatgtgaaattgaagctctctggtggagtatttgaggtacgggtgagtgcgctagatgtgtgattacatcacgaagttgatggtgcactcaattaatagaccccgaggtcggtagctctcaatttgaccatgatgtgttagcggccggagatagggaagaacacggtggctgtaaccgtggcagtcaccggtgtaacggcgcaaggagaatactcctaagggtgccacgcttactaccgcatagtaacaagcttcggcgtggcgcaaccgaggtcaccggcgcttccacggcgactctggtagtccggccacgtcgcagcgactataatcacggcgataaactgcaattcgcgatcctatccattccccaccgtgagatcttttctttgccgtagttatccacccgccagtgaacacgaatccaggcggcggcgtgaatcacggcgtagagatcgtcagcggcgaggttgctgtgctggcggtctgatccactcaaagcactgtaccatggcgaatgacattcagttggcctgacagaccgatttgaagcttgattttctcctatttttatttggcaacccatccgaggctctgca

SEQ ID NO: 175181 - DNA, 416 bp, Zea Mays
gaagactacaggggagaataccagaagggcgcggacaaggacacagaacagaagaagctgaaagaaaatgtgttggccgtcatgtgtcaaagccgagtgggcgttacccgtcggacatgtggtccgtgtaaggaggggcgaggaagtattttagactatggttgtctctgtgaaccctaatatttaagaaatacagaacccttctcctatcgtcttcttcctctcgagctacttccttctctcctctgtaatcaccatagttggtagctaacaattggtatcggctgagttctcctgggactgctcgtcgcagcaggcatggccggcgcctccgagtcctccattacctcggcgttggaagctcaatccaagtctatggcggcccagtcgcggctgctccaacaaatcgccgagcg

SEQ ID NO: 175182 - DNA, 324 bp, Zea Mays
ggtttatttatgtcttattaaggatctactttttttacatgagtggtcacatgtaataataactagaggtacacatacatatataaaggaaataatttctcctttttattcttccttacaaagtaggtattacacccctcccacggcgaacttgcggcgcacatagaagacgctagtagctgtggcacctggggtggacccggccgcaacgagtagcagcacgactaggaggggcgcaacacgacaatgcggaggcggagccatggattattattggtgggcgaggcagacaacaatccaaaaccatcctgcacgtagcaaaag

SEQ ID NO: 175183 - DNA, 450 bp, Zea Mays
cttaatcttcaaaagaatttgagtttccaaactaacccttaaaacgtttaccgtcacacgcaacagccaaaaccatcgccaacgaaagacagttcactacatgcccagaaggcttatgacagcacacaggctgtgatgatataaatatgcctcagttttttaggcttggtgaatatttggggattacgaagggggagacgacccaagttcaaaagctcacatgaatttcgttttacagcctgggactcaaatgcatgtttccatacttagcacaagattgtactcctatatgtttcgcttcttccctgttagtgcgtttaagtaacttaataagtcgaggtgttgtttgatccacaaattgtaatgtaaatggcaacgataatgattaacattcgagtgacaacgacaataagtttgaatagactgttatccatttacagtgtaatatct

SEQ ID NO: 175184 - DNA, 528 bp, Zea Mays
atcaacaaaaacattagacaatagccatgttgcacgaatcttgaattacaagggccgtgcaacacttcgggtgctatgcgagtcaattgtaagaaagggagagaagaacaccttaaatcatgagtcttctttttccttcacaatacacaatctgtcgcactcacgaaatagtattctctctctctctctctctcccatatctgcctccaaccaactgtagtcatcccatcttgctaatccgtcacgacgccatgacaactatcccattcattggagtcagttttgagcgtggagatccttaaccaagagaggatggacaaggttcagtggcttcttgagtggatcacaccaacaacgctgataatgtgcgaccacacatgcctcgagagagcatgtgggagtacaacttattctacttctttttgcgatgatggggatgaactttctattgtcctgatgctttctctagaatttggaattctatggcctctaagttggcacctcgttagtttggcagccggacagtcc

SEQ ID NO: 175185 - DNA, 372 bp, Zea Mays
ggttgattgggtgtctgtatcttatatagctgagcctgacttgattcttctgtttgggtatccatgtgtttcgtggcttttgcttgtgattgaggtggactaatcatgtatccaaacattttttattccttttgttgttcttcattccattcatcagatatctctgtgattcatttttctcgttcatagttgttaaggtaggaattttgtcattggcatcacctacttcactggggttcatcatctggttagagagtaaaagagatagtgagacaagattgcataagaggcttgcatgacattaagataaagagctaacacaacattttgatttccaagataagattagttaaggatgatttccgattccgc

SEQ ID NO: 175186 - DNA, 566 bp, Zea Mays
catgtttttgtcgttgaacaacaatttgatgccacccgttcgccacccttgttttggccactaagacaggtaaggctgtttttggcctcgcgtgagctacaacacatgttttcatggccgaacaaccaatttagtgtccaaccatagtacactagtgttaaaaccatagtacacatttttgtccccggaggcctgtaaggctatttttggcgtcccgcgacacatgttttcttcgtcgaacaacaatttcatgcctcccgcccgccaaacatgttttggctactggcatgggaaaggttgtttttagcatctattgagctacatcacacaaaacacttaaatcctaaaccccgagccccaaaccctaaaccatgaacccgtaaccgcgaacccttagactaaaacccgacccccaaaacacaaaatcacaaatcccaaactccaaaccctaaacattaaaccccaaacgctaaccctcaaatcgaaacccgaaatctcgaatcccaaaagcctaagctctaaacctcgagccccaaacgctaaggcctgaacattgaaccccaaac

SEQ ID NO: 175187 - DNA, 451 bp, Zea Mays
tcccctttctgttgcaccttaggctatacagccttgtagctggctcctatgagagacaagcaataacacagtcatttcctccctcatccctaccactctcaagccttcagaagaggggtaaaacctcaccggagaagacggaccgagggtacgacctacgtagccgacggcccccttccctagactctaaggcccttgacaacttggtatcacggtcacgtcgatccgagacttccagttcttccgctacttccgccgcaaccagccacccagcagccctaaacaccgccaacccacactcatcacccacctccactgcaccccagcccagcgccatgaccgaacccaccatcgccgacctcgccaagttgatcgaggggctcaccggcaagatcaatacccttcaaaccgacatcgacacgatgaagaaggacaagacgtcgtcctcggg

SEQ ID NO: 175188 - DNA, 421 bp, Zea Mays
ggagaggataaggtgcacataactaggacatgccaagttacactacataagcaaaaggagatagctaaggccaaagcactgcagaatcagctgaagcaagtcctacatattgcttcgtgttattcctcgtacattcttgagtatgtgggcaatcaactgccattttcacaacccacaattttagtagcttcggcaaaccactctccagctgcatgggccttgccacaaccaccggtcatgactccaacttcgtcccacaactaactgccagaagtgtagcgctaaattcaacaacaacgtgatgcaagggaagattctgaagctcagacagttaatagcactattcgagaatcaatgcacatttactacagccacaaaggcgctaggttagaaactttcatatacacctattttaatttcc

SEQ ID NO: 175189 - DNA, 637 bp, Zea Mays
ttgggctcagcagcagtcgggtcacacccattggggtcaacttcagcaaattcaggcactcgcacttcctcagcgacaggaacagaaggaccggcatcctgatccaagctagacactcgacgaagacgtctcttcttcttcttctgcccctcagcaggagaagtgggttgatcggctcggtgagaacgcttcgggcgaacactgtcagacttctgagcatccaaagctttgccggcttcagggatgggcgcaaccaccagtgtttcagcaggagcggcgtcagaagaatcctcagctaacatatccagcatggcacttatctctgcgtcacttggattcaaaggcacctcaaaatgaacctgcctcttgtcgtcaggaatttctctgagtgaggcaaccaaaacactaacttcttcgggagagggtcgcactctaaggcccaaaccgctatcaccagcaggaggatttgacacgaaactggtaaaggcctgggaaggaggcagattctaggccgagtatgcaacaggagcgccgatgttagacaccttgcctctgagcatcatctcgagccggctcaccaagtccacagcaggaattcttctgttggttacccgggttgaatcagcctggcctcgat

SEQ ID NO: 175190 - DNA, 880 bp, Zea Mays
gtggattatgttgtgaagcatctgcttaaatatgtaaatgattaacataaagaaaatataataaatgtactttgcattcattctagtactttggtttgcgtatttaaatttggtttgaaagatcaaatatgagattaaatctaaactagaatgaaaagcttaaaactaataaagtgaagaaaaaaagtacgattgggccaaattacttatctagccgaccacagccatatgattgctattgccctttttattatttctttaatcctcttgccgtgctctatgtcatcatgaaacggttgatgacatcaacatgcaaattacttagctgcttgaccaaacatcatgcacatcgtcgtctttctcaggttttagctcaaactcaggctcccgggtgtgtgtcccataaacgacgttgaatggttattcacctggggttagttacagaccgagcatggtgattgtttctaccctgaagctctgcgtctcgctaggatcttcactgcattatttgcttttgtcgtaaccgcctaccaattttccctcgcatagctgacgctgccggagtcgcggattctgttgtaaccaccacagatcgtcagcttttactccaaggcgaactccttaggctctaggtttatataaatcaagctgtcgcatgaccctccacctcacccaagtctcatactactcctaattctacggccgtcctgctacccaagagaacagggagatacagagcggggcgaggagagatgggtcaccgccacggtcatctcgtgccacaccattgcttcatccccgacgaacaggtctgggcgttgtgcgagttcccgggagcgtgctcgtggtcttctctgacggaggttacattggagctcca

SEQ ID NO: 175191 - DNA, 924 bp, Zea Mays
ccaaaggggcatcggccgattacagccgttggatgggaaaccaagtgcccatattagtttcgcccattcgcgaacccgtacgcatttagattcatcggatccaaatctgacggtctacaatccccaaactttgaatccatccggtcacccgattacgatcctacggtcgagatgggtctcgcgaaggggtacgctaagttctaattatagccgcccactgagatcggattgccgggattcactggcaacggggcgattccccccaaacacaccactgcccggccgcgcgcggcggagaaacgcagacatggcggcgccatgaccgggaatggcccaaaccgtgctcctgcgaccaaactctcccccgaacccagctttacatagaataggcaacatggaatacgctctgcgctcccacatcgggtttcccggcaagtagcgggatgcccccagcccgcagcggactccattgcacggcgtactccagcgagaaatccccatgcaaccagcccaccattcgaccaagaactaggcgctatacaacgtacagaggaggatgaaaacatggcggatgtctcaccttgattggcgcggtaaaaggccaagcccacgacggcgtgcggaaactgaggcggcgacaccttcttccccaaattccccctctcacactctgctctgtctatggcaaaggaacctctagcacgaggtggcacggtcgcgtgcgaaggaaggcggccacactcttaaacaaccccggtatggcgaggaccccagagtgcgtgcaatttagtcgcggcggacgctacattgtcggccattctgttttgccggggcacgaagtccgcggggacatggtctctgggccccaccgcgcagcgagcgtgttctaggtcggtgcgactagcaggtaggcccagcacgcac

SEQ ID NO: 175192 - DNA, 876 bp, Zea Mays
ccaacgacaagattttcagtgccatcaagaaaaggctactcgacgtcaagaaaggcaaatgggcagtccagctccccaaagtcatatgggcactaaacacaacaaaatctagagtgaccaaatttacacctttttgtttgatgtatggatctgaagcaatgatgtcgcaagagctgaagcacgaatctccacgagcgagctccactcctgatgtcgatgagtcaacctccaaggaccttatcgacgaagaccgtgttcttgccctagaggcactaaacaaataccaagcacagacgaaggcatgacacgacaacactgtcatccccaaagaattcgaagaaggagacatagccctcaccggaaccaccagaacagagtctcggggcaagcttgaacccaaatgggaagggcccttcatcgtcaagacaaaacatcctccgatgcctacaggctcgcttcaccatccggtgaagacctaaagcactcatgaaatgtgaataacttacgaaaattcttcgtctagtcccaaggccttcgcgcctttgtaatttcgtagacactatctcagtcgggcttgcactcttttcctcgtaggggtggggtttttaacgaggcgaagccatgtaataaagtgtcgcaacaacccccccccccccccccacacacacaaaaaaaacaaaaattcaagacgacattacgactgtggatgtcgaacaagaccacagaactggtcttcaacattcgacgccaaaacagtcaccgcaacggcaagcctcggcagccgtcgtgtgcgacaaatccaggcaaaagtcgcctaagggttcagccggataagaacaacaagtgtgtaacaccacccacagtgtgcgaagtctt

SEQ ID NO: 175193 - DNA, 630 bp, Zea Mays
cgtcctgctacgattccgatcctttcccgctttgtttcaggatgctatgcctatgtaggagtatctttcttttgttgggatagtcttgggaagcggcgccgggctttctcgtgagtagtggggctatggaattgggtgccgcaaagtgcagctttgattctgaattaactgagctgattaaacagtagtctaacggctggagttgggtggctttgttccaagaaattaactgcttcagtgccctgtcacagagaaaaaaaaaagaatcttgtgaccttgtctatgcatgtatttgtcccttttgatctcagctttggcaaaacagaacacctataattttcaccatggcatgaaaggttcatcaatggaacattttgagacttccattgaagcctaaacttgggttgggaatattccaattcttattggcctgtttcaacctataactcaacatggtcatgttttgcttggctgttagtctcgttaaagtgtatacagaagctttgagtggatagccagtttgagtagattattcgatcttgatggtggtgtcggtctggtgcaagtggcaatcagatattaaaattctactattacgatttgatgttcacttagctttatcatattcat

SEQ ID NO: 175194 - DNA, 548 bp, Zea Mays
gcgcgtgtggttggatggtaactctgaattacagcagcgggttctccaggcgatgcatgattctgctattggcggtcattcaggcatacctgtcacttacggccgattgaaacaactattttattggccaggaatgaagtctgttgttcaggcttatgtgcattcttgttcagtctgtcaacaggcgaagccggaaagggttaagtacccaggccttctccaaccattgtcagtaccgccgcaagcctggcatacgatttcactcgacttcatcgagggattaccccgttctggacatgctaattgcatcttggtggtggtggataagttctccaaatatgggcacttcttgattttatcccatccattcactgctgctcgcgttgctcgggtgtttttggatcacatctataaattgcatggattacctaccaatattatttcagaccgtgatcgtatttttacgagtacgttctggcagaatttattccggctcaccgacaccaagctttgtatgtcatcagcttatcacccgcaatcggatggcc

SEQ ID NO: 175195 - DNA, 665 bp, Zea Mays
cggggtgttacaataataaatgagaaaattccttatgtgccatcaaaatctataacaatcttctataagccaccgaaaattatgtcatctcttttatgccatcagtttaatttttcaatcctctatatgccatcgccgtcgatgtacagggaaacgacgtcaaaataaatgcagacagtacccgcgtcgcccccgacccgaccggcggccaagcgcagctcccaccccaagcccgcatcgcctttaacccgaccgccacgactccgcccgcgacctgcggccaggcggcggctccatccccgagctcgtggacgcgtccgcctcggaccgatggctaggcggttgcttcaaccccgacgcaggcagttcccagttcgccacgtacccaggctgctccgcccaaatcccgacccaagctccttccccaatccgtccctgacccgagtacgagcttccgcccgctcgtgagtgctccatgcgcctgcaccatcccacaagtcacgacaaatcaagctagccagaccactgaatttgtaggagcaagaggaatgtgtggaccatactgtcgttcttttgcttaggaagtgcgatcacgtagttgttttgtgctactctgtatacatctatcgtgtgtataaaaaacatgtgttctgtgataaaaaaat

SEQ ID NO: 175196 - DNA, 574 bp, Zea Mays
atatatttatcccactttagaataacaaccatgatctaattaatgaaatattatcaagtctatctagtcatatccaatctaatctagattttatctaatctattatgatctaatctagggtaagttacttaatgctggtacaaaagataaggccatatccctcatgcacttaaaactaaactggtgccttaaaccaactcagccacatgcatgagatctgacccaaccaataaagtcatgaagaattgtataatcattccccacctagcgtcaaaccaacttctaacctacatcatgtagtctatctcacctatatctatcttaaccatattcccccaacttcgatgatatacactgaccccgactcaatgagacaaagaccggaaaaggacaatatcaacctcgtcaaggaaggagagaagtcaaactcaatcttcagatgcattaccactcaacacggaattctttcctaccataaacttcttacccttagctattcttgccctaacctatccatctcttatatcctacataataagtagctggatacccatgttctcctaatcactcacta

SEQ ID NO: 175197 - DNA, 616 bp, Zea Mays
agtccagccatgtgacactatttactagttggttaaggacccatggtccaaacgccgacaaaatgatatcagaacaagtatatgtctttatccttatgcaccgttcgctcgcccgctcgctgcattagtcattgattgtacatgtgtaaatattgcacttgatatcaatacagaagtgttgttgatccaatcactctcacatgatgctagtccacggttttttcaaaatctcgcgatgcaccgctctcgctccttctcaaactcgtgatttgatgctcccaatcctatatgctcttgccatctccccgttcacaccatggacgaccactcatcttcctctaaatccaaaaccttcgagttgaggggtccacctccgcctccattctctaaactgtcaacattcgtgtgcatgttcgtatcaccatcgatgtcaacgaggtgaactactagcactagcgccgcttcttcgatgaggtgttaggcaagtttgacctcacacaacatggtcgatcgtcgtcgtcgctggatgaacgtgacaatgagttgcatatggtcgatcactgcatcgtcagctgaatctttgccatcgtctacaagtcagtgttcaacaatatcc

SEQ ID NO: 175198 - DNA, 825 bp, Zea Mays
ctgtgagtcccaagagggtaacagatgggatgcagtttggacagtgggcaataggttcagttagtgcagtgcgaagtggatttctaaaaaatgattttaccactgttgtgccttgttgtttctggtcgaagggagtaagtggatgggcattggcatttgtgggtaggataagtattgagtactcaaatacctgaagctaaagagatttaaagtctatccacacagatgactcacctgttgtgtgcttcctatcaaaacaccagcgcccctttagcttttacctcacggtggcttgatcctgcgtgtacttgggtgctggggctgtgtgtccatgtgcatgaaatatttggactcaacacatgcgtcgtgataaggacaacagtagcagagcctccttgctctatcctgttatcatggccaacagtgcactagccccgttttcatgtaatccttagcccagccgacaggtgatttagcatccttgtttacacgtccaaggtaaactgggttccatagttcatccaaccctaatgtcggctctccatcacctcgcctctcgacgccagaacaacagcagcttggcgccgagcttcatcacacgcgctcgtttcagcttcccgtcagccacacgtgtgagctccccggcgctcgtccctgatccaccgttctcgacatccagaatttcgtcggcattctcggacctcgccctggtgtgtggtccacgccgcgaatcccctgaggttcacgcacgtcatctctggctcttcctggtctgtggtgtgtgtcgctgcatacttgtcgttggtcgtcggccatcgatcccgc

SEQ ID NO: 175199 - DNA, 352 bp, Zea Mays
gttttaagccctttggcagaagtgacaatgccgaaggcacaaaaaggtcttgcggcgacccccaagagaaaaaggatggccagtgtactagatgtgctggagacggtaaaggcttcaagctctactccagggaaaattgccaaggcttcgaaagtgccaattgaaacagaaacaaaactgaccgaagccaaagctacaatgagccaggctagcgccgaagctggaccttcagagcctgccaaggagaaaccctcggaaattggagaaaaggcagcggaggaagaagctatagaatagattttgcctgaaaaagctgccgctcctactctcgaagcaccttccgaagaccttg

SEQ ID NO: 175200 - DNA, 421 bp, Zea Mays
ggccaacacgtaatgttcctaagattcagtgagcagtactggtgaacggcgggttcatatatgtaaagcgcatggtctcttttagaaaacgctcggctgcggcaatgtatggattaacaggagtcgtccgatcctgatctgaggaacctgatataatgatgaagggtacgcgccatgatccataggattcggaatccacggtcccggtttaatacagccacgatcggctcatactcacccgatcagatatctacggcctagaatcaatcacgcgaagggttatcgctggcatctaatccgagccgtccaacgagatccaatggtgcccgatacttcctcgctttagacagtcgtgcacggcggcgccgccctcgcactatggcggttccattgccggagtagcgcccaatagacgttctag

SEQ ID NO: 175201 - DNA, 406 bp, Zea Mays
gggaagtgagcaattcgtggtctctagtggataattggaggcaagcgtgggtgcgttggcttcgtgataacatggcgcaatagacccggccatcaatttataggatcgctaagcggtggccaaggatttggatgaagacgcgcgacggtcgggggaataggaggttactggtgctcgggttagtggctttcaccgtggcagtacaccagcgatcaccatgcatgcgagacgcgacttacagcgacgtggtctaacgctttagcatgtggcaggcgatcgacggacagccaacgccggtgaactgatctgcgctggcggcaaggcatgggggtacgggggccagctgccggagttatccccaggcgaagatcttttgccccgaagcactatacggtcaccagtgagc

SEQ ID NO: 175202 - DNA, 946 bp, Zea Mays
ggagaagtgtaacgagatctgcggaaattatcttgttagggagcacgaagatatgcattctatcttcggaggccgagggaaacttcgtcttaacagagttatgaatgccacagggtttgagtacccggattacgaagatccggcagccaatgccgaagccggggaaaagagaaaaaggggtgttgaaggtgctggcaaaacatcaaagaagaatgccgatgccgaaacagaggatgataatgaatccgaacatgacgaagagacaccttcgggcctggcaaagaagaaagtcaaaatttctgtgaagaaaggtacaactgcgaagaaaactccagctacgaaaaaagctgcagctgcccaagagcaaggaaaggatagcaccacgactacctcgtcattcggttgcacccggattctcgaggtaatgactcgaccattaccattctccactctaagtccgttgggaccgacattaactcggtttatgccaactacgaagggtactgacgaaggtggccaatcatcgaaaagcaaggatattttgtctaaagaggaagtagagagcccgcgcattctgggtcttggaggtgctgccttcggcggttcatcatcctccgaggaagatgatggaaaaaagtccgccaaaggtggtggatcttcggggcacgagaaggtagagggggagccagaagagccaagccttacagctagaacggatacagctatcgctacccaaactaccggtgaagaaatagatgagcttggattctttgtgagacatcttggcggtggcaagctgaatgacaaggaagtcttagagctagaaaataaaggcgaagctatgggatacgaagctagagctatgctcgtcggcggggggaatgaaatgcttatgtcactacaggaatcaagaagattcccgtcggcaatattaattcccgtcggc

SEQ ID NO: 175203 - DNA, 646 bp, Zea Mays
ccgcgggggtccgttccgcagatgcgatcacctccgggtgccgggcgggccccgcatcggccacatccacggtgtgcgccagcttgccttcggttgattgacgcgggcaatggcctagctcccatgcgcggtcgtcatcgcctcgacgtcggatacgatgcttatgtggtccgtgacgccgtgcgggtccacgtgcagcctgtaagggaagagcgggtggccgcgtagccgtcgtcgccataccaatagtcatctctctcgctcccatgcctcaccagtgacaggcatggctgaaacaacaccacgctctatgctgcacgacggtgagtactttcctccctttttaatattttattccctctctcctcaattcatgttcgccttattaggtcctggaaccgatagcttctctaacccgtctttgtcgttgttcgccactttggtttgggcacccaccgtcgtcatgggagcgtgtggtctgctcctgctgcccgccgccccgtagacattgtctgtgactccgtaagtccatgtttgctctactagaccccctcatgtcgtctgcatctgcattagggtcggctccattggtgcttgctgcattagggtgtttgctctttgcaagaactgtgttaccgtcggtcat

SEQ ID NO: 175204 - DNA, 529 bp, Zea Mays
gccgtatctgcgtcgtgctttttttccgtgcttcgggctgggccatcagacccagcccaaatatacacctatagttcataccaattaactaccgttgacatcaacaatgcaagggaggccgtagcggtagtgtcttcacgtgtcttcaggttctttcttccttcctaacgaggcttgcactagacgggagttccgagacaccgtttcattgagagcaggcagtgcttcaattgtttggtacgtcatttccaatttactgtaatgtggctgtagtttagtggtgagaattccacgttgtggccgtggagacctgggctcgaatcccagcagccacatagttttttgtttgtctttatttataacttcaccatgtcatctcacacattttttttattgtttgtctatatttataacttccccatgccatctctatcgatatatgctggatggataatttttcgcgcctaaattccatattttgttctatttctctctatattccataacttctacattttacgctgaaaac

SEQ ID NO: 175205 - DNA, 798 bp, Zea Mays
cttgcacctcttctgtatagtaagacccctacaatggtgtagtgggccactgtctcgcgatgcgctccgccgcagccttgtcatccgattcttcctcatttcttatgtatctgatgattagctctctccagtcgttgggatctacttctgcctgacttagaacgtggcattcctccatctaatctgtggtgacatttggttgttgtatttcttggacaaaaaccctatgtggaacttgggcccgactggaccccaacttcgatagcgtgtcagccgctgcattgcgatccctttccacatggtggaattctaatccttcgaatttgtcctctagcttccgtaccactgagcaatatttgttcattgagtcggttgagcaatcccagtctttgtttacttggcttatgagcaccagtgagtcgtcgtacaccattaatatcttgatgccgagtgaaacaatgatgctattccatggaccagtgcgtcgtactttgcggcgttattggatgctggaaacaggagctggagtgcgtacttgagttgctcacctccaagagcgataaagggaatccctgcccctgctctttgcagtctcagcgagccatcgaagtacattctccatatttcagcaacttctcggctttccaggacctggtgttcagtccactctgatatgaagtcgaccagtgcctgagtctttattgccatgcgaggtaggaactctatatcatgagctctgagttcacacgcccacttggttgttctcccaacatcttcattgttgtgaagaatatcgcc

SEQ ID NO: 175206 - DNA, 682 bp, Zea Mays
gttggccacggcgcgaggtcacacgatgacgcggaaaaccaatttgtgggaaatagcgaattgaggagctacagtggatgattggaggcgaggagcgatgcactgggcgcataacaacctaacggagcatgctcaacgctcaatttatagtgtccatgaatggtggctccgaattgaggagagaagctggcgaccgagaagaggggatgagtcactgtggcgatttaccctggcattcactagacaaaggcgtacggctatcactggttaacttccatggctcaagacgacgtggtaaaacaacctaaggcttggcgcgaccgagtgaatggcggcagccaccgcgacgacaacgcagccacgtcgtcggcaagtgggtacagcgtcagggcagcaacagtgccccaacttcatcccttgcgtaagatctttaccctgagtcgttatccgtgtgccattgggcacgaatcacagggccagcgtgaatccaggcgtggggaacgccggcggtgaggtgcactgaacctggcatcttcttcagactactgtacaatcagagtcttcatcagagcgcttgacagagcattttagagggcttgattctcaaacttttatgtggcaactccctaatccttctgcagcaaagttgatcccctacaaaccagcttgaatttcattatag

SEQ ID NO: 175207 - DNA, 591 bp, Zea Mays
cggcaggtagcactgcctccgaaccatagaccatgaagaaggggtgtttccatgcagagctcgactgggttgagttcttaggctccaaaccacataagacaactctctgatccacttccctgcgaacttttcattcttgtcgaagactttattcctgagtgcttccagtatcattccattcgccctttccacctgaccattagctcttgggtgtgctaccgatgcatatttgatctggatgctccgttgttcgcagaaatcaaagaattcagagctagtgaagttggatcccaggtcggttatgatgctattcggtatcccaaacctgaatattatatcttgtatgaattccactgccttggctgaagttagagaagcaatgggtttgtactctatccatttggtgaatttatcgatggcaaccaacacgtgagtatagcctccatgagctttcttgaagggtccaatcatgtccagtccccagcatgcaaatggccatgttacaggtatggtctgcagctgctgtgctggtaaatgttgttgctttgacaagaattggcaagcttcacatctctagactaactcggctgc

SEQ ID NO: 175208 - DNA, 815 bp, Zea Mays
gagaattccaagagacaaggtttgagccaaaatagacagcataacctccagtgctgcgtctgtcgtcttggtcaccagcccaatcagcatccaagaaagcactaagtaactcagaattgctcttggcaatatgaagacccatatgacgagtgtcccctaagtaccataatatcctttttaccgcactcaaatgaacatatgttggagaggccatatattgacacacacgattcacactgaaagcaatgtccggtcgagtcaataatatgtattgtagagcccccacaatgcttctgtatttcatagtatcctcagaagagagaggttccccatttgtcagtttgagccgatcagtgggcagcatcggcgtagcaactgctttagaagtcagcatgttggtttgtgtcaagagatcggatatgtacttgtgttgtgacagtagaagcacaaaggacatacgagacacttcgatgcccaaaaaatatgccaaaggtcccaaatctttgaccgcaaagtcagttcgcaactgacgaagcaaattttcaacagccgatgaagacgaacttatgatgatgatgtcgtcaacatatatgagcatatacataaagagatttggcttgtgaaaaaataaacagagacacatcaactttagacagggagaagccaagggaaaccaacttcttgctgagacgagaaaaccaggctcgcggagtttgtttcaacccataaagtgacttatccaatttacaaatataattagggtgggtcttatccacaaagcccgggggttgcttcatataaatgtcctcttcaag

SEQ ID NO: 175209 - DNA, 395 bp, Zea Mays
gtggaaagttgggttggcgccgtcagattggatttgtgtggccacgattagaagttagggtggatggccactggccgttgatctcctgataaacgctctggaatagatctaggtagcgtttcgcccaagactgttagatgtcgttcggacggtttggggtgcatcaagcttcataaaatcagtcgtcggattctgatcctgtggctaccctggcatatcggttcgctagatggcatgatctaatccgatccgttggattgggatccaacaaccgatattcacccataacccttcgccacgctcttttactaaagagaccccgagagataactgaattaacccgccgtccaagcggctttagctctgagtcttcggaagagttaccctgaggtccc

SEQ ID NO: 175210 - DNA, 649 bp, Zea Mays
cttgaagctttgattaaagttggagttttaagcccctagctgccgagtgggaaatgtcgaaggatgctagggctaatacaagttagaatgctggaaagagcagtttggttcatttgaagtattcttatcgatacagaaatcaatttggcgatcctgacgatgactggcttgatgccatcgaagcaacaagtgatgaactgttaggagcgtataccaaagctaaagatgaagctatgaattctgcctttagtgcccgaggaaagaggagattaaacagggtttttgacgctattggatttatttaccctgattactgcttccctgctcagaagagggggttaaaaaggaaaagtgcattaaaagcttattccactgcaccgaagcagaagaaagtaaaggttctgactcatcgacgaaaaacatattattcggagagagcagcagagttacctgccttgctggttaccgcgagcgcgagtgatttaccctcgaaggtaacgattttttagctttcactttaaactgccctaccaacactctttttgaatcctttgaatttttgaacaggggcaggagaaaatcaagaaagcctctgctgatttttttgttatggagctgaagatgcttgatctgtcgaagataccggatc

SEQ ID NO: 175211 - DNA, 808 bp, Zea Mays
caatggtacagtgcctggggggataaggatctggacctcgctggcgataaggatgccatggcgattgggatgggtcggcggccgcggtaaatatcctcggcaacgtggcagagaatcactgaggtggcaggccccggttaatcggcgaccgccgtgccatcaccggaatctatcgcgcggtgagctcgccagcacgatcgggaatccgcactccttctccaactccggtcaacagcctataaattgagcccggactccgcttcttcatcacatcccgcacctcaacaacttagcactcgaatcgagtacgccaaagaactaacgcagtccacaaatcccctttctctctgttcttactccgccgcggggaactctaccgtgatcagcacccctcgggttagtaattcccccaattgctccctgttctagcgcatttatagtctcttatggctctcagaaccgaccaattgaagttcggccaaagtctttcaccggaacaggcacttgctctgtagaacaccgtcgtgacaccctctccgtagcccagcgtttctattcgtgcccagtccaaactttagtatgtgcgtcacctctggtaggcctgtgaagctttcccaagcttcaatttggtcgttcacgccgtcggttggtcagaatgcttccatccatatgaccatccgccctgtcaccgtggaccggttgattaatagtcccaatggtgaaattgattgaggggaagtgttcggtaggggttcaattgtgtccctgtcgcccgggagctccagccgtggcgtcatctggccggaat

SEQ ID NO: 175212 - DNA, 271 bp, Zea Mays
tgacacttggtctctttttctaaaaaatcaagcatttcgatgcttctataactcccatgccactaggattatcaatgaattgagtccttttcgaatttcttttggtgctgctgcatttgttttcctccaccaccctgaaaaactgaaagtcgtagtatgtggcgccatctgcagcagccctaattgttgcagaattatggtccaaatctcacgagcaaagacacatcatatcagcaagtgatttatgttactaaccttaggattaacaaat

SEQ ID NO: 175213 - DNA, 520 bp, Zea Mays
tggcactatgcatggatcttatagtatttcctgagatttaggacgttgaaagaagcaattagagtaatgtatagtggattgctggcggatctttgtagttagctttctattattaatttatgatcaacttgtgactaaactggctatagcagtatagcctgcttttcttctctctctcctcagtcttgccaagcttcgagttcctcatttactcgtggtaggaagcagcgcagaccatgacgttgacgagaccgcctttaatgtgggcctgtccgatcccccagcctgccgcatcatcagtagtgcttcttggcgtccccctgcgcgctgggagtgaaccaagagaacccaacacgtctgctagattcctcatgattaatgaggctcatcttgtgcccaaatagatagtgggacattgatgcatcagcaggttctatgctgtaagaaaaacataaataaaaattacaaaatcacgactgtaagcgggtttgtaaatctgcagacaaccttaggccagttc

SEQ ID NO: 175214 - DNA, 1043 bp, Zea Mays
ttcacgcccctggttctcttcttcaggtgcgctgtttgtttgggctgcttcctgtgtagcactgctaacactcgacctacagctccatctcctatgtcacttccttccccgccatggaagctaacaaatcattgggacctcaagatgatgattatcgcggtgtcgacctcacccgtgctaagtcctctaatgacaagtgggctactatccgtgcttatcatcatgctcgtgggctatgtcttaaatgtgtcgaaaaatgatccaaggatcaccgctattcaaactccatccaactcaaggcagtgcaagagctctttgacaacttccagtgggacatggattgccactctattgctgaaacattgggtaatgaataggagcaactctttctgatggtgttagatggattgattcaatagcatgtcgtccatatattggtcgattatagtagttcgcactcattcatgagtgcccgattagttgctcagttatagggtgccgcacctcttctcataactctatcagttcaagttgctaaaggggctcagttgtcctgcaccgtacatatattggctctttcatggtctgtgcaagggctcacttttacttctgatttcaaaatcatacctctttcttcctatgatgttattgcggatatgtattggatatcaagtttcagtcccatgcacattcattggcagcaatagtggttggtgattccgtatcagggcatttctcagtgttactgcaaggggcttcctattctattcttgatggcacagtgattcagttatgtgaggtggtagattttgtgcccattcagccggattcatcctctattccggtagaggtgcagtctgtgttacaagaattatcagccatgttcctcgcacctatggacctccctccaccaagggcctatgaccatgccatccctcttatccctagtgcttccctagtggctatgaggccatattgttatgcaccggcattgaaagatgagattgaacaacaactccaagagatgttgtcacatggaatta

SEQ ID NO: 175215 - DNA, 420 bp, Zea Mays
caaaagaaggcgcccggactgtgtgtcggtctgcgcataaggaggcatttgtgcgtgctggctgctggggaatgtgtgtcattcgaaggctgcattgggagcgcaacaaggtgatattcggcgacgtcgctgcattgatgtgtccatcaccatgtcaagattagggggagattgttagcactaatcctgacatgcgtgcgttgggtcggttagctcctagaattgttagctgctgcatgggcaaatgcaaaggatgctcaccacattgtgcggatgagcggcatgcgaggtcgttgtgatacgtcattggaggatctacatgcggttagtttgttgcgatccatcgtgcggcgtcgtgcgcgcgcgacaagctggcaagcgtggagtttgtgctagcatttccgtccagctatataatcc

SEQ ID NO: 175216 - DNA, 627 bp, Zea Mays
atcctttcgcgtataaggaagggagaggacggccctggtcgcgcacacccttctcccttcttttcgtccgctcgcgccgcattccgttggaactcctttgctcccaccgcctccgctagctcaggtttggtccgccgccgtcgtccggcaagtaaactggtgcacgtgccttagtgccagggttggtgtgttggtggcgttgccccggtggtgatcgcatgcttccctgcccataacccaagctgcctcgtcgtgatttctcaccgtcgaagcgcgcaccgcctggatccgcaccgtgccgtcgccgggggtctctgcgctctaattcctggtgagtagcccttccaggtgttcgcgcgattgtcgtaatcgttttgcgctagtagattcagggtttagtgcttgggatcgccgggtagagagttcgtcggcgtgacgagcgtgctggttctagagttcactccgtcgcgggatagccgaaggttgaagacgcgagatcaccattcgatctcctttgggtgactgagattagaactgggataacccttcgtgtgattaatcgggtgccgttagatcgagatcgggcggcattggttagatcagaaattataaaatatgggtcgtcgt

SEQ ID NO: 175217 - DNA, 328 bp, Zea Mays
aggcgggcgaactcgtcggcggcgaggactccggcctatccagggtggtatagttcaattgaacgggtcagagagctttactggatgctagggaagacgtaggcacgaggaattggaaaatggcttaccggttagtcgtggccacgtgcgccggcggggattacaactccggcgagggtggaacggcttctccggtgaagtagcgtccggtttcttgcttcggggagctctacggggctctggggaagctaatcgaggcacatgattgagcggagatggctgggaggggtctggccatggtggccgagcgctcgggttgcttggcggg

SEQ ID NO: 175218 - DNA, 574 bp, Zea Mays
accctatgtgatgaattgtgcaagctgaacctggaagttgtttcttcaggtgccttaagttatatctcggtggaacccacattgcaagagcaaatagtcagggcacagattgaagataagggtgttcaggttatcaaagacatgatcaagcagaaggcagaaaaatacaagtgctttcgtcaggacagtaagggaattttatggtttggagatcgattggttgttcccaaggaccctgagctcagaaagaagatactggatgaagctcacctttccaaattctccatgcacccaggtagcaacaagatgtaccatgatctcagatccttatactggtggaccaggatgaagagggaaattgccaagtatatatccgagtgtgacacctaccagaggatcaatgctagtcatttgaaggcagcaggacctttgcaaccccttctcacaccatcttggaaatgggaggacatttgcatggactttatcgtaggattgcccaatacctccaggcaccatgattccatttgggttattgtggacagattgaccaagactgctcatttcttaccagtgc

SEQ ID NO: 175219 - DNA, 481 bp, Zea Mays
ctggtttgaagagtaaggcacacgttatttagatgtgggggtgacaatgagatggtggatggattgtgtggttttgtggcaagggcatcaacatttataggtggaggggcgacaatttgtaatggagggagtcttgatcggcgtactgtgagttgcgacgttaccaccgtgcagtcgcaacatcccgaggttggcagggtaacttggttcatggtggggcattcatttagttgtgattgtgacaagtgactggcgtgtgctcaggcgggtgcacgaggtcttgtcggagtggctttctgcactgaaggtatcacttcaaggtctgcaacccgacacattaatatagcactcggcgtgcacaacaaggctgtctttgggcagagggtgtaggtgggtcttgccaagatgcacaaacgccaaggcagctagaggcaggcttacgatttctttacgcatgtgttttgccataggtggttgtggg

SEQ ID NO: 175220 - DNA, 511 bp, Zea Mays
cggaacttcgccgccgtcgacgtttgcgacttccgaccacgatacaacctcagagggtagtcatagggcttcgccaacgctccccgcgcgtgatcgtagtgccttcgggtgggattactcgtcggcgtgggggaaattactcattggagcggaagtctcgccgccgggacgaagctctctgtgggtagaaccttctactccacggttttaggtaattcctttccccactgactcgatttaatggtagcatcatgtattagacattagaaaccgggtttgggtcgcgggggaggtcagatttctcatcgaagttgggcgttttccacacctctgccctgcgccgtcgtcggtgcgattgagggcttgatctgcggtgtaggtcccgtaaacttgaacgcctagtcatgcgcttcgtgatgtaccctacgcatagaagtttgggcttcggggtggggttttcgtggtcgtcggccatggcgccgttgtctgcgctcgggcgccgccgtgcgct

SEQ ID NO: 175221 - DNA, 893 bp, Zea Mays
gcacgatgtgggggataggtatcccctaggtcaccttggcctagagacattcatggtccatccgaaaggccactgatgggacacccggaagccgcccgatgggcctcagtcggacgggaaccattggagcccaaaaaggtgcaggcgtgcgtatgtgagaatctagtcgcgtcctgtttgtgctgcttgtgaaaatcgatggacgacccatttgaccgtagcccagtgtgacgagtggcaaaacaagcaaagcatggagattgtgtactcgtgctagtttctctgtaacctcaactcaatcggcaataaggctgatgagaggaccctacgaaaaggagatagacacccaatagaaatcatcgtcttcctctagacactccatgtattttagagaactcaaccgcacacaaacataaaaccacatgacatagggtgttacgccatcgagcagcctgaacttgaacaatcatttgtgtctccagcgtgctctgcacataccattgagttgcgatcatcgtcgccttcctcagaaaagcgttatgtggccaccccatatcgtgttgcggtacttaacaccgacatgcgggccagcctccgactttcccatctcggggcaactggcaattaagtggtcgaggtcgcttgagttgaagcatccatccttggacctaccacaccatcggttctggcggttgtcgtggaaccgattgaatgaactagcaaccatcgccagctcctcatccctaaggctctctagtttctcctttgtgatggtcaacaaagaagatacagaaaacatagcaggtgagaggtgagaggaagaaccacctccagagaccagtgccatggtgggtgcacaagggttctcaatcttggcatgggtttggtagtca

SEQ ID NO: 175222 - DNA, 702 bp, Zea Mays
agcaaaaaacagaaagttgaactacattcatccacaaagacctctgcccaatggacaccaactagtagttctagacatctttggaaaactcctcaaaactggcatttggtattcatctgtatttttattgaataaaagcacaagcataagtgtaccataattggggttataaggctcaaaggctcaacactatttggctacggttagcactcttagctgaacatgtttattaaacccggatcactactttagtgaagaacccaatttaagtcataataattagaattaatttggatgaactcttcctccaaaacaaaacttaaccatgtaacccctaacaaagaaggattcagtttgttcatgtctgagagcatgtacaatatatcatgtaaagggtccattttgcaaaatgtgtacaactttactcgtgagtcatgattcccaaatgttaaggtttgcaaagcccacataacctcttccacggaattttggcaatgtttcactatgcaacctttagttaggcaccctaacttgtaagtagtcgctaggtttcagtggcaagtgtgcatatgtgtactccttctagaggcataagtggttgcaacaccacacaccaaggtaggaaacacaactataccacatgatacacctccactttgtgccttttggaaagcactaacaagtcagataagtactagatac

SEQ ID NO: 175223 - DNA, 579 bp, Zea Mays
ccccccatcatatgccccatcaacattaacttttagccagcttggtttatgtcgcttctatagatagcttaagtaaaagcaattgcactccctcattgttaagtgcctacaatgttatgtagagtagtaaaagcaatttgcaccccctcattcatgccaagcttaagtagaatgcttagcagagaccttgaggattaaaacacaggagtagttcccgaaccgtccaacaaacccctagtaccacccacatggtctctctcaggaaataggagggttgtttgtttcttaggaccatagattttgcacaatgtagtgacactatttcacatactcaacactatagtgtcactattccatgctatataccacggcatggaagtctctgtctctataaaaacaaagcccggcccccttagcaaataaggggcaacatgagtgtagtcttcttcatctcgcttgaggtatcggtctctaaagttgttgggaactgtgccatgactaattagagcccaccaatcacttcaaaatgtctcttctgtcttatttttcaaggtcctccaagtgctctccctttagtgg

SEQ ID NO: 175224 - DNA, 446 bp, Zea Mays
gggattttgggaagataagtatgtttggttggcctagagaatgtttgaacacctacagaaacaaatggacacgtgttcgatgccggccctgcgcccttggcatgcactggccgcgcccacactcaacctgtgccatggatctccactccccaatgcccgctcctttttaagccacgcccaagtcgccatagcttctcctcgcctcacctgcttgctcttgcacctcaccgacttttctccacaccagagagcacgccatcgtccgtcgttgccgccagagctctgctcctgtggacacatgcctccggtcgtcctttgcctgaactgaggccaccaacagcttcaccgagctccacttaagctcgtgtgccatttcctcaaagcactaccacaccagaaatgcctaacactagtcgctcgtgagcccccctgcttgctcccatgga

SEQ ID NO: 175225 - DNA, 561 bp, Zea Mays
caccatttgaggctctatatggcagaaaatacaggactcctctatattgggatcagactggagaaagacagttcgttgggcctgaacttattcaagaggcagaagagcaagtgtgaatgataagggagaatttgagaattgcacaatcaagacagaagagctatgctgataaccggagaagactactggagtttaaggagggtgatcacgtgtatctgaaggtgtcaccactccagggtatgaggagatttaaagttaaaggaaagttgcccgctcgctttattggacctttcttgatcttaaagcgagttggagaagttgcatatcaacttgaactacccgatcacctggcagatgtacatgatgtattccatgtatcccagctgaagaaatgtctcagggtacctgaggagcagctaccaatggaggaccttagtgttcaagatgacctgacttatgctgagtaccctatcaagattcttgatacactgactcgtgtcacgagaaataaggttataaagatgtgcaaagtgcaatggagtcaccacggagaagatgaag

SEQ ID NO: 175226 - DNA, 748 bp, Zea Mays
ggacatgtccgcaggctgccaagcgaacatgtcctagttgtcccataggaactgaacgagtgtgcttccctattctacgttgaggctggagctgatggtcgtcgtcttgcgcgcatcggggagtcagggtcgcctccatggcggggaccgagagatcgtccttcggaagtgcgcctgcctccgtcaccagctgcttttgtgccactgaggtgttctcggtagcacttcgtcgaggcctgaaagtcggccttcaccgtgacgacaccttgggggaccgacatcttgagcatcatgtaggtgtagtgcgggatggccatgaacttagccagccctggctcccgataatggcattgtaggcacagtcgaaacgtgccacatcgaaacgcagaactaggtgcggtagttgtccggagtgccgaatatcatgggcaaggagacgtggtcgagggggtattcccccttggtcgggacgatgccaaagaaaggagtgtcagactcttatagctcgccgacagagatctcgagtgcgttgagagtccgggggaaggtgacgttgatgctgttctcccatccatcagcaccttcttgactcgactgtctttgattatggggttaacaagtagggggtactgctcgggtgatcaaagctgagccagtggttggcccgactgaaggtgattggcatctccaaccacctatagggcattggtggtccggtcgcagccaccagtatttgccgatctgtcag

SEQ ID NO: 175227 - DNA, 373 bp, Zea Mays
taatcccaaaggcggagcctatgtaaaatgtaggcgttgacatggccgttctttagtgaaattaattggaaacgctgccctcacccccttcaccaaaggacgactatgagagccttctgacagaacgaaataccttgtatatgaatggtaatttcacgctcgttgttttcacgcacttgaattgagtaagttgcatcctttggtggttgtgttatagaagattctacatgcggaatactttgcacccttggatttttagggatgtgttatattttttgatctaactgcacccatagacgactttttgttcggatagagataggcgtctctcgcatgacttcgcacccttaggtggtttgatgcacttgttgtg

SEQ ID NO: 175228 - DNA, 371 bp, Zea Mays
acctttgtcaggcaagaatcgtccactgatatagcgatctgaaagaacagctgcagctacaagggcactgtcagatattcgtacaccatggtgcaactcatatctctctcttagccctcggagtattgaaattgtatcttcaactgaaggttgatcaacaaaaacttgttggaagcgccgctccagtgctggatctttctcaatatatttgcggtattcatcaagggttgttgcaccaatacaccgtagttctcctctcccaagcattggtttgagaagattaccagcatccattgcaccatttgtggcacctggaataagatgaacattcataaattacctactagcagagacaggtgttctatcgttca

SEQ ID NO: 175229 - DNA, 627 bp, Zea Mays
gcaagttagtaagtggcttggatatgatgccgaaatgtttgacaaacttccggtaatagcctgccaacccaagaaagctgcacaattccttcgtgttttttggtgtaggccaagtgaccacagcagacaccttttgagggtcagtctgaactccctccgaactgataacgtggccgagatatgaaatggacctggcagcaaatgtacacttgaacattttgaccttccactggtcttgacgcagtaagccaagcactgcgtccaaatgggcagcatggtcgtccaaggaagaactgtataccaggatgtcatcgaagaaaacaagagcaaacttccgtagcacaggtcgcagagtgttgttcattgcactttgaaaggtggccggtgcaccagtcaagccaaaggccatcacacgaaattcatagtgtccactatgtgtttggaatgctgttttgaactcctcaccctccttaagtaatatttggtggaacccaacacggaggtccaagctagaaaaccaactagcaccatgaagctcatccaaaaattcatcaatgatgggaacaggatacttgcgcttactggtcatagcattaacatggcgaaaatctacacagaagcgccaag

SEQ ID NO: 175230 - DNA, 678 bp, Zea Mays
tcgctaggccttcaaatgtccaatgagaatgtaataaacattcaactttgacccaataaatcaatgtaagtgcaaagtaagcaacagtgtgacttgaaatgggagcataagacacagcaatgatatgaaggcttgaattcaaattactaaaccaaatgccgtttcacccatctaaatcatataaattgagataggagcaatgagagctcgctgtacgaatcaaaatactccaagaccatcacccgagatgaagagaaccatcattaatcctagaaagacacctaacagatcattgtgccctaacaatacaaaatatctcgccggtaccatgctaaaatttgattggcgtgaatgcaaattacagaactcactcaaacccagtaaaattgccaacagaaggaaaacaacttaccaggatatattttgtattggtaaagaagtatctaaatttgttaggctaaaacttaagaggaactcatagggacagacagctgaaagacaaagggtgaaagacagctcacgttctccgatgagttgtacatgttagggttgaacttgatgcgggcgcctccaccggcctcctccgtccgccgtatctcgtcgacgaggtcgggcgtcagccgtattatagccgcaaaggcaggcagcccgctggactcgaggcagaacgcctcctcg

SEQ ID NO: 175231 - DNA, 756 bp, Zea Mays
gtggacagtgggtttatttttcaaaaactagagggctctttagcaattaggccacgacgaaggggtatcttcgattgccagccatccaatcccgatccaaaggctcagaatagatcgtgaagcgatacacggcaggcaccacaggatccaagatccacggtccaaaatctctcccttgcattaaatcgttctagcctttggatttcaatctacggccaatacaacccctcttacctcaatccttcatcgcggatccaacggtcctcccccatcttcttcacgcgaggcaccaggcaactgtgttgtggctgttcccagctcgcgacggtgtccgccggccaggagcccgagcagccccggtgatctccaccctgcccgatccgcagtcgcccctggctctacggcgaagtctccgctggcgagcaacgaaccgaggccattcctccctacttcatgcacctgaggaagatctgcacagggtgttcttactctctctccctcaccgctctgctcaatggaggtgctcgggtctgatggagggggaaggaggggtggaggcgcatatatactcctatagaacccagcgatggccgaggaaatcggagtccgttgtggagtttgctgtggagtttgttggccgagagctcgggtgtcaatggagtctttcagccgcgccgttgaatccgcagtattcggccagaggagatctcggccctctttgttgctgcagattccgaaccgaacgggtcccacctg

SEQ ID NO: 175232 - DNA, 689 bp, Zea Mays
tctctgtcttgatcaccacatcatccacataagcttccacatgcttgccctagtggtcggctaagcatgtctgaatagctctctgataagtcgctccagcgtttttgaggccgaacgacatggaggtatagcagaaggctccgaacgaggtgatgaatgttgttttttcctcatcttcttttgccaagctaatctgatgatacccagagtagcaatccaagaaagacaacacagaacatccggcggttgagtccaccacctggtctattctaggaagttcgaagggatccttcggacagtgtttgttgagatccgtatagtcgacgcacatgcgccaatccactttattctttttgagtacaagaacagggttagctaaccactcaggatgtaacacctctctaatgaatccggccgcgaccaagcgagctagcttagcatggatggtttctctcttgtcgggcgtgaagcgacgtaatttttgtcgtatcggcctcgcctagggatagaccttcaatttatgctcgaccagttctctagggactctcggcatatccgcaggttgccatgcgaatacgtctcggttatcttgcaaaaactggacgagcgcgtcttcctatttgtcatccaggctagaactgatgatagcagttttgcgctcgtcagcgaacccaagattgattctcttg

SEQ ID NO: 175233 - DNA, 2108 bp, Zea Mays
cgcatcagcggtccccgacgtcgacgaacctacgtcaaaagacctcatcgatggagaccgcgtcttcgccctgcaggccctcaacaaataccaagctcaaaccaaggcctagcgcgaccacacggtcgtcccaagagaattcaacgaaggagacctcgtactcatccggaccacccggacagagtcacggggcaaactagagccgaagtgggagggtctattcatcgtcaaatcgaaggtgtcccccaggcgtataggctgacaacgccatccggcgaagacctagagcattcctagaatattgacaatctccgcaatttttttgtttaaacccttagggcccacgcgcccttgtaatgcaccaaacaatactattccggcccgcactcttttcctcccgggggtgaggtttttaacgaggcggagccatgtaatatacctgcaaaaatcccccactaaaactcagacgcaacatgtcaaaaaagaccgcatcgacggtcttcggcattcgaccactccgaagtcaccgcgagaggcagcacagactaccctcgcgtgcgacactccacgcaaaagtcgcctaagggtgcagccagaatagcacaacaagtgcgttaatcgaagtcttttatttaaaagacactccgcgcaaaagtcgcctaagggtgcagctggaataacacaacaagtgcgttaatcgaagtcttttatttaaaagacactccacgcaaaagtcgtttaagggtgcagccagaatagcacatcaagtgcgttaatcgaagtcttttatttaaaagacactccgcgcaaaagtcacctaagggtgcagccggaatagcacaacaagtgcgttaatcgaagtcttttatttaaaagacactctgcgtaaaagtcgcctaagggtgcagccggaatagcacatcaagtgcgttaatcgaagtcttttatttaaaagacactcagtgcaaaagtcgcctaagggtgcagccggaatagcacaccaagcgcgttaatcgaagtctctcatcaaaaagacactccacgcaaattcgcccatgggcgcagccggaccaacacaggtgtacgaatacggcaaacagaccacattaccatacaaattacaattacatacacacggcgagggcatcacatattacatcggctcaacctttgggaagatacccatctccctgtaattaaacaacattatcctcaattcctcaccctcaaaaagcttccgaagatcccctcgcctatgctcgccccaatcggtgaggacaacaattctcgtttaccaacccggtctacttggagacggcaacgctccatccccatatgacgacgcctgccacttcgcgaaaattcacccacactatgttttcccatcacctttcgccgcctacacccagtactcgcactagggagatcctcgacaccctccacacgcggcgaagtctccgccgcagccacatccaacgcaacaaaataatccaagccttcatccgaggactcctctgtccaaggaaacgaactcccagattcaccatcagactcaaaacactcagacacagaaccaaacaaactatcataggtaggcactacggttgaggtcgccacaaaatcagtattgtcagcagcggttgcctgcacaggcccaaacgtcggaacctgtgcaacaaccgaggttcagtatcacagagacaaaagtttacacttaaaatccctaaaccctattccgccacctacgaaggccctaccgtcgccgtggggtctccggcagctggttcgcccatcgccttcgaagcgtcctcactcgtcagcgcaggggctggcacggggtctttgccagctccagtcagcgcggtccgcgcgggggtcaccgaggggcccttgcccgcatcggatggcggcgccagctccaacccagatgcctcggggagcgtgctatcgggcagcgtgccgtccagatcgccaagatcctcaacctcttcgtcgtgcgccatctacaacaatagcacattcttcagcaaaaccacacatacccaaacatacccacacatataaccacacaaagatgagcctttacctgatcaatcgcctagtcggac

SEQ ID NO: 175234 - DNA, 626 bp, Zea Mays
atagatcagatggaggaatgccacgttctgagttaggcagaagcagatcccaatgactgaagggagccaatcatcagatacataagaaatgaggaagaaccagatgacaaggctgcggtggagcgcatcgcgagacagtcggcccactatgccattataggaggcctactatatagaagaggtgcaggaggagtcctcatgaagtgtattcactcggctactggaaagcagatgttggacgagatccatgttgggcaatgtggcatgcatgcagcgtcagggactctagtagggaaagctttcaggtccgggttctactggccaacaacgaagaacgatgcagcggagttagtccagaattgtgaggcatgccaattcttatcaaaatagcaacatctacccgcgcaacagttgcagactatttctgtaacttagtcgttcgcatgctgggggctggacatgattgggcccttcaagaaagctcaagggagatatacacacatactggttgccattgataaattcacaaagtgtaatacccaaaattgtaaaacataatataagagtggaccctcttgattgttttgccatccaatcctcatttcatggggataataatatttaag

SEQ ID NO: 175235 - DNA, 654 bp, Zea Mays
tataactatctctagatggtgggtttatttcttaaaaacagagggactcttttgcaaggttgcagtcacgaaggggatgggtgaagatcggtcgtccgatctagatccgacgtcccggtcttatgaatatccgaaccgttcatagccctccgatcaacgattaccggattagatcgaaccggcatcggaatccaatccatgtcgttcatttatctagcaacgaccatgattcaaaacgatgaaggggtatgggtgtatctaatcgcagtcgttcattacagatcaacggcaccaagcccttcttccacctccagcagaggcctagcggcgtttttgccaccgcggcaaaaacctcgttggcaacaccaggggcgccgcacagatgacttgtttcgcgaacaaatgagggttacagctagggcggaataaggcaaactcggttgatggcttgttaccggattttgcagtgtggagatccccggccacgatggtgtgcggctttgtggccgttgtcggcgtcggtgaagaattgtggcagcaccaaaggcttctcccacccacaagtgccacaacgatctccgtcgtgccccgagaaagcccactgacccgagcttgcgccccgaacaatgacggaacacgatttccatggcgcca

SEQ ID NO: 175236 - DNA, 748 bp, Zea Mays
tttccaccgcattttctctggtttccaaggatttctccttggcgggcatcgaaggcccaacctcggtgttgtcctggctctttgtagctttggcttcagtcagccttgtatcagtatgcgttcttgaagcctcgacagttttccctagagtagagcttgaagtttttatcgtctccagcacatccagtacaatggccatccttttcctcttgggggtcgttgtaagacctttttgtgccttcggcactgtcacttctgccgaagggcttagaacttctaatattttggtcccctcgactcctgtctcttcaatattatcggcctttggcttagccagttcggctgaggatgccttcggcattgccaccggctcttcaatcctctgcgtaagcgcaagttctttcgcttcggtagccgaagaggtctcaccaccaaattcaggcactatggtcggttcaatatagcgcggtcggtgagtaagaaccttcacctttttcctcttcggcacgggctcgcttggagcagctgaagcaacatcctttccataagttgcactctttctcttctgccccctgtggtgggtagcggtagtcaaggtacataaatccaatagcatcaaaaactctatttagcctcttctttttccagctcccgaaggccacagatagtgcgttatcttcagatttggagtagactccaagtagttcatcactggtgttttcaacacacttcagccagtcgtcgtctg

SEQ ID NO: 175237 - DNA, 701 bp, Zea Mays
gtgcttcacacgaaacaagaggagtttattcgactaaagaaagggggagatactgtaatgcagtatctcaataagtttaaccatttataccaatatgctatagaccaagtgaacactgacctgaagaaaataattgcttcatgaggggactcaacgactggctccaacggaaaatgaccacctgcctagatcttacttacaatagagatgtcagcacggcgctggcagtagaagccaagaacataggctagggaaaatcaaagggatttggaggtgacaggtctaatcagggacctgagaagcgaaccgggttggtaatccgaccttttaatcagaatcgttgttcgcctcgtccaccgtcctatccgttcaaaaagcctgctttcatttgtcctaccactgcccccacttctacaaatcagccgagtgcccctggtgctcatttccctgctctccctagttcttctactcgctgcttcaactgtggaaagtctggtcattttataaaggactgtccatacccgaagtagaataaattcaacactcagcagaactctgggatctccaatcaaggtaaagggaacatggctactaaattagcgagcaaaaatgtcaagaagtctgggcgaatttattatactcaagtggccactacaccggatggcgagccagtaatgatgggtacgttccttgtggccaat

SEQ ID NO: 175238 - DNA, 312 bp, Zea Mays
agagagagggcatgttgttgggtcatatgattcggtatgcgtatatatgtttacgaaattttgtggagccatgtcatgtatattttgtacctagatactagctacacatgtaggtaggtatatagttgtgtcacacacagttttctgcatgtcaatcttcctcttctatgcataggtctatctgaatggggaacaagtaattactgatcatatggcatggcatgaacctttaccatgaatttttggaggaaagcacgagatttgtgcagtttctttcccgttgacacttcaatatctgaccttatgtgtatt

SEQ ID NO: 175239 - DNA, 516 bp, Zea Mays
ctcagaagcaccctcgggggctgggtcaccctcaacagcgccctcgggggctgaagtatcctcaatcgtacccacaggaatcaggtaacccttgcatgtaacatcaggaaccaaggtgtccacatggattaggccgccctcaaaggttgaagaagtatgggaaactgttcgggttatttcttgcccgacaaattttctagctaagggaatgtcatctggcacctctgcacggatgccaggactcccagtttcaggaagttataataaaagatcttctgggataatctcctccagtgcatgatcaatggcagacatcgctaacctctgaagattaaccagccctgacggagcctgaattttggacatcgttgttggtcttgctacggcgactcttgcgaactaaagggggaatttcctcttcatcctcttcatcctcgtcacacacacatccaccgattctagtgccaccatagctctcaatatcatcttcgaggttggcactcgccgggttagcac

SEQ ID NO: 175240 - DNA, 611 bp, Zea Mays
gttgatttgagagctaaattgtgcttgatcgagtcgaggtatgaacaagaactctataacaaaaataaagttggtatgatggacaacaattttgctatggtcggcttgatcggttgttgaacgaaaaccgaagagaaatgatctttaaatcactctgtcaggcgcgcgaaatggacattcccatggtacagtacactgaagaagatcccaagtgtcgtgtgctcgccaccaacgtcccgccgccgtgtttcgagctcgcgtcgcaattggtgccgctgagatgtggatcaatacgtggtaaaaagatctctagctcagattcgatgctcggattaccattctaggcacgggcaccacgtgtcctcaccgtgaatcatccgtgccgccgtagcaagccaccggacgctccggccgtccacgcagctggttggagactcgcctaatgcaccaccgtaaaaggaaggttcatggtaaacccgccatgttactggcctgtggacaccgttgaggctaatgtggagcttcttgggttgtcgccgccgctgtgagtcagcgaccaaattgcccaccgtcggggtgacttcctttaaattgagcctgcgcttagcccc

SEQ ID NO: 175241 - DNA, 821 bp, Zea Mays
aaattaggcaagagacaccaatcaacttgagaatagaagatccactaagtatatatctaaagaatcttgcctaaaccatatgaggttttcaaaaaggggaagatgttgaaaccctagatcaaccctaattgagccacttaagtagaaaggaagaaaaggggtaaaaagaccatgaaaacatggaatcatggcttaggccaattattaaaattggaatacactaactaagctacaataaagattataaaagtttggccaaaatagtttgttaaaaacctcaagcaagccattcaagtggaggtttcatagggaaatctgaaattcagatttctgaattttcagcctctaagccaaaaccgagcgcgttcaccttaatctccatctcaaaaccctaagctcctgacaaaaatgtgcttaactaacccctctacctcatacctgaagatggcattgggatgcgtgccctagacatgtcaaactcgtgaccttctctcggtgttcggcagtgagacaaacctaacttcacccctccatatctcttgatccagtcagcgaaatccataagcctccacacacaaacgacaaaggaatgtcaggagaagagatctctcaacgggatcatggccataatctcagagatttggagcccatccgtgcttgaacatgacctctctttgcgctgcctcgtgctcgacgccgtgcccagacgccagagcgcacactggcgctcgccctcgcataccccgagcgcatgttagagccacccctcggtcgtgctcgcccacgcctttaagaccaccctcagacgcgcctcacctcac

SEQ ID NO: 175242 - DNA, 499 bp, Zea Mays
cttggggaaacgagcactcatgtgcacgacaagacagtgagtagggaactgtagcgtcttgttatgcatgtcccgtctgggtacagtgcgggagtatttatagttaaccggacaggtagatgggtcctcaaataccgttatacccccggttacctgctacattcccaaaatattcccctcaacggggtcattacagtgaggcgaagtacaacagcctgaacacactacaaaatctaccccgtgatggggcttacaggtggacctagacaatggtgtgacggagtctgggccccactacatcttggcctttgcttgcactccgcggtctcggccctacaaagacgtgccttcttgatcctacaaagacttgacatcaggatttgggagagttcgtgcctttgaggcgtatgcgcaggcatgtggtgagcctcccttcggctattgaggcccttcgcttcgtcccatccaaaggccgttgtcgaagacttggacgttgaca

SEQ ID NO: 175243 - DNA, 588 bp, Zea Mays
ggagggagatggggagtcaggggctgtcggcggctccattgatggcagggaaggggaaactgtcggtagtgggggagaggagaagcggagcgttgctggtgctccaatcaacagggaaacgagcgggcgggtctcagtggcacgagctggcgaacaacggcgtgggagctcgagcggcacgcacgagccagtcggaacagaggagctgcacaaaggttgaagaagagctaacatcaaggccccacaggtaagagagactgaaggaggagagagtggagtggggtggctgggattttcgcggcgatggctccacacgcaaggagagttggcagtgcgtacatgtaacatggctatagcttgaaaaagctcttacaactagaccccacgtgtaagtgagtgaggaagaaaaaagacgggtggtgtacggttgggctattttggctggcgcacaggagattgtttttttatttttatttccaatttttttcatagaatacgtagagaatatatatatatatagttttatatatttaaatatataaaaatttcataaatccacaaaataatatttacataaatcaaaatgtg

SEQ ID NO: 175244 - DNA, 511 bp, Zea Mays
aaaatgtgaaaagtgatttcctaagagatattattaggaaagagagaattgattttattggtcttcaagaaaccaacaaaaaaactttgatgactcttggttgaatttcattggtggcaatagaaattttgcttgggtttggtcccccctaatgggagatctggtggcttactcgtagtgtttgatgctgacatttttgatgtgagagaaaaagatttgggggaatttatgattcgtattctggtgattcataaggaatcaggctttatttggaacttcataaacgtgtatggagctgctcaaaatgaccagaaacataaatttctgagtgagttgtctcctttctgttccaagtgctctcaccccatgttaattggtggtgacttaacatctttggaatgagtcagacaaaaataaacctagaggcactaataggtggagttctttatttaattctattattgatgtgcatgatctgattgaactagagcttagtggtagactttatacc

SEQ ID NO: 175245 - DNA, 811 bp, Zea Mays
agtttgacgaaccaaatgatgactggttgaaatgcattgaagctaccagcgacgagctgcttgggacatattccaagctaaggccgaagatgatgccttgtccgcagccttcgggggtcggggcaagaaaagattaaacagggtttttgatgtaattggcttcatgtatcctcattactgctaccccttgaggaaaggaaaaaagaggaaaactaccgcttcgaccaccaccgctgtgccgaagggcaagaaaatgaaggttttgacgcaccgacctcgatatattgaaacgatcgtagtgcctaaatttgatgagggtacctcctccactgccgaagcagaacaagcgctcccgccgctcggagcgctgaagggtctattgtagtgccgaaggtgcctacagtcgggccaaccgaagccaaagatgatgcggccaaagagccaaaattggaaaaaatagtgataatgctagaaattctgagcccaccagcaaaggcagaattgccaaaagtgccaaaggctcctgccgcaactcccaagagaaggaggatggcagcgtgctagatgctgtcatggagaccacaaaagccttgacccctgctcctactaagaaagttgtcgaagctgtcaaagtacaggccgaagccgaagctgggccttcagtgcccattgagacgaaggctgtcgcacctaaggataaagctgagcaacaaactccagataccggcatggcagcggggcaagatatgatagaaaaagctaaatctcctgcccccgaagctccggctgaagatgttgattacattattcg

SEQ ID NO: 175246 - DNA, 852 bp, Zea Mays
cttgagttgttcacctctaggagtgataaagagaatccttgcacctgctccctgcagctttaatgagccatcaaagtacattctccacacctcagtaacttctaggctgtatgggacctggtgctcagtccattctgatacgaagtcgactagcgtctgagtctttattgtcgtgcggggccggaactctatgtcgtcagctcccaactcgcatgcccacttggctatccttccaatagcttctttgttgtggagaatgtctcctatcggaaatcttatgactactatgactttgtggtcatcaaagtagtgacagagcttgcgagcggttaggagtaccgcgtacaacagcttttggacttgaggataccttatctttgaggacccgaggacttcactgatgaagtagactggatgttgcaccgggtatgcatgtccttcctccacccgctcgactactaatgcggtgcttaccacatgagtcgtgcaggagatgtataacggcatatcttccgccgactaactcggcgtagctcggtgcggcggcttgagtactggtggtgtggtcaagaacttcttcagtgcctctagagcttcctgcgcctctgtggtccactgaaacttgtccacttttttgagcaatttgcaaaatggcatgcctttctcgcctagccttgatatgaacctgctcaggtttgccatgcatccagtaagcctgtgcaccttttcctgtgatcgtggcgcttccattctcatgatggcctcgatcttttctggattagcttcaattcctcggtggctgacaatgaatccgagtaactttcctgcctgtacttcgaagacacacttttc

SEQ ID NO: 175247 - DNA, 494 bp, Zea Mays
gttgagctctcatcattcaacctatatgtacacctaagacctttgctattttcaactttaaagtcgcattgggtcagacgagtcatcaacatgattccaatcaaagttcagaagttttagatccaagggaacgtaagagaatacgagaaagaactcgatttgcatctcaaacaaaagaacaaagggcattgcgtaatagggaatcatgtaataagatggcaaggaaaaactataaaagaagacaacgggaaattaaactccaggacttaatcggcattgaggacccgaagtttaccccggagcttgtgtggagttcaacagatgctgaagcgcctcatgggtctctatgtagctccgagggcatggctatccctgagttaagcccaacacctttcgttcctaatccatcacagaccgaggatgtcgagaaagacagtaagacagagtctcctagacgacaaagacataaacgtcatgtgtcgtccggccaaaga

SEQ ID NO: 175248 - DNA, 539 bp, Zea Mays
aatcgtcgatgcagtgtcgtggcagatgtcggagccactgcagtgcgtcttgccctaggacgatgggcaaatatgctgccattacatcttccgtcaccccggcggcccgagcaacagttgtgtagacgaccaaccagcccccgggtcctgcttgggctcgtacttgtcgacgttggagactttgaagttgggggggggggcactgaatggctcagagacgtggagtaagcgtggagaccctgcatgtatcttcctgtcggtgttcgtgaggtcggtcctgaggaggtgagctggtggtgtgtcgtctcgaccgttctcgggttgggccactagtcgaggccacaaccgactcaactcgagtggcgtgacttcaagctgggacgccatgatctcggtcatactcctcctggcgccatatctcgctttcgtgccatcggtcgcacgaagcattgatggagctctgcgtgtctcgttggctattgatggcttggtgtagttcactcggggggatgagcgatggacagaaggtgattagctgc

SEQ ID NO: 175249 - DNA, 754 bp, Zea Mays
accatggaaccgagggcactgagaaagagaagggggagaatgaggtctgccacgcggacatcctgtctgtgtctccccaccatgttgtgtacggtctgggcgagaagtcgtggcacaccggcgatgaacatgccctcaccggggggttcggtggcgaggccgcgtggaattgctcgtcggaatcgtcgagccaccgtcatgccgcatctcgtcgtggttaggcacctgcacggctccaaattaccggtaaggtacctcatgattgttcgcctaggtctcaacatgatgtagcaataggcctcgaggggaatagtgcaccctggtagatgggactaggccatggatccggggtcgacggtggggatttgatgagggtcgtcgtgcctgtgtagatgggactgtaccgttgatcacatgatgaacggtcctggttggatggagccgtggtcgcgggatctgaaaagaacggctctaatcaaatccttggatatcggttcgggtaggcagatctggcacgttaaacagtgggtggatggtccagaatcgatctgcggtattaaatgcatgccaccgatcgttgatcagacggctgccactccatacctcttcgtgggaagcctgatctaatcctggtcgtaaacttgtgatccaacgaccgaaggcaacggataccccttcgtggtggtgcatttgcaaaagaacccctggaaataggaaaaataacccaccatcctcggctgtgagggaatcctca

SEQ ID NO: 175250 - DNA, 529 bp, Zea Mays
gtgatactgaacctcggttgctacgtaggttccgacgtttggccctgcgcaagcaaccgctactgacaatactgattttgcggtggcctcaaccgtagtgcctgccgatgatagtttgtttggttctgtgtctaagtgttttgagtctgatggcgaatctaggagtcctcggatgaaggtttggattattttgttgcgttggatgtggctgcggcggaggcttcgccgcgtgtggagggtgctggggatcttcctagtgtgaaaactgggtgtaggcgacgaagggtggtgggaaaacatagtgtgggtgaattttcgcgaagtggcaggcgccaccgtatggggatggagcgtggccgtctccgagtagaccgggttagcaaacaagaattgttgtcctcaccgattggggcgagcataggcgagggggatcttcataagctttttgagggtgaggaattgaggataatgttgtttaattacagggagatgggtatcattgttggtgcgaaggcaaagacgccaccct

SEQ ID NO: 175251 - DNA, 314 bp, Zea Mays
agaagaggtgcattaggagtcctcatgaaatgcattctctcagctactggaaaacaacttctggatgaggtccatgctgggcaatgtggattacacgcagcatccagaatcctagttgggaaggttttcaggtcaggtttctactggccaacagcgaagagtgacgcagccgagttagtacagaggtgcgaagcctgccagtacttgtcaaaacagcagcatctaccggcgcagcagctgcagaccatacccataacttggtcgttcgcatgctggggattagatatgattggacctttcaagaaagcccaagg

SEQ ID NO: 175252 - DNA, 466 bp, Zea Mays
cccgggtggaaagcctggagcagaaagtcagggagctttcagaagaaaaagcgtccctccaagagagcctctcgttagctgaaggcgaagagaccaacacccgtgaagcttaccgcaccctcaaaatggactacgacaaggtactaaagaagctcgcccccgcaaggaaaatccgcaagaagaccaaaagccaaggatgtcagactgagcagcaggaagaaaacccacccaggaaccagtccgacgccgaggacatgtccctggccagccttgatgaccttctcaaggagtttggggacactttagagaaagagttcgggggtaccttaggtagcactcgtgtgtaataagcttgtggtagtggtatgctatgtaatgtaatggcttgatgtaatgaataaaataactagttaaaaaaaatggcatgtgcataatagtgactctcttcccatggcagatggcttcg

SEQ ID NO: 175253 - DNA, 503 bp, Zea Mays
atgtcaaccatctctcccggtagctgagatacctgcactgccggacccactgcttttttcagctgagatacatgaaaaacaggatgaatggaagatgaagctggcagttgcaaacggtaagcaacagttcccactttagccactatggaaaaagggccgaaatatttaaaagccagcttttggttcgcgcggggagccaaagaggattgcacatacggttggagcttcagaaagacttggtcccccacagcaaacgacctttcagaacgcccttgatcagcttgtttcttcatcctcagctgagctctggataaatgttgttggaccagctcagacatcactgttttatcttgcatccattgagccagagatggaacaggacatgcagcattggcatccacaccaaagtgtttaggagtatacccatacagtacctcaaatggggagaaacccaaggacgaatgccaactgcagttataccaatattccgccaagtatatcca

SEQ ID NO: 175254 - DNA, 847 bp, Zea Mays
ggcagatcgatgggcctccgccctatgaagaaccaacccacagataatgggtgccttggcagaagggagatcaacttcatcatccttgcctccgtcatcatcgctagttggctcctaggcctatggatttgccgtgggtcgagatcgaccgaagggattccaggtcgttcgaccgcggccaccatgagaccctgaggcctcaccaccttgcatcacattgccggatcctcgcccgcgcttggatctggaacgcggaggagtttcttcacgaatttcttgatcatcattggagtcaaattcaactactgacggatttctacgatgcaccatccttaagataaaaaggagaacatatggtgagcgaggaaatcgatgttcaaggattttaacaaacacgattgagtaaagacacatatgatattgcgcatgcacctcaaccgttcatgtgagcggttcaactacaacaaacaataccaaactactaaactcaaacaatgttcgagacaaaagaaaacagtttaagtgtggcaagcacctaaactacacagtatccttgaaaagatacacaagacaatcacgaacggtgttagatcgagtcaagaaaatgaggaaataaggcaatacctcgatctgatgatttaaccacagaaatcccaacgaagaggaaggagttgatggaggaggccgagaggaacaagtctccaacaaactcctcaaggatttgacggctcgaaagggatttggagtgtggtgtgagtgagagagagagaggaaaagtgaaggcaacggcggcagtaacaaatgaaagggtaaagagtgaaataaggaaggggaggagaaaaaggag

SEQ ID NO: 175255 - DNA, 606 bp, Zea Mays
cggctgctggcacgtcgtgcgcagagggaactccggcgatctcatgctcgggcggggctgagagcgagcgggggagtacagtcatggcctcggtctgttttatagtcgtgggcgtgggcgcggggttgggcgtcgcacggggccgagcgctggggcgcgctctagcgcgccaggacatgtcgaacacgtgtgtgttcttctaccctagttcaagggcttgctgagcagccaaacatgcgaatctcgccaaaaatcttgtgtaaggtctcttctatgtccctagggctatctagtttgtgtgagttccaagtgaagacctggtctggtttgtgagatatggtggcgccaagtcaggtctgtcagcactgttcaacccgagacaaaacacatgtcaaaccatgtcaatggttttggtttgggttcaaaattttccagggtgtgccttgggtaatttggcgcccttttgtcgattggaccatgttgatttggcatctgcaactaagtgaacacttggggtctttagaagagggctgaaatttgacttagagaaaaagaggttgttcttgagtgctttccacttgggtgattaatttgaggtttttgtgg

SEQ ID NO: 175256 - DNA, 511 bp, Zea Mays
cacactcattactaggttacttgagacatttgaggtcgaaggtaaacttaaccttggctcatgtaactgaggttggacatattgtgggatatagggtgaacagtatgaagacgtactgaacacttcttttgactgggaggtttgaatggctaacgaagcaagttccttctttgttgatagtatgatggcatgttcttggtgtggcctttgtccttgccataaaacaagcagaatggtttccttggaggtgcattgaatctgccatcaaaacttcggcctccccttccgcctctcagagcaggtggatgaaatgtgttgtgcaaaggttgctgctgagaacttatttgctactagcccaactgaccctgagaccaggccatcttttcctcacactgcaccgtgttgtggatagttcggacatgccttggatggaatcttccttcaaagcccctggtgatttcggtttatctgtgtaatttctccattctttggcaaaaatcattgtttgccc

SEQ ID NO: 175257 - DNA, 887 bp, Zea Mays
cgcccgcgctgtcagctttacgcaggaaaccctggcggtttgaaatttctataaagaatccttcccactattcctctgtctcgctgacacgtgcaaaaagacccccgcgctttcatctctttacaacccgtggtccacgacgccacacggcggagaaccaagctccagcgagctcataccagtcggatcactcgatgaccgttgctctacttcggctgaaacctaattcaagccctaacaagagtttcccctcaattaatttcactaacggagctctaactcgctatgtccatggagacagcgggcgcaacggacagcacgacgtgttcccggcgatctaaggggtcctagcctaattggcggggtcggggagcatcagggacacacaagaacactgaaacgaaagagcagagggcatgagcggacctgagacgagctggccacggcgaggcctctttcacggtggcggaaaatagaattgggggaaatggcaaattggagagttgtggtggctaatcggaagcaggagcgggtgcttaggcttggtgataacttaatgcagcagaccgtgccgtcaatttataggggcgctaagcggtggccagtgaatttggtttggcgtggtggccgccggagagtgagaagagtactgtcgtgagagcttggtggcatctaccgtggcggctcaccgacgatctcttgataggtcagtacgagtcacggcggcgtggttaaagtgctaaggcacgtggcacaagaccgcgaggtgtctaactccggcgagggttgattcaaggcgatcggtggtagagcggacacggcggccgaacgaacagtgccttaagctcatctagggggaaagatcttttcaccgtgaaacgttatcc

SEQ ID NO: 175258 - DNA, 1895 bp, Zea Mays
gctgaagttacttgtcatatattcggtttggttctactgagtctaaaatttttgaactctagaatataatgtcataactttagtttaatatttatgtctgcttagctttcaacatctagcactacatcgtccataaaaaatatacaaaagtgatatccccttgtatgtcctttgtgacctcatccatcgccaagacataaagataagggttcaatgctaacaattatcagatgggcatacaaattcttgcattgagttctagagaagcatcctagattttaccaaaacaatttgtgtgttaatcttgatcgaagtgtacaaagttaattacttgtttaacattgcttattcttacaactagcaagatttatagttagtatcatggtagcttggaaactataaatacagcctatcagcaaattaccctttataagtgcagctagtcacttcaatagtgactgatgtacttcaatagtcacttcaatttggaaaacctaggctcctccaaagatcaagtccttcatgtgactggtcgcttatcgaaggctttggacagctaacactttgcaaaagagaggcatggatcaccatgcgagctgcccattgtgtgatcaggagcaagaaacacttgaccatctgctgattgggtgtgtgttcgtccgggatttctggtttaagctactatctcaagttaatctccaaagcatagcctctcagcttgttgatgcatcttttatgggctggtggagttggctggcaatcaaatacatggagtgacaggggaagcagtaaactccctagtaatattaggagcatggactctgtggaaacatcggaatagttgtgtcttcgatagaaatagacccaatgtggatcttgctgttgggatggctgatcaagagcgggagaagtgggaactggctggggcaagaaagctatccttgctaactagtcgcatcccgggtctatgggctttgtgttagagtttgtagctttgggtgttttattcatggatgggtatcagtatgcctgtacttggcccccgtgaggtgactgttttgtatcatctctgtttttcttgttaatggaatgaaacacagtctcctgcgtttttcgagaaaaaaatagtgactgaatcaagctttttaggcgttagctaagctttcctcattacataattgcactcaaaggtgtacttcattgaaggaggaggtcaaaagttttcgcttttcagaagtaaaacattacttatatatgtacaactaggacggcattgttcaaatttataagtagcttcagaacttagcagttagcacctatgtagtccactatccagataaatattctcaggtggccttaatagtgcttccttgaagctagagttttattttattacaattaattatctcgctgtgcactatcaaaagctcgaggacttcacttttttaaaatcacagctggaaaactcactcagcttagagcctacgcaagtatgcaggcagttgatccttcattttggttataaattagtaaagtttgcttctactcactcggaaactcagctaaaccaggcatcaacataaagaaaccacatgtccctttcacaacataatacggacagcatagtgcacagaagttttcacagtttttctcaaccattttctcgacgaaagcctccacagctgacagaattggatttttttgcatttgtaaattgttaaaaaaactttgtgagatatagacatgacagagtgcactccccaaacaaaatattgaaaaaaaacggaatttgcttcaacggaacaaatagaactccaaaggaagagatttaatccaagacagtaggtttctggtttccttacctccattccgctgccgttgctcgtcatatctgc

SEQ ID NO: 175259 - DNA, 623 bp, Zea Mays
gggtggtagactaaataaagagcctactttggattggcatgtctcctaatttacttattataatggtattttccagttggtaaaattttgaagcatcagagattcaactttgcatgattaaaatgcaattgtgcaaaactgtacccttatcacatatgcacattcagtgctgagaaaacatcctatttggtactatcatgtgaacctactgaaagagggcaggggcttaagaagaaaatagttaaactcaacttatgttgggtggggctgagggttattcagtaattccaagctagacattgcctgaagttacacaaagttttcaataatcaaaactcataagatgttacacattatcagtctgcaacagtgaaactaacttcaaaactacaaaactcaattttaacttcaattaggagtaatgagttctcagctataatggatcagcctatagcagtagtctataaattcaatgattcacacaaattaggctaaaataaattacattagaatcaaggtatgccaattcaagagtagtataggtaaagcactggtgacgcaaagatgctaataaataaactgaaaccaggcagtcaagtacgatacaagcagtcaaaacttca

SEQ ID NO: 175260 - DNA, 636 bp, Zea Mays
tcaccgagatttcaccgcagttgagcgtgccaccgctcacccttgttgcctgagccccggccaccgtggttcggccatcacagccacccttcaaccgagtaagctccactgttagcttccttgagtcacggagaaggttctcggccagccccctcactctcaactcccctctaggagcgtgccaccgctcgtcgtacttcatccgctcgctggtgatcgtggccagcgccacccagtatgccgtcgcccgattccttgcaccagcagcatccccgacctccaatgaagctccccagccgatggaatcaagccctaccaccgtcattgatcataatttggagccgccgttgaccaccgccgcctgcgcacggggactgagcagctccgaccatcaccagccacaacccgaccattgacgtgattgccgatgcctccccaacctcactcgacccctcgtcggagccctaccaccaccgaaagccctgtcgtccttttcttcgcctctggcactgttccggcgaggaatggagcgcaagttgtatagcttataaacatatgggggttttcgcagtggcagagacttcggtgaatagtgccccaaggactactttgtcaggaaagaaaggaagaaaaccg

SEQ ID NO: 175261 - DNA, 642 bp, Zea Mays
gaaaaataaaagtaactatgtaataacaagatcaaaatcaaattacaggtaataatccaaataatccaagcatgacaacaacatataacttgatattcttttttacacagtattcctacacacaaggaaaatgaaatagtcattagaaacatgactggatattgctgaggatgttggattcaacacacgaagatgcccctatcatgcgtgccactgtcatcgggtgacaatcagggatgtatggagtatatccccatatagatccggcaagggatcttagtgtatcgccctattgcctgccacgactgattgggcctagtctggttactaggagatgaacacatcaaacacacacatgcataacaaaggagataagggtttagagaggttcaagccactaaagcgtaatatcccacgtcctttttgagtgaattgggatgcaggaaaatagctaagtgtcgattgtagagggttgtgagagcctgggagtgtaaaatgtgtggttcaaaccccttacataggggtcaccctttcccttttataaaccatgggagaggggttagaactgtcaagtgggactaggtcataggcctatcctactctacattaatggaagtcctgttgacatcagtttgagatcat

SEQ ID NO: 175262 - DNA, 709 bp, Zea Mays
cgctggtgagctcaattgcgccacgctgaaatcctttaccacgtagtcgtaactgtggcacactcagaatgctgttgagcaccacgacggacccgccagtacaatgtcttgtcataaccgtgctccgctctcctcccaaattcggagccaccgcttcgagctgctataaattgatgccccagcctgcttcaccaacttattacgaactcagaacaccacctctcgcctccaattagtcaccatagctcgtgaatttcaaacttcccccaattccgttttctgcaccaccgtgagcacccctccgtcgacccactgtcttgtcccttcacccgccttcctagttgccgttcttgagctctggtacgtcgctaaatcttaccgtgcccttaatttggatgttgttgtactatatcgtcaggaacacgacggggaagactccatctccgtgggtgtacgtaaaccaagctttaggacagcatgcaggttaaattagtgattcccagttagtcgccaaggtatgaattaggcatagaccatattagggcgttgattattgcgtatcacggccgatgtgagttcgccgaagtacgcacgccgtcgtccattgtcggggacccgagtttgtgaagttaagaaagaaggggctcggtgcacttgtcactgagacaatgaatagtaactagggactcttcatcagatattcaaacag

SEQ ID NO: 175263 - DNA, 758 bp, Zea Mays
caagtccttctcagggtatcacccactaaaggagttgttcggttcggtgtctccggaaagcttagcccgagatatattggaccgttcactatcttggccccggtgggtagcttggcttatcacttgcaattgccgaattccatggcaggggtacacccagtttttcatgtctctatgctgaggaagttcttgcgggatccggaccatcagattgagatgtaaccaattgcgatgcagcaggatctgaccttggagtgtcgtccggtgcatatcttggaatcctcggagcgtgttttgaggaagagatcaattaagtatgtcaaggtcttatggactaatcagtctgagcgcgaggctacgtgggaacttgaggagctgatgcagcagaaatatccggaactttttgttgtgggtaagtgttgttgattcattaatttttttcccttttgttgttccgatagaagcgtcagaattcgaggtcgaattctttttaagggaggtagagtgtgatacccgatttgcaaagagaagtggaggttattctttttgttctttttcctcattcaggtgatgcgctttgggaatttggaatttatggaaaatattcacctgtaagacactagaatttctttggttagttgtttgtgacggggtcgggagctgtcacatgggcgagttggaccttgaaccttgatctggcccattagtctcccctaaccctagcccccccctttcccattgggatttttgcagccgcc

SEQ ID NO: 175264 - DNA, 462 bp, Zea Mays
gtggggtcatcctcagtaggatctcttcctgacagggcctgaagtcttttcctctaggtaggggtatttttgttgctaggtgggaagtaacgaaggggggtttcaaaaacttctttgctgtagttttggcatatctgacggagggcttttcgggcaacattttggcaagtgtatgggaagtggtgtctagtgaaggtaacttggaaaggagggtggtttgggtaacttcggctttctcccaggtagactgccatagagcacttctcaattccgttttcgcggtattctttccagacatactccggcttcttgcggatccccatgcgaagcgcgcaactccgcaagagatgagggaatccttcctcctctgagtagtaggatgtcctaatgacccaggagccttccatctggtagaagaaaagaagggtctgttaatatcgggggaaaggagagaagattttt

SEQ ID NO: 175265 - DNA, 1175 bp, Zea Mays
gctgatgctacatgtggttggtgtagtggtgtctgtgcggacggaccctaaacccttccacagtatgcgtagaccttcatgccagaaggtcatgcaaaggtcctagagatcccataatactggtcccaatgttctcaggaatgctgtcccaagaatgatctcaaatgtatccaagggaattgcatatgcctcaatggtgaacttctctgtgttgatgtcaatggctgcgcgacgagttactccctggcagaaaactgtgtctccatttgccaccttgacatggcgacctggtgtgggttccaaagtaaccccacactgttgtgctgccttgtagttgatgaagttatgtgttgaacccgtgtcaagtagggccagcagctcctgaccgttgaggactacctgtagctgcatggtgtcctcccttctaatcccagttattgcatgtagggaaaccactgggtcctgctcttccttgtcatcatctgtgtcacccttgatctcatcgtcagcaaagtctgtgacctccagatagaatagcctgggacagcggtggccgcgtacatagggctcgtcacaattgtaacatagcctttgtttatgttgttctgccatctcgacgggggtgaggcgcttgaacgggactggtgattgtgttggtggctgctggggtgtattcttggcggcattgtcgtcatgtgtgtgagcactggtggtcgactaaatggtttggggccctaccagtctgttgccgctgttgagcaccatcaatgacctgagagcgacgttcatatgcccttgctagtcgagaagcctgctgcagattctgtgggttcatcagctcgacatcgattttaatccgctctggcaatcccgtcgtggagagctgcacttgctggtcaggtgccaatggagaggtgtggcacaacagtgacgagaagcgctcttggtaatcatccacggttgtccggaaacaaagatgggacagtttgcctaatgggttggtgtgtagtggcggaccaaagcgctcattgcagagctctttgaattgaggccatgtcaccgttgcatagtcctattccaccatgaaataccaggtatgtgctgctcccttgaggtgataggaggcgagccacactttgtcctcctcaatcgtgcgttggcctctgaaatactgc

SEQ ID NO: 175266 - DNA, 441 bp, Zea Mays
ccaacacataaaaccaataatcataccagttgccccacttgttgcgggcacaaggaactagttccacaacttccaccgaagtcttcccggtcctcggcgtaaaggtgcacgatccaaactgtgcaatcttgcttctaatttttctcttctgccagtgcagacaataattcttggcgaagacctctacggagggctgaccgccatacgaagtcaccgcccagatatacttcgccagggccaccactgtattaggtgtcaattggtggatctgcacgtcatacctctgcaagacctctgccacaaaatgatgcgcaggtaggcgaaggccggcgataaagaatgcctcgaacacatctatctcaccctccggctcaggaatctcttccgcccctggaacttgtccaactccattcccaaaacaccccaactgctgcatgtctt

SEQ ID NO: 175267 - DNA, 376 bp, Zea Mays
gttctcgcacccgttctgcctgaaatacacacaacaccccaaagagcaatcaaattcaaacatgtgagcatgtgccgcccgccaccataagcaataatgctacaacttgcaataggtattcaatgctacaacacaaaaaaataaaatttggcactgattggaatcgagaggggcgacaagctaaaccctacccgctatcgagaacggacaacaccaggcaccgcacgcaggcatcagccatgacctccacgacgttccacatcccagctataattgactcgatgacctcctcctgccagggttgaatggaaaatggaaaagtttcagttttaatctttgtgctcatattgtacataagggaaaagattcagaaagt

SEQ ID NO: 175268 - DNA, 586 bp, Zea Mays
tagtggcggggtaggtcgtgtgcgcgaggtctgggcatttcggcgtggttgcagtgggtggcgccaggcgtggggcgcgttcgccgtggctcgctgatgtgccatggcaagacgtctggaggaagaagataatggtgcggcccttgattggggaatcaacggctagggctgtctggcgtattggtaggatagaggttaggctggggcatctgccgtcactgccaggatgaacgaccgaagttggtaggcggagccagagccgttggatcctgtggcggcagtgaggattagatggagcctacctacttgactcgtgcatatcctgaccatccaatcttgattaggcagatgtggtgtgatcgggcatattttagaatcgtaacccttgatcgctgatccaatggctcacattccataccgcttcaatataaactgtgatctaatcctggcctctggatctaatctgaacggcccacatcagcagacaccccttcgttgtgacgatttagcatatgagtcccttggtttaatacaaatgaacccgcagtccaattcggaattaagctgagtctagggaatcttgcgc

SEQ ID NO: 175269 - DNA, 392 bp, Zea Mays
gtacatctagatctagacggacgagggcaccacgtcctggcgtcaattcaaggatttgttgaacctacgttatgggccaccgctgcactcggccccgcgcggtcgccgagtatcaagatcggttccaggcgctccaccctcgtgctggtccgcttgaagaggcgcagagggtccagatatacactggtggtctccggttgctgctcagcatcaacgtccggatacagaaccccccagtccctggtcgcagccatgggcttggcctaccagttcgaactgcaagagcagtataccgcctcggcccccagagcgtcgcccaaccctcggctactgagtccagccgcccacctggctctacccgcgccgccgagtgccaaagcagccacctccgc

SEQ ID NO: 175270 - DNA, 613 bp, Zea Mays
gtttgattctagctatatttgtacaaattaggataggtatgttgcattttcactttgtggtcattattagtactttagtttttagtattgatcgataatgaacacaataactggacattgctagaaccattacagtttatcccgtatttaatcaactttgaaactatgctcaagctttcccctacttaggatttggaaaactcttcaattatgagaaggtctggttcagtctctaatgacataatattgaggcactacatttgaataatcgatagatatcagagaaatacttgttctatcaatagagaaggacaactttttttgagaccagagagggccaattttggcttcatatgtgaacaaagtgttgtgttttctgctcaaaaggtttgttttacctttgtaagttgtaaatttatattattcaaactgcagttacatataccttggtaggctgcatgcttcctttgaggtaagattgctatggagttgatcgagtgatctttcctgtcatattagatggttttcttcttgttcctttgcaacattatcttgaaagtttctaggaggcagctgaggcatgcactattccttaaatttgttgtattgtgtc

SEQ ID NO: 175271 - DNA, 505 bp, Zea Mays
tgcacactctgtttttgcatctgatggctcattagcattttagaggtaatgcccgagtgatgcttgcttttctgcgatccaaacttctcccgagctatcgacctgccattttgcacccaacttaacatgctaacccacacttctgctggcgtcctcttgagttctgaaccctagttctgctgaatccgtttgcatcgtttgagagatcatgatggcgtccaagaaaagaaaacagagtgctgctattccagtcgtcccaccaatcgatcccaatagtcaactccccttcgctggtaaccatgtgtctgttgtttctgaagctgaccttctgcaccttgttgagattggtgttctgtcgtcgaaagagttgtgttcctggtggatctagtgcggagttactgtcccgacagaggatactcacgaggctgttatcttcgtgtcattcctcatccggggactggccctcccagtttctcccttctttcgcggccttcttgacttttat

SEQ ID NO: 175272 - DNA, 376 bp, Zea Mays
cggagcccgagatctccggcgagctccatcgcgagacgggcgcgatccgcgcggggcttgggcacgacccgtactaacgcaggggccccgccagccagcgaccgagcgaagaaagaggacgcgagagaaaagcggggaaaggacgatctcttacacgcgggtcccgcatcacagtggttagcgcgcgcataagctgaatgacaggtggggccgtggtgtcggcgccgtgttaccgggtgggctgcgcgagttcagagttaggtgggccaatttcaggagattgagcccacacgacgccccccccttctttattctttttatttttcctctctccttttgaatttcaaattcaaatttgaatcaaactttaaatgtg

SEQ ID NO: 175273 - DNA, 643 bp, Zea Mays
tatgaatcaagttaatgtgcagatttctttaagtcatgagaaattgaataaggtaaactgaactatgtagtatgacataaggaagtatcgccacacgatggctagcaaatatagattcaacatgtataaattcaatcttgctacagctaatcatgctacagttgaaagattcaacctgtataaatacagctagcaaatacagctaatcatgctacagttgaaagattcaacctgtataaatacagctagcaaatacagctagcaaatgtagcaaatacagctgaaataaggtaaactgaattatgtagtcacaaataaattcaatcttgctacagctgaaatggtatatcctgatatggtcaaatgaacttaaccaaaaggcagacaacagcattcggatgcaaagagaagatgtgagaaatggtataagcacggggcctcagatttttcgttcgtcaggacccctctggcacacacaacatgcagcagctcttccagttcaacttgccttgaagcgctgcaaaagatatccatgcatggaccacaccacagcgcttatgaagaacggattaaggccgcaagcaaggaggaagccaaggacatggcttgtcgctcagatcacaagctcgctcgatctacagga

SEQ ID NO: 175274 - DNA, 740 bp, Zea Mays
gacaaattgatgtttttaactcgtagtcgacgctattacaaagctaacacaacttaaaggactcaaaacagatttaaaacacgaaagatatgaatatctagcgaactagataacttgacgctattttattggctggattccgaccacacatagggccatacgttggtggccacagaaaatcctgggaactgttgtgtggccactttccacattatggttgcatgctacaggagacatcgcatgccaaaaaaatgccacgcatgcggggtagccagtttcctatttcttcccacgcccatcacgcaagatgaggacatcagcaacatgcaggtggacccctacgacagttctacattttggctgaatatcgcatgcagatccttctctctaatgcacttgcgcacgaccgttttcttctcatctccttcttcccaattgcacagcagggcttcttcttcttcgatctatagcaagtgggggttgatgggcgccaggccgccaggagggagaaggccgcaggggacgcggtgggcgctcgctggcgaggctcgccagagcggcgctcggcggcggcacgactcgcagggcacgctgcgcggaggcaggcgctcggcatccagggcgcgacgcgcaggggcacgacatagggcctgctcggcgcgcgcatctaccatgggtgtgggcggagctcgccgtccatgggtttggccgccacgactgcgtgctagaaaggggcggga

SEQ ID NO: 175275 - DNA, 534 bp, Zea Mays
aataaatcccccaaagtaacaggtctggtaactatctgccttgtctactattctctcttaccatatgtttctaactctgatggtcaataccaggaagggtggtggaattgacttacctcccaatcgacacactcgaaggatatttagacaacaccagccacaaccaacagagatggatcctccaccagcaggagttgacccactggttgcagctcagatgaggatgatgcaacaaatggctgacactatggcagatatgcatgctcagatgcagcaggaacgccaggagatgcaccaagagcgggaggagatacgtcgagagctgcgccaagaacgataagagatacgccaggaaaggagggcgcagcagcaacaacaacaacaacaacagcaacatcaacaagcatcactgccaccaccaccaccagttccaccccgagataagcaccgggagttcatgagccataagccaccgacatttgctagttctcctgatccactggacgcagatgattgactgaagtacgtagagaa

SEQ ID NO: 175276 - DNA, 397 bp, Zea Mays
cccactgctcaatcctctcgcccccaccagatccgacacgatccatggcgcgatgcaggctggtgcgtcgcgaaccttctgctccatgcaccgctccccctccacctccgctccatggcgcgatgcaggctggtcacatagatgaccacatttgctttgtccgacacccaagatccgccgcatggcccccgtcctccccgctgccccctcctccaagccagatccgtcgcatggccccccgtcctacccgcgacgccgccgctgctgtttggggtttttgcggttgactccgaatctcgccgccgctgctcgtgcaggaggcctcgagctcccagtgctcccctcctcaaccaccccgggtaagtggttcccattcctaccattgccgcggatcccc

SEQ ID NO: 175277 - DNA, 535 bp, Zea Mays
acgtgctacgaacggtgctcctctgtctgacacgatagtccttggtattccatgcaaacgcactatctggtcaatatagatttctgcatacttctccgccctgtgggtggtatgtactggcaagaaatgagttgtcttggttaacctatccataatgacccaaatagaatcatggtgtcgggatgtgttgggtaaacccacaataaaatccatgctgaggtcctcccatttccaagatggtatgggaaggggctataaggtacctgctaccttcaaatgactagccttgattctttggcaagtatcgcattcagatacatacttagcaatttccctcttcattctggtccaccaatacaaggatctgagatcatgatacatcttgttactgccggggtgcatggaaaatttggaaagatgagcttcatccaatattttcttcctgagttcagaattcttaggaacaaccaatcggtcttcaaaacatagaactcccttgccatcccgacaaaagcatttgtacttatccactttt

SEQ ID NO: 175278 - DNA, 993 bp, Zea Mays
ccgctagatcggagatcgacggctacaacttaatgaaacacgatatgttctaatccgcaggataccgatctgacggcacggatccaatcgcctaaagcggtacaccccaaactaatctccaccgcccatccaaatcctacggccaggacccaatttctcctttcccccaaacaaacactgcgccgacggcgccgcacagcacccccacggcggagcttcgccggagcgcacaaattcctgccaccccgagccccaaactctaaatcgctcagccctcgtgagatttacgacggcccgaacctatgttgcccatcaatttcagctgcaaaacagcgtagacccccgacccatggcgcagtccaatccacggcggggacacacgcgacggcgagcaattgctatggtcatatggttcgaacatggcgcggtataaactcctatcatccagagaagattccgcaagcgagaggagggagttaccgtcaaggatcacaggggagaacacggttgcggcagcggtcgtcccagatgtcgatggcggcgcccttctcgtgtcgcccaggatggtctagataatgcgaaagggcagaggagtgcggcgcggtgggttgagcaggaggcgagacgtgattgggttttataccccggtcgagttcggtcagcgaggtccgcaacggcagccgaagctcccgcgcgggttctgttacgcgaaggggatgaacccgacaagtgggtcccacctgctagtgactcaacactagcgctgaatgactataccatgtgaggctgggcgcggggtccggatgtcagtgggtgtccagcgcgcgcgcgtggaggattaggagttgggccgcgcgggtgaaaacatgaattgggctggaaaggaggtagtcggcccatgtggctttctttttctttttctttttctttttctgattccctctttctctattttcaaatccaatttgaattcaagtttaaattcaaacttgt

SEQ ID NO: 175279 - DNA, 553 bp, Zea Mays
cgcttacacatgacacggctctgttctgtggcacccgggcatgcaatgcagtgcaggtcagtcagctggtccatggctccatgcatcccaaaaggcaagctcttctgatagcaacgtctttaattcatccattcatcagacacatgccgccagggcagtcgattcatcatcggcggtctcgtactctcgtccatgtgcatgtgctcggtcgtctccgttcaaaaaatcgccgtctccctttttgttgtccttttttttcctgccgtagcaaagctgtaggctcacttttagccatgcaatgcagcgtgcctcaagaattcgaatcggagtagagtagattgggggtggggctccttcccgtccggttttcgtttacggcacactagtaccatgtttgaaattttgaatccgaggatgtgaaatgatatatagtaggtttgatagctgcaaaacatgtaacctagtcgaggcgtttgcgcagaatatgcaggtatagtccagtctagactagctgctggtctgtggtcgtcttgctttcacctttatgactgtc

SEQ ID NO: 175280 - DNA, 584 bp, Zea Mays
ggcggcgcggcggaccgaattgggggaaaacggcgtcgcggtggctctgtttgaaattggggttggagattgaggctactcggtcgtaagaagctgtgctttcaccgtgcgcaatcgatttgggagaaggtggagagggcagtgcgaatttgacttcgatctagtcactgtgtttgcgatgatcacacctcgccgtgaacccaatggctatttatagccgtggcggtccggcgatcacctcgcggctgaggatagtatcgcaatcgcatgtcgaccacgtcggtagaaggtacaatgagggagaagtacggtatgagcgccaccgcggtggaattcactgagtcacggcggccgccggtgagtaactccggctgggcctgggagatggcgccacgtacgggttatccctccccgacgttatccacaccataccgcccacgaatcaggacggcggtggcactaattttggcgcagagaggtcaccggcggtgagcaagccgcgctggcaacctgatccacccgagagcactgtaccatgggatacttcttcagtgtgcctgacagtcacagtttaggaccaaatt

SEQ ID NO: 175281 - DNA, 399 bp, Zea Mays
aggggcacatatggagtctgctacctatggggtttcagtggttcaacctcaaaacaacccagtgtgatagtttgctggtttcatcgggtttgggcctcaaaacccatggtcacaactctaaagggaatcagatgcagcatgtggtgtcatcacgaagggtgcgttaaggcaaagcaactttcgtgaagagtgtgtggtagtcagatcaaaattccaagagttggtctatttttcccttagttgattggatatactatgtatctaggggtagtttagaaaataggaataaccctctataaatagcatgggagagttgaaacattcaaccatctctctagcacctctttgaactgcaatcttcattttccttctcattttgttaggagatccttagatgct

SEQ ID NO: 175282 - DNA, 417 bp, Zea Mays
gccttttctatcatcagcatttcaaaatgacaatcacagtaaatcaaaatagaaattatatttcttccattcaactttacaattaaggctctagaaaacagatactaaacaaagagagagattcaactgattatatgtgaatgcaaggaaacacatttggcaaagacttctcacaaagtaaactggaatcaataaaataaacaagtgaaatgattttgaaattagtgatgaaaggagatgatattattataacaaaccagcatggaataacatttagccaagcaaaatatgataataattccagaggtacaactaatccaatgttgacaagggaagagtaggccaacaagtcaacaagtaaagcaaaagagaaacagataacaaataaagttgagagggaacattcatcaaggacaa

SEQ ID NO: 175283 - DNA, 530 bp, Zea Mays
gtcccgcaggaatatggtaattcctgaattgaggagagaattctgcccaggtaaatgtgttgacggtggcatgagcagcgcaatacgcatcccaccaatccgcagcaggaccagtaagacgacccgatgtgtagagcactttctctctgtccgagcactaagctatgttgagcatcttctctacagactttagccagtcatctgcttgcagtgggtccacggagttggagaaggttggtggtttgtgactcaaaaactctcggtgcttatccctgggtggagctggtggtggtggaggaggtggaggtagtggtggttgctgttgttgcattattcgttcatggcgcatttcctccctctcttggcgcatctcctgatgctcctgtcccatttgcacgtgcatatctgccatagtgtcagccatttgttgcattatccacatctgggctgcaactgctggatcagctccgactggtggaggatttggaggattcatctctgcttgttgttgttgtctaagcaccctccgg

SEQ ID NO: 175284 - DNA, 351 bp, Zea Mays
tagctaggggtaaaacttcctgagatgttctatgttccatgagttccctatttccgtgccatccatttgagtaaggagatacgatccaggccaagtgacttctgctactatgaacggtccttcccatagtggtgatagtttgtgccgtccctcccccgttagaattcggtggaggacgaggtctcccactgcaaaggatcgatgccgtatggccttgtcatgatagcgcctcagagtttgctgatatcgggctgactgaatcaccgtattcaatcattcttcttccagtacatcgacatcctccagcctagtagcctcagcttccactatgttttcaaagattaaccttgg

SEQ ID NO: 175285 - DNA, 662 bp, Zea Mays
agtctacttctgggacttgtcagtttttgggtacttcgttggtttcatggtcttctcgaaaatagtctagtgttgccctgtgtaccacagaggccgagtatattgctgccgctagcttttgttcacagttactttggatgatggctaccttacgagactttgacttggattttcatcatgtgtctctgctttgtgatagcacgagtgccataagtgttgccaagaatcttgtgctacatttgaggaccaggcacattgatgttcgctttcactttcttcgtgatcattatgagaaaggcgacatcgaattgcgctatgttgataccactcgccagcttgcagacattttgaccaaaccccttgatcaaaaaacttttgttcatttgcgaggggaattagatgtttgtttccctttttgattagagggctccctttttggtcttttcttcttattttctactttcactttcttttgtattatatctgcatgtcatattgagcttcacttgtataactgctagaatgtgattttgctcctagtagtatgttctttgtgtacatgataatgctatggcatgcttaggctctttttgctcatattgatacaatattgttgagctaagttgttttcataattgtgaacttgactattactttctcaa

SEQ ID NO: 175286 - DNA, 383 bp, Zea Mays
attttcaataagtttggaaggaaaaagagtcaactataaagggaggacactcaaatgaaaaaggaagacatcaagagcaacaacacctacttgggtatgagatcttcaaaacattcaatggtgtggttgtaagcattctaaaacttttcattatgagaatactaggcaaaaattgtttattgaaaatcttttaagccttgatcaagataaatagtgcttctccctatttgcctttaaaagtaagtgcatccacccatttccttcattcttgatgcatatctctagggggagcctatttctatatcctgattattttgagactagcacgttatcttagaaatctcatattgtctcatgtatgagaacaagtttctcataaggca

SEQ ID NO: 175287 - DNA, 328 bp, Zea Mays
gtagtatagaaaagcaaagataggtagcatgaataggatgaatgaaacatgtactaagctactatatagggggcttaacttaaaattgtatgtcatgatgcatgctcgacctattcgtcctgacaattcttgccaacatatagtggctatcacgttctatggcggtggcatacctactcactccgttattgaacactagtcgcactttcctagggtttagttagtgtacctgcagaaaattacattatagttgtgggttagtggttagcatcctaaactaagccaccttatagtccttatcttaactatatactatttgcacttcgac

SEQ ID NO: 175288 - DNA, 695 bp, Zea Mays
gccgcctcgttaaaaacctcaccccgggaggaaaagagtgcgggccagaatagtactgtttggtggattacaagggcgtgtgggccctgagggttttaaacaaaaaatttgtggagattgtcaatattccaggaatgctctaggtcttcgccggatggcgttgttagcctctacgcgctgggggacgccttcgacttgacgaggaatggaccctcccacttcggctccagcttgccccgtgactctatccgggtggtccggacgagtacgaggtctccttcattgaactctcttgggatgaccgtgtggtcgcgccaggccttggtttgagcttggtatttgttgagggcctgcagggcaaagacgcggtctccgtcgatgaggtctttggacgttggttcgtctacgacggggactgctgatgcgcttgttcggggtgacccatgctttatttcctgcggggtcatggcctccgatccatatagtagacgaaaagaagtgaatccaattgcccggcattcggtcgtgtttagtgcccagaccactttgggtagttggtcggcgcatttgcccttcttgtcgtcgaggagtcttttcttgatggcggtgaagattttgtcgttggcgtgctcgacgacgccgttggattgcggatggtataccgaggcaaagaagggcttggtgccgatggagag

SEQ ID NO: 175289 - DNA, 307 bp, Zea Mays
tcatggtacattttggtgcttcccggatgcatagagaatttggagagatgagccttgtccaagattttcctcttgaggtccttgtttttaggaatcaccaatctgcttttgaaccataatacacccttttcatcttggcggaaagatttatacttttcaaccttctgatggagattctccttgataatctgcactcccttgtcactgagctaggccatgatgatctggtcttgcaaagctggctcgacagaaatgtgagacagagcactagaaggaatcacttctatttgcatcttgctcaactcat

SEQ ID NO: 175290 - DNA, 476 bp, Zea Mays
cgccgacgaggagaagcatcagccaccccagtgccccaatccatacgagagtaagcgcagaatgggcagaagatcatggcggatccgaacgaatcatccttacctgaactagcgcggcacaaccctccgcacacgatgcaccatggcccatggcggaaatctgttttccggtgagaaattcaccgagcaccagggacttcccagtccagccaataccgcagatcgcttccccgaaggtcgacaaatggcccgaactcgctctcgcttccggaacaccaccacaaccaccgatcctcgatggcggagcacccccaacgccttcggttccgcacgacgagcattcctggagatgatgcttcgagttgatagagttggcgcattatatagggcaaaggccaccaagatcggtgggatggttgcaacagtctccaagttcggcgggagatccgtccatggcgcgcgcgtggcaaaggcgg

SEQ ID NO: 175291 - DNA, 566 bp, Zea Mays
tgcggatccatggcggtgataaacaatggcgagcaatcgccaatgccctaatgctctaatctaacctaaacttggtatatacactagtgaagatgaggcgagcacaggatggaagcattaccagcgcctggagttgcggaggtgaccggccatagcgtggaggaggtccgctgtgcccaccccactccagcgagcagttcacgacactgcggtgctccacaatgatgttgatagccacaaccggcccacaacagaccaaaggtacccccaagctgcgctcctagggccgaacaataccgaatcatcgcacgccccacggcagcgcccgtgttcttcgtcttctctgttctctcttcctcgcggaaattgggcatagacgactccatgaacccgagctaaccctaggtgcggttctagtggagggctatgcggctttggtatttgtagcccatgaccaaggtccccgccaaaatcgtgtcgacaggcgtggaccgaatccaccccggatacatgctctgccctcaatagatttgttagagacgaacctaacaagagaggtctcactc

SEQ ID NO: 175292 - DNA, 341 bp, Zea Mays
gtgaaagctatagggccaactcaccgtggtttagggtagcatagaaccacgcccacggcgaagagcggcaccttggcagcgaagggctccggtgagcaatccctgatgccctgatgatcaatcgttcccaccgagcctgcgaacgacgttactttccacttgcgatgttcctcggcctgaccatgcgtaaagacaggcactgagggcgagttccctgggcagcggcgatcctctcggcttcacccgcggcaagtcttaggttgggctcaacgctcccggcacgtgatggataaggtaaggaccgcgggtttcgacaggttttgtacccaggtcaacgccca

SEQ ID NO: 175293 - DNA, 694 bp, Zea Mays
tagaggatcatacacttagtaacctgattctcaaatcgacggggtcaacgaactgaaacttagtacgtggtatgttactaaaacaagatttgaacattatgggaacaagattgtttccatgttcccagaatgaaacgaatgttcccgaaacaagtaatgtggccaagttcaatgttcctggattataagatcaaacaccctttgctatttgcttcacgtgtgatcattgtccccttcttctccttctcttatatgatcttccatgtagtgcgctgtgtccctagagcactagagaaaaataatgtgaagaagcgaacaaagaaaacaatggtgagtaaatgagtggacgatagaaggataaaaaaatataaagaggtggaccaacgtagacctagaacctagtgtgttcgggagaaggcttatgcctaaggtccggatttaatataaactattgtcttagtgtgttttcaagaagatacctttgaaccatatgtctaaatcaaaaggtttgactggctttccatcagtaaaagacaagctgaaggagtaagatgagacaaagtttaaacatgattgaaccaccttcgaatacagtgacaaggaagttacgaaggaggaggaaaagacgtacatgacacttcttccccgcgacttgatattagatgagttgtctgtctccagttgtatagtcttc

SEQ ID NO: 175294 - DNA, 571 bp, Zea Mays
gggcatcctctacctcattatgtgcttcaagtcgctgctcctcgaccatgacattgagattgagctcatcgtcagccgagtccgtggacatggccaccgccttagtcggcttctccggctcctcacggtgcgtggcgcacacacacggcgcacacctgaacaaatcgagcttaggtttagggttacgtgctcacggcggtggagcgagagaacgagaaaggaagacgagacgtcgagacctagagaccgagaaggaagacgacacacacacaaatgactcatggcgacggagcgagaaaggaagaaaggaccgaaagaacgagatttagggttacctgcaacaccggagcaccggatccaccaaccacaaggcagacgacagagtcgcagaggtagaggagcgagcttggcgcagatcgaggtttagccatttagggttagggttagggtgcaccgttacagtgaacaagcggagcgagaaaggaagaggataggacggaccgagagaggaagaggaagattagcgtcggtcgtcggtaggagttcttctccaccggcggcggccaccaac

SEQ ID NO: 175295 - DNA, 720 bp, Zea Mays
cggagtcggggggtaagggctgaaactctgcacgtctcctggtcctctcggcgatggttgtgatgacggtccctagagtgggcctgttcgtggaggctgctgccgactcagttctggcacggttgcgcgctggtgcaccatgatatcagtcgtactcctcttgctgtctcatctcttcctcatgctggcggttgcacggagcgttgatattgctccatgcgtctcgttgaaagttaatggcatggcatagatcgttcagtgaatgtgcgaggagaagaagatggtttcgccgcctgggtgaggatctaccagtagccttccgcgtctggtgtgcgcagcaagccgttggcaatttgagccaggactcccccgactaaacccgacatattcaatgcccgagcgaagtcaagcaacaggttccgagggagaagcgggttctcgcgttggagcctgacgtcctgctccgcttgggcatggcgatgatcatgatgacgggagttgtggcgctcgcagagcgctctgttgtccggggtttccctactttagaggcttcgtcccgggagacaggttgtgcaagatcacgttccccggcctcatggtgacgtcgtatgttacatcgcatgtttcgatgtcgacgtgcgtgacgctaggggactcctcccccaatacagtgggctcatcgtcggagaccggcgcgtcctctactcttccctagatgaa

SEQ ID NO: 175296 - DNA, 492 bp, Zea Mays
ttgttgtagtgtatgttgtgtctcggattgcgataataatggactagccgacgtgtatgttatttagcgggctatgtcgttactctagttagccgaattgttggacggctttagttaagcacgtaatcgcgataaatttcttgttgtagtccaaatgcgcatggttatggtcgcggttaaaattagtggtgctcatgtgatgtctaagtgaaaatgcaaattagtgtgtgaagggcgcaatcgatatacacatttataccaggtttgattaatgtggtgaatgtgtttgctgattgtgtatggtaattctagcgcacgaaataacttgtataaaattagtaagtctacttattggtcctaatttgattgttttaactctaatagatggtaaagtgttagaatggttgaagtctctagaacgcgacaattcttgaattgtataggagctgaaatttattaattgttgttttggactgcacgcagtgatttccc

SEQ ID NO: 175297 - DNA, 927 bp, Zea Mays
agctaacttacatagaattcccatccaaatggcgctgggaagaacaaacaagaagttggaagccgagaggaacaaaggaaggaaaaattggtcgtatctactatgttcatccatcaacaggagaaagatattatcttagaatgttgctactgactgtcaaaggtgcacaaagctatgaagatctacgaaaatataatggtgtgttataccgtaccttcaaagaagcatgcaaagctcgtggtcttctaaatgatgatcaagagtggtataatgcgttcgatgaagcagctagatgggcaacttcgaaccaactttgacaactttttgtgactatgttacttttttgcgaagttggagatgaacattcattctttgaaaaagtttggaaattactagcagatgatattcaatacaatatgcgcaaaacactaaatcattctacatatcaaatggaagaacatcaaataaaatatcacctaatagaccagctcacagttctattcaacaaatgtggtggaaacattaaaaaccacgacctaccttcaaaaagtgtatcttccgaaactttgcatggaaatcgtttcatcgaagaagaattgttttataatatcaatgacatgttgacccaatcctgtgaattgcaatgcaaattgaatacacaacaaatgaatgcctttcattctattgtacaaactgtactctctgatatgccagggttcttttttgtttctggttatggaggaactggaaaaacatttctatggaaagccattattacatacctacgagcacagaaaaaaatagtacttgtagtcgcatcttcaggagttgcatcattgctgcttcccggaggtcgtacagctcattcccgcttcaaaattccttgtgatttagatgaaactacaacatgtgatattaagagaggta

SEQ ID NO: 175298 - DNA, 309 bp, Zea Mays
ataggggcaccggaggggggcggcccacggcggaatggctcggcggcggcaccaatcgactccgacaaggaattaagcacaacagggagcaagagagtggaagggagagggcaggggaggttccttacctcaaggcgaacccagggacctcttagtggcggcgaaggcgcgacgacggctcgggtcgacggtggcggacaacggcggctgcacggaggacggcgggtgagcgcgggcagaggaaatcagggagggagaggagaaattggagcgtgttccgagttgcggacgtcgaggcgaagctcaccg

SEQ ID NO: 175299 - DNA, 1513 bp, Zea Mays
attaagttaatattgtgatttgagacctaatttgcaattttagaaattggagaagtaaaggaaaactactatacaaaataaaacaaatatgggataaataaaaccttgctatgatggtttgaccaaactgcataattaaaataggttcaaattcccaaataagtttgaatccagatttggatttaaaagagttaaggataaaagaaatcagaaaaaagataaaaaaaaggggaagaccacacgtgcgggccaatttctcactccctggcccaactaacacctctaccgtacaacccaaactccccttggtgccgacaccccggccccacgggtcagctactgcagctgcgatcagcccctcatcccacggctgtgttgcgccttgtttcgccgatttgtgggcccaagtggccagcctttccatctgagcttcacctgtgcatactcgctgcttgtgggaccccctcgacagcggggtcttcttccccgtttgactcggacggcaatgaaatccgcggaaaccgcgcgcgccggagcggacggcgaacttcacgcaacatccgtgccccccctctgcttggaatctgtggcgtagaccctataaaacccggccctcgcgaccgtgctcgcactcaccgaagctaccgcgcgtccgcgcccagtgctcgtcgtcgaagatctagcggagaggagagagagacaggaagcagcgccgccgccaccatcgtcacactatctgggggccattcggtgtccagtgtgggtataggattgatcgccgagtcttggggaagctttctccaccaccaatttgaggaacggtcgggcggaactcaagcaatcgtgcaccagaccttggtgcctgcgttctgccgtgggcaggtctttgtgcggggtgattcacggtgagtacctcctctggtgaatggttgttgcctccgctttgcgtcgtactattcaggcctgggagtggggcacggtgggttggaatccggtgctccggcatgcatcgccgtgacctccgcgtgcggtcatgggttgccgtgacctggtaaatagcggaaggtaggagaagcactgatagccgtcgatagtgagtggatggcgcagattagatcctaggtacccccttcgtgtcactaaagctgtgacgttgatctctgcgtgggcggtcaggattagaatcagcataccccttcatcaaacggatccgagccgtaggatggtaattcgatgaccgggattagatcgcatcttcataacaccctagccgtaggatcttaatcggatgccccacgttgggtaccggttcggagtgaatcgggtctaatctgcacgatccatttgtgattgtgcggcccagatttgatcataccccttcgcgggtatgttttactaaagaacccctatagttttactgaataaacctgccgtccatcagtgggttaaactgtgtctagggaaaacttactagttagcccctgcagtttccgataatattgcgcccagtccg

SEQ ID NO: 175300 - DNA, 750 bp, Zea Mays
tcattttagtaaatcgcagggattcttatgcaagtttccatgggcgaagctttatctacacatatcagtcgtccgatcaggaatcaagtgcccagattagatacaggcttaagtgaaccggtacgccacccaagccgttggatcagagatccacggattacattttaaatacacgcgatcgccttggatccatccgattcgagatcgacggcccgaacgaaggggtatacaatcctatgatctcgcccatccgcatttgatccaatggcggatatcgaatttggccaaaacacaacccaaaccaaatcccagccgcacgaatccgatcgcacggcaaggagttcttcccttactccgcgacgcgccagtgcagcaacccggcggcgcaatgaattctggcggccggacctcgccggcgcgaagcgtacctggcaccctggtgccccaatttccaaattgaccacggctacgcaataaggaaagggttgtgaatgcaatggtggatgccttaccgaggattaagctcccagggagtcccgcccacggcgcgtagtagtcctgcggcggagaaggagcaccggcgagaaatagattacgcagcgcaggacccgtccgccaattgtggccgcgaacaacttccccaagtactgaagtaccccctcggccccactccgaagaccgaagcccggcaacgacgagacccaccggcggcggcacactctgctccccccttctcactctcgttcgaat

SEQ ID NO: 175301 - DNA, 971 bp, Zea Mays
tagtaatatttcctttccctctcctcggagcctattcgcattatttagtccttatctactgattctcgaatccgccgtcctcgctgtttcgctctttcgttttgcaagccaccgtcctcatgggagcgtttagtgtgttcctgctacctggcgtgccctagccattgctaccgcctctgtaggcctaggtttgctctgctatatctttttggttcatgtgcatgtgtcgctgttaggatgggttccagatccgtgcattcatgggggcatgttgtctatgcgtgcttgagctttggttagcttccagatctgcgcatttgtgagggacgtgttatctatgcatgttggatatttggttggtgcattttgcttccagacttgggtgccatgtgcgcatagatagcatttgtggtctgctatcgtttttctggttaatcgaatgacagataccagttctgctattgttcaaaagagcttttctgtattgtagtcttgctgaagtttggattacaaataccagttccgctattgttcaaaagagcttttctgtggtgtagtcttcctgaagtttggattaaggacaatagttcgtccaaaaatgttagatctgtattagggacaacagttcaaccaaaaataccatgcctttattgccaaagaacattagaacagtctattctggatgcgactctgacattacataaaagcacatgtaaagagctacatacatgtgtatgccttttcgctgttctcgaaacaaaatagattgttctttacatacatgtgtaaagaacagtatattttattgacctctaaaagaggcactaggctctacttatgtgcagagatgtgtccttgcttgttagttgcgtaattcttatgcctggtttttttagtgatttgggtgcttgctgtctaggtgacttttaccgctacttggaggactcaccattttgcctttccgatcgtcg

SEQ ID NO: 175302 - DNA, 1302 bp, Zea Mays
aaaggctccgcgtggaagaggtggaccaataggtcccagtggggcttgatccccaggaacccctcgcagatgatggagaagatggtcgcctgcgcgatagagttgggattgaagttgtgcaactcgaccccatagtagtgcggcaaggcccacataaagcagctcgtcggaactctgaaacctcgttcatggaatgaggtgaagctgactatgtagcccgcgagtagatctggcacctgctcatcatgcgacgtggtccactcgggatgcgagccagtggatcggggccggagcaggccagcttcgacccgtgcctctagatcctcgtaggtgacggaggatacgggccatgggtcccaaggaggaaggacagtgatcttctccgccatcagaataaaggaaagaggcgagaggaagatgaaaggctctttgggcagaaggaaaaaatgacgttcgaaggcaaaggactgaaacagcgaaggtaatggtccgaagcctccctctcgattagctttatgtaggacagatagagccaccgaagtgtgaatcaaaaatggtcggacaatgaccatttcgaatcccacgcgcacgcatgtcacaaacggtcggatgaccggtagtatgtcccatcacatcaaatgttcgtgtcccctccgaggaaaaacgtgttgagcaccattttgcatcctgcctcgaacggtacgctttctaccctcgacttctctgtcctttatcctctcggcaatcaaaccagaaggaagtgtcttctgccttaggcaacctacctcagaaagggagcagtgaactagaagaagtcgtcttctgcctcggcatattatttcgggaggaaagaaaaggcaaggaagaatactgttcagaagtttgaaggttcagccctcggcagggttcagacgaaccacctcatgacttcagggctccgagcccaatactgattaggggttcgaaggttggcccctcggaagggctccaaaaccgccctagagcacagagtcagggatgactataggtacgcccgtacatggccttagcttgggttgcaacccgaggtaccttaagacatatctgagacccccaggagcgattcgtgacagtatcccatcatagggaggcatcgagccctcggaccccatcgaacgggtttgggaccaggcgaatcacccgcaagtatcttttggggcatgtctccggaccacaagctgactctaatcaaaaggagcttggaccccactcaaatcactcgttaacagctaaatggaaacgtcctgctcgtcgcctgtcgag

SEQ ID NO: 175303 - DNA, 403 bp, Zea Mays
gaaaacttggctaatagaacatctccgacgtcaagtgaatggagcatactgaagctaatgggaacaaagaaaaaacttgagcttgttcgattgccttatcgttttaaatttgagaaacagttcaaggagccttgccaagagtggctggaaatgattgagacaatgtgcaatgaaattttgggaaactataccaaaaaagaagatcaattaatgattgcagcctttggcacccgggccaaaacgaaggttgaaccaggtattggatgctctaaattttgaataccctgattatgaacgactcaacaaaggtgccaaaggggcaaaaaggaaaagggttgtcagcgttctgagcaggcaggctaccagaatggtgaaggaagatgaaaaaactttaaagaagaga

SEQ ID NO: 175304 - DNA, 724 bp, Zea Mays
aggatgttaaaaagtttacccaaaaaatgattattaagagcaggctaaaaaaatttaagagcatctccaaaaggatgctaaaatcaatccttaaacgtgtttaggggtggaaaaacgaaatttctccgtccaacagacctcccttccttcccctaaattacatgcgtcccgcatccatggtccgccctcccgcaaatatccgtgagcaaggtctttccccaatccatccttgcgcacgcttcgccagtcgtttcccgcggtatttttcgcttgggtgatcgggatagaggccagcgacagcacctgcaagtggctagttttgtttgagcgttcgtttttgcgtgaactgatggagctatactttgtttacaccatgaaaaagatttagtatgtcccccataatcagtttttgacgaataattttgtatttccttttggagatgctctaagagtgaattatgatgggtactccaacagtttctttaattatgacatgtggcgcaatctgtacagtcgtcgggaggccgtgaatgatatgatacgttgatgaatggattggtgagagatagaacacaccaaaatatgagggagaggagactgtggatgcaggacgctaattttttgggggcaagaatgagggagctgttgaagtaagaaaaacaactattcttgactaatatttgttttaggattagtttacacattcttttggagttgctctaag

SEQ ID NO: 175305 - DNA, 517 bp, Zea Mays
tgtgggtccagctcgtcgattatattaaagatcgcagacaggagatgcgtaggttcacagaatcaatgtgttatgacaacccgatgtgtgttgagcggaggaggttgaaggtggcaaatgagaagagagaacaggatgcaagggaatgggaggcggctagagtcgagaaacagaggttggggaatcttattggtcgtctgagtgcaagtgagtgagaaaaagaacatgttagttttgcttgtacattatatttatcttgtctttgaaacttatttgtcacatcatatttgcaaagattggatgtgccaagaactatatcgcatatgaggctcgtgcaagatacgtacgttcaggaaaaactggcgacgatggagctgatggaggaggaggacacatcaaggttgattgagcttatcgctctcattgagacagaattacattggaaaggggaggacgacacatcaaggcggacagagcaaagctgagtgagggagagcgcgcgggagggggaaagccg

SEQ ID NO: 175306 - DNA, 606 bp, Zea Mays
acgagtgctaggacttgatcgatggatcgaagaagcagaatgactagccatggtgactgacaccgaagacatgcaccgacgcgaggacgtggtagagcggatcgtgtcgccggagcggtcgcggactggcgggacatgtgtccaggacataggggacgcgcatgcggtgcactactcacaacggtttggcggttgagcctcaaaaccacccaacaccacgtatgaagggtttcgatcgagtttgggcctaaaaactcggttgtgcggttccgatgagaatcagaagaggcacgtggctcatggcatcatcgagaagggtgcatcgaggcgaagcaacttcgtgtagagcgtgtggccgtctgatcaaaatctcaggagttggtccatttcaccctactaagtggataggctaaatgtatctagtgatagtttagactactgaattcaccctcattacagaaaaaacacgaaaacacgtcgatcaggaaccgacgttcttactctaataggccgacgttcttaggatgggtggactgttgtggacaatcatctctctctttggctagcgcattagtctcttgtttagaaaaccctagtttcatttcc

SEQ ID NO: 175307 - DNA, 543 bp, Zea Mays
aaagaactgcagggtgctatctaaaaattccagggcctcagtgtaaggttctttcaactgcttgggactgtgggttaattcgtggagatcctaggggttcttttgcaaagtcatcggccaaagggtacgggcgatctcgagccgttggatcaagcacacacgctccagattaaattgcgactcaagtgaaccggtaccatgttatagccgtcggatgatcgatccacggctcacgttgaaccgaaccctgcttcctaatctgggtcacctatttctcattcaacggccgataaccaacttctattatcagccgctcatctagatctaacggcgcaacgcgtttcttcaacctctcggttctctctcgctcctatttctttcctcagccattccgccgcggccgagcgccatagacgcggcagcgagcgattccgagctcgccattcgagccctaacttctgcccggacgaacctgctcgaaccctacgtgaccttgaccagcgacagggaaggaaaactcaccctggtgaagctgcaagccgc

SEQ ID NO: 175308 - DNA, 568 bp, Zea Mays
cgagcctgttccagacctcatgtccttttcgtgggatcgttaaaacgtcacacctcacaaacgtcgtgttgctcatgtctacccccgtcttcccctgacatctacccctcggcgctaccatcgtctacccccatcaaacctacctcgcctcgctccaccatgcaaccactgcctccatgtcgacgcgcgcttctcgccgctgcactgcatatcccactagttcgagtcttgtgacaacttcgtctcgccaaaccatcgtccacaatacgcgctcgtgtgacacaagcgcaggcgcctcgtttcgtcttgctttgtcacataatgtcccgcacgtcgtgcatgcaatatccttgtcgcacccctcctctatgcatacgcacatgtccttctggtttcccgattgccaacctcctccactttccctagatctagatcatacagacagagcaggtgccccttaggttatcgatcgtcataccaaggtgagtgtccttcttctctcttcgtcccccacacgatgccctcctcctccactaatcccctattgacgccctacgtgtggccctct

SEQ ID NO: 175309 - DNA, 434 bp, Zea Mays
aagaattagaatttgacttgatatttgaaaactggaaattaaaaccagaattcgaatttagtttgaatttttgatttggaaataaaacagaaattataaaagaaaaataaaacattctagggctagaacctttgccgagtcctcgatacgcagagaaagggagagaggaccagtgaggaagtagatgtgccaccgcaggccacttttgggtcggaacctttgccgagtcctcgattgggattctgggggcttcgctgcgatggtggtggcgccctcaccttgggattctagggctgggtgtgccggaatcgcacggtatgccgtgtgcctgcccggcgccatggtctgctctgttgccgtcctcggtttgggaaaggatcacgacaccacattctccatcatcgctggtacgtatagagctacttgaagcaaag

SEQ ID NO: 175310 - DNA, 720 bp, Zea Mays
tggcaatggcaattggattggagatgtgatgaaatatgatggatcggaatataggttgggatcccagtcccacagtggagaagctgtttccaaataccaaactaggaaacatcggtaacgctctaatcagaactggtacaagcgcatagtgactagcattattcttttttttctccccaagcgtctcgtcatttgattcttctcgagacatagatatctgactccacctgccttcttccttgagcatatgatgactggaagaaatcatttatctctcctctctccactctcctctcactccccctctctctaccgaccatgacatacacaggtactcctatcattcatactaccaaattttccaactaagaatcatctagcagttgccactagctaggaaactagggttcagcttttgaagagaaaagctaaagcaaagctgcaaaggtgtgacacacacacaggagtagtagaaggaagagggcagtagtactgtatatacttgagcaaatatgcgaagaagccttcttaagccccaacattctatatatcttcctgacaccaccagggggacagcatcatcacgaccattgaacaaagatgaaaggatgaagaagcaatgacaagagcatcaatcaagattacctaactgtcaggttttaaactttgaatcatgatgaacacagtttcctagctagctactccaagctttatatttac

SEQ ID NO: 175311 - DNA, 578 bp, Zea Mays
gcagggctcctctcttccacgctgcgaaggtgacttataggtcctcttctctcccttagattgcactcaaaactagactctaattcctatgtaccggaaatagtataatttcaaatttcataattactgaagttttttatcacgcttaaatatttgtcaacaggtgtacttagcaatggtgcaaatcatgcccatccacgagatcttggcctcaacgccgattgagaagatgacgttgcaaatatttcagacttgtagagccctcgagcacctccatctcttgttcagttgcttatattagtcatctgttccctatgtttaaatttgatagtagattgaggcaacatataaacttcaggtcaagataagaagagacaaaggaagaacagtcaaatgagaaaccttttcagtcagtatagaatgacatcttttttctttcagttcaggttcagagacacatgcatgtaagaatacattgcagactaatctttgttgtggcatgagtgtgaattattttatttttgaaaaaagcagaccaccaaggagccaccttcctccaatggtgtggtgcaaaaaca

SEQ ID NO: 175312 - DNA, 719 bp, Zea Mays
catgagcaaatagtcatggcacagattggtgacaagggtgtccaagtcattaaggaaatgatcaaacagaaggaggataaatacaaatgcttccgtcaggacagcaaagggattctatggtttggagaccgattggttgttcccaagaacctcgatcttagaaagaaaatattggatgaagctcacctttccaaattctccatgcacccgggcagtaacaagatgtatcatgacctcaaatccttgtactggtggaccagaatgaagagggaaattgcgaagtatatatctgaatgcgacacttgccagagagtcaaggccagtcatttaaaggtagcaggcaccttacagccccttcccataccatcctggaaatgggaggatatttgcatggatttcattgtgggattgcccaatacctcccgacaccacgattctatttgggccattgtggataggttgaccaagacaactcatttcttgccagtacataccacccacatgacggagaagtatgcagaaatctacattgaccagatagttcgcttgcatggaataccaaggactatcgtatcagacagaggagcaccattcgtggcacgattttgggagcaactgcaagaatcacttgggacccacgtaatacgaagctcagcataccaccctcaaacagatggtcagacagaaagaataaatcagattttggaagacatgttgag

SEQ ID NO: 175313 - DNA, 382 bp, Zea Mays
caggtttattattaaattgtccagggactctttaacaaaactagtgcgccgaaggggtatcgggtggttagagtcgtccgatcagaaagcaagggctcagattaaatcttttcctcgcctgaaccggtacacgatgattaccataggatcggaaatccatggccgttatttaatggggcaaaggtgtatcgccatgatttaatctcgaccgtacattgcaagatctacggttcccaagtcatcttccacctctcgtctgaaccgtggggcgagggaaaaccacaacggttgcgctattgccgtggtaggcgatctagcatcctggtggttcctactggcgtgtctagggaatatacaggaaataggaacggcgaatctatgg

SEQ ID NO: 175314 - DNA, 385 bp, Zea Mays
tttcatgagctgttggaaaacacagtggaagtttacattgatgatattgtagtcaaatcggctgagtttagttctcatatagttgatttgcgcaaagcctttgataaaatgtgtcggtacggtctaaaaatgaacccacgtaaatgtgcttttggagtgtcggctggtaagttcttaggatttatcattcatgaacatggtatagagatagaccctaatcgaattaaatccattcggaatgtgggacctccgacgtgtaagcttgaaatgcaaatgttcctcgacaaggttaattatttatgaaggtttatttctaatctggccgggaagaaagatgccttcactcctatcattcggcttaaaatgatgctgaattcacctgggg

SEQ ID NO: 175315 - DNA, 577 bp, Zea Mays
cgtcatgccagtcacctttagcgctccagacagctaccagaccaaattcctacacttcgaggtagctcggttcgactgcggatacaatgctatcattgggaggccgagctgggcaaattcatggtcatctcgtactacccgtacatgatactcaagatgccttgacctcagggtatcatcaccgtccgatctgacttctagggagccacataatgcttttggggggctatctagacggaccctggatggcacttacaacgctgaacgacgacacaccagcagtggatgacctcacaatcccagaaaagaagcatctaccgctacctctatgcgaccgaccaaagaaaccaagagggctaaccttggtttcttcgatgaacgcaagacggtaatcatcagttctagcctcactgccaaataggaaagcgcgtcgtccggtttctgcaagacaccaagatgtgttcttgtgggcaacacgtggacatgccaggagtcacgagagagctggccgagcaccaactgaaggtgtatcctcaggcaaaactgatctggcagaagctacgccgtttcacgcccg

SEQ ID NO: 175316 - DNA, 1150 bp, Zea Mays
ttcccagtggactgcgggttgattcatccatttttcagggtctcatacgctattctgccatggcgaagggtatcggtgatccagagccgtccgattagaaacggacgtgccagatcagatcgcacatttgtatccaaccggtatactacccgagtcgttgatcgcgagatcgacggccgtgacttattactgaaccggtacgtcatgaggaccatcggattaaagatcgtcggtccagattccaccacgtcccacaccctatcggatccgtccaaacccaatcacatggtcaggatctaatggattgaaagggtataagcataacatatccgagccgtacaccctaggatcgatggctcacaaacgatcttctaccctcagacggaacccaggcggcggcgcatagcatcacggcagcgacatcgccggtgaggatgaaatcacacacaaatgccccaaattcgacaccgaaagatgctacacgaaactgagactatggggaaggtgtgggtgagctcttaccaaatggttaggtcggtgatggtcggcagcgacaacgcggcacgcctaggttccgacaagaaattgggggccgcccagcaagattccgttccaaccaaggcatcctacactcgccatacgattgaggcaatgcccccagccgctttctgagagcgtggcgccgacacagcggcgaatcacgacggcggcgctttctccctcgacctctctctgtcggtggtgcttgtacgcaggtgcagttgagtggttgaagcgcaaggaaaggggaggcagacccagcggctatggttttatggccatcgcagtagcaacccccccccccccccccagctagatccccgcgaccgcgcaacagccacgccggagaagcggtcaatgcggagctatcccacgatatgccccaatcgcgctggaaaggagacaacatcgcacagggcccacacagtggtgagttgaggcgcgagcaggggtgaggagaggcaccagcacggaggattccaacgaatttcatcactggatcgcgctccgcggagatctcgccagggagagaaacggtgcccaacagagaagtggatacgggagggagaaggagttcctgacgtccgggccccacgcgtcaggagctagc

SEQ ID NO: 175317 - DNA, 809 bp, Zea Mays
tgaacttgaatcacatttatacccctgagataccaaaaacccccattggaaccctggaaaaccctaaatccaaaccctaggggtctatgtgcaaaattagtccactcttggactaaagtgcaaaaaccatgacaataaggtatcctaagccctttggttcacaaatatgtgaatttgcaagctaaactctgagttttggacttacttgcaaaagagccacatttgaactcttttgactaagtctgaatttcagtgtactatgcacatctttgtgaccttgtaacttctaaacaaaagggattctgccctaggtaaccacatcaatattgtagatctatggaaggagaataactttgctatagaactcatgccttggtaccatgaagaattctgagataaatgagcctgaagttggactgtccgactgcttgaaatctgaaattcatattaacagtgggatggcatggagttagggctcggatttaaacatgatccagtgcaagtttgagcatgattcccataacaaatttgtagctggtatgtagcactacaactttgatgcagagactcggggatgtttccatagaaaattgggaggaatctggccctaaatcttggctatcagacacactgaataagcatcgccatggtacagtgcctggacagatcagatcaaccgctcccctcgccgccgatgacttcgcaccgggatcgttgccgctgttaagattcgcactcactggtaaccggatagcactcggggtcgcgtaaatatcctcgccgtggatagactccggccattaaacaac

SEQ ID NO: 175318 - DNA, 343 bp, Zea Mays
gctctgttagcagggcatagtggtcaccccgagttaagtatgcgtgtcaattgacagtgaacaatctgagcacctttgaaacctttttattgatgatatttttctcaatttacagaatacatcgtcgttccgagagcctctgtgatgtagttacgggtagaatttcctgagatgctctatgttccatgagttcccaatttctgttccgtccatctgagtaaggcgatatgatcccggccgagtgacttctgctactatgaatggtccttcccatagaggtgacaatttatgccgtccctcccccgttagaattcggcggaggacgagatctcccactgcgaag

SEQ ID NO: 175319 - DNA, 881 bp, Zea Mays
aagttaatcgccactaatctcctaccaaactgccccacagttttaagctaagcttatttacatagagcaaaacccaaaaggatcagatcaacaaagtgtaaacttcagtttctggccaaaccaccaacacaattttcaattccaaaaagaactaactgggctgaactgatcgacaacagccgacgccagaggccaaaatgaagtcttcaaccagaaatacgtcgatccctcggacaccacccgaacgtcctgctcatcgcttcacttattatctttcgaatgagttggcttcctcggaccaccatccttttttccttctttttctgtcgaatggcccaagaatccaaccagaagcaacaaagaaatataatgttagcaggatcaattgaaattttttcaccaaaaaaccaatcatttctggtcctccaaatagaccaaaacaaagccccacagccaaaaatcaggagatttgacatagattttttagggtttttcatccagctatcacaaacttcctcaatgttttttggaacatactccaaattaagggcaatttgaatcactctccagacaaatctagcaacagagcatttaaaaaataaatggtcaatagattccataccaccacaaaaacaacagtcatccgaacctttccaatttctttttttcagattatctttagtaaggattttgtttctaatcaccaaccacataaaaactttaattttctgtggtaatttagatttccaaagaaatctgtaaggaactttgatctgatccaaagaatttttcttgtataaagaattaacagtgaaaccatttttacccaatctccaaacaggtttgtcttcatggcttgacaaactaaaatcagaacataa

SEQ ID NO: 175320 - DNA, 623 bp, Zea Mays
ccaagctccacatactttcttctgatcaatacagctgtgaccttgcaatcgcggtgtcactacctcttggtaagtatcacgaaccagcctccgattgtaccatcctttgcttgtatttcgtcagacacttgtaagagcttggtaagatacattagagtgtgttcctgtgttccacctgagaggagcgtgtagtgagattattagggataaccgtcaccgtttgtttcctgtttttgtgtttcgatggcaggcgacgacgaggaagcaaggatccctacagatttcgatgaatgtgttagccgccaagatcttgaggcaaacaacaagctcctgaaggagcaaatggaggagacggtccacaagtcagtgcatgatgccttcattgacatgaaccttggcaagacttacgagaggctagatcgacgattgtccgagatcatcgacagacttgctgtgttggagacgcaacaacaagcaccgccgccaccaccacctcctcgtccacgtcttcccgatgatgctgtgtttgatgaagaaggtaattatgatgaagcagccaccagagatttgtgcctacgtcgccgtcttcatcaaaacacagaaggtatgccacaccaacaccg

SEQ ID NO: 175321 - DNA, 514 bp, Zea Mays
gtgaacttgaagttcaggttgtcccttttatgtctagctaactgtgactccattggctcaatgaactcagcaagcaaatgaaaaagaaacagcttggtagggcctttatttatcatgtaatgatctaggaacaatggcctagaattatgaatgtgtgcagtattagccttactggtcatcagcctacgaacatccgcatttgagaccaccacatgcctttcttcaaattcttggtttgacccctcatcaaatattttatcaaaaaatgcatggtctgcagcaaccgtatggatctcatgccagatgagagctgaataagacgtttccctagatactttgagaccaccacaaacagacagcactaatgcattgttatgcacctgcttgcactgcatctggtcatccatctcttcaactagctgctctcgtaagccatgtgaattactgaagccatcacactcacagaaaactggcacatcatgcacatggatgagatttagaacatggacaacaa

SEQ ID NO: 175322 - DNA, 433 bp, Zea Mays
aaattcggtaaagaaacaatgatacgaagacacatacaagatagacattaagtgatccttctaaacattgaaattcaccagcaactttatgcagtaccaacaagaaatcatcaaaggcctcaacatgttttaactccctgggggtggctaatccatcaggggggttccctttttcttaacgaaatgacacgtagctctcctgcgtggttcaagaaaaaaacatgttttacctgcatggattgcaatattttcaaaccaaataacagggcttcatattcagcttgattcttggtgcaatagtaattcaatcggcttaacctctcaaatttaacactattagaagatataatgactatgccaacaccctggccttttttacaagccaatccaatgaagtaaaccttccatgggtagaagtccaacgaaataaagt

SEQ ID NO: 175323 - DNA, 471 bp, Zea Mays
ctttactagctaaatttggctagcaactctcgctagccaagctaaattgcatgttggagaatctgttggaatgaaatgttatatatagagtttaatctttatgaagagacaaatactgagttaaatagagagtcaaaagtaaataatctcttggagatgctcttacgtgatctatactaccaccactagtatgcactgtgtctgtgtgtagcgcggcgccaacgatgtggcctctagataaagcaagatccaatcgagttaatgactgcatcgatctctctcattaactttctcatgtctctatcgttttgaaattcaggagcacgcattgaaggaaatgtgctctctcggatgcttgctttggatggtgtttcatgtgaagttgcttgccttgtacgtactccctcccccattcataaatagtgttggagccaaggttgaacctagattttactcatactccaatccgac

SEQ ID NO: 175324 - DNA, 511 bp, Zea Mays
tacaactggtgtgcttgtgtggtcatatgcctctcctctcgaaggaagagggggctctatccttttatatctcaagggtaggaccttacagtgggacttgtattctagtggacagagaaagaggtctgctccccaggttggcatggtgggtcctctgtagggtcatgtgtagccgtactcccagtatgacgtcgtttgttactctagctcttgtagcgagtccatcgctgacgtctttgtagtggtgtgcgatgggtcccacggatcgttcttatggtgtggtcgtacgtggcatgacttctcatgtcatcatgagcccatcgtcacctgtcagcgtgtgtaggcgtacactcggtatggcacgttgtcccatccttccgatatatgggtcactgtagaaaccccggttcctaatcagtgtgttgtgcgtatgtcctgacgtggcttgatggtgacacgtcccatcgtggatgatgtggatcagtagcgttggactcagatttttgcctcg

SEQ ID NO: 175325 - DNA, 718 bp, Zea Mays
gtcgcgaggaccgggggttggtgcacccggcgactgcgcgggggttggcagggctccgtccacggtgctcgcttcggctcacttcgctacagtttgctgctagtcgtttctgcactctgttctgatcttttggttttgcactgattcccggataggatgggcgcatgcacactgaactgtcgtattgtggatgcgtatcaggcgagtaaggtaccggtagctcacaacgttttgaagggtcattggtgtcagcaacaatgatttcatctggcaagaaaaaaaaacgggggcatattgatcttccaacgaacataaaacccagtatccttgggggtagttagaggttcgctgagacaatcgtttacgaaaaaacctggttaggtgaatggtcagaacttcggagcagattttctgtggagcatgaggattaaaacgcctttgtttgaagtttggacagagaccaatcaggcagctgaagcaaatgcgctgattatcagtcaacgacgctgaaggatcctccctttgtttggacagagatcagacacgtgaacgcgttttgcaactacgtaatgcttttactactggctctataaaacttctcacctgagcctcttgatttcttgatatgtctttacgcttcagtattggagagttttttttatatattcaagcaataaccattaaacaaatttgccaagtgttgggatatgtcttcggc

SEQ ID NO: 175326 - DNA, 766 bp, Zea Mays
tttcgattaagcaaatggtgataattgcttggcaatagcgaaacaagaccgttatccatctgggactaggcttcaacaacagatagtagtgctctaataagaagaaatcatcaggagtagagaggagacaacaggtctctacaagatcttcatatttctatcacaaattatcatcactaatagtctagtggtcaagacatatgactcttctggctccgaggaccaaggacatattaatgtctaatttagcttcaagctctgtggtgatgtgggatttcatagctagtttctactcttcttactcctagtagatcagagatagattacggtaagcattttaaaggtggaatccaatgtagttctgctacataaactccaggtatatgtccattcaggactgacctttaccgtttggcttaaaagtatatcataccaatcaaaggactatacctagtcaattcagcgactatagtatgtacaattctgagagatgtatgcaacacaagcatagaggtcctaaacaggacgagtaaagtggttcgacaggaacacacaatggtttttcacacaaacattgtgaaaaatttctcagaattacctttcaatgtactcgcaacttcatgttgctaaggtactagccatttatctcaaagttcgcttcatgtcgttcagcgacaaatagcaatgtgccaacatctggtgagcaatgtatgactgagattctagcatttattcatctgataaggtcttattgcttattaattaa

SEQ ID NO: 175327 - DNA, 437 bp, Zea Mays
cgaagaggaacaagtcaacgaagaggccaactatgcccagcaagactacatggggtttgggcctgtcaccgaacactacacatcaatgttcgagacggggcacttccccaacctgctgcaagacgtgctgcacgcgttgggaacctacgtccgacccttttacgagacaaggcgagtgtgcgagcctccccgggcttgccattacatcactcgcattcatgtcagggtgatggatgcaggggataggggattcaggacactgtcagctcatgagtccctgataccactatccacctacactacttcggtcagcaatgctgccagacggactccgtggtctctcagccacacctaccagcagcagctgcatgacataaggtttaggcatttgcctctatgtctgagtggaggaagccagaccagcattgttccaggtg

SEQ ID NO: 175328 - DNA, 610 bp, Zea Mays
gccaaagtcgggctgtcagtcaaccctaagtctgaagtttcattaacagtgaggttgggcaagcttcgagatggaattcgactatgatccattaattgttggactatggttgctatagcaaggttgtagctggatcatagggctgcaactttgatacaaagagcaggttgagtcactacatgaatttgggagcaaatctccctactagttgctctgtcatgcgtgtgaatggaatctgattgtacagtaaactaaacatgatcccagattcagcccccctcgccgttggtgattctgcgccgggatcctcgtcaccgttgcgattcgcgctcaacgaagtaccgattgttgctcagggtagtaaatatcatcgtgtggatgaacttgagccactgttcactccggccgccgtgtctgcctagctctcggccgcttcggaatcatcctcgccagtgatagccccctcgcgaccttgtgccacgtgcctcggtgtcttaccacgtcgcagtagctcgcgttatgcatatccagtggtcgccggtgagcttgccactgtgaaagccaccaatcgcttgcgccagtgcacccccttctctctgaccgccaccgc

SEQ ID NO: 175329 - DNA, 489 bp, Zea Mays
attgtagttggtatatagagctacaagtttgttacagatggattagcaagttctcatacaaaaatccaagatctgggcactgcaattctggttatcacgcgttctgaataaggaatccgatggtacagtgctatacaaatatcccaggttcagagaacctcaccgctggtgagccatgcgtccggattcacgccagccgctgtgattcgtgcccatcgcaagtggataacagagaggagtaaaaatcttgacgctcgaattagctcgggcttgctcaccgttgtgcctgccgtacccacttggaccacggctggccgggatcgtcctcgctggcattagccacttaacgatcgtgcgccacacgtcttggaagtctagcacgtcacaatgaatcggtgttacaagcctatccatcgcctgagaactggccacggtgaaagccacaaattcattgcgccagtaacctcccctctccccggtcgccaacgc

SEQ ID NO: 175330 - DNA, 346 bp, Zea Mays
gcagcagaaaacatgtccataatagaagagttcgtggatgtatttccggaagagttgcctggaatgccaccagaaagaggagtggagttctatatagacctcattcctggcactgcgcccatcgcaaagagaccataccgcatggcccccacagagttagcagaattaaaactccagattgcagagctgcaataaaaagggtacatccgtcccagtttgtctccctggggagcacccgtccttttcgttaccaaaaaggatggaagtatgagaatgtgtattgattaccggtccttgaacgaagttacaatcaagaataagtaccctctccctcggatcgacaacc

SEQ ID NO: 175331 - DNA, 319 bp, Zea Mays
cctcccagtgcacgcccgcgcgcgctcgccggtccacagccgcccgtgcaccgcgccgtgcctataaagccgccccaagcctcggccattcatccccgcgcgctctcaagacttgcccaagtcagagatcaccggaaatcgccccgagcacgccgcgccaccgcccgccaagctttcagagcttcggccaccgtggccagcccactccagtcaccccaagtcgcgccagcgcttcggttagctccgctagtggcccgtgaagctttccaagccctcggacccggcagaacttcactggaagcccgagatcaccctcgcc

SEQ ID NO: 175332 - DNA, 776 bp, Zea Mays
aaattcctataatagtttgaccggttacaaactgtgaacctgctggggttcagttttaagcaatttgatagtccaataactcataatttattcatgttctttggcttctcaagtacataacaacaagagcatatgctacgtaagagtagaacataactagttagtataacacatgcctatgtacccaacccttctcctcgaggaaaacattgctagagatgaaacccaacaaaaggtgtaggctagctatagggtcgagattgtagacaagaggggggtgaatattcctttctaaaactcaaatgtgcgggctaaccgaaacaaatgcagaaattaatttaatagatgtagccaagactacatgcctctatctatcacaagcaccttacaaaggtcctagttaagcaactaagataccgagctaggtagagctcatctacgcaattctagttagcaatatgccaatatcacacaaacctaagtaactagtacaaagagtacaatgggagctcctactcatactaatgagcaaagcacataaagcctaagcacactagcactactcaactagcaaagctacgcaagctaaactagagagctactactacttagttggtacacaagctaagctatgctacctagctacacaagtcgagcaagcaactagtaagctacacaagcaaactagctacacaagagcaacaacattagcacaagtgtaaacaaataatacaaactagtgtagggaacctgcaaaccaataggaagaggttgac

SEQ ID NO: 175333 - DNA, 492 bp, Zea Mays
gggcaatttcacgtaagactcaacaccggcgagcaattcccaatgccccatggacctaattcgggcgcggtatgaacttataccaactcagaaagattccgcagcaaggaggtggggattaccggcgaggaaggcaggacggagcgcggatgcggcgtcaatcgtcgcggcggcaatggcgctactcccagaccgcccccacacacgccggtgctggctaatcacacgggcataatgaggggcgagagcggcacttaatccgtagccttatagcgcagggagggccgagattaaggcaacggctcccgcattacccgcgcgggtcgttgagctcgcgcacggcaatggcgttgagaggggaaaacgtgctgaccagtggggccccagcgacagcgagtggccggttcaacgtggatgcgagacagcggatgacgcgcgggacccatttgtcagccgcacgcgcgagcgggcgcggaagagctgggccgcgcg

SEQ ID NO: 175334 - DNA, 574 bp, Zea Mays
catatttcaaagtactttactattatcatgattttattgttgtgaacaacatggtattttttttaaagttagctttggagaactgcactaagccaagcaagcttaaatcatgaaacctatgcttgtagtttaaactccaaacattaaagcgctattcataacattagagtacatcatagctggtatttttgaatttcctgccttctaatcgttgctagctgctgcatggttgctaaatattaatgttttctctattactttgaacagacgtgtgaacttgatttgtgttgctgagtggtgcttgctagacattactggatttttaggtaaccactgaaacatcagcgccttctttctctaataaaaatctaatgttcaccatatattgcattttgacttactagggtatcctagaattggttatagatgcttgattcaataggatatctctcttttcgttatagctctatggcatgcatgatttatggtaaaatgcatatacagggacaaccataggttcaaatgttcaaaaacaaaaaacttgaaaagaagaccacctagagaacaaatttgc

SEQ ID NO: 175335 - DNA, 456 bp, Zea Mays
aaaaatgctagaaagtcacatcgaagaagagacaattcagattcagaaggatctgcagtaccgtaaaagccggtgaagatttttgattcagccatccgaaagacccaaaactcagaagtgatactctgtaaagttcagtggagcagagaaggagaagaggaggctacctgggagagtgaggactctttgaggagagaatacccttaccttttctcaagcccagtctgaatctcgagggcgagattcttttaagtggggtaggtttgtaacatcccaattttgatcccaaggttagaaaccctaaaactcctaaaccccccaattatctcctaagacccccacctcatgagacatttcattcatcatatgcatacactatggttgttagtagcacctctcatagaatattttgacacccaagaaatgtagataaatatttgtttaaaggaaaaagga

SEQ ID NO: 175336 - DNA, 405 bp, Zea Mays
ttctctcctccctctcccgtgcccacactgtccaccccatcgtcgctgtcgcgccccagatgtagtgtagctcgacaccgcctcgccctagagcacccaagcacccctacgccccttccctagagcgtcgccaccgttgtggcctagctagagcattgctcgacactgtcgtgccctgagcccgtgcccctgatcaccctcgtgctcccgtgcccctgaagtttgcgcccgagttttgcactcctgaaatccaaaactgcatgagtcgcggtggaagatgaagatagagttcgccttagagtgaggaagcagctaccgacgtctccaccaggcattgatgaggcttcaagcaagcggtggcagtgagcaccggcaagcaaccagcaattgacagcaaccttcttc

SEQ ID NO: 175337 - DNA, 564 bp, Zea Mays
ccaaaacaaattggtaaagatcctatcacgatcactgaccatatttttaggtaggccatgcaacttgatgacatgatccagcaacacttatgccacttgggctgctatgaaaggatgccttaaaggaagaaagtgagcatattttgagaagtagtctacaactaccagtattgtgtcacaatcttctgagagaggtagattctccgcaaaatccatcgtgatgtcttgcctcgctccctgtggtactggtagtggctgcagcaaccttggagaatggattctctcagctttagcttgctggcatacttggcactaaagaatgaaatcctccacatcccccttcaaccctttccagcaaaatagacgtttcagacgatgtaggttgcctatactctaaagtgtcctcccaaagcactgtcatgtagagctgccactagttttgttctcagagaagaattgttgccaatacagatcaaatttcccttcctgatcaaaccaccaacaagctaatacccttgttcatttggactcttcacactcaaccttgataacattcgctgggcc

SEQ ID NO: 175338 - DNA, 521 bp, Zea Mays
tccatggaccagtgtctaccctttgttgacgtggtctagagcttacaccaagattgtagtctctaacctgctctcggcttgagaccgggcccttgcaaacatcttaggcagtggaccagatcgttgagttcccgctaactcgacccagatctaccacatgtatcataccatgcaccaactctttgtttgaattcatgctcctctctagacgcatgtagtgcagcctgaattttagcatcataatcatcaccttgttcttcatcataataagttcttgctacttcatctgctcgttgactctagacaatcctttgcctcttcttttcctttgtcttgtctagctcgccagcaaagaatttctttatttcaggaggaacggatggacagttcttgacatccttccctcgatgtgctaaatgctgcttggaacgagtagcacttccaccactcttcccttcatgacggtacttgcacctgaaaccttgaccaatattctctccatgctcccacactaggcccga

SEQ ID NO: 175339 - DNA, 353 bp, Zea Mays
cttctgccaaggttcaacggctgatttggtcgacttagcgtgcagatcttagcaaaacccccatgtacggtctcttctctgcaccaaatcctaccttttcgatgtgagttccaagcaaagatatggtcggggtagagagatatgggggtgagaagttggctctatccgagctgtccacaccgagacaaaagccatgccaagttgtgtcaaatggcttagggttgggttcaaacttttccagggtgttctaggggtctttgggcgccattttgtcaattgggccataaggttttgaggttgggaacaaggtgaacatgtttgatctttgaaagagggtcggttttgaacttgag

SEQ ID NO: 175340 - DNA, 668 bp, Zea Mays
gtgataaacaacattattacaaaattataggaactggaatggattaatttggacaaaattatatgaattaaacaagttctagggatttgtttttacattaaaaatcaatttctcaattagtttccctgttatatcaaatatctggactgagcgtcatttaccagagagctccagggtaaaaatataaaaattctacagactcagactgcgcctgcccaggactgcgggttgatatgccaaaagttggaggggctctttacaaattatcttggccgaaggggtatccttcacctagagtcgtccgatcacaaccgatcggatgggattagaaccatgcgctatataacgttgcaacctgccctggcaacccgatccaatatcaacggatgagggatgtccacgcccccgatccgatcctaaccctgcacccgcgatccaacgaccaagttttcgtgtacgcgcgttctaacatctcccatgcgatctagggctaacggttaggattcagttacgtgcgaagggttacgcatttctaatccggatcgcccaaaaccaatcggacagtcctgcattcctgagtcaatcggtacgcgttgccctaatcccgaccgtccgagggtcatccaacgatccaggactgtctcccttacccaaccaatgatccgatg

SEQ ID NO: 175341 - DNA, 814 bp, Zea Mays
cgcaagaaaaacacaaatgagagacacaagcgatttatttatcgaagttcagtttcacaaggaaacctacctctctgttgaggagtccacttaaaactggtctctttcaaccatttccctatttcgacccggtcatttagatcgtttaagtgttccttctcaatttgagaggtcgaagtctccacggggatctccacacaaatttagagtctcctttttcccactagcctttacaagaatgagaatgggattaggaatgagaatgaaaacacaaatcaaaacatcaagcaagaaagggcacaataaattcaagcacactcatcttcaatgtttctcacaaggcactaatgactagttgatcacttctcgattgcggcacttggaggctattgatcactttgagtatgacttggagtgaatgctcttgctcttgtaatgaataagaatgaatgtagtgcttggattgcttgggtaccattgaatgggatggttgggatgtatttatagccttcatctacccacatagtcgttaatgttgtctgcgcactagcgaacgatctgtgtgtcctatccagacggtccgcccctacaagatcaatgactagatcacaaagattagttacaatggctatatcaacgactataagagcattaaatgtgtcgccatatgtcagataatgtgcatcgtggactattcacctctgatcccgaatagtccgcgcttggcactaaaattcattttaccagcttgtcaccttcgggttgattagtccttaaacagacagacagtatacggtttatagtcagatagtcc

SEQ ID NO: 175342 - DNA, 598 bp, Zea Mays
ggcgacggcggctacggccaactaccggggaggcattactgacctacgacagcctcggaacatacatcaattggacctgaacaccccgagaacgaccggtccacgagcacggcggaaaccgcggcgtcgatcttatgttctcaattatccaggcccgaattggtcaagcggatgctacggtgagctttatgggcctacatagctactagaacaatagtggagaggcgcagagccttaccggaatggtctggccgtggtggggtgggttttacggtggcggagatcgatttgggggaaactccgaattcgcggacctcagcgaacgatcggggctaattcgaggtggctggttagcttaggactttacggaactggtggggggctcaatttatagggagcgacagcggcggcggtcaattcgagcaggttgtgctggtggccggaggaggaagaagagtactggcgcaatggattcgtggctcctaccgtggcggtcattccggcgatcaacggagagtcactaaggcttacggcgatgcggtggagatacgtggcacaaggccggaatgcggctggccggcaacggatgaggatcgcg

SEQ ID NO: 175343 - DNA, 481 bp, Zea Mays
ccgccgatgttgagatggctggggcgcctctgccctgagtcacccctgatctccccattttcgaccatgaggaggggcggtcgttgttgccgtggtcggtgagtggaggattgtcaccttggctgaggagaggcccgacacatcgacgacggcggcgcccgatgcatcgactgtagggggacccggcgcctcggtcaccaggcgcatagaaccgtggcctgtcttggggagcaacggccttatccccacgcagctcaatcccaatgagtggtgtgggcagccgctcctgttctggagtcgcgacacctcggagcccctcctttcccttaacgatgagttggaggagtagctccggggtaatttccatgaatataccgaggcggcgatgaggtcgcttcagacgaccatggaaatcctttctagggacgttcccagggtcttccaggtaaagatttagatgtacgcctcgcgtgatcagggc

SEQ ID NO: 175344 - DNA, 404 bp, Zea Mays
gtccttttgagccacatcagcgttttagaaataacgaccgagtgattactggtgacgtctgcgttttagaagtagcagccgagttatatcgagccgtgtcggcgttttagaaataacgaccgagtgaggactggtgacatcagcgttttagaaataacagctgagttacatcaagccacgtcggcgttttagaagtaacagccgagtgatgactaggcacttttagaatcggtgcctgacccaggaaaaccccatttgtaccgcgccgtcgcatgcctctgcattctgagcccaagccttactttctgcttctagaccttctctgtttccctgtgatctcgctttcgctcagttcgccgacgagattgagatggcgcccaagcggaagagttataattccaccg

SEQ ID NO: 175345 - DNA, 622 bp, Zea Mays
gcatgtaaaatctgagaaattgtccgatagcactcctgagtttcatttgaagatgtgtcctaaaattatgggcttttacatgtgtttgtgattcatttcaaacggtgggcgaatcacgcgtgtttgattccggttgtcttcgattgctaggctgcttgctttcgcctcactccttgcagcagtgggtgctacttgcatctttgtttctgtctccttcctcgccgcagagcaacaacaacagttgcaggggcacgggtagaaggttgggggacaggtggaagaggacaagcaggaaggtgaccgaaggtgggcactgaaggccgaggatggacatgaaattgcaacttgttgtcgcaaaggtattagaacccaatgcatttctttgtatcccgtatttagcttcctcttatctttgtttgaaattgcaacatggtgtttggtcattcgattttagggatgggctcatcgcccccttagaatctctctctagatagtgcggtgccgcatgaaaataataggttttgggttggattgtgtgtttctgtagtttatttgcgctgccctcatacttggaccttgagacctttaccttggtgtaaaagaatttatttttacattgaat

SEQ ID NO: 175346 - DNA, 807 bp, Zea Mays
tgaggaggataacacaaggttcaaaaggattttgatatcttgtacatgggcatgaaaggcacaagtgaataatgatctaataggagagggagaacttttatgcataggtggtatgaagattaatcaagggatgggggaccttgagaagagaattgccaagatttgggtatggacaagatggttgtcatatggtgcaaattaagtggaggtaggtttataggggaacatataagaaggtggagggggcgagatggtttctagctttgaaatagaggtttagctaaactagaataactatggaagggtgtgatatacaatggggaacaaaggaaagctttttggctttaagtactagttggggcaaaagagcaaacacttggtgtgcaaggagactaggagaggagaaaacaacactgaggaaagggacaaccccataggaatatagaacctgtaggagaatgcaccaccacacagatagggaactgaattcacaaggataagatcgcctgagagggaacatagaggatgattcaaagggtgtaacatggatgagagcatgagtgaaggagatcatgcagacatacaaacacatgctcaaggggatcaccagagcggaaaagaagctctagggcatgggcacaaggtcgacggggagcagtaagaacaccgacgaagacgggaggtggcggcggcaaactagatcgagcagggaaggcgaaagagaaagaagacaacattgaaattaaaaaaagtgaaactaacacgcgggcccgggcgaggaaatggaaaagggcaagcagttatgag

SEQ ID NO: 175347 - DNA, 523 bp, Zea Mays
agcttcgaagacgattcccggtatccgaaaattaccgtttcctcctcttgtccatctcatgccaacgccaagaaaccgaacatgaccgtcaactgtggagccaaccgagaaaaaggaagaagtgatgtcgccgatggggagtcgcataatcatgggcagcgagtcctctgtgggtgtcagagggcatctctaaggcacgccgcaagtgggcataatctttttcagcgagaatagtggtcatagtttagggaaaagctcaccgaagctcaagcctcgttgtggagccgcacaacaccatggacggggcttgctgctgcgagattcacggtgatacttccttccctgagtttgagttcatctctgcttcaagtaatgtcgtttgaattgaaggtttgatcatggggtcacaggattgggggatacggcaatggtcggcgtcgccgcctgggcgtagtcgagaggttgaagatggcccctgaccattgcatccacactgacgaccacgattagatcactggatacc

SEQ ID NO: 175348 - DNA, 735 bp, Zea Mays
ggcgtaccacgtgggcgttgccgttgcgtcgtggaatcccaaggcgccagccaggcccggcgtacgggcatgtcgcccacacgtgcaagcgccggtcagcggcggcatttttttttttgatcttttgtctagtgccagtcaacattcgcctccctgtcaccacgctcgcccacgcccacactatatattctagtgtttcatcgtcctcgatcgatctataccgctgcactgtgtgctctctccgtccctcttcacaactttaacaggatatattatcaaacaataaagtgttgttgaaacaattaataatcgttctataatttgttgcagcagaaacaaaaccgtcccaaacgagatctacgtatactccaatgtcccagagcagaatgaagacgatgatggttattgaagactaatacatacacgcacatgccgacatgcgttgcgtggcccctaaacctaataaacgacaaggagacacccaatatatatagcgcgttatttataatgcgaccaacttgccgtttttttatatatcgtacgtatttcgataacatgtcatgaaaacaaaaataaattaataatcgtttgccttggtcagtttcagggcagcttcgtcgtcgtcgtcgtcgcatgcgcgctcgtgcgccctagctggtatctgattctcctccctgatccgtcgtcgtcggtcgatcccgctccagtagctagctagctctctggtcgtccatc

SEQ ID NO: 175349 - DNA, 712 bp, Zea Mays
gcccaaacgaagacgctaagcctaacaatggcgttaggggtcagctaatgaaggtatatttcgaaatttttcaagacttcccctatcatctcgttcagaggaaatcgtagtcctgctctgaagaagctcttgaagaccactacttcatcactcttcggtgctggggtggtctcttcttcggcaaatcggacgagtttcctttcaccttcccaaagtagcccagcttcatcatcataggcatgtcagcttcagacactgtagatttctcaaaatctagatggctaggtttagttgggatcaaaatactataatcttccttttcatcaatattttgttcttcagcaacagtctgttcggcttcggcaacatgagtaccttcgttagtagttccctctgtcacaactagacctgattgtttcatgacttcggaaattggtgctgtctcagtgacctcagtttcttctccctcacgagacacccttgcagtcgaacgcactctggccatttgatggatttttcacggttttaacgaagttgatggttgttttgcagttttgacgaagctcactcttctgatgaagttaactctaaatgatgaagtgctcgctcgagagcgcagtgaaaaaagctttggctatggttaaattttttaacagcacaacaatgcaatggcaatgaatgttgtggtaactctgcaccaacccgtctgttt

SEQ ID NO: 175350 - DNA, 747 bp, Zea Mays
cgccggtgctacaattagttctctctagtgaagaaatagtcatggcggagtaaagatcttagcaccggataggctcggacccgatcactagtgcgttcaccgtacccacttggcctgcggccgaccgagatgatcctcgccgacgttggctgcttactgaccgtgcgccatgtacctaggggctttaacacattgcagtaaaccatggaagcaagtccgtccatcgccggaggccttgccacggtgaaagccacgatcacccgcgctagtgcatttctcctctcttcggcgccagtgcatttctcctctcttcggcgccagtgcatttctcctctcttcggcgcgccttctcaaaattagacgccaacgccgtaggactctataaattgatgccccagtgagttccgctaggtaattacacatccaaagcaccagctctcgcctccgatcgttcaccatagcctctcaatttctcttttcccccaaatctgttttccgcgtcaccgtgaacacctcgtcgtggccacctctctgcaggttagttcaagcttcttggcttgatgtcttgcctcccttaagtctcctaatactcgtagacccatttaattgaactagactgccttgaatcgccaagaacacctcggactattctcggttttcgccgtcgtcgtgaacaggcatgctccggtccggattagtgcaattagttgagggattagggtcgctaagggtggaattgggtgtcag

SEQ ID NO: 175351 - DNA, 1107 bp, Zea Mays
cttgtactaaaaaagaataaagttgattggcacatgtgcgtcgactatactgatctcaacaagcattgtccgaaggatcccagagtccgctagaggcaaatctcaatgactggagagagccaatcatcaggtacataaaaatgaagaggagccagatgacaaggctgcggtagagcgcattgcatggcagtcagcccactacaccatcatagggggcttgccgtacagaagaggcgcaagaggagtcctcatgaaatgcatccactcggccaccgggagacaactattagatgaaattcatgctgggcaatgtggtgtgcatgctgcatcaaggactctggtgggaaaggctttcagatctggtttctactagccaactgcgaagagtgacgctaccgagttagtccaaaagtgcaaggcatgccaattcttgtcaaaacaccagcacttgcccgcccagcagctgcagaccattcctgtaacctggccgtttgcatgctgggggctggacatgatcggacctttcaagaaagctcagggaggttatactcatatactggttgccattgacaaatttacgaagtggatagtatacaagccaattgcttccttgacctcagcaaaagcagtggagtttatccaggagataatgttcaggttcggaataccaaatatcatcatcacggacctaggatccaacttcaccagctcagagttcttcaatttatgtgaacaaaggagtatccagatcaagtacacatcagtggcacacccaagagctaatgggtaggtagaaagagccaacagaatgatactggatgcactcagaaaaagatattcaacaagagcgagaagcttgtggggaagtggattagggaactgccatacatggtcttgagcctacgaacccagcctagccgagctctgcatggaaacaccccatttttcatggtgtatgggtcagaggcggtgttgaaagcatagctgaggtagaagcaaccaggctagaggacattgatgtgctgggggaggaacaactaaacatggtaatccagtcggccaggtaccagcagcctttaaggtgctaccacgacaaagttgtgcgac

SEQ ID NO: 175352 - DNA, 480 bp, Zea Mays
ggaagttgttatcagatggctattgatagcagtgaagcagatccacttgagattatcatggttgtgtccgagttcccagatgtgttcccaaaggacttactaggcacgccaccagagcgaacagttgagtttgccatagagcttcttcctagcaccacccccatttttaagagagtttatagagtatctggaccagagttagttgaacttaagaagtagatcaatgagctgtcaaagaaaagttacatccggccaagcacctcgccttgggccgcccctgtcctattcgtggagaagaaagatggcactagaaggatgtgtatcgactatcgagctctgaatgaggtcacaatcaagaacaagtaccccttgcccagaatagaagatctgttcgaccaattgagaggagccagcgtgttttcaaagatagatctgaggtcaggttatcaccagctcaaaattcgaccctcagacattccg

SEQ ID NO: 175353 - DNA, 440 bp, Zea Mays
tgaagattctgatgacagtgatgattatgatgtggaaagtggagatgaagattctgaggaccggccctggcggccaagccatactatcttcggaaaatcgaccattaaacaaagtaatattgacaccatgagaggaagatactttcgcgacatgtctattgtgagggttggaggagacagcactgcccctgctcctgaggaaaatgaagttgttgtttaccgaggctttttgaaggcaggccttcggttcccgttgagcaaatttgtggttaaagtgctgaagatattgcagatctttattcatcagcttacccccaaagctataattaggatgggcttgtttgtttgggatgtaggaagccaagggctagaaccgagcataaagtgtttttgcagtatgcatgaacttttgtacgagacgaaggcgaccggcaaagaac

SEQ ID NO: 175354 - DNA, 553 bp, Zea Mays
ttcaccatgagaaagccgaagaggcccgtaatgtacgtgttgtgctggccacagatggattcaatccctatggaatgaccactgccccatacacatgttggcccgtgttcgttatccccatcaatctcccccccggcgtatgctttcaaagacagaacatattcgtgtcgttgataattcctagacacccggggaataaaatgggcatgtacatggagcctttgattgatgaattggtccgtgcttgggataaaggggtatggacgtacgaccgagctacgaagacaaacttcaaaatgcatgtttggtaccagtactccatgcatgacttaccagcgtatgggctattctgcgcctggtgtgttcacggtaagttcccatgcctagtttgcaaggaagctcttaggttcatttggttgaagaagggtggcaaatattcgtcgttcgataaacatcgacaatttctccctcctgacaatgcattccgactagacatcaagaactttacgaaaggtgtcgtagtgacagaccgcccacctgcaatgatgactgg

SEQ ID NO: 175355 - DNA, 770 bp, Zea Mays
ctcccttcttagagccccgccagcaccccgcgcacgcccctcgcctcattttgcacaggttcacactctctcgcgctctgcccacgccgccagccgccgctggagacccgcgcccgtgttcccggccatccagctcgccggagaccgctccaagcctccccgagctccgcctcgaggtgagacactcatccccgtgcccaatttcccctattgcgccctgtgcttggccaattttgccttcgccggtgctcggtcgcggcagaccgtcgtgctcgcgcggtgtcctaccgatttagctcggtctagttccccggagtaggtccctgtgtcacccctgcctctgctgaagctagcccaggccttagcatgccttaagtcccctccccgtggccggaatgccttaccggagttactccggcccgcctgagaccttctcaccgccgttctcccctctctgcccgtggattcatggcctcttccccgccattgagttcgttgtggcgttctctccctctctgcccaacttcggcgaccccagagccaccctagcccacgccagcctcaactccagcgacctcgccgctgcggagaagagcagcgccgcccgcagccgttcgtccccctggtcttatcccctccgtccgattcagatcgcacggctcagatcacgaataacgcttcgcgcaagcgcgcctgacactctggcccgcttgtcagtgcccaagtcccctggcgctgggcccgctcggtcagtgcgccctccccctttg

SEQ ID NO: 175356 - DNA, 682 bp, Zea Mays
ctttagccctataactttggtgcagagagatgaccaagtcgtaatgcaaaattttgagaacaatggccctaaaccgtggctgtcaggtgcatttgactgaattttccccatggtacagtacacggatcaggatgccagatcggacagctcaacgccggtgatcccgcgccgcgatccgcgtcgccgttgcgattcgtgcgtcgtgggttgcagatagctcataagggtaggaaataacgcgacgtgggtgaactccggtcactattctactccggccgccgtaccaagcttggatcacgaccacttcggataagctcgtcggagttagccacttcgtgaccgtgcgccacgtgcctcggtggtttaccacgtcgcagtagttccccttgtgcatatccggtgatcgccggtgaccccgccacggtgacagccacctattccttgcaacagtattcttttcactctccgaccgccaccgcgccatccgaaattcaccggccaccgcccttggagcctataaattgagggcggggatagttgcgccatgtaatcgtcaagctatagcacccactctcatctccaatcgttccccgtagctccccaatttgggattacccccaaatcgatcgaagaacgccgcgaaaccaagctcgccgtggtcagctcaattcgggtcagctcc

SEQ ID NO: 175357 - DNA, 603 bp, Zea Mays
gaaaaacccaatcaaagatggactgtcagactgcctgaagtctgaaatacagattaacagtgttgtgggatcaactttgagctcgattttgaaggggatccagtgactttttgtgagtacgcattatagcaaagatatagatggattatagcactacaactttgctatagatcactggttgtgttgccacttgaaaatcagagaattggcggcttaaatttgctcgatcaggctgtctgaatagaactactgatggtacagtgtctgcactggataaaactgccagcgcggctgtcctcaccgccggcgacctctctgcgtgaagattcgcgccgccgccgtcctgattcgagcaccgggcttgaagataacgattgggtggaaaaaatatcatctccccgtgcgctggacgccactccggctcgtcgccgtgcctcccccctgcttaccgcccgtgggataaagcttttcaccgccgtcgtgccttcgccgtggcctgccgcgtggcttttggtttccaccggcgtcgccgtggcttctcacagccgtcaaatcagcaccggtaagcttgccacgccatttgccacgaactcaccgcgtcag

SEQ ID NO: 175358 - DNA, 640 bp, Zea Mays
gaggggcggcacggccaccagagggcgaccatggccaaggggaggagtgctcccctgcgctagcagaggaagaggggtgtccagcagagctggaagaagtcgtggagggggaagatgccatggatccaagggagcttggattcgaggaaggctgggcgctagaggcgctgagtggacctgaggcgcgccacgcagtggaagcgtggagtcgggcgggaggcggagcacccattccggcgaagaatcccggtggccaggagaacgattccgcccaggcgaagccgcgacgagcatccgtgtgcgcttggcttccacccgagtcaatccccgagggctggacgtgggtggtggagcacgacctcggagagcagtggcccgacgatggaagatctgtaccggcgaggaatccctagtgccatggtgacatatcttggaccgctagacaaccagatccttcccccaacatggtgaagccccagggcgagcaatcggatcctgagcgacaatatggacgtggttccatggcggaccgacgagttccctcgcgagcttggtttattagggggtcaccagtgatgacgatggataggggaaaagcggggccggatttttataccgaggcagagtccgcgttcaagga

SEQ ID NO: 175359 - DNA, 428 bp, Zea Mays
aaagaggaagtcggttagccctcctattttagtggagagattagctctcagttgttagaggtggttgagaataaagtggcgcctaatctataaaggagctgctgtagtttgtattagggttatcaaaagtccttggtcgtcctggcgcaccttgggccagctgatggaaccagctcctcctctggccgatccccctacccactgagatcccttccacagtcccaagccttactgcgatcaccactgcgcagtcctatgcgctcacgacatatcaatttggtatcagattcctccaacgcatcgaccaacatgtccggcgtcgatcacgatcctgcgaagacctccttcgactcagccaaattggatcaaatattggcgcagctctccaccattaactcacgcctcgaactgcatggacagcggatcac

SEQ ID NO: 175360 - DNA, 379 bp, Zea Mays
cgcaactcgccgttggtagccaacccagcgaccgggtgtactagacggactacggcgaggtgacacacacgatgtgcggacggacgcgaaacagctagtggaaatcttatcggcagtggcgacagaaacaggctctgcctacggctccataggtctgcggcacggggatgtcttccggtgagcaatcgaccctgccccgaccctgctcgagttcaattgatggtcggcatggcttctacatcacgcagcgactccccagagatactttattgtgtcacagcgacaccccgtcgcgagtacgacggcggcagtacaagctcccctcccttcttctgaaattccgatctgctatggccgcgatggtattcaggttgatgga

SEQ ID NO: 175361 - DNA, 453 bp, Zea Mays
accaattgtcctcatgggtatccgttgagttgctccaaccaaacttggatgaactgtgttgttgtcttcaaggattcctagcgccagtaacgcagccgggggagttacatcatgccgaccatctgacctacaaggtaatgtcgatgttgtattctctccacactgcactggtccgctagccgtcgccatggtgtatgccctaaccctcctaggtcaatgaactaaagcggcggctgtgtgtagccctgttttattttttggagttatgctcctggattggccaaaaccgtcctggccaatattcatggtctgttcaaaatatcctgcatgatttgcatgtcccgagatttacgtgtcccgaccaatttacgattacctgcctattctgttacagcaacataaactcctcacccccacgtgcgaccccaccacgaaaccatgatcccagtagac

SEQ ID NO: 175362 - DNA, 525 bp, Zea Mays
gagttaccttatgtggtttggagcctaagaactcaacccagccgagctctgcatgggaacacccccttcttcatggtctatggttcggaggctgtgctacctgccgacctcaggtttggggcgccaaggctgatcttcgaaagcatagctgaagtagaagctacgaggctagaagatattgacgtactggaagaagagcgattgaatacagtaattcagtcagctagataccagcagaccctgaggcgctatcatgataaggctatatgacatcgatcctttgtagtgggagacttggccctttgctgaattctaatgggagaaggacggcacaaattgtcaccgctatgggaagggccattcatggtatcagaggtcactcggccaggatcatatcggcttactcaaatggatggcacggaagtggggaattcatggaatatagagcatctcaggaagttttatccttagcaagacttcaaaaactatcggagcaatgttgtactctgtaattggaaaatacgc

SEQ ID NO: 175363 - DNA, 602 bp, Zea Mays
cgacagggaggctgacgtggcagcgaagaacaacataagtcctagagtaaaattttgattgtgtcgtgggcgatggcgtctagcagaactgcagaagggcggcatctagcagaaggtaaggcgatgtctgaatggcggatgggcctgcaagagatttgctgggctggcgtaacacagtttgggggaaccaaaattgtccctgtttgtagctacaaaataggaatttttttggggctatgaaaagttggggaaggtttgagagccctgttggaggcttgaattttcatgttccctttaattctaggttagggggcattttaagagacctcttggagatgctcttaggctacattagcagcgtccataaaggccttatttgtttcatcccgaaaccaggattgaggaggattttgacttataacggatttaacccccctcaattattatgggtttgaaacaaaatgaatagggcctaaataaaaaacttcctgatatgcttgttattgtttgactacatttagcaccacctattttgatttttattgctatcattttaaaggtatgtgtaaacatccacttttagtgatgctaagaaaaaattg

SEQ ID NO: 175364 - DNA, 771 bp, Zea Mays
ggatcatatcgacttactcaaatggatggcacagaaatagggaattcatggaatatagagcatctcaggaagttttacccctagctagatttcaaaagctatcggacaacattgtattctgtaattgggaaagtacgtcatcaataaaaagacttcgttctcaaaagctctcgaactacttattatcaatctacatgttcacgcttacttaacttaggatgaccactataccctgctaagggagcaatcggcttaagtcggcagtgacttaagacggtgcgacatgctcacgcttacttaacttagggtgaccactataccctgctcacgaagcaatcggcttaagtcggcagtgacttaagacggtgtgacatgctcacgcttacttaaacttagggtgaccactataccctactaacgaagcaattggcttaagtcggcagtgacttaagacggtgcgacatgctcacgcttacttaacttagggtgaccactataccctactaacggagcaatcggcttaagtcggcagtgacttaagacggtgcgacatgctcatgcttacttaaacttagggtgaccactataccctactaacggagcaatcggcttaagtcggcagtgacttaaggcgatgccacatactcacgtctattcgacctagtataaacatgcttacgatcactcatcttagggcgatctctatgcctcacaaaaataggaagaagttttgaaactagcatactgcatttacttctgcaatcgtaacaa

SEQ ID NO: 175365 - DNA, 599 bp, Zea Mays
cactacgtggggttatggcctgtcactgaacattatacctcaatgttcgagacagggcacttccctaacctgctgcaggatgttctgcatgtgtggggaagctacgtccgacccctatatgagataaggcgagtgtacgagcctctcaggcttgctactacatcactcgcattcatgtcagggtgatggatgcaggtgatagagggttcaggactctgtcagctcatgagtctctaacgttgctatccacctacgctgcttcggtcagtgatgctgctaggcgaacactgtggtgcctcagccacaccaaccgggagtagctgcacaacacgaagtacatgcatcttcctctgtgtattcgtggagaaagctagaccaacattgttctaggtggagctggagaagatcgcctcaacaccctagctggtgtggtggcaggtcttaacaccgacctagatagtgctaccttggacctctttagggtacacttggagctggaggatgcacacgcaaggatcgcagccttagaagctcagcttgatggaaggaatccccctgaagttcatgtccctgccatggcgttatcccctccccgcaat

SEQ ID NO: 175366 - DNA, 688 bp, Zea Mays
gttggccactataattcatgtgttagatcaattaaagatgtattagtagttaccattgttgttgatctcaaaagtagttaggtgatcaatttcattgtccccatcactctccatttcacgatccatggttgtagtagaaaactttcttccaatggcaaattgaaattcttggttttgacgggatacccaaatctgtctttcgccatacgacacatgacatttatgtccttttcgtctaggagacgttgtcaggttgtttgtctcaacatcctcagtcaccaatggagtaggaacaaatggtgttgggatcaattcaggaatagccatgtgctcggagctaaatagagacccagtaggtgcttgagcatctgcggaactcgacacaagctccggggtaaaattagggttctcaatggagattgagtcctgacttagcatctcttgttgtcttattctatagttttgccttgcactcttttgacatggtgtcatattacgcaacgtcctttgttccctagtttgagttgcacatcgagctatttctcggattctcttacgttcctttgcctctaacacttttgaatagtcatggtgtacaacattttctttgttgcgtgacgcacgacgtttcttcaattcattttttttcatcactcatctacgcgtatcgtgctcgttctctttcccg

SEQ ID NO: 175367 - DNA, 816 bp, Zea Mays
tggttgtgctatccagagaagaggtgggaataatagtcgacaccccttgtcttgatagtgctttgctctagaagcatctgaagccaagattgtggaagacatttgtgtggtgtcagaattcctgaaggtattcctcgaggaactacctagaatgcaaccaaagcgagagatcgatgttgagtactgataggtgacccaaatactcagagacatttaggagggcacaatgcacaacaaaacattaggtagggaaaatgtagcatttcattatgtgtgtctcgtccagctacagaataggggtatttataggcaacctgggggtagatggtgcaaagtacatacgtacccccattcaccaaatacgttcccaaaatattaaatgtaatagggcaattacagcactgcaacaaccaatgaatacacacactcacaaagttactgtctagttacactgataagtgggccctcttgggagccccttcattgggccggtgacccggacgactcttcttccctagagccttcgttgtcccagagccttcccacctttggatccctcgctgccagcaaggcgtgacttgtgttgagcgaccattggtcgcgacgagcgaagtcttcgacctcgatgtttgacccgcttctcgggcccttacatgggtactagcccccatcatggtcagcattagttgcctaatcgaaggctccatcaagatcacgcttggcaaaggctccggttgtcccttttcctgcaatcaagcatggttagttaagacgagggaacaagccttcatggtgctaatcgaggtctagttcagc

SEQ ID NO: 175368 - DNA, 569 bp, Zea Mays
taaatccacatcctaaatgtccagatacagcagtttaaataattgtgcttttcgcctcctccctgcctctgtaatttgtatataaacaggaaaatcacgtaggctgctctgatgttctaaaaagacaagatcaagttcccaatgaaaacatatatttgctcatccgattaggcaaaacccaggcactctggcaagttcagaaaagaaggtaacatacaatactgcttatttacttgtcagttgctccttaatgttcataggttaaggtcagggtccaggcaaaataataccataagggaggacaaaattgtagccaatgactcattaggagtgtgaaactcaaatttttatgttagctagggtctgcttttataagccttctctgctccctcccgctgaaagccgccgaggtgggactagactgaagcaccacaaacgttcagacctctgtctggttgcgtgggctttatgggctaccaatacgtcgatgctggcccggtccgtagagtctatctcgctccaagttctcgagtccgtttccaccgcagctggctggacacaggccaccc

SEQ ID NO: 175369 - DNA, 321 bp, Zea Mays
aaaatgaactcgaaatagtaaatacattgaagttgacttacatttggagaaatgtttattgacagtttgcacattgttgtagaaggtgaaactgattggtttgtaaatatattgaagttgacttatatttggagaaaccttagagtgacttgataatagtccataacatagaaaagggtttggctcatttttcttataatgaaaacgatagcaaaaagaaatcttgcatagtcacatgagaccttctattcttatctgcattctccatttcaacatatggaacaccaatttgaaatccacgctcaccaaaagtaaatatca

SEQ ID NO: 175370 - DNA, 597 bp, Zea Mays
atcaatttgtaccttccgttcacctttagccatgaggcataggtgagaagtcgatgagggtgatggtggtggtgaagagaagtcccgagcgatagcggcaagttttttatcattttcttcttcacttgaagaaggtcttcttcgcttgaggactaaatgtcagcgagccagtcaccaacaatgtttgtctttccatttttcttcttattgaaccttttgtgtttcccatcatttctcttcaagaatttcttttcctttttctcgtcatcactgtcatcatctttcttgcccttgaacttgttcttcttgggcttattgcattgatgagcaagatgaccaagctctccacaattgtagcagtctatttcacagatgggatttcttttactggagaagaacttctttcttgggtcaaacttgatgtcttttctattgagctttttcaacattttggtgatctttctcaccattaaagcaatgttggcatcaagatcatcatcactttaggattcctcctcaatttgcactttagtttttcctttcttttcttgattggctttgagagccaagtcttttctcttagaagataacttgtcc

SEQ ID NO: 175371 - DNA, 1038 bp, Zea Mays
gaaaaagcatcatacgtatgaataacaacaaaaattgtcatcttctaccttgcgacggggaagaaagcagggggcttcaggcgcggggtttcagcacggctgagaaatctgtggcgcgggagaaggtccggtgaggagatagttcattggcaagggtctccaacgacacatgacgatggtgagtagtagacatcgtgacggaggagcagaaagccgggctagtagatagtgcgaggcacgagggttgagcagcaccggtgtagtacagacgacaaagcagacggagctccggcaacggcaacaacacaacgtggtggcgcgagcacaacggtgcgcagcagcagggaggctcagtaatggagcaggggtcagcgaggcgtgaactccggcgagcacagtcgcggcagctgcgagccggtaagcacatgtgatgttgtgatttgtgagcgagagagcgatcaagggcaaggagagaaggactgggcgcaaccttttatagccaaagggaggaggaatttgcaaccgcgaccattgaagccgaccttgaattacagaggtaaaacgactgccaataaaatccattaacggtgtcggatggtgaaaggagaagaggagggggtgctgcgccctatatagtggaggaaaggagggaatcagtgtcgattaagaccctataaagagaaattgatgcactgctattaatccgtgagtaattaacagccagaatcaacatcaatggccgctgcgggggaaggtaactgctgacggggatgccgcgaggagggagaaggggaaaatcacaggaggagaaacgtcgccgcaatggtgctccactacgcaggcgaggagacggaatggctggcaaacgggtacggtcgcgaacagcgaacaacaaacatttggcgaggaatggagaaggcggatagtgttgatggctggggctgcttgtcataggaagaaaggacggaggtgagaggagcccgggtgaggttcacgtgacggtgttggccgagaggccgatcgtccacattttttttt

SEQ ID NO: 175372 - DNA, 788 bp, Zea Mays
tgacaatccaaggtatgacttctaagatgggttgcacttacttaggatcttgagctccaaatttggtgtacttttcccaacttaagtcacatgtgatgatgggcttacttgtgtagccttgagtggaaaacactaagtaacacctggggtgttacaaccggcccagcctcctctgctcctcctccccgtgttctctctcgtgtgaccgctccatccttgagatgctgctgtgacgagctcgccgtcgtccatcgagtcaggtgaatctgccgctaactcttctccttctttgtcgccctcctcttctcctcccccgctgaccctttctgtttcggttgccgccccctttcctcctccttgccatcgacagatctaccttgcctgctcctcccttcaacagatctactgggtacaggaagattttactcaagtatcgtccatgcttctgtggtcggtcccctacttaccttcgggtactgggagatttgctcacttgttcatgtccttggcttcaggtactccgcctagttgctcgtacgttcttgtgagtttggagagaagacaagaagtgacttcatacagaagcaaggagacgtagctagcatcatggacatttccaaagaactataggttctctaatgaaaatcctttttctttatttctgcttctctgattagcaatagatttctttatgtttatttctatggttattaagaactacagtttagcttggaattgtttcagtcaaaaccgtgcggctggtgctagtagccatgccaattgaattg

SEQ ID NO: 175373 - DNA, 744 bp, Zea Mays
gtttgatgttgtggactttctgatctgtgagattgaggacactgttctagatgggattcgtgctcgacgacagctaccttatgctcactacttatgccacatctttgcgcagctgattcagccacctcgttttcagagcacccttgaggcctcacgccttgtgtttggatcttaccgtcctgctcctgagattccagtgccagcttatgctcctgtgtttgacactcaggccgaggatgcagcacttcgtcagtttgacactcagggtacagctgatgatgatgatgatgatgatgattttggggttcctcctccgcctccgcctcctatgcctccacgctcacatgatcatgaggctgggagttctagtgctgcccctcctcatcctcagactatggaccctgcccttgcttcgattcttcagactctcacccagcagcagcagactctcacccagcagcaggctctcctggcagccgagcaggcccgtttatccgacaggatgctctcgatgtttcagagcatgcaggacaggcaggatgcacttcagcagcagcttattcaggatagggcagagaatagggcattcatggccctcatgcttcagcattctggtatctcagcacctccggttcagtctgctccgccttcttcgcttcacgctccagtggtgccttcgatcttgtctgcactccctgctgttacctctccgctccggccggtcaccttggcattcacttctcc

SEQ ID NO: 175374 - DNA, 339 bp, Zea Mays
aaacgctaggggctagagcgcaaaaggatccaagactcagtttacccacgtagtggagtgcgagttcattacttgattctgcaggggttcatatgctaaactgtcatggcgaaggggtatggtgtgacctggctcgtccgatcgaatatcgacgcatcggattagatcgtcgttttataacatgcgtaactcgtcccgaccgtccaacccagagtatacggcacggattaggccacactcaacagcaactggcacgcccttaccgccgtcagatccggatcctacggtaacaaagcactcacccactttaactgcaccagccattggatccgatccaat

SEQ ID NO: 175375 - DNA, 562 bp, Zea Mays
tatcgcgtgaaccatccaatctatcttgacatcctggattagatccgaaccggtacacaatcgtacctattggattaaatatcgacgatcaaggattcgccacgccactcacctaatctgacccgcccagacgtgattggatggcctgaattttatggggcgaagggggtatgctccttctaatccaaatcatctattctgcgatcaacaatttatatttcaaaattagcacaacctgatcaacaccctccaccatcaatacgacgaccctcactactcttcaacccccgacgatgcacacaacggcgcagagttcttccgcgacggtgaggctcatcggtgcctggtgtctaagcgcacaggtggcctacccctatccgactgagtgcgaaactatgagggaggtatggcgaacttggtagtgttcccttaccgatgattagcgtgccgaggaatcccgtctactaagatttatagattggttgtggtgaaggactccagcgacaaattccgtctccactgcacatttctgtgctcggcgacggccccggttacctctcac

SEQ ID NO: 175376 - DNA, 464 bp, Zea Mays
gtgggcggcagatgtcgtcacgtcagtgtcaaagaactagcgctggcagagaggcagggacctagcagcgggggagtggaggagccgaacctagctgtgcagccgtcgaggattaagagccgtagtggctgggacctagcagcgggggaggggaggagccgaacctagctgtgcagccgtcgaggattaagagccgtagtggctgggggatctacgtccctggcggcggctaggcgatctgtgtcctgggcgccggtggctgggggatctgtgtgcctatgtctgtggcggcgcatttggcggcgagacgaggaagaaaccaatttgcgtctgttttttatcgtctggaatacgcggtgaaggaaaaatttggcgccagattaattttcgggagctctcaggagttggaatactctagctaaatatattgataaaatggggtaggatagaaacttgataaattt

SEQ ID NO: 175377 - DNA, 378 bp, Zea Mays
tcccaatttgtttgataagtattgttttgctatggacattgttctgttgttcaccctggggtagccaattatttgtgcctggtctaatttgtagtcttttgtacagttcaggatctgctcttggaactgcttacatttttttggtctataattgcaccatttagaactttcttttgttagattaatgctatgttatctaagtttctacagattgtgcagaagatctgattcgggtgggacattttaagttacatgcatgtgcgttttcggctctattttaaccatgggaacgggactatttagtttcaataaatgtctggatttgaaatgtgggggtgaaaatttctctgatatattcactttattttggcactggct

SEQ ID NO: 175378 - DNA, 345 bp, Zea Mays
caagcgccaagaataatagcactattaaggttctttcggaaatctttaggaacactgtctcctactcttctccaacactcagcaaaggagtcctcatcgtcattaatggtcagatgaccaagactgaaagggccatgatgctgtacccaaattgtcgtgctagactacaagaagtcaggagatgctgaatagtttcatcagcttggtcatggagaggacagtgctcagggtgtgaaagacatccgttttctaattttcaactgtccagtatttgtctctaatagtcaaccaaataaaaaccttgcattttggaggcgcccaagatttccataaccttttccaagg

SEQ ID NO: 175379 - DNA, 404 bp, Zea Mays
gtagaatcttcatgccatatctaagtgggtcatcatccaaaactaacataagttgcagtgcatcatatggttttagcggtctgaagtatggttgaagggttatgtacatgcaatagaattgtatttagttgtaaaatggcaggaccaataagaaaaaatctaacactgcattcaagggccaaatctctattggtttcatgtttttgcatatatcatttatggtcatctttttggcgtgtggaatatttgatgtgcactggttcttgtttaagcctgtgaaatgaaaggtaaaatttcaataatattaccaatcattagacaatgaagtacaaatatgcggtctatgtaagtagtctcttttgtaaggttggccagctatgtactatataaacaaaaaaggaaat

SEQ ID NO: 175380 - DNA, 633 bp, Zea Mays
ctacgagcatcacgggcacatgagaacacttaaacgagggatcagatgatatgagctgacctgaattgcgctggccacggcgagggtgttcttgcggtgggttagagcagatttggggaaaattcgaaattcaagctctcggttgcaagattggaggaaatactgggtggtgtggtgcgtgatgatcttgcggagcttacggagggctcaatttatactaagcgagagcggtggccgggaattggaatgatgacgcgcggcggtcggaggaggggggtttcactggcgcagtggattggtgtcctataccgtggcattcactctggtgatcaacagagagctaaagcaggtcatggcgatgcagtagagatgcctagacacgcggcacaaggccggaaggcggcggtcaccggcgaactcatccgattccaccgtggcgagtgcggtacgatggctagaatagtttactggccggagttatccacggcgacgacatttacgcgaccttgagcgctatccgatcaacccgagcacgaatcgaaatggcagcggcacgaattgcggcggagaggtcgttggcggcgagaaactatgctggcggtctgatctacttcagatactgtaccatggcca

SEQ ID NO: 175381 - DNA, 755 bp, Zea Mays
aagaatggacataatactagcgcattgcatctccatttcaatgatgatgatataaataaatcaagttcgatcacaggcatgcatgtggtgtggccgaagatagaggccttggttggtatgtaactaggcccaaaaagctatcaagggagcagccggcccagcgcgtgcacttaacaaacacatcagtgggaattggcccactggactagcccacagcttccgcccccgtcaagcccaacggcacaagtagtgcaactctggaaagcagagggcagaggcaacaccttccggtgtagaggggtgactaggtggtggtgagcgtggtattaacgcctcaacggcatctatctgcttactttgctactcgcaaatcgcaagtaaatcaaatcaaatggctagctgtactagcataaattcggatttcagtagttggtgcacttgaaactgcggttctttatgcctaacgtggttatcgcctaaaacaaaaaacaagaggctaactttacttcgattttacacaagtagttttgcttcgcaatgtggcttactactgctgccacaacacccatgtctgccttctcgcatcgtacgttcacatacctaggggaaaaaaagattaggctgccgttccaaacgtctagaaccacttgttaaaagattaggccgccgttccaaacgtctagaaccacttgttagcaagctaataaactgttaactggttttatctgggtttagggcagctgataactaatgac

SEQ ID NO: 175382 - DNA, 499 bp, Zea Mays
tattgatgaggacgaggaagaggaggaggaaatccccttgattcgaaaaaacagtcggtgttatatagtcagtggggagagtagtgatattccttctccagctttgtctgctctcgttggtctgcaggaattgtctctagcaaattttgatcaggctctcgaggatgtggtccctgaagatctgttgtccgagccgacagatggtggtatgatggacgtttgcactgatatacctgatgtcaggttagagttatcccaagcagcgtctcatgcctcatcgaccttggagcgtggtcttaagagtcaggaagctgctctagattgctccgttcccatggaggtggttgagaatccttcaaccttagaggtggctgctgaagagaacccggttcccaaggatggcgccagcaatttcgcagcccccgagggtgttgccggtaatgatccagctcaggtgggtagcgcgagctgcaacccagcccccaagggtgttgccggt

SEQ ID NO: 175383 - DNA, 1076 bp, Zea Mays
atataaagtcatttggttcacaatcatgaagatttgcaagctaaaccatgaattttggacctatttgcaaaaagaccccatgggtgttctagggctaagtctgaaaatcagtgatattgactccactttggagttctatatcttccaaaatagtgagaatttaccctaggtcaccacatcaaatttgtaaacctatcaaaggagaacaattttgcttaagagtgtaagcaaggttgttatgaagaatttggagataattaaacctaaagtcaggctgtcaggctgttaaagtctgaatttcagactgacagtgcaactgcagtgactttgggcatgaattcaagcaggattgagcaagaatttgcttaggattgctataacaatattgtagctggatcttagagctaaaactttgctaaagggtgatgatcatgttactgcacaaaatcgggagtaaacagccctgcaaatcgctttgtcaggtgactgaatgggctttcccatggtacagtaacctgaaatggatcagatcaagcactcagctcaccgccgacgatctccgccatgattcgtgttgcctgcgtctcgattcgtgctcggggtaagtgcataacgtctcgggtagaaagatcatcaccgccgttgagctggacaccaatccggctagccgccgtacctcccccttgttcaccgatcgctcgggtaggatctcaccgccgttgatccctcactgccgtccgccgcgtgtccaaacactttaccacatcgcagctaactatgctacgcacgtccgatgatcgccggaggagcagccacggtaattgccacgttgcgcggccaccagtgactcacccagttcatacctatcgcaatccgcgctcctcctccgattccggtcgacgacctataaactgagcaaggattctgcttcttcaccacatcccgcacctcagtaactgagcaatcggctcaatttcaccggagaactcacgcagcccacaaattccctcctccctgttcttaactccgccgtgaagaactccaccgtggtcagcgctcttcgggttagtaacttc

SEQ ID NO: 175384 - DNA, 553 bp, Zea Mays
caagaagatggcccgcttcctgaagggactcaggccagaactcaagacaattctggctagccaagacttcctcagtttctccacctctctaacaaggccatgcaagtggaaagggcaaaggaggaagaaaaagggcatctcaaaaggaaattccaagtcctccaggctcagcagcaagaccggcaccagaaaactcgatcctttggatttccacccaagggaccaagcttcagtagaccagctggacccaccccgtcacgattcagtcagcagagtcagagctctttccatgcccctcagttgcaagcaaccaacccccggtgaatgcatgttggcactgcggagatcccagtcatttcaagaacaattgtccccagctgaagccatcaggacctgcctactccaactcggtgaatggccccaagaatacctcagcatccgccccaaggcgccctcctccatcagccagcagaacaagacccagtatcaaggaagggcacgagtgaatcacgtcgatgcccaggaggctcagcaagctccgggagtagtgctc

SEQ ID NO: 175385 - DNA, 641 bp, Zea Mays
gtcgtatggatcattttaacacgtagatacagttcatcaatcatcagtttaactcatatgacataggaactgcacgtacatataacatatacatcaattgatacgtaagtaatatacatatagttttcttttttactaaaatgtgataactcgttgagctcgtgagatggctcgttaacaaaccgagctaagtgttagtttagctcgtgaaaaaatttaaataagacgagctgaccacgaaccgaaagtccacggttattttgtccagccctaccgatgccaaaccgcatatcgcctgcctcgctctctcgtcactattctactcatgcatcaagaactaagtcgctggctgaggctaaggaagaagcagatgcccatgcgaaagcggcagcgcaggcaaaggaggccaaagagaaaaacgaggcagcggcagcggcaaaaaaaaaaaggaaaaaagaagaaaacagagcagaagacgaacagaaagatgagcaatgaagatgggtccatccaaggaaggtgacaagtacataatgagcttgtttattagtgaagtgatagagaaagatggctgaataatgcagtgtcttatatgcactaggagacgagtggtccagaggagcacatgtataatgtatcac

SEQ ID NO: 175386 - DNA, 915 bp, Zea Mays
atatcagaacctgcaccatcaagtgcaaaagagaatagggaaaagctcaaaagacgtccctaaggggatgcagagctgtaatcactccgagaatgatgaagctacaaaagtcattcctaagggagcgtagagtaagtttcgaatctccaaagtcgttcctaaggggatgcatgtgacaccccagtgtcacctagggtttctctcagtgctaacccaagaatcaacatttcatgtgagccaaattgagcatgaagcatcaaatttacttaagaataaaagatgtactaagtgtatatctaaagaatcatgttccaaacaaataagattttcaagaagggaaaaatgttgaaaccctaacaccaaccctaatcaagctatctaagtagagataaagaaaaggggtaaaagaccatgaaaaatataaaatcatggcttaggccaattataaacattgaaatatactaaataagctacaataaagattatggaagcttggccaaaatagtttaataaaaactccaaacaagcttttcaagttgaggttcaatagggatttctgaaattcagatttctgaaattctgcccttaagccaaagaccgagtgtgttcaccttgatccctagctcaaatcctaatgactccattgacaaaaatgtgcctaactaacccctctacctcataccagaagatggcatcgggacgtgtgctctggacacgtcaaacccgggatcttctctctgtgcgcggcagtgagacaaacccgatttctctcctctctttctcttgatccagtcagcaaaacctgcaagcctccacacacaaacaacagaggaatgtcaggggaggagacctctcaacgggatcatggccataatctcaaagatttggagccaatccgcgcttgaactcgacctc

SEQ ID NO: 175387 - DNA, 358 bp, Zea Mays
tgagtaagaagcctcgcggacagtccgtcgagcggtaggacttcatctgaaaggaggtccggaagctgctagacgccggcttcatcgaagaggttcatcacccagtgtggctggccaacccagtcatcgtccccaaggcaaatgggaagctttggatgtgcatcaactacaccagccttaataaggcttgtcccaaggacccgtatccacttccgcgaatagatcaaatcgtggattctacctccgggtgcgaccttttgtctttcttatatgcttattctggtttccatcaaatccagatgtctagggaagataggaagcatactgcttttgtaacagtggatgggctttactgcta

SEQ ID NO: 175388 - DNA, 809 bp, Zea Mays
taaaatgaaaaggagaagaataaacatctcttgggccggtttcgcttctttgcggcccaagttacccccatcccgcctcggccaattaagtgcgcgcccctggcccaactgaccacctcgcgccagccatccacatcatgcactggcaggtgggtcccacccgcaagtctcacgtatgatgccactggcactgcttgtggacccgtgctgtcattctcacctgcgctcggacactgatcaccggggccgccttgacagtttgtccttcctccccaaaacgcgaatccgcgggcaacgcgcaacaaactcaaccaggaatcacggggttcgttcactggaagatcttcccatgggctataaaacctttcctccgtgctcccctctgctcatcacaacagaaccaagaagctagaagctctcgtcgccatagctgtgtgtgggagaggggcgaaaagaaagaaaaggtgggcgccgtatgccaaaatccaatcgctccatcgctcctgctggggcgcatagcctgggacatcgccgtgaagcatggatgctggggaccttcgggttggtggggaattggcgaccgagggacaacattggtgggctgccaaccatgaacgccattgggggaccgccgtgcaccagggcgaaggctctgcatttcacgaatcatggtaaggaatctccgaatcaactcgccatgacctgtgcattgtgtagcgcgtttcgtccatgacggtggggcatcggaaccgcgcgtcgcagttctctggcgtggaccgccgccgcaagggaggctccgcgccgccgcg

SEQ ID NO: 175389 - DNA, 536 bp, Zea Mays
aattggtgggagcagatctcaggagtcacagttggtttacttggaaaaggcctcaactctttaatttccttgggagcttggacaatttggaaggttcaaaacaaatgtgtattcgatggatggactccaagtttggccttatctcttaggttagcaggggaggagagattgttttgggaagtggcaggggctaaagggctttcttaccttgctgctctccttccctagatatatcatcttttgagtggttgtgtgtgtgtctgatggattgtttcagttttctgtgtttttggcctccgtgggagacctttgtatttgggcttctcaagcctttttacctaccttcttaatataatgagacgcggttctcctacgttttcgataaaaaaaatgtttccatatgatcttcccaatatggaaagttgtcgccctcaaaaatgggatgaggtacatccccactagacattgtaactaaaagaggttaagataaactaatgagcatgagtttcttatactaattgaaaggatcatgattc

SEQ ID NO: 175390 - DNA, 466 bp, Zea Mays
gataatctaatatataccgcagatgagacatgagaagcgatcctccgatttagagcagggcggcggcaaactggggcacaacactatggccagggctccgttctctccgatcaagattagattagaaaaatgaaacgtctaggccactagaaaattgaaaccatggtggactgcagcctacagggcattagggtcagggcactacgagttagaaaaatgaaacatccagacattgctgctcgggccatatcttaatggcctaatgggcctcctggcatgacgccatattgttcagtgcactatatattttttcctttttagtttttatatattcggtatacatacactcgttggttttacagggtatgctgccatgccgggcatacccggcataccctgtaggttcgccactggctggctcccttctcgtccaaccccgacagctgcagcagccccaacaaccggc

SEQ ID NO: 175391 - DNA, 486 bp, Zea Mays
tcaaggctagtcatttgaaggtagcaggtaccttacagcctcttcccataccatcttggaaatgggaggacctcagcatggattttattgtgggtttacccaacacatcccgacaccacgattctatttgggtcattatggacaggctaaccaagacaactcatttcttgccagtacataccacccacaggacagaaaagtatgcagaaatctatattgaccaaatagtgcgtttgcatggaataccaaggactatcgtatcagatagaggagcaccgttcgtagcacatttctgggagcagctgcaagagtcacttggaacccatgtgataagaagcttagcataccatcctcagaccgacggccagacggaaagagtaaatcagattcttgaggacatgttgcgagcctgtgtgttacactatggtaagaattgggataagtgcctttccttggctgaattctcttacaataatagctaccaat

SEQ ID NO: 175392 - DNA, 325 bp, Zea Mays
gaaaaattgagaggctatggtgaacgattggaggcaaggactggttcactgggttcgtaacaagtagtcagaacaagccaaggcatcaatttatataggacggccacgaggagggcgaatttggatggggaagtgcgcgcggtgaaaagggggaggagtcaccagagtttgctagcgtggcgttcactggtttacggtctacggcggtcactgccgagtcttcacggcttgcgacgagtggtgagatgacttaaagcgtgtcacaaccgagctagacggcggcacaacggtgacggtcgcgtagccacgtcgccggtgcaagtgg

SEQ ID NO: 175393 - DNA, 564 bp, Zea Mays
cagctcaggctagcttccaaatggtgcaagaacacctactcatcttgcagtacaatctctcgtcaacaccgacgccctctctctctctatcaggcgcacactgtcaagcggcacaggcacagaaaacctagaaggcaccttttccaagagcaccccagccccattcttgtcaccccggcctagcttgttcatgtccactgcaagtgcaaggtagggtatgatccgtccaaggaacaccaatttctgagcaaaaacatctactccatctagtcaagacaaatataaaagctactgtgtgcgtcgatctagatagaattaattttatcacctcaatctgaatccatttccattttcaggcacgaagcatccagcgtcaaaaccatcaagttactagaaccctccactcctacccttattacgattctcatgctgttttcagcgaacggcctgaccatgatgagctagggaagaagatcaagagggagtagtcaccggcggagcgcatggcggcggcggcacggaggagctgcagctcgccggcgggggctggtgctgttgcagggg

SEQ ID NO: 175394 - DNA, 593 bp, Zea Mays
tcttcaaagatcctttgtttagcatgtcatgactactagtcttcaaactcaaccaaacccgatcatctgcttccccatcctcgtgttgtgatatctatttctgagccttcactcaaatacttgaaccatgcatggcccaattctaatcgtcatatatgaaggcatttaccttcgtctcttcgattctataaaacgttattaaagtccccacttggattttgacacgattttttttaatttgaccctagacggtccaaacatccatatttgaaatactctattattttatatttcataaatttaaattccttgcattgttattcagtttcaaaaggtattggttaattcaaatatcacgaaaatccccacttagccggcggttgttgctagcgatggttaatctttattcggcgttgtgcttgcgcatgtagatcgagacacgcccactatgtgcatgcacctcttgtgacttctgagcaagagcaggggatgactattggtacacttattggcccgacccgatccctatatataaagtagctatatataacaacaaacaatgtagtaaagtgatatacgattgctttactaac

SEQ ID NO: 175395 - DNA, 452 bp, Zea Mays
gacaaactctcaattggataaatcaatggatagctcgtgtgccttccccacgtgcaaatggatctccgagttagcctttagtggactacttcccaccatctttattattgagcttttggccaaattcatttagcctctctttgtgctctttatatctgaactaatctcctttagcacccaaatttgtttgccctcttgtgtcggcttacttgtccaccttgatgggcaccaccttatcattttcttctttttaataagtatggtgcaatgtctttctcattaaccttgttggtgtaggtgcgaagagcttgcttctttgattttttttcctccccattctttaccttgcactagaaggaattgtggccttccttgtgggcatactacaaaaaactagatcgagtcacggtttagaccaggaaaaactggaaacagtggatttggtggttcgg

SEQ ID NO: 175396 - DNA, 1088 bp, Zea Mays
tgactgtgtcccgaagattacttagaagaccatctaatggttgcaggccatcatttacagccaaattcactatgtgagcagcacaacggacatgaaaatattttggatcaaactgtgcatttcttcttgcaagaagcttggacttcaaatttgtaatggcaacatcattatttgaggcattgtcaagagttattgtcataaccttgtcttctattttccattcaaccaaacaatcaaaaacagcttgagctattactataccagtgtggggggatccaattcaacaaagttaaggacacgacattgcaaaacccattcaacatctatgtaatgtgccactaaacacatatattgtacaccttgattagatgtccacaaatcagtagttaaacttattgattcagcttctctaagactcttcttcagtttctctttctcagattcatagactctcatacattcacttctaatagtcttcctaccgataggttcatatttgctattcatccatgtcatcaagatattaaaccatttatgctctaccatcctaaaagaatactcatgaacaatgatcatcttggcaatcaatagtctagtgtgctcatgatcatattcatcagggttaacaataatagatccatcagttgcagtaaatgtgagagtaccttgaggaagttgagattttgccttagccaatttgttctgaaactgtgtgcacttctataaatgacgatttaactgtgaagtttcccccctggatggtatgcatagcttttataacataatttgcatttggcttttgtcaccataaccccaaactccttcttggactgaacatggatctccttaaaatatttccagcaaccagcacactttcctctctttgccttatctttggaaggagacgactgactaccacccttcaatctttttatgcctcgatttgtcttctgagcctttgacacatgattgccctccgattcctccccctcctcctcctccgcatcatcatcatcatcatccccctcctcctcccccgcatcagcatcatcatatatctcatcattcatatcgatcaaaatctcttc

SEQ ID NO: 175397 - DNA, 772 bp, Zea Mays
gggtgatgactcatgaagtcccggtgtttatctctggccgggggtgcatactgctgctactggggttgctgattctgttggttctgttgtaattgctgaaccgcagcagtgagtccttgcagaatctgcatttgggtggcgatgaactgctccatgttgggattaggtggtggtggtggtgcttgttgtccacgctggttccggttgttaggtccttgacgttggttcaccatctgatttgttaggaagtgaagtccttagaaaattgaggagtagaaaagattctagagggaagatggcttaagttttacaaattttatatgttcttatggccatcattccataagaccatagcactcaaacaaagattcaaatcaagcatttcaaccaatcaccatcacatggttgatatttattaatataaaaactgaaagatagtttcatcgtctaatgcgaagcgtaacttattacatcatgatcaacactcctaaagcagcctagtgacggatccgggctctccatagcgcagcctcttgcggggaggagacaacgccacggcgggaacctgagcttctggcggattcagtccttgcagttgggcttccagggctgcaatcctggcgtgggcattctccagctccaagtgcacactgtagaggtccagagtggcactgtccaggtcggtgttgagaccggccactacaccagctagggtgttgaggcgatcctcaccaggttcacctgggacaatgttggtctggctttctccacg

SEQ ID NO: 175398 - DNA, 519 bp, Zea Mays
cgggtaaagagtgaaagaaggaaggggaggagaaaaaggaggaggcggcggctggtcagcggaccaaaaccggttcaaccggttttgctgcagtgtgaacagttaaagcgcgcagaaaacgacgttgactgcgtggaattcctaccatactgacagcgcagtctgcgagactgacggtgcagactgcggggctgactgacagcgcggacgcagaggcgacaaaaaccggttcaaccagtttttataccggttcaacctgttttcaccacaggaaaaccggttgagtggcctactcagccgatttactcaacctgttttgagatattgcccggtaaggctttaactacaatcaatattagtgacatgagtaactttggcaataaaaataggatttcacatgtcattttgtgcataaagcaattttatatcaaacaatcatgattcaaattttagttttatgacacgtttcgagaatccaagatatttagttcactcctaagaaaacaaaacctagtctca

SEQ ID NO: 175399 - DNA, 2584 bp, Zea Mays
gaaaaacttttgatttcgccaggagacaaacatgctacataccctcataagaatatgaatattgaggaggaacccacaaacaaagaagatcatatattgaatgtgtcacatacagaagggtacatttatcaactattccaaattttaaataataaaatagattaatttctacttttatttcctgagatcaacttctatttgttaagttagtgatatgcgtttactttgcatttgcagtcatgaaaaccttttgatttcgccaggagacaaacatggtacatcccttcgtgaggatgtgaatattgaggaggaacccacaatcaaagaagatcatatattgaatgtgtcacatatagacgggtatatttattagctattccaaaatttaaataataaaatagatcaatttctacttttgtttactgagatcaatttctatttgttaagtgagtgatatgtgtttactttgtatttgcagtcataaaaaccttttgatttcgccaggagacaaatatgctacattccctcatgaggatgtgaatattgtggaggaacccacaagtaaataagatcgtatattgaatgtgtcacacacaaaggggtacatttatcagctattccaaattttaaataataaaataaatcaatttctacttttattacctgaaattaatttctatttgtttaagttagtgatatgtgtttaatttgcatttgcagtcataaaacctttttacagtttatggctgaaaatgatatgtctactggtgttatcttatatgatgacgtaaaggattgtatgataacagttattgtaagagaaatgagtgtagactttctaaattacatttttaataaattcgagagaggaaagtgttggagtgatggctgagaattaagtgatatggaaatggaagttgaagcaagaagaaagtttgtcattaccaaggaggctgacgcagatcttactgttgaagatgacacacaaaatatatttgttcatcttggttttctggtaccgtattataaaaaaggaaactcaatccagcattttttgattccttcggaaaagatatattatacttttctgatcttaagaatttttcaataaaatggaaaaggtttgtcaaactcattagatcagcgttagctttgaaagcgcctttggtcagattaaccttaatctgtgagatgtctacaattatcgtattgcagctttaattatctaattctgcatattattaagtattataaaaaaatgtcaagattgacgtgcttcagtaaaatgggttatgccacacagacaggtctaccactacaggaacaatatctctttaaggtatttttatgataagtggtgttgtaacttatgacacgtaatgtggtatttaagaaacttcgttaagcatgtcctgacctacgtaaaagagtagaggaaatgctgaaggaagtttcttcaataccacattacgtgccataagttacaacaccacttatcataggaatacattaaagagatattgttcctgtagtggtagacctgtccgtgtggcataacccattttattgaagcacgccaatattgacattttttgataacacttgatgatatgcagaattagataatttaagctgcaatgcgataactgtggacatctcacagattaaggtcgatctgatcaaagacgcttttaaagctaacactgatctaatgagtttgacaaacattttccattttattagaaatttcttaaaatcatgaaagtataagatattttttctcaaggaataaaaaaatgctagaattgagttttctttcttataatacggtaccaggagaccaagataaacaaataaattttgtgtgccctcttcaacagtaagatctgcgtcagcctacttggtaatgacaaactttcttcctgcctcaatttctatttccatatcacttaattcccagccatcactccagcactttctttccttaaatttattaaaaatgtaatttagaaagtttagacccatttctcttccagtaactgttgtcatacaatcctctacgccatcatataagataacaccagtagacataccattttcagtcataaactgcaaaaagtttttatgactgcaaatgcaaagtaaacacatatcactaacttaaacaaatagaaattaacatgcttattaaaacgacgttaaaacgacgtttaaacgtcgtttaaactataaaacgctgacagaaagtgaaacgacaacgttttacgattcgtcgtaaaacgtcgtttaaacgtcgcgttttgacgtttaaacgcgttatagagtgaaacaccgcgtttcgggcgtttaatgcgtctgctgctagaaattggcccaacctaattagaaactcccgcccagcccgcccaggccgccgctacaggccgcactatcaccagcccaattaggaactcgcgttctcaccagccgccgcactccagggcgcgctccagcctccaggccgccgctgccgctgctccaaccctcctgcgccgcccgtccggcgccgccaggcccgcctctgcgtgccgctgctccaggccac

SEQ ID NO: 175400 - DNA, 463 bp, Zea Mays
gcggatccgcagcgccggcgagcaatcaccgatggcgtagcaaatttgaagccgagccctaccccaggtaagcttccaccgcgtccactgatgcccccgaacccctccccgaagctcgggcgacgtccacggcacacggcgacgacggtggaccttttctttcctcccctcgccaaactctcgctgctcggtgtcggtggggcaaaggaggagagagggagggggttggccatgttaaataggaagcagggtgcgaagggttagtgccgagcagaccccgcgaggtggttaggctggctgagattttgggcgtgcggcaatggcggcatggccgcggctgaccggtccacaactcgggttcctagagagtacggagaggtagtcgtggtcaaaatggtggggcgtatccgcagacgaggtggggtggttagcggcgctgaccccggcgaagttcccggtccac

SEQ ID NO: 175401 - DNA, 328 bp, Zea Mays
actagtccaatcacatggatggtcttcaaagcaaactggatgctataagctctgtttctcaggtctaactcaaccaaaaaagcagttgaatgccgaggagtaccttcaccttatactttctactaccccactatcaatttctggtgtgggactaagcttaacaaaacagttgtgaaaccgtttgaaaatgacaactttatattttgctaaacttggaaacgatatcataatatggaaacgacatggaatggtattgaatttcccaaacctgctttcatccctacataaggaagcaattagcaactgataaccacaggttggcgatatt

SEQ ID NO: 175402 - DNA, 1749 bp, Zea Mays
gcgagggtccaccgagaagttagccatgagcaagaaaggcgaagacaacaagtagaaactgcaacattgttggtggcgagaggtgagaaacgagagggttttcccactacaaagagagtggagcaaccagtgtccgaatctaaaaggcgtttggaatcgggtataacaggcagaccagtaactatagccagtgaaaaggttcgacagagagggcgaggagatggcaatacacttagggaggaactaaatagttgcctcgtcagaatgcagaaagtcgcctttactagaagaatgtgtgggcccagtaaccgaaggcaaaggagccttaacaaagttaccgggagcaacttccgacgcaacttgagtaccttcgttgcttgccaccgatccattaatgcaatgtgccttagacctccagaggagttgtcataggttgagcacgcagcgcttattgttacaatatttttcaaagtgtccaagcaagaggcagcggtgacacatgaccgggctagtacaggtcctgatgaggtgggagcctgaaaagcaccggaagtagaatttgccctaggtaactgtagacccaatagtaggtgtcacatccagcgcagaatgcgcttgcgacttgagaacttttcatcggctacaagttagtcgaactataggtatgaagttatacgtagaaccatgccttcagtcatggtatattgttaggatatccttctctagtgacagtcatatctaccataggggtaggcatgttatggcatatcagcggacaaaagtgcccatgtcattgggtatgatacatttgatatctagagtaacaatatgtacttgataatactttatgatgcactggcacgcccacaaatggctacatagttaatgcacttacctaatagtggtcttgagtagcctgtcatctaagtcgtggtgatagtaccttcgtcaggttgtaatgtttcatgtcatatatttaaacgggagtcatatctaaagtgctagtgttatgggtttgtcaggaatagacctcaaatttggcatcccagtttttggggcagtaatgtccttggcggtgacaactacatttttttgtcttgtgggtggctttatacttagcttttgtaagagtccctttgttcccacatgaggccttcgatcctagggagctctaggcacaacttatcacattacttgaggccagaggccttagggatccgaggactaatagagggcactcgagaccttagaggtttgaggactagtagagagtctcgggcttctaagtgtttatcatgaataccctaagcccttaagggctctaacttttagatcattcatcatgagggccctagagtatgtggtcctacttagatcattctagtcgggggcacctgaaggcacaagacccaaggttttggaccattgcaaactatggttcttgaaagtaggggagtgtcgcgaactttagagtgcctcaggatgtcgagggccttgaggcctttgattgttctggtaggacatggtataaatatcttatttctttggagtgtcccgagatgaagttccctagagggttaggccccttggccaaaggcagagcaggttctcggggcatgaggccttaggagcgatggtcctagtagttaggtctcacaatcatttcttagttaggtctcacaatcatttctcataccaaggttcttgaatgtgtcctggcatcatccggaggttagccttcttcatgtg

SEQ ID NO: 175403 - DNA, 350 bp, Zea Mays
cggcctcgcacgtaatgctcctgaatgccgggaagcgggagcggctgctggtacaggtcgggagggacgatttggagaaggtggtggccgagctcatggacgaggggccagcgtgtgcggcgcggcgggcgaaggtgaaggagctcgcccacaatactgtggccgcggtgactgagggcggctcgtcggacatagacgtgaagaacatgctccgtcacgttgtggagttgtcgcgcaaggatgaagacttggttcttgatgcggcggaggttgcgatgaagagaaaggtggacatggacgactaggatggcatactcaaagtggcagtgacatctgaagtcgcttgaaat

SEQ ID NO: 175404 - DNA, 457 bp, Zea Mays
agccggaatagcacaataagtgcgcaaaaatcgaagtcttttcctaaaagactctccgtgcaaaagtcgcctaaggctacagccgaaatagcacaataagtgcgcaaaatcgaagtcttttcctaaaagactctccgtacaaaagttgcctaagggtgcagccggaatagcacaataagtgcgcaaaatcgtgcatcaatcgaagtctttcatttaaagacactccgcgcaaaagtcgcccatgggtgcagccggatcaacgaaggcgtgcagccacatcatacaaattacagttacatacactcagcgagggcatcatatactacagtggctcaaccttcgggatgatacccatctccctgtaattgaacagcattatcctcaattcctcaccctcaaaaagatttcgcagctccccttcacctatgctcgccccaatcggcgaggacaacaattc

SEQ ID NO: 175405 - DNA, 701 bp, Zea Mays
gcaagttggcttacagatccatgctatacccaaggcaaactcgtgtaaaccaacagatctactcatggcacagaataaactcaacaaatcgagaaaataccatgtaatctgtgatgatggaggggttgttgatggcgacgaggttggcatcctcgctctgtggtgcgacattggccaggagattgccgatcctaccaaatccgagcagacgcatagagaatgcacaactcagatcagacgaaaccgggccgaggaggagaaatatcatatcatgggaatacaaactaaccgcttattctggcggtaccacgcaaccgaggacatgtgagagcatgtgggggtttctctgcctgtggtcggtgacctaggtgctggtcgagtgccggtgcggccacacagggtgaggagggagccatcgacggctggtctgagcgctagcgccagatcattaccgatgaacgattggccaatcgtagacgtgggtgagcgggaggaaagaactgctgccgtcgtagctcattggctggccaggtgcggacatggattgggtgaggggatgatggcgactggtgatctcggaggggaggggaggggaggggaagggatgacgtaggattagattagggttgcaagcagctgtgggtgcgagggatgattggagggcgtatggtgattaggtcgtggtggaccaagtgagcgcg

SEQ ID NO: 175406 - DNA, 437 bp, Zea Mays
tacatgcttatttggttggagctttgaggcatatgaagccttgagagctagattgatatttgacctaggatgtgtgggtccccgaggcttaacactatttgctatgacgtgtagtttagtgagccaggttaaacagatgcctatatgacccgttggtagagtgccactatcttctgccatgtaaggtctagggtcctctggacataaacccctagttatgatgattcttctaccatggggtccgaggtcagttcccttggcatgaatccttgagtgcgccttgaaagtaccctaaggtatgtccttctctgggtgctaacgcaaccttatattgaaccatttgttatggagaaatgatgtgatttttagtagaaaatcttttgactcatttgcataagtaatttagagggatacttactggttatgatgctgatcac

SEQ ID NO: 175407 - DNA, 519 bp, Zea Mays
gtagttgttcagtttgtcaggggtgttccgtcattcttgctggcgaggtcttttcggccaatcttgttgtgatttcattgggggcattcgatgttatcttgggtatggattggttatctcagtatcgtgcagttatatcctgtttttggaagacagtgttattgcaggcgtcgttgggtagggaggtggtattcttgggaagttccccaaagttcacgttatccttgttggcgcaattgcttccggattgccggtcaaggaagttgagaatctttttctccatggtggtggagggtgaggctgcgttgcgggtgcaggacatccgggtggtgtgtgactttgccgacgtatttctagcagagcttccaggccttccactagactgtggtgcagctttcgaaatcaaactgattccgggtatgcagcctattcataaggccccgtatcggatggctccaaaggagcaggtggaattgaagcggcaattggatgatctgctggctaagggtttcattaggc

SEQ ID NO: 175408 - DNA, 794 bp, Zea Mays
ttttatccttttctagggcttcattcctcagtatgataacctctgatcgaaggttcccaaggcctatttggcagcttttgtcttcagcattcttttgtgcccttaaagcattgctcaagattaagccctacaaaaaacggggatccacacaataataaaagatacaaaaacaatctatttataagtcaaaacatctttaccttcagactattataagcgaggctgtctgtaaggtcatccttcgacattgcagataggccaagctcgagcttcggaaaccctatgttccttggcatcccttggcaaacagatatctccttgttgtccggaaggcagtacagaaagtcgtcttcatcagtgacattatacaccaaggatccctttgggtactttaattccctcgcatagtgtttagcttcggcaatccgctcttccgacaactatttacccgaagcatgtcgtatgataaaatctagctcttcaatagacgctttgggggtaggagatttaaccttcttgggtgcgccttctttttccaagatcagagcggcatccgaaggtccgtgttcagtatcctttccaacagtttcaattggtcctgattctacgggaactgagggtccaacttcagcttcaacacgagttgtaacatcttcaacggtctccttgatatttttctcactcatgttgggcacttctatagaggcaggagttggtacccttgtcgactccatgacagcgtctagtacgctggccattctcctcctctttggagttactacaggaatttttga

SEQ ID NO: 175409 - DNA, 423 bp, Zea Mays
gcactgctggttatcaattcgaagatgaacaggccgatgatgtttatcaagaagaagaattgccaaccacttttactgtcgatgagggtgttgcactcaactcactagttagagactgtaatgacgtcactccttatgagtgtgttgcaccgaaacgaaaacgaaatccaaggaacaaaaagccacattgcgagctttggatcaaagaagactccatggtcgtgattgcgatgaattttgatgtgtaatgcacaatttagttttatgtgatgtattatttgttttttattaattcacttaattttatggagctagtacatttaatgtttttctattgaacatgatgagtggtaggaaaacaaagcacactgcgaggggtttcttaatgcggctagcaggatagtccctggtgcacgttccctt

SEQ ID NO: 175410 - DNA, 404 bp, Zea Mays
ctattatgcacatgccatttttttaactagttattttattcattacatcaagccattacataacacaacacactgctaccactagctcatcacacacgagtgctacctagggtaccccccgaactctttctctaacgtgtccccaaactccttgagaaggtcatcaaggctggccagggacaggtcctcggggtcggactggttcctaggagggttctcttccttctgttcagtctaacatccttggcttttggtcttcttgcggatctttcttgcgggggcgagtttcttcagtttcttgtcgtagtccattttgagggtgcggtaagcttcacgggtattggtctcttcgccttcagctatcgagaggctctcttgaagggacgctttttcttctgaaagtt

SEQ ID NO: 175411 - DNA, 576 bp, Zea Mays
ggatgggattgagcgcgtttaaatctttaacaagtcaaaaaaattatatcccaaccttatccaatccatatctaatgacaataacggaataaggcctcagtgcttgaaaaaaaaggtaaatcttagccaatttcccatgcatccaagcaggccctgtgatgcctaggtggctagtttgcatactgaaaccttactttgagtcgcgaatatgtgataacggaagtgatattaaccctaatctttagtgcatggtacatctgtacctgagtcatctaactggggtttgtattcttggccaagaacacgctatacatgcataagaacttgtcaaaattgctacttgatagttatacgctgcccacctgtatctgtatatatgttgcacatactatgtctcttgctgattaagcatactagttcagtcaatgcactgcaatgtgcgatcattcgttaccctggtcaaattggacaaatatccaattttttggcattatttaattcgtttacttccgattctgaaacaggtctttagtcgagtgaattgcacaaaacaggtattggaagttggaatcatct

SEQ ID NO: 175412 - DNA, 489 bp, Zea Mays
ctcgcccagcctccgcgacaaccccgccactgtgctcgagccgtcccctcacccccgcctgcccgagccatcgcaatcggcgttagcgccattcttgccatcattgcgagctcgccggtgctcgccgtctcctccatccccctcccttcctcgagcgcctataaaaggacccgaccgagccccgtcttcaccacacagcttcggccacctccactgccttcttccccgagccattcgagcttgcgccgccgtgctcccttcatcgctccggtgagctccctttcccccctctagcgatcctctatccaattgaactatgccagaagctccgccacactctcacggtcacagggcgccacctccccccctctattgtggccggcaacctcaccggcggcataaccgccgtgggcacccgccatcgtgtcgcggaccggccgccataggtccccgcaggaaaaattcgccccacccccgtgacccccatcc

SEQ ID NO: 175413 - DNA, 397 bp, Zea Mays
cggagtttgaatgaattaaatacggattaaacaagtttatggatttatttctaaactaaaaatcatttttctgaaatgctttatcctttttattctctgattgaactagggttactattatgcgaaagaccaggggctaattcctatatttctccaagactcatattcaccctgcatggatggcgggttgaaactctaaatctgcaggggttctttagataaaaatcacggcgaaggggtgtcgacgatagtgggccgttggattactatcgagcggatcagattagattcaaaccccaccgaaccggtatgcagctccagccgtccgattttgatcaaacggctaggaacaccccacaccatgatctcatctgattcatccgtgggtcgatcgacg

SEQ ID NO: 175414 - DNA, 327 bp, Zea Mays
tgagttgcttgaaagtatagttcaactctgaacttgaaataattgttcatcgggcgaacttgccagatggagttgggaacatgcaaacgctagagtttctttcacttgtagttgtggactacactacctcaacaaacttattagaagagctagacatgttgaccaaattgagaactcttaggttgtattgacatatgagggtaattttgtttcttcacttggcaaactaggtagttgaaaccttcgatacttaacactcatcagtccatggtcactaaacttcctgttggaaccttggtccccaactccacatttccttcaggagtt

SEQ ID NO: 175415 - DNA, 921 bp, Zea Mays
gtcggtccagagaccccccgggtctcgaaacgccgacagcgccgaagcgtctgtcgttgcaggaccctcagcgccacctccttggagcaaggtttgctcttctgctctcgcctccacctcagcatccttccgggtcaccgagatttcgaggttgtcgaggtcctccacatcttcttcgttcatcgcctacgaagacatcacaataatgtttcaaacaacgaacacacacaacacccctcaccaaacccataacatatcggcgccagcactcggtctgccctctcccggacgacgccgcggctgtgagggtcccacatcctattataaagtgccccagcaaagcgcttcagcatgtcatcttcaatctggaacacgccacgatcgaagtcctcgttggctcggtcgaaggcctcgaaatgcctgcatcccttgcaagacaaggcattcgcagccccttcgcaagtcacgagagatgcataggacatgatacccatcacaatagacaggagcgactttagctcatcttgcagccaccctagaaagcgggtccccacctcctcccccaatttgtcgaagggggcggtttgcgtgccaaggtcacggtacgcatccacgaaaagcgtgtgcgcccggtcaaccctagcacgggtggaagattctgtcctctcgcggtggccacgcatattcttcagctccagctccaagtcagcaacacgcttgcgggcagcctaagcctccgtgcgggtgttctccgcatcctctttttcatcattaagtcggcggccgaggtcctccttttcctcctcctgcgctgtcactttctcgagaaggttctggctcttatttttggccgccgacttatccctaatcgccttagtgtgctgcgttcgaaggcgctcaatcctaccctcgagttgtttc

SEQ ID NO: 175416 - DNA, 389 bp, Zea Mays
ttctaagccaccgaggcaaggggccagcttcgacggcgcaggtttgtgtatgagcgtggtgctgatgcaacagaccacccttcgcggcggcgatttttgctcaagcatgacgaggattacgacggcttccacttctctaccatagcggcggggagctcgtttcttttatggtggcgcgtggtcctggttggatgggataaggagaagaggtcgcgggcctgggttttatagtctagggcgaggacgagcctagtcaatccattcctgaggtcagtgcggatcctggagaaccggtgaaggagttcgtgccctgctcgccgcaaggatcggagtcccgattgggatggggaggaggatagacctgtcacgcggggactacctgtcagtgg

SEQ ID NO: 175417 - DNA, 376 bp, Zea Mays
cgagcgctaactgaaggcaaatttctgggcgcccatcgcaacagctccccggagaatctggtcaacgaccggccgaatcggctttgtacctaacccataacagccgagctctcccgagatctcttcttggtcgtgcgccgtaggaatcggtcttggcatcctggggataaaacagggagagctccacaaccctggccacctccaaatgccggtaccagacagggagagattctgagggattgatggccaccttgggcttcattgccgcagataccgtgggccacgttgtgcgggagcagggaactgcttctccatggccgtgttccggtaagggagtgagagaagttgttgctgccggtgtccgctcatgcgccgc

SEQ ID NO: 175418 - DNA, 948 bp, Zea Mays
gcggtatggagtggataacgtcggggagggataacccgtacgtggcgccatctcccaagcccagccggagtcttcaccggcggccaccgtgaccagtaaattttgtcgcggtgtcgcccatgcctcaatctccctcactgtatctctttccgacgtggtaggcatgcgcttgcgatgctatccgtggccggaggtcgtttgttgggtcgccgtgactataaatcgcacggtggtccacggcgaggtgtttacctcttcaccagtgaaccgatcgcaaagccaaattcgcgctgcctctaccccctcctcccaaattgattgtgcaggataaaactagagtcccttgccaccgtatagtcccaagctccatcctcaatttcacccgagcacaccacgacgccgttttcccccaaattggtccgccgcactgcgaagaacagcccgcccgtggctagcccactatggtgagttcctatccaattcaagtgttgtttccatgcctctgcatgcttgcgaagctcacggtggcatccgtttgctctagtcgaccatggtgtggcgagaacgtgtgctcccaagctcggtgtccgccgtgatcatgggcagacggctcccagtgggtttcatatcaaattaatggttgttcctaggtctccttaggtcagggaagtctccccgctagttaacccgtgcagccatcgccggccagggctagtctgtgtgtcgtcaggggcgaacggcgagcacgccgtggcctggggtactcgtggggaagaaatagaaacctgagggcatttctgcaatgtgtcagcgacttagtacaatagtaaatgaacctatttcggtttagctgataagacgagggcccctatgcaaagttgccagagcacgcgggtgcgcgcgggcgcgcgaccctgtttcctgtgtagttaggctgtgctgggctag

SEQ ID NO: 175419 - DNA, 586 bp, Zea Mays
cccctgttcctatcaagtggtattcaaagactcaggtattaccgttaggcttaccctagtttagtttaggtttatcatcctataactctagataattaccataccaaaaaaaatttcgttgtcctatagccctgtttagccttgcaatttcgtttcagattgctttgttgaatttgtgtccgtgttcgagtcttgttgctggtttaggtcttgtcgtaatcgtagttcaaccgcttcgtcgctgttatttgtttccgccgctatcccatccacctttcccagattacaagtcgagacaccacattactcaatttgccctcgctagccgccttgtgtcaactctcgccacgctagccctagattaggttgcaagccgctttgaattgtagcccctccttgtttcatcatctggcgcttatctattgcttataccagggaggtttgtgcccctgtgctctatagtcgccgctacggttcctaccaatttgtgcccttgaaaaccataacttgaggtaccttccataaaacgggcataacttttcactcggtgctccgtttgagctcaaatttttacagcagattcctg

SEQ ID NO: 175420 - DNA, 936 bp, Zea Mays
gtgaagaatgatttaaaggcaagggaagacattaaagagatcatccaacgccctatttggtcacgcttcggccttcgaaggctgaaggtggaaattgatgccgctgtcgaagcgtgctagagggctttcagcactgtttgctccttcattggcacaagagatttgattcaagaacatatagccttcagggtatggcctcttgtggaaagctgggaaatgccgaaggaaaccaccactgattctagtgatggtggtctggtccgactaaaatataccttcagatttagggagaagttcgatgagcccaatgacgactggctgaagtgtgttgaagttactagtgatgaattacttggagcatactccaaagccgaagataatgctttgtccacagccttcggaggtcgggggaagaaaaggctgaacatggtatttgatgctattggcttcgtataccctaattaccattacccgctgcgaggacaagagaaaaagaggaagattgctgctttggttaccccagctgagcctgtgccaaaaggcaaaaaggtgaaggttctgacccaccgaccgtgttacattgaaccggtcatggtgcctaactttggcgcagggtcctctttagcagccgaagcaatgcaaactgctccgactgcacagagcgctgaagaaccaattgtgatgccgaagacgcatacatttgagccagtcgaagataaggttgataaggctgaagagctgaaggttgaagagataataaaaatgccaaagattctgagccctccgatagaggcaaatctaccgaagatgcaaaagacttctgctgcaactcctaagaggagaaggatggccaacgtactagatgcagtgctggagactacaaaggcgctgagccctgctcctgcaaagaaagtcgctccaactgaagccaaatcg

SEQ ID NO: 175421 - DNA, 686 bp, Zea Mays
atagagaccctgcactccaatataaccatggcacttgaatgtttgttcttatgataactatttgattcacttctttgattgattaaaatatttgtgggattttatccacaataaaacctagtatagtaggtacattctagcatgtaccgatatagaagcagtgtagtaatgataggtaggagtactttacccaactgagctattgtgacccaaaaagatctcaacctaaaggtcgtgtgttcaatacctaactgtctgtcttatctgcgaatttatcttaccttatgtctctaacctagatggtcaatgccaggacaggaggatgtgttgatcaaccttcgtgcatccatcgaagaagggctgtagttaatttagaactgcaaatgaatccccaaatcctccacccactaggtcgaaagccttcttcatgacccaaacctagctacttcagtagatggttaatataatggccaacatgcaagcctagctcaacaataaccaacaatacccacaccaaccaccacccagagataagcattgtgagttcatgagccacaaaccaccaaccttttctagctcccagacccagtgtaagctgatgactggatgaaatctgtggagaagatgcttaacattgctcaatgcactaacatggagaaggtgttatatgcattaggtcacctcac

SEQ ID NO: 175422 - DNA, 820 bp, Zea Mays
cccgctgctaccggttcttgcttcttgtcgttgttctagttctgatccgtctccctgttaccggcgcccatcaacggaggagacgggtacacggtcgttgggcagccagacctcgctcggcatggtggtcggcagatcacgtccttgctgggcacttgttgtaagctgtgtgcagggctggtgggcaaactggcccggcggtggcacaacatgcaacagccagagaaggcgggaggaaggaaacaaaaaggaatacaaggacctgacccacaaaactaatttcaaaattgatttactacctatatatatgtggaacagttggagatcacaattttttatgcccaaacttcagttaccaactcccaacactataatttaaggagctatttttagagaactactgaagttgctctaatggttagaacctaggtatgggagggggagggtgacagtttgaaccccagcactatgctcatttttggacttttatttcgctcgctgcgctcgttggaggagacgatacatgaagggagaaactctcttaaatatagtagagatagagatgtgttatgttttcgtaccatatgagatgttgactagacgttaactcaacttatactatcacatgaagttattgaaaaaaggatgatggcatgccacgctacaccgctaccgagcagtgtcacggtcgtggtacataggactgaacaattggttaaccgaaattttttagttcagttttttaaagttcggtttctaggaaatggaaaccgaaattatatctaaaaaaggaaaaccgcacattcagttaaccgtatat

SEQ ID NO: 175423 - DNA, 496 bp, Zea Mays
ggagccacaacaaaaatgttcgtgtccatatcctacaactaaccccgtgaactcggccaggtttactggacttgcgcgtcgacccgccctgggaccttgggtatatgggaggttctgcctcggtgcaaggaaggtcaccatggccgcgcgatgggatactccccagggcgagccgcccttggggaattcgcaccgtgctttatcgaagagagaggaggaagccacctcgtatcctcgccatcggcaagctttggagtcgggtctggggagcgcccagagaccggtgttattcgttggtcaaccagatttggcctcgaactgcaaagtgattcgccacatcgtcgtcgtcggtgagccatccttcttcctcgtatctctttcttctcttctcggagatgcaaccgaagttgggtgttgtagtagggatggggcggacatgcgtatccacggtcttgtctacggctgcgctggcatcgtctccacccttttgtccgcg

SEQ ID NO: 175424 - DNA, 525 bp, Zea Mays
cttttccatgatttcctcttcttttactagagcaaatcttctttattaaaacttgactccctttgcagctctccccgcgtttcacgacttcggcgccgatcacgagctgacgcgtgtctctcctcacgaagccatcgttgggaaccagtgttgaaaccagtgcacgcgttcactcgagtcttggctcacggacgcgaactttctagccttgccctcgacggtggccacacgaacacgacgcctagtcgcccacttcgatctcttcactgccaccatccctctgctcgtctcaccgtcgactgtgtcctatctgtgccgcagcgcagggaaagtcagctcctgctcctgctacgatgcctcgaccccgcgcctctccgcctcctccatcctcctccacgtggttgtgctccctgacacagtctcctcgtcgacggcaacaagctgccatgtccttcgccaacaagaaccgtgcgccgccgcctctcactggcaccgtcgcacgcagaccggtcacactgtcgccgg

SEQ ID NO: 175425 - DNA, 607 bp, Zea Mays
tataaatcaccccgtccacggagacagcgcgaactacggatgaacagaagtgttcctggtgatctagcgtggtctagcttaattgaacgggtcgagtagcatcaggaggacatatgggtactgaaacaggaggacaaagagcatgaacagacttggaacgagctagccacggcgaggtcactatgcgcggtgtttcggaccaatttgggggaaatcccaaattggggctctctggtgagtaattggaggtacgagtgggtggattggatgcttgaatacttagcggagccgagggtgtgctcaatttatagagcccttgagcggtggcccgtgaatttgagatcgcgcggtggcggtcggagagaaggggtgttctggcgcaagcgattggtggcatttatcgtggcgggctcaccggcgacgatcaggtgggctaagatgactcactgcggcatggttaaagcaccaaggcacgtggcgcaaggtcgcgaagtggctaactctggcgagtctatccaaagcggccgtgacacaagtgggtacggcatccggagtagaatagtggccggagttcatccacggtgcgatatttcttaccttcttgccg

SEQ ID NO: 175426 - DNA, 428 bp, Zea Mays
gtataacaatagttatcaagcaagtctaaaaatggcaccatttgaagcactttacggacgaaagtgtagaacaccgctttattggaatcagaccagagaaagtcaagtatttggtccataaattctccaagaagcagaaaggcaagtacagattattagagagaatttgaaaaaagcacagtcgagacagaaaagctatgctgacaatagaagaagagagttgatattcgaagtaggagacttcgtataccttaaagtttccccgatgagagacatgaaaagatttaaggttaagggaaaattatctcctcgctacattggcccattcaagattttggaaagaaaaggtgaagtagcgtaccagttagagctacccgatagtttgtcggatgtgcatgacgtatttcatgtgtcacaacttaagaaat

SEQ ID NO: 175427 - DNA, 534 bp, Zea Mays
agggcggccaagtgtgggaggggggaaaaggggtggcggccatgtaggggcaaaagggggaaaaggccaccactagggtttctttgcgggagaaaagaagcgacgccacagatgactctgatttagcatccatcggcccacaacccttttcccacatacacgcaccgaagatcaacctttggcaacattttttttgggatattacacttaccccccttaaaaagaatccgtcctcgaattcgtccactccaaacaaaacatccaaggtaccccatattgcaccaccattccaaaacataggtccattattggtcttaattaacacaagaacttctacctcggactaaatgtctaaggaaactacaccacctgacatcaagcatgaaccaacatgtaatgaagctcaaactaagtcatagatgcaatcaacactacgatttcacaacatcgaatttggatgcaaccatacatccgcatcaatgtcttaaaacgacactcttttatgaaggggtaatatgcactaagcacaaactt

SEQ ID NO: 175428 - DNA, 513 bp, Zea Mays
aagaggcagaggaggaagaagctttggaggaaggttcaacactcaacctaggagattgttctgcttattctgtggggaggataagggacacacaacaaggacgtgccaagtcacgatccaaaagcaaaaggagatagctgaagccgaagcatgacagaatcagccgaagtaagtcttgtatactgtttcatgttattcgtcatatatccctgagtatgtgggcaaccaacaacccacgacattagttgcttcaacaagtcaatctcaacctgcatgggctcagttactaccaccaccaccattggcacctaccttggttcataatcagtagccagaagggcatcgccaagtgcaacaacaacatgacactcgagaggagtctgaagctcgcacaatcaacaacacaggggcttgaccagaaagtttctgagttcaatgtatttttacttttctgtctttatatttcccttccaaaaagacaatataaggaggtttaaccttcgtcttgttgta

SEQ ID NO: 175429 - DNA, 513 bp, Zea Mays
agaacattagatttgtatatgatcaatcagatagaagaggctaaactactaagcagatttcaagctactacaagaccgcagagacaagattagcatccaaattacatgcaaaacttggaaacagtacatctagacaaatcatcatataggtagcctacatgaagagcaaccaccaccatctaactagcatcgaaagctagcaacacccaaatgtcagcttgggacaatagatcgcaacaggaaatagggtgtcatctgaagcaagcgacaataccttgtagtactcctcacaacctcgcaggtcgggttctcagtagcgaagggcaacgctgcttgaagtggccctgattgaagtggcagtacggccctgcttgaagtggcggcgctgcgtgcgacactgcttccgcccgcaccgagccggatgagggagaacaagctgggaatcaggtgatacctcgccggacgaggaggatgtgtcgccgctcgtcggctacagctgcagccaccgcctgc

SEQ ID NO: 175430 - DNA, 830 bp, Zea Mays
atttggaaaaatgatccaccaccaccaggattgtatcagcacgattagagcgaggaagaccctccacaaaatccatttcgaccacttgccatgacttttctggtactggaaggggttgcaataaccctgggtacttgcttctatcagacttagcctattggcacatagaacaattggccacaaattctttgactactgatttcattccagcccatgcaaagatttgcttgatcttgcgataagtaacaggaaagcccgaatgccccccaagagggctgtcatgtagtgttgacataatgttcttgtgaatacatggatcattaccaacccataccctgcctttataacgtataatgcccgagtgcaaggtgtagtgggtggaatcagactgattggtagcaagagtagccaaaagagcttgtgctttaacatcttgaacatagctgtcagcaacctgaagtagccattgaggaactgcagtagatagactgaacaaggcgaattcaacaagtggcatgcgagacaaggcatcagctgccccattttccacccctttcttgtacaccaccttatattggagacccaataacttggagaacactctctgttgccaaggagtgttgagcttttgttcagataaatgagacaaacttctgtgattagtaaagataataaattcggcatgttgtaagtattgtctccattgattgactgcaaggagaatagcaagatactccttttcataggctgaccttggttcttgggtcctaaggccttactgacaaaggccaatgggtgaccttctcgtagcagcacaacaccaataccat

SEQ ID NO: 175431 - DNA, 458 bp, Zea Mays
gcgggctcgcgcacctgccccgtctccacgccacccctggatggtgggcctgcaggcgtagccctctaacctattgcttgcttccctctctaacctccttccacgacgcacgttctagatctccccataaactcgaaaccgttcgtccctgcacaaccctctcaccctcacctccctagtgttgctcgttgcgccgtcgttcatcagacccgcgtcgccactgctcgtccgccgaggtgagctcccttcttcttctctccctaaccttcgattttgccttcttcctcgttggggtagccaatttgacgtgcctctccattcccgccgtgcgcgccgaggggccatggccgcggttccctcgtcctatcgtctgcttccttgcgtgcggcggcgcggcaccgcacccaatcccctgcgcggataggccaagccaccagcaggcgcggcacctgcgttcc

SEQ ID NO: 175432 - DNA, 467 bp, Zea Mays
gcggatatgataacaacatgatcatgagtaatagtgaactaactgagcatatcttcctataattttgccgacttatcaccgttcagttccgatgcttgaggacgcagtgcgggaaagtcgggttactgccgtggatgttgctcgaatctgttgcgtctgagctcgagttgatccgatcttgtattgatccacttccccgagcgtccctccccaggcccaggaagggatgaccttacgaaatatcgggcccagagcctttcacgaggtcttttaatcttctagtggacccagagatatctgtcccccacatagactgatgttgaggttgtgcaaactgacaagccaaagttcgaaaggccgaaggttctgttgcctgcacctacggagctatattgactcatatttatttttatttattgtgttgcaacattctgataggtcttaattttcgtgtagtgtgtaaagat

SEQ ID NO: 175433 - DNA, 1030 bp, Zea Mays
gaggtatttttgtgatatctcaatcgtgagggccggaggggagaataatgttcctcttcccgaagctgacgaagtggtggttttcagaagcttcatgaaagccaggcttcggttccccctggacaaattgttggtcgaggttctgaaaacctttgaaatttaccttcatcaacttactctcgaagccatcattaaagtggagatctttatatgggccatgaggagccaaggactggaactagatgcaatatgcttttgcaacatccatgagttatcttatgagacgaaggctaccgggaaggagcagtattacaacaactttggttgttacagtttcgtgcctcagtctgagaagatatacccagttcccacatttcagaagagatgactaggctcctggatgcaggaatggttttacgtgaagaatgacctaagtcaaagggaggatgtaaaagggattattcaacgccctatatggtctcgcttcggcattaggaggtcagccactgcccttgggaatgatatacaaacatgtcaggtggctttcaatacagtgtgtacttacataggcacaagagacttagtgcaagagcacattgcttatagagtgtggccacttgcagatgggtgggaaatgtcgaaggagactgctgctggctctagccaaggtgatttagtctacctgaagtataccatcaggtacaggagccaatttgatgaaccgaatgaagaccggctaaatgtcatagaagcgactagtgacgagctgcttggagcatattccaaggtcgaagatgaagccatgacaactgccttcggggctcacggcaaaaaaagattaaatagagtgttcgatgttatcgggtttgtgtacccggaatactattatccctcacggaaacaagggaaaaagaggaaagctactacttcggcaactgctggtacgtcgaggtcaaaaaaggttaaagttttgacacatcggcccagacgcattgaaacggccgatgtgccgaagctaattgagagggcc

SEQ ID NO: 175434 - DNA, 482 bp, Zea Mays
acacattcaagtcaagtcaccaagatttgtccctacaattgtacaaccgaggagtccaccctagtagtggttgttctagtacacgttgcgaagcactgactagtatgccattcagtcacgatctgtcctggaaaatcctgacgaaagctacgaacattgaaagagcaccacttcgtccaaagcttggtaagttgttcgaccgtccagaaaatgtgtcgaggtaggtggtctacaatgcccaaagcagccgattcgcccccaaaaaaggacagcggccgggccgagtccacggcggcggctggcgagtgacgaatagtcaagctctgaccaagccaaacaaccgcattgccagtcgatccggtcagcaccacccgcaggaaccagccccagccagcgcaagctaacccacagcgccagcaccggaaaccggttcttacgtaaagatcgaagctttacacccaaaccagcgcgctccaaatcgc

SEQ ID NO: 175435 - DNA, 1334 bp, Zea Mays
gcctcggtttgatcgtcagttaaggcacagctgaaagggtcaaacacttccggcccaatttgccagcccattgattgcgcaatggccgcacggccgttccagttcctcctcccgttccacctgaccagctccggctcctcttctatttatacctcgcaaccccgaaaccctaaagcccgcactcgccgccgccatctgcatctacctcctcgtcatgtttggtttcagagatccgccactttcctctgcgttttttttcgggatccttttgtctttccatggtagggtgcgatgacgaggtacacacaaccctgatcaatcgcctccgatggcgatctgatgttcaccttttacctttggttcgtattcgctgagcatccgatcttcttcatctatcgaggccagcattttttgtttctttttttttcttgctcggtttgctttggatcgagggacctggggatccgccgcccttcttcgtgcggcgtcatccagtttttacccctcgaatacggcttgcaggcgcgtcctagccatctcgctctctgcataatcctctgcgagacccgggctcgtatgccacattcgtcgttgtcaaactaaacaaaaaaaataggcttttgtcgcgaagatcccagcagagaggtgcgctgatgcctccctaacaatcataatcttcgcagagaaacgctcatgatccgtggtttcgtggatgtgtgatttggatttttgttccattacatctgtttccacggcgacattttcatgattactgcagcgaactgaacgagggacctatggatggactgctctttgtccgtgttgtgccgtccaagtttgccttcggatagtaaaaccagcaatctggtcacgagatctcgcaagccttttcatgtttgtgggaatggtgtgccaatttgccaaattttgggtttctatcgttatcttcataggtcgtaattttgccaggatatagcgccggaaccccatactgaggtcgtcgttattgcagtcataagcgacgatgaaactttgaacagaccagaatgttcttgcagtcacaagtggttgtctaaatttggatattgaacagaattacttccagttgaacctaccgcttcaacaattggcatacttgcctgagtggctaacgatccatgcaatactgcactattattaattggagcccgagacaccacctcaaatttcataacgtcgctataaaaacaaatattagttttcacaataatgaagactataaaatacttttaatgcctagttttattattctaaaaaatagtttaaaacaatctctaagtacatatataagtcac

SEQ ID NO: 175436 - DNA, 488 bp, Zea Mays
aaaatcctcgccgccggtgagctggactccactccgaggactcccgtcgtactttcccccttgcccggcagccgaagcggattaactcgccggagactgccgcttcccggctgtgcgccgcgtgtccaagcttttccaccgcaccgccgcgacttaccctcgctctccgtggctcgccggagtaattgccacgactgtggacacgaatccaccgcgcccgtggtcttctccacctccggccgccgcgcgtcctctccaaattcactggccaccgcctcccctcgctataaattgagtgtccccgccactccgtaggatagttacgcatcagttgcaccaaaccttgcactggattatccaccagtgactgagaattgctcgttttccccaatcacggtttccgccaccgtagaactcgacctcgccgtggtcagcccgattcaggtccaatctcaccctcgatttccttgtttcaacatccttgcttg

SEQ ID NO: 175437 - DNA, 810 bp, Zea Mays
aaaaaaccgaccattcttgcgagatgaaaaaccagtcaagtctctgtaggaggggctccctttgcctgttcgaccaggtaaaggaaagcccatggagggggatttccagcaggtcgagcgcactaatggcctcattaaatttcaacatcagattaatatccccccccccccgcaacgtttctgtttttaggcctacgaatgaggttgaagtccccaacaatcagccatagcttttccgagggcatgttgatattagagaaccagttaagaaatttgattttcccatgcggagtacagggcgcgtaaatattagtgacaatccaggattcattggacgaattagcaaagaattcaaccgaaagggcataatcattctgaaaaatcacagtgcccaccaacttagagctattccaaacagtaatgaagccccctgaatttcccaccgagggaacaaaagcgaacgtatccaaagaattgggacagaattttctaaggtcggccctgtcaaaaaattccttcttagtctcctgcaagcaaacaatatcacatctggagtccctaatcgcgcaacgagtaccattccctttaacgaccgagttgatccctcgaacattaaaacttaaaacggaccaatcagaaaaagtagcagagttgtaactattcatcgtgggaatgatctggtttgtcaacgaaaagaaacccaaacccatcagcagggtgggtgaaatagtgtttgttagaaccaaacatagcgcagccagaaatcacaaagtttgttgccacaacaactagccaaaagcgccagggccg

SEQ ID NO: 175438 - DNA, 435 bp, Zea Mays
catcttcctgaagaacagcaagaacagaaggcctccttccctcaaacacacaggcatttcggtgtttccaaatcacccaagcaaccaaaacaatgatagaattgagtccttttctatgctccttaagaactgtcctaacagagcttctcttcttatacattcaagaagaaaacaaagaatacgatcttgaaacactagtccaaagaatgatattcagattatgccactcaagagtttaaatttcaagtcttgaaataccatgtgtggagctggacgtgatcttggcgtggtcagggaggataagagtcatctcgcctggaaaaggtaatctgatttccattgaagtgaatggaggtgtgagtgtacaccccctcaaatctgggtacctatttcttcttatttacaatgccagctagcacagtgccggaaatctcc

SEQ ID NO: 175439 - DNA, 545 bp, Zea Mays
aggctttttagcctcatgtaaattgtaaagcctgtatagctgttgtaataaagaagtaacccccacatcaacctccaccttgtaccaaaaataaggaaataaaaatgtgatgcgtttcctttaccattacttaccctaggatttttaatctcgggacgagattcttttatggggggaaggatgtaacacccctggtgttactgtaactaaaacttgagcatggcatcatagcattggcattgcatatgtttgacacacctagagtgcattcactaggcaaaaatttcaaacaagttgtattgttttgaatgttttgcaactagaaccctggttaatagacttaaccctaaatagtagttaaaggggtgcaacttaacccaagtcaagaaaaccaaaagactttagggtaaaagtcataaaatgaccctaagaataaacttgaatcacttttatacccctgggatgccaagaaaccctaattgaaaccctgggaaaccctaaaaccaaaccctaagggcttatatgcaaaattagtccacttttgg

SEQ ID NO: 175440 - DNA, 766 bp, Zea Mays
ggggccaccgctccctaggcctgggttgccctcgaggcccagttcattgacaaccaggaagcccgtgctctccacctcgacgccgcttttcacctgctctcctagggggaccactccattggagtactacgtcggataaagggcatgggggactttcttgatgaccttggcgagcccgtccccgaccgcactctcgtcctcaaccttttgcatggtcttagtcggtgctatgacctcctgaaggctgtcatcaagtggacaatgtcgttcccccttcgacgacgtctgtaacgagctacttctcgagtagctcaccatggacgtcgagttcccggcgcctgcaacggtgctctacgacgcgtcctccgtcggcctgtcccctcgcccttcgacgatgggggggggttgcacgccctcttgccgcccccactactcctagagttcctcgtcaggctcccaactccgacgggggtcgtcggccccacgagggcggccgcgggggcgatggccccaccagtcgtggcggcagtcccatgtggtcatccttctacaacccctggaccgtgatcatcactatgcggttgagccctaccatgggtgcttcctcgccacgccccccgcaatcggctctactagttacgccctcctatggtgtcccaccgccttcggcaccccctctaccatactcgttgccggcttcgcctctcctccctctgccgggacccctgcctcggccccttggtccccgttagctggaggttgggac

SEQ ID NO: 175441 - DNA, 601 bp, Zea Mays
aagagagataaataaggtcctacattaatagtgtcggatacctaggaacatggtacccaaaataaggcccataaagccttcttgtcgattaaaatctccttgctaagtaagatcgtgaggcggagcaactgacctggtccccgctgagcaagtcctcatggcaaggcgaccgactaggtccctaccgagcaagattgtgaggcggagcggccgaccaggtccctaccgagaaagtccgcgaggcggagctaccgatcaggcccctgccaagaaattccttgatgtagaacgaccacctaggtcccaaccaagaaagagaagcgagctagaaacctaagtcaagtgtcgcaaagtccacaccaactaggacaagacataacatcccgggccatggtcagtcatccgaacggtaggtcgtaggcacgccgagtgtccgctatcaacatgactgcacctccctgagcacggccccatatgcgctcccacaatcccgagggaccggatgaccctattcataaagtacctcaacatcgaagcttctacagtaacctgaataccgggtagtgcgcggcagatacaccataccaggtgtatgcctaag

SEQ ID NO: 175442 - DNA, 574 bp, Zea Mays
acagaccatcagaaacctttagaaggtaaacacccagagcacaggggagggcacgtgaattgagtagtaaacaaacaccagcagcagccggtgttattagcttgtgagttctggccaccctgcatcagtgcagtacaaaagaacaagctttcacaggcgctagaaacactgtacttattaacaagggataaagttcagaacttggggttaccgaggaggaagaaatgttctcactcacctgcaccacacctcctcaacagagcactgagcacagcagcaagcaattaacaattcaggatcagccagtggcaataatgagtacatcaactagggataaacatacccaaatgatgccatcagctgggctccatccatgccatcttccttccatcttctttcttcccccacacctggattgacaattgctaatattcctttctgatctgaaactctaagaaccacatttttgcagaccacactcgctgattttgcttgttaccaatcgagcacgaatctcaaagacgaatagacggtatggcacagtaggatctacggctagagaacagaagatggt

SEQ ID NO: 175443 - DNA, 429 bp, Zea Mays
gttcaagaggtggacgagacgtctcttttaacaaaactgggcgacgacacttaaattgattaagtgcggtgcaccgatgttataggtcattgtctcgttgttttctgatgaccaacaaggacaaggaaaaggtggccagtggcctgccagatcggaatttgctgtttactcttttgatctgacgaaatcgaatcagaataaaagaaagctctgcactgttcatcgagagcatccatagcaagaggaagcggctgaggttggctcgggtgagcaacatggcggagaagctgacgccggaacaggtggacgagtgcaagaaaatcttcgacctgttcgacactgacgacgacggcaagtcgccatcccatcgaactcctatccaccgcgcgcgcactccgagcctcactcaactcatatgtgcgtgcgtgc

SEQ ID NO: 175444 - DNA, 514 bp, Zea Mays
tgtgatggcggtaacgtacacctgcaggaactccgacgggtttgatgttccgtcgtatttttccggcaggtgtggccagaacttgggtggccaggatgccgcacggagatgatccgccagagcggcgtagcctagttcggccaaggggacacccgtctgggatcgggtgcccattggtgtctgcggtgcaaccgcagcgaagtcttgatcgaggtcgcgcccattgatgttttggcggcgctcgcgcgccctttccaaaggtacccgggcatcttctcccgcacacctacggttgagttctgcccagagatcattggtctgcgtgcccctcactgagggcgagcgcaccgatgctgatgcctcgtgttggcgccgtgatgaccgcgccttcgaccgggtcgaggtagaatgtgccatactgagcagctggtcgacgtcgtcccgccactgcttcatggctccttgtgatgccgtggagcttggagggtgtcgcaataactccctggctgctgac

SEQ ID NO: 175445 - DNA, 964 bp, Zea Mays
tggcagtcttgcagaagggcccctgaggttttcattatctgggaatgggtccttccactgtttacacagtcactgacactttgcaaaaatgtccctagacttctgtctcttctccaaacacctccctggtcacggcacgctcgccgttcatcccggacgaggtctgtaccggctatggccggcgataactgcccggactaaccatcggggaggcttcactgacctaagatggccccggaacacacattaatttgacccgaacgcactgagaatggcatgtccacatgcacggcggacaccgagcttgggagcacatgttcccgccaaaccatggtcgattagagcgaacggacgccaccatgagctttgcaagcacgcagaggcatggaaacaacactttaattggataggaactcactagagtggcccagccacgggcgggctgttctttgcgatgcggtggaccaatttggggggaaacggcgtcgcggtggctctggttgaaattggggttggggattgaggctactcggccgtaagaagctgtgctttcaccgtgcgcaaatgatttgggagaaggtggagggggcggtgcgaatttgacttcgatctagtcactgtgtttgcgatgatcatccttcgccgtgaacccaatggctatttatagccgtggcggtccggcgatcacctcgcggctgaggatagtatcgcaatcgcatgtcgaccacgtcggtagaaggtacagtgagggagaactatggcatgagcgccaccgcggtggaattcactgagtcacggcggccgccgatgagtaactccggctgggccagggagatggcgccacgtacgggttatccctccccaacgttatccacaccataccgcccacgaatcaggacggcggtggaactaattttggcgcagagaggtcaccggcggtgagcaagccgcgctggcaacctga

SEQ ID NO: 175446 - DNA, 880 bp, Zea Mays
gtgccaccgtcatcatagggaacaagagcaatgcaactggcgtccccatgaacatgacggcgacagtgagtgagtaactctagcgatcgatatttcactgcacttgagttgtcatgcatgcatactttaaatcaaaactattaatttgttgctgctgctgcagatgccttgggtcatggcttcatagcatagaacttgacaatcagaaacatggcaaggccagaaaggaggtaggacgtggcgctaaggtcaaattcgaacaagtcagtcatctaccggtgcagcatggaaggtcatgaggacaccttgtacgcggagaacgggatccagttccacatgcagaccttgatctagggtaccatggacttaatttgtgtttggcaatgcccaggccatgttccagagctactcgctgctggtgcgctgcccaccgaaaggcaagcacaatgtgctgacggcgtagggctgcaataacaccagccgcgagtccgacttctcgttccacatgtgcaccgtggaagcagcatcgggcgtggacctcgatggcgtggagacctaccttggccacccctataggaacttctcccacgtcgccttcatcaagaagtctctcaaccgcgtggtcagccccaatggctgggtagtgtggaacatgaacaaggtggtcgaggataccacctggaccgtcgtctacctggaatacggcaacgatagcgccgttgccgacacgtccaaccacgtcaagtggctgggcttccgcgtcctgaacgccatcgctgagacagccatgtacacgacggacacgttcatcaacgcgagcaagtgggtccctgaggctatccagtacgaccacaccctcagcacaacgccgccgccgcgc

SEQ ID NO: 175447 - DNA, 2129 bp, Zea Mays
aaaggaatcttcatctatcagtttaccatataatccacaactcatcctacactaaagcatcaagttcagtaaatacacattagtagagttttaagcaaacagcaattttctaaaattcagataggatgatgtatccaggcattgttctccaatagctctggtagcaaaaaaaaagtcaatatcccaaaatcaaatactttaatagccacattttaactataaattcataataattatatgttcattttctttggtccttgggagcatttgcattttttataaaactaacatatagcatgtgctaatactatgatcccgcggaggggatgggtcgacagcgacggcggcggtgcagagggaggggttggcggcggcgcgagtgagggggaggaggcggcgagggagggagagggatgatacaaataataatgtccattggatttgagtaagggagagggagtcatccaacgatctgaaccgttggttttaatggtgtgttaagtctgtgtgcaatttgtttcatggaattagtggaggttatgggtgggggtgatttggttggctgggttttgtaaagtttaaactggtggattatacaaacagacttcatatatctataaacatgtacgactatatccgatgaaagtaaagtcaggttgcttcaaaaacagaacctgtatcagactccagctactctactcatcctatagctaatgcattactaacattattttcaaactcctactctgctgagtatacgcatacaggcatacaaaatcagcgcacagaaaattcaaaggtgtggaacccggcacaaccaccaccatcaccattaacccactcttttaaagaactaattgaaaatattcttgaattgtagtaacagatttttcatgtacaacttttaagtgcagtagaaacaagttgacaagttagttgcagatcaaacatatttgaatttgaaactacacaaaacaaagatgttggccataaaattgaagtgatggtgaccaaaaaggaagtgacaatcagatagcacatacaaatgagaccgtattatattgttatacagagataaggaaaacaaaatagatcacctgaaatttcatagacagtatcgggacctttttgaagacatcccgtaggctacgtcgcacctctatattgatgccgcgaccatcacgaatcatacactttcccagagttccatttaccccaaccgccatgttgattccatttatctatttgcgtgaatgaaaatgtcatgtaagcgaaatgcaatggatataatcagaagattgatatcgcatcccattgcttacttctgcatggagaacatcaagccttacagcagaagggtcagtctctttacctccatgccaactaaactcattccttactttcaattgaccaagatcaaactgtatataactgcaggaagatatcagcatcaatgtcattttttccacaacatcattctgtgacacttaatttcaaattattaacgacagcaagactagaaaactcaaactcagtacaaacacattagtctatctaacaaccaagatatttgatatatgtgggaaaccctaacccggatcatgttggtagtggtgcgaatgatgcgttcggcccagcctttctagatgtgtaagggcacgaaagacgcaactgaatgccgtgagagagaaaggagtgagaggcagagttgtgaactcgcggccattgtcacactgaagagcacgaaacgggcgacgtagctaggtggagatctaggcaaagaagtgggtgagggtggcgaacgtgtcgaacttcaaccgaagcggaaaagtccaaagaaaatgagagaaatcatccaaaatcaccaagtagtatttatatccagaaagacttggtgcgaagatgtctagagatcacaatgaacaagatcaaaaacatgttcagcctaagaagaggtagtaaaagggagacgagtatggtgacctagctaacaagcatgacacagaccctcaaaatgtcccctactacaacaaatgtttgaactactggtgagcttggtcatgacgtcgggtcctggatggccgagacgacgatgccaagtggtggaggaggtggtgaagaccaggaca

SEQ ID NO: 175448 - DNA, 462 bp, Zea Mays
cttcgccggcgtccaagggcagcaccggattggcctccgcagcctcgggcggcgcgtcgaccagacttccaaagtcctcaacgtcctcggcacgctccatctgcagcaacaacacattcactcagcaaaaactatacatacccacacgcaaccaaccacacaaaaataataacctttacctgctccctcgcccggtcagattgctccctgacagcctcccgaccatgtgccccccacatcctatcaaaaagggcccccgctgactgcttcacaatggggtcttcggccttgaagatctcgcgctcaaagctctcgtctgcctggtcgaaaacctcatagtgtctgcagccctcacgggacaacgcattcatggccccctcgtaggtgacgagggaggcaaaggacatgaaaccttccatgatggttgggagtaccagcaactcctcctgcaaccattcgagg

SEQ ID NO: 175449 - DNA, 384 bp, Zea Mays
caaggatgcaggagcgttggcggggtaattaccagaattcgaatggagttctgtcctgtccgcggcgcacggcggaagagcttcgacgacgagggattccgagagctctggccaccaatccatggcagggaggacaccgggtcaatccccgacgcacggcgagacttacagacccgaattcgtgggcgcgacggcggtgaacacgaaaccgggtcggcggcggcgaaggtctctctctccctctgtgatggtggctacgtcgaacttgcagaggggtagctgggtcgcgaaggtaggaggataaggagggggaggcgagctcggtcgtgctccctttaaggtcacggtcgtggtcaagcgcacaacggactgcgcgcggtctcc

SEQ ID NO: 175450 - DNA, 508 bp, Zea Mays
tctgttataccaatttcacttacctgcgctaggtattgtcctacatgctcgtaggtagtttttgaatcatccccagaaaatttcacaaagtccgggattctaaaacctcgaggatatggcacagtgtcaaaaaattcaggatagggcttcctatatgacctagtatgccctttgggctcaaaaccaaattccctgagagtccttgccacctgttctctaacaccctcagatctctcaccctcagctgttgtatgtgtgactcccgatgctgataacaacgctctctgctctccaatcctgtaatcatttggaacaaatccttgtgggatcttgttccctataggtggaatagatggcccgtatgccatactctgataatatggctgctgtaggttaaagttcattactgaatccccactcctctcattaacagtttggtttacatcattatgcgcaactgctctgttataactaggcgcatatgaaagattttctacacgcttaccct

SEQ ID NO: 175451 - DNA, 1085 bp, Zea Mays
gactttggcaggatcctcagcaatcacaacatcgatcatagagacaaaatcagtgtcgacaattgtagtcttacggttatataactctcccatctcaacatagtttatggcaatttcttcaactgaaacatctggttcattatgatttcccaagttatttgaaaccggttgtttcaaagtccttgtgcttttatttgtgcgcacatttgcactaggacgttcaccttcaaggtgtgtcactactggaacatctgaaaggggcgtgttgcattctcttcagtaacttgatggtgcaggcgtccccgcttggttggtactgaatcatccggttttctcccccttttcctaggatggggagtacgagtagagtccataccctacagagatatctccactctctcaggtgcatttgccgcaggaatatgcgacttcgacactcctcttatatcagtaaaggcatttggcagagtatttgctaagtttcgcaggtgtattattcgttgaacttcaagtttggtttctctagtgcatgggtcaagcgattggatgctactagcacttcattctatttctcggcattctttattattaaggtacaatcctccccctaatgccgggaaatgctcttcgtcgaagatgctatcagcgtaccaagccgtgaacagatccccagttctaggctctaaatatttgattatggacagaaattcataaccaacaaagatccccaacttccagtgaggtcccatagatgtacgctcgggtggtgatatcggcacgtatacaacacaaccgaattttcgcagatgggaaaccactggttgttgaccacgcgttaactggtggggagaagcagagtggtaagcagatggtctatattggattaaggtcgcagcgtgcaaaactgcatgtccccaacaactggtcgggagtttgctatcttgtagaagtggcatggctatgaattttattcttttaattaaggactcggcaagtccattctgtgtatggacatatggtacaaaatgctctacatttatgcctagagcaagacaatagtcattaaaggcctttgaggtaaactc

SEQ ID NO: 175452 - DNA, 416 bp, Zea Mays
aactataaggtgctgaaggaagcccgcaagcaaagtggtgttggatggaatgaggtcatgggtatgatcattgcggaaccaccaatatgggcaaatataattatcgtaagtttttgacttaaccatgattatttcatttaactaatcattcttatttacttttgattttggttacaatctaattgtagtatattttttatataatgaatagagtaatccaaaggtcaagaaatttcagtcaaggccattccctttgtataatcagttgtcagcactctatgatggcagttgtgccaccggtgatctcaattttacatcaactcaacaacatacatcatcccgacaacaattacatattcaagctgaagctgaagctatgagctatttcaggattgatgatgacctcggggttgacc

SEQ ID NO: 175453 - DNA, 317 bp, Zea Mays
gctgtgagaagccaagggctagaactgagcgtgaagattttttgcagtatgcacgaactgttgtacgaaacgaaggccactggcaaagagcagtatcacaacaacttcggttgttatggattcattgctcgttctaatgcaagctacccagttccaacatttcagaaaaggtggcctaggtcctggatggaggaatggttttttgttaagaataatttgattgaaagggaggacataaaggggatcatccaacgctccgtctggtctcgcttcggcctttgaaggccgaccgtggcgattcaaaataatgccgaagc

SEQ ID NO: 175454 - DNA, 319 bp, Zea Mays
gttacacaatctggtttacctgaccctggctaatcattagtggggcaagcaattgatatagatgtgaaaatcccagtcactaaccacgcatactcataagattgcatcgccctgcacccacatagcacagatcgccatatatgttggatgaatacatttctctggttactgactgcgattttcacaactatatcaaactggttagcttctcatgatggaatgcaaaaaatatctctgtctcattctttggttattgctgctttggtccgtacaaccagttagctccatagtttggtaatgttgttttggtctataaaag

SEQ ID NO: 175455 - DNA, 640 bp, Zea Mays
tgatgctaattccataattgatgccatgatgacctgtatggaagatgaagaagaaacaatggtaccttggctaattactaattagtaatattcattgtcttctataatattcattcttttgattttatttttttaggagagcgatgaatccactgtggttgattaatgtggtgctgcctcagctagtgtgttgtggtgttgttgttgtggcgttgtgttgttgtgggcctaaggcgttgtgctgcctctgccggtgacctattttctagtgacctgttgcatgtggctggttgatggggtgctggtagcctactagtgacctgttgcatgtggatggtagcctgctagtgaactatattgttgttgcatgatgacaatgataattcttttatgtattatatggtttgtgagagtgtgagactatgcttcttttatgttggacgcctagatggtgaatcagtgatgtaatgattaaacctctaaggtatttgtgagactgattctttttatgctagagattatgctggacgactggacgcctggtttgtaagatcatgttctattttttagtgtctatgtattccccgtagggccccaaacggggatcggggatccgtggggacaaggatggggatggata

SEQ ID NO: 175456 - DNA, 765 bp, Zea Mays
cttgcctagttgtgatggccatcggctcggtgtgggtagagtcggatgattccccagccaacaggctaagcacaacatctatctcagcgtcatcagtgctggctggcatctcaaagtgagtctacctctcatcctcgggaagactccgaagtggagcaatcaaagcctcaatatcctcaggagagggtcacactctatgacccaggctaccgtcacgagcaggagggttggatacaaactcagagaatggcctaagtggcagcaggttccatccaaaataggccacaggagcaccagcatttgaaaccctgcccctcaggatcatgtccaggcgactcagcaaatcttcagtaggaatccttctgttcgtgacccgtgtagaatcgttgacaccgctatataagtaagcggggtaaaccctgtcctttaagggttgaatgttcttgaatacaaagtcaacaactacagcttcagcagttagacccccatccttcagcgagtagatcttggcaagcaacactttggcctctgttatctccggagaggtcggagattctatccagctaggtgtgcgaacatctggctgcctccccgaccgaggggggagagatttgcagtggttctccacaatgaaccactcaaggcgccaccccttgatactgtccttgagaagaatgtcaagatactctgctttcctcccccggcgaagctctagacttgcgccgccaacaagctggtgctgtcccccagccatcccgggccgac

SEQ ID NO: 175457 - DNA, 963 bp, Zea Mays
cccttgagcgctacaaagcgtgtttggtccttcgcggatttactcggcgccctggcatcgatttcgacgagactttcaaccctgttgtgaagcctgccaccatccgcaccgtccttagcttggctcttcaccaggactggccgattcattagttggatgtcaacaatgtgttcctccacggtaccttgattgagacagtctactgcaccctgccagctggttttattgaccctgtacatccagatcatgtctgtcgcctcaacaaatcactctatggattgaagtaggctcctcgagcatggtacaactgttttgcgtctcacatccggtctatggggttcattgaggccaagacagatacttcgctcttcatctaccagcatggtcctgatagtgcctacttgcttctctacgtggatgacatcatcttgactgcctccacaacagctctgcttcgccagatcatcacttcactatagcagtcttttccgatgaaagaccttggtccacttcagcattttctggggattaccgtgactcgttccgccaccggcatgttgctctctcagcgccagtacacgcttaagatattggagcgcgccggcatgactagctacaagacctgcgccaccccagcggatacacaaacaaagttgtcttcttctagtgaacttgtgtctgatcccaccctctaccgcaatctggttggtgctcttcagtacttgactttcactcgtcccgatatcacctacgttgttcagtaggtgtgcctccacatgcatgatcctcgggaaccacatcttgctgctgcgaagcgcatccttcgctatctccaggggatgcctgacctcgagctattcattgaccgcgcctcctcaccaaccaccctcaccatctatactgacgccgactaggctggttgtcctaagactcgtcgctccacctcaggctttgctgcctttc

SEQ ID NO: 175458 - DNA, 742 bp, Zea Mays
gtggtcattgtcttgtgtcctgggggagagtttgtcgtcctctcaggcttggtggcctgggcatctccagcctgcccgagatgtgttgggcccttcatatgagatggctgtggttgcacaaaactgatccatctcgtccctaggcgcatctcccttttcatgtgccgaataagattcgggctttcttctccactgttctagtttcagaagttggcaatggtgccaacacccttttctggactgataaatggatctcagggtagagaatttgtgatatcgctccaaggatttttcagtgtattcccaagaggaacacaaaaagaactgtgcaagaggctctcctaaatagaagatggatctcagatattaagggggccctctcggtgggagttttggtggattaccttcagatttggaaccttatgtctgagatagtgctgcagcctactattgaagacaaacatgttttcagtattgccccagacggtatctattcagcaaaagtggcttacgaaggattcttcatgggatctaccttttccgccattattccagggtgtggaggacttgggccccgcctaaatgtagattttttctttggcttgttgcgcacaacaggtgctggaccgctgacagattagctagaagagggctggatcaccctccgatatgccctctgtgtgatcaagaggaggacttgggccccgcctaaagggctttcctatctgtctccccccttctt

SEQ ID NO: 175459 - DNA, 554 bp, Zea Mays
gttcaatccacaaaatattacaaacatttgtccacaaacataagacatagttcaccaaatgcataaggacataaagttcaaattgtccacaaccataagacatagttcaccaaacgcataaggacataaagttcaattgtaaacatgcatatgcaaagtctcaatgtccacatgagctccccctgaatatgacatcccccaacttctcttctcttctctcccccttttatcaattgccacaaataagggatctcattgatcaccaggtggagggtacatgctgtagtaatgagtgctgaaggtgtcgaagagagaggagaactgcccgaagtcggtctggagctgttgttgactctgacggatatcctaaatgctttcattggtggataggttgtcaaattgactggacaaggctcccatattatcctgaaaactctgttgcatgttgttcattctagccataagaggaccatgaatagtttcttggatgtgagagcgaaatttagaaagctcagagttcagcgcatcaagattatcatcaaagtgagactgca

SEQ ID NO: 175460 - DNA, 276 bp, Zea Mays
attgaagtcataggtcgaaggcaagaaaataagaaagcctcggaactcatggttgagcaagacaacgtttatgaagagattgaatagatcgaatccaaccaaaggtagatcgagatttagaaacaaaagacgcttcaagtcgcttagctttggcagcagatagatgaggcctctaacgagattcattgcataagatgggatgaagatgaacatatgtaaagcttgagataccataacacaagaacccttcatctagaggaagaaaaatgtgtcaac

SEQ ID NO: 175461 - DNA, 656 bp, Zea Mays
cggtatcccacgatctaggccgtgcaatcaggatcagacggaggggatcagaccggggaggggtgaacggctgcgggcggcgctgctcctctccacagcggtgaggtcgccagagttgaggcaggagcgagttagggtggctccggggtcgtcggagttgggcagagagggagagaacgccacggcgaactcaatggcggggaagaggccacgaatccgagggcagagaggggagaacggcggagagaaggtctcgggcaggccggagtaactccggtgaggcatttcagccacggggaggtggcttaaggcgcgctaaggcctgggctagcttcagcagaggcagaggcaccttagggactaacgccggggaactagagcaggctaaatcggccggccaccgcgcgagcatggcggtccgccgcggccgagcaccggtgaagccgaaattggccgagcatagagcgcaatagggaaaattgggcatggggacaggtgtctcacctcggggcggagctcggggaggcttggcgcggtctccggcgacctggatggtcgagaacgcgggcgtgggtctcctgcggctacgggcgacgtgggcagagcgcgagagagggcggagctgagcaaaatgaggcgggggtgagcgcggggca

SEQ ID NO: 175462 - DNA, 502 bp, Zea Mays
ctgacgcctcttgtatggtcaaatcaggtggaggcacctcagtagatgtcgtaggctgcttagggggtggtgcatggaatccctcaggtatcatgtgttgctcgtcggtcatagtagcgtgtacaatagcggcaggctccctatgctgatcatcggccatagtagcaggcactatagcaacttggcgcacatgcccatgtgaatggtcagagagtggttctccctccccttgcggcatgcttgcaacattcggtagagatgtgtcattttggtgaacagtacctcctacatattgatgatgttgtactgcaatattctcattaggcatgttagtatcaacagggaaaaagtcagggacaacaggatcacatctatcagcactcgtttttgtcgtaaaggatggcagcaaaagaacttcagatcgtaatttggcacaagcattagaatggagagcatagatggggaaacgaatctcatcaaatgtacatctctggagatgtaa

SEQ ID NO: 175463 - DNA, 929 bp, Zea Mays
gttgcatttaagtgggaggcccttgttagtagtgatcaggatttggttgaggagtttattgtctatagtgcttggcctctcagccatggatggtctgttgggcagattatgcgaaggtctatgccgtcgaaagagggcatggaggtgactagtcatgtcttcgccatcgagttgggtggtagagatggtccaacattcgttggtgaagttgaaactgaagcatgtaaagttattaggaaatatgtgagaaaaacaaagctatcgaagagcatggacattcagggatgcaatgtcctgatcaatcgggtgttcgagctgaatcatttgccatatgggctgtaccttgaagacactgcgaaagatatagaggagactttgaataaagggaaaatataaaaaggcgaagtctatgaagggtggggagaaggtcgagcctttgaagcgaaaagctgggtcgctagaatcaggaaagaagtcacaagttcggactagcggatcgacgtctttgctaggggaacggtgcctgctaccatggattttgtcgaagcgttggctactacctatgcaaagttgggccaggttatgacggaggccaagctcaagagtgcctcggcatgggatacagaagtaactaggggtgagcggcctcagggtgaatgcgttcctagggccgcaagcaaagacaattacacatctaggctagcacaatcttttaatgtgttctcttatggtagtaacattgaagatgttgtgtcagctgccatggagaaatcttggaaggttgtggcaaagaagaggatggcctcttcgcgtctcgtggacctgatgaagttggttcatgagaagttggcgaagacagaagcatccatcaagacaaaggcatcggtggagtcttcgcgcgtggcttctttgtgcgtagccccaccgag

SEQ ID NO: 175464 - DNA, 752 bp, Zea Mays
tccttggtattgaaaggcttttggtaacaagcttcatccacaactttttgttctgagtcaatggattggaatccgtcaaccccagcttcatttgcttcttgaagttttattcagaaatcagaattgagtggatgctaagatcaaattaaaataaattgacgtggctttaaacatgtattattgccactgatcataagttgtggcgcatacagtgagcttacacacctacaatacctgctttgatgttttttagtatattattacaaaattgttgaacagcatttccgggtagagccacttccattttcatgccattccatgtttctttttctggatggtcttcgctcaagcagcccaaaatcaaccagctgataggcggcagccagaccacaagagcagggataggagaaggggactgggataatatatcatttgttttcttgcctctattttatttatctccaccttgtatagatggagaggtttacttgacttctaagcaagatgattagtcttacctttaaccataaccttaatgggcctcttgtactaccaggcctagccgactgctcatgacatagtcaatgtctatggaatcaatcaggtaactaaggttcctttttaaaataaagcccccccccccccctaatgctctcatactactggtctagctgactgcccatgacattgccaatgcctatggaatcagtcaggttcttttttaggaaaaaggaacaggaaggggaaacccc

SEQ ID NO: 175465 - DNA, 670 bp, Zea Mays
attaatagttgacaatggaaagcaattcgacaatcaagattttagggaattttgcaattctatcagcacgaaggcattgttcgcatcagtctaccacccacaatccaacagagtagtagaacgtgccaacggtatgattttcagcgccataaagaagagactccttgacaacaagaagggcaaatgggcagaccaacttcccaaagtcatatgggcgctgaacacaacataatctagagctatcgggttcactccttttcgcttgatgtacggatctgaagcaatgaccccacaagaactgaagcatggatcaccatgatcaaatcccacgagtactctagatgtcgatgagtcaaccaccaaggactttatcgatggagatcgtgttctcgccctcgaagcattgaaccgataccaagcgcaaacaaaggcatggcgcgacaacactgttagtcctaaagagttcgacgaagaggaccttgtcctcatcaaacaaccagaatagagtcccgaggcaaactcaagcccaaatgggaagggcccttcattgttaagaagaaaacatccccaaatgcctacagactccaatcacaatctggcgaagacctcgagcattcgtggaatgtagacaacctaagaaaaatttaagtctaagacaccaaatcccaag

SEQ ID NO: 175466 - DNA, 2014 bp, Zea Mays
ccagtggcgactagctccgccgaccgggagggcgaaagttgatgctacgtggaattagtgagaacaaaagggtgtggcgaatgcacgttggggagtgttggagatgatggacggtgaggcaaggaaggttcgtcggtcgatggcattgaacgacggtgcggtgggtcattgttcccagagtcgtcgtaggtggctagaggtgcgcctggcaacgaggtagacggaagctgacgcgcacactgaggagacaaaggaagtccgacaaatgaaaattggtgttcgtagaagacaacatgccgcgaggtaatcaccttgcgtgtgtggtgatcgaagcatctgtagcccttatggtcagcgggatagcctaagaaggcgcatggagcagatcgggcacagagcttgtttgcctttgtcgctgtcagatttggaaatcagatacacccgaaaacacgaagattgtcataagtgaggggcatgccaaggagcagttcgaagggtgtgagaggactggtagctcgacatggacgtcggttgattaaataagttgcagtttgaagagtttcgcccagaaagatgttggagcatgagagtgcaggagcatggtcaggatggagtcattgagtgtgtggatgatacgttaggctttcctgttttgagatgaattgtatgggcaagaaaggcgtaactaaatgccatgagcgttgaagaatgtgcgaagggagaaattatcaaactccttgccattgtctgtttggagggcgaggatcagcaggcgatgtttggtttgaacatatgaatgaaaactacgaatgtgagagaaaacctcacccttgctacgcaacgggaacgtccacgtataatgagtgtaatcgtcgataaggacaagatagtattaaaagccagagttgctcaaaataggagaagtccacacatcggcatgtatcaattgaaagggagaaaaactaacatacatagaagatgtaaatggtagatgaacatgtttgccaaggcgacatccctaacaagtatgatgatctgtataattacaagtaaaattgaactcgaaggcacgtaaactctgaagaagacaatcacggtcgggatgtcccagcatcgatcggagtagagacaacatgaaatgcggtggatggttgtagcttcagagggtagagatcgtcatggctgtcacagagcagaatcttcgtcttggtgtgtagctccataatggaaaaaaccgaatggatcaaattccacagagacgagattatcgcaagtcagttggcgaacagatatcaagttttcaaccaaatcaggggaaattaaaatgtaacgcatggaaagattatgaagtttggtgggaatagaagatagagcagtgtgagtaacaggtagacgagatccattgccgacggtgatagtggaagaaaatggatgaggttgaacatgttggagagattgtgttaccagagacatgcgacgaggcgccggagtcgaggaaccagtcaaaagtgggcaatgggtgtgctgcgatgagtcgttcagagccgccatcagagcctgagtgtcgaacgagtactgtccaggaccaattgtgggaggcggtatagattgaaggtcggcacccgatccgaagtagaatgcttgcttctgtggtaggccagggcgtggaccgagaacaccagacgttggcacgaggaacggcatcgaccatgcttgcaccacaccggtccaagggttatagttggggcacgaggtcgcgccggctggaaatggtggtggcacgccagatgtgacccccccccccccgaattggacggggccatagatccagacacgcgaccacgtcggcgatgaatggtgttgtggccgccgcgagtagacgggttggtggagttggcgacgaccagagggaatgaagagcttttccccgcgaacagggcgtgcttggcgatcgttgtggctcgctacttgtcgaagagctcttccatcaaaagataggagcgagcagagagga

SEQ ID NO: 175467 - DNA, 657 bp, Zea Mays
tacagtggctaaactggatcagaccgccagcgtggctgtcctcaccgccgacggatccctccgccgcgattcgtgtcgccggcgtttggattcgtgcaccggacttgtggataacctctcggggtaaaagatcctcaccgccgtcaagctggaagccaccccggtcagccgcgggactcctcccctggctcaccgctcgcgggtaaagtgctcaccgtcgtcgtgccatcgccgttggccaccgcgtgtcctaaccgtgccatcgcatcgccgtgactccctctaaactccccgtcaaccaccggagttactgccacgacagtgaacacgtgttcactgcaccagcattcttcctcacttccgaccgccgtgtgtctcgtccaaaattcgtggccaccgctcgctccgcctataaattgagccctcccctagctgcgtaacatcatcacccacccagcaactaacaaccgtgcctccgagagcttgaattttggtttctccccaaattcagtttccgccacccgaaaccgacctcatcgcggccagctcccttcccggtcagtccaaccctccctctcccttgtttaagctttctcacatgtctacgatgcttgctgactcgtccaattggactaggggtccactgaccgtcgggaa

SEQ ID NO: 175468 - DNA, 425 bp, Zea Mays
catgctctccggtgatattgtgagaaccttggcagtattcaataatggcagcaggaggggcggctgggcataattaggccatgtgtcaagagacctgtggacagccgcagatcaagacgacggaggccagagggaaaaaaaaaggttctctttctactactttccagcggccgtaccggtaccggtgaccgaatcattttagtacgtacgtagtagtagtgctgtgcccatgatcgtccatgaaggaagggatatagctataagcaccaccgggcaagtcgcaaccaatgccagccgcccgtctcaactgcgcatgcatgtctcgatctgcagactgcgcgcactactactactcgtcgtctgtaggaggattaccttttatatatgcagagagaacgatagatatcatacgttacgtaatgtat

SEQ ID NO: 175469 - DNA, 563 bp, Zea Mays
cagactaagactatgatgttcagagaaatcaattgtataggaccaactttaggaccatgtggagctcgatttattgggtgtttaactaaaacctctacaacaaagttaaaactggtttgtaggggagtaactttggtacagtcaaatttctatgttgttgtacaaaaatcaaagaactagtggtgtgaagttgttctgtcagaaacaagccatgcgaactgggcaatactgaaagccacattcagaacaccatggtctcaatgagatgcagtcgatttgggagcaccaaatttgagaatctaagcagaattgatccatgaatcctatagtaaacttgaagactgttgtttggtgaacatattttattaatgaagatcaccctgttcttaacaataattaggagatagagtgggtgaaaggaggtcggttcagcagaacaatgaagatcagagaaccggaagtatctgcagaaggaaaagatctctggttactgtggttttggatgtatgcaggtgaagtggagataggaacgaacgcggcaagataactacgggttgattcac

SEQ ID NO: 175470 - DNA, 523 bp, Zea Mays
tttatccatggtagtcggtggtataggaccggatctcgagatgttaggctcatgtgggtgggcattgttatgtcggtatttcatatgaggataatatgtgtgtggtggtgtgaatccctctaactccttatgtgtcgggcgatacttggccctaggtgtgggaatgcttcgactttggtggtccgaaggtggagaaagatagtggtgttgtggtatataatgtggctaagtgttgtgcatattgcatcaatctgagtgttgtacattggacagtctaggtcaccagatggttcggtgagatgttagacagtccgcgatgggttaccgggcgatccgaccgtggtcaagggtgttgtcatatagcacaggggttgtgggggcagtggttgcccttggtacgagttcatcgatataccatacaatggttgggattgagaaggctcatttgttgccgatgtgtttggtgagattgcctcaactatgacatcgtgagatggaaaattaggaacaatggatttttcga

SEQ ID NO: 175471 - DNA, 559 bp, Zea Mays
cacacatatacctgctggagaggttcacgaagccctggtttgaaatacgggcccgttgctgtcccatcatggcccaaaggcgctggaggtttatctggaaattaatttggcggcatgccatgatgagacacccatcaaacaatcctgagtatcgaagattcaacccgagttttggcgcaaaaatcctagaggctgatctagaaattgttatgggggcatgccacgatgaaacacctttcaaacaatcctgatgatttgaactcaagtgagcagcttacctcacatgccatgttacccagctacgagcccattctcatttagtttgatacttgatatgaccttttaagttttaatatactaagggaatggcattctattattagttagctggttatagaaaacacaatttaggcgaaggggtaatctgttttcttgtgtccatgtgcaaactgctttgctctttagttcttacccatgagcttttatgcacatctttagtgcctaagatcttttcagacttcttataggttttgatgtgcatgacaacttgcttggttcc

SEQ ID NO: 175472 - DNA, 822 bp, Zea Mays
gtagccctcgagctttgagtagatttttgaaaataatccactcaaaggtcttcatcttatgctttagaaatcagcattctgtcatcgtcttatgctttagagatcagcattttgtcttcatctcatgttcttgcgaattcaaacaacgttatctatccttgccttgttaggtctaaaatttatttgatcggtgacagattggacgtttggtagatggctcttggctggacgtcaccccgctctgtgcttcaatgcttctcatctcagccgatctcttccttatttggacttgcgattcagtagctatatttggatttcctcccatctcagccgatctcttccttttgccgcagtacattcattgcatatactgtatggttatgacttcttcagaaaatcttttgaaaattcctggctacacccccaatgagtgtgcccaaggggtgtcttggtatgcagagcgtttagcatactgttctggagtagtaacttgatgtgaccgtggggtgtaatcatactgcctgagcagttgacctttgtccaaacggtgtcgtgttacgcgaagcggcgtctgttgcctgactcattttcaggcggcttgaattgcttattgaatacttgcaactgttcagcgagcgtagtaggaagtggacggtcacccccggcctctataaataacctgattgcatcattgttctcttcactcatctttcgatcatctgttgctttcttcttccttcctctccttctccaaccagccatgggtagaggcaagaggggttgtggctggtctcgacgtggtgacaacaagcgtaagcgtgc

SEQ ID NO: 175473 - DNA, 696 bp, Zea Mays
ttccataatcgtaggatcatgcatgcatcatatttaaacaatattaagtattcttcccctcttatagagacaaggcatgcacgaagaccacccttcggaaggcgaccggacctcagggtgtacctcgtcaccagttggctcctcgacatgaggggagcagcagtgagagcaatgatcccataggagacctggaggctagagtcgaacgtattactatggagctatgccatggagggagggagcgtgcgcgtgctagtcgtcgcatcgctgagttgttagaagaggtagagcgtatgcagcgtgagattgtggaacgcgatcgggctattgactgggctgtgaattcacgatccatagcctaggactgcgaggcgactgctcgagcccgagtggaagagctgagcgtggccttggaaaatctagaagtgtacaacaatgttctgcacgaggaagtgcatgtggtgtatgaccaactacacccaaacatgctatcggaagttgtagagatgggagctagcgcagcggaagtagatgaaggaggactttatggggaactggacatcttcgaagcccctcctgtgaatgtcgtggataatcatcctcccgaagctagtagcagatctggagcagccaaggatgtggaggactagactagtgtaatagtaggttgtttccttatgtagtctaaataaggaa

SEQ ID NO: 175474 - DNA, 600 bp, Zea Mays
caaagccataggagagaggatgtttctagaattgactagtatttctacattgtgcaagaggcaatcctataggttcaagggtaggggaagcattaccacttaacttaggttgatttgaggagctcgatcaagacaggtctagggaggggtttgggactagtgagtcagaatgttgtgactacaattgcctaacatgcttcccctagattctaaaccacttctttgatatactattagctttctagcactagtttcctcatttatgttttcctccattccgtgcataggacatgggatgatcccaataatcacctcttcattctcttcatcttagtggctaaagagaaatccaagaatgcatctagatcacactattttatgtagtatggttgaagcttatcaaaagtcacatccatactcacgaataatctttttccaatagagtcccaacacttgtataccttttatgtagaagaatagacaacaaaaacataattccctgcttgaggatccaattttctcattgaacaactaatgtctatgataaagtagacacaaccaaacaccctaggaggcaccttaaattctcacagtcccaat

SEQ ID NO: 175475 - DNA, 519 bp, Zea Mays
ctgccctggtactgggtcctgctcagctgactgttggagggaggtgccttggaggtaggtgtcgagggaatcttggggccattcaccgagttggagtaggtaggtccgggtgccttcaactgggggcagttattcttgaagtgactggggtctccgtagtgccaacaagcatttgttggcggttggttgtttgcaacagagggggcctgaagggagctctgactctgctgactgtaacgtgacggagtgggtccagctggtctattgaagcttggtcccctgggtggaagcccaaaggatcgagctctctagtgacggtcttgctgctgagctcggagaacctggaattttctcttgaggtgccctttttcttcctcttttgtcgtttccacttggatgactttgttggagaggtgagagaagttgaggaagtcttggctggcgaggatggtcttaagctcgggtcttagccctttcagaaaatgggccatcttcctagactcggtgctgacatcgtca

SEQ ID NO: 175476 - DNA, 425 bp, Zea Mays
caatacttcatgcaagattatatatttatcctttacattctattttatggcatgtaattgaattatcatcttccattccatcgccagcattattattatttatttctccttcctggtacaaataatatgtgaccatgcatactcatgtgttctaaatagtataacatttaaaaaaattgaatcttattacctggttttcctcatcatcactaacatcacatgactcattacatccaatgcctggctctaatcggcatagaacgccatcgagctcatccaacacatccattgccttgtcgtaccctacttttgacatacacgcctggcgaacaactttcattgttttcgttagcaacattttctgtctgtatgatttagtaactccatcctttcccctgaagctcttatcaattctttcaaacgat

SEQ ID NO: 175477 - DNA, 812 bp, Zea Mays
tgctgatcttaataaacaaaacataaagaaagcttagaaagtacttcaggaccactatgttgtggacctgtggtacttatccctactcaaaggggcaggttggatcttacactctagtggttgcccttacaaatgtctagtatatgggttggtaaactgtctgtagctcattcgtagccgaagatgctgtgctgaatctgacaatataacaatttgatgagaagtaactatgctgaaaaatatagctgaaccctacactctgtaaccttttttgcattcaatttgttcccttattgttaatgttcaatcactatattttgtattcatattctgttcactccctgcttatctgatgcaaggtttgggagaattaacgtgtttttggaaaggttactagcaatagttttgagtgcaaaaagaagattcagtggaataacaaattagcaggtagaacatatttttattcattgtaactattgcaacattcaataattttctgttccacaagctataatttgcagaaacgttctacaatgtttacccttggtatgcagtttaattaatgacacgaattccctccggtccagtttataaggaacacacgcatatcaaggttcaaactttacaatctttgactaataatttggccaaccattgttaactattgtaatacaaatttgatatgattagatttgtaattaaatgcactatccaatagtcttaatactatgattataaacaatataatggtcaaagaagaccatgtcatgtcaaattgtgccttatatactggaccggagggagtacatttg

SEQ ID NO: 175478 - DNA, 593 bp, Zea Mays
gtgcgacctctggaaaggttgccgcttcggctgctccgagcgagcctgcgccgaagagtaaaaaattgaaagtcctcactcaccggccccgctatatcaaaccggccacagtgcccgagtttagcggggaaacttcttcagagaaaaggaccggctcctcctacgcagaaaattgaagagccgactgcagtgctgaaggcaccctcagccaaattagctgagccaaagactgataatattgaggagacaagagtcgaagggacaaaaacattagaagttttaagcccttcggcagaagtgacaatgccgaaggcacaaaaaggtcttgcggcgacccccaagagaaaaaggatggccagtgtgctagatgtgctggagacggtaaaggcttcaagttctattccttcatggaaaattgccgaggcttcgaaaatacaaatcgaagctgaaacaaggccgaccgaagttgaaggtgcagtgagccaagctagtgccgaagccgggccttcagagcctattgataaacaaccttcagaatttgataaaaaggcagcagaggaagaggctacagagcagagtttgcctgagaaaac

SEQ ID NO: 175479 - DNA, 1145 bp, Zea Mays
cccatgcaagggtagcccacacgagggtcaacctcctggtcaggtaactctataggtagccccaaaccttctccacttgcaagttgtgctccggttctggcggcgtctctcatatctccctaatgtatggccactctcaaccttttggctcaaacactacgagccttgttccatccagtacacgcttatggccacactataaatacagttgatgtgatcttgcaagactagatgccccactcgttataatacaatggtgcacacaagcatcaagaggttgaggatgtttaacctcacttataaaaactagggattaacctagagcaagcactacaacaatggtctgactaatctaagcactttgtaaaacacctaagctagtcatcaagtgattctttgagcacttatgtgtctagagccataggaacagagtctcaactctctaatattgtttctcagctccacaaccctcaaatggccagttggtgtcatatttttagccacccatatccaaactagccattaagaacaacgcataaactatgcgcactcactagatatgtctgttgaagtcaccggacatgtctagtgtgtacacatcaggtagccattagaactagctgttgatgaccgttgagcttgggggtatctgatgttaacactggtgagtacacgacgcagttgcatttttaacgtctctgagtaccctgtctggtgtaccatcggacacgtctagtgcgttgtaaacctcacgtacatgttgtagtcatctcttggtgctttgtcccatgtggtggtcggtgttatatccggttgcacacccgtgtgtctagtgtactcagttcttaagctctttctttagctcaggcatagtacctatccgatgccttatttggtgtaccaccggacatgtctggcgctgtcgtgtagcttgtttcttcgcgtttctttgtccgggcttcttttgtcttgtgtcttgaacttatgcatgatcttctaagagcttcaataagtctcttaatgtcttgctttgaggggttaatattcttgatcatcatgttgcctttgtccgaagtccatgctccatcgtttgaaaatatcagaaatactagcaaacattattagttcaaatggttttgttgatc

SEQ ID NO: 175480 - DNA, 499 bp, Zea Mays
gaaatatccgcccacggaactaaaggaataggaaaaggcatatacaaaccatgtgggttcaatcgtgacatagctttttgacacgtcgtgcatcttgctacaaagcgctcaacatcacgccgcattcgaggacaaataaagtgtgtggacatcacagcctccatcttcttggcactgaagtgagccatcaaaccaccaccatgcgcttcctgcaacaacaaaagacgaaccgaaccaactgggatgcataggtggttagctctaaacaagtatccatcatttagcacaaatttattccatgaatggccctctttacaatttaatgcaacctctttaaaatcatcatcaaaagcatattgtcccttagttgtttcaagtccaaaaatacgacaatcaagttgagacaacatagcatagcgtctagacaaagcatcggcaatcacattatcattcccctttttatgtttaatgatgtaaggaaaagtttcaagaaattcta

SEQ ID NO: 175481 - DNA, 651 bp, Zea Mays
tggatccgaagaatcgcaaccctaactgggaccggtgggggccgaaggatgctccgcagggttcccagtcgtggggtaaaaatcggagtctcagctggcggttgaagactggatctggaaagcctgatggcaaggatgacatccctatctctactcccggcgatggcggccagccaggtatcctcaaaacccctcaccctaccattctgaaagttgagaatgaattggtgcatagggttttctgccaaaaatatggtatgaatggccatcatgctagggagtgctttaaatctttgtggtgtgagatatgtcgcaaggaaacgcaaaacaccgctcggtgtgttctccccaaacagaacaaacctagcatgcctattgttgggatggcgccagatgggctagggttttactcttctcattttgccaaaccgttatccaacaaaccaaatcgcagttttattggtttggttaaaatcgttgagggtttgatctcggccgaggatcttgagaaggatttcggttttcatttcccctggggacgtacttggaaagctaccaagtgtcattctggtttcctcatgcaatttccctctcaagagaggttggatgagatgattaatttcccagaaatgaaaatgaagttgtcgggtg

SEQ ID NO: 175482 - DNA, 1176 bp, Zea Mays
acaataatttatcaagttggattgaaatgtagtagcatgccttatgagaaacttgttctcatacatgagataatatgagatttctaagataacgtgctagtctcaaaataatcaagatatagaaataggctccccctagagatatgcatcaagaatgaaagaaatgggtggatgcactcacttttaaaggcaaatagggagaagcactatttatctcgattaaggctaaaaagatttgcaataaacaatttttgcctagtattctcataatgaaaagtttttgaatgcttacaaccacaccattgaatgttttgaagatctcatatccaagtaggtgttgttgctcttgatgtctccctttttcatttgagtgtcctccctttatagttgactctttttccttccaaacttattaaaaatactcaagacagatgttaatagcacaagggagtgaatgatgatttctttagaaagaaagtaaaggcagttcatcatccatagatcatacagacatgaagtaaagtccttgacattagtgcatattacttgaaaagaggaacatgcattttttaaacatttgatcaagcataggaatttacttcttcatattgaatttattaatcattacttaaaagcaagtcaatatgagaacatatatagcaaaggtatgaaatagattctaatgggtaagtgcattaatgagaatgagattgaatgcatatcttagccaatttaagtttaataaagaatctatttcttcacaaagatataattagagtgaacaatcattgatgggaactaaattaaagagatgagttcccatacctttgctttgacttttcttccttttgggtgaagagtaccctttgaggcttgtggctttaaccttgcacttactctcttataattaggctcaagagaaatgttaatagcaacacaagcactagtttccctttttgtaattatttttgataaggaatgaaaagtgaattactaaagcatggaaactttataatatgaactagactattccttgaagtatgcttagttttaacttatggaacaagcatagtaagttcttaagaattacgggaataaatctaattcataacatggagagcgataaatgtagaagaatcatatccaatataagcaagaagcataacaacataagtc

SEQ ID NO: 175483 - DNA, 521 bp, Zea Mays
atggcttggcttcccaagctaaatcctgcaggtcctgttgcatgaatcaaaggatggctgataccagacgatgggtcctatgggtgtgctactaacactccctagctgaagttgtgtacaggtccaggtcccagttgaggctacctcctgggggctgggttaccaactctttcttaggtatgttggtatccagcctcgacacgtcgagcctacatcccaagggggccaagtactaggagaggagttggcaacgccacgcacagcaagaacaaataccatacagataagagttgtttaattgatagttcccaaaagtatcttacaaaaacaaaagttattacatccgccttcaagcggagccctagcctcatttctacaggtatgagctactcgacatcagcagggtcacgctggaagcgcgtggtcgccgtctccacggcatcttaaacgacctcccgggcggcgtcttcagtgtcgacaactagaccggcgatcactaccaccgcccgtgggcatcctcc

SEQ ID NO: 175484 - DNA, 429 bp, Zea Mays
ctgactgcagaggctgtggttgctgattttgtcttcaagaacattcaaccgttgaaggacagggcatacccggcttatctgtaccgaggtctagctgactcaacccgggttaccaacaggagaattcccgctgtagacttggtgaaccggcttgaaatgattcttagaggcaaggtatcaaatgttggtgccccagtggcatactcggcctggaacctgcctccatccaaggccttcactcattttgtgtcgaatccacctgtcgctgatggcggtttgggccttagagtgcgaccctctaccgaagaaattagcgctttggttgcctcgctcggagaaattcctgatgatgaacggcaggtccactttgaggtgtctttggatcctagtgatgtagagataagtgctatgcttgatatgctggccgag

SEQ ID NO: 175485 - DNA, 1018 bp, Zea Mays
tcacgccgaaccggtatgcagcgcgatccgtccactccgcgatcaacggctcggatttaattctctccgatctcactagtgtcgtccgatcacgatctaacggcacccaaccaatgtggcgaaagggtacgccaactctaatcccgaccgttctttaagaatccgacggcgcacgttttctgccccaacagggcacccacgcacggcggagcgaagctcccccacggcggcgcgccatggccggcgaggctaaacccccttgcccacacccccatttcctaattaaactcagctacgcaatgcggaaggcttaaggaaggtgggggtaggtttattaccgcgaattgttgactcgacggcgctggccacggtgcggtgcggatccgcggcgatttgcgcactccgatgagcaattgccgacggtgtagttgattacttgtcgcgttcagtgcccggtgagcttcaacagcgccaaacgaagtccccggactccttcccggagcacgggcgatgctgacggctcgaggcgacgatggcggcactcaagacttccgtggcgggtggcggcgtgtggtttctgtgcggggagaaggcagggagatccgcgtggcgttcaggggggtcttatccccaggtcaaggcggtccacaaccgaaatctcgaagccttcggatgatgcgcgacatgcgcggaggtggccgacgcgcggggaagacggggtcgcgtgcctgagagtctgtcctgtgggctcacgatcacagtgtaaggccgggtcttaacgcgggtgcgattgagcaacagacaagtgggctccacatgtcggcgcggtgcactgagcggagacggacgcgagtctggcaaagtgggcccatgtgccagcggcagggtgagagggcgcgggatgcagagctgggctgggcgcgctgaggaaagtagaagtgggctagattggggatggttggcccagttaggttttattcttttctccttttattttctgttttcttctttctctttt

SEQ ID NO: 175486 - DNA, 837 bp, Zea Mays
cactgtagactgtccggtgcgcccatactccgtttttaaaaaatccctctctgcccgagcccgtggcctggctcagtttcttcctctccacccgcgctctctgttctctggcgattctcctctccccgccggcgaactccctccaccggcggccaccgtccccgctgggctccggcgacctcgcccgtgctcttcccctcggtgagcagctactctccttccctctatctccctgctctcggtttgaaagtctctgtggcattctattcaccacccccttgtgcaaaattcaaatccctgtgaaatctggagatttcctgttgtggaatgtgttcctttgtatgccttaaacaccattgcaggtttctagctccttcgggagggttttcccaccccaaataagcttttcaccgaaaccctagctccccgcacgccacatgctcggtgaaatgcccaaaccagccaaacttgctccaattaaacccaaatttttcaggcaccttcacaacacttccagtaacctacttgccaaatttcacgccaatccgagatcccaggcttaaatttcaccaaaattcccgttttgagcgatcgtttctgagccgagtgccctaattcctttttcttcgcctaaattcaaaccaagcacacacttcactcatattcacctatataaacctattcgtgaagtatcggctcaattccatatcatttcgtgcctcatttcgaattccaaacctcctatgtcactatttgtctgtcaaacgtcgttttcacgtcgtttgacttcttgatcgtcccgtctcgtgccatatctctctgtgtatgtatttattc

SEQ ID NO: 175487 - DNA, 1261 bp, Zea Mays
ttccactggacggcgggttggtttcaaagtttggcggggtttcttttgtaaaacgtacccgcgaaggggtacgggccaataccggccgtcagatcgaacatggtcggtccagattagatcagtgagtgttatgattccgtgggcgtttcgatcgtccgatcacacatgggtggctcagatctatttgtaagtgcgacgaagcggtatgcctcgagagtcatcagatcgcggatcaacggttcccaacaatcgcgaccacagacacgatccgagccgtccatcgctagatctacgcaccaattctattccgctgtaagggtgtttgtgaatctaatcctagccgcatgattggatcggacggctctggtgcattaactcaatcgttttcccacaaccgaatccttagcgtccaaacccagatggacggccagggagtcgtcttctccctccctggtgaacgagcgccggcgcaaaagcagccgcgatggcctctcgccggcgaccggatgcaacggcgccccgacctttcccgacctatccaatgactctaaaacgcagaaggaataatcgtgagtccgttgggggaaatcttaccgacgttggtggtgcgccgagctccgcccacggcgtctgacgattccacggctgtccgaagtcgacggtgagcaattcccccaacgccagcggctaatcaatcccgaggacgagtcgtacacgttccacgcggtcgcgcgaagctccacagccaccaccggactccgaaggtacagccgagatcgacgacctcaaactcccgacgccgcgacaatcttcaatcggctgcgagctcggtggtgaggctgttgatgggtgcgagcgcggaaaaggggagaggaggactgcgaccgagctccctttaacggcctaggtgagtcggttggggccgagcggatatcaacggggaggtccgccgtgcgatccgcgcgggtggttggcgcacgtccgggatgacaggtggggtcacggggacagtgataggcacgatccgtggtatgacatgtgggccccatgtgacagagcaacgcgcgggaagtggagttgggctagtcgcgcggggggagaggaaaggtaggtgggccgaaatggatgaagccagcccaatcaaggtttgaatctttttctttttattttctttcctttcccttttcaaattcaatttgaattccaattttaagttcaaagtgtgtggtgaattcatcttcacatttttttgttcaattac

SEQ ID NO: 175488 - DNA, 852 bp, Zea Mays
cacacacagcaagaacaagcatcatacagataagagctacttaattgatagttcccaaaagtatcttacaaaaacaaagttattacatccgccttcaagcggggccctagccttatgtctacaggtatgacctactcgacatcagtagggtcacgctggaagcgcgcggccaccaactccgcgacatcttgtacgacctcctgggctgcgtcttcagcagccgggccagcggtcaccgttgcaggcggcactcggccattaaagccaaagagatggagccgcagctcggctcgcttcccaccccatggaattggagctagaccagatcctggcggtgtaccatgaggcactggtgaagctcatgcgaaagatggagccgcagctcagcttgctttccacctccgcaaggctgatgaacatccttgaaactgagcactggtggaatagcgccaccccccacgaggtcgtgctcctacaacaatagcaagaagaaatgtgagatcggcagcgccaacacgcaggaaacgaagagcatgaactccccgatggcgagatcgtcgtgacgagaggcgccaacacggatccttccggcgaatgccggtgcaccccatccgagcaggttgcgcaccaagtcgagtgccacctcgggctggaagcactcgggagggtctaacaaggccatggcggctacggcggcagaagagcgcggagaactcgagggcgtaagggcactacgagtgatgagaatggctaccgcgctcgggggaatccctttttaaagaaagattcccccactgacgccccgagacatcgcagaagatctcgcccgacgcgcgccaaggtgaccaagcc

SEQ ID NO: 175489 - DNA, 698 bp, Zea Mays
cacgcctctcttccattctttattctccttcctagatacttgtgtgtggggcccaccagcagtccctcacgtacccagccaagtctgcttcccaatcgtttctagctctgaggaaaaatgaccggccaccaggatgcgacctcgccgccgatcggtttttcggctccctgcgcccgcctcctcatcttccctaaagtggagctcgccaacctccgtccacgacacgtcctctccccttccttccccagtgcgctcacgtcgcagaccgtttcccctcctccgcgacagtttcttctatctccattaatggctacaattgctcctccccataattcctctctcggcgtacgtttcttcttccctgggatataaatcaaagcaccgcgcctgtgacgattcccttctagatttcccctgtctcttctcctcccgtccttgcctataaatggagccacaatgcagttgctcctcctcccccagctgctctcttcctgctttgctctgacgcccatcttcgtgctactcgcccggagcagcgccaccgctcaccactgagccttcctctccagcagctccctcctctatttggcttcctgctcacgacgtcaagactccgttgctatcatcacatgctcctcggcgccatcgctcatcgagccgcgccatgctgcatcgtcgctggtacctcctactacgtc

SEQ ID NO: 175490 - DNA, 521 bp, Zea Mays
gcttgggcgtccaccgcgaccgcaccggctcagccgccgcgtgccgctccgggctcagtccgccttccatgtcgacaggtatgatagccagatggatcgatgggcagggcggcgcgactgctgctgctactgcaggctgggaatagcgggatcgggatcgggtgatgctctgctctgctctgctctgatgtgatgtgaagagatggtgtttcgtctgcctgcagtgagctgctgcgctatatatgctatgcaaaggtgatgggtcgaggtagaagaggggaggagacagtgttgcgtgctgcttccacactctaatgggattgctgcctgcgcatttatagggagatccaaggggctaccttgcttaggtgtgcaatggaatctgtccccttttcggtgcaatttttattttctgtccatgctaaggtttgttatatatatacactgcacttggcatatgacgcgattgcttgtcctaatttgctcttagcgcagcgcgtgcatttccaacgggttctgaa

SEQ ID NO: 175491 - DNA, 474 bp, Zea Mays
gtataggaaaaccatatttctttttcttaactttatatggctgtttaattgattgaaccgtgaaggaacaccatgtatgcaacctggatcaattaatctatgataggatagctggttcaattggttatgcatgactgagaatctgatgccgctaaatgggagggcggctttggtgcttaggtaataacaattacgaaaaaagatgaaatctgcagtgtctactgcaagagaaccttgaggggctaccaatacagatccagtttccaccatattggaacccacacactagggaactctgtaaaaagtaaattaatagacaatatggtctccaagaatagttatctgaagaaacaattagatatcctgagcacaatcaactttcataatcctttcgactaaccagactcagcaaagaggcgatgcagaaggatggaagcccttcatgaaggggaatgagggaggggtgatgtgaga

SEQ ID NO: 175492 - DNA, 1147 bp, Zea Mays
gggagattagggttccaaaccttgggttgaaattttaggatgttacaaacctaccccacttaaaggaatctcgccctcgagatttagactggatttgagaaaaggtaagggtattccctcctcaaggagtcctcactctcccaagtagcttcctcttctccttctctgctccactgaactttacagagtttcacttctgagttgcgggtcttccggactgctgagtcaagaatctttattagcttctcacggtactgaagatctttctgaatctgtattgcctcttcttcgatgtgactttctggtgcttgcaggcatttgcggagctgggacacgtgaaacacattgtggatatcagacatggattctggtaattcaagacggtatgctgcgggtcccactctgccaatgatgggatagggaccggcgaatcgtggtgctagcttccctttaacttggaatcttctgacaccacgcatcggggagaccttgaggtagacgaagtctccttcctcaaatctgagttctctctgcctgttgtccacataactcttctgccgactctgagcttcaagtaatcttctgctgattagggcaactttctcctcagcctctttaacaaaggcagatccttccagtgccttttcccctatgttagaccacatgagaggggtctggcattttcgtccatacaatgcttcgaacggtgacatcttgatgctggcctgatggctgttgttatacgagaactccgcataaggcaaactggattcccagcttctatcgaatgttaacacacatgctcttaataaatcttcgaggaccttgttgaccctttctgtctgaccatctgtctaagggtgataggcggtgctaaagtctagcttggtgtccatagctttctgaaggcttgtccaaaatttggaggtgaactgggttcctctgtctgacactatctttcttggaatgccatggagtctgactatctctttgagataaatccgggcaagggtggctcctccaaaggtagttttcactgggatgaagtgggctaccttggtaagagggtctattattacccagatagagtcattccctttttgcgtctggggtagtccagttacaaaatccatgcctatttcttccc

SEQ ID NO: 175493 - DNA, 693 bp, Zea Mays
gggttgacctccgcctcgggctgcgcgccattcagatgtctgaggtcttccacatcctcggcacgcaccatctacagcaacagcacactgattcagcaaacccacgcgtacccacattcaacgacacgaaacaaaagacaaactttacctgctccctcgccaggtcagaccgctccctaaccgcctctcgaccatgagggccccacatccaatcgaagagtgcccccgtggaatcctttaccacatggtcatcaaccttaaaaatttcccgctcaaagttgtcatctgactggtcgaagacctcatagtgtttgcacccctcgcgcgacaacgcgttcatggccccctcgcatgtgacgagggaggcgtaagacatgaagccctgcacaatcgtcgggagcaccaacagctcctcctacaaccattcaaggaagcggaggctggcctcgcggtcgggcacttcgaaatctgcagtccgcgcacccagatcgtggtatgcctccacgagctgcgcgtgcgtccgcacgacttctgagcgcaccgaggtctcggctttgtctacgcgactgcgcagggcattgaacctcgcctcccactcctcggcgcgttggctggcgaggctacccttcgccagcgccaccttagcctccgcttgcgcagcctgcgcttcagcgacggcctggttagcctccc

SEQ ID NO: 175494 - DNA, 451 bp, Zea Mays
ttctttgctgcctccatgatacccttaactacgatcttctttggccctctccgacttctatgctaatcgtctacaccaacacatattgggatgactacctcgacacgttctgatccacctttgggtacactgtgttctttggcacaaacctcgtcttctggtcctcgaagcgataacccgtcatctctcgctccaccgttgaggcctagtatcgtgttgtggccaatagcatgggcgaggcttcttgactctgtcggctactccaggagctccatattcccatcatgcatgccacactcatctactgcgacaacgtcagtgtcctctacttcaccaatcccatgcaacactaatgcatgaagcagaagaagatcgacctccacttcatccacgagcatgtcactatcggtgatgtccgcgtactccacgtcctaactacctcacagttcct

SEQ ID NO: 175495 - DNA, 585 bp, Zea Mays
cgcaaggatcgcccgggattgtcttcgcctctagagcgttgaatcgctcgtcgacgtcgaacaaggccgaggaaccacgccttcacgtcgtcgggatcaccctcacgataaaagactggtgtggccgccctggtgatttcgcctccctctcctctttcctttggtgtagtttcgctcggattaggtcggtgggtcgccaaatcgccgcgtccggccatggagccaccatagggagaagcgtctggccgccggtgttaggagagactcagagcgcgatgtcgaacgtgggccatcggatgaggcacggacggtcccgattagtagccggaagtaccccttcgcgatagtcgatctgcgacgtccgtttctgatcgggcgagcgcgattcgatctggttactttaaatccaatgcattcgctgataatcggacggcggagttcggataccggttcgagtaaacaaaggtctaatctgggcgctcggagtgtaatcggaggctcgggattgtccataccctttcgctgcgcgctctttccaaaagagaccctagtattttccgtaatcaacccgcagtctacttcaat

SEQ ID NO: 175496 - DNA, 356 bp, Zea Mays
ctagactattccagtctgcgaacgtaggggcatgatgtcacctatctcgtgatgcctctgaagaagatgaacactcgatcgaactccacacctccaatcgagacagcgaaggcatcctttaccaacaacactaagaaaaccacagtcaccttggctgaccaaacctctacatctcctatgcaggcaccacctaccatcgccacctagctagcaaaagaaatatcccttcccctgtcacaaagagctagtcacttaccccactaaaggactgaaatggcgaatagaggggttgaatgggagccattaaatttctccaactagagagcacatgacttggttctcaaaatctgtccaac

SEQ ID NO: 175497 - DNA, 1083 bp, Zea Mays
atgggcccccccattcgtgcctcatatgggagatgaagaatcaaatgctgcgttggattgaagaagccgggtggaaatatcttctcaagcttacacagtaacacgagtgccaatctttccaagtctgcaaccacggtccaagataactcttttgcacaaagctggcgaaagaaatagctcaactctgaaagcgctagccagacatgctcagggacatagcctcgaaccatcgcaggaagaatccattcaatccatatgtggaagtcatgactctttatccctaagactcgcatagtagataagttcacccccctactcaggttagctgcatacccatctgggaacatcaacatattgatccactaaagtacttccttcctctgggccttgcttaggacgaaatcggccttaggccttctccacatctttccgccacttggcagcttcatctctaggttttgtccataattgttgcccacagtgccttggcaacattcttttcagtgtgcatcacgtcaatgttgtgtggaaggagcaggtcgtcataataggggagccgagtcaagccagactaatgtgtccacatatgctgctcaccatatcccacaaaaccaccttctgtattggccatgtgcccatctatctgttgacgaatttcggcatcagtcatcgttgcaggtgggcggtctgtcactacgacacctttcgtcaagttcttgatgtctaggcagaatggatggtcaggagagagaaattgtcgatgtttatcgaaggacgaatatttgccaccctttttcaaccaaataaacctgagagcttccttgcaaactgggcatgggaacttaccatgaacacaccaggcgcagaatagcccatacgccggtaagtcatgcatggagtactggtaccaaacatgcattctgaagtttgtcttcgtagctcgatcatacgtccataccccttcctcctaggcacgtaccaattcatcgatcaaaggctccatgtacacgcccattttattccccgggtgtccgggaattatcaacgacacgaatatattctgcctttgaaagcacacaccag

SEQ ID NO: 175498 - DNA, 322 bp, Zea Mays
acctcctgcatatcctcatggttagagaccactcttccttcatcttctagatatgaaatgaaatttcttttcttcctgaaacgagtctgcgtatgaaagaatttagaatttgcatccccctcttttaggtacttaatcctggacctcaatcgtgcaattgttctttccatagaagcataaacaaaacaatgttgcttcagctttccaagcagccaaaactcatctcctgacaaaactctaaggtcctgtgctgattccaacctatgcatcacctctctagcaagacccaactggttactcacatttcccacctctctatgcc

SEQ ID NO: 175499 - DNA, 274 bp, Zea Mays
gttttggcaaggaagaagggcgcgagaagagagcgagcttcgggtaaggagagaaaagaggtcggctggggttttatagagggggagggagaaggaaaggcatcgagggagatgaaaagcaacgaccaacattgatggagaaaccgtctactttgctaatggagggaggcgaagaaacgacgctggccgttaatggcgcttaatggaggaggcgactgttatggggaagggcaagaaactgtcgacgcgggcaggttgcagcgtgggcggcctg

SEQ ID NO: 175500 - DNA, 475 bp, Zea Mays
gcggacgatgggtcgctgagctcccgacgatgctctgaagtccgaggacgaccccaagtcaggtgaccaacttcaccccgttttttatgatgtatggttttgacgcattcttgccaactgaccttgactacggagccccgagggtcaaagcatacaacgagcagggagccgaatcatccctttaggatgccttagatcaactcgacgaggtacgcgacatcaccctcatgaagtcagccaagtaccagcaggccctacgtcgatatcacaattgtcgggtaaggggttgggcgttcagcgttggagacatggtaccgcgccttgtctagagcaacaaggatcgccacaagctatcacaggtatgggaaggcccctacatcatcacataggtacttcgaccgggtacgtacagactgcaaacggttgataagcaaattttctccaatgcatggaacatcgagcaactgtgtcgttt

SEQ ID NO: 175501 - DNA, 419 bp, Zea Mays
catctgtctgaggatggtatgctgagcttctaatcacagtggttcccagtgacctttggagttgctcccaaaaatgtgctacaaacagtgctcctctatcagatacaatagttctcagaattccatgcaaatgcactatctggtcaatatagatctctgcatacttttttgtcttgtgggcggtatgcactggcaagaaatgagctatcttggttaatctatccacaatgacccaaatagaatcgtggtgccaggaggtgttgggcaatcccacaataaaatccatgcaaatatcctcccatttccaagatggtatgggaagggctgcaaggtacctgctaccttcaaatgactagccttgattctttggcaagtgtcgcattcagatacatacttagcaatttcccttttcattctgg

SEQ ID NO: 175502 - DNA, 410 bp, Zea Mays
cctccgtgagccttcttgaaaggttcgatcatgtccagcccccagcatacaaatggccacgttacaggaatggtctgcagctgctgcgcaggcaagtgatgttgctttgataggaattggcatgctttacacttctggactaactctgcagcatcgctcttcgcagttgggccagtagaaaccgaatctgaatgccttccggaccagagtcttggatgcagcatccaccccacactgcctggcatggatttcatctaacaattgtctaccagtggccgagtgaatgcatttcatgaagactcctcctgcacctctcctgtacaataagccccctatgatggtgtagtgggctgactgccttgcgatgcgttctgtcgcagccttgtcatccggctcttcttcatttttta

SEQ ID NO: 175503 - DNA, 873 bp, Zea Mays
ctgtaagacatgtaatattagatttatggagatatagaaaaaagagaaatggagatggaagaaaagcgagcttgtcgatgtttcgaaccagctccgacaagtaaatttgttgtgcgtgttccgggttcgaatggtgtactcagtggacgcatgatttatactggttcggacagaacgtgcttacattcagtcttcggtggctcaccctaccgacaccttgttgctcaatacttatagttggggttaccaggcaagagagggaagaggctcccaagtctctcatgcgtggagtggcaaaaggactacaaatctggtgctcgctacctaacaaagccttgggcgtcgtggcggtgtgctcgttggctccggcctccgtagtccttcatgtgctctggttgtctgtggtctacgtgagtcgtctttgtgtcctcttctcgtctgtccctccccttttataggtcaaagaggggtcacttgctagtagcttcacaaggaaggagctactgtgccgtggtaaaatgaggcgttctacctcggtaaagccaggcttgtcgacatgtgcctcggtcatctgggcttctataggcgtgctatttaagaccagttgcgtgtgggcggcgaagagctctggcatcatcattactgtctctgtgccacaccgaccccttccctccgtagcttgggtctcatcgtggctcgtcgagttgaggatcctgtagacgaccagtatactcaggcctaggtttgatacgtcatgagtgggctgcgagacaaggggcccaatataggtcatgagtggaaggaggtctgactctcctgatgtggctcggtgctaggcgtagttaatgcggtcggtcacttatggcgggccaa

SEQ ID NO: 175504 - DNA, 313 bp, Zea Mays
aaaaaaaataggtgcgaactggccgtagactcatcccgtgcaatccccggtgctggattgctgacgtgtggcagtaaaatcatctggcgtgcatggacgagaaggcccacgaaagacgctttgcagccggcccatatctgtaaccagggcaagagtcggctctgttttacgactccgtatttctctatctctaccaaacgaaacagtcgccgtcgtatttctttcgatcgtgcgccgccattcatgagattccaattcatgtgactagaaagagtaccacaaagcaccgatcagaagtgccaacaaagacaaa

SEQ ID NO: 175505 - DNA, 363 bp, Zea Mays
gaaagtaccaagggcagaccagtaggaatacccggcaaaacaactcccaaggttctcagttccgctccggaaatcagagtggaaacaacaactatcaagcacagcgctctggacaacaaggtcagagaagcaatcaatactagaaccagcagagaagcaacactcagaccggtcaaaggtctagtgtccaacaacaaaatcgtcaaggaagcgctgtgaacacaccggccaagaacaacaatacaactaccccagttcaacccaatggttgtttaaagtgtggcgaacttggccactatgccaacaactgcccaaggcataaccaatagacacccgagaaaaacagcaaccagaggactgacc

SEQ ID NO: 175506 - DNA, 457 bp, Zea Mays
ggctgcacgacttcacgtcaggttcggcccgatagcttatgtcatgggccacaagcagcgggtctccgcctgagcaggacgtgaagggcaaggcccagacacgtgtcagcaccggacccctgctcataccagggtcctcctcgttccgggaccctactgaggttcagacctgcccggaggttccggacttatatgtataggggtccggtcttaccgggacgtgttgtcttctcttgccatgtggcgccctttggcctgcccatgcggtggggtcaggcgccgtcccacgcgtggttaggagacgtcgcatgggtgcggcgtcttcatgctgtagaagagggtacccctgatttagggtaccgacagtggcccccggtcccgcctcaggggaggatgcgagcctgcaggtgggaccagagtctgattggcggttggaccgctgctcctgcgtgcctgt

SEQ ID NO: 175507 - DNA, 599 bp, Zea Mays
tatttcaaatgtcttataagatttagtttcgtaacaatcggaatatatattctaagagaaggtaatgatcttccaaagacccccatatcctaatttgccttataaaaatggaggggatactgttaatcaatagccatgtcccaaacatttctcgggattgggctgacttcgtcactccaaggtcccctctcacccacacgctgctcatcttggacggatttcaatcggaaataatctaattaccataagagacgactccaatttgtgaacaaaattattagaatgtaacggcatcgcccgcaactatttctctgataaaatcaaaatggaaaagtgttcaagactttttcaggaaaaaagttgaccttgtgatgttcatgaagccatagccacccaagaatcttcccacctcgaagtaagcggggttggtcatgagcgctgccgaaaccgaccgcagcgatcgtcgtggtagtcgccggctccacccaccgggctccggcgaggcgaggaaccgcataggcagagctttcagcatcgtagctgatggactgacactgggtttgcgataggcattagaagccatctcagccacagactgc

SEQ ID NO: 175508 - DNA, 1242 bp, Zea Mays
cattttgcacagaggccctcggggttctgggtaacaggaaacaagttcctttactattcctaggtgtcgctgacggttcacagaaacaccccttgatttctatttcttcgcacggccaagtccacgacgacgttcacgcgcggtcgtgcttcggtgagccactgcaccggccgattgaggcgatgaccggcgccgggactaagactaaaccaaatccatgaccaggggagcatttcccccaacataattgcactaaggatcaaggagtgtgctttggccacggtggccgtgaacatcatggcaacgccgtcgtgttcctagcgattggcgggctcctagttcaattcagtggctcggcaagcatcgtagacttaagggaaagcttgaacgagggagagaaggagatgaactgaccggagtaaggctggccgcggtgaggtagagtttcgggtggcggagaatggatttgggggaaatcttaaattcgagctctcggaggcacggttgctaacgattgctggtggctggatagaggatgactttgcggagctagcgggggcttcaatttatagagctctacggcggtgactgtgaatttggacgttgatgtgcggcggtcagaagtgaggaatgctggtgcagtgaacacgtgttcaccggcgtggcagtaactccggtggtcgacggggagtttagagggagccacggcgacgcgatggcgaggttgggacacacggtggacaacggcgagggcacgacgacggtgagcagctttatccacggtggcgagcaaggggaagagtatcgtggctgaccggggtggcttccagctcgacggcgacgacgatctttctaccccgcagcgttatccggttaccagcgagcgttaatcttaacgcggcggcgcgaatccttgcacgggggagggtcaccggcggcgagcacgcgatgctggcatcctgatccactttggctactgtaccatcagagctcgcttcagacagcctgacagtcaagtttggagccaaattttctcttaattcctaatggtaatccatgtcatgctctatagcaaaattgtagagtaatgtactatctacaatgttgccatatggtgttgccactgaaaatcactgaatcatgtctgaaattgggcttgaagttggtggtagttcactgttagtctgaaaattcagacctaatcagcctgacaacctgacagtcaggcttaaatatctctgg

SEQ ID NO: 175509 - DNA, 541 bp, Zea Mays
gagagatttagaaccttaggtgagatagccttcgagcatttttcttagacatttccgcttgggttgtctataccggtaccctcttccctttcggccccccttcggtaggggatacaacaacaccctattgcccacttaggctccctccatcctagtgaaactatctttgtcccccacattgcacgctatgcgctcctctatacaggacccacgtgggatgtcgttgcctgtgcacgtatttcagcacgtatttcatcacagatgctaagaataaaatgatattaaatgtttgtggtgggttacagagggaaaatataggggaaccgttgcggaaggtaggaaaataggggtaggaatctgggtgacgtggagaaaaagtgggatatagggggataaatttagagggaatcgctacaaatagccttagactatccgcatcggtgcccctcccctaaatatagggacaacaatgtcgcccctatagccgcttggatgcccccatatttttatagccttagactattggccctagatgatgatg

SEQ ID NO: 175510 - DNA, 321 bp, Zea Mays
agtgatattgattcgttcaaagtgagattgagagtgatctctagtgatttgcattaaattgttgtatctattggcattagtgatcatattgagctacaagtttcttgttattttttgtggttgtcggcttgccgccacctggatgacttggacataacggaggattattgaacaacttttggagaatgccattggctccaatcatcattatgagggattatgaggggattttgtgctcattccccatgtgaagttcacgaagaacaaatataatgcaaccatggcttgttggagtgcctctctagtgtggtttttatggcg

SEQ ID NO: 175511 - DNA, 732 bp, Zea Mays
ctttatcttgctttactctaatatttctcaatacggtagcaagctcctttattaatagccaatgagctcaaatttgtttcagctttctcttctttttcatttaccggtatattcatatcctgaaggcacctcactagcaggctgctctccagttaccagctctcaactggttcctcattatttcattggggtgtttcgtgactaggctgtgataagctctcttatccatttttctccaggcgtccccgggtacttggaattagagtaactagatttcctatccttttctttgaggcctcggaataggatgaggaataccattcatggtacttaagtcctctctagtgcactaaacaatagtgctacttgatcacgctctacaaatcacaaaacaaaatgacagttcaatactttatttcaatgtcttcttgacattccaatttacttattggtattgcacgggaatattctatgtgaattcccggcttcttgattttctagttttcttattagtgcgggtctttcacggggatttttgtggctttttcgagcgatttcccggcattcttatttcaagtattcttttcctccccctaatgccatggaatagataattgagcattattgtggtaagtacatagatttgaagttggggagttgttcctatgatcatttgcattagtcatatgcaataagactatatgccccttttcttttcttttgaaattattg

SEQ ID NO: 175512 - DNA, 292 bp, Zea Mays
tgtgtgcagctgctgtttgctggcacttttcacatgggtgaggagggaatctggttttgggttgctaagctttcccttgatccttgccttagggtgcctatttatagtacatgggtggtcagtttgataaccgacacgattcgttacacaagaaaaacctactcctaacatttgctgctagacaacttcaaatgtctgctgctattatctgtcattcagcatacctagtaagccaaagaaaaacgaaagaatgcctactattcagtaatcagtacaatgcaaggattacaac

SEQ ID NO: 175513 - DNA, 1227 bp, Zea Mays
ttgatgcccaaattttcgggtacctaaatttttcgggttcgggtagcccgttctacccaatttaaaactacaagcttatccgctacattgcttcactgtagttagctttgtacattccggcagcaaacaatataatatttaatgtaaatatacaatgaaaaccaggaagcaaacctgcacaataagcatttagtttaaatttttttcacatagcatcactcactcacatcaaagcagccgagcatcaatgatcactgatcacagctcacggtctacacagtcacacatcactaatcacggtctcacacatcgttgatccactgtccacactcacggtctcacatgcacaacagacaactcgcagcaacagcaaggcagcaatacgggtgcagcacacaacaacaaggcaacattgtagcaggaaggcgagcaggaactaaacggacatctgccactgcaaagtagccgagcaggagcaacaaatcgggccaaacgggtatttcgggtaccgtaacgtgatactcgattaggcccgaattaaaatcgggtattaagttttgttacccgcatgaattatttgggtactgagcttcgggctaaataggtacggtctcgggtattttgggcttcgggctcgggttttatgcccagtgctaccgtcacccttcctcctccacatccacgccgtcctctcccacacgagtctctagcccggaggccacacgagggacgggaccttctcacgtagctcaagctcacctgccagcgaaggctacgacacatcgacgaccttgatgttgtgctcggggtccttgatgtcgacatctcctactggtcgtcctcctctccgccgcagcagaggggtctcgcctctaccgtccaggacatcatggtctcggtcgccatcctcgcctctaaatccgccagcgctagggagggcgccgcgccacccaggttcgcgtccttgtctgtcctctatctgttgccgctgtcctcccccaggccaccagaatcgcctagggccaggaccgctgatgggtggtacgactgtatgacccacgtgcctagatgcgggccaattttcccttctcttaaaaaatcccttgttttcttctttcacccattctcatctaattaagtcactttgttgaatgtctggatgtgaagcaaggtatgctctaattgctcggagatcattatggagagtgacatattcacgtgtgtaat

SEQ ID NO: 175514 - DNA, 304 bp, Zea Mays
tgaggataaagcgtcatcttcggctctggtatatgccccaagtaactcgtcgctagtagcctcaatacattttagccagtcatcatttggttcatcaaaccggtctctgtatctgaaggtatatttcaaacgaattaatccaccttcgctggacccggcagtggtctccttcggcatctcccagttatccacaagtggccatactctgtaggctaggtgctcttggatcaagtctcttgtgccaatgaaagcacagacattgctgaaaaccttttggcatgattcggcatcattttcaatcccc

SEQ ID NO: 175515 - DNA, 402 bp, Zea Mays
atcagatgaccggctgatgggtgttcttcaccgagcttgactttagcgtttggggctccgtcaagtttggggacgcctccgatgtagagatcaagggcaccagctcagtcatcttcaccgccgcgtctggagagcacaggctgctcaccggagtctattacatccccgcgttgaggaactctatcatcagcttaggacatctggatgagaatggttcgcgtgtggaggtcgagcacatagtcatgaggatttgggatccctctcgtcgccttctttcctaggtactcaggagtccaaatcagctttacatcctcaacgtgaaggtggcacaaccttgttgtcttgctgcttgtcgagacgatggggcatggcagtggccgagtgcttcagacaccttaactt

SEQ ID NO: 175516 - DNA, 837 bp, Zea Mays
tgtccacggtgacagcgggcacgacggacaattaaacgcgttcccggcgatctaaggggtcctagtctaattggcggggtcggggagcatcagggacacacaagaacactgaaacgaaagggcagaggacatgagcggaccctgagacgagctagccacggcgaggcctctttctcggtggcggcaagcaggtttgggggaaatctggaatttgtgagctctagtgaacaattgggggcacgacttggtggcttggtgcttgactaccctacggacccgtcggtgtgctcaatttatagtgtgcttgagcggtggtgcttaatttggacgaattgcgctggcagccgagaggggaatgagtcacggcggcgatctaccgtggcaatcgcagggcgactgaactacgggaggtcattggatggtcactacggctcatactgacgtgataaacttcctaaggcgtggcgtcctcacggtgaatggtgaacatgccggtgattgccgcacggccacgtcgccggtgtgtacagatgaaccattaagcacacagtacattccagcccatccgcggctagatctttcaccccgtgatcattatccgcgtttaattcagcgtgaatcacggcgatagaacgaatccgcgcgtgtgttcgccggcggcgaggtctgtgagctggcgatccaatccggttactgtaccatcacgaagtttcatcagttggcctgacagagcatgcctgggatcgattttgctctatattttatgtgatgactcaaccaatactctgcatcaaagtcgaagcctgataaaccagctccaactttgttacattgtgc

SEQ ID NO: 175517 - DNA, 386 bp, Zea Mays
ctcccggcgccttcggtctttcttttgtctggagccttccgagtaaccactctgcgtaacatatttggtgtgcggggatcaccaatgagaacatttttatctttgcttttatcggccgcacaaggccgaactatgactttttttcttgtcgactctaatgtggtggcagggacaggtggcctgtcaatcctcacctccttttgaaacctcaaccggccttcgtttatagccgattgtatttgccaacgaaagacagcacaatcattggtgttatgaagaaaggagccatgccatttacaatatatacgcccttttaattcttcaaccggaggaattatatgtgataatttaatattaccatgcttaagtaactcatcaaatatttt

SEQ ID NO: 175518 - DNA, 725 bp, Zea Mays
gttgttgtagttccttctttgtggtcagcagtatcattgttctgatgaattcctacttttcaggacgatctctatcccttgctcatgcactatgcactaagaatcagaggaactgactgactgtcaccccgaaggtacacttcttcgggttcatctttagccaaaacctcctggtccgttctagtacatggcgcaagtcctctatatgcccctctatggatgtagacttgactatgacatcatcaatgtaaatctctaccagcttccctattaggtcatgaacaacatggcacgttgctatgtagctctagcattcttcaacccaaaagtcatgaccaaatattcgaacaatcctaccgagccgggtaccctgaatgtggttttgtgcacgtcttccgaggccatgaaaatttgattatacccagcattcccatccatgaagctcaagatcttgtggcaggcagctgcattgatcaacacttctgtgactggcatgggggattcatccttcggtgtggccctgttgaggtctctgaaatccaagcaaaccctccatcgaccatctttcttttaaacagacactacagtggaaatccattcggcatatcggcatggcctaatgaaccctgcctccaacatcttctttacctctttcttgacttcatgtagcacttcatctttcatcaaccgttctcattgctaaaaaggccgaaacccgttcttca

SEQ ID NO: 175519 - DNA, 479 bp, Zea Mays
ccagaatcttgatcgggtactccgtgtaagtcaaatcaccctgaacactgagttcttccattggtaactgttcctcggggacacggagacacttcttaagttgagacacgtggaacacattatgcacatccgatagactagcaggtagctcaagttggtatgccatctctccaactctcttaaagatcaagaatggtccaatatagcgaggggacaatttgcatttaaccttgaatctcctcattccacgaagtggtgacaccttgaggtacacataatctccttcctcaaattccagtggtctccttctattatcagcgtagctcttttgcctggtttgagctaccctcaaattctctcgaattatacggacttgtccttctgcttcttgcataaattcaggtccaaagaactgtctttctccagtatgatcccaatataaaggaatcctgcacttcctgccatatagagcctcaaac

SEQ ID NO: 175520 - DNA, 560 bp, Zea Mays
gcagatcgtcctcgtgctttaactttcttccaaaacaaagatggagctaacaggtagctagggagcttgcaaggctggcaaatctctctggctgctttggcctccgctctcctagctccatacggatcggagacgccatggacgacgctttcctgctgcgcatatcgcatggcgaagaatgtagccataaatgctgcgccgagggccacaaccggaattgaatgcggaactcggcagctcgctcgcgcgcgcctactctcgccaccaacaagtgggagtaaaagcggaaaggaggaggatgccgaaacttaataaaagcgaggaaggagaccactagctagcttcattgatcagctcatatatgctgctacggcgcccctcacgcgtccatcagcgtttactgcgggtctgcagcagctagccttcgattcgctgcctgctcccaaattgtgcaagggagcatcaaatgtgttacggacccgagcagtgccagtgacattgcagcagtgaagctggtcgcccagcattaacttagtacgtagtagagagagagagaagat

SEQ ID NO: 175521 - DNA, 379 bp, Zea Mays
ctcaatgtcagtgagccagtcaccaacaatatatgcctttccatttttctttttgtggaacttcttgtgcttcccatccttcctcttgaagaatcccttttcctttttctcatcatcgctgtcatcttcttccttgcccttgaacttgttcttcttgggcttgttacattgatgagcaagatgaccaagctctccacagttgtagcaatccatttcagaaatgggctttattttgctggaaaagaatttcttctttcttgaatcaaatttgataccttctctgttgagcttctttaacatcttggtggtcttcctcaccatcaaggcaatgttagcatcaaggtcatcatcacttgaggattcttcctcaatttgtact

SEQ ID NO: 175522 - DNA, 519 bp, Zea Mays
ctttgacagcttcggcagcttttttggtaggaacaaggctcaaggcctttgtagtctccataacaacatctaacatggtggccaatctccttctcttgggagttgcggcaggagccttttgcactatcggcaattctgcctttgctagtggactcagaatttctggcattttaactgatttttccaattttggttcttcggccgcatcaccttcggcttcggctagccttactgtaggcaccttcgacactacaatcgattcttaagtgctttgcacggcaggggttgcttgttttgcttcggcagttgaagaggtcccttcgccaaattcaggcactacggtcggttcaatatatcgcggccggtgggttagaacctttattttcttacccttcggcacagtggcacaacaatggtggccgaagcggcagtttttcttttccttccttgccttcgcaacgggtagtgataatcagggtatacaaagccaattgcatcaaacaccctgttcaatctttt

SEQ ID NO: 175523 - DNA, 449 bp, Zea Mays
tatctagttggggtaggctatgtgctccgattgacattgggggtgctcctctatgaaacctaggacacgtggcttcgccgaacttggagcactgggccctattatgcatggggtcatcgtctttgttgcatttgagaatccaacctcttccatgctcacatcccacaccaatggagttcttgaggttggagcttactttgtgtgattgttcctttcccaagtagccctcggtacctctaccattaggcctcttagggtatgtgtctctcgctcctcggttcttgtgcgtctaaggatcctactttccgagctcaagtttgctctaaagatgtcatctaagatggagtcatgctcgtgacatatggtcctgcatggctcataatttcttgctctcctaagcatggggttgtcctagtaggatttgtgcttggggtgtcttaaggttgtgg

SEQ ID NO: 175524 - DNA, 590 bp, Zea Mays
caaaaatcctaagaataaattttaatagaactatataatttcgtgaatttaaaaaaattagtttggtaatttttgcagttttctataatttatgatgatatctgtaacctgctatcaaaaagaaaaaggaaaactaccaatagtactgggccaaaacctgtccgagaaggcccagcacggccagatatcgcgccctcgcacgaggcccgtgcctgccatttccgcagtttttcattcagacccccactaaatcagttaaccgaacaagagtcccgtgccctattctgttgtttcactgacatatgcaccgagatcctttccttttcatttattcacaaactccgatccacgacggtggctccggcacccctaagtcgaacacgtggttgcgcgctccggcaagggtcaacacaactatgcgttattcgagctcagcccgacatatcttttgagtgaatcggatccaaatgacctaaatcgccccagacaacagcgatggcagagacctgagctccgatgacatagaccggagtttttaacgcagtagcgttcaaccccaggctatggaaagctttagcaatctgtcaagc

SEQ ID NO: 175525 - DNA, 586 bp, Zea Mays
tagggccagtcctaggatgagaaaaggcatgaagataaccgcctcgtgagtatcctctgtcgggacagtaactccacgctagatccgctaggaacatagttctttcggtggtagaacaccaatctcaacaaggtgcagaaggtcagcttcagaaacaacagaaacatggttaccaacaaaggggagttgactgttggggtcgattggagggatgaccgggatagcagcactctgttttcttttcttgggcgccattgtgattcctcagacgacgcaagcggattcaggaactcagaaagctagagagcggtggaggaaaaatcaagaactagggttcagaactcaaggggacgtcagcagaagtatgggttggcatgttaagtcgagcgcaaagtggcaggccaatagctcaggagaagtttggaccgtagaaaagcaagcatcactcgggcattacctctaaaatgctagtgaaccgtcagatgctaaagcagagtgtgcaacaaaagattagtagcaaagcatgccttcattcaaaggggggatcattacaaaattgagaccgactcatcacgagtcggcctcc

SEQ ID NO: 175526 - DNA, 823 bp, Zea Mays
gaacaagacccgaagagcgggtcgatggtgagggggggtcacggcggcgaggtgtaaaggcagagccacgcggcgggcaacggcgaaggcttgacgacggtgagccccttaatccacgggcggtgagcaaggggaaggaattacggctggccggggtggcatccagctcaccggcggcgaggatttttactgggctatgcttatctgatggccacggcgcacgaatcacggcgagccacaatcaatggcgatgggccaccggcgtcgagcagggggtgggatcggcatcttcttcagtttaatatttactgtaccatggcgatgatcattctgatgaattgacagagcaagtttaggtcacattttctcttaatttcaaatggcaacacatccagtgacctgcagcaaagttgtagagctatataccacctatatttcgactatagtgactgagctcatttgatcactagatcatggttgaattcacactcaaagctgactctgttacactgaatatctgaatttcaaaatgaaaccagcctgacagccaagttttgagcttaattatctctggatttttcttaacaactaagctcacactcttaagcaaagttgttctccttagtttggtctacaactttgatgtggtgacctatggcaaaaaccctagaatttgaaagttgcaaggctccaaagttgagccaaaactctgaaattcagacttaacatgaaatctcaattagggtcctttttgcaaatgagtccaaaacttagggtttggcttgtaaattcacatatgagtgacccaaatgacttaagatac

SEQ ID NO: 175527 - DNA, 785 bp, Zea Mays
cacttattgcgctagtccggctgcacccttaggcgacttctgcgcggatagtcttcgtggaagacttcgatttttcgcacttgttgtgctaatccggctgcaccctttaggcgacttttgcgcggatagtcttcgtggaagacttcgatttttcgcacttgttgtgctaatccggctacaccctttaggcgacttctgtgcggatttgtcgcacgcgagggcggctgctgccgggcctcgcggtgactttgtattagtcgaatgtcgaagaccgttgaagcggtcttttttcgacgtggattttgcgggggatttttctcttgtatattacatgactccgcctcgttaaaaacctcaccccccgggaggaaaagagtgcgggccagaacaaaattgtttttacaaattacaagggcgggctggccctgatgagtcaaacaaaaaatttgcgcagattatcaatgttccaggaatgctctaagtcttcgccgtttggcgttgcaagcctgtatgcgcagggggaggccttcgactttacaatgtaagggccctcccacatgggctccagcttgcctctggactccgttcgagctgtccggatgaggacgaggtccccttcgctgaattcccttgggatgactgcctggtcgcgccatgcttttgtctgggcttggtatttgtccagggcctgcagggcgaagacgcggtctccgtcgatgagatccttcgaagttggctcatctacgtctgggacggccgacgcggctgtccgaggcgacccatgc

SEQ ID NO: 175528 - DNA, 765 bp, Zea Mays
agcaaccatatagtacactatgcctcagcgtctcctactaaagtgttcccaaactccttgagaatctcatcaaggctagcttgggatacttcctcgacatcggaaaggttatctagccctcggcaaggcaatgctggcttagactcctcctccaagtcagtctagcatccttggtttttgaaacgcttccggaccttcttgactggggcaaacctcttcggtttcctgtgtagtcctcctttagggtcatgtatgcctcccgagtgttggcttcctcgctttctgccatctcgagactattttggagtgatgtgttttcttccttcagttccttgatccgctgctctaggttttctacctgggagtttaggtgggtgcattaggagaaaaggtcatcaaagtgggtgtcaagggtgtggagatatccggccatgtagattacggtggggtaaaacctcactatgctctctccctcacaaatcttggagtcttttcctccaaacagggttatttttcttactgggtgggaagtagcgaaggggtgtctcggtgacttctttgctgtagttttggcatagctggtggaggtctttgagggcagcattttggcatgtgtcttggaagccgtgatctggaaaggtgggtggtttgggtagcttcgactttcccccaggtagactgccatggagcacttatcgaatccattttctcggtattctttctagacatactccagcttcttgtgaactcccaagcgaagcgcaa

SEQ ID NO: 175529 - DNA, 886 bp, Zea Mays
ggcgatcttgggtaccacgatacatttactctaatcccgtttgatcagatcggacggcatgagaccagccccgcgaatcgttatgcgaacttcgatacataccgctcttcccccatctaatggccgaggcgcgcagcatcagaagtctaatctcagccctatatcgcgtgatcgatggccaggcaaagccctccttcacctggttgaacgccgacgactcagggttgagtccacggcggcgcaccatgaccaacgaacccatgctgacccctggtgcacgattacccactaccctcggtgctagacaatgctaaggcaatagcgaatccagaaatggagttgatacttacgattggttagacgacgagcttgtccatggagcggggcggctactcggcggaaggtggaagccgacgagaaattcacctcacgtcgcgggattacacacccaattcctccccgacaacggttctacaccaccgtagggtagtccgaaagcgcaccacgggtgttatacggacacgatggcggtagatagctacggccgcgacgattttctctcagctctctgcacggtgctcacgacgacatgggtcacggggaaaggatagggccccgattagaggggatgggttcgtcctttatccgtgcggaagattctgcgtcctcggtcaatccctcccagcgcggacccgccgaattgaacggaccccggcggacctggcgcacgtctgccatgcgcggtgtttagttgggaggggaaaactcacgaggcggtcccacatgtagctgcaacggcggaacagaaaaggaaagcaggcgcgcatgagtgtgcccctggccgagcgggcctaggtgtcggcacccaatttccccagccaggccg

SEQ ID NO: 175530 - DNA, 444 bp, Zea Mays
aaaggtaccctttagggctggatcggtgtcaggatcgtatgactctagaggaggagagagttcaactgcaccaaaatataagtttctgtaagatacgaagctaaaacatttatgaagctaaaatatgacaaacacacctatacgcctctcgcgctctgcggcttcttcagcttttcttgcttcctctgaagctagatgagattcttcttcgttttgtctgatagcttcgtctgctatctctttgccgccgttcatccacacttcagaataaaatttcccaccaagggcggtaacttcgactgaaggttctttaatgtcgtttgctaaaactgagaattctggctgaattatagcctttgcatgttcatagccaactttttcgagaagcgacacagaccctcgagcgcctacacaagcataaaagtctccctgccagttagaact

SEQ ID NO: 175531 - DNA, 456 bp, Zea Mays
gaagagggaaattgccaagtatatatccgagtgtgacacctgccagagaatcaaagccagtcatttgaaggcagcaggccctttgcaaccccttcccataccatcttggaaatgggaggacatttgcatggactttatcgtaggatttcccaatacctttaggcaccatgattccatttgggttattgtggacaggctgaccaagactgcacatttcttgccggtacataccacccacaagacagagaagtatgcggaaatttatgttgatcaaatagtgtgattgcatggtattccaaagaccattgtatctgacagaggagcactgtttgtggcacgcttttgggagcaactccaagaatcacttgggacccatgtcatacggagctcagcataccatccccaaacagatggccagacagaaagggtaaaccagattttggaagatatgttgag

SEQ ID NO: 175532 - DNA, 662 bp, Zea Mays
agctctgaataaggttcccatggtacagtaactaaagaagatcttcagatacatcgcccctcgctgccggtgaccgtcacgccgtgattcgcgtcgtcattacgattcgtgccctctggtatggagataatcacgaccacgtaaagatcttggcgccagataaactcgaacccgatcgacggggagttcgccgcacccacttggattgcggtcagccgaattggtcctcgccggcgctggccgcttaccgaccatgcgccacgtgcccgggcgtcttaccacatcgcagttggtcgcgttaagcatatccggtgatcgccggtgagtccgccacggtgaaagccactaatcgtttgcgccagtgcccctcctcctctctgactgccacgcgtctccatcgaattcaccagccaccgctcaagcacgctataaattgcgcacaccctcggctccgctatgtagtcaagcacctaatccagcaacttgtgcctcaatcatccactagagcgcgccaatttcaaagttcccccaaatcagtttccgccaccgttaaagcgtcctcgccgtggctagcttgttctaggtttgttcatactctctgctctctcgtatcagcatccttaggctctcctaatgctgctcgacccatttaattgaactag

SEQ ID NO: 175533 - DNA, 480 bp, Zea Mays
cgcataaccccgtctcgcatacaaccatattgtggcgtgcactcgagacactaccgattaacttaacgcaattaccactacaatacacttcgatatacacgttcgatatcacagtgcttcgacaaaccccacccttccaatctacttgtcacatccaaacacactacgtgcccactacattctcatgaccaactttagcacaattatttatgacaacatttatcgactagacaagtgaaacactaaccgatcattcgcacatctcatcttaaagacactaatcacatgtcacaaaatttacatcttcgatccactctatcctacaccacgatgaatacataaattatcttttacatagacgaacatcttagccgactgcggaaattaccaagcatgctttacgctttattaaatttaccacaactaacacactactttacgacgaagtgtttttaacaaccaattaatacttctgtgaac

SEQ ID NO: 175534 - DNA, 597 bp, Zea Mays
agaattccgccagagataggcacttatcccaatttttaccatagtgtaacacacatgccctcaacatgtcctccaaaatctgatttactcattctgtttgaccatctgtttgaggatggtatgctgagcttctaatcacagtggttccaagtgacttttggagctgctccaaaaacgtgccacaaacagtgctcctctatcagacacaacagtcttcggaattccatgcaaacgcactatttggtcaatatagatctctgcatatttctctgccttgtgggtggtatggactggtaagaaatgagctgtcttggttaacctatccacaatgacccaaatagaatcatggtgccgcgaggtgttgtgcaaacccacgataaaatccatgcaaatatcctcccatttccaagatggtatggggagaggctgcaaggtacctactacctttaaatgactagctttgattctttggcaagagtcgcactcagatacatacttagcaatttctcttttcatcctggtccaccaatacaaggacctgaggtcatgatacatcttgttactgccggggtgcatggaaaatttggaaagatgagc

SEQ ID NO: 175535 - DNA, 340 bp, Zea Mays
ttttgccgcgcacgccatgagttgtcgcgggcgaggtggatccgacgagatccatggcggaggccgaggaggccccgactggatctatggcgggggacgaggtagctccgacgaggtacatggcgcgggtggaggcagctgcgattccgacgaggtccacgtcggagggcgaggaggccgcgactggatctatggcggggggcgagttggctgctgcaggatccatggtggaggaggggaaggtccgacgggatccatggccgggggtggtggagctgggtgcgacggtatctacgacggagggcgagggtgtcccgacgggatccattttcgctgtccg

SEQ ID NO: 175536 - DNA, 1107 bp, Zea Mays
aaaatcattttctacaatttattatctaatttcactgctcacggactgggcgcattattatcggaaactgcaggggctaactagtaagttttcccagacacagtttaacccactgatggactgtgggtttattattaaattgtccagggactctttaacaaaactagtgcgccgaaggggtatcgggtggttagagtcgtccgatcagaaagcaagggctcagattaaatcttttcctcgcctgaaccggtacacgatgattaccataggatcggaaatccacgaccgttatttaatggggagaaggggtatcgccacgatttaatctcgaccgtacattgcaagatctacggttcccaggtcatcttccacctctcgtctgaaccgtggggcgagggaaaaccacgacggttgcgctattgccgtggtaggtgatctagcatcctggtggttcctactggcgtgtctagggaatatacaggaaataggaacggcgaatctatggatagaaaatttaccggcgccaatacgtagaggaactcggccacgacgcaacaatccgactacgcactccttgtcgtgaatgattttccggccaccaggttctgctcgaagaagatccgcatggtggcgtttctatctctctctctctcctccgttgaccgcacgctacggaagacgcaggtgcaggccggccgtcgctacttgctcggctgtgtggaggcctcgcgacgacttgtagatggacgaggaggtggtcacgggtgctcaaccttatatatctagaggcacggagaaacggccgggcaatgcatgcttgcatgagtcctggcggttacgaggagttcggctgtttgttacgatatcaagctgagaggagagcatgtccgggatggcccgcacgtcagcgccctcacagatgcaagcgcttgcgggtcacacctaaccagcggcgaacgcggcgcgtggctgttgctccattccgttttagctgcgaggaggacgaacgagctgaccctcgtgctcatgcacaatggctcgccgtgaaggacaattgggttgctggtgaaggcacgtgacgacttctcatctcctcttttttttcca

SEQ ID NO: 175537 - DNA, 1013 bp, Zea Mays
cgaagggcataaaagaaaaagaattgttagtgttgtgggcagacagtgtaacaccccaggtgttacttagggatttcacccaagccaacactattgaacccatcatcacatgtggtttagtttgagcaaaagacaccaaacttggggatcaagatcctaagaaggtgtaacccatcttagaggtcatgccttggccttatcatgcacctaaagaggagagaagggctcaaaccctaattcaaatccctttaggcaaatggagccctagaggggattatggcaaaagggctatgtaaaccacattatcatgacttgggctaattataaaagttgtagtacacttaataccctacaaaaattagtaagagagtgaccccaaaaagaattcagaaaaaccccaaaaaggtcaccaaagagaaggacataaaagaaaaatcagatttttctcactttcaaaaccaaccctctttcaaagatcaaacatgttcacctttttccaaacctcaaaaccaaagggcccaattgacaaaatggcgcctaaagacccctagaacaccctgaaaaaaatttgaacccaaccctaagtcgtttgacatgacttgacacgggttttgtcgtggtgtggacagctcggacagagccaacttcccacccccatatctctcaaccccgaccatatctttgcttggaactcacatggaaaagataggatttggtgcagagaagagatcgtacacggggtttttgctgagatctgcacgctaaggcgaccaaacaggccgttgaacactggcagaagtaaaccaccacgtgttccacgtgggcagacactcgggaacgcgccagagcacgcccgcacgtgcacccccgcgcgccatcagccgcccctgtgcccacgcctatgttgtgcccacgaatggctataaagcccacccccatgcatggccaccttccctgttaccccctccgcaccgcgcctaactttcccgagctcgcccatagctctggcgacc

SEQ ID NO: 175538 - DNA, 632 bp, Zea Mays
gttgcatgaacacacagatgtgagtatactcgcttttgtgactcggctcatggccattaagtccaagtattttttttctcgaacaattgttacaatgagattttaaagttattatgagatgtgctaccaaagcccaataagttgtctaaagacatgtaccattcaaagacaattatcaaaggtctcggtatggattatgaaaagattgatgtgtgcaaaaataattgtatgcttttcatgaaggagcatgcgggagagaaaaatgtctgaaatgtggacaatctagatttgtggaagttgttaatgatgagggtgacaaggtgatgacatatgttgcacataagcagctccgttacttgccactaactcctcgagtgaaaaggttgtttctatctaaaaaaccccgctatgcacatgcgatggcacaaagaaggtgtccatgataacgatgacctaatcgtgcacccttcagatggggatgcttggaaggctctcgacacgtttgattcagactttgcagctgatccgaggaatgttcgcatcggcctcgtgactgatggcttcacaccttttggtcaaatggcatcatcatactcatgttggcccatctttgttattccatacaaccttcc

SEQ ID NO: 175539 - DNA, 757 bp, Zea Mays
gccattggaatagaactgcgaagacgtctgccactcctcccctttgcaggtaacttttgcccaccccacccctctgtcacggcgtcgcggtgctcaatccgggcagctcccaagttctatcgccgccgcggcagcgccatatattcaaaatatgtttgaccattatgtgtaataatttgtgctaacactagatataggtggtgacattccgtctccgaagtctacatatgataggtacatttcacttataactcttttgcttttaatgtcggagtataatgactaattaaaattttattttgtagtagccttgtacttgtgtcagttagtggcatccaatcttcaagtgtgccaagtggagaaggtggaccatccgctgttttagaaacacaaggtgcagctcctagtggagaaggtggaccatccgctgttttagaaacacaaggtgcagcgccaagtatagaaggtggaagacctcttttattactaggaccatccagtgtagcgccaaatcttccaactactccatcatgccatggcactggtcctagaatgcttaaaaagaagttcacaccaaaaaaaaaggaaggcatgagtacctgatatgtaagatttgaaatatgttgtgtgaactatgtgttatttgagaccatgtgaagtgtaagatttgaaatatgttgtgtgaactatgtgttatttgagaccatgtgaagtgtaagatttgacatagaactgttgagctgcattcccagttgag

SEQ ID NO: 175540 - DNA, 763 bp, Zea Mays
cacagtgggaagttatgtacaagaaacgtgatcgacataaggaaacattggcagagtattttaaggaggaggctaagaaagagtttaaagacctgatgtctcgaatgctgtcgaatcctcctatagaattgatgcaacaattagcgattgtgatgtctgttcaatagatgaccactcaacctccacatatgcaactaattccagcagcttaaacgctatcttccatagatggtacaacagtcccaagctctatcgcgtctatgggaaataaggaccattatccagttcatgacatcacaaggcatgtggtgtgcaccctagttataagatatggtattaacaatcttcgtatgaagaaagtagccacaggccttgcgatactaggacacaaattccatggaaacgacattccataacattattgcatggtagaagtgatgacgattgtccaaggatccgaggataacatgctagacatccttgggccccgaaggtattgagacacttggacatgctatcaagaatttcatcctttagcctcgacggggtatctaattggctgatccaccaccgtcaccgtctcatgcccaacccctaacacaagagtaatcaccttctattccttttcacctaccatcgccacttcctcatcctctttttgacacaccgtctccgccacaaagcatgtccattaagggctccaccaccttctccacccctactcatcctctctgtgacccattgtctccgccaccagcatcgc

SEQ ID NO: 175541 - DNA, 532 bp, Zea Mays
caccggcaacggcgtcaaaaattgtctttgctgaaaccgccgaagccgaagctactggaacgaaaactactgaagctgaaaccagcgaagccgaagctaccggggccgaagccgggggcaccgaagagtcaaacctggaaactacacttgaggttattgacaatatactcctgaaatggctgaagaagaagctactgtggctgcagtgaatacggcaactgaaaaggggaaagagcagattgatgaaatttcagaagaaggaaattttaactttcaagatctgctcggacaagaactaacaaacgccgaaaaagaggagttgaaaaaatatgccatatcttgcagatacaaatcaggggctatgctatttggtggggtcaacgaagggaaactaagatgccttcgggaccgcaccgaggccaaaattgttagaacccttttcaaaagcattggcttaccgaagctggaagcggacttatgccgttatcaacgacaacatatcgccggaagcttgctttatgctaacttcaag

SEQ ID NO: 175542 - DNA, 555 bp, Zea Mays
atctaacataaaaagaaaaatcaatccaatgacttatgttgttatgcttcttgcttaaaattggatatgatttttctacattcatcactctccatgttatgaattggatttgtttcataatcttaagaaattatttatgcctgttttatgagttaaattgagcataacatcatctatggataatccagttcatgctatgaagtttccatgttttagtattctatctttctttcctttcaaaagggattactaaaagggaaactagtgcttgtgctactaatgacatatatcttgagcttacttatgaaaatcgacaagagagtaaatacaaaccacaagcctcaagggtttctcttcacccaaaggaagaaaggtaaaagcaaaggtatgagaactctttttcccatcaatggttattcactctaaattatcttattctacctatgtgaagaatatattctttattggacttgatttttgctaagtatgcattcaatcttgttctcataaatgcactagtccattagaatctatttcatgcctttgctatacata

SEQ ID NO: 175543 - DNA, 464 bp, Zea Mays
cttttctctaaaataaatatgaatggttttcaacttatcctggctaatttgtatatgtaggttagtggtcaactatactatgctgctacgatctttcaggtaccgacatattgttggtttcctatatggattatagaattatccagttcaagcatgtctgggtattatagatgcccatttgtgttaggacttattacgatgatctccaatataggggttcatggcctcaaaacactatcaatcccagtttcatggtggaaataattgctaaacttgtctgggcaacttgggatcattactttttagaccccacattatctattgaattcctttatcacttgtatctatcatttgtttgcaagcagagagttggattctctggggcatttggtgcctctcatgtgtaaattcttcttattactaaaggtacatgtgaacacctttgcatatgctctattgaaatt

SEQ ID NO: 175544 - DNA, 335 bp, Zea Mays
ggagaagtccataaatcacaatgtattattttgaatgattgtgtagtgcgggaagatgaactagtaaaaggaagtctagtatgacgacctaattaacaagcatgacaaaaatcgggagtgctgtgaggacaacttattgcggtggtgttgtgaagtttggtgaggacatcagggctaggatgtccaagacgtcggttccacgtggaagcggagatagccgtcagagcgtgagatggagtggtagacgtgtatgggaaccgaatggtgtagaggggaccatcactattgcacctaatgatctctctccgagaggtgaggtccttcatagaaacacc

SEQ ID NO: 175545 - DNA, 365 bp, Zea Mays
agttttcaaagtatgcacaaaaacagggacccgctaaaccatgctccgatacgagctgtgacagaaccgaccaatttataagagatcaagtacaaaaattatccatttagacggtcgatctagcatacttgaacccatataaacccggtagtctgtgaaatctcgaaggatttcaaactttccagtaacacaaccagggtcgtactagttcagcagccatagttcacatgttacaacatttcgcacatagttcaaatacataggagtagcagaataaagttattacaacttaagttcgaaacaaagtagcagaagcaaataagtcttaacttcacccgcaacacacgcaggttcaaatacagtgc

SEQ ID NO: 175546 - DNA, 772 bp, Zea Mays
gccacttctaagttttttcctccaatcttaaccggctatatatgcattgggctctaggcccacaacagataacaaaaccataacggccggcacaacacaacacaacacaatacacaatgtaacatcctagcgtctaacatctctgtagttaaaattctagtcatgatagttgttgagacttgatcgaaactctgagaacactgaggatggacgcctcttgctggtgaagacatcggtgaaccgcgagatggtcgagacgtgcaggaaacgaacgtccccaacagtaacacgctcatgaacaaagtgaagatcgatcctagtatgcttcttacactggtgttggatgggattgatggagaggtacacgatgctaacattcccgcactagacaagcgtgctcctagtaagggggttgtgaaactcttggaggagccagctcacctcaaccacccattagcaatatcctaatactcagcttcagccctcagcaccgaagcgggtgaccacaggctcacatttggaggaccaagagatgaggttttgtcatcaagaaacaccacacaaccggggatagaccggtgagtgttagtgcactcggtccaattagcgtcagtgtagacaaccaactcatatgcggagaagcaccgaagaagaagaagcatgtagtcgatagtaccctgaaggtacctgaggatctacttaacagtaatcaggtgcgactcccaaggatatgatgcgactgatgcaagccgagaatgctaaacaactttta

SEQ ID NO: 175547 - DNA, 618 bp, Zea Mays
gctggcccacgtacttcccaaaccctcccctcggcccaccacggcctgccgacccacagcactgtccctgcaccgtgtccctagacggtagacccgctcggctggcgtctcgctcacacgcgtggtttccctcttgggccactgtggtgtgggcccctatcgtcagtcctatcatccagctcaggttggttgcggcaaactcgccgggcctgcctccgcctcagtcgggaaccggttgcaaccgcgcgcatctcaacggaatccgccatcctcgcgtgctcagcgttcccgtccgcctcaccacggattccgcgattccctggactcggaacctcgtagccgtataaaaccgagccgtcccttttgcatccgtggcgtcctccattaccgagcgcagagagagtggaagcgccaccgcgcctgtgactcgcctgtgcctgctctcagcttttggcgggggaaatcacctaccggagctgctgggcgcgcctctccgtggcggcaaatctcagcgtgggagacttcggtgagccttttcttttctgttctactgcaatcctaggatccgaaagcgtcttgtggcatccgatttgggattccaaatcgccgccgttgtct

SEQ ID NO: 175548 - DNA, 386 bp, Zea Mays
catacaatacatgtacttcttcatgtaaagtattacagtacacttgcaggctttcgagggacgcactaagctctgccacacgagctagagctttcgcttcacagtcccaagcgaacgaacgcgagttgacagcccaatcaatggccatatctcaagatctcgtactgctaatggttgacttcagctgacaattcagctatacgatgactgtcttgctcccgtgccctgttcctgtgacgtaacttcgaccgaagttgttccaccctggcttccaggtctccaatcaggtcattactgccactactacttccttcatgcctggaagttagctgatgtcatagcacgccaaaaggtccagtagatttgcgcgttgttttcctggtaca

SEQ ID NO: 175549 - DNA, 795 bp, Zea Mays
gaagtaccaacataggtctttactaaagttgaccccactggtggtgtacctgctgaagctgaccccaatgggtgtgaccgtgcaccaactgaccccaacgagtgtatccgtgcactagctgaccccaatgggtgtgatcctgttgaaactgaccctaatgggtgtaaccttgttgaagctgagcccaatgggtgtgatcctgttgaagctgaccccaatgggtgtgatcctgcaccatctattgtccgcatttttgacaaggacgaagaagaggaagaagaagttctgctaattcataagaatagccggcgttacagaggtagtaggggggatagtgatattccttctccagctctgtctgctcttgttatccttcaagatttatccataacagatcttgatcaggcccttgaggatgtcattcctgaagatatgctgttggaaccgactattgatgatatgatgaatgtttgctctgacgctccagacgcgggattagaggtatcccgggcggtatctcgcgcatcgtcgactttggaaggtagtcttcggtgtcaagaagttggtcaggattgcctgactcccatggaggtgactgaggatccttcagccttagaggtggctgttgcagaaaacccagcccctaagggtgatgctggcggttacctagcccccgagggtgtcgccagtaatgatccggctctggtgggtagcgcaagctgcaacccagcccccaagggtgttgccggtagtgatccagctccgatgggtagtgcgagctgcaacccagccccc

SEQ ID NO: 175550 - DNA, 533 bp, Zea Mays
accgtcgactcgcgggctatcactcaccgatcacgtacgtaaacgccagctagcccttgcccgctgcaggttcatgttgctgctcgccccttttgactgtctcctgctgcttctactttttcctccttcctctccgatcacccaccatattctgtgacgaggaagcgctagcttgctgtcctctcatcggcaaggcaaacgtagaacatgccgggccagcagcaggcgtgttggcagcgctggcacaacaactgctacgtactgtaggatgcgccctctctatgcaacgtcgtcgtcgtcgactcgcgagctcctctgcctctctctcatcacactcacaccgtacgtccgtacgtatacctacgtcttctgcactttgcctttcttttttgtgtgccctagctacatgcttcttgctttgctctttcttgccttcgcgttctttggctggcggcggctcacgtacgtcgtcgtcaacaacaagtatttgcatggatggggtggcgggccttacatcaaatctttcactgtcc

SEQ ID NO: 175551 - DNA, 335 bp, Zea Mays
tctgaaacgctttaagtcggtgcgacatgctcacgcttacatgacttagggtgatcactatgccctactaacggagcaatcagcttaagtcggaaacgccttaagtcggtgcgacatgctcacgcttacatgacttagggtgatcactatgccctactaacggagcaatcagcataagtcggaaatgccttaagtcggtgcgacatgctcacgcttacatgacttagggtgatcactatgccctactaacggagcaatcggcttaagtcgaaaacgccttaagtcggtgcgacatgctcacgcttgcatgacttagggtgatcattattccctac

SEQ ID NO: 175552 - DNA, 1141 bp, Zea Mays
ttacttgatgaggggagatcagcagcaacgatgtcaaaggcacggctcagaggaacctcaacctcgtcagcatgcggtagactcccagcgtttggatcactagcctctaaagtgactagaccagcgagagtcatagagagatgtgtcaccacagcctcctcgggctagactggtggcgatccaacgtggacgtccatagaagcagcagagggggagcctgccccaacaccctcgggggctgggtcgctaccatcaccacccttgggggctagatcctccacggcagccacctctaagactgaagatccctcatccacatccataggagtcaggtgactcggatcagcgtcttcgcggggaagaccgccctctaaggtcgacgaagtgcgagaaactacccgggtaatctcttgcccggcagaatcatgcggcagaagaccatcatctgggacctctgaacagatggtgggattgttagcttcaggaggctctgatagaaggtcttcagggatgatctcttccagcgcttggtcaaagtcagatatggacaacccctagaggctgacaagcgccgacaaggcttgtatgggaatgtcgctaaccctgtggtgacgactattcttatggatcagtggaatttcttcttcctcctcctcttcctcatcaggcacactatcagcagcctgagtatcatcacaacctccagcattgtcctcgtggatggtgctcgccgggccatcgccaaggaataatgtggaggggccagcgtcttgttctaggcatgacaaccgtcagagtcgccttttcttcttcttttcctcgacaggtgtagctggacggttcactcagcgtgaacgtttctgacgagcaccttctagtttctgaatttcctcatcttcgccaaactctcgcccggtcgcaattgccatcggctcagtgcgggcagagtcagatgattctctggccagcaggctaagaacaacatccatctcagcatccatctcgaagtgagtctgtttctcagcctcgagaagattttggaggggagcaattaaggcctcaatgtcctctgaggagggtcacactctatggctcaggctaccatcttgagtagtagaattggagacaaaatcagagaagg

SEQ ID NO: 175553 - DNA, 329 bp, Zea Mays
catgaatatgcaggtgatcctctacttctgatatattttggggaagtctattcaaacactttcgacatggacataatatctcctcgttgtcaacaaatttatctgaaacaaacttcataaaatcgttcaccccttctaaattgtgattactaaaaagcctactattgatccaagatctattcatctgccaaattttgaaataaaacaacatatattaacattatttcacttttggtaaataatctatattctcttgaattgaacagtcgacaatcagcaacgccagtggcggacgcaggacaagaattcaagggggcccaaaaaaccgc

SEQ ID NO: 175554 - DNA, 530 bp, Zea Mays
ggccgccgccgttgtgcacgttgaagaccagaaagacccgcctgccctcgatcctgtcggccagctgcgtctggagcgcgtccgccttcgttttgggcccttgaaggacgcctatggcggcgcaggttgcctgtaggatctgggcaacggtggacgccctggagatggacacccacgcgcgcgcgctgaaggcgctctgcgtcctctggtcgtcgaagatcttcctggccacggtcgtcttccccacccctcccggcccgtagatcgcgaagatgaggaactcgcgaggtggctcgtggtgctctgtcagcttgtcgaccagtggcaggatcctcatctcgatcttctctgcctccactagactgctgccatggcgcacgaggtcgtcgtccagaccgtcgcatgacgacgatctgccgtcgtgctggtaggttgccgtatcgctgctcgtgagcgcgggaggacggttctcggatagtaaatctatgtccttgagcaagctgcttatctctcgcttgatgtacatgtcc

SEQ ID NO: 175555 - DNA, 365 bp, Zea Mays
cgtggaccgagttctagaacggcgttcggaccaaattggtgattcccagtggagcgccaaggttagaaataggcgtacaccgaattagagcatggattattgagtatggcggccggtacaagttcgccggagagcccacgccgtcgtccatcgtcggggatccggtcttgcgaagaagaaagaatagagtggccttagtgcacatgtcagagacacaagggaatagtgaataaggattctttatggtttttcgaatagttgaggacctctgcacaagattaccaatgtgggagtgggcgcgcgcgggtttctctgttcgtgggccagatcgagctagtttcagcccagtactattcatccttttc

SEQ ID NO: 175556 - DNA, 965 bp, Zea Mays
tcaaacctgggttgggattttgggatgttacactgcgccctggcaacacgacgcagtatttgtgccgttcgaacttggttgcgtcatgtgattgctatgtcgcgctctccattaatcggattgctcccgttgagtcagaccgtcatcgctaagtcgcgtattttttgcatgccctgtaggcactgtctgtctgacgcgagccaaaattgcgcctgttgcgcacgttgcatggatttatcgtgtaccccaattaccgagccataattgtgcctgttgagcttattacgaaggcttgctatactgtcgtagccctgatggccgcaaccgtgttgccgccagatacgctggagcttgtactcgcggaatgtggtgggttatccgagcccctgaagtcacagcatagcgcaaccttcgtaaataatttcgtttggctctatattttgtttgacctgtgttgtgtggcttaatatatttatatatatcgccagtggccataacaactttgacaagctctatggtgcttgtaagctctgggaagttaatgaaatacctatgaaacacaaataaataattctctgctctctcctcatggataaagttttacccgaagtaacccgaagatatataatataatgcatgaaagcctttttggcataagacatcacaaattgggattttattagtaagcaatatgaccttaccaaataatttatgaccaaaaatctcagtcatacattgctcaccagatgttagcacattgctctctttgtcgctgaatgacatgaagcaaactatgagataaaaggacatgtagtcgctagcaacacgaagttgcgagtataccgagaggttattctgagaagattttcactatgttggtgtgaaaactattgtgtgttcccgtcgaaccactttgctcatcctgtctaggacctttatgcttatgttgcatacatctctcagaa

SEQ ID NO: 175557 - DNA, 551 bp, Zea Mays
aacattgcacccaccgtgcacgccctccggatcccggaatgtgcacaataaatttacttgtcggagtgaggttcgaaacactgacagatctaatctagtaacctagtcgtatgggagtccaactctatataatcacaagtgtgcttccttatccgttaggatcctatcatatatcttaggactctgtcttgtatgttgtgattttgtcataactgtttaggactctaacttgtctcttctattccaataatatctttatcatatttgtacttttggggtcctcatattagaccctcaaaaaatcacgacgattgagtctagagactcaaggtaggagatgactatgatgagtgggttctacgcgtcagtcactagctgcgattgagagtccacatgcgtgggcgcaatctcgaggtaaaaaacagattcacagattacgtattcggcccggtttgcctcgggcatggtgaaagcgtggacgacccactgaagtttagacttttttcgaaatatttatttccttgatttattttaattctagagaaatctag

SEQ ID NO: 175558 - DNA, 480 bp, Zea Mays
cctattctatgtttgggacttatggagaatggcttcggctgaatgcctgaatcgggccgggaagcacggagcagatagaagtgcactttccaatgcagttagacagagaaggcatggctgtcatgttataatgctgaaggaccccaagaagagattatggcctatcgtttaccaccactgcccgttatttgtgggcttcaccgagggctggaaacatttggtggcagcaaacgatcttcggactggggacatctgcgagcttgttaaggggccagacgatggtgagtcggtgtactctgtccggatgtgtggtcacaaaatttaaagccgtcctggcttcatctgtgcgcttctcttctcttaggtgggttgctaagagcacttagcagcccacataagatggaatgattcatactcgagaatcattacgtcttaaaatcaatatcccgatatacaagaaggaggatgttcctcctaaat

SEQ ID NO: 175559 - DNA, 593 bp, Zea Mays
atctcgttcgtacctcctgctccaggtaccggcggcggttgagtttatttggcagtaacatcctgttagttttcaccccttctcgtgatttgttgttagcaggtgcttatggctgaggttaagcgcaaccatggaggagggatgcgacgtgacgaggtatggaacggggagcagccgaagcagagattggatcaaagagggctgggcaggagacgagcaaatcgtgagtatttgggtcccctgtattcccaccctgatgtgcaaaattaagcacctaaacctgaaattgagctatttatatttgaatcatttttatcgaagtgtaatattaatacatgtattgtgcctgcactatttctttggaatgcagctgccaacctgaggtgttgacaccgtctctttccatttcactgataattgttacacttgactccacttggggtcatctgatccagtatagataacctcatttagctttttttgtttacataaagcctacaacagtacactatatgtgcacaaatctgccttacaaccctctttgaccatcttctctataaggacggtagcaaagtcagtattgcctaccttgc

SEQ ID NO: 175560 - DNA, 412 bp, Zea Mays
agctaatattaatcaagttaattaacatttatacttataaaagcatgagttaaagctatggactcgttctaattaaattgttattttaataaccatcgaaccaaccaataatttaattacttaactaaaacatgtgtggtggcagcataataattttaacgtgtgtgcaagatagctacacggctaatgtataattaattaaccaacatagttgactttacgtgaggaataataataacgcgcggcaagcgcacgacgcgaaatcggtacacacgatgcgcggggtagacaaacgggctcgggggtagacagctatgtctaggggtagacaagggcctaggcgagcgttatcggagttccgacgcgcgacggacaatgatgacacgtgcatacaatgaaacgcgaacgccgc

SEQ ID NO: 175561 - DNA, 339 bp, Zea Mays
gatttacctacttttctgcttgctgatggtgccgattcagagggacatctcacctatctgccaggactgctttctctgttgatgtcgagtggcaagtataatgaggagtgggtcagagtgtctatgctacagtgttgattgaccctaaccatcagtggttgcaattccgtttcgagagagaggatgtcactttgcatgccagtcagattcgccagctctttggatttccagagtcatcgactaggctccacagtttgtgctacggcacctcggatcctcctcgtcgccctcacagcggagttgcacctactacagctcacgtcgcggccctgttcagac

SEQ ID NO: 175562 - DNA, 1262 bp, Zea Mays
gttgatcgttgaaaatcctaggggcgcttaaacaattttgcctcggctatgaggaaatgggtttgatcgtccgttggataaaaaagtgacggtttagattttataaagtgaaggggtatcgacgatctaatcataatcgctcgaactgaactggatggcttggatttaattacccaatgatgaactcggacacgatctacaccgttgattgccctatctacgactctgactgagtccacccgaatgatgtatccgatctaatcaggggccacccattcaatagatcaatggtcaaaggtttgtcgccctcctctcgacactagactcgacagcgaccatgcatgcacggcggctcctcgtcgacgaagtcccaacccacgccatggtggccaaaacggtgtgcgagcacgtgcataggaaagtggagatgacaaagaatgcatgtaaggaggttttaccagcgtgtgtacagtgtcaagcctgcccatgaagcagtgcggctccacggtggtggccttgctctggcgagcaatttgtagtcgtcctgtggcccctcgagctcgttgaattacccttgaaccctacttggttaccggtgatgctcccaaacatctttttggctttcgaacgacgctgcaggcgcaaggccacgccggtggctatttctccttccttcggttcgcggtggtgctctacgatggtggcgcttgacaatagagctatccttcatatgcgttggtccaaggggggtattggttggtacttatacgcatgggataaggatcgggggaaggcattggccgatgctcgcggcttcgtttgcaacaactgaagatggttacgatgattggcatcgagtttgttacgcacagtcggtaggagacgcttctgtgcagcgggacccacacgcagtgtctttggaggcgggcgcacgcgagaccagttgaacgtgacgtatccaaccgagccgtggagtccaagtcctggcgaaactccctgcatctaccttctaatatcgtcaggagatagaagataagcctaacccacgagacccatgcatcactggctcagctgctcaaagggaaaagaaaagggaaggttgaagaagtgggccggtgggtgtaatacttgaccgagaggaaaaataccgacctgagtgcaagtaagttttctcttctttctttttattttattttatgtttcccttttcaaattcaattttataatcaagaattgaattcaaatatgagtttcaagtttca

SEQ ID NO: 175563 - DNA, 857 bp, Zea Mays
tggacgccggtcaggcggtgaagaagccactgtcagatctgcaaaatcgaagtagttacctactaaaagctatactggaccagaactaaaattacaacccagcaatgcaccaatgtgcatcatcagacctgtagtgatgcaaataacagggaaaattcactacaaacaaatccttggctactgctcctaatcaccgcacaaattctgactgcaatcagaagcgttggtcggttcagtgactacaatcagcattggttaactggattcttattgggaaggtcttgctacctatacagatatccaagtttatgcgccatgtgtgtgcgcgcatgcatgaattaatgctatccattaacgaattaatcaccgcataaattctgaatgcaatcagaagcgctgcatcagctaatatattcgatctccacaaatcacaagctaccagctcttccatccgttcagtgatgttgctgatctacggagacctacggacatagataacaggacgctcgtcgtttttgctttccgaagatctacggagccttacctgatcccagccgcaaggcgcaccagattttcgtctccgtcctgttgctgccgtctcgtggatgttgtggacgccgccgcagtcgccttcgtcccggagccgccgcagcctcccgcgccgccaacaagcgcagattctttccacgccgatgggacgagggttgtaacccggtcgagatgatgtgggaatcgtccgggatgggccggggttgatgcccgaacaggcttaaacgaacgttgtttttgcgtgggccggtatttcaaccacggaggtctgatcccgggaggattctttccaatccagactgatcccg

SEQ ID NO: 175564 - DNA, 787 bp, Zea Mays
cttgtactggccatggccggcggtggctatcccaattagctatggggtgagcatttccgaccccaggcgactcgagaacagcctttaattttggtttgtacactaagagaacgttctacccatgcgcacggcagaaaccgtgacgtcgagcccgcgttcccattcactcacgcccgaattggtcaaatggctgctacgatgagcttcatgggtatacagagctgctaaaacaacactcgagaggtgtagagccctaacagagtggtccggccacggagcgcggagaacttgtgcttcccagtgacagaaaaaggggaaaatggcaccgcgacaactctgggtggaattgggaggtgagattggggctacacggccgtaaggaactatagtttaaccgtgcacactcaatttgggaagaggtggcagaggcagtgtgaattttgggcttcaatcaactcactggtggagatgtgaatacctcgtcgtggttcatagcgctatttatagccacggcggtccggctaacgatcagcgaccacggaaggctttgcttacgcatggtaaccacgtatagaagaggtacagtaagggaggagcaaggcatgggtgacaccgcggcggaaagcactgagtgacggcgaccgccgatgaatatctccggccacgcacgactgagctcgcgggatgatgccacgtccaaagttaccctcccccggatcgacccccccactggatcactcgagctcatctgattcaacagtgccatagatcttttccatgtgttctt

SEQ ID NO: 175565 - DNA, 595 bp, Zea Mays
ctggcggacgcggtaaatatcctcggcaacgtggcagcaaatcactgaggtggcaggctccggttaaacggcggccaccgtgccatcaccgggttccgccgcgcggagagctcgcctgcgcaatctaaagtccgcggtcctcatccaattccggccgttggcctataaattgtgcctgggttccacttctttatcacatcccgcacctccacgatcgagcactcggctcaatttcaccgaagaacccacaaatccctctctcctctgttcttgctccgccgtgaagaactccttcgtggccagcgctcctcgggtcagtaattatcaaattgttccctgtttcagttagtctttgatctcttattgctcttggatgcggcaaattgaagtttggccgaagcccatcaccggaacgcacccgtgcgctgtaaaacgccgccatgacaccctttccgtcgccccacctttctgctcatgcctagcccaaaacttagcgtgtgcgtcatctctggtgaacccaggaaccttttcccagcttcaatttggccagccaagccttcggttatccggaacatcttagttcacttgatcaccc

SEQ ID NO: 175566 - DNA, 709 bp, Zea Mays
atagagttccccgccgatttgatagttatgggtaaccaggatacaactatagatgtcatcctagggatgaattggctaaccaagtatcaagccagtcttagttgtgataagagaacagtgaagttagtatccctatcaggagaagaagtgttagtagagttggtcttgtcaggaccaaggaaagggagttgtcaccaagtcaccgcctatattgaggagattaaaccatcagaggttatcactgtagtgtcagaattcccagatgtgtttcccgaggagttaccaggtatgccacctgaaaggaaggttgaattttccatagagcttattccaggcactgcccctatttccaagagagcctatcgagtgttcggaccagagttggtggaactcaagaagcagattgatgagttgttagaaaaaggctacatcagaccgagtacctcgccttgggcagccccagtgctatttgtggagaaaaaggatggaacaaagaggatgtgcattgactacagatccttgaatgaggttactatcaagaacaagtatcccttgcccagaattgaagatttattcgatcagttgagaggagccagtgtgttctcaaagatagatctgaggtcagtctaccatcagctcagaatccgatcctcagacataccaaagacagccttcatcactaagtatggactatatgagttcacggtca

SEQ ID NO: 175567 - DNA, 285 bp, Zea Mays
ttgtcaaattcacaacacgtgcaaccaacaaatgttactaccaatttgaaggaccagccctgcaaatcaactggtgggactggtcctaaactgctgactgtaaaataggataaaaccagcagttgaagccaatcaccgaataacaggcagtcaatatccagtgaggcatcgaaggatgcaagaagttcaactgatgcttcttgtggtgctagtaaaactaaaatttgctggcagaataacctatggcaaggtcaagctttgcagacatcgagaacactaagaaga

SEQ ID NO: 175568 - DNA, 484 bp, Zea Mays
gttattccttttgcggaacgctgctcggggtgggtagtgggtcactgtaacgccttgtggcggtgctccggtgagctcgccgtcgtcggctaatcatgccgccgcgattgagttcggattgggggggaaggcgctgagccattgatccgcaaacgaacgtcccagattagaggtgagggtatcgcttcacatgcggaatcagatctgttggatcgtgatcggatggcctcggatggatcacgattatgtaaaatatgtgtcgtagatcttagatccatgggctagcagcacttacggatccagatctaatctgatccgttgatttagaatcgaacggccgtaagaccccgatacctattcggccatgatattttgctaaagagtccccgcagaacataggaaacaacccgccgtcctaagcactgttgaactgggtctgggaattctttcgggaaaacccctggacttctctgtaattgacccg

SEQ ID NO: 175569 - DNA, 745 bp, Zea Mays
gaatgatgaagaagtcgatgatctcggaggcctggaaagctcggcgacccggtagaagatgtgaggatggaggctggggagcaaccggcgccgctgaccggccctcgtgaggatcctgtggcgtccgccattctgcctggcgaagacgctccagcgatggctgcgacggccaccgaagaccctgcagcgccgaccgctccttcgtaggtggcaggatcgtgttaggggtgttgtgtttaggaccttatttgtgtgatactgaaagtcggttgctgcataggttccgacgtctgggcctgcttaagcaacccctactgatgatactaattttgtggcgactgcaaacgcagtgcctgttaatgatagtttgtctggttctaaatcttggtcttggtcatcttatggtagtgagtttgggagcccgtttttctggactgaagagtctttggatgaagatttggattattttgctgcgttagatgtggccacggcggagtcctcgccgcagctggaggtgtgcgaagtgtctgatcccccggctggcgcgaggaccgatcggcgtcgacgaaaagtggtgtcgaagcatagcgttggcgagatgtcatgaagtggtagacgtcgtcggatggcgatggagcgaacccgccttcgagtagatcggggtggtcaacgagatttgttgtcctcgttgttcgggacaagtattggtgagtgggatctgtggaatctttttaagggcgaggag

SEQ ID NO: 175570 - DNA, 765 bp, Zea Mays
tgagcatgtcacaccgccttaagtcattgccgacttaagtcgatttctccgttagtagggtatagtggtcaccccgagttaagtaagagtgagcatgtcgcaccgccttaagtcattgccgaattaagtcgattgctccgttagtagggtatagtggtcaccccgagttaagtaagcgtgagcatgtcgcaccgtcttaagtcattgccgacttaagccgattgctctgttagtagggtatagtggtcaccctgagttaagtaagcgtgagcatgtcgcaccgccttaagtcattgccgacttaagctgattgctctgttagtagggtatagtggtcaccctgagttaagtaagcatgagcatgtcgcaccgccttaagtcattgccgacttaagtcgattgctccgttagtagggtatagtggtcaccccgagttaagtaagcatgcaggttgacagtgaacaattcgagtgcctttgaagtctttttattgatgatatattttccagtttacagagtacattgtcgtcccaatagcttttgagatatagctaggggtaaaacttcctgagatgttctatgttccatgagttcccaatttccgtgtcgtccatctgagtgagatgatatgatccaggccgagtgacttctgctactatgaatcgtccttcccatagtggcgacagtttatgtcgtccctcccccgttagaattcggcggaggacgaggtcttccactgcaaaggatcgatgccgtatggccctg

SEQ ID NO: 175571 - DNA, 872 bp, Zea Mays
taacaagcgaagaaccccgcgcactattcgtttggctcactaacaaatgcagataggccctcgcacttctatttcttcacagctcgtggtccctgacggtgaacgacgatgaaccgagcttcggcgagcttgtactggccagaataagcaatggctagccctcccctttgttggacaccaaattcaaccatacacgatcatttcccctcacttaattgctagatttgagctctaaatcaccctgcccacggtgacagcgggatcaatggacatcatgaagtgttcccgatgatctaaggggttctagcctaatcggtcgagtcgagaagcatcaggggcacataagggtgctaaaacaagagagcagaggatatgatcggacctgaagcgcactggccacggtgagacccttcttacggcggcggaaaaccgatttgggggaagtgagcaattcgggggctctagtgagtaattggaggcacgagtgggtgtgttgggtgcataattacatagcagagccgagggtgtgctcaatttataggacccctgaacggtggcccatgaatttgagatggcgcggtggcggctggagagaagggggtgcactagcgcaagcaattggtggctttcaccgtggcgagctcactggcgatcaccggacgtgtgtaatacaagctactgcgacgtggtaagaaaccaaggcacgtggcgcacgatcgttgagcggctaacgccggagatgatgattccgaccagtcgcagtccaagtgggtacggcggcacaatggtgagcaagcccgagctaatccgagcgccaagatttttacccttcttcgttatccatctacgctaggcacgaatcaccgcggctg

SEQ ID NO: 175572 - DNA, 454 bp, Zea Mays
atcagcagtcggcttaggattagagcagcaacagccattagtgtttgatcactggtgggagacacagacagaacagaactacagagatgggggagagggagcagggggaaccttgagatgacgagctcatctcgtcactggtgctggagacactggtgatctggagtagccgtcgcccaccggtgatctggactctagagttctgaactggagctgtggaccaggcaagcaggcagaggggcacatgtgactggagcaggcgagcagctgccggtgatcgggagttcgggcagaggggatcactagtgctggagagtggagacgccggtgatctggacctctagagcagccgcccggcagagggatacatgcagggtttaggcagccttagggttttagcagaggagaggagaggcggaacttaatgttcttgtagatgagcgaaaacattggt

SEQ ID NO: 175573 - DNA, 869 bp, Zea Mays
tgacctctgcaggcacaagaacttgggcagatgaacacggccacgtgttcgacgcgccctggcaacgccagagcacgccctcgacgctcagcccgcgcgcgtagccccgcgccgtgtcaactccacgcccatgcccgcggctataaagcccacctcggtctcgaccgtacacccctgtgcgtccctgacccagcccgagcacgagttcgccggtgtttgcccagagaaccccgtgccagcggccgcacaagccacggccaccgtagactagccaagccatccatcctccaccccgtccgacccttcggatagcttctccggacctcagtgaagctccccgagccgaggattgaacaatacctcaccgaagacgccggatcgacgtcgccggacttcaactggccgccgccgcacgtagaccgagccccatggtaagccattcgtcaattccttgtacctataacatccttagcatcctgtaaagctccctgtgccatttgattgagccctatcgccgtgagcaggccggagtacacgccgtcgacgagcccgactgtctgcgcacgcggtcagccctattccggccatcacagtcgacgacccgcaccttgatgtgaccgccaggaccttccagacctcacccagccgttcatcggacctccctcgccgccggtaagccgcgccaccctttttcctctccacggtcactgttacggtggggaaggagcccgagttgaaagaaagaaaagccagggggtttttgcgaggtcagagactcaggggaatagttccgcgggggcactgttgaaacgcatagttaaagaaaaccccaggggcctcggtgcaaacctgttttccttaaacctttt

SEQ ID NO: 175574 - DNA, 330 bp, Zea Mays
ggacgatcggaggcaagggctggtgctttggcttcgtaacaacctagcgaagccaacgatgcacacaatttatagccttcgagagcggtggatccgaattttgaaggggaaagctggcggccggagagaggggtgagtcaccggcgaacgctatcgtggccttcaccgaggcaatgttacaggcaatggacaggcttcctatgacggtttactgcgacgtggtaaggctttgaagcacgtggcatctgggcagcaggcggcaaacttcggcgaggtcacctggaccggccgcagggcatgtgggtacggtgacggagcggtaatagtgcc

SEQ ID NO: 175575 - DNA, 409 bp, Zea Mays
cttacccaagggtccatctgagaaagggtaggagaaggataaaatatccaaagaagagagggataatgctgaaaatcgacggaatccccttctccatctccaaaacctaaccctccgtaccgtttgttgctccacaaaattgctgggcacttctagggtaagtcacaacacaccttcgctaacatggtgcgctcaacccttctccggtgattctagtcgagatgcaacatcttggtgcgggacgccagggtagagcctgaagctctagtcgaggttatcaggagaatgtgtagagaagaatcgaggaagatggccctaacaaggtgaagatcgatgagtctctgaaactagtgagaaagtggaagtatggaaaacccctcaacaagatccctttctacttgggaacaac

SEQ ID NO: 175576 - DNA, 515 bp, Zea Mays
agttaagattaatagtgacagttctatccagtcttgttcctaacaagcttctgtagaagttatccaccagcatggctttgtcagcatgatcagtaaatacattatctccagagaccagttttgccacaaagttcttcttctttctatatctggcatgcatatggaatagtttggtgttagcatcaccctctctgagccagttgattcttgatctagtacgtgcaatggtgcgcttaaatgaggcaagggctaaggaatgctttttcagtccacatctcagccaatcctccaaaggagacaaaagcctgaaatcttgggctacttcaagcctgtgaagaatctcccttgctaaagctaactgtgaggtcacatgcccaatcttttgtccactccatttctgcaaggatctagcagtggcttttagtctcctatcaaagcttagaactgggcagactccttcatcaatagaaatccaagcatcattgacagcttcctggaatccatctaactttggc

SEQ ID NO: 175577 - DNA, 561 bp, Zea Mays
cggtgaaatgcttgtgacagtttagcttgctcctttgggcccgctttcttcgatgcgtccgaccctcaacaaatataatatccctcttttcctaagcaaataggccagttgtgtgtgtgtgtgtgtgtctgtgtttttgttctctcaacaagcatggctagtttgcttttgtcacatggaatgaagtatatcaagaacgtgcctccttttggagactactacttgatcatcacatgaggtctcacgtagatgcatgatgtggtgaaaggcccaacaccaactgtgacgacgactttgcaactgttgatgatgactatggctaccctgaaggcgatggctgcattggaggcgtgatgacgatggcagcatacaccaaagagatgaacactctaatgacctcgacggtgcatgcatgaccatacaggccgatctacatattctatgccttaggatataatgggagtggcagagaagaaagactaaagccaccaattccatgttaactgcagggatggcatctaacttattttgggcccctttgatgacaggagactagccttt

SEQ ID NO: 175578 - DNA, 993 bp, Zea Mays
gagacttttatgatcggtgtaaatgtcacaagactcgccatagagataatgcctccacgattttagagaaaagaccaccgcggccaaatcaagatcatgagttggataattcccttcatgcttcctcaactgccttgagccataagcgatcactctgccttcctgcatcaacacacaaccaagatcaattcgagaagcatcagtataaactatgaaacgcttaccactctcagccaaagctaggataggggcgctcaccaacttgttcttcaatgtctgatagctgacctcgcaatcgctggaccagacgaacagaacacccttctccaaaagtctagtcaaaggcttagcaatgctggaaaaatttggtacgaagcgtcgataatatccggcgagccccaagaaactttggatttcagagacactagagggtctcttccactccaccacatccgcgacattcttgggatcaaccgcaatgccctgctgactaatcacatgccccaggaaagccacttaggacagccaaaaggcgcacttcttcaatttgccataaaattgattcttcctaagagcactcagaatgagacggagatgccgctcatgctcttcctcggtctttgaataaataaggatatcatccaggaacacgaccacaaagtcgtccaagaactcatgtaacatcctattcattgcttccataaaagcagcaggggcattagttaagccaaaagacatgactatgaactcgtaatgcccatacctggtgcaaaaggatgtcttctcaatatcctcttcacgaatcctcaactaatgataaccagagttcaaatcaattttggagaacaccagggcacccctcaactgctcaaaaagaacctcaatacggggtagcggatatttattcttgattgtcacttgattcaaagcacgataatccacacatagcctcttgcttttatctttcttctcaacaaacaatactgggtaagc

SEQ ID NO: 175579 - DNA, 556 bp, Zea Mays
ctgacgtatccatcatgcaataatgcagcagctatagcgtaggatctaccaacaaaactcaagggaaatccgtgaattctaatgtttttctccctcccttttgcagatccgcatctcaactgatataattaccagcaggacagtgaataattcttggattctaagtaaagctggcgggacactacactactagtagtgcttgtggtttaagtgaagggatcgtcggcaagtgaggttttcaaaaaatgggcgccaaaagccgccaagccagcctgcaactgacagcattggctaacctaactaccactggattcttattgggagagtcttgctacctatacacagatccaagtttctgcgccatgtgtgcgcgcgcatgcatgaattaatgctatccattaacgaatgaatctgcgcgcgttctttttctcgtaatcttttttttgtgagtttgaaaagatagaaataaaatgctgggtgcagttatgcaacggtttcggttttcacatgttggcagtgcaccctatatataatgcatgcacaccccactattgtt

SEQ ID NO: 175580 - DNA, 1212 bp, Zea Mays
gaatgtgaagacacctttatctcttgatcacatatgcacatttaccagccccttctgttcattaaacctataatcatgcaatacaccagaactatctcatattcaatgaaaaagacctcaacatagtgctactatgttaccgcctgtttcttggccagaccatgagcaaggcttcatgccaagtcctacatgccgatagtttggagagtatttggtattaatttttgaagacaaatatcaatgatgtagtgcttaaaaatacatatcatgggacaccgatgtcagagatgcagctccaagcaggagatttctccatgttcattacttccatggagcttctaatgtcctccacttcagcccatctatcacctcctgcttggatattactcagcaacacatgatagccaacattacttggttccaactccacaagtttctgagctgcaaaatatgcaagcttagagtttgagtgaattctacatgatccaagaagggcaccccaaattctgccatctgccttaactttcatgttgctgatcacttggagagcttcctctagattacctgaacgaccaagaacgtccaccatacaagtatagtgtcctagctcaggtgcgaatctgaacttttttgtcatgcaatcaaacaactcgcgagcttcactgacgagacctgaatgactacatgctgaaagtagacttaagaaggtcacttcatttggctttactccttctttcagcatctgattaaacaatgttagagcttgcttaccatgaccatgaattgtgaatgcttcaatcattgaactccatgagactatatctttctgaagagttctgctaaagcatctttctgcaagatgaatgtccccacatctagcataaagcttaacaagggctgtgtccaaggcacaactctcagattctgcagcatagttgtttcttatgatgtatccatgagttgctttaccacaccttaaagcatctatttcagtgtaactgactaggagacctcgtagaatgtcagcatttggaaagtaaaaggagcccatcattctctcaaatagatggattgcatccaagaacattccatgatagataaaagcccatatcatggctgaccataagtacttgcttcccccattgaattcctcaaacaactgaatcgatgacactaactcaccgcatttcgcatagaggtcaacaaatgatg

SEQ ID NO: 175581 - DNA, 971 bp, Zea Mays
gcattaacgatagtctgtcattaacccagacgagcaacaacatatccccttaaccatttatgtgccgtcgcaacgcacgggcatctaactagtcaaggttgaaggcccaactcgcccatgtgacagctcccgaccccgtcgcaaacaactaaccaaagaaattctactgtcttacaggtgaatattttccacaaattccaaattcccaaagcgcatcacccgaatgaggaaaaagaacaaaaagaataacctccacttctcctctttgcaaaccgggtataacactctacctcccttaaaaagaattcgacctcgaattctgacgcttctatcggaacgacaaaagggaaaaaattaatgaatcaacaacacttacccacaacaaaaaattctggatatttctgccgcatcagctcctcaagttcccacgtagcctcacgctcagactaattagtccataagaccttgacatacttaattgatctcttcctcaaaacacgctccgaggattccaagatacgcaccggacgacactccaaggtcagatcctgctgcaccacaattggttccatctcaatctaatggtctggatcccgcaagaacttcctcagcatagagacatgaaaaactgggtgtacccctgccatggaatccggcaatcgcaagcgataagccaagctgcccacccgggccaagatagtgaacggtccaatatatctcgggctaagctttccggagaaaccgaaccgaacaactcctttagtgggtgataccctaagaaggacttggtcacccactgcaaattccaaatcccgcctcctcacatcagcataactcttctgacggctctgagcggccaaaatattctgacgaatttctcgaaccttttctgaagtctgctgtacccaatcaggaccaaccagggatctctctcccaaggtctcccagcacagaggggagacacatcgcct

SEQ ID NO: 175582 - DNA, 423 bp, Zea Mays
cagcgagcaaaaaaaaaaaaaaaaaaagcctggacacggcactactacatgtaactactgtcaggggtcagggcatgcatggcatggcagaaaaacttcatgatttgatccgacctcggtcccaacagcgaaaggaatgcatgcatgctcacttgctcagtgaatgttataatataataattactatagttgctagttttgcaacagatggataattaaggagcctaaaattacattaattgtcttgcattgcaactgcatgcagatatagtgggtctttctttgagtggcttagcttgtgtggttgtagtacatgactacatgttgctgtctgtgatgatccgccccaatctctgactattttttgaggaccagaaagcgtttggttacggtgcgtgcatcttaagatccggtgtatatttg

SEQ ID NO: 175583 - DNA, 1887 bp, Zea Mays
cgcgcgcgtgcgtctcccagtcctcccacgcgagactactccttcaacccgccgtcaaaaactaaacaccgcgccgccgcgtccgagtaaaccctaggtaaccagggtggcagggcccgcgcggccgctagtgcgtgcggcgaggcaagccgtcgagcaggtgtgcactgcaccggcgcgcaaccaggacgactccgctactctgcctgtgactggtgagccacgttctcccattcctagttggtctgtgttgattgttgttagaccaaaacaatggattaattgatcattaagatgaggatctatctttttcttaattaggtaaccacttatataagtcaattttacgttacattgcaattattttattcaaatgaagtttatatgtgccattatttatgcatttgtattgtttaaactttttaagaggtacaattttttttagtgttatatctggccctacccttagaaagatcctagccccgccactgagttcagaggtagagttgcagttgcagatattccaagtactagcaactaatcttatttagaactgagttaattaagacagacctcaaaacagataattgcagatattccaagtactatcgttgcaatttcgtgcctacaaatcaaacgaattccctatctaatgctactacaaaggatcacactgtcacaaaaatcatgtaatacaggaacatttcaagcagtccaatttataagtcctggaggctaaatgcacaaatcattccgtataatcaaaatactgaaatatgtactatcagattaaatttctagaaaggtacgatagtgagtttaataatagcgttgtttaggactcgtcactaacatggtggcaatgctagctacatcatccagtgtccagaaatgttcttctgatcatccttagtcctcacagttcctcctatatggtagaagctttgtttccctatctctatctttcttagatgaaagaagttggctctgcgcttgcaatatcggaacaacacatgccatcctaacctgtttcttttggagctccatcgtcctaggtcccagcaccgtcccatccaatactagagccagaagcttttagggcccgagtaatatttattatatatacaaaaatatttatattgttccttcttaaatataatctttacactttgccacctagcagtcctatagggtgtctgagtagtggctctgccattagtcccaccaacaatatctcgacctaacaagataggttcatggacgtatgggcgtatggctattgcttgtttgtcggcctgcaattcctactccactcgcggttcagtgtttgaatccatgtccaccgcaacaccatagcagatgggcgtattatataggttggtcggtttctagagtcttggatgattaggatgtctgatcgactaatcgatccatattattctaaggcacaaaagtacgaatgcacaacaaactaaagtgttaaagagttttttgtgcagaaaacattcacatgtgtcttcatgaactatctgatccttatttgaaaatatttttaagttcaaatttgaaaatatttttatgttctttttctggtatgggtgcatatatctattggaataaggagcatagccaaagatcagttttgtgttgagaaatctgctggcaagtattgtggacagacagccggcgacaataaattcagtggtgcacgacgcctgaacgatagccattggtcagtggtaatctctagccttaactttttcatcttctgttgatcagaactatctaaactgggaaaaaagtaattaatttagcttttatctttaatacttgtaacgattcccctttttccacctctactttgaggctaggaagggtacatttcac

SEQ ID NO: 175584 - DNA, 648 bp, Zea Mays
cacaaacatcaaaacatacaggggctatctcgcaaaagatcataagactcaggattcccccgcactgggtcgatgggttaattgtggcaaagggaaggggctcttaagtaagaatgcccagcgaagggggtaagctctgatcacagccgtccaatcaataacagagcgccaggattatatttattttaaaacgaaccggtatacgatccgggctgcccatcatgcgatccacggccctgatatcacggcgccaagatcagtctctggccgtctgatcttatacctacggctcagatcttaagcccgaagggttataaccccgatctaatctcccgcgtccgttcacgatcaaatagcagggagccattcttccttacatccacgatggagccacgcgaccaacacggcggtgcaccaagctcacacggcggcgccattgccagaccgcgcctttcactgatccgggcccgaaaccctaatctgaggtatgctatgcgcagataaaacataggggaattagatgagagccccataccggtttctacgctgcacagtgttttgcccacgatacaggtggctccgcggttccggtgagcaatcaccaccgccccgactgttgatccccgccatcgagtccacgaataaccc

SEQ ID NO: 175585 - DNA, 502 bp, Zea Mays
ctcacgtgtgctcttaccttggtcaaccaaaaactttgcgaattcgggtatcctagttctctgtgggtatgggtgatagtaaaatcggctatcataaggtctctgatatgactgtcccccagggatcatgctaactccgagcttatctcagaacgtcccggctatcttttccctcactatatcaatggcgatcgatgggagtccaccggctctctggtccaacatgggtgtggttatttggatatttgtgtgttgtcttcctcctcgttggcttgggttttgtggcacattaatacttgccctatgcggctcataggactggtcattcttttctggccttctaggagggggccggaaagtactcacccccacggttttgggatgttatattacggtgttggtgcgctataggatgtgacgggaggtttagctgagatgcatgtgtatttggataataatcgtcttcataaggttctatgtactctgcgtcggactgtccggt

SEQ ID NO: 175586 - DNA, 647 bp, Zea Mays
cgtcgatcaccggaataactgccacggtagaggccacgaatccactgcaccagtgaagcttcctttcctctggccgccgtgtgtctcgtccaaattcgcgaccaccgctcgcgatgcgtataaattgaccccgtcgcgggctccataaggcagtgaagtatccagccacagctaattagccacgatcgttcgccagagctcgagaatttcttgtttcccccaaattggtctccgccaccgcgaagaacagctcaaccgcggccagcccaactcaggttagttccagtgtctctgttgcttgttctagtgtccctagaccctcctcaagctctatgaccccttcgattgaattggaccaccacccatcgccgggaacacgagcatgtgtccatgacctttgctgtcctcgtgggcagagcggaatgggtcaccaatcgtgcaattaacttaggggaaatgctcgaagggggtctgatttggtgtatgccgctcgagagcgccagtccttgcgtaatccggcccatctaacctcgccggtggtcggacctccgccgtgtgacatcaggggcgtaccactgcgaagaattagaacttgagggacctctgtgcaaatcgtcagtgactcagaaaaatagtaaccgaaccca

SEQ ID NO: 175587 - DNA, 607 bp, Zea Mays
tcttaggcaaaagttgtctggccaatcacgtcgcttcctttggtgcctgctgagtcgtgggctagttttggggcaactatattaggagtgtcgtggtttcggaaaccaagggacaatagaatttgtgtttagttggggagctagtgcggactcactctgaatggtgaatcgtggggatttgaagagaatgggatgtgagacggtggattatactagtttaggctcgcatcgtagtctagtgtagtgctaatcgtagtattgcctgaatagtgttacatcttgtgcgtgtgtttgagaaggaggagggtctgcccttttatagtttatgggtagaccttaccatagggacttgtttgctattcataagggcgctctgccgccccaggttgaggtagaattcccgatgccgtccatagggctgtgagtagtcgtactcctaatttggcgtatcgtcctacatgcctaccatacggggccctgtagcgagtccttcgttgatgtctttgtagaagtgcacagtgggtctcgtgggatagccttgtgactcgatcatgcacggcacaactccgcctatcatgatgagccctatatcaccagcttgcatacg

SEQ ID NO: 175588 - DNA, 993 bp, Zea Mays
cctagaatcaattaaaacaagatagaaactgaaatgacaatttttacttacaaattcaaaagtgctccaattgcgctcacatccggaagcggaacaacaaaggctaacaattcgctttgcaaaggattgaatctcaaatgcaaggccaccatatgcatcccaccaacgaactaaaaaagagaagtttgagtgttgcccttgcaatgcctctcacgaaccacatcttcaggtgctttgcgaagcatggatgcaattgacttagaagacttcgacatgtgttgattgttttggcttgcttcagctgagagccttctcttttgggctgttccggaactgggctgaacaactgaatgggatgctctactttccccttctccaagtacttcaacttcatcatctttatcaccatccttatcaccatccttatcatcatccaagtcaataggcttatgtctagcattcttcttcaaataatcactcatctctttgctgattgccgatcttgtctttgggcacttagcaacatcaccatgaccaccaacaaggtgctgcttcaaccttctaacacctgcatgaacaattttgccacaaaaggatgcacttcaccacatcttttttgtttcaaatccggtcaataacaatagttccatgctggatccttcgattttgcctttcttcttaggatctttagctggatcgtatggctgctggcttcctgactccccttgtggtcgatctgcagatgcatcttccatctcttcaagggcctcctgcagattgatgagagggcgagggagggtgagcttgctgcgagggcgggagagggggagcaggactcaccaagtcactaggttcctgcagattgatgagggcggcgtgcagactgcagaggaggggcggcgtgagaggaggggcggccggcggcgtgaggactgaggggtggccagctctgtgcaaaggaggggcggatgactctatgcagatgaggggcgg

SEQ ID NO: 175589 - DNA, 521 bp, Zea Mays
gaacaagcaacagagggacttggactgacctgagttgagctggccgcgacgaggtctctcttacggtgttcttgcgcgaatttggggaaagttcaaaattcgcacactctggtgagcgatcgaggctaattcttggtggctggatgcttaactaccttacggagctcgcggcggggtcaatttatactatgggagggcggtggccgggaattttagcggtgacgcgcggcggtcggaagagtaaaagttcactggcgcgcgtgaattagtgtcccatgccgtggcagtcactctagcgatcaacagggagctagagtgagtcacggtgatgcggtagacaggtagagacacgcggcggacagcagtgagggcttaacggcggtgaggaccttatccgagggatcagtgcgcaagggagaggcacggcggctagccggagtggcgtcgagctcaccggcggcgaagattttcctaccccgcgacgttatctatccactccgggcacgaatcgggacgtcgac

SEQ ID NO: 175590 - DNA, 486 bp, Zea Mays
gaagcgcgccggtagttgagtccgtccgagaagagcggcgaaggaagaagagcgccccgacaacagggcccaccagtcataggagccaaggagcgtaggcgggtgggtgtccgatagaccggacctacctgcatgcgtacgcggaagccggagttgcgggtcaacgcccacggacgcgaggattgcgatggcgtccgcggtgttcggctttgcggttggggacgaagctgacgaagtcggcccacagatcagtggcaaataaaatgaatgcgagcgcggaagagagacaagcgggccccagttgacaacgccgcgcgcaatcggtttgggctgcgcagaggggaaagggtaggtgggccaaatttgggatctgcggcccaggtaggttcttcctccccttttctttttattttctattttcctttcttgatttcttttattcctaactattttgaatttgaattttgaatacgaatttcaccattg

SEQ ID NO: 175591 - DNA, 1073 bp, Zea Mays
ggttacgctagcacgtggggccctggagtcggacccatctcttccacgtcgcgtgaccaggagacgaaattctccgtaacaagcctggccgcaatcaccgctaatcacccggattcatcgcccgatgctgcgtccgctcctgtataaaaccaggatcgttgcgtgctcctcctcatcccctagaacggagagctagagccgcgccatggctaatacagagaaagagatgcgggtgcagggagccttggaatctgctgcgcgccatgctcatctccctatgaatccgcctggaattcttggtcacgggtgaatgctgggggttatgggagctcgcgcactggcagggtaaacccggagtcatctcgtggacaagaattgttcatcggtgctgcgtcaccatcgccatggcgctccgcatcgacgaccgggatactggcgcccgaacctccggtgagaacgcctccgtttggctcgccatgccacgccaaataagtatgtggcttcgcctggctggaatcgcgctctgcgcttccggaactgtgtgccggtaatcacccttccgcctaggtccgtcgaccggactcaccaccgcaacagcgccggttagaccacttccgttgtgttcgccatcgcttccacttcataatgatcacatcgggttgaagaatagcgcaccggggtgatgtatcgcgtgcaccggcgatggcgccgtcgcatggtctgggcggcgccgccgtggcttggccgtgggagtgaagacgacacgggagccctcgatctatgaatgaacggctctgattgaatcaaagttaccccttcgcgagatcaaccctggatcattgatttgtgatcggatggccaggagtacgtccttggcatatcgcctcgggtgcaaggtctgcaccatagaaatctgatcctggggccagcgtggtgtcggttcacttaaaacgtcggcgtgatctgtgccgcgaaattctaatccaatggctgggaagccctcataccccttcgccatgcgcttctttcaaaagagaccctgagaaattgacaaaacaacccgtcgtccgtgc

SEQ ID NO: 175592 - DNA, 309 bp, Zea Mays
gatatgggaagccccagccagggtagtggtcacgcgcgtggtcaggtcgggccagtggggcacgtgagtccgcgcgattgtggagtgcgcacgtggtggagtcgagttgggatatacgaaggtgggtcagcgtcgtgttcgctgatcgggtagttggttcctactcgtgtttatgctagcatatttaatggttcagacttgcataacatgagagcggcaacaaacttttcattggttcgttcaggtgggtccacacaccatcgtgattagcgcgcccacgaagctagaagttaccgtatatatcggaac

SEQ ID NO: 175593 - DNA, 357 bp, Zea Mays
tatttagcttagtcttctttcattttactcaccaatgaaatcaaaatcttgtctttctccaaaccttcatttctcagctcaattacctctgagcaaagattgctgagagctattgtgcaactttcgtgttcggcgttcttttgtgccctcaaggcattactaagaattaggccctgcaagaaaaggagagagttaagcatgacaatgaaatacttcattcccaactttaaagttaacagcttctgtacctttatactgttgtatgcaaggctatcagcaagatcatccttcgacatggccgaaaggccttcctcaagcttcggaaatcccatacttttggctatctcccggcagacg

SEQ ID NO: 175594 - DNA, 501 bp, Zea Mays
ttgaagtatgggtaccatcttcgactaacatgaattttgggatggacagaggtggaaggaggggtgatcatctcagtgcgtagctcaccaattgcacttaacacctcatgaaaatatctactaatagtcttagtagatcttcggaaggtgaatttgagaaccctaaacctttgattatgaccaacaacatgtagaaacattgcaacttgttcttctacagaactgtgaatactatcccttagcaagtgtcaagaccgaaacaaaccacaaagctcaaagaaagggaccttagacattctaagcagctccacacattggatgtcatcagattcatagataaatctaagatttgcctgcctctcaatgtccctttgaaacattggaccatatgtgacacgaggatgaaagattctacgcctaaggcatgcaaacaaccaacaagatatagcaacaaccaatgccgatgctctcaacttcagcaaatgacgatttggacccaac

SEQ ID NO: 175595 - DNA, 689 bp, Zea Mays
ctatccactttggcgtgcccaactcatgccttttctccgcagcactaagctgctcggccatctagatggctccacgccggtgcctccgaagatgatcaccacgcctacggacgccggcgccgctgtactcgccaacccggagtacgatcgttggtacgatcttgaccagcagctactcagcggccttctgtcatccatgacggaagaagttttgcgggatgttgccaccgccgtcacggcaaaagaagcttgggactccctgcaataaaagttagcgtcctcttcacgggcgcgcacggttcagatccgtgctgaactcgctacatgcaagaagcgagatatgacggcggcaaatttcttcaacaaggttcgtggtcttgcccatgaactcgcagctgctgacgcccctcttcgcgacgaggagattctcgcctatctgtttgcaggacttccggttgaatatgatccctttgttactacgatgaccaccctgccatctgctccaactctcgatgatgtttttgctcatctactggcttttgaagcccgtcaacttcgtcaccacgccgagcagcagctgaacctcggtgcctcggcaaattttgctgggcgtcgtggctcgttccgtggtcgtggtcgttctgaccgtggccgtggtacaccatacaggggccggggccgtggtccac

SEQ ID NO: 175596 - DNA, 639 bp, Zea Mays
aaaaggaatagaaaataaaagaataaaaacaaacccaactaactgggcctaaatactggaattcggcccaaccccgcttctccaccgcgcggcccaacttgccacagccccgtgcgccgactggtgggccccttcgtcggtcggccggtgctcatctgtggtcgctcctcacctcttcactggcgcatggaccccaggcgtcaggctcgtctcctacaccgcaacagatcgcgcgaggaaggcgcggcggaagaccaaatccggcggggatttcggcgatcgttccctccctgggactcaagatatatggttgggttgggttctcgctgaacccgccttgcgactcgccctgccgcgcttaccgcgatcccttcttcccccaaagccacccaaaggtctgtactgcaccgccattgccgcacagctcggcctcgcgaaaacgctggccatttcggcactgggtcgtcgttgggtgctccgcgctaccgtgggggatcttgcctgaagttgggagcgcactggtgtcaccgagccggcgtcaactccccagcgtcaccgcggatccgcagagcagcgtggcccgatcttctcggcaccggaattggggtgagtggcacgtcatcgcattccccatccttc

SEQ ID NO: 175597 - DNA, 408 bp, Zea Mays
atctgactgggggtgataggcggtgctgaagtctagcttggtgcccatagcttgctgaaggctcatccagaattttgaggtgaactgtgttcccctgtctgacactatcttccgtggaataccatgaagtctgactatttccttaagatatatccgggcaagggtggctcctccaaaggtagtttttacggggatgaaatgtgctaccttggtgagacagtcaattatgacccagatagaatcgttccctttttgggtccgaggtagtctggttacaaaatccatgcctatttcttcccacttccatttgggtactggaaggggttgcagtagacctgcaggcttctgatgctctaccttagttcgctggcaagtgtcgcaccgggccacatactgtgctatctcctg

SEQ ID NO: 175598 - DNA, 685 bp, Zea Mays
gggtagttgttctgcccatttgccctttttatcgtcgaggagtcttttcttgatagcgctgaagaacttgtcgttggcgcatttgacgacaccattggactgtgggtggtagacagaggtgaacactaccttggtgccgatggagccacagaattctcggaagtcctggttgtcaaactgcttgccattgtcgactgtcaactcggatgggactccgaaccaacagacgatgttttgccagaagaatttgcgcggtctttgctgttattgtggagactgctctgccctcgatccatttggtaaagtattcgacggcgacaaaggtgaattttaggttcccttgtgccgtaggcagtggtccgacgatgtctagcccccatcgctgaagaggccaggtgtgggcgatgagcttggtaagttgcgaaggggcacctgatcgtggagagaatttctggcatgcttcgcatgatctggtgactcggttggctgtacatattattgcgggccaatagaatccctaacgaattaccttggctgcgagggcccttggtcctgagtgtgatccgcaagttccatcgtgtacttcaaggaggatctctaggccttcggtttcagttatgcatttcagcataggctggttgattccctttttgtaaagctagccctcgactattgcgaagtctct

SEQ ID NO: 175599 - DNA, 294 bp, Zea Mays
ccggtgagcacgccttccggcgaacctgtaccggccaagacactcaatgaccagggctctagcttggcagacacttaattccaccctcagcgacactaatcccccatctaattgcactaatccggaccggagcatgcctgctcacaacgacggcgaaaaccgagaagaaactatagtgttcagggcaatccagtgcggtctagttcaatcaatcaagcctacaagcaacatgagaccctagagatgctagaacatccaacagagaggcatgaaccaacctgaggagggctggcc

SEQ ID NO: 175600 - DNA, 615 bp, Zea Mays
aaatgatcataagaacaactccccaacttcaaatctatggtatatgtacttatcacaataatgctcaagtatctattccacggcattagggggaggaaaagaatacttgaaataagaatgccgggaaatcgctcgaaaagccaaaaagatccacgtgcaagacccgcactaataagaaaactagaaaatcaagaagccaggaattcacatagaatattcccgtgcaatacaaataagtaaattggaatgtcaagaagacattgaaataaagtattgaactgccattttgttttgtgatttgtagagcgtgatcaagtcgcactattgtttagtgcactagagaggacttaagtaccatgaatggtattcctcatcctattccgaggcctcaaagaaaaggataggaaatctagttactctaatttcaagtacccggggacgcctggagaaaaatggataagagagcttatcatagcctagtcacgaaacaccccaacgaaataatggggaaccagttgagagctggtaactggagaacagcctgctagcgaggtgccttcaggatatgaatataccagtaaatgaaaaagaagagaaagctgaaacaaatttgag

SEQ ID NO: 175601 - DNA, 669 bp, Zea Mays
tcatttctctctccctctctcacctcctccactcaaatccttccaaaaacccaccaaatctatccaaaacttcatggagattattgtggattcgatcctcttgggctcctccaccctctctccacttctctttgggatttttgtggacggtttctcagatcgaggtattgttacatcttccctatcttttgacttgatctatatagttcttgaatatcttaagagtatcttcaaggagattgtgtagtttaggtgtatggcacacttaatctgttctcattgtctcgaacattgttttgagttaagtaggttgatattgttcattgtagctagaccactgatatgaacggttgaagtgcatgcccaatattatacttgtctttcctcaaacatgttcgttaaactccttgaacatcaatatcactctcaccatatatatttttgtttgatcttaaggatggttcgtcgtcgaaatccatccgtcgttgaatccgattccgatgacagttcgccacagattcatgaggagactccccctcggtccagatccaagcgagggcgaggattgggcaatgttatgatgggtggtgaggcctctgggtctcaaggcactcgcggacgaacggctcaaaacccttgtaaacgttctcgtcctgcgacaaaccccta

SEQ ID NO: 175602 - DNA, 452 bp, Zea Mays
taagcgtcagcctccacacagagcaaggaaagagacgcaagggcaaagccaacatgacgcacatggttggctggtaaaagctggccctactttcgatcaattgctagccaaatatgctggcaagaaggccgttctacgcgatcggccaacaaagaaaccctggtcacccactaaaacaaaacgaccaagtaaaacagcccgaaagacgacgcaaccagcaacgcctattcatcctgtcatgctaggatgctttccacccacctactcatcgtcgatgtgttgtcctattcaaatatggaatggtacaacgatgaacccatggtacatgcgtactccctttgtctatccaggctggggggcacctccattctattccttttgatctattgatcaaatggtcacgactgagaaagatgcaatcctaaacggcctttatgcattggggctctatt

SEQ ID NO: 175603 - DNA, 392 bp, Zea Mays
gtgaaacacaaaggttcccgagactcagtaaacagccacaatggacagcattccactcgcggtggtcaacatagccagcccacccaatctgcgcgttctggtgcgcgattcccaaatcaatctggtgctacacgatgtaggtgcatgggcggatcggtatggggagttcttaccgtgtctcgacgcagtagaggacgcgaccacggcacacagcggtgtggcggcggtgcaagagctccgatgagcaattgatgtcgccccagtagatgatttccccccaacagtcgcgggcgcaccaccggtgatgcagtgagactcccagcgacgacccagaggtcttgcgttgcagccgagcttgattccgtgagcgcagttcaccagcgacttcttcc

SEQ ID NO: 175604 - DNA, 356 bp, Zea Mays
gagattgttctgcttattctgtggggaggataagggacacacaacaaggacgtgccaagtcacgatccaaaagcagaaggaaatcgttgaagccaaagcacgacagaatcagccgaagcaggtcttgcatactgcctcatgctattcgccatatatccctaaatatgtgggcaaccagcaacccacgacatcagttgcttcggcaagtcattctcaagctgcatgggctcagttaccaccaccaccactggcgcctaccttggttcataatcagcagccagaagggcatcgccaggcgcaacaacagcgcgacactcgggaggagtccgaagctcgcacagtcaatagcattgtgc

SEQ ID NO: 175605 - DNA, 523 bp, Zea Mays
aaaaatatatcactatatcatggaactcggcttcatttgcaattgagctgtcctggcttcgttttctaccttgctgtaagcagttgcaaggacagtcaaaggtcaagagcttgcattggcggggtgagagatgatgaaccccacccacacatgaatggacatggctagctcacccccacatgccccaactaaacccaaccagaaatccctcgtttaaccaaccgaccccttcctaatccgccgtgcttgtcaaatcaaattaatgagatgtactacgtatataaaaaccacaaaacccccctccgatcctttgcctaccaacatccacacacttgcatgcaagataggcagcagccacttgtagagagattcttcctctacaactgaggcagcagggcaccgtgcaagcaacaagcgacgacgactagcagctgaggcagagcacaccaaacggcccgggatgtcaaccagagcgcgcggcggcgggaggcagttgcagttcccggtggggcggcgccgccgg

SEQ ID NO: 175606 - DNA, 338 bp, Zea Mays
caagatgacacacaagacttagggggggaattgttggaataagtctcgtggtctgtgggaaggacaacaacagtccttgtcggtttttgactgtagggacaacaacatctcagtctttttgactgcaaggacagcgtgagacagcagcagcaacatgtcagacttttgactgcaaggacaacgtgctgcatgcatctccttttccacttttctagtttttggaggacagcagcttgatgcagttttcttttgactagagtacaacaacacgtagtggttagtgcagtttgtaggacaacatattcgcatatctagaacgcatatgctgcagtcccttg

SEQ ID NO: 175607 - DNA, 743 bp, Zea Mays
aaacttgcgaacatcttgattcagatcacagttccggttttgatgacacaatagttaaaaatcaaatatatctaagatatctatggactatggaattgaaatacatgaaaaagaagatagtagcttcacaaggtccaagtttaataacagcgctcattgaacagtacagaatattctgttaaaaacttccaagtcatgtttcaatattgaatttcaattaaaaatgcatacttcataaatggccaatgcttgatcctcagacctcagtgtcatgaccagatgaggtgtaacctcaaatccatcagaagtaaacatcaatcaatccatcgaactaataaaagcataagcaggtccttttctgagcatttttcctttatctgagcccgaagtaaacatctagcacaaaaatccttgatctgtgcaggatcgccatctaaagtactgtaacaaaagacagactacaagagcatgatgccccagcttaacatgcactgttacactctcgaatcacaaaacggtgctagatgttatacttattatacaacccaattaaatggttcgcaggtaaaatgtaaaggggttgtcaactaaaacttcaatttcatatgcaatagttaattagttataaagtctaaacaatgcagagataccccctggtatctcggtgtacggcagtgcccggaagagccccctctgccacacgcagttgaaggagagagaatggaattcccctttataagggg

SEQ ID NO: 175608 - DNA, 1024 bp, Zea Mays
cctgtaattgaacaacattatcctcaattcctcacccacaaaaagatttcgcagatccccttcacctatgctcgccctaatcggcgaggacaacaattcttgtttaccaatccggtccactcgaagacggccacgctccatccccatacgacggcgcctaccacttcgcgaaaattcacccacactgtgtttcgccaccacccttcgtcgcctatacccagtactcgcactaggaagatccccagaaccctccacacgcggcgaagtctccgctgtagctacatctaacgcagcaaaataatccaagccttcatccgaggactcctccgtccaagaaaacgaactcccagattcaccatcagactcaaaacactcagacacagagacaaacaaattatcatcggcaggcactacggttgaggccgccacaaaatcagtattcccagcagcggttgcttgcgcaggcccaaacatcggaacttgcacagcaaccgaggttcagtatcatagaaacaaaagtttacacttaaatccctaacccctattccgccacctgctaaggccctaggtcttcggcagctggttcggccaccaccttcgaggcgtccgcacccgtcagcgcagtagctagcgcggggtcttcgccagctccagtcggcgtgagggtcatcgacgggccctctcctgcatcggatggcggcaccagctccacccccgatgccttggccaacgtgctgtccagatcaccaaggtcctcaacctcttcgtcatgtgccatctatagcaatagcacaccgattcagcaaaccacacatacccacagacataatcacacaaatgcacctttacctgatccatcgccctgtcagacctctcccggacaatctcttggccgtgagggccccacatcctatcaaaaagagccccagccgaccgcttcatcactgggtcctcgacctggaagatttcgcgctcgaagccttcgtcagactggtcgaaggcctcgaagtgcccgcacccctcg

SEQ ID NO: 175609 - DNA, 848 bp, Zea Mays
agaaggactccggatgtgtagggatacagtctgctacaaactaggagacaaacaagtagatagccatcatcgtctgtacggggtaactctccctggtcgagtatataaggccaggaggtacccctaccatttcatctcatcctagccttcagcacccataactctcagcttgtaatcctcacaacgataccagaatcgccataggaagtagggtattacgcagatctacgcggctcgaacctgtataagtctgtgtgtcatcccatcgtgttataacacgaaccatcgagttgcaatcaacgatgacgtcctacccaaaagcatcacctgggcaaccccgtggtgcacgattagatcgcaaacaccgatagctggcgcgccaggtagggggtgcgacattgtatgacgactccatggcagtcaccttcaagaccatggtcaccttcaaccctggagcaatcttctgcttcaggtccatctcttgcatcgcagaccaggagggaaccttgcaccgtgttgcgggcccatccaggatgaaaccttccctggggacgccaaaggcggctgcaaggaagtcacaaacatcgctagcgaggatcccgccagcagtgtagagggtcttcgtcccacgcaagaccacgcctaggaacgctccgacacctacgggccagtcggtcatgacctctccttcagcacgacgaactctattgtccacctcacccacccaggtgtgaacacaaatcactcggtggagagaagcagacgctcctaggcctagcaagacctaggaagcaccaccagtgatcaccccgaccgctccgcgccctcaaaggagatggggggagaac

SEQ ID NO: 175610 - DNA, 437 bp, Zea Mays
gaatgaagaagagccggatgacaaaactgcggcagaacgcatcgcaaggcagtcagcccactacactctcattggggaagcactgtacagaaggggcacaacaggagtcctcatgaagtgcattctttcggctaccgggaagcaactactagatgagatccacgccgggcaatgtgggatacacgcagcatccaggactctagttgggaaggtcttcaggtctggtttatactggccaacagcaaagaatgatgcagccgagctagtctagaggtgtgaagcttgccaatacttatcaaaccagcagcacttgccagcacagcaactgcagaccatacccgtaacatggtcatttgcgtgctggggactagacatgattggaccattcaagaaagctcaaggaggttacactcacgtgctggttgccattgacaaat

SEQ ID NO: 175611 - DNA, 596 bp, Zea Mays
gctttaagagagggggggtccaaggttcaatccccctttgccctaggtgatccttacctaaaagcttgggtaacacttgggtccttggtatttctcaactcactcatgcttccaaggtcttaaacactccctctcttccaagttttaaccacatgtgataatgggtatatgtgcccttaggaagccaacacctaggtaacacctggggtgttacatggtatgttcggtctgtgctcatcggagtggttcttacgcagccggagctccaccgccgtcgcctcgtcgtgtccctgtgtctctgtcgttgccccgtgcctccagcgcttcccctcaaggtgagcaacctcctcacgcccctatttccctgtgtactgcactggttagcgcgcaattgctcgtcggaattgcctcgcgccgccgttagcctgcctcgccgtgtgcaacaccctctaatgctcccgcgccggtgtggtgtcctcggctgagtccgccagatccgcctgtgcgcgcctagactagtctcgagcctctggtgccccaccatggccggtctgctcgtctctggcgagttcccgccgtgggaccgagcggcgcca

SEQ ID NO: 175612 - DNA, 536 bp, Zea Mays
gggaaatccgaagactggaggctacgatgcacgagaacactgattagggggtggaatgaaggcttaatagagagacggagcgagggcaatgctcaatttaatgggatcgactacgcgtcatgccaattttggccagaaccaacactgtggtggtgggatatttcactggcgagcccgtcgtggccccagccggtgcaagggctccaagatggtaattccaggcgtgccacggttatcactacgtggtgaaagagtcatggcatggcgcaattgaggtcgccggcataccacgacgacaccggccgctcggccacgtcgcacgaccatcaagtgcagccaataagtttctacccgcgaccaaatccactccctgctagatcttttactcccccacagttatccactatgcggcaagcacgaatctccccggcaaactcggatcttggcgcgagctcaccggcgacagtgcactgaacctggcgttattcgtcaggtcactgttcatcactaaacatccacccgagtgcctgacgacc

SEQ ID NO: 175613 - DNA, 410 bp, Zea Mays
gcgcactgtacagaaggggtgcgacaggagtcctcatgaagtgcattcctcaactacagggaagcagctattggatgaaatccacgccggacaatgtggaatacatacagcatccagaactctggttgggaaagttttcaggtctggtttctattggccaacaacaaagagtgatgccgccgagttagtccaaacttgtgaagcttgccagttcttatcaaagcaacaacatttactggcacagcagctgcagaccatacctgtaacatggccatttatgtgctgggggctggacatgcttggactcttcaagaaagctcagggaggccatacccacgtgctggttgccattgacaagttcaccaaatagatagaatacaagcctattgcttctttaacctcagccaagg

SEQ ID NO: 175614 - DNA, 460 bp, Zea Mays
ggtatcattgtgaaaatccgcaaacaaggctagtaaatcatcctttattacttcccagaaagtctgatagaactccgccggaaaaccatctggaccaggagctttattacgttccatttggaaaacagccttgcgaacctcatccatagtgaatggtgcagttagaatcgtgttttcagtatccgtaacctgggggatatcataagtaattgattcctccattactactgagttgtggtctgtcttcccaaacagagttttatagtaattagtgatatggtgtttgagatctccttcttcaatacggttaccctcatcatcctcaaggctaaaaattctttgtttttgatgttttccattggccactaattggaaatatttagtgttattatctccttcaagaagatgcttaacttttgcccgttggaagagacggatttcctcttcccttaatattgta

SEQ ID NO: 175615 - DNA, 592 bp, Zea Mays
gtcgtacgtgtcatcatcgtgctgacaattgtaacaacaattacgttatatctgacactatttacgctcaaacttgaagagtttacgatcatgaataccacgtcccagagatatctacatctctaatgttggctcggtatttacgataaccacctaaatttgcgcacgtctgttgagcggggaccggggtcctacgtgacatcgtgctgctgactattgtaacaacatttacgctatatttgacactatttatactcaaacttgagagttttacaattaaggataacacatgtaagagatatcaagtctcccatgttaagtctcccacgttggctcattatttatggtaaccatctgaattcgcgcagggttcgtcatacgtgacaacgcactggccaggataacaacatttatactataccagacactttctacgctatatattttttcctgttgaggtaactccaaatacatcattcaaaggtaagccggccctggtgctccccagacggttacgcgagaagctacggatatgtttggatgcctggtctagcttgagcctcgctaagtgagaggacataaattttaagcg

SEQ ID NO: 175616 - DNA, 602 bp, Zea Mays
cgagaaaccacccgggttacctcttgcccgacagaatcatgcggcaggagaccatcatatgggacctctgaacagatagtgggattgtcagcttcaggaggctcagatagaatgtcttcagggatgacctcttccagctcttggtcaaaatcagatattgacaacccttgaaggctgacaaggcttgcacgggaatgtcgttgcccctgtggtgacgactattcttttagatcaacggaatttcttcttcttcttcctcttcttcctcatcaagcacaccgccagtagcctgagcatcactacaacctttagcattgtcctcgggaatggtgcttgaaacacccctggtgttactgttactaaaaattgagcataacatcataagcattggcattgcatatgtttgacacacttagagtgcattcactaggcaaaaatttcaagcaagttgtattgttttggtgttttgcaaatagaaccctggaataggatacttaatcctaaataggtattaagggggtaaaacatgacccaaattaagaaaacccaaaagctttagtggaatagtcataaaatgctcccaagaatgaacttgaattaca

SEQ ID NO: 175617 - DNA, 754 bp, Zea Mays
cctccgagggaggactcggggggcgcttgcgcttcccatcggcggggcggagccctttcttccctttcttccctccggccatggctcacttggaatgagaggaagcagggaagaagaagaaggcgaatgaacgagaacaagtggggagagcagccagggcgagcagactatttaaagagcccgggaggcaaccgttcacttcctacccgctcaccgaacagtcacaagaattcaatagtgattcaaacctcctggaaatgagtcaggcgtctggcaccgtttcgcgtaacacgacactagatggaatcaaagccaactgctcaggcagagtattacacctctccgtcgtgtcaagttactgttttagtgctacacgatggacatcttttactgggcagacacccgttgggcacacccaatgggtgtaccgcccgaattctctgagattttctgaagcagtgagacctaaaacatatacgcaatgaatataccacgacaaaggggaagatcgactgaaatgggagaaagtccagatgcggtcaccaagcgcaagtctaatctgcagaggcattgaagttcatggccgagtggcatcgagccaggacctctctgttccgactggccggactccaactcatcaccgatcaaatgaattctagaccaaacgagatatggacagatgtcgtcactaggctattccgaaagatcattttgaaaaaaaagatgaagacctttgaattgattatttcaaaat

SEQ ID NO: 175618 - DNA, 718 bp, Zea Mays
ttttattttgtgggtgcatgtatggaaaatttttgtccgatgggtacatatctgttgccatctctaagcaggagcccacctctccttcatgagagcgctgctagtccaaccaaggatacacccttctactctggctagtcaagtcaccatgaattatgcatccgtcactcatgcccctttcgatcctttttcttctcccacgccacaactaggagcttccatgactggcaccatcctaagctctatgcttcctttaccccctaaataaggagatccttaggaccatgcacgttcgtcactaccacattggccctttccatatcttgtccctcactatagagccaccataaaactagggacgaactcagaataaaatggtagtgaaggcacacttgtaacaatgaacgccaaaatatcaaagtgacgtcaactaagttggaccgagaagaggactttatagtgaaaatctagactctaccacttgcaacaaagaattgagcgggggcttaggccctcactcacaccaatgtaggtcctctcctgcgtcaaacgttgttcccaccacggtcgcaatcatcgttgttgacttgatcttatcgctagagccctccccgactccaatttttctccctcgataccataagactatctgcaacgctatcctctaaatttttcccctatactgcactatgtagccatgtcacccagatttcatctc

SEQ ID NO: 175619 - DNA, 505 bp, Zea Mays
taagttcccatgcccagtttgcaaggaactctcaggttcaattggttgaaaaagggtggcaaatattcatccttcgataaacatcgacaatttctccctcctgaccatccattctgcctagacatcaagaactttatgaaaggtgttgtagtgacagaccgcccacgtacaacgataactggtgccgaaattcgtcaacaaatagatgggctcgtggccaatacagaaggtggttttgttggatatggtgagtagcatatgtggacacataagtctggcttgactcgactcccctattatgacgacctgctccttccacacaacattgacgtgatgcacactggaaagaatgttgtcgaggcactatgggcaacaattatggacatttctgataaatcaaaggataacgtgaaggcaagagtggatctggcagcgttatgtgatagaccaaacctagagatgaagccgccaagtggcggaaagacgtggagaaggcctaaggccg

SEQ ID NO: 175620 - DNA, 772 bp, Zea Mays
ctgtgagtccatctaattacatgtgtgtacatgcacatgccaacttcgatccctttcaaagattattatgcgtacatgagcacacccatgtcctttactggatatgcgcctgcagtcaggtgtgctttgcattgaatctttgtagcccttctattcttcatcctccccacagtggtggcatttggataggcagtgcaagtgggatcaggatatgtgatgctgagacagttaaagttatgatgaagaatcaacagaattgcagtatgattcggaaactagtttcagaagttagactatgggttagcctctcaataacttagttttaaatggtctacgttgacatgtctttgtctaaaattttattggtacttgcattatcaacctaccaagaaataaagtttgttctgttttttctgctcctttgatctctttgctaaaattcatgcggtgatctgtgttccaggccaatcaagaggttgaacagagctgtgcaggtgagcatgcattcattatattcccacagttcatattctttgcggtactacatctatggtagatttagtcgctgctgccatacatcagatgcccagatcttcttcaggcccttcgtcggcgaggagtatcacaaggtacgccaatcgcttggtcttatcttcctgctctgcaaaaacaagcacgcaaacccaatttactatgttacaccccttggcttccgatgaggtggccgaggtgtgaggctgacggtggcgctggtagtccgcaaggaaccgga

SEQ ID NO: 175621 - DNA, 752 bp, Zea Mays
ggaactaaataattttgtggactctacaaaattggtttcataattgtaacatttttctatattttctagtgtattttacaatctgctggataaaagaaaaagaaaaagtttcaacggtcactgggccgaaaggtgctggttcggcccacgagcacaaagaaaacggcccccgcaccggccgcccgcgccaggaatgtttacagaaaccccctcacccgatcggttaatcacacaagggtccggcgccctattcttttgtttcgctgacatgtgcaccgaggccctccgttttcattccatttacaaacgccagtccacgatcaaaccctgacgagctccggccatctgctgcatcaactcgccggtgatgtcctcctccgacgaaactaagcactcggacgtaatcctcgagactaactggttacgtcccctaggttaatcgatcccaaataacctagagcatctccgaccgtggcggaggcagagagccgagctccggcgagcctgaaccagggtctaggatactgtagctttcgatccatggttatgacgagtctcagtgatctgtctagcacacgctggccacatagatttacctagaaagagcatggtttaaccaatccacgcgaagctggtccgcggcggcgttctagacagatccgacgacgttctggctggggtactacggtagcgttcaaataagcaacgccctgagcatcattattatacatgggttatgaaacgtgagcaaa

SEQ ID NO: 175622 - DNA, 683 bp, Zea Mays
cgcggatccgagcggccagatctgaatcagacgattgagatcgggtcgggtttaatagaagccaggccgtcaaatcctagatggacgcctgagatctgacgatgagctcgggctgggttgttggcccgctcacggcggcaccgcctgactccgggacgaagtttcgtcggaggcaagggcactaccatggcgagggtctagggcattgggaaagggctcaggcgagctcgggtgacacggcggactcagctgtgggcacaacaccaatgcagaggtacaagaaggtgcagtctgtggtggagcagcccaatggcggtgcagctcaactccggcgagcgactgcgtggacaacaggacagtaaacgggaaattaagggcgtggggagtttgctcatctcgagaggggactctggagcgcttgagcaatgacgaggacgcaaagaggccttaggtcgacggtggcggagccccgcggggcaacggacacggcggggacccgatggtggccgcgaaataggcctgagaacacggcggacggcggtggatttccctgggtgcgcacgcgatgcgaggtgagtgctggggtgctacgagtgagggagtaggagagcgagtgggggtattgggcagctacaaaaggtcgaggtggggacgggcacgaccttagcgtgggtcgtgggcgc

SEQ ID NO: 175623 - DNA, 499 bp, Zea Mays
gttcttgcaaagagaccaaatgtaatgggtggtccaaaaactaacttacaagtggtggccattctagagagagcccatgcgattcgccaggttacaagtcattccattgcttcctagctacaatttcagtcaatcgtagctgtatcatctatgattaaatgatgattatttcttttaaaacaggctgttgctgatgacgatgacgacgatagctggagtgagtagctggctcttccccaaagcgatttcggctcctgatgtttcagaagtgattgcatcgatcagacctttgtgtccctgttcttgcatggagcaaaagatgaaatagagccaagttaccacaggttttcatgccaagacaattggcatggaccaggtgatgcccatggatgggcaggaacggtagaagcaacgttgcaactgcaaacgtagtgtgtctctacttgtactatctgtgaagtttcgaagtgcgtcaatgtttattacctttcgatgcgcc

SEQ ID NO: 175624 - DNA, 576 bp, Zea Mays
ggtgttgcttgccctttagcttgcaattagctgggttttcaatttctgttgtggcctctggggcagtgatgtcctccgcaactatgggctttgttataagcttggagggcagttgaatatgggctaattccatgcttggttccacaagagatgatggagcatcagacttaaggaacttatgggactattcacaggagtccgacttccccagcaggcccatgaagaaggcagcccaaggtttaggcactttcaccatatgggcctctccgtccttagagagttcaggatcccagatgttgcacattttcctggtcataaattcttcatagactgggtctgcacggtagtaatctattcttctcatcaagcccacatggatgttttcttccatctatatggcatctatattttgctcctaaatgtcctcaatctctatgttatcattctgccccccttgtaatggcagagcagggagggctaaaacatgcccaatttgttgctcaggaccctctggaactagtaagcctcccacatttggtaaacccaccgagctgtcagaagatgggtgctggatta

SEQ ID NO: 175625 - DNA, 366 bp, Zea Mays
tgcgtccgaggtgaccatgtgaggactaggtcgccttcatcgaattctttggttttgacagacttgtctctccatgccttggttgcttcttggtatcttgcaattgtgctaagggcttcggccatgtagtcttcgagtaaatccttggtcgcgggctcgtccttttccagtgctgagttgctttctactcttggagacttgaattttaattcttgtggcgtcattacctcacagcaccgtacatcagcttgaagggtgtgaatcatgtgcacctagtttctgttgtatttaggccccatatgacttggggcagttgatcgggccatttactcttcatgtcatcatgtagcctcttcttgactgctg

SEQ ID NO: 175626 - DNA, 922 bp, Zea Mays
ctgccatgaagaactttgatgttaggaatgttgagcgtcgatccctcaccagtcaccacaaaagtaaattagcgccaaataagtttgacaacaatgacaagcaaaactaagacttggctacaaaatgctacttagctgagttcattcaatagttttcgagcacacaaatttgatggatagcagcttgttgatcttgattactctagagagtcaactaaaaatcaatatgtatactgtatagcattaaagatacacttatgtaaccccttcatgtatagcgttaaagatacacttatgtaaccccttcatcctacaatggtaagcataatttgatcagagaaaagtcaaccaaaatagactcggatcattaatttttttcttagcatacgctgtaagtaatttgctaataactgatatcatttcagaggctctttgaatagaaatttaatttcatgtcctaaactggtatataatttgggcaaatccttatcaaacttcatttttttcctgcataaagcacgattataatttcagggatggagggagtgctaagtaaaccattacttgcagccataaaatccgttctctcaccagtcaccagcaactaacgaatccagcttccagccttcaaaacagtgcttttatcttcaacgcacgggcagaatgtagtttatatattgacttcctttacttccaattagtgcttttatctacatcttattttctttcatgcaaatgtgtagttatcaatctgtttttagaggttgtattatgcactttgtcttctaaattcatatcaatttctgatatcgttctttcccataggttggaagggatccaagatttgagcctgttcattttttatttgtcaatctctgctttatcttgatataccattagaggttctccagtgtgttttcag

SEQ ID NO: 175627 - DNA, 1069 bp, Zea Mays
aaacaaaacaagatatattggttggggatggaaagagtagattgtagtggaaggaggtcaaagggtgagggacgagtgctcgtaggtgacacatggtgcccgtgcggtgggatgttgggcagtagcgatgatgcaccaccatggctaagaggtggttttgtccacaatgaggtggaggaactagagtagcaatctaagtagaagtgttcttgtggatccactggcattactgaggcgttgatgatagtttatgggataccaacttcaagtagtagcatatatgtagtaggtggaggtcaattgaagttatgtatctacgatcctcatagagaaggatgtagtatggtatcccgcggcatacaagggtggtgcttgcaagtggagttgtagtgaggtcaaacaacttgttgaagacgatgttgaatttggatctaggtcgaccggctatcgtcttgctgggttgcttggcgggcaggttggtcggtagcctcgcctcgctgtgttgcttggtgggcaggatgatgatagtttatgagataccaacttcaagtagtagcatctatgtagtaggtggaggtcaattgaagttctgtatctacgatcctcgtagagaaggatgaagtatggtatcccacgacatataagggtggtgcttgcaagtggagctgtagtgaggtcaaacaacctgttgaagacgatgttgaatttggatctaggtcgaccggttgttgtcttgttgagttgcttggtgggtaggtaggtcagcagccttgcctcgctgggttgcttggcgggcaggttggtcggcggcctcgcctcgctgggttgttcggcgggtagcctcgcctcgcctcgctgggttgtttggtcggcaaccccaagaatgaggccctttttttggactaaacattcggttgattcgatccacattcgttgtcaaacaatgtttcaaatcagatgtaagaataggcactattatttggtttttctaagtacaagagaagcttgaatgccgaaaggggtaaaaagaattaacatgcataaaaagaaatcgatggatgagaactga

SEQ ID NO: 175628 - DNA, 343 bp, Zea Mays
gggagctattgacgaaggtactcttgatgccgaagccgaacaggttgttgttgaagaaaatgttgatgaagttgaggaagattacaatattttgatccccaaaaaacccagccatctagattttgagaaatctactgtgtccgaagatgacatgcccatgatgatgaagcttggctactttggggaagcttaaagaaaacttgtccgatttgctagagaagagactacccctgcaccgaagaatgatgaagtagtggtttttaagagcttcttcagagcaggactgcgatttcctctgaacgagatgataggggaggtgctaaagaattttgaaatatatctt

SEQ ID NO: 175629 - DNA, 619 bp, Zea Mays
ggcaataatttgttacgtttactccttgatcacacggccttgacagaaaagaaaagctgatcagaaaggacagaaaagaaaagctgatcagaaccaaagtgtagtaatcaaccacagattcccgtagcaagatgtccgcagtggcacttgccaacaagatcggacgacgattagtgatgctgcgggttgggaccaccggggctgagcctcttcgacccgtcgtacggtatccccggcgcctcctccgaccaggcagaggctgaggcagaggtcgtgttcccttcagggcccttggcaatgacaacttcgtctcgcagccagcgtcgccccatcgcagggcggctatcagagagcgggaccggcgacgaggcgatgacgagaacgacacagatgcagaagcacaggacgagcttcatggctgatgagaagtgtgctgctaatagtggaatgcggagatgatgaactagagcggccggctcctccgtccatttataatccaagcgtttcagttttttatggccatgttgaactatgatagggtgctgctgctggtggaagctggcatggaacgaactgtggccattcgcttcctcaccggacccggcgccgccgaagcttg

SEQ ID NO: 175630 - DNA, 396 bp, Zea Mays
aaccgttcggctgttggctcttcgtttgggaaccagccggaatagcagcggtgcaaggtccgcgatacactgtccatggagccatttatctgtccaaaaaaatgtattggctccattcccaatctcgctacaaatagcgattgagaagaaggactgcaccatatttggggcatgaactggaagtgaatcccaaggcttatcaggctcagttttttgaagccaaagccatctcatgcgcaatgcctagctaagcttctgaagatcagtgatgcccagaccaccaagctcctggggtcgacaaactttttgtccaagcaagcagactatgactaccgttgagctatttccttcctctccacaaaaatctcctcctgatcttatctatttctttgaaag

SEQ ID NO: 175631 - DNA, 399 bp, Zea Mays
atccgatccagagctccacgcgaaacacggaggtccagtggagtcacatacgcccaggccgccgccagaagcggagttgatacgaatcgcgacatcgggaaggggacgatccgccatggggcccacgcaccagcgcctagcgagagaaagagagctcgtgccctagccgccgtagcactcgccagggaatcactcggcttcgccgcatccaccgtccaccagacgccaacactgccatggttcggtggaaaggttggggatgacgaccgcgccccatatgtcagtctcttgaagcaaagagaaaatgaaaaagggaaggaggtggagtaggccgcacaggaggaaaccgcaagtgggctgaataggtggtctcggcccaagcagttctttcattttttt

SEQ ID NO: 175632 - DNA, 442 bp, Zea Mays
ggcagagcgccgccgcgccctggtgtgtagtggggaggaactccggtgatctccataggtggagctcggtctcgccgccgctactgcctggagatgggctggtgagggtgttgtgggacgctggccgttggatctccagacggacgcgctagattcaattctgcattttaaagatccggagcgtcgatctcttgatggacggtcttgatgggatataacatatctcttcgactaaagtgatctggaccgtgtatccctaatccgacgtgtcaggttgcataccggttcacacgctgtgcgatctagtctgatccgtctgttttggatcggacggctcataatagatcttaccctttcggccatgccattatgcaaaagagacaccgaaaagcttgctattcaacccgccatccttttctattgaaactaaccacaagttggc

SEQ ID NO: 175633 - DNA, 507 bp, Zea Mays
ggaccacctcaccaatcggaagaaatgaaaggtcatactgtgcaattgagacctaacatacctgcatggacacctccacctccatatccacctatgccatatccatacacatacatgcctccaccatatgttccaaatcaaatgtggggcatgccaccatattcattaaagatgccacagtaccccgcttggggggcaccccaaacatccgtattcaacaggttggcaccaccagcacaagaccaattgagggtcgctcaattcggtcaccaggcacagacccaacaagattgccggactactcggcctccaaggccgaccaatccggcaggggggcatatgcctgcagcaactgaaagaacaacaaaaaagaacatcatcaaagtaggtactgcagatgttgtcatacaggaagataataaagggccgatgatttttggcgaatcggtcaacacaaccaaaaaagaagatacgactaccatcaaaacagccgatccaaaatactcc

SEQ ID NO: 175634 - DNA, 614 bp, Zea Mays
ctggttgaggattatgatgacgacgtctaccattacctcccataccttgtcgattacgtgcgaagcgttgtggcagcggtgcataaacatcatcgtcgtcgtcctccataggagagtgagatggggctggagttgttggtgggggcaagcctccagtacgtccatgcatgtaacaagttcgtcaactcgttgatcaagctgctcataggatgtcgtcgcagagtcctggtattttttaaaagcttcagtcatcgcgcgcatcatctccttcaattccatctgagagacacactcatcgtcgttaagcttaggcccttgtccttgtccatttgattatttggtcctgtcattgttagcacaaaacagagacaaaaaggcaacaaacaatatgaaccctacaactatctctcagggtggtggtggaggtggtggaatacaaattatgaagcgtcttaccccgctcttacaacgttcttaccaacactgcaggtggcaaacggtgaccggtgtgactgtctaacgagcgtgggtgtgattgcaatggagtacctgttctgctcgagagaaaattggagctataggaaggctgactaaatataaatatgtggcacaca

SEQ ID NO: 175635 - DNA, 516 bp, Zea Mays
ccacacagcaccgatgatggtgccaggccgaggcaagatgggatgggcgaagggccatagagcatggttttataagctgaggtggagtccgaccgaggatcaatcaccacggaatccacgggcggaaggtcggcatctagttgagatttggggcagagtccatgaggttgaagaccgacctgaaggagtggcccacgcgtaagtgatgaggagggagaatggcgagatggccccacgcgtaagtgactcagagaaaaagataagggcgctgatgggccagtggggtgcgattcagtcttgggccaagcaggaaaatagggcccatagctcagtttcttatctttttttttctttccttttatccattcttttccaaatttaaaacttcaattcaaatttaaatccggtttgaacattggctttctgaatatacccaataagaatcctaataattctaaggagtgctctaatatttatccttatataatacctattaacctaaataaaggataattt

SEQ ID NO: 175636 - DNA, 528 bp, Zea Mays
tttatctttgtcaaccttcgtttcaattagctcaaccgaaggtaccttcggcattatagctggctctttagtcctctgcatgggaggaacaggttctcttgattcagcagctaaagaggcctcctcaccaaactcaggcaccacagccggttcaatttaatgtgggcggtgggtaagtaccttcatctttttgctcatagccttcgacacaggttcagctggagcggccaaggcagcagcttttctcttcttcccctgtcccctcagcgggtagtggtagtcggggtagacgaagccgatggcgtcaaaaactctgtttcaaaaactctgttttttttcccgacctccgaaggctgtaggtagcgcgttatcttctgccttggaataagctccaagcatctcatcacttgtaacttcgatgcactttagccagtcatcgtttggttcatcgaatttatccccatatctgaatgtatacttcagtcggaccagttcaccttcgctagacttggtgatggtctccttcac

SEQ ID NO: 175637 - DNA, 610 bp, Zea Mays
acgtgcttagtttgtcaaagagatccgtctatgaactcaatttagcatcttttaacttgcgaatacttgtagggccaaagagatccatctatgagtgtcgagttgagacaagtagccaacgtctttgcttatagggtcaagaaatattctgggtatgacatcaatggataccgttttcgcacaacaaactacgaccaaagttggcccaatcggaaaacaaggtgttctggagtctttacgcccggccttgacgatgtcgattattttggacaaatcgaagaaatatatgagctcaatttttatggttccaaacctcttactccagtgatattcaaatttcattagtttgacccttaagtgatgagacgaacacattctaatctcgggatagtcgaaattcgacatgattccaccttaccaggagacaatgtctatatcatggcccaacaggccacataagtgtattatctcccatatgcgtgccaaacgaaagaacatcttaaggattgggatgttgtgtataaggtatcgccgcacgggaggttacctgttcctaatgatgaagattataacttagacccggacacatatgatagagagttcttccaaa

SEQ ID NO: 175638 - DNA, 972 bp, Zea Mays
ggtgggtccagggaccggggatcatttccccaacggtacccctgtccccaggggagagtgtctcactttgagggctgataacgagtcggacatgtgtcttatctgtttgttcctcgagcaattgtgacgttctttcgaaaattggtcccacgacctttcacctcctagggtggagtcgggcgcccttttgcctctgtataaacctcgggcgatcgctcccctattgtcatccttgagacgtctttctaactcgtcttcaaccgggccagcagtcgaacttcaagcttttcatgatgtcgagctctgtcagtcacaagctgagctaggcttctctcctcgggcttgttgacctcttctatttgtctgatttttctctatcctttcccagcagcagtgcggtcgtagtcgacccggagactgcatctcgactgagctccccatctcttccttctccacctcaggtgctcacgggggggctgtgatgcctttcgcgcggtgcaagaggcgaccgaggttgaagcttagctactacgggtgtagctcgttgaggccgacggtcgcgtcgctggtaagtcgtttgattcttgcttttatggtttttgtcctcttttcttatcatgtctgtttcttgtggcagccttggaagcggagctcgagatgctgcgccactgctcgggccaacttcttgatcacgttggggcccatggtgcctctttgatcgagcgcttggataatgccatgtgccgcgttcgggacattgcagacttaggcgttcatcgcggggccgcggtagcgctactcatggcggaggtctgcctaggatgcaaccttcaggatctcattggtcccccttcatctttcttggatgaagggttggaggatttgctgaaaggctacgatgacgtagctagccgtgtcattcttagggtgtctactcacgacgttgtctactgcatgctaactgcgacgtgc

SEQ ID NO: 175639 - DNA, 443 bp, Zea Mays
ggcgcagtgccgggaatgagatctatatagaactctactcctctttctggtggcatcccgggcaactcttccggaaatacatcctcaaactccttgattacagacatgctctccgctgttagattaaacatcattggatcgtttgcgggcggttgggcttgataggaaactacctttccttggtgatctgtgaggagaacagtcttgcttgcgcagctgatgatacccttgtgcttagctagccagtccattcctagaattacatcaattccttgggatggcaagatggtcaagtctgcaaggaacactaccccacttaagagaattctgacttgggagcacctgagtttgcacaggaggtctgatcccggggttcgggtgaccaaagggatagctaggggtgtagaggggatgccatgcttttccacaaacttagcggctat

SEQ ID NO: 175640 - DNA, 572 bp, Zea Mays
gagagctcgaaggcgaaaaggcgcagcagttgggagaaaatgcggaagcttaaaccgctgcacacggggtgaaccccttttaaaggaagactcccttgctcgtgccctgagacgccgtgaaaaatcttgcccgacgcgcaccgaagcaacccggcctatgacgcgggggtccgggcccacaagtcattcagctagggcgtaagtctccaagtgcgaagaaggcgaaacaccacgcgaggagcgaatcaccgcgcctcttcatctccaccgaaagcagcggcccaacctgtgacacgggggctcgggcccataggtcatgctccatgggcgtcggtctctaagtgcgaagaaggcgaaccatcgtgtgaggagcatgccgccgcccgcggcgatgcgcctcttcatctccgccgaaaccaactgcccagtctttggcacggggcccgggcccatgagtcatcctccttgggcacaggttcctaggtgcagagaagtcgaaccgccgctcgcgccagtactacgcctcctcgagtcagccacataagacaaagaaggtgaatttttaaaccaac

SEQ ID NO: 175641 - DNA, 470 bp, Zea Mays
ctgaattctagatttgtgcgctcaattcatgcttttccctttccgtagtgcacaacagcacaagttaatgttctccaggaatgattaagtttgcatcagttagattcaatcagtaaggcaaaggatacacaaagttgggcttgagctgatcggctgcacttattcgtcagctgcagctgctgtggttgcatgcatgctgtgataatctactgtgtctcttagtttggatttttgcagccagataactgcagtcgttatctgctatttcttgctcgatggattatattagtgtttgaggacagttgctgcctctgagtttagagcagtatggttttatttcctgttgtatctacacaccaactatctttaaaaattcagagtttagaggcgccatattagtatatttgacttgtgcaaggctgcaagcttatctgactagtttccatgcctagtttaccctctgaagtgtt

SEQ ID NO: 175642 - DNA, 868 bp, Zea Mays
aataagttcaagtagctcagatatgttcaacgggttcacacaggtaacagacataggtcaggatccagcatcaaagtaccaacctttgacatctagatcccaagtgaccagctccgcatgcaatccgcaaatagaacctgggatatggctcgacaagttgttgcaagaaagaagcacccagcggagggagacttggagcaccaaaaagtttgtcaatatcaggcaggcgtcgggtgcatccaggaaggaaatggaatcggctcatcccaagtcaaggtaatgtagttgctgcagatgtgctatctatgatctatccgtggagtgcattattccagctgagatccagaaatggtgcagccggataggcacaacaagtgcgtaacaccacccacagggtgcgaagtcgtctataagacacacacttttatccgagcaaaagctgcctaagggtgcagccggataaacacgacaagtgcgcaacaacaccacaagggtgtgatgtcgtctacaacatgcatacttccatcccttacaaaagcctcctaagggtgtagctggattcacagtaagcacaacaagtgaagtcgtcacaaaagattaccaatagatcaacacaaagcgcacgaagacacaattcagcgcaaaacaaaaatgaaacacattgttacaactacacaatgtacaccatacacaagatatccacccctcatagatgttcccaccgccgtccttcggcgaagggggcgagggcagcattttcgctcatcatcgccaaagcacggtgctggcaacacatcattatattggttcttttttcggaataagaccagcttctcggaaattaaaaagcatcaacctcaactcctcc

SEQ ID NO: 175643 - DNA, 600 bp, Zea Mays
tgtctttacctaattccagagttgtcactgccattgcctgagtgctttcttcagcatagacatttttaagtttgactgggcacttagaaacatataatgtgaagtatttggtgtaagttctgactcctttttggatagttttgttcccctaaagcttacttttaaattttaatgattcgtcgcttgaaaacataggttgttttgcacaatgtgttaatccagataggtacattagcacttataattttgagtgactgtttttcatagcaagatttgttttcttcattaacaggaggtagttgtggcgatgacagctgcggagtggaggatggaagaaagagcttttggtcattctgggcatcttgcttagtccgggtccattgttcaaaagtggaaacatattttagtccaagaataataaccattgttggcactgggagagtagtagttggtctattaggaatatatgtgcgtgtcttatcagaaatgaaattttagtattttccagttatgtaaggtccaaacttcagaaaaggtacctgttttagcattgggggcataccaattggtccattatgcagtgccatagcactctggttt

SEQ ID NO: 175644 - DNA, 854 bp, Zea Mays
gggtgacgctggatccaacacaatgaagacaaggaaccggatgttgtgaactccggccgcctgagcaatggtggtggcaatgagcctagtagtgatgtggaccgcaggggatgccggggtgggcgaattgatgcgactgaagaagagttgttgagccttggctagctaagcggttagagacttagagtagtgtggacagcatgcttgtgctcacaggcttgggtcacggggtgacggcggactggatggtggcaagagctgcgaccagtgaggagatgctagtcggctgtgtcagagcgacggagctggaaggagcggtgaagccggggggtggaacccacgaggtgtgctgtaggaagcgagtgggtaggcaggcgggtgagagactgctagtgggcgcagtgatgctacccatgccagcagcagcaaggtcagtgtcggtcatggtaaccgggtagttgggaagggcgaggtcgttggtggtcgtagcagtggccacatcggggaggatgagaggtgccagggtcgttgtcggaggatccatggtggcagcaggcgttggggcaaccggcggcgtgggggcggcaacgaatcaggacagtcggcggcgtggggaggcacgatagccgtggatcggggcaaccgatgtcacgggtaagcgcggcggcagggatcagcgcagaaaccgtgacgggcgacggcgggtttgagtccagcggaccgagaggcacatcacaggtcggacggttgcagcgggcatcatggcgggtagaggaggggaaggaatcggaagggcagtcgagtggcctagtggtggtcggcggaggtggggttgccgacggctgtacaagtcc

SEQ ID NO: 175645 - DNA, 429 bp, Zea Mays
tccaatatggcagcatcctaccagacattttcaggtgaattcaatactagcaaagctcccgccttcttggcgagactttgtgacttcacgtcgccacatgaagaaccaaataactctcaccgagttgtctgctgctataaatatggaagagcatgcaagggccagtaacaagccatcccagcaacttcaagctcacgttgttgagaagggcggagatagaaaattctagaagaagaagaactctccacagaagaatctgaacctacctaagtccaaaaagatgaagaaaaaggaagactttatctgctacgtttgtggtgtctccaggcatacaactcggaggtgcaaacttaggaagggaaaatgtactccacctcagcgcaaagaagggaacgtggtggttaactccacccagggtatgcacctcag

SEQ ID NO: 175646 - DNA, 600 bp, Zea Mays
ttggaaggaaaaagagtcaactacaaagggaggacactcaaatgaaaaaggaagtacatcaaggacaacaacaccaacttggaggatgaggtcttaaaaaataatcaatggtgtggttgtaagcattcttatccctttcattttgagaatgcaaggcgcaagttatttattgcaaattttatgagccttgaacaagatgtataatggatctccctttatatctttaaaagcgaatgcatcaaaatcaactccctcatttacttgatgcatatctttagggggagtctattcttatatcttgattttgttgggactattgctttatctcagtaatttcatatagtctcttgcctgagaataagtttctcatgaaatatgctactatttttaaattcttgtctttcactccaaagtagcatatttgctggattctcctactccaagcttaattgataatctaatgcgtatgttgttcttttgatcacatatgttatttgtttgatcattgaatgacttcaatcaacaatcatgcttcttagtgccgtatatactatcaatcgatatctctcttgatatgcactaagttaaaaggagaattca

SEQ ID NO: 175647 - DNA, 585 bp, Zea Mays
ggatatgtgtcatgaatactcggtgctctgccctatcttctaggagctactgctgaagagtgtcctggcggtcctgaatagtctgaaacatagataacattcgctcggacaactgatgctgaatagctgcctgtctggcctgctctactgcttgacgggcctgttctgctgccatgtgagcctgctactgagtaagagaccgaagaatcgcagctaaagcagggtcaatagcaagaggagcagttagaagagcagcactggagccaccaacctcgtgatcatgggaacgaggtggtatgcgaggtggtggcggaatccctagatcctcatcatcatcatcatcaaaggaagtctctgcagttgcacgctgatcctcaaactatcttatggcctcgtcctcaaccctgagatctggtgccggtggatcaactggagctagagttgtgtccttaggagctgggcggtagaaaccaaactgcagtctagagacctcaagggtagcctagaactgaggagactggatcagctgagctaagatatgttataagtagtgtgcataggacagctgatgccaagcccgaagac

SEQ ID NO: 175648 - DNA, 328 bp, Zea Mays
ctcgaatgtctttaaaacctcaaccaacatcttgtgtagtggaaagcgaagcccagctttcatgaagctcttgaagaccaccacctcgtcagctttgggaaggggaacaatgctttccccctccgaccctcactatggaaacatcatgaaagtatttgcccttcatcgcttcgatttgctcttgtttgacagttgacttcccaaaaacaacatggcttgacctccacgaccgatcttcgacatcttcattcccactctccacgtcaaaactatcgctatcgctggaatcttcagacaacccagccaacatctcattggtgatcttttc

SEQ ID NO: 175649 - DNA, 447 bp, Zea Mays
gaggagctggggacgcaatcctaacaacttcgtgaaaataacaacaaatccccagccgattcccctccggttgttgcaggattttgatggattaaccagcgagtccgtggttggcatggaggagaaagagatggcgagtgtgccccacctgtaagtggtgcagatatgtgtagacgcggcgttagaagagtagaagctgggtcccgctagtcagtgaaacaacatggatgaagcttatgcgggagtggctggtaaggtgggctggcagagcttgatcgggcgcatgtgcaggtatgtgtatttttcctttttttgatttagtttcctatttttgtttttcagatttccaaactaagtttgaattgcaatgtttaaatttaaatgcgcaattagaaaatcttcagcatgaatgcaccgtttttatattctttagtttactcatttatg

SEQ ID NO: 175650 - DNA, 872 bp, Zea Mays
gtttttgaggcttctagtgaggacctcaatgagtcgggtttgattggccaggacttgggctaggtctaatggcagctctagaggtgcggggaggtgggttcactcccttctccacaaacttctcattcggcacctaggggagaccttgctccaatccatgaggcagtaagcgtggttttatccgaggcactatgcatatgccatattttttctcaaacatgttattttattcagcactccagttcattacaagcatacaatcatcaccgatcgcacgagctttttctaaggtgtccccaaactctctaagaagatcatcaaggatagccagggacacttcctcaacgtcagaaaagttctctatccctaggggaggtagggttggcggggcttcctccttcgggtcagtctggcatccttggctcttgaaacacttttggatcttcttgatgggggcgagcttctttaacctcttagcatagtccatcttcagggtccggtatgcctcacgagtgttggcttcttcgccttccgccatctcaagactatcttgaagagccaccttttcttccttcaattccttgagctgttgctctaggctttccacccgggagtttaggtggttgcagtgggagaaaaggtcgtcatagtggttgtcaagggtctagagatatccggccatgtagactatggtagggtcatcttcattgggatctcttcctgacaaggcctggagtcttttcctccaagcaggagtatttttgttgctaggtggaaagtagcgaaggggtgtcttagagacttctctgctgtagttttggcatagctggcggagggctttttgggcagcattctggcaggtgtctgggaag

SEQ ID NO: 175651 - DNA, 1390 bp, Zea Mays
tatcacaaggaaagttctcagctgatgaaattcttgaacttatactgggtcactccaattttgtatcgacaataacatgcaatgaagtttatgagtatccatatgcttgtaacaccacaggggggatgctacagccagctccaagtattttgaaattagttgatttttctttcatggaagaaaataaggcagaaattgctattgcagaaaagagaagagttgaaaccatcagattactaagggtactgtatgatattaagagcagacaacagaataatagccaattgagtggatgaagaaaattagttttcttgcttttgtctgtttatggtgcaacccttagtgaaacagatttggagttatttcaccttatgaatgagatatagtcacccgtgtgccaaaccattactgaagttgatcatctgtggggagcttctgctctaaaatttagagaagaactgaaactagatttttcaaaatcagatacgcgtaacacagagaatgctgaaattactaaaaggagaagggtgctctttcgggagaacatacctgttgattccaagctctgtgcaaagacatctttgctatattgctataaaagatctacaagggcttctgttttctcactggaacaacttcaatgggataactttgctgatagttttgaggtaatttctggaataatagtgtcaactgaagtttgggtattattctaggttttgtggtttcacaataatgttatttaattgtaccttgttgatctatcttcatctgattctggttggcaggtaacatctcaaaaaatggatgttcaggtttacgatcctttttttatcttgcgattctcaattcatactcttcacatgggttacattgaacctgctcaatttgcccgattagggcttcttgcaatcacacttgttagtatagcatctcctgatcatgaattaaggatgttgggctacgagtgcctaggaacattcaaaaaatcccttgaggtacctgttgtttcatgaatctctaaattttacctggtttattatattcttatcaactactagctgcttatattgaattttctatattacaacttatcttcgctgggcgaacatattgttggttaatgtatatgcttgtatcagtatgttcaaattctagcatttgttaaaacgtttaatgtgcttatttaagtatgttgaaattcctgtagtttaaatatttttaattttttatttgttaatgatattcacttgtgatggcttttatgcctattgacttgaatggcagcataaaattatgcctattgacattctgggggcattcctatgacatatagatctgagtgcaaaaagcacttgtatggtacctgtatttgtaatcttttatcctt

SEQ ID NO: 175652 - DNA, 777 bp, Zea Mays
cgaggcaaggcttagggtgtgtgctgatgcaaaacgaaaaagtcattgcttatgcatcacgcctacttaagccgcatgagcagaattaacccacccacgatttggaattggcagccatagtgcatgctttaaagatatggaggcattacctaattgggaacaagtgtcacattttcaccgatcacaagagtctgaggtatatcttcactcaaccagatctcaacctccatcagcgaagatggttggagctgatcaaggattatgacctggaaattcattatcaccccgggaaggccaacgtggtagcagacgccctcagtcgaaaaccattcggaataaagggaaccaactttttagaagattggaagaaagaatcagctcaactgaatacatgtctgggaaacagcggcagtctcgaagtcagaccaatgctggaagacctcatatacaaagctcaacgcctagacccagagacaacaagacttgtggaaaaagcccgcaacgaacaactcccggacctcagggcagatgaacaaggagccctttggttcaaaagtcgtctgtgtgtaccaaaaggggaagcatgagaggtcctgctcgaggaagctcacaactcagcctactccatccacccaggaactaccaagatgtaccttgacctcaaaaccagatactggtggagagggatgaagaaagagatagctcattatgtggcccggtgtgacacctgccaacggacgaaggccaagcaccaaaaacctgcaggcctattacaac

SEQ ID NO: 175653 - DNA, 760 bp, Zea Mays
tctagtcgctcgatgttccaggtatcggctaacgtccttcctttctcgccgtccaactcagcgcctcgcaaccggaggtggtgccggcctgctgaatggtacgtggaaggggaaacgggccctctgggcatgctttttatcgaggccgatgtgatcaacacacatccttcattctctgttcttctagtccagtgttgagttggccatataccctggtcggcgttgatgtcgaccacaagcaatttgccagtcccttgcctgatggcgcttcgtttgtgttcacggaagcatcgtagtcatttgtttcatgggctttcgaatcgggaccaatccataaggagtgtttagtggctcccctctggatgcccctcgtgtcggagggctgttgtgcaaatatatccctctccttaggaagggggtcgacgagtgtgccctcctatttgggaggggcatggacctagtgtgtgtcacctacccactaggtcgcccggggtcccgcataactcccttcacgtcgtccatcatcttgaaggtcatatcgaccctctttgcatcagggccttgctcgtcgaaggctcggggttcctctgatagctcctgagcaagggtggctccctcggccaagtcacattcgaccttgcattcatacgcatgttgcgccatggtgcccacggtgatggttcccgctgggcctgacattttgagcttcaggtaggtatagttgggacgaccttgaacttcatgtagcacgaccttacga

SEQ ID NO: 175654 - DNA, 378 bp, Zea Mays
aataccaaacacagagcggaacggctccgctcctggaattggaatggagtggctctactccaacacactcttgaaccaaacacaccctaaagggtgcagcctgcctctctttacttgatatagcaagataagatgtagaagattctaccaactactactattgcagtgccatactggccataccatctactgttactgctaggccatacaagcatgctcctgtcactagacaggggaggcatagccaaaagaacataacactatctgctcataacgcatggaaggcaaaacagcaagagctagccagattaaacaacacaattcctgtagctgagtgcacctttactgcatgggcaaactgtgttttagcgagggaga

SEQ ID NO: 175655 - DNA, 529 bp, Zea Mays
gttactatagcaagatcaaagttgaattatagatcaacaactttgtcacaagaggataaacaagttatcacataaaaatttgagatctgggccctgaaacttgctctgttagacgttctgatggtgatcaccatggtacagtgactgaataagatcacagatgcagctcccctcgccgccggtgaccctcgcaccgtgatccgcgccgtcgccatgattcgtgctctctggcgaggagattatcacggctgggtaaaaatcgtggcaccggataggctcggacccggtcgacagtgagctcgccgtacccacttgggctgcggtcgggcaaagtggtcctcgccggagttggccacctaccgaccgtgcgccacgtgccttaaggcgttaccacgtcgtagtaaaccactgaagcgtgtccggtcatcgccggtgaccttgccacggtgaaagccacgaatcctttgcgccagtgctctcccctctctccggccgccagcacgccatgcccaaattaggagccaccgcc

SEQ ID NO: 175656 - DNA, 408 bp, Zea Mays
gagaggtcgagttcaagcgcggattggctccaaatctgagattatggccatgatcccattgagagaggtcgtttgtgtgtggaggcttgcaggttttgctgattggatcaaaagatagagaggggagaaatcgggtttgtctcactgccgcgcacagattgaagatcccgggtttgacatgtccagagcacgcttcctgatgccatcttctggtatgaggtagaggggttagttaggcacatttttgtcaatggggtcattaggatttgagctagggatcaaggtgaacacgcttggtctttggctcaagggctcaaattcagaaatctgaatttcataaatccctattgaacctccacttgaaaagcttgtttggagtttttattaaactattttggccaagcttcc

SEQ ID NO: 175657 - DNA, 518 bp, Zea Mays
gtggggttagagttatcccgagcagcgtctcgagcctcatcgaccttggagtgcggtcttcagagtcaagaagctggtctaggttgctctattcccatggaggtgactgagaatcctacagccttagaggtggctgttgcagagaacccggtccccaaggatggcgccagtgattacccagcccctgagggtgttgccgacaatgatctgactcgggtgggcagcgtgagctacaacccagcccccgagggtgctgccggtggtgatccggctccgatgggtaatgcaggatgtgacccagcccccgagggtgtccgagcgggctccccttctcatacctccatggatgtccacgtcgggtattctcctccacattctggttgcatggcggcagcatgtgcttcaaatctgaaaatcgccttagagaccggcacacctgacgctagagttttgattcctgctggtgatgctgagttgatccccaatgatgctcttcagattgcttcggttgatattcc

SEQ ID NO: 175658 - DNA, 596 bp, Zea Mays
gtcctcgtttgagtataaccaatgaaaccaactgcacacaaatacacaattcctgctttgtttcctttcacctattgattgaaaagaaagaaaaattgaaacttgcagctgcactgaaagacttcaccaaacctactaaggcaggtaatcacccaccctctaacaaattatcatgtgtggcctataaacataacacatatgagaacaaaacaacagccatttagaagactatgggcaaggttcccaccactcatcagtacacagtacacactgtctccagttcaaatatgatttttgagtcttacaaaaggagtaagaaaaaaaactctttatttcaagcaataacaatctgatagtaaaaagggtgagtcatcaggatatactgacgatatgcttacataatgatgatcattattcttagattttgcacaaagacaaaaaaaatacatgggcccggatgttgctgttagtcagcaatgtaccagaacacatcattaacatgttgaaagcacccagtggaaagaatcaaagcatggatcagttggaagcacattttccactcctaaccactgtgcttctcatgtggctgttattat

SEQ ID NO: 175659 - DNA, 885 bp, Zea Mays
atcaagaaagtcgggagagcagagaaaacagagttaactacctccagtcttccggcctgggagagtagagcagaagtataggatagtctcccttcaatcctttgaataagtggtaaaaaatggcagattctgggttttgacaggcctagaggtacaccaaggtaagtgaaaggcatagaacctgtctggcagtttaaagttctggttagaatctccgaccttgctgggcagacattgattgggtacatacttgatttaaggtaattgactttaagacccatcgaggtagcaaaggagtttagaactgctctgagaaaaaataattgtctggggcaagcttccaaaatcaagagagtgtcgtcggcatattgaacaatcgggaaatcttgaccacagttctcagtgagtggcagttggagaagaccctgctgtctcgccttattgattatactttgaagcagatctgtcgctagaacgaataaaagaggcgaaagagggtctccttgtcttaccccacgcttgcaatgaaaagatttgcctggcacaccattaaggagaaccgaggacgtgccagagtggaggatatccctaatccagcgcagccatttgggcccaaatcctctgaaggacagcacctgaaggatcagatcgtgctcaactgtgtcaaaggccttctcaaagttcagcttgagtacgatgatttcttttttggaaacatggcataaatggatgtattcataagcccaagctaggcaatcctggatggatctacctttgatgaagccatattgatttttgtgaacaagggatgtcatcactgtctgaagacggttggccagcaacttagtgatgattttcatactattatttagaagcgagattggc

SEQ ID NO: 175660 - DNA, 469 bp, Zea Mays
gttcagaaaacatggaaatttgtcgagcggttttccttttttgctgattgtttgtgtggaagtgctggtggctggcctggcgtcttctaggtgacgatgagcagggagcgacaggactgtttggcctcgaaggagaaaatgttttggcggatagcaaaataggagaaagtagtggttctttagaagaaaaaaaagccaagaataggaggtgggattaagtttatcctttgattttggatctaagggccctcaacacgttttagcatgttagcacgtgaatttgttttacacaatatacattgcctttaagaatatttaagcttataggggaatgctttaatctacagtgccaatagatgatatctttgtatatggaggtccacgtccacatcggatcttccctcccccaatgtcatcttctgtgatataaaagttgaatatgacgtagaacaaaagattttcagttctg

SEQ ID NO: 175661 - DNA, 385 bp, Zea Mays
tgagggtcccagatgggaccccaggatttgcagctgcttgaacgcaacatggctgatgacgttgaggcctgccccgtcgtcaatcaacacatggtgcagccgcatgttggcgatgataggggcggtgatgagtggcagtatgccggcccttgccatgttgtcggggcagtcagatgccccgaaggagatggtggtgcttctccatcgttgatgtggggcagccttcaggacccctggagttgccgacaggacctcatggcgcagggacttgacgttcctgtgggaggtgagttcctagcttccgccgtacatgacgtacaacttcttgcggcggtcgctgtcatccccggagttggaatctccagtgaagatgtccttgaggtcc

SEQ ID NO: 175662 - DNA, 755 bp, Zea Mays
actgaacagaaattggagaaaaatgtgcctaaagtttaactgtcagactgtcttaagtctgaattcagactgacagtgagtttgagccatctttgagcttggattcgattataatccagtcagtaattggctatggttgctatagtaagatttcagctggatcattaggctacaactttgctatagaacgatggccttgttgccatgtaaaatcaggagaaaatcaagcccaaacttgatctatcacgctgactgaatagaggttccaatggtacagtgactggattggatcgccagctcagtccctcgccaccgatgagccgcgcgcggattcgtgttttcgccgccgtgattcgtgcttggctagcagaggatatccacgggaaggtaaaagatctcatagaggaatggatttgatcacggattgaagtttatcaccgtgcctgtagccgttgcgacgtggccggaccgccagcgtcgccgtggaagctccggtgacctcgattgcgccatgtcgtagcttgttactgtgcggtagtcatcgtggcacctttaggagtataatccctgagccgttgcaccggtgaacgccacagtcacagccacccgtgttcttccctatctccagccgccagcacgtcgtgatcaaattgagagccaccgccctcggagcctataaattaagtgcgccatcggcttcgctatgtattcaggcatctagcgcacccacccgtacctcagatcctccaccagag

SEQ ID NO: 175663 - DNA, 531 bp, Zea Mays
ccgctggccgacctctctctcggcctataaaagggaggagttggcctccatgcaaggggacacttcagaaggtaaccagacgaagccgaggtcactcggacatgcaccacaaggacgaacaggaggaggaggagcacccgatgaggaccaggagaccggagccccgtcgttgagccaagacatagctaggacccccaccctgtagcttttaagctccacttccaccccgaaaagagacttgggagcctctcctccctctctctcccacttgtaaccccccactacgagtttctccaagctctggatggatggaaacaacattggagtggtatgggctcccggagcgaccgttcgttttgggaatccctacgacaccctttgcccattttctaacacataggggctcactataccacaacaccaaattagcatcggacgactgtcgctataaatataggattctcgtctaattgttagtcgatatatattgccacataccgtgagtcgacatttatctatattccaactgaa

SEQ ID NO: 175664 - DNA, 432 bp, Zea Mays
cgaaggggtatcgggctccctcaacgtttagatctcggatcaacgaccgagattaggccggcggggcgggcacacgagtgcgcgaggcgtggccgactgacaagggggacccaggggtagtggcacgctgagggcgcggagctctggctgctagatggggaatcaagggccctagttcaacgaaccaacatgaatcggtatctgaagatctggaccatcggatcaggggtgggcggccaagatcggacatccggaggtttaacaactatggacggccaggggtggtgccgcttgcgctcgcggtggcgcagtcgctggaggcgaagcgggccagagatctagggggtcgaggaccgtctaggcaggccagggctattggggagaacccaacgaacaccacggtggagcttcggatgcaagaacgggaccgag

SEQ ID NO: 175665 - DNA, 1024 bp, Zea Mays
gaactctggtgtggttgtgctggtggatttatgcaacgaccggtgctcccgagcggcgtacaccgaattaaaccctccctgaacgattcccctaacttaatttcacgattggtaagctatcaagctctgtccacgtgaaccgcgaacgatgaggacaatggtacgcgttcccggtgatccctggcggtccggttcaattaaaggggtcgaggggtttgcggggtacctaaggatgctagaacaagtagcagagggacttgagctaacctgaatcgagctggccacggcgagctgatcttcacggcggcggagatcagtttggggagaatttgaaattcgcgagcgctggtgaatgattgagggtgcgagcgggtgctatggctttggaatgatctagcacagttgcccgggccatcaatttatagcgctcacaaatgttggctggtgaatcgagcgagacgcgaggcggccgagaaggaaaaaggcactggcgcaagcgctaggtggcttctaccatggcggtctctccggcgatcaccggacgcccctagcgtgactatccgcaacgtcgtaaagcgcccggacacgcggcgcaagaccgagcgatggcggttcaccggcgaagttatccgcagtggctgtggcaacttggtacggtggtcggacttgtttacggccagagttatccacggcggtgaagatcttttaccccgcgacgctatccatccaccctgggcacgaatcacgacgtcggcagcatgaatcacggcggagggagtcgtcggcggtgaggacaatcgtgctggcgatctcatctgtttcagttactgtaccatcgagaactgattcagagcgcctgatagagcactttggagctccattttctcccagattcatatggcaacatgatcaacactctgcagcaaaattgtagagcaatataccatctacagcattgctatattgtgctgccacaaaaagccaatggatcttgcttgaaattaaacttgaagttcatgtcatt

SEQ ID NO: 175666 - DNA, 336 bp, Zea Mays
tcttgcttcatatggagcactccctctggaacataatgctcccagaacgctagcttgaattcctcccaggtgatctgatgtccagccggttgaattgctacaaaatttgcccaccaagtactggcaggccctctcaggttttatgcaacaaacagtggcttttgtgtctctatgcagcggattaatccaaacttctgttccataactcttatccactcatcagcttctaaaggttcttctgctttgatgaagagcgggggtcgagtctcagagaattccgaatatgtagtatcacacagtccttggggaggagctctgcctccgtgctattggaac

SEQ ID NO: 175667 - DNA, 320 bp, Zea Mays
ctgccttcctgctagccgtcggtgcctactctgaggttcacctctcctatctgcctggacttctcactcttttgactaccaacggcagatatgttgaggaatgggtctgagttttctatgctactgtatggatcgaccctgatcaccactggatgagattccgatttgagcgagaggatgttaccatacatgccagtcagattcgtcaggtgtttgaattcaacgagtcatcgacttgtcttcacagcatgtgctatggcacctctgaccctcctcgtcgccctcacgacagagttgctcctggtacagctcacgtcgcg

SEQ ID NO: 175668 - DNA, 753 bp, Zea Mays
gggggattataaaaccacgctagggtgtttacttaattattataggaggaaggatggtggggctaggttatttggtgacgtagtgttactgcattttgtatatctgtcgtggtgggaagaaaattcctccactgcaatcttgaaatcatgtaaaagaggtgcagaaaatagaggatgtcatgtgtgatgcttcggattaattgacctataaaacaggtatggattcagtggtggggcgggcgggctcgagcctttgtaccgcttacgatcctatcgtactccactagaaccctctaatctaaaatatacataatataatgtagaagaggtttttatattatagtaatttaattcagtctaccctaaacttttttttggctccgtctatgctacagaattatgaaaaccttagaaatttgaaagggtggagtgatgcaaaacctaggagtcttttgagagggcttctaagaggttaaataaaaaaaatacaagatacagtacgtaccacctaccatttgtcaagaaaactaacaaggttctccatcagtcattttcttttgcaagaggagaagaaaatgcatatactggtcctacactacacaagctgagaaggttcatcagacgagaaggagttatgcaagaacgtggaaagataccaaaataagaggaactgacgctcagccttcccgtgagtttcacagaaacggcacgatctcatatggtaatttcgtgaacgcactaccataatcccgg

SEQ ID NO: 175669 - DNA, 454 bp, Zea Mays
ccttccttcttgaagtgttggaaaaagttggattcgggcccatatggagagatgtgattagtgggctgcttatgacctcttctacccaaattatgcttaatggagtacctggggaatacatccaacacaagaggggtctgtggcagagggactcgctatcccctccttttcatcatcattatggatgttctcaatggcctaattgttaaagctgctgatgagggcatgctccaacccctttcaacacgctccattcagcaccgaatatcgctctatgctgatgatgtggtgatattcttgagaccgactgctagtgatctgtacttggtaaccaggatattggagttgtttggggacgcctcggggctaaaaaccaatgttcagaaaagcagtatggcccccattcacggctctccggttgacatggaaatggtaacccagatttttccttgca

SEQ ID NO: 175670 - DNA, 559 bp, Zea Mays
atctagccctaggttctcccacccgcgacgacggcgaacttcacggacaaatcgaggtgttctagataattgagcagggtctagcttaatgggttgaaccgatgagcatcaccagtgaatagaggtgttgaaacatgaacaaagagaacaagaacgaacctagagttggcggtccacggtgtgatggttcacgacggtgcagagaagtgaattggggaaatgcgaaattggggtgcggtggtgcacgataggagctagctggggatgggttggacatgtaactaagaagcggagcagagggcatcctcaatttataggtctcgatcgaaatggacaagaattttgggattgagatcacggttatccggctaggatatttcaaagtggcttgatcatcgtggcgcacaaaagggaactgatccgcggtcgataaccagtggcttgccacgacccatacacgcggagacgtggctattacgtgtcacggccggaaaaacgaagagctccagtgatgccagcgcgctgtccgcggcgggacacgacggccggtccagccagc

SEQ ID NO: 175671 - DNA, 379 bp, Zea Mays
ggacgctatagaggaccttgttagagtcgtaggggacctgacggacccctacgtttagggtacatgaccatatagcggctcttgttggagccagtctaagactgcttctccggcttgcttctcagctgttgcaaatctggaatattcaacactccaggcgaagaacaatcaagataacagtgtcgatctccgctgccctctccgcctccgtttgtcgcatcaaccgctcgacgagcctcagatcgaccaccaacaccgatgccgactctctccacccaccaccttcagctatgcctctggtagcgccaactcggccgacgcggcgccgcattcgccctcgtgctcctcgccgctgtcctcgtgctcatgatctcccact

SEQ ID NO: 175672 - DNA, 715 bp, Zea Mays
ggacgaggtctcccactgcgaaggatcgatgccgtatggccttgtcatgatagcgcctcagagcttgctgatatcgggccaactgaatcaccgtattcaatcgttcttcttctagtacatcgatatcctccagcctagtagcctcagcttctgctatgttttcaaagattaaccttggtgccccaaacttgagatcagcaggtagcactgcttccgaaccatagaccataaagaaaggtgtgtttccatgcagagctcgactaggttgagttctcaggctccaaacaacatacggtagctctctgatccactttcctgcgaacttttcattcttgtcgaagactttttttctgagtgcctccaatatcaccccgttggctctttccgcctgcccgttggctcttgggtgtgccaccgaggcatatttgatctgaatgctcttttgctcgcagaaatcgaagaactctgagcttgtgaaattggaccccaggtcagttatgatgcgatttggtattccaaacctgaatattatgtcttgtatgaattccactgccttagctaaagttagagaggcgatgggtttgaactctatccatttagtgaatttgtcgatagcaaccagtacatgagtgtgtcctccttgggctttcttgaaaggtccaatcatatccagtccccagcacgcgaacaaccaagttacaggtatggtttgcag

SEQ ID NO: 175673 - DNA, 318 bp, Zea Mays
tgctgatgtgaggaggcgggatctggaatttgctgtgggtgaccaagtccttctcagggtatcacctactaaaggagttgttcggttcggtgtctctggaaatctcagcccaagatacattggaccattcactatcttggcccaagtgggcagcctggcttatcgcttgctactgccggattccatggcaggggtacacccgatttttcatgtctctatgttgaggaagttcttgcgggatccggaccatcagattgagatggaaccaattgttgtgcagcaagatttgactttggagtgtcgtccagtgcgtatatt

SEQ ID NO: 175674 - DNA, 677 bp, Zea Mays
tgggttgcgaccgtgggggaattgtgacggtaggagcaatgaggtccggtgaatttctcgttggagcttcttctctgcggtggaaccgagtcttgccgtggactgcgactctggcatgctggttggtggtaagatctcatgcataatgttcatcgtgccattcccttcatgtttagctacttgattgtaagtaggattgcacaggacactgttttggctgctcgcccgccgatctccggcgctggcacgagaggcgccgcataagccagtgacctcatgcgcgagtggggttgccggggcctcggtggctgttgattagggcacgggcggccgtgattagattctatgtgtaccgctttggtagaggaatcctgcccgttgatgtaaaatcggtcggggtaggattaatcggggggtttagatcatggtcgttgatcctcgatccgagggtggttggcgcgcaccggttcactctatagtgcgtgtaatcctgagcactcaatttagatcggacagctggaattaaaccctatcgcctcggctgggaattttgtaaaagtgaccccagactttcctcgaaataaatcgcagtccaccacgggtagatcctgagtctgggaaccatttacgtagtgaaccgtgagatatctgtcaatattccgtacgatccaggcaaa

SEQ ID NO: 175675 - DNA, 1403 bp, Zea Mays
gtgtaacatttcatattggttccagacactacaagtttgacttgaacattagtttaacagatcatgattggctgatgtctacaatccagaagcttgtgctcggttgctaaaggaattagcatttttaacaaactatctcttgctgccttctcgtagtatgttgcacttgcacttctctcatgtgccgctcactgatatctggaggcaatgatatctagaagggtaggcttagtgtagtggtgagagctgtctcatcgagtcacctggtggaacgttcgaagcagtctctccatatttacgggtaaaggtttgcctcagtttatcccttccccatacaccactcgtatggaagccttcggcactagattttccctttaatgatattttaataaggttttcttcattggagaaagtaacacatgtttcatttaccatgatcttgcaaatgaacacttagtcaacactaaggaagcgttaaacagtttatgtcaagctcagcattcatgcagtacagccgctctactcttatacttgaattgaattactgaaaccaaactctgacctattatattgaaatattactttgatcgttaactgtttacattttttaatatactttcctgacttcggacaggaacatagagaataatattttttctggaccggtgcctgcgagcttgcttaacataccaaacttcaagtgagataccttcttcctttcacatttaccttaatcagcttcattaaacctccacgatgttgtctgtagcattgttatttcatctattagacaaatatataatattatttagataggttgtctcgtctatatgaacttgttaagcgactaatagtatatcatcacagaaaggacgggaatccattcaataccacatctgcatctccgccttcaacaggacccgacccaactctaacaccagcacctaacacttcaaattcaacgcccccagcaccagcacccccatctccttcaagagctactcccccgcctaaaacaacctcaaattatcctgaaggatcaactacccgagacagcacttcatcatctaggaaacacaatacatcaaccctcaagattgttggttttgttcttgctggagtagtgctgtttattgttatagtcttcctagtattattttgtctatccaagtaccaagggagacagtcgagatacgatcgtaatagaagtcagctgggaggggtgcatcatagggttgaaccgcaaatcaagccacctccagtgcaacaaagcaatgatattaaagaaggtaaacctttcatcccactattatatagctttgtgtttattttttgcgttcatgtaattggtttatttgataagttcaggcgagacaccggacaggagggtccatcaactaagt

SEQ ID NO: 175676 - DNA, 442 bp, Zea Mays
tcgcttcggccaccaccgttgtgccgaagggcaagaaaatgaaggttttgacgcaccggcctcgatatattgaaacggtcgtagtgcctgaatttggtgaggggacctcctccactgccgaagcagaacaagccgctcccgccgttcggagcgctgaagagtctattgtagtgccgaaggtgcctacagtcgggccaaccgaagccaaagatgatgcggccaaagagccaaaattggaaaaaacagtgataatgccagaaattctgagcccaccagcagaggcagaattgccgaaagtggcaaaggctcctgccgcaactcccaagaggaggaggatggacagcgtgctagatgctgtcatggagaccacaaaagccttgacccctgctcctactaagaaagttgccgaagttgtcaaagtccaggacgaagccgaagctag

SEQ ID NO: 175677 - DNA, 398 bp, Zea Mays
tagggctcctttgggagcacggaaaccgaccggtttcctcgggagcccgtcacaccgtggcctagaatgcccgtggcggtcattgggccatttgggagatcagtccgcgtggtagtaggccctgggcgcgacgggtttcgctgggtcgcgcacgtctcgcctccggaggccgggcacacattcccgtcgagcgtcgttcccgtccttgactcttcgctcccacctccacaacaacgacatcgctcgagcagataaaacagccgagggcagcagggccggggctggtgtcccaaacggcagcagggcagggctcacctgcggaggacgcactcccgcgggcagccaggcgagcgtggcgggggatgcctgggttggcctgccccggcgtagcctgtcct

SEQ ID NO: 175678 - DNA, 994 bp, Zea Mays
cttgccatcgtacttgtcgttgcacttttagatcagaatactctctgttgcttacgcgagaacagggcttcgtatcccgagggtatccgatcttgaccgaagggcaccatgcagttggtagcatagtgtcgtctgcaagttttcgggatgggtcgatgctatggaagtttcgttcgtaccctctacttttgccaacccttgttcctcgtagcccattcgtcgggttttcctttgtctctcgtacaagggtggtggtgctacatttgtcctagatttagaggagcatggggcttgctggagaaaaagggcaggtcctgcctttgtcatgttgtgtagaatgggacaatagtggacacatgtatggagcgatggtacgatcgtctagccccgagaggccctatctaacctgaccgatcctctcctatccatctagagtaggcataattgcatcacagtagctcacctgtaggtacctctaagcttatggcgacgacatcaactcgactggcgtgatgagaaaggagatgctcatgttctgctcctctagccctagtgtgcccagcatctttgtcggcgacatcgcgtttggctatgacgtcgacaacggtgacctctcgtgtaattccactggcacggtctgcctaggccgtgggagcatgtcccttatggtgcagcttgatgggtttagcgtttgagtaggtagctagatattatagagtaacatgatagcaacatggatgtttggaccgtgcctgactttgtaagtgtcttcatcgtgggcgacaacatcacccacgatgcccttctcctcgcaccggccatggtcatggccgagcatggtcgccctaggctccgtcgtttagatccaaggtgcccttctcctcgcaccggccatgaccggtgaggcccacacacatgcgggaatgtgcgatagtatggacgtggagctgtgcacgaaactacaacattggacaggaaaatttttgggccaaaa

SEQ ID NO: 175679 - DNA, 706 bp, Zea Mays
ggtcttgttacgctgtatcgttcccacaagatgtgatgtgtaagctctgacacctttaccgtcccacttaaaagcacttagatcagtgattggagcttgctcaacaacatggtaccgtgtcgtttgcgcattcacgttgtttgtgtctgaaaatacttgcttgagaataatgtgatctctctagctgcgaacgcctctacaatacacccctcaacccttgccttattccccaccattcctctgagttttttcaattctatttcttgactatacctccacccgaactgtgtaggtcctcctaccaacgcttcccaaggtagatgcacaagcaaatgttgcatacaattaaaaaattcaggtgggaatactttttccatcttacatacaaggacaacgatttccttctcaaacctcagcatcaatttcattgagatttccttagcacacatctgcttataaaaataactgagttctacaaatatcttccacacattgggactgaagtatccacggaacattaccggcactagtctttcaatcaaagtgtgatagtcatgactcttcaacccaacgagtgtaccagtgttgaggttaactacccgttttatattagatgcatagcgatccaggaacctcaactttttcaaccattgaaatatctcttccacagccgttggtgaagctgctggcgaagggtgcaccggat

SEQ ID NO: 175680 - DNA, 407 bp, Zea Mays
accggccactagctaacaagtttctgcaacttgttgtcttgttccgtgtcgtgcactggccagaactttacctgcccgttttggtcgatttaaagcggggagccggtaccgaaattttgctacatgaggccgcacaagctagctagtttgcataaacagacgcgcgcgcgtgcggcttttcgctggctgtgctgccccttgcatgccatggcccatggcccatggagagggcagcgccggcatcttttacagtttcaacttgccatggttactttaatcggtcttaaatttctgccacaaatacgtactcactcacatggtggttaatataaggattaacttttgttcagcataaaattacagaccctttgctactgaacgaagtttgcattaaatcttaaaccaca

SEQ ID NO: 175681 - DNA, 477 bp, Zea Mays
tgtgtcccgttaggatgccctaggactaggggggtcaaagcatgaccttttaagttacctaaggccgagaaccttggggattcagtggccggtagagcgcctcggttgactaagagaacacataagtgtccagctgtcatgagcgaccgaggctctaggggctcagatcttagatcattcttgctgttagaagcgactaaggcactagatctttgatcgttcttgtgaatattggtgaccaaaagaacttaagtgtggaagtgttgcgaagcttggactatcctggatgcatggggtcttagactgttcctttgggatgtgttgtctagtataactttactccttcgtggggcctcaagattaagctctccgaaattgtggacctctatctttgctagagccaagaaaacatgagtttgacagtaccgccccgatacttcattgggaatctcgaaagtgtcttgatagtatttggat

SEQ ID NO: 175682 - DNA, 533 bp, Zea Mays
ccatcgtccgaccttgtgccgcgtgtcccaacctcgccaccgcatcaccgtgactccctctaagcttcccgtcgaccaccggagttactgccacgacgttgaacacgtatccactgcacccgtgttcttcttcacctccggccgccgtgtgtctcgcccaaattcgtgaccaccgctcgctcctcctataaattgagcccccgggcagctgcgctagatcatcgcgaagctaacgcacccactctccccctcaattaaccaccgtagccgggaaattccctatttcccccaattcggtttccgccaccgtgaaatccacttcaccgtggtcagccctccacaggtcagcccctgtcctctgcttcctcgtttgagcactctcacagctttgtgatgcttaccgaaccctcaatttgtactaagtagccttagatcgccgggaacaccttcatccgtccgccatgctctcggtcaccgtggccagagctcattagttggtcattcgtgcaattaagttaggggaaacgttctcc

SEQ ID NO: 175683 - DNA, 1005 bp, Zea Mays
ccggtgctcttcttcgatctaaacctaattccaggcctaaggagtgttgccccccaactaatttcaccagtggcgcactaacacgccctgcccacggtgacaacggacatcacggttaaccgagcacgttcccggcgatcctagggactctagctcaattggaggggtcgagcagcattaggagaacttaaggatactaaaacaaatgaccagcgagtatgaaccgacctgggattcgctgaccacggtgaggtcaaaccgagcggtgttcttgagcgatttgggggaatgagaaattggggagctctggtgaacaattggaggcacgactaggtggcttggtgcgtgattatcctacggacccgacggtgtgctcaatttatagtgtgcttgagcggtggtctccaattttggattggtgcgctggcggtcggagaagaaaggagttactggcgcacgagattagtggttgtaaccgtggcaacctcaccgacgatctctggataggtcagtacgagtcacgacggcatggttaaagtgctgaggcacgtggcacaagaccgtgaggtgtctaactccggcgaggattgatccaaggcgatcggggtagagcggacacggcgaccgtagtaaacagtggtcggagttcatccactgggtgatatttcgcacccccacaatgttatccaacgacgccaagcacgaatcacgtcgatcggcgcaaatctagacgcgcggctcatcggtggcgagggggactgaacccagggatatttagtgcactgtaccatcagattgttcttcagttagcctgacagaccaagtttgtcattgattttctcctaaatttacatggcaagttgttgatcggctagtagcaaatttgttgtctaatgatctagctataaacctattgtggtagccatgctcaaacatccacgtgatcatcttcaaaatggcacccaaagttcatcccatgccactggataccataattcaggttgt

SEQ ID NO: 175684 - DNA, 754 bp, Zea Mays
tgtcaagtggctctttttccatctctgaaactgaaaatgaccaagtctcacaatcaaaattgagatcgcaacaaaggcagggatcagagggaaaacaaggatgtggcttatagggcaaaaagagggtagcagcagattatgatctccctatttaagattaatgagtaactttgctttaaaaggatggagaagttgcttttgatatgtggattagaagtggtgaagcacttagggtggttgagtatctataagcagattatgatctccctattgatagattttctagttttcagacttaaaacagtagtctgaacatgagtttcagtattttgagctgtttttggagcccatttgtacctaatccatgaggttttaggacgtagagtatatagaggaattcaagaccacctaatggtgaacaactttatgaaaggatgatggacatgatcgcacataaaaagtgaagtaacagctgctcaaaggttggactatcaggtggctagtgattaatatatggagtatgagacccacatttggagctctctggtaattaatatatggagtatgagccctacttcatgtagaaaagttaaataccattgtcatcattgtcacgggattccagacactacaagctcaagcgatcgatcagtgatccttgggttgtggggctatggtttttggttgaggctaatgcattggcttaggaatgccagccccaaaaccccctttatattgcgcttagctagccgga

SEQ ID NO: 175685 - DNA, 395 bp, Zea Mays
cgggaagggtgtcaagtgtgttcctaagatgcttaggttttgaatccacacttgtttcggaggagggtctctcacaggctcctcaatcacactatctctcacacgggtgataggcttaggtgcagtgattttgataagcttgggagtgggtgtaggtttctttgatggtctctaaccactgcactcgccaacctttctaaagcaagcgacactcccatctatagcagcaaggcctaaccccggtctgccacttcccctcttaaactgactgaccatcatgcccaactagggctcacagcacgacaccccaactcaagacagatcgaaggtttgttttttcttccttgattcttgtcttgtcatgtctgtaggactcaagcaaactgcaaaccctc

SEQ ID NO: 175686 - DNA, 783 bp, Zea Mays
gtcctgcaccagggaaccatacattccctgagaaacaataggcatcaacattttattctgcatggatggagacaaagagacaggttcatatgagatgtcattagttacctttctcagatcagcatcattcgaagtagagtttcccatagtcacgcacaagtcaacaggtgtcagcaatgtacctgctcccacctcacaaaccgggttctgaacccctgaatattttgacgagtgatctgcagcgtcagttgagccatcagagctgaacaaactacagaaagggccatgtagagtcgttgtgaggggaagagcagcagcataaagcataggtacatcatttccaacactatctcccccacccgatgaagcaccagacccaccaacactccatccatttctttgtttcttctttgcatgacctgggtttttgtcatcttggtcatctccaatatccccgccacctttgccaacccagcgtgggacatctgtgaacaccacagggtctgcaggggtgaatttctcatcttccaaaacaaaagtgatctcatatcctttagtgccaaagacaatgtcagtggtaaggggaagaggatctctgttcatcattccaacaagcactctaatcactcccatttttctatatgtatacatatccacatccaaggtcgctccaattaccgagcctagagcccaaaatcctaggtaatgtctccaagcatggggaacccccttgatatggacccatacctcatcaagctggtaactaggatcagcatcactagc

SEQ ID NO: 175687 - DNA, 760 bp, Zea Mays
tcccacatttgctggatctagcaacccgcttgatgctgatgattggctgcgcacagtgaagaggaagttagaagccattggatgccttgaagaccagcgtgttcacttagctgcccaccagctctccaggatggcactatcctagtgggacactttcagtgctgctgtgagagatgctaccagggtagagtttgaggcagatttccgagagcatcatgtgcctttgggaattgtccagctcaaggaagaagaattttgagagttgactcaaggaggtcgatctgttagtgagtacatccataaattcacagaacttgctcgttatgcaccagatcatgttagcacaaaagtcaagaagatgccccgtttcttgaaagggttaagaccaaaactcaagactatccttgccagccaagacttccttagcttctcgcacctctcaaacaaggtcatccaggtggaaagagctcgagaagaggaaagaggtcacctcaagagaaaatttcaaattcttcaagctcaacagcaagacaggcaccagagggttcgatctttcgggttccctcccaaggggtcaaacctcagcaagccagcaggatctgctctgccacgtttcaaccagcctggtcagagttcttttcacaccgagtccgcagcaatcagccaacctccagccaatgcttgttggcattgtggtgaccccagtcatttcaaaaataattgtccacacctgaagacaactgcacctacctactccgac

SEQ ID NO: 175688 - DNA, 490 bp, Zea Mays
actggagtagtgtagtttagatatgatgatgtataataggtaatgtggtcttgttgtaaattcgagtctgtatcattaccttttaagtaatgtaaaatgatggtgtgctttggcatattatattttccaaatgttctttgcctcagatgtcgtccaggactcgtggacaggatagtgcgggaacctcccgtgggagggaaactactcctaatccgccaccagtacccccaaccttgactgaggctatcgctgccttaggcaatgcaacagctgacaacacctgtttccttcacgaaatggtgggacagcaatatcagcagcaaggcaggcgagcttattcgcaaggaccctgcgaaacttcatatttggatttctcggaaactcgtcccccactattcgtcaaggctgaagatccccttgaagcggacgaatgtattcgggttattgagcagaagtttggacttctccgatgcacggagactcagaagcc

SEQ ID NO: 175689 - DNA, 491 bp, Zea Mays
ccaactactaccatgctgaagggcacaagctctcaacgtatcttccagtacttggttagtcctttcggtctgtccatcatcagtctgaaggtgataggctgtactaaagttcaactttgtattcatgttctcatgaaaacttttccaaaattctggaggtaaactgtgatcctctatccaaaacgatcttcttcggtacaccgtgtagagacacaatccgagccatatatactctaccaattgagatcccttataagtagtcttgaccggaatgaaatgagcaactttggtcagtccatccacaataacccatatagaatcgtatgctttcgaggtgcgaggcaatccagtaatgaagtccataccaatctcttcccacttccacttgggtatctttagtgggtgcagtagtccagctggcctctggtgtttagccttaactctttgacacacatcgcacatagccacatgtgcagccacatctctcttca

SEQ ID NO: 175690 - DNA, 609 bp, Zea Mays
actaatttcgtgaatagcgctctaacctactctgcccacgatgaccgtatgatcaacggactttctaatgcgttcctagtgatctacggtcgctcagctcaattgaacgggttagtgagtatcaggagcaagcaagggtacagaaacaagaaagcagagggcaggatcggacctaaattgggctggccacggcgaagtctcaaggcatggtgttcttggttgatttgggggaaatcccaaattggagctctctggtggaggatctgaggtacgggtgggtgcactagatgcctgaatacatagcgaagccaatggcacactcaatttatagactccgggggcggttgctctcaatttggtcacggcgtgctggcgaccagagatagagaagaacacgggtggctgtgaccgtggcgttcaccggtgcaacggctcaaggattatactcctaagggtgccacgattactatcgcatagtaacaagctacggcgtagcgcaaccaaggtcactggagcttccatggcgactctggcggtccggccacgtcgcaacgactacaggcacggtgataaacatcaatccgcgatcaaatccattccccgtcagat

SEQ ID NO: 175691 - DNA, 454 bp, Zea Mays
ggagtatattgcagagaagatgttagcagtaattgatgaggttggggcacaaaatgttgtgcaagtgatcactgacaatgctgccaattgcagagccgctgccgtcataattgagcagaagcaccctcatattttttggaccccttgtgttgtgcatactttgaaatcttgctttgaagaacatatgtgctgctagggaaattgaagatgtgctttatacttaattccagtggattagcgaagtcattggagatgccagcatgattaaaaattccatcatgaatcactccatgaggttggctatgttcaatgagcaaagcaacctgaaattccttgcaattgctgacacaagatttgcctctgctattgtgatgttgaagagatttattgctataaaagatgctctttcagtgatggtagtaagtgaaaagtggagtgcatatagggaagcggc

SEQ ID NO: 175692 - DNA, 864 bp, Zea Mays
aaatctacgaccgagaatccattacaacgcaatctagtcttgatcgttggtttcgtgaccgaccgtcctgattcaaagcgatgaaatggtatcccaccttttaatttgatcccttgactctcgatccaatgacctcttcggtgtttctaccctcgacactcaaccacaattgtgcgttcactcaacgacgacccactacaccacacccttctagctctatgcgtctacgaatacagcgaatcgaaccagagcattcttacggatggttaagttggcagctaggccggccacgacacctagccataccgcagtggtgcttattcgaaagcgaggaatttgtcgccctccaatcgatctcttatgctcagctatcaactctcgggttctatgctcaagcggacctttagcacatctcgacgagagccgattgacgacgtgggcatgaatcgacgacggggcgtcgccgacgaccatagttcttcggcatgggcacacaatagcgctgagagtagatgtcctaagggggtgagggttgctcaggttttatacctcagggtcaaagtccggccaaggggaaagaatgactagcagctgagtccggcaaggactcttctttccctgttcgaaccgaacacgagctaggaggagacccctgacaaaccaagcccactactcagtgacacacacacacgatcgtcccccctaacacgactggcttgtgcccccctcacgccagtgatggagtcctagcgtgcatttggaaggggatctgacccgtcgacccaacctggtagtgtgggggtgtgggtcatgcgggatgcagaatagagggaagtgggtcgcagaggaaggagaagttttggc

SEQ ID NO: 175693 - DNA, 457 bp, Zea Mays
ctttgtttgttgttttcttttctttcttccccgaaaaggctggacggcggctccgagctcactcgtcgccggcggctgttgcaggttctttctttttcctacccctacctcagttgcataagctagcacttcgtatcgtatgttgcttgatgcgctgatcggaaggttgtttcccgtggcgcttttcgttctcattggattggttattcgtcgtcgctggcgctggtttaatccggtggcgcgactaggttcatcagtccttagtttccaccaagttcggtcctttgctttaatccggcggcgcgacttgtttcatcagttagtttccaccgagttcgggcggtatggtgctcttttcctggggttctgcaagtgcaaggagtatgatctggtttgatgattcgttactttttttataacacgattcttttggttgagcgcttggatgctagttcac

SEQ ID NO: 175694 - DNA, 311 bp, Zea Mays
ttttgagcagagcactccattccaccccttttgcccaaattccaaatcctgtgaaatcttgtgcatccatgttgtggtatgtgtgcctctgtgtgtattgagcatccctgcaggtttctagctcctttgggagggttttcccacctcaaatagccgtttcaccgaaaccctagaactccgcacgtcacgtgctcggtgaaatgcccaaaccagccaaaaatgctccaattgaacccaaatttttcagccaccttcacaacacttccagtaacactcttgccaaattttacgccaatccgagattccaggct

SEQ ID NO: 175695 - DNA, 1123 bp, Zea Mays
gaaaaagagacggctttggcgagtgtcgtgtttggaccaggatgctggcccttctgctcctgctgctgaagaagtaccggtggaactctttactggagctgatcccaatgggtgtggccctgctgatgctgatcccaatgggtgtgaccctactagagttgatcccaatgggtgtgaccctgccagagctgaacccaatgggtgtgaccctgccagagttgatcccaatgggtgtgaccctgccagagctgaacccaatgggtgtgaccctgccaaagttgatcccaatgggtgtgacccttgccgtttattgtctgtattgttgatgaggatgaagaagaagaagaagaagtcccactaattcggaagaacagtcgatgttatagagtaagtggggggagtagcgatattccttctctagctctgtctgctcttgttggtctgcaagaattatccatagcaaattttgatcaggctctcgaggatgttgttcttgaagatctgctgtctgagccaactgatggtgatatgatggacgtctgctctgacattccagatgtgggattagaggtatcccgggcagcgtctcgtgcctcgttaaccttggaaggcggtcttcggagcctagaggttggtcgaggttgttcaattaccatggaggtgactgagagtccttcagccttagaggtggctgttgcggagaacccagtcctcaaggatggtgccagcggttgcccagcccccgagggtgttgccggtaatgatctggctcgggtgggtagcgcaagctgcaacccagcccccaagggtgttgccggtggtgatccggctccgatgggcaatgcgggctccccttctcatacctccatggatgtccacgtcgggtcttctccaccacattctgatggcatagtaacagtgcatgcttcaaatgaggaagttgccttagagatcggcgcaccggatgctagagttctgatgcctgctggtgatattgagttgatccctggtgatgttcttcagattgccccggttgatattccttcatcgagccaccacctgggttctcatgatttgggatttccttcattcttctccaatcttcagataatttggcttttcc

SEQ ID NO: 175696 - DNA, 428 bp, Zea Mays
acctccaagccaaaacgcgggcctgacctagctgctctaccgccgccgcactctgctgtcgcgcactcactgccacgccctgacccgccgctgcttgccgatcacgaacctatgcatcgcgaggactcagggcgaggatgctggacgtagagaagaatggcgggaccgcacgccttgttgcggtcgcatctcactgtccatggagcgactctctacgcccttcctgcttcgctcgttggctcgccacagctggaacgccgccgcggacccgcaccttgccgtaggaaggattctgtgctacctaatcactggtaagttctctgccaattgtctcgtgtgatcatcccctttgatttgtgcctgccagtgttggtggtaatgcacctttgcgtcgggggggaacatttccggcgagacttcaccgggtg

SEQ ID NO: 175697 - DNA, 787 bp, Zea Mays
gacatatcagcttttcgtcgtgagggcgggtctggcgacgtgatggcgcagttccccggtccaatccaagtccgacgagcaattccagctcgcccacgggcccctcctgcccggcgatgccctagaaacacgcggggcgcccccagcactacactgcaatgccccgacgggtcgactgcgtggtggaatacacttgggttggtgacggtcactccacaacaatggcgttcggttaggtggtgaggaccgactaacacaagatagacgcgagtatgggttgcgaggcgcggctttatagccagaaccaaagtctgggtgcgatttggccaggtgggcgcgagatcactgttggcgatttcgctgcggtctgttatggtcgagggagagaagagaagaaggggaagtcactgcgctccgggtcccacaagacagacagaagggtgctgacggcgtggccctacctgtcggtgcgacagagtccatcccacgatccacagcgaggaacgctgtgactggccggtggacccagggtgtcgacgccactactcccatcctcaactgggctggcacggcggaaggagttgggccgcgcgtgtgggtcattgggccgagcagaacagaagccggcctagtgcatggctttcccttttcttttcttttctttttctcttattttctattttcttttcttttttatttttgaatctcaaatttaaatccaaatttttgctgtaaattttttacctagatttaaatgtacaaactaaaaataccagtataaaaaggt

SEQ ID NO: 175698 - DNA, 410 bp, Zea Mays
tccggattggataatcgcaatgcaagaggagttaaacaacttcactcggaatgaagtctggtccttagttcaaagacctaagcaaaatgtgattggaacaaaatgggtctttagaaataaacaagatgagcatggtgttgttacaagggacaaagcacggttggttgcccaaggcttcactcaagtggagggacttgactttggtgaaacatatgcgccggtagcaaggttagaatcaataagaatattaattgcctatgctaataatcatgatttcaagttgtaccaaatggatgtcaagagcgcatttctaaatggaccactacaagagcgagtctatgtggagcaaccgccaagatttgaaaatccaagaaagccaaaccatgtttatctactccacaaagcgctct

SEQ ID NO: 175699 - DNA, 606 bp, Zea Mays
gctcgtccgaggaaccgaggcttttgaggccctttccatcgttccccgtttgctgatgacgaagtcgagactcccaaaacgaatggtcgttcaccttgtcgtcgtcgttgctagccatccatagcctagaaagttcgtcgaaaacgtgcaaggcctctacctgacgcaccaattgtctgtgttttgatccttcgctccgacaaataaatttatgtgtcgcgttctaggctccagacgattgctcagtgggcgcaaggtttatactggttcaggccgaacatccctacatccaggtttctacggctcgtgctaccaacacctctgttgctcgatgctcgtagtatgggttacaagagggcgggagagagaggaaaggctccaaagtatcttatgagggagtggtcctaaagactacggaactggagtcctatgctaagctttggctccgacctccaagtcttcagatctcttcgagtgtatgtggttgcctcctatcgagtgtcttttgtcttaggaattcttaggttcgtcttggtctgtctaggttcagccagcctagccccttggccgacctcctccttttataggctaaggcgggtgtcgggt

SEQ ID NO: 175700 - DNA, 499 bp, Zea Mays
aagtacaacgtccatattattttgatctaaccgaatccaattcgaacaacaagcgatactagactaagcacaagtcctatatcttcgtgagctagagaacacaccaaaaggcggtcgagacttaggctcattattgagggacacctaactcagactaaggatagaaaccattagttaactttctaacccaatattataatctaacctgtatagcacgccaactaattagagcatcacaaaatttaattaagcaggtctagtagaatttcctaactagccattagaaacactagacatgctcaaaatgtcatttactaagaccaggcattaacgtcgccatatcaataaaattcaccaaagcaatatggatattacttgtcaataaaacactaaaaatactaaccaggcatcaccatcataccagtctacgaattaacatttattcaaggcaattagcttaagcgctaaatcttcattgatgacatttactcaatcaata

SEQ ID NO: 175701 - DNA, 580 bp, Zea Mays
gctgcacttccgccgtgcgtcgcgggcagggcggaatatcgcttggattctggtaagaatcccgccaacgcattcgcaccatttccctcttcgtaaagtagcgtcttccgcaggggccgagggctaggagcttagatcggagaattccggtgatggcgccgccgtctccgtcggtgttgcgccgccgctcagctgggtggggttcagtcgtgtccgtgcaccgttggatacatggtgggcggtctcgattagtcttggcgtactgattcgcccgagtctgcctcggccgtagatcagcagatgaacgcgagagattaggtcgcagtttttttttaaaaccgagccgccgatgggggatccaacggctaggatcaaataccggttcatggtgtgggcaggctgatctgggcgctcgatctctgatccaacgaccagaaaccctagctaccccttcgcgggtactttttgttaaagagcccccgaggaaagcactaatcaacccgccatccggagtacactattctctgtgtctcgaaaatcttacgccagagcccttgagttttccaggaattgacgcccg

SEQ ID NO: 175702 - DNA, 298 bp, Zea Mays
tagctcaaggtcctagcgatgtgcactagcgacgagctacccagagcgaggcacgaaaacacaacatgttctgagcacacacacagttttggacagcgtaacatttgctgcattttctctgattgttcatatatgaaaactgaaacaaaatatatcgaaatgcaccacacgcctagcttcccgatcgcgtctatccccacgacccacacgatgttgactacacccccatcgactcactcacgttgaggtaattcctagcatgcatggctagcaacaactgtttgacgtctaactgaat

SEQ ID NO: 175703 - DNA, 295 bp, Zea Mays
ggaggcctcattgcctcaattgcctttatcttctctgggtttgcttcgatgccccagtgtgaaactaggaatcccagcaacttccctgtggaaacaccaaagacgcacttgtctgggttcaacttcgtgcatgttgcgtgtagcttgtcaaagaccaggcttaagtcttccactagggtcgaccctctcttagtcttgaccacgatgtcatcaacgtacacctctaccctgtccctaatcaggtcaccgaaagtcttactcattgtcgtacaaatgttggcaaggtgtttttcag

SEQ ID NO: 175704 - DNA, 291 bp, Zea Mays
caagttttcaacgatctccccctatgaataaaaatgcggctctttgctagtccactgttccatgcttttgtttgcgcaattgatggctcgccgacattttagaggtaattcctgagtgatgcttatgatctccgcttttccgagttatgatctagcacttttgcgccaaacttattgagccgactcatatttatgttgacatatccccttgagttctgaaccctaattctcgcttttttctctgccgcttctctgtttcctgagttcttgagcccgctcgctttgcttgag

SEQ ID NO: 175705 - DNA, 538 bp, Zea Mays
catttttctcgctagcagtaaaccacctctttgcatgcaccgtgaatctctcatctgcacaccattttcatgatcagcgcccacgatcgaggtgcatggagtcgcgcgtggagggcgcgtcgttttcctgctaggacgttttctcaaaatgcgcatgtagttgttcatctggcaattggcgaataacaccgctccttggccgagcctccataacctcggcgtctaccccattccgcctcgtctaccccacacgccgtcggccatggccaccgctaccgagcaaccactaatccctgtgcccaagccactacaccgcgtccatcaacctgtgcacctgcatccacgccgcagcccacccctccgcgtctccggtgaaactacctcttcctcggtgagttcccttccctcccattgtttttctccattactagttcatagatcagttttctctgatgccacgctcctcacgtgcgtcgtagccatcacctccgtcttggggttcgcgagctcattgtcctagtgccgcagccccggccgc

SEQ ID NO: 175706 - DNA, 485 bp, Zea Mays
cgcgcctcgtgctccgtgcgcgtgctcatctccctccacgccgcgcgcccctggagtctcctcgccgtgcgtcgctgctccatggctggctccctgagctcggcccctggcttctatgctacgcgcgcgcggtttcctctctcctcccttcatttctcttcagccgtcgcgccctagttctctgctcggccatggaggtcgcggttccctgatctcctgctcgcctggccacgccgagctccatccagggccggagtctctttgctcggatttcgtcgggcccgcgagctcccctacgcgctcgtactccagctcggttttccttcaccgcggctctccctgacccagcttctctctccccatggccacggcacccctgctccctggtacagcgcgcagcttgcctgctcggctgtagccaccgcgcgttcccctgccctcggcttcctgcatcgcgtggtcgcacccctcccttgcttctccag

SEQ ID NO: 175707 - DNA, 784 bp, Zea Mays
ccaagaatacgtacggaacggcatctggtcctgccattgcgatgtttctacggcgtcgtcctccttgccgccatacgttgatatgagcgatctagcaacagctctcttcactgcatcagaaacctccactggatctttctgttctatcctgtttctcatcaatgagtgctgcttcatcctgtttctcatcagctgtccagaaaacgtgacccttctaaggaaagcgatgactgttccaaagatggatgggctgatttcataccattgtttcttgacgtgcatggtggctagtgatacctgggcccagtccgatgacagataaaatgccacatgcaccagctccactatgagggcaatacccagaagcagtagagtgatgatgtagttagctcttgagatgcgtacttcaatgatcggatttggcgtctcaagtaccagtgaattcctgacggcaaacaccccaacggttatgattagaacgatctttgctaaaaccaaagactggatgaccggcaccggtagctgattagtcattacgaaggtgtagcagtactttgtgaagaagaaatcatagcagaagcccagctctgcctcgataatcctgaacgctctttcgaaatcccatccagagggcagcagtttcttgaatacgaaatcatggtcttttatttcagggatgatcttgggttggacgactagcccaaagaagcgccttacaatgagctgccgaaacaaagcatgggacaggcataggtctttcagacaagctgaggagcggacatcc

SEQ ID NO: 175708 - DNA, 439 bp, Zea Mays
gatttcacatgttcgcagcctatcctctccaaaatagcggcaatacccctagcacccgagaaggcgcatatgtccccacggccactcaaaacttcctcaaaagcttcagcttcgtggctggtccattaaattgggccctcgggatcgcccattatgaaattctcctcgcttgagtacgtgccaacgttggcgaagctaatttttattctcttcacacaatccatagatttctcaaaacatttttccttggatatacgaaattcttcaatgtttttctctaaacattttgtcctttgatcgctaatttctcgtttagcttctgcaacagcacatttttctttagcttcgaatagttgtttttgaagatcttcgatttcctgtttctgagcttcgacttgggctttggaaacagcttcgttttcttttattttactcaaca

SEQ ID NO: 175709 - DNA, 481 bp, Zea Mays
agccatccgatcgacaaccgatggcggtgattagatttaggttttgtcgaaacggtacgcaccgagagctattgggtctagatccaacgaccaacatcctacgatcccgagatccgaccctaaccgttcgatcagagatctacgcacctgacttggttatcccgacgcggccccaatattcaatctaggccggacagcacaagatcaacggcccacggtgaatctctccccggatctaatcctagccacacatcaaccttcctatggcaccggtcactttctcccacccaaacgacggagctcggcggcgacccgagccaccacggcggcggcatcaccggatcaagccaacctatgattccgagcccgaaacatccctaccgaagcagctacacgaagcggaaacaagcacgaagctattggaggattgctcaccgagaatcgcccgcgaagatgccctgcccacggcgctaggcggtcc

SEQ ID NO: 175710 - DNA, 782 bp, Zea Mays
aggaggtatccttggaagatgcagactcctctgactcttctaaggagtggagtggcggcggcggtgacgacgacgaggacgatgacagcagtggcgacgacgacggcgagggtggcggcaacgacagcagcggcgacgacgacgatggtaaggacgaccatgacgacagcaagggcgacgacgagggcagcaagggcgacagcgacgacagcaagggcgacgacggcaagggtgacatcggcaaaggcgacggcgacgacgacaaggctagtggcataatgccgctggtttaaatattagtatagatagcagtagtagtagcaataagtagtagtaagtagtagtggattagagtagtattagtatagcgtagtgtaagtagtagagtagtgtaatgtagtgaccaggggtggaagaggccgactcataatgagtcagcttcaagtttgtgttgaatccccctttatggatgaagaacatagttatttcacttaaccatcgttgcacgctttttgttcgtgtgcctgaaggcatgccgacattttagaggtagagagacggttgtgattcttacttttccgagttatgatctgccattttagaggtaatgcctgacttatggagccaacttatactcatgtcgacgtgtcttcttgagttccgaaccctaaatctcacttttctcctctgtcgcttctctattttccgaattctcgagcccgcccacttcgctcgagagattgcaatggctccataagagacagagtgtcgctattccaatc

SEQ ID NO: 175711 - DNA, 711 bp, Zea Mays
gctttttctcgagcatcatgagattctttctcgttttttctaatagcttcattagtcatctcacgaccacccttcatccacacatcgaagtagaacttaccacccaaggtagaggcttcagccaaagggttcttaatatcttccattgagaaaacaaatcccggcctagttgtagcccgaacgtgctcacaatcggccttctccaagatcgcagcgacccctcgggtgccagcgaatgcgcagaagtctcctcgatcgcttaagatttcctcaaaggcttcgacttccccgctgatccattgcacgacaccatcagagtcactatggatgaatttctgctctgaagagtacgctctcacttttgcaaaactatcctttagagtcttggcgcaccctaaggatatttcgtaccatttctctttagaattccggagctcctcggcattcttttgcactctggatttctcaatttcgcttatttcatgttttaccattgtgacttcaaatttctcacttgtttctgcgagttgcttctttaagttttcaatttcgaccttgtgagcttcggtttgtgcatcgagcctagcttcactggccttcagcctgtccactaaggaaagcaatatcttatccttttcaagggcttcgttccttagggaaatgaccttcgcccgaagattcccaagagctatttggcagctctcatcttct

SEQ ID NO: 175712 - DNA, 768 bp, Zea Mays
tcgggatgctggtccttcggttcctgctgttgaggaagtgcccgtgcctgaatttaccgatgctaaccccaatgggtgtgatccatctgaagctgaccccaatgggtgtgttgtctgtgttgctgatgaaaatgaggaggaggaagaagatgagatccctctgactcgaaagaacagtcgacgatacttagccagtggggaaagtagtggagttccttctcctgctctgtctgccctcattggtctacaagaattgtctctggcgaactttgatcagactcttgaagatatggttccagaggatctgttatcagagccggcggatggtgacacgatggatgtttgtgctgatgtgttcgacgccgggttggggtcatctcgggcagcgtcctgcgcctcatcgaccttggagcgcggtcttgagggtcaggaaactgacttggattgtcctgctcccatggaagtgactgagggaccttcagccttagaggtggctgctgcagagaacttggccctcaaggatggtgttgacacttacccagcccccgagggtgttgccgggggtgattcagctcgggtgggaagcgcaagctgcgacccagcccccgagggtattgccggagacgatccggctcgaatgggtagcgcaaactatgacccagcccccgagggtgtccgagcggggtctccctcttgtagttccatggatgttcacgcagggtctcctccacactctggttgcatggtggtagcccaagcctttggtca

SEQ ID NO: 175713 - DNA, 380 bp, Zea Mays
cggagaggaccttgacgcgccatttgtggcggcgcatgatgggctggacctgcctggcaacgcggtcgagggttgcccgcgcggcggtcgcgtcgggcttgatcttgagcgcacggacctcccacaccttgtgcaggtcacccacctccatcgccaccgcccggcggccgccgaatcgccgattacacgccaacacggcgtgattttcaaatgggttgcgggcgactattatctccagcgactctctatttcactctttatcaaactttctatttcaaaattctctctacaaacaatgtatcagtctaaacacacacggtgacggtgttgctggagttggcttagagacggatacacgagcgggcgcgggaagataggcg

SEQ ID NO: 175714 - DNA, 449 bp, Zea Mays
gaaatgtagctggtttgtaactctacaactttgctgcagagatttgggtgagttgccatgaaaactttagagaaaatccaccctaaactttggctgtcaggagcactgaagaacattgccatggtacagtgcccgggaggataagcttcagaccctcgccgccgacgaccaatccgcgccgtgatttgcgctagggtcgggatgggcgcgtgacgtgcatctcctcgcaaagatcttcttgatccgggtaagatcgccgcgatggagcgtgatgattccggccgccacgcggccactaatcactccggccatatccggtcatcagcgccattcatccatgccctcactgatttgaccgcattactgtcgcgacgggacgtggcaagctcgtaggaaaggatagtgctcgacgccgtcgttgatcgccagctaaggccgatgatggttat

SEQ ID NO: 175715 - DNA, 1851 bp, Zea Mays
gccatttcatcaaccaatgcctgacgttaaaaacaaatgagcgtaagaacagtatcacacccggggtatagtcagatcaggaaaaaccaaattacctggaggttggagaagaacgaaggaacccccaaatcatgggaagtcagttgatagctcgatgaaggatcaccaaccggagcaatccgcaatgcatcagtggggaccaattcagtgtcatcagcagaaatcaaaactctgtcatcaggagcgccggcctctaaggcgacttcctgacccgaagcttgtgctgctgccatgcaaccagaatgcagaggagaagaccctacatgaacatccatggaagtatgagagggagaaccaactcggacaccctcgggggctgggtcatagctcgcgctacccatccgagccagatcatctctggcaacaccctcgggggctgggcaaacactagcaccatccttgaggaccgagctctctgtagcaggcacctctaaggctgaaggaccttcaacaacttccacgggaacggagcaatccagatcagcctctcgactcttaagaccacgctccaaggtcgacgaggcacgagatgctgctcgggataactctaacccggcatcaagcacatcagcgcaaacttccatcatcccaccatccgccggctccgacaacagatcttctgggaccatgtcttcgagagtctgatcaaaatttgccagcgacaattcttgcagaccaacgagagcagacaaagctggagaaggaacaccactactctccccgctggctatgtagcgccgactgttcttccgaatcaagggaatttcctcctcctcttcctcatcttcatcaataatgcggacggtacatccattgggatcaactttggccggattacacccattgggctcaacatcatcaaggtcacacccattgggttcagcatcagtcgggtcacacccattgggatcagcttcagcaaaaaccagcactggcatttcctcagcagcaggagcagaagggccggcatcttgattcaagcatgacactcgacaaagacgtctctttttctttttcttcccctcagcaggagaagttggatgattggttcggcgaggacgcttcgggcgaatactatcagacctctgagtatccacagctttgccagactcggggatgggtgctacagccagtgtttcagcaggggctgcatcagaggaatctttagccaacatgtccagcatggcacttatttctgcatcactcggattcaaaggcacctcgaaatgaacccgcctctcgtcgtcggggatttcgccaagtgaagcaaccaaagcctcaacctcttcgggagaaggtcgcactctaaggcccaaaccgctataaccagtagcaatatttgacacaaaactgatgaaggccttggaaggaggcagattccaggctgagtatgcaacaggagcaccaatattagacaccttgcctctgagtatcatctcaagccggctcaccaaatccacagcaggaatccttctgttggtaacccgggttgaatcagcaaggcctcgatacagataagctggatgcgctctatcttttagtggctgaatgttcttggaaacaaaatcggcaaccatagcctcgacagtcagacccttctccttcaataatccaacctcggcaagcagagcccccgcctcagctacctccaggtctgtgggggattcagtccaactcagagtacgaacatctagctgtctccctgaccggggggagagaattcccgtgattttccacaataaaccattccaagcgccatcctttgatgttgtccttgagtgggatgtcgag

SEQ ID NO: 175716 - DNA, 559 bp, Zea Mays
cgggtttggaataggtgagggaactcgactctaagagcatcttctcgttcccaggttgcttctccttcagaatgtctgctccactgaactcggcaaagagtgacactcgaggtccttgtcctgcgagtcacggtgtccaggatcttcactggcacttcctgataacagaggtcatcttgaaggtcgatagtgtcctgaaccacttgttcttctggaacacggagacactttctcaactgagacacgtggaagatatcgtgcactcccgacatgtcctcgggaaggtgtaacttgtaggctactgctcccacccttttaaggatcaggtagggaccaatgtaccttggggccaactttccacggacctggaatctgcgcgtgccacggatcggggaaactttaagatacacaaagtccccgacactgaaagcgagggcacgcctccttttatctacatagcttttctggcgggattgagctgctttcaagttttctcgaatttctgccactttgtcctctgctgtcgtgataaagtctggaccttcaataattcgatcac

SEQ ID NO: 175717 - DNA, 547 bp, Zea Mays
cccatatgtcaggcgagctcctgtggatcttcccccgagcgccgcactccggccagctcgcaacggactccgtaacctcatccatgcatgtcgggcgtacatggagacttccgagctcctattaaaggatggataccgcccctttctcgtgtattctatccaaaccacacagaaccccactcaaatccatggcgtaggagaaatcgccgtcccaaatccgccggattggagctcggtctagccgccgccattggttcacgctaacgccgtcgctgggtcccttgaatctggcgcaaagcctgcccaggcttgtcctcatctcaggagcacccaagtactcgccgtggctcacgatccgtcgtcgcgccgccattacccgtggccagacctgctgtcgccgtgaaccaaggtgagagcccctccatcgtgtccgtcgtacctcccacgtcgtgtagcactcgtcgcgttcagatttatacagagaagagggattggcgggttgccggcgggagcacatcggcgcttcgccgccgtcggtctcgcccag

SEQ ID NO: 175718 - DNA, 419 bp, Zea Mays
gtcggatagttctttgtttatttgtcgccgagggtccgacactgcttatttgttgctctacgtggacgacatcgtcctcactgcctcctctaccgagtttcttcgtcatgttattggggctctccagcatgagtttgcaatgacagacatgggtcagcttcaccatttcttgggcatctctgtcacacgctcagcacatggcctgtttctttctcagcggcagtacactcaggatattttggagcgcgccgggatgagtgcgtgcaaaccttgtagcacacctgttgatatccactccaaactatctgcagatggacctcctgttggtgatgctactcagtactgcagtctggcaggagcccttcagtacctgacctttacacgtcgtgacattgcttttgcagttcagcaaatttgcc

SEQ ID NO: 175719 - DNA, 1084 bp, Zea Mays
atatgtactatgttaattatggcatgagagctttatttcaacatctaggtcatcaagttattgttgtattttttttaaataatagatgcccaaatttgaaatggattgttgttcatggtgttcttcaatttttttagcagattctgagtatggatagatgagaatttttccaccaaacatgagctaatatgatggcttccacagtatggttgttagattttgttgttctatgaccatgctatttctagttaaatcaacagaccccaaacattcacattaatgctaggagtaatactttcacctagagaataataagaggtttcctcaacctaatatgttgtaattgtgtacaaatattgtgaggtcaatgagggtggaaagtgaggtatatgtgtatcaagtggactcgagacatgtgtgagcacaagtgtgtaggtgtgacattgctgaatatgatgagtagcaactggatgcagtttacttttgttattaatgacctcatgcaaacattcaattaatcataattgatgctacttgattattatgtctattagcatgtaattgttgttgattgattatgactaccatcatgtaatttatattgatcgattaaaacaatcaacatgaaaaccgacatggctttactatctataatttcaaagttgatgctctcatgtgtatcgagtgctgacacatgagagatatgcaaatcttcctatcttggtagtatacaactcttgagacaccaagacactgccattgttctatctattgtagtagcattcttgattcgttgccattgaccttctacatgcacaaaacaaggaattagacctttgaaccatttatgttcttatggtcttactcatgataagtgacaacacatgtttttagggagcgcacagtaccactatttctatttaactatgtttacttcttatataaggtgaatgtgatgcaacaaaactattcctagattaattgatattgactacatcaacaaggtcccatcaaattatagattgatgtgggtaacaatgcctacaggactacctacatgtgtactactgttgactttgctttc

SEQ ID NO: 175720 - DNA, 690 bp, Zea Mays
taccaatcgagtaaatagtagatatggctgcttgagttgcagctactgccacaagagttgctatgatggaggctagccagtatatggcctctgcagttagagtacctcgactttagtgtagtttagtgcgcaaagtattaacataccataacagtggtcggataagcctatgtcagtttgtgcatagtgtgcttctttttgtgatatagctgaaagaaaccttgtgaaagcagactatggcaactagaggagatatttagtgtctgggccaaaatctagacctaaattgaactaaggttttcactgtctatagattccatgtttagtgatgtctaccaatcaaaccactctgtgcaggtacaagatatgcctcaccgctgaagatgacactaacaccgccgagtttatcttctttggatggatggcgcagtgcctcattaaaaaaatgtggacaccctcatatcgactaatccgcctggtttcattccaaacgaaattacaaacctactggaaaagtcttttgagtggaatgttagcttcaccgaaagcacaattatttatagcagtgtttccttccaagtgaatgctataaatgcagaaatggatggtggcagcacacttccaactacaccggcctcacagccatcgtcgaccatactatctcaaggtaaagcttatcgtatttgttta

SEQ ID NO: 175721 - DNA, 798 bp, Zea Mays
gtcttaaacccctcacgagaacataaatatatctttattctatttctatctaagtgtaacaaagcattcatccaaacagctagcacttcttactattaaatttcttcgggattgggagcaaaatatatagcgacaccacctttttgttactggatccaagcaccccagatcgttgctagcaaaaagattgcttcatccttcggctttgttcgagctgacggagagacgacgccaaaaggcgcaccttccacatgctacttacgtcccggtgacgtacacggtacacgtacaaaggcaacacgattcctccatcacacagtttctatggcgcggccagcatgcatatcctggtgcgattccagtagcagaaacaacggtccgggccgggtctggctagcttagctgcagcttttttccatgtccatgcaatgcaggggccctggccctcacgggaagaagtgacaccggcgatcgtgcacatacgcatctgcaggaaagattagcaagcagtacggcgtgattttcgccgtgcgcgtccgtggaaaaggtggattgagatgcatggatgaggtgtgcggccagggtgataacggagatatcgtgccgtacgtgcaccctacctggctacccaccatcaacagctttacgccgcgtcttgtgggttcttcaaatctggggtgttctgctcgtgtaaataaacaattgtacgacacggtgggggtgttctgctcgtgtcaataacaattgtacgacacagcaccggtacacatcaatgtttgaaatatctctgtcgacaag

SEQ ID NO: 175722 - DNA, 487 bp, Zea Mays
tgtgtcctcgagtgctaagccatctgaagccatgcgcatggttacaaatttagttctgaaacatgaactagcaccacaaattggacattggacatgttgactgaaccaatatcatcctcgagtgctaagccatctgaagctatgcgcatggttacaaattaactagttgatgctacgaaatgttgtcttgtatagagaaactccagttcaaatcaacgtaaagacacaactttgcagcatgatatgtgtacatgatgcgattgtttcacctcttgttgggcccttaatgattagtcgatgtatgtgttgatgtcgtgttggatttttctccatttcaaaggtccacccttttaagcatgtggaatttggatacatatgtactttcaaggttggagtctaacttgaacaaggctaataatggatacatcagctgcaaaaatgttgcatggaatctacttcctcacactgtagtacacagcatgcatgg

SEQ ID NO: 175723 - DNA, 511 bp, Zea Mays
tgctgggaaaggatatgctgaagtatttgatcacctcccaaagcaagaaaggcatattgtacatctgtctgcatgggagtgctcttgtcttgagtggcagcatacaggtagaccatgtcagcatgcacttgttgtcattaccagctttagaaatgagaaaattgagaattatgtgcattcttattactctgtggacatgtttagaaaggcttattcaaacattatttaccctctaagagataagtcacaatggcctcaggttgagttggaccatgaggttagggcacctttgggaaagaggggagttggtagacaaagaaaattgaggatcaaaagttgccttgagggtgggaggaaatcaaaatcaactagtaaagaaggggatcaacctgcaaaaacagtaaaaagagggcctacaaaatgcaagagatgtggtgaacttggacataggcaaactagctacaagtgttctttaaatggaacaaaaaaaaggaaaagaaagccgagagct

SEQ ID NO: 175724 - DNA, 514 bp, Zea Mays
ttgtgagcgcaccggcttttgaatttacctgcttttctgcatgctgtcggtgccgattcagagggacatctcacctatctgccaggactacattctctattgaccatgagtggcaggtatattgaggagtgggtcagagtgttctatgctacagtgtggattgaccctgaccatcagtgactgtgattccatttcgagggagaggatgtcactttgcatgccagttagattcaccggctctttggatttccagagtcgtcgactaggctccacagtctgtgctacggcatctcggatcctcctcgtcgccctcacaacggtgttgcacctgctacaactcacgtcgcggccctgttcagacctcctttcatagatgggttgtgacgatctcctgctgacttcactacttcagtgaagttcttatatgagctgatgagacggacattactacctcggatgggatacagagaggctaccactcattcagctatggctacttggtgctttggtctca

SEQ ID NO: 175725 - DNA, 578 bp, Zea Mays
cagttatgttagaacttgattattccatgggcagggtgctggaaaacacccctggcacttgtaagtgagatatttctttattcgaagtactctcaatttgagctggttattctactactagggtatagtggtcaccctaaatcatgtgagtgtgagcatgccgcatcaacttaaggcatttccgacttaagccgattggtctgatggttgggcatagtggtcaccctaagttaagtaagcgtgagcatgtcgcaccagcttaagacgtttccgatttaagccgattgctacgttagtagggcatagtgatcaccctaagtcaagtaagcgtgaacatgtcgcaccgacttaaggcgctttcgacttaagccgattgctccattagtagggcatagtgatcaccctaagtcaagtaagcgtgagcatgtcacaccgacttaaggcgtttccgacttaagccgattgctccgttagtagggcatagtgatcaccctaagttaagtaagcgtgagcatgtcacaccgacttaaggcgtttccgacttaagccgattgctccgttagtagggcatagtgatc

SEQ ID NO: 175726 - DNA, 628 bp, Zea Mays
tgtcacctccaaatccctttgattttccctggcctgtgttcttggcttctattgctagcgccgtgatgacagctctgctgtaagtaagatccaggcaggtggccattttccgatggagacggtcgttgagtcccctcatgaagcaattctttttcttcaggtcagtgttcacttggttaatagcatattgggataaatggctaaacttgttgagatactgcattacagtatctcccccttgctttagtcgaataaactcctcttgttttatgtgaagcactccctctggaacatagtgttcacggaatgctagcttgaattcatcccaagtgacctgatgtccggctggttgaactgctacaaaattcacccaccaggtactggcagggcctctcagttgttgggcagcaaataacagcttctgtgtttctgtgcaactgactaatctgaacttctgctccattacccttatccactcatcagcttcaagagggtcttctgctttaacaaagagtggaggatgtgtctcagagaattccagatacgaggttttcacgcggtccttgtggaggaactctcccgccatgctgctggaattgattacccgccatctcacacaagaagcggg

SEQ ID NO: 175727 - DNA, 496 bp, Zea Mays
cgtaaagcagccatacctgatcgtgccatcagtgtatactttttccttccgaatgccactcctcagtcttgtatagggacgcagagcagccacttgaacaggttcaacaactgcttcccctgacacctcttgtatggtcaaatcaggtgcacgcgcctcaatagatgttgtaggctgctcagaggatggtgcatggaatccgtcaggtacctattcatctgtcatagtaacgtgaatagtagtggcaggctccctatgctcatcggctactgtagcaggcactgtagctacttggcgcccatgcccatgcgagtgggtcataatgtgattctccctcccctggtggcaggcttgcaacagttggtagggagttgtcatttcggtgaatagtacctcctgcatattgatgttgtactgcaatattctcattaggcatgttagtatcgacatggagaaaatcagggacatcaggatcacatctatcagcacctttttt

SEQ ID NO: 175728 - DNA, 364 bp, Zea Mays
taaaaactcgcaagcgacaaggaagagaatacgaccaagggaaaataggtaaaatacaacgctaaaattgagatggaagggagaagattttaaagggcaggtataaaataagcatcaaggtaagatatagaggtgacaaaagtaaagatgataataatgaaaagcataacaacggatagagttaaagcaagactcgcgaagtggtgaagtagcaaagtggataaaagaatcaagggtaagataggcaaagttccaacaagatggttgaagtaaaaattcattaccgagggatgttataagggaacaacaagatcaccaaggtgtgcgaaataaaatgattgctcatggatcatcgagaaacaag

SEQ ID NO: 175729 - DNA, 668 bp, Zea Mays
ctttaagccttgggctacgatcactatttaccagaagctcgaggggtttggcacaaaatctaggacctatctaagatttcttttgagtagccacagacagcgggttggtttattagaatcctgagggtttatttgcaaaaccacatggtcgaaggggtatgggccgattctgaccgttgtatgcttacccaagagcctagattagataaggttggctcccaaccggaagccaccctagccacccgatcaaataataatgctcaggatttaaaatgctgagatggaaacccgtacacccgatctttatccaacggactagccttaatccactcaaccggtatcccctttttgatattatccgctcaaacctaatcaaacgatcataagaccatcttccacccgtgggcgacctgggcgacgcggcccgaggcacgcgtggtggcggtcaccggcgcgcgcgccattgagcgcgagaaccggttttccccataaagaccatcgctacacgttgcgagtgcataatcgaacgccctaattgtattcttacctaggattagagtgccggtgagggccacccacgggaggtagcggtttgtgaagtccggcgaggaattctcctcagctcgcgccgtcattgagcacagagagcccacgtacaccatattcat

SEQ ID NO: 175730 - DNA, 517 bp, Zea Mays
cccaaacccccctttgatttcaagcgccactaccccctccccaagcctcgctacctctgtccgcactctctgttgccgccgacccaccatcgtccatggccagggacccctggtgtccctccgtccacgccaaggcctccattgtgatcactagagctcattgttgcttccttggtcttctccaagctctcccaatcctttatcgcgcctagccatgtcaccccgacctcgccggagctcgtcactccaccaccggttgtcatcgatgttatcctctaccccgaccccctcagtgaggcactgactgtgttcaccttcacctcagctcccttctaagccttttccctagcatgttaggccccccggagccccattccggtcaactctagtgagctttacagtcatgcaccacgtacgctgtgtgccacctcgtcgcacccccttcgccctgcctcgctggccgcgatgccgcttgcgtgccgagccatgcgatcgggatcaatggatccgaatcgga

SEQ ID NO: 175731 - DNA, 585 bp, Zea Mays
caaataccaccaccagcttggcacaggtggttacaagcgccaggttcctaaatggagacaagaagacgccgagaagaaggctgcagggttgccaacgctgtctgtgcaacttggtgaaaggacagcaaattagattcgtgctagaaaaccaagggaaactgagtctggtgtatcttttgatgatcccactgtcgaagaagcggcaaaaaacatatatgcaattgcagctaagcagagccaaggaacatttaagctgcaaagggagagagacattctaacggctggtctcggtaaccctgagcatcctggtcgtgtacgaggaatctcatctaaggaaggatggaaggaaggattcagaccacaatgggaaggtctgtacaagaaacgtgatcgatacaaggaagagatggcgaattattttaaggaggaggccaagaaagagttcaaaggcctgatgtctgaaatgctatcgaatcctcctctagaattgatgcagcaattggcgatggcgagtgcgatgtctgttcaacagatgaccactccacagatgcaaataattctagcagctcaaacgccggcttccac

SEQ ID NO: 175732 - DNA, 598 bp, Zea Mays
gggaggttccatgacagctggtatcagagcgaagcccatttcttcggacattacttagtgcttcaaaagattttaaaatacttacctttgaacattctttcattcttaccttgatcctttcttatagcaacttatcttttgaagtcgggtaaaagagtgccaaataataggttatacatatgaggtatgggatcaacaagaggttgattccataatcgtaggtcatgcatgcatgatatttaaacaatactaagtaatcttcccctcttatagagacatggcatgcataaagactacccagcggaagtcgaccagaccttagggtgtacctcggcactagttggctccttgatatgaggggagcagtagcgggagtaatgatcccataggggatctggaggctagagttgaacgtctaacgatggaactgtgctatggaagtagggagcatgcacgtgatagccgccgcatcgcagagttgtcagcagaggttgatcatttgcagcgggagaatgtggagtgggatagggctattcactgggatgtaattcatgatctatagcctaggattacatggcgactgcccgagcttgggtgg

SEQ ID NO: 175733 - DNA, 1324 bp, Zea Mays
cggtctgtgcgcttgtggatgacacgtgcgggcccacccggtcagtttcttccctgccgcgcatgtagcatccagtgactgacttgtgggccagcttctgtctggtggacaccgtgtgctgtggctcccttgcgtacacaaccacctgggtcgctgcgtccgtgggaccggatgtcaggcttatcccctccgcgccataccgaactggagccaccgcattatcagctgggttcgttgcgatcccatctctggagattgggtttggttgttgatatcccggataatccggctctgtttcaagatataagtgccctcctaccacaacaccgaagcatcggggatcgcaggaagaaagggctacaccgtgcgtcaaacgacatcgccgccgccaccgtcgagggctcgtcaccggttgtgtgtcgccgcgggtgaatcaccggcgctgggtccctgaaaaccggttggggagcttcgccatgttgctagaaagctgctagtatccccctctggtggtagccggctctggtgacatgccaattgctcgccgatgtgcgaatgcaatcgtgtaatccgcactctgccgtgggcaactcgcttgcgtctgcgtcggggccctggcgcgtggtctggtggtactgggccctcgggacatgcgggtggaagtcgtgccctgctattagagtttggtggtcggcgctctcagatctccccgtcaacacctgtctccaccgcagctccatgttccgtggatctgggccatgtgactcttgattcacaggtatagacctacaaactgtttctgcatagtctctgcctcgcttagctacattttacggttgggttggtctcttggttgttggggaggggcgtgtgatggcaatggcgccaccgccttgtgcctacgccgagggagccggtaccagggaagaagaaacagtcctgaccgttggatcatgatctggcgcgcatacttggatgatgggtcgcggaccgcccattcatcgctggacgtctgagattaaaggagagggtgggcgcacctgggccgttgatcttttaagaaacggtcgcgattagatagagcgataccccttcgatggattggatctgggccatcaatccagatcggacggccttgtgcgctcgcgggttcataatggacgagatccaatcctggccctcggatctgatctgaacggtccgaatcttcccataccccttcacccgagaacacttgcaatagaacccctctgttttatagtaatcaacccgcggtccgcacaactgttttctgtgtcttaggaaaacttaccccgagacccct

SEQ ID NO: 175734 - DNA, 399 bp, Zea Mays
atagtatcacatttggagataaccgcaaaggaaaggttaaaggtttaggtaaaattgatattttgaatgatcattccatatcaaatgtgctcttggttgagtctttgaattttaattttactatccgtagctaaattatgtgatttaggatttagttgcaattttaccgttgatgatgttattatctctagtgttgatggtagcaatcttaagtttaaaggctttagatatgaaaatctttatcttgttgatttctcatccagtgaggcaaagctcacaacttgcttattctcaaaggcttcactaggttggttatggcatagaagacttggtcatgttggaatgaagcaactcaatcgtttaaccaaacatgacttagtccgtggcttgaaagatgtg

SEQ ID NO: 175735 - DNA, 374 bp, Zea Mays
aagcataccacttttgtaacagtggatgggctctactgctatgttgtaatgccctacggtctgaagaacgccttgccaacatttgtacgggcgatgagtaagaccttcggggacctgatcagggacaaagtagagatatatgtcgatgacatcatggtcaagactatgaaggggtcgactctggtggaagacctgaccctggtctttgataggctgcgggcgacgcgcacaaagctgaacccggacaaatgtgtctttggtgtctccgccgagaagctgctgggattcctggttttgcaccgggggattgaagcaaacccagagaagattagggcaatcaaggcgatgaggcctccgacccgcatcaaggacgt

SEQ ID NO: 175736 - DNA, 951 bp, Zea Mays
tttcttgggcaacaatgtcatcacgtggtgttcacagaagcaaagagtggtgtcactgtcatcttgcgaatctgaatatatagcagcagcttcagcagcctgtcagggggtgtggttgagcaggctattgggggaccttatgtgcactgatgtgaagcatttttgtctcctcattgacaataaatcggctcaagaactaagcaagaatctagtctatcacgaaagaagcaagcacatagataccaggtatcattacatcagagaatgtgtgggaaatggtgttctggatgtgaagcatgtcagctctgaaaatcagttagcagatatacttacgaagcctcttggcagaatctggttcactgaattgagaagactgatcggggtggtcaagattggagagtgacaagattaagggggagaaatgttgttgtaatcttgtagtgcgtcaacagtacttgcattagttgcacgtagatgcattagtctatcgcgtgtgttactgcatggcatatttgttttagcgtagatcacggcgagctggagactgcacagtctgcgtcgtgaccgcgtcgtttgggtattcgccgccaccacctgtacgccgtgcatgtcgcacgggccaccgaaagatgaggggcttcgtgcagctgcggggagtggcggggaagtcggatcactccgtgtaataagactatgttaatgcatcagaaatcggtgcgcgagttgcaacccaaaaacacctctgtctcaacgttcgtccgtcggctctggtgatcgcgctctgtcgtcgcgctgccacagttcgtgctcatcgccggccgccgtgtttcggttccaacattcagaaaccccctgttgcaggcttcaggaactatgtccattcataatcaactgcaactatgcagcaagggtaccgaaacaggttccagcgatggttcttgtttctcttat

SEQ ID NO: 175737 - DNA, 560 bp, Zea Mays
aggaaaactatctggagaaaccaacacacaataacacaaatcaaccgtgtaggccaccctctgtctcttgtccaatccactccatttttctatctcgcacgaccgtgcttcacggacatacgaattctgtttcgtgccctcgcccatccctacctcttcgaataggcccacactcatcatgtttttctcctccacgcaccgagcaggcgagcaccgaccagagtggcagagtaccagactattcgtccccgcattgccttcactattgccgccatcttcgtccgtgcgcactcgttgccgatatcgctagccccaaccgtcccgtgtcatcgctggcagagcccccttctcacctccggtcgcacgccgacctggtccgctcaccacaccaccgtgttcctccctaccatgccgcctccgacatcccgcgcttgcttgtgctcctactggccccaccgcctgcgacgagcctctctgcttgctgctagggcctcgccgatgtggatctgcccacccgtctcccccaccaccagtcaccagtgacccgtcgtcgtctccgc

SEQ ID NO: 175738 - DNA, 335 bp, Zea Mays
gtgcaaacaataaactgaatccatgaatagccgcgccacttttaaggctgtgaaggggtgagccaaagccacggagtgagaaggttttgagaattttgtcaactataactagaatgcaatcgtacttccctgattttggtaagaggcatgggtatttcgatcgatccagtttggcacgggcacagatgtcacataaactcacaaattgccggaatgtcctcctatagcactgtcatgcagggaatgaagaaataactttggagtgaagctcgaaattagtacccaatcaaatccgccctttgtacttgatgaggccgtcagacagttgataaggg

SEQ ID NO: 175739 - DNA, 361 bp, Zea Mays
tgactttttcttttgacgttgcataacaagaatttaactactaacacatttttttgaatgttgtaggtccctccaggaaacttgctaactctgagaaatgaggactctgaagatgcggtcgcttcttttgtggacggtcttctaaacagcggaggagctagcggatcaaatcaaccccctccatttgatcaacctcctccatttgagtagcatgtctccttgtgtttttctcgtactatgcatggtggtattgtgaacttgtgaacttgtggacatgtgaacttgtgaacttgtgctttaatttgtggacgggtgaactttttgtgaatttaaatgtgtgtttcatgtgaaacgatgaatt

SEQ ID NO: 175740 - DNA, 344 bp, Zea Mays
gacacacactaaataatacacccataaattacactaacaagtgggcctcgcagaagtgtcctccggtggaccaacggcgggttggtcgcctcgtagccttcgctgctacctctagagtcttcatgacttggtgcccttcgctctgtcccaacgaatgtatggcgcgggttggtggtggcgttgtggagaaggccttgatcggtgttgaacgtctcaaggcctccgcttgatttcctcctctgtcacggccgagtgaagagtcctgcatgcaagttagtaaacgtgacacgacgagtcaaacgccccttcgctctatggtcggggcatgtccagcctccgcccaa

SEQ ID NO: 175741 - DNA, 996 bp, Zea Mays
gataggttgatcacctgcaatcggttgcagaggagcccgcccatggtgcgagcggaacccacggcggagcaccaactccggcgtaaaatcgtgggttccccgatcggcaatcccatcaagcggagcaccgtgtgccatccacgcctctaatcgaagctcccagacccacttgaggaatcccgagcggtagcgtgggcgagttccacggcggcggaaccacaccatcggcgcaaaggcgaccgaccaccacagtgcccaaaacgtcgattaaaccgagctacgcgtagatgagacagtagcgaacatgggggatgaggactcaccagagaaggagtctgcagggaggctggccatggaggacagtgggttcacagtctccggtgaagaaatcctgagccccgggcgccggttcaatcgtgacgaggccacaataattctccacgcacgggtggagcttcacggcacgacactggggcagcgaccacgacgagcccaccggcgatggcacagctcggttctttctctctctccctgttctcactacggaaatggcggcgccactagtttaactcgcgcccctggttgatcgcgacccgcggatggctagggaagaggaggtataggggggttcggcccgcatttgtagccggtcgaggggagtccgtgggcgcgggagtatcgggcgttctgttgcgcggaggtggaagacggtagcgcgcggataggaaggtgggggaaagctgcgaccggggcccgcatgtcagcgaaagccacagcacgcgcacgctgagtcgcagaggtgccgacatcccgggcccgcaaatcagtgggcgtgtgaggagcgagcgcaggaggagctggcgcatgggtcccgcatggcatagatacagcgggtttgggctgagcgacggcgaaaatgggccaaggtgtgcagatttggcccaatgaactgataggtttaatcttttccttttcttttctatttctattttcttt

SEQ ID NO: 175742 - DNA, 749 bp, Zea Mays
ctggaccgccggtattaccgtggaaactccggtgacctcggttgtgccacgtcgtggcttgttactgtgcggtagtaaccatggcacacttaagagtacaatctttgagccattgcgccggtgaatgccacacctcctttgcgccagtgctcttccccctctccggccgccgcgcgtctcctccaaattagccaccaccgctcatgaatcctataaattgagcgtgccatcagctccgctaggtagctgtgcatccaatgaactagctctcacctccaaccatcccctacaactccccaatttgagacttcccccaaatcggtcgtgaacatcgtgctatgtgagctcgccgtggccagcgcgctacaggtccattcatgccctctgttccctcgtttcagtactctggtgtgctcttgatactccctgacccatccaattgagttagaacccgtaggatcaccgggaacatctcggtttgtccattgctcgcgctgtcaccgtgggaagtgtgattaagagctcgaaccttgcaattaactgaggggaaatggtcggttagggttgaatttggtgtcaagcaaagagaaggattagttgttgcctatttcggccagtacgagctgaccggagctcggcttgtcgccgttcaccattggggatcgcgagttgtaaagaatagaaaggggaggggtctattcgtaattgtcagtgacacaagaaacagtactgcggactcttcaaaggtt

SEQ ID NO: 175743 - DNA, 1042 bp, Zea Mays
ggcccgaaaattggatggaagaatggttttatgtgaagaacgacttgacaacgagggaggacatcaaggaggttattatgcgccccatatggtcccgcttcggtctccgaaaaccgaatgttgaaattgatgacgccaccgaagcgtgtcagaaggcgtttggtactgtctgcttcttcattggtacaagagatttaattcaagagcatatagcattcagagtatggccgcttgtagagagctgggaaatgccgaaggagaccattaccaagcctagcgaaggtgaactggtccgactgaagtatacattcagatatggggataaattcgatgaaccaaaccatgactggctaaaatgcatcgaagttacaagtgaagagctgcttggagcttattccaaggcagaagataatgcactatctacagccttcagaggccgaggaaaaaagagaataaacagagtttttgacgccatcggcttcgtctaccccgactaccactacccgctgcggggacaggggaagaagagaaaagctgctgccttggccaccccagctgaacctatgccgaaggctatgggcaaaaagatgaaggtacttatccacctgccgtgttacattgaaccggctgtggtgcctgagtttggcggggaggcttcttcagctgctgaattaagagaacatgttcctcccatgcagaggactgaagagccagctataatgccgaaggcatcttcggctgagttagttgaaacgaaggttgataaacataaagctgaaagatcaaaaactgaagaagtatcaaagatgccagggattttaagtcctccaacagaagcgacagcgctgaaggcagaaaagagttctgccacaactcctaagagaaggaggatggtaaatgtattagatattttggaaacaaccgattccataagcctcgctcccacagggaaggttgccgaagctgacaaaatgcaacccaaagctgatactaagcaaatagaagttgaagctacaataacccaggttgaaaccaaggttgg

SEQ ID NO: 175744 - DNA, 508 bp, Zea Mays
gtagcctggtagggctgcaagaacagcacggtgacgtaccgctcacatcacagcgttgagcagtcaaaaaaggctagcgcgagggcgttctcatctttggccgtttctttcgcttggcctgggtgaaaagatgggggttcgtccttcgtcgtgggccggtgctggtgccgtacagccagacgagcagcaacaaaagagaagggacgacctgcacctacctgcagttagttgatgcacacttgcatatgcgttggcagcgttgcacccgggtgaggccaacaggacgaggctgcagacgatggttggtggacgaaggaccgagggccggccgaggacgacgacacacacacacacacacacatgggttgcccccgaaacgaatcccgatccattcttccgccagcgcgcgtcatccaaccacattggatccgatccgatccgagtgagtccgtacggtagtggagagtacggtgtgtatactgaatctgaatgggagccgtttgccttg

SEQ ID NO: 175745 - DNA, 1084 bp, Zea Mays
gagatgtgcgaatgatcggttagtgtttcacttgtctagtcgataaacattgtcataaataattatgctaaaatttggcatgagaatgcattggggacacatatgtgcgtgtgtgctgtggtgtattgtagtggtggtggcataagatatttgattgaggtgtgcgggtatatgccgtaatatggttatactcgcggcgaggaaagatgtacgcattgggtaacacgacgcttaggtcgctgttgtataatcgaataaatgatgtattattgagcttgagtcaaaatgtgggatactagtggtacgctaggcaggcggtgttccaaataaataaatcggtggatgtggttgttgtcgtgcgtgatttattgttagtgagtagtttgaataacgagttatatgaggattatgttagaaactagtatacggcgtgtaactgtgcttgtgatgtgaataatatatcagtaggtatttgtaggtgtcattggcaagtgggatgatttcggttgtgcgataaattttgaagggcgaagaacatgtgtagtgtgtcgatcaagttaaccgataggttccgtaaatatgcttgtgatgcttttatgtgcatgataagatcgatgccttgccttgtcaattattgcattccattcccattggataaataaatatcttattgattgattagaggtcttatatgagcgttatcgcagcctaataatttttggaagcgagtagcgttcataagtcggtccttgttaaaattgaagaacgatccgataagatatgcacgtaagtgctttaggtccttcagtagcaaatgtaagtcttttggagttttacgccatatgtaaatgcctctatgttataccccaacaatgtgctattttaggtaactggtgtgttaactaatttgagttgagaaaaggttaagaagaactaattaatctgctccaacccatgtttcgagttgcaatgtctaaaatggttcgctaagtcttatactgtgattagccaactcatgttaagtaggagtcgagtttattaagtgattgttatatatatgttgtgtctcggatttcgctaataa

SEQ ID NO: 175746 - DNA, 584 bp, Zea Mays
ggtgaagcgcctccacgggggtgtgccctcatcgcgctgaatctacatgaaccatagctaggcacccgcctctaggttgtatgatgccatccatacttgttcctcttctgtgatgcattattagtgaaagtatgacttgcaccgattaatgaatgctactagatcggatttcccatcaaacttgggaaaatccatcttctggaaatgcggctcttgattgttgtggtgcttgctgccatgcagccctctagcgcccgatggggaggagtcgatagtgcattacttgagcatgtcgaacttggtctgcatgatctcaatggtcgtggtcaacttggtgatgagggccacgatatcggttgttgtcagtttggccattggtgtggatccagacgggtttgggggcgttgacacggcggaagtgggcagggagaccgacggtgtagtggatgacgattgactggatcgtgataccaagccactcggcgctaccaggttgttaagggcgttgacgcctaaggcgacaatgcctcgactacatagctcgtagcctcggttagtagaggcatcgtggtttttgctcgatg

SEQ ID NO: 175747 - DNA, 318 bp, Zea Mays
aagccgaggaacgaaggtctttgataccaactgtcgtgaccccgtggccgccgcgaactgcgaacgacgtgaggaaggaagaatgtgtggggaagaagatatcgccgggtaaggtttcctcccggtaggaagtggttttgtatatttcttttttgatgtgtttcccagttctgtgatccttatttacatattaaaatggtcacggggcccacagacggtgcccagacacaccccactcataccacgcacctctggcacggacacacctgcctactagtgctcctctccttcctgtggcgcgaccggaacaggaacgga

SEQ ID NO: 175748 - DNA, 581 bp, Zea Mays
ctggatgcttcgttgttcacagaaatcaaagaattcagagctagtgaaattggatcccaggtcggttatgatgctattcggtatccaaaacctgaatattatatcttgtatgaactccactgccttggctgaagtcagagaagcaatgagtttgtattctatccatttggtgaatttgtcaatggcgaccagcacgtgagtgtatcctccctgagcttttttgaagggtccaatcatgtccagtccccaacacgcaaatggccatgttacgggtatggtttgtagttgctgtgctggtaaatgttgctgctttgataagaattggcaagcttcacacctctggactaactcggctgcatcactctttgctgtcggccagtagaaaccagatcagaagacctttccaaccagagtcctagatgttgcgtgtatcccgcactgtccgacgtggatctcatctagcagttgcttcccagtagccgaaagaatgcacttcatgaggactcctgttgcaccccttatgtacagtgcatccccaatgagggtgtagtgagctgactgccttgcgatgcgttctgctg

SEQ ID NO: 175749 - DNA, 1198 bp, Zea Mays
ctcggctgggtgggctgaaaccggcccacttcctagcgccaccgcgtggcccatctggctgggctctcacgcgcgctcgggctgacatcgggggggggggccactggcaactgcgtatcgcacatccgcgtcgcacactcgctgggtcgctatcacgcgggcccactcaatcagccactcagccgcaccacctccgcgcggactcgttcgagctaccggtttctggcgtgtggacccggcctggcggcttcctcttccatgttacccacctcgcgacattaccggggaggtcggcatggccgttgcacccgccgcgcatgaagtccgagttcggcgccccggaaactgaggataaaaccccgtacgacctgcggaaccctcctatcccctaccgaccgcgcccacgtagttaaccagcgccgccaggagtattgctgtaacccgccgcagcgccaaattcgtgtgccacagtcgtccgtggagctcggcgctaaattggagccttgcgggaggccaagaggcttcgcccgggtctctggttcgcgttggtggcgaatacggggcaggtgggtgaccggagcacgcccaatttgtcttcgccgtcgtgcattcgcggatcgccgtggaccgaccgaaacgacgccggactttgggtagggacccgctctcctggttcgccttcatcttaatttcattccgcgcctagcatattggggtttggcgcactgtagccatggatttgcctcaccggcggtggccgtggccgccgtcttccacttggggtgtttggccgggaggagggcgaagggttgtgggtggtcgatgggctaatcgatggcccagatcgatctcgcgtcaggaccgcacgatttggatctaagggtaggaagcgttgcgcgtcatggtctaagctaaaccgtggatttatgatccgagggctgcgttgagatctcggcttcatgatatccataccgtaggatccagatccaagggcgtcggtagaatacccattcggagatagtaagatctaatctggaccattcgtacttgatcgggcggccagaaacagagaataccccttcgtcgagccaaaactgcaaaatagcccctcggtttcattaaaatcaacccgccgtccattggtcactatgcgctgggtctctggattcttaccccgagccccctgtgcttcacagat

SEQ ID NO: 175750 - DNA, 393 bp, Zea Mays
cgaggattagtgcctgggatcgcagggcagggaggtcgccggcgtggcgagcgcgctggtctgggttcgctccaccgcgggatggcctggggtagaagacgggagattaccgttcgatcttttctgggcggttgagattagagcggggatagcctctcgggtgattgatcgagtgtctttggatcaagatcgggcggcgttggttggatcagaacttataaaatctgggtcgtcgtatcttcatccaacggcctggccagcgtaccggttcgatgtggtctagatctaatcgtgggcgtccgattaagatctattggtcctggtaaaccctagagcactgaacatttgtaagttgcaaaagagtccctgtgaaacagagaaatcaacccgccg

SEQ ID NO: 175751 - DNA, 959 bp, Zea Mays
gtaacttatcttttgaattcgggtaatagagtgctaaataataggttatacataggaggtataggatcaacaagaggttgattccataatcgtaggtcatgcatgcatcatatttaaacaatactaagtaatcttcccctcttatagagacatggcacgcacaaagactacctagtggaaggcgaccgggcctcagcgtgtacctcagcaccagttggctcctcgacatgaggggaccaatagcgggagtaatgattccatagtggatctggaggttagagttgaacatataacgatggaactacgccatggaagcaggttgtccatttgcagcgggagattgtcagtagcctgggttgtcagtagaggttgaccatttgcagcgggagattgtggagcgggatagggctattgactaggctgtaaattcacaatctatagcctgggattgtgaggcgactgcccgagcctaggtggaagagctgagcgtatccatagaaaatttgcaagcgtataataatactctacacgaggaagtgcacgtgtagtatgaccagctacatccgaacgtgccatcggaggttgcggtgatgggagctggtgcatcaggagcagctggcggaggaccttatggggagttggatctctttggagcccctccttccatgaacatcgcggatgatcgttctcccgaagctagcagtggggcgagagcagccaaggacgcagatgactagattagtatagtagtaggttgtttccttatgtaatctaaatatggaaaagtgagttatataagtagagcatgtataattagaacaagtttggaataatgtaacaaaggctgtgtaaatgtggcatgtaataatcaagtatgttttcttctttagatgccgtccagaactcgtgctcatgatggggctggaacttttcgtggtggggagaaaactctgataccg

SEQ ID NO: 175752 - DNA, 607 bp, Zea Mays
taaaggaagaggaggtcaccgaagggaagaggcttcctcttgaggaggtggatgagaacgcctgcatcagccactgaacagaacaagcaggcgaaattttgtgtggttggcatctgccacaaaaggattgaatcaaggagtgtgctctggttgtgaagtgataactaggctaccgcatgttcattttcaaaagttttcgtgtgtgatcgtgatgaggggtgaaaccgtggtttcagccaacgaacttgcagttcctgttgttgcttctccccctttttcctttttatatattttgtatcggttacagaacatgatttatccagtggtttgttgatgaaagatgctaagtttcgcttaatataatgtatatgaaggtcctgggtacctcaaattttatccatattaccagtacgaaagacatcttccttgaaagttacagaaatgcttcaaagttcaaatggcattcagcatgttccatgtgctgctatttcagcactcatttcccgtgctggcaatgcaaactggaactgatcattagttagcattgactgaaattttctagcctgttcgccttttgtttccaggaacatgctttgtatctttgaac

SEQ ID NO: 175753 - DNA, 1138 bp, Zea Mays
ttcaaccttgatccagtgctcaactgagtttaatccccatagtcgatttgtagctggtttattgcactacaatattgctgcagatcactggttgtgttgccatagaaatctgagaagaaatcggtcctaaactatggctgtcaggttgactgaatggtgcagcccatggtacagtaactgaaatggttcagactgccagcgtcgtatcctcaccgccggcgacctccctgcgcgaagattcgcgccgccgctgttctaattcgtgcaccgggcttggagataacgcttcgggtaaaagatcatcaccccgtgcgctggacaccactccgatgaatcaccgccgtacttccccctgctttgcggcttgagcagataagctcgccggtgaaccgccgtcgcacggccttgcgccgcatgtccaagcctcgccaccgcaccgccacgattcactttagctccctgttgatcaccggaatagctgccacgacgttgaacacttattcactgtgtcggtattcttccttatctccggccgcctgcgttgttcgaccaaattgcgcgccgccgtcgaagctccctataaattgaaggccgggactgctgcgctaggtcattgcgaagccatagcacccgctcccacccttaatcattaacccgagtccgtgaatttcccttttcccccaaactggtctccgccacagcgaagatcaagctacccgcgaccagtgcgatttaggtcagtccatgtcttctgcttcaccgtttaagtactctcatgtgtctacgatgcttgccgacccacgcaattgagctaggcaccctctggtcgccgggaacacgattgtctagccgcaacgctcacggtcaccgtggccagagccaaccaagcacccatttgcgaaattaggttaggggattggatcggggagggtccaattcggtgttagccgctcggagaccccagtcgttgccccatttggccggtccaggagctcactggagctcggtcgcgctcgacgtcgtcgaggacctgagtctgtaaaggaatagaacctcgaggacttttctgcaacctgtcagcgacttaggaaaacagtaacaaagcccacttcaagttatccgaaaccccgagggcctc

SEQ ID NO: 175754 - DNA, 303 bp, Zea Mays
caggggcgacagcagcagtagcaacatcaatgtgtgcctcgcttccaaggccactggaaggttaacggtcctaagtaagcttaggccctcccaatgttcgctcgatcgtagcctttatgtcgacgggtcttgatccgtcctttgcctgccagggcctcctcttcctcggcatccgtaggcgttccctcctcgtcggccgccatgcctgccagggggtccgattcccaccggcatacgcctgctgggaacgtcgccgacgatccatcagtagctaccatggatgctccttcctcgtcggccgcc

SEQ ID NO: 175755 - DNA, 691 bp, Zea Mays
gttgatttggagtcggttgtaagaggacctttggcaaaaaggatgttggagggcaaatgaatatgaggatgaaatgatgtcttgaggttggtagtaaacctaagacaagcaccatagaaggggcaggcaaataaaagaggtcctataagatgcaaaaatgtggagaactaggtcatagacaaacaagctacacatgccaattaaatatgacaaaaaagggaatagaaaacaaaagacctgcaaatatgctggtgcaaatcagccttcagaacaagtggactcccatgcagtatacgataggtacattttttctatcttcaaacgctacaaacatggttcaaacacttttttctaacttcaaacattgtttattcattcccatgcggttctcttatgctagtttcattgactggaggcccatcttcatgtgtggctactgctgcttgtgaggcgagaatagtgtgaggagctcccgaaaatgttgtggaatcccatggttcccaggtgcctgcactcccatgtgcagatagccaaagtggagcacaatcatctactctagttggtcgaagtggagaacaaatagctgcccagaaagatgtagtcccaggtcctcgtatgctgaaaaagaagcttactccaaaaaagaagaagaccaacttcttaccctaatgcaaaaagaaaacactttggc

SEQ ID NO: 175756 - DNA, 625 bp, Zea Mays
tcatcctcttcctccctatcgtcttcattagcaacacaggcagcacacccattgggttcagcaacagatggagcacccacattgggatcagcagcagattgggcacacccattggggtcagcatcagtaaattcaggcacaggcacctcttcagcagcaggaaccgaagtaccaacgtcccgatccaaactagacactcgccggaggcgtcttttcttctttttctgctcatcagcagaaggttcaagttgattgactcggcaaggacacctcgggcgaacattgacaggcttctgaatatctgaggttgtaccaacctctaggaggggcgccaccaccaatgtcccagcaggagcagcatcagaagagtcctcagccagcacatcaagcataacacttatctctgcgtcactaggattcaggggcacctcaaaatggacctgtcgttcatcatcatgaatctccccgagcgaggcaaccaaggcgctaacttcttcagcagaggatcgcactctaaggcccaaactgtcatcagtaacaggtgaattcgacacaaaaaagagtaaaggctttgggaggaggcaagttccaagctgagtatgccactggggcaccaacatttgac

SEQ ID NO: 175757 - DNA, 317 bp, Zea Mays
aatcggaccaagggagcgcaaccactgcacccctaagacgtaagaccatgtcgaagccgccgtccagaggtaggggatagcaggttgcagtgaagattgtcccctcgattgatagagtagccttgtcacaaattccattgcttgccacctgatcaccatttgctatcttgactgtgagacctggcctaggcgtcacttggagcccaagtcgcgatgtgatggatctgcggatgaaagtgtgggtggaccctgtgtctaccaatgccaccaaggactgtccattgatggtaacctgaagcttcattgtgtcggccaca

SEQ ID NO: 175758 - DNA, 722 bp, Zea Mays
gggaggtagggctagaggggccttcttcttcttcttctcggtctagcatccctggttagtggtcttcttctggatcttctttttgggggcgagtgcctttagcttcttgtcaaagtctatcttcaaggtccgataggcctcacgggtgttggcctcctcgccttccactatgctgagactctcctggagagatgccttctcttgcttaagctctttgacttgctgctctaggctttccactcgggagtttaggtgggtacagtgggaggagagctcatcgtagtggttgtcgagggtgtggaggtatccggccatgtagacgatagtgggatcatcttctatgggatctcctcttgacagagccaggagtcttttcttccaggtgggggtgtttttgttgctgggtgggaaatatcggagggggtctcaaagatctctcggctatagttttggcacagttgtttgagggcttttcgagcaacactctggcatgcgtctgggaagcggtgcccgatgaaagtaatttggaagggagggtggtttgggtagttccggctttctcccaagtagactgccatagagcacttttccattccattttcacggtacttcttccagacatattcgggcttcttgcggatccccaagcgcagcgcgcagctccgaagaaggtgaggaaagccttcctcctctgagcaataggaagtcctaatcacccaggg

SEQ ID NO: 175759 - DNA, 509 bp, Zea Mays
ggacaagagtctaccttatgctgagttctcatataataatggttaccagaccagtctaaaagatgtcaccgttcgagactttgtatgacaggaaatgcagaactcctctatttttggaccagactagaggaagacagttctttggacttgaacttattcaagaggcagaagaacaagtttgtataattcgagagaatttgagggtagctcagaccaggaaaaagagctatgctgataatagaagaaggccactagagtttgaggaaggtgatcatgtgtacctcaaggtgtcaccacttcggggaatgaggagattcaaagttaagggcaaattgtcccctcgctatattggaccattcttgatctttaggagagttggagagatggcataccaactcgaactacctactactctatcggatgtgcataacgtgttccacgtgtctcaacttaagaagtgtctccgtgtccccgaggaacagttaccaatggaagagctcagtgttcag

SEQ ID NO: 175760 - DNA, 442 bp, Zea Mays
gtctctattcattttgcggaacaggaaggccggaattggtggtttacaggggtttatggtccacaaactgaggaagaaaagattacgtttttacaggaattgaaagatatcaggatgttatgtaatgggccgtggctgacagctggaggtttcaacatgatttaccaagcctcagacaaaaataatgataatctggacagggccatgatgggaaggtttcggagatttttaaatgaagttgatttgaaagaaatccgtctcctgggccgtaaatatacttggtccaacgagaggagttcacctactttggtaaggctggatagggccttttgctgtttggaatgggagaatatatttcctgattcagttctccaaagttcggcgtctaatgtatccgatcactgccctttgattcttggtttaaaactccaaactaaaggca

SEQ ID NO: 175761 - DNA, 458 bp, Zea Mays
gcaagcatcactcttgccttgccttctttccagatgttttctcgaacaagttttcgcccacaaggcactttcacgtctggtcaagtggtggtcaggcatatccagagtattattttccagtcttctttacctggaattgacagggaaataaaagaggattgcctctggtttaagaagtttatcatagcggagcgggtggagtcaaccaagctactcatgccaaacataagtgggaatagtgttgggattatggaccagcctttttagccggcacaagtctgatccaaaaacaggagtcgaaagcacgaccttgcgcgaaataatatgggtcagactagcacgatccgaaagctggtctggactggatctcaaatctcggcttgttaggctccagcacggcccacacgcatgggtcgggcttaggccaacacggcccaatgaaatccatattgtttagt

SEQ ID NO: 175762 - DNA, 369 bp, Zea Mays
gcgatgtgtgtcaaagagttaaggctaaacaccaaagaccagctggactattgcacccgcttaagatacccgagtggaaatgggaaaaattggcatggatttcattattggactaccccacactcctacagggtatgactccatttgggtgattgtggacagactgacaaaagtggctcacttcatacctgtgagaactaattacacgggagccaagctagctgaactgcatatgactcggatagtttgtctacatggggtgcctaagaagatcgtgtcagacaggggatcactgtttacttctcggttttggaagaagttgcacgagtgcttggacacacaattgaatttcagttcaacctaccatcc

SEQ ID NO: 175763 - DNA, 516 bp, Zea Mays
ccatcttgatgaaccacacactgggcactcattattttttgcataatcctttcgaaacaaaacacaattgttaggacacacatggattgactcatatccaagtcccaatgctttaataagtttcttagcttccttataagatgttggtacagaacaatgtgggaaagccaatgacaacaactttagaatagcagagaaggcaacattactgatccggtaacgagatttgatatgaagtaacttcactacaaaagaaaatcttgtgtatgatgcacctgggtgaagttcttgcttcatctcatccaatacaactgcaaacatagaattttgtgcacctccctcttcagctctgaaaaaatcttgtaccatatcaggcaatctatcttcagggttttcaggctcattcatacaaacatcctcattcatactataatgttcatgtagatggccagcttgttcactcagttcagcatccaattgttcttccctatgatgtatccacgtagtgtatgtgct

SEQ ID NO: 175764 - DNA, 641 bp, Zea Mays
ggtacccggtatgacccgctggtgtctccgtcgtcgatctgctcctgcaacatcggaccagtcttggtcggccgggtcggcgctaaccttggtaagctttgttttcctctctgcggtattacataaactatcaaggtttccattgccggttggctggggtagtgttgggcgagcgcttgggatttagacaccactggcggattctcgaggtggtctgtgccatgggcacgtctgcctgtatggcgcacggccggccccaggctgggcgtctggaggtagaagaaaggggataacggctcattgggaaatgaatggctaggatctgatctgcatagcgaattcacgatagtgtatcgtggccgttgttgctcggatggccggttgtgattagatcgagggtaccgtttcgatgaactcgctctggtccatccgattgtaatcctgcgtctcaaatttaatatcgaggattttaaatcttgtccgtcggtcggtaatccgtgggctggtaatgcataccggttcaggtgatgctcgatttaatctggtccatcaatcctagcttggacggcacagatcggtgcgtaccccttcggcctggagatttttctaaagagcccctcgtcttattccaaataaacccg

SEQ ID NO: 175765 - DNA, 807 bp, Zea Mays
tttaaatgttcttatggccatcattccataagatcattgcactcaagcaaaaatccaaatcaaacattatgcaaacatcgccatcacatggttgttattataataatagtatcataaagagttttgtcgtctaacgcaaaatcaaacttattacatcatgacttgttaaactctagagtagcctagtaatagatcctgggacaccatgcgaatcctcttgcgggacagggacacagctatggcagggacttgggcttcaggtggattcctcccttctagttgagcttcaagggctgcaatccttgcatgcgtgtcttcaagttcctcgtgtacccttgaaagatccagggtagcattgtctagatcagtgttaagacctgccaccacacctacaagggcgttgaggcaacttctccagcttcacctggagcaacccttgtctggctttctacacgaggacgtaggggaaggtgcatgtacggcagggggaccacaaagctctccgagcagcattgttgaccgaagcagcatgggtggatagcggtgtcagagactaatgagatgatagagtcctgaaacctctatctcctgcatccaacactctgatatgcacgcaagtgatgtagtaacaagcatgtggaggctcagacactcgtcttgtggcatatagaggtcgaacataggttcccaatgcatgcaacacatcctgcaacaagtttggaaagtgtcccatctcgaacattgaagtgtaatgttctgcaacaggccgcaatccaacaaagttaacttcttgttcattgttgatat

SEQ ID NO: 175766 - DNA, 1256 bp, Zea Mays
ggaaattgttctgtcagaaatgtggggatgaaggtcatcatgctagagactgtagcaaaaatttatggtgtgagatttgtaggaaagacacccatgttacggcgaagtgtgtttggcctaaacagaccaaaccgaccatgcctatagtcgggatggcagctgatggattaggcttctacatgatgcaatttgctaaatctcaactcaaaaaaccaaaacctaatgccttaggtttggtaaaagtactggagggaggagtctctgcagaagatttggtaaaggactttgacttccatttcctgtggggacgtgtttggaaagcaaccaagtgccaggttgggtacatcatgcaatttccttcacatgagagactggatgaaatggttcaattttcagagttaaaaatgaagatgtcaggagtgaagatctcagtggttccatggatctcttcagccactgccaaggcaagactgcatacgatatgggtggtggcagaaaatgttcctgaggagttacgtaatttccaggctatttgcgagctaggctcggcattgggtgctgttgaggaggtggatctaaaagctttagaaatgcaaaattgcgtgaggttcaaggtgcatgtcaaaagcatctctttgatcccctctgtgcttgaagttggggtaaaaccttacctgtttgacatttttttcaaaattgatggcgttgaagaggaaggttggaatgaagagagtggtaacttgggaaagagagcttctgtggatacccagcatagggggtggtgggtaaagggaaaaaatgggaaaaggataaggaaagagacagatgaggagaaacatgtgttcttacaaactaaagacagtcaggctgggacagattttgacaaaactgtcctttccccaaaagatgataaaggaaaaacaaggtctagtgtgcccgagggactggtggagggctcagattatgatgatgataaagtgaatcttgaagatagtgaagaagacttgctcagttctcaagaattggaagctctagcaaaaagtgttggggttgatataagcacaccacaagaagaggtggatgataaaagagaggatgcagttactaagaagtataatcaagcggagaatgaaaagaaagggaagcaaaaagtaggtgagcaggctgaaggtccaagaaggagtcccagactggaaacctctgaagagatgaatgtgactgagaaagctatttctagagctgcagccaaagatgct

SEQ ID NO: 175767 - DNA, 914 bp, Zea Mays
ataagtggccactgtgtattttgccctgacgggtaggaagtgggcaatctttgtgagtcgatcaacgataacccagatagaatcataccctttggcagtcctgggcaatcccacaataaagtccatactaatgtcttcccatttccaagttgggattggtagagattgtaatggaccagcagccttcatgtgtatggccttgacatgtttacaagtgtcacatttagccacatagcgtgcgatttcgatctttatctttgtccaccaataatgctgtttcagatcttgatgcatcttagagcttccgggatgaatagaatagcgacgaagatgggcttcatctagaatttgctggcggacttcgtcatttttcggcaccactatgcggtttttaaaccataccacaccttgattgtcttctcggaagcaattggcttttccagctcttatcttctcccgtatatgtttcataccctcatcatttttctgtgcgtcaattatcctttgtaagatgactgactccagcttcaagtgatttgaagtcccatgctgaatcattcccaggttcaggttttccatctcctgacacaatgtaatgtcagaagtcctcatagttaaacaatggcaagaggccttgcgactaagtgcatctgccactacatttgctttgcccgggtgataatggatttccagttcataatccttgattagctcgagccatctcctttgtctcatattgagctcagattgggtaaagatgtatttcaaactcttatggtctgtataaatatgacagactttccccagcaaataatgacgccatatcttcagggcatgaaccactgcagctagctctagatcatgagtgggataatgctcctcatgccgacgcaactgccttgaagcatacacaa

SEQ ID NO: 175768 - DNA, 763 bp, Zea Mays
tatcacttatagcccactcggcctgcaaacctgcatgaccctgcaccgacaggtgtgtcccacttgtctgtctcccatccccgcattccagccttggtccagtattcgcatggggtaagaagcaatcacttccagtgggccatccccgtcagtttcttcctccctcgctcgatgttgccaaactaacgaacgccgcggacttccctcggttggcgcaacaaacccccatggagttcgggatttcctccaccaacgtcgcgcttccctgactccctcgcccggaaccataaatagccggccctggcgcctcctattgaatccagccattagcagccccaagttagccacgcaagaagaaagagagagaggaggaaagaagcccatcgatggttttgcccaggtcgcgtggtgctctgcggtgcgatctaaatggtcggccaagcgctgtgaacaaatcgaacggagggctggggtgttggctgggcgcggccaccttcggtgctcgtgccgccatgggcagcattgtgagcgcggggaaaagagctcgtggggatctcatctgtaagctacttgcctcgtcggggtcctgctgtcgggttgaggagcttcgcccgtgcccttgggaggttgggatagcatcaccgtggttgaagggaccaccatgtgccctaaatttctcacctggggtcagcatcgtcgcggtctgccgcatgctgtgtgcaggacccctgctgctccaatccgaggtatgcttcctaccacg

SEQ ID NO: 175769 - DNA, 885 bp, Zea Mays
cggatcataaccctcaccaccggagttgtaaccctccgacctttcagagagcatctcattgcacacatacaaaaactgcagcatggactcaggatctctcaacctggaatagtccaaggcgaagctcggaccgtcttcctcctcggagtccaggcaccttgaagggaaaggaaggccgtcgtacatccgagtgacggagctggtgttgaaacttggttggaaggggatggggttgaacacggatggttctcccccgacccccgccatgtctctccaaggagcgtccggcttctcccgacccgcaggtgggagggccggcgtagctgacaccactcgctaaatgacgtggggaactggtgtctcccacatcggaggaggtggtgccaggaataatgttggtgcaggtgcggctggcagcgctccaattgaaatgtcgatgctggctaaatccctcgagagggactcgatgccatcagccatcccgaaggcacctctagtgaacggagtgccctgagtggcacgatcatgattgctccatctctgcctcctgtgacaagaagggtggctacgggagattggatgctcaatagggacaggtgggatgagtatcatgtcatactcgatgtcgagagacattaactcaagactcccgaacctgatcaccgtcccaagcctgagtgggtggtggaaacctgccatctagagtattggcgagaactggaagtgtttcatgcgacaagcccctacctaacgcaccaactgtcggtgtttggaccatgggtccttgaccaactagtaaattatgtcgcgtggcgggactctagatggtgtgtgagaatacacaagcaattatcctggttcgggcagcacaaggccctacttcca

SEQ ID NO: 175770 - DNA, 476 bp, Zea Mays
caggtggctttggttacagaagactgatgcgtcaagaccatgggctggtctccctatccgagtgcaccataatgcaaaggccctcgttgatgtggctattacctcagtggtaggcagtggtgaatctgtgaagttctggtctaatcgttgtctccttggtaaaactgtggctgaacactatccaaccctgatccaaatgatttctagaagggctttaaagtgaagaacagtagccgagggctcacaaattgttaatgggtgtcagatattcggggaggattgtctataacagtcctagtggagtatctgtagctctggaacttggttgatggggtagttctgcaacctgacatcgtagaccaacacattttggcgcctctctgctcatggtacttattgtagcaaatcgacctatgatgctctctttgtaggctctatcccttttggcccttggcgatgtgtctggaagacctggg

SEQ ID NO: 175771 - DNA, 572 bp, Zea Mays
ggggtagaaaagaaagggtgcaacttctgggaaggctgctgcttcggctacctcaagcgagcccgcaccgaagaggaaaaagttgaaggtccttactcaccgaccgcactacattgaaccggccatagtgcctgaatttggcgatgagacttctttagctattgaagccaaaggacctgctcttaggcagaggattgaagagccggctgcaatgccgaagactgacaaaattgaagaaccgagaatcaaagagacgaaaacattagaagttctaagccattcggcaggagtggaggtgccgaagacacaaaaaggtctagcagcgacccccaagataaaaaggatggctagtgtactagatgtgctggagacaataaaagcttcaagctctactccagggaaaattgctaaggcttcgaaggcgcagattgaaaccgaggcaaaggtaaccgaagccgaagctacaatgggccaggccgatgccgaagctgggccttcagagcctgtcaaggagaaatcctcagaaactggagaaaaggcaacgagagaagaagctataaaacagattttgc

SEQ ID NO: 175772 - DNA, 479 bp, Zea Mays
gaggaaacctaaagaccctccgcagtccagccgtacgtggacgaggccttcgcaggcagactccggtcgggacggccgcagtcagcaacaggtacacaacatcaccaaccagcaccccgctggtgaggcccctcgccgccaggagtatccccccagggccgcggaaacagaactcgtggtcggggccggggacgtgcgcagcagccgcgcagattttactgcttattccacggcgaagactgtgcgcaccctacaagagactgcccagagacgaaggccaccagagacaggatggcacgggcgcaaccagccaataaccccagagttgtcacgcatacatatcaacaaccccctccgccatacaaccacagccccgctccacatccaccccaccgcgcataccaacaccaccaggaggtacaaatcgtacctcccccaccccacctccacatccgcaataacaaaacatccaccacccc

SEQ ID NO: 175773 - DNA, 808 bp, Zea Mays
cgaacaccgaattggatctcccccgaacaattcccctcaaacaatttcaccaatggcgcactaaaacgccttggccacggtgaccgtgcgggtgatccaaagaacactgcgttcccggcgattggcggcgatctaattgaattgggtgggtcggtgagcatcacaaacgaatgagactgcttaaacgagggagcagaaggtttgcactgacctgaatcgagctagccacgatgagatgttcttcgcagtgtattcgaaccggtttggggaaaatgcaaaattcgagctcgctggtgatcggctgggggcaatactgggtgtcggggtacttgagtaccttacggagcttgcggtggcttcaatttatagagctagtgggcggtggccgcaaatttgaagaaggacgcgcgacggtcggaggaagggaagagcactggcgcagtagcttggtgtcctacgccgtggcgattactccagtgatcaacggagagtgagagtaggctacggtgatgcggtggaaaggtagagacacgtggcggacgccggtgatggcttaacggcggtgagaaccttatccacgggttcggtgagcaaggggggaggcacggcggtgagttaccggagttatccttaggcgaagagctgctatctggcaggcttatctggtcaccggtggcgtaaatcacaacggcggtggcgcggatcgcagcggagatcggtcgtcggcggtgagagctctgcgctggcagtctgatccacttcagttattgtaccatggcgagctccattcagatgaactgacagtcac

SEQ ID NO: 175774 - DNA, 1833 bp, Zea Mays
gggaggggaaggaatgtcgtctgttataccgaacagcaacaggaagaaggacgaagcgccgagaggaagcagctacaaggcgtgaggaagcagcaatccggatgccctgtcaagaaatcgaaagggggttagaaaccctaggtcgtgaaatagaacaaaaaacaaagctccaaacctacaaagcacgaatccaccacgaatctgaaaagagaagaagaaatagggggaggatgggaggaactcggcaccaatcaccggcggcgatagcagagcagtgcggtggagaaaggggagggaggtgaagcagcgttatataacagcggtcacgacgggaaagagggaggtaaccacagcgttcgcaccatctcctgccatctcccacgctcacgcgcgcgctcgcccccgcgctgcacgccgccagcctacatccggagaaacgcccgattcgaccgcatcgggggagctaggttcgagggtagggtttgcatcttgggggcctggccgggaaggaggagaaggcaaccgaacaagcccacttgcatctcgggggcctggcccagggtacagtcgggcaaccaatcacgccctaagagactaagagttgtccaacacagcatgccaggcaactacagaacaacctcaccactcgtggtctcgatttcacgtgcccattggtgactgcatttccagcatcttctcttctcatatgccttgtcataaagcaacaataatggatgcttccaagatgtacgagaacatatttctaacctagcaagagcattgcatgaaggtgcacgccaggatgggtgtagatgccctcggagttggacatgaactgccagcagagctctttccaagatctgatgaaagccctagagaggttcataagtcatgatcaggcagaaccaattaagacgatgtgaaagtagtttgccatgatccttcatttccattgctgacaaggatggtcgtggtatagatttggaggaactcaatgggcttaatgatgtcatcatactctctaaaaggtggaggtaaaacttttgcgaccatgccgatcgtcgtagtgttagggtgagcgtcatacaatcggcatcgaaggggtggaccatctgaacagcctgtcctggaggtggcactaattctagagggcgcgactgctctcgactccctcatcacgatggcgatcgtgcaagtcatggacaccatgcaactattggagtctatggtgaggcacatgaggcaacgactagggaggcagaactttatgccatgactctagaacttgggggtatgacctcgatgacgaacctaaagagaccatcatagacacatgggagcatgtggttagcacattgtgctcggttgtagccttcttagagcaaggctacacaggctaagagggtgcaaggttaatcccggcagcaactatggacctaatgacgtcctattgtcactgttcagtgatcccttctcgagtgtagggcactggatgattgcggagaagggcttctgggatgtcaagaggccatatggtgtcattggtgctgaacttgaggtgccgacgagcatgtcgagatgccgctaagtggaaccttaatgcttggagattgcctcaccatacatgtcctcacacaaagatggaggagtggcatgcgccgaagtgtcaccatcccacaacacttagggaggcaggtgtcatgacaactgcatcgcttcttgaccataatgtcgtccatcatattttatacgatcgatggaagccttatctaaacagtcaataccacatggttgttttgagtagagacagatactggtgctatttaatatgtg

SEQ ID NO: 175775 - DNA, 590 bp, Zea Mays
agcacaattcttgtgatttgcctcccttcttcagtgttgggaaacttagttaggtgccactcatcactgacaaatatactctttagaccattcctatgcctaagcatgctcgccaatgtcagaaatgaggtagcaaatcgaatcacacctggcctaacaagatcaccacctagcttctctcaaattaggatgtgaattctaccatgcttatagatgaacctcgacactttcttagccatattgatgcagctattgaagtccttgatctttccaatgtcctctatagcaaatccaagcaatgggcagcataaggtgtccaaaacaaatggggatcctatccatcaagattctccctgcagcttcaaaattggctccattgtctgtgacaacttgcaccacatgctctcttccaatcttgtcaatttgcttctccaacaaatcagccaacatgttagcattagctacctcacttgaagcatcaacagaagctaaaaattaggtccctgccggactgtttactagaaaattgatcaagtgacggtgtgctatgtcggtccacccatcagacataagcatgcaaccatattccc

SEQ ID NO: 175776 - DNA, 574 bp, Zea Mays
agcagtaagatggaactatcacaagagcacaactgagggggtagtttctctttataactcgtcatgcatgtgtgcagaccaatagaccgggttcatgggagcggatcccaccgggttgtcgtacacgtatgcgttatctagttacaaaaaagggaaacaaattcgaccccttagctttgctctatggatagaacttacagagatgttcggcatcggggtaaggtactcctccagtcatagctagatggttgcccctgggacggtgcattctcgttacctcgaagggtccttcccagctgggggagagttgtggagcccttcttggcgtggtacttgccgtggagctaggtcctgacccagggttcccacctgcctttgacataggagtcctcgtctctggctgtggccacttctgcatgtacctgtccgcagctcggacccgtggggaatccggaagggcctccggaggaaggcgtgcttcagctccattgaccggggaacgcggggtccctctggggtccgcctagttgtcttcaccggagtaggaacctccggcgaagatatccttcaggtc

SEQ ID NO: 175777 - DNA, 436 bp, Zea Mays
ctcgattcggagttataatttaggagatatcgttgtttgaatctgggtatgttgctgtccaaaaaacagatttccgcaggtgggcgaacagcattagtattagcagattctggggatttttcgtgggaaattagtgataataaatatgataatcatgtagagctttgtcatacctttccaacgagtacttatgcgttcgattcggagatataatttaggagatatcgctgtttgaatccgggtatgttgctgtccaaaaaacagatttccgcaggtggacgaacaacattagtattagcagattctgggtatttttcgtgggaaattagtgataatcattatgataatcatgtagatctttgtcatacctttccaacgagtacttatgcgcttgattcggagttataatttaggaggtatcgctgtttgaatctgg

SEQ ID NO: 175778 - DNA, 518 bp, Zea Mays
tggaagacagcccagccgcctccaatgtcctttcgcgggggccatcgacaaggtcgttagggcaacaggtgtcgtggtggcatcaccctccaggggaggccgggagggcaatggagctcgcctcagcgtcatcagggtgggaggagatgcccatagacgaagggttccccgctccaacggaggccataaaggtcatgtcatctacatccgtggacggggtgatgctctcccctggcctggcatgagcaagaccactgcttcatctgcctcccacttccgtttcttcttcgctttgatggcggcgtcctcaagaagagggggcagagaaaccgtgacattcccaagccccaacagagacgcacgaatgcacgatggtgaaacatcgaacaaagccgaagagagaaaaagaagaatctaagactcaccaggtcactcaacctcccatggttgaaaagcaggggccattttcgtccataaagtctgacgtcacatttgtcgtgacgataagtacgcgggcc

SEQ ID NO: 175779 - DNA, 474 bp, Zea Mays
ctcggagagcgtttcaagtggatggcggaagcgcatgaggctcttgacagccttaaaaacctcctaaccagggcccccgttctggtccctccaaaagacaaagagtcgctcttgctctacatagcggcgaccacctaggtggttagtttggtgcaatggtgctcgtgatcgaaaggtaggaggaggggtgcatatgtccgctccaacatcgcatctacttcataagtgaggccctaacaggcgcgaagactcgccaccgctaggtacagaagcttctgtacgttgtactcattactaagcgaaatctcaaaaattatttcgaggtggttagttcggtggtcgtggtcgaaaggtaggaggggtgcatacgtcctctctagcgtcccgtatacttcataagtgaggtcctaacaagcgcaaagactcgctacccctaggcctcaagtacagaagctcgtgtatgccatcctcatt

SEQ ID NO: 175780 - DNA, 292 bp, Zea Mays
tatatatttgataaacatatattcaatacttctatatttgtgtttaaactctatttttgtacttgcaggcttcatgctatgatgagggagaaaattggtggagagttgattaggtggaatgccactaggttcggcaccgtctttatcttccttcagagtttctgggatagataagataagtttatgcaatggatggtgtctgatgattggaaaaacaacgcatggaaagatgaagcagatcatgcatttacttatgattgtttgttaaatagaagatggtggagtgacatgg

SEQ ID NO: 175781 - DNA, 743 bp, Zea Mays
agtgcaaataagaaataaagctatgagaaaggacacaatgattttttctgtggttcgaccaagcctcaaatgcttgcctacatccacgttagggttagccaactggcttggagtccatttcaactccttcgtccttttactcaagtttatcacgcttgtgataaaccgagacttctagtatcacttgttgcagttacaactatcctgaggctaaccacaacttggtagctctccattggatgatgaactcaacccgaacgcttgcccaagatgaccactagctcttatatgtagccctccaccacacatgcctctctctatgactagatcacacactaatcacttgatcttgcgaaggaacacactagagagggctaaacatttgctagaatatgagtatacacttgtagaggcttgcttcctatttgatggaggtatggagggggtctatttatagcccccatggcctaaatagccgttggccaaaatctggaaaatatgcacattcaactagccgttgtgccgatcattgacccaaagtagctattggattctaaggtctggtgcaccaccgaacccgaggttcgccgcgccaacagtgaattccttcgaggtaaagagccacccattcactgtaggcagcccggtgcaccgctggacctgaggtctagtgtgccaagccgccaagcccttctacagagcttctacgcacctgggctagtgcaccacaggatcggtttgga

SEQ ID NO: 175782 - DNA, 463 bp, Zea Mays
ggcatcactccactcaactttaaaggaaccacactccaattaacatagtgaagcttggtcacgccgtgcagtaaccacacttgtactcaccacacttgtactcaccgtatctacaatgggagactatcttaagaccaatgagggataaagtctacggacatggttaagacatgtttaaccagatactagacttgttagctcttgttagctcaggaaatatcgtttactatatttctcgacatgtgtttagtacgttctaacatttaacacatgtagccacacattaatctttaattctgtttctgtctcagacaaggcatccaaccatgactgatgtccattgacaatcatagtttccattattaactatgatttctacggatccatggccttgctccagtgttaaaaaaataactagacttctaccgagatcctaaaattagcaagcaactccttaacgttg

SEQ ID NO: 175783 - DNA, 1116 bp, Zea Mays
ggtgccacgttccctgcgcatctgacactcagccctctttcacttcttctccaccctatctttcttatccttccgctactacgttgcccgcacgcgagccacctctttctccaccgcgctcttcggcaggggaacggggtcacctcacaacaccagagaagaggactgaaggaaggaggaagatggggctggaggatgtgaaactaaaaatggggaaaggaggaggggagtggaaccaaacgaacttacaaactccacaaagcctagctcaggacacattggagggcaacctggattcaaaacacatatgggatgatggcctcatccgcacccttgtgaacttccatggccttcgtgagccagcgagcgatcttcacgttattaagaagtggagcactcagccaactgccatccgatggggccttggtagtcatcgtaaatagtggcaatcgtctgccaatgagaggagccacccccatggaggtaattcccaatcttctcgccagcgtgaccccgcgatcgcgaagaatggacagcgccgcaatggccccggtcgtccttttctccccttccttcgggacaccccatgctcaagtttgaggggccttcgagggtgcctcaggaagaatagcaggaaggccatggacggcggcggatggagcctcatggttgcgcaggtaaaaccattggttgtgccaccccttgttggacgatcataaccacaaggggatttaccctttgaattgtgacccccacaagtggatggtcgtgcacccgatttgggttgccttagctagggcatccagtgtcggccgcttatgaagcaactcagccgagaagaagtagcaccaaagaagaaaatggggggacatcccgagatatccctcgcatagggcagcaaaagcggccatatgttaaaccctattgaaatttaggtgatacaactggatcttgtaatggtgcagcatccccaccaagaaagggtgaagagaaattatgaagacacactcgtgtaagtgcacgaacaacactacaaagccctccgactgatctgtaacttcttcgaagccggggagcaggtagtcgccttcgcggaggagcccgcgtgagacaaga

SEQ ID NO: 175784 - DNA, 661 bp, Zea Mays
ctttcctgcatattggtctctgccttttagctgtgaggacctccctttgcttctggagatggttagttttgatgcgtagggctcgcagtttaagctggtcttctgctaaaattcttaggtctttgccctcttgaaggatgtctccgtctccttcggttgggaggtatccaatgggagcaaacctcgacggggggtcgtcgtgtgggaggtatttgaagctgcttgtgtggacgttgccttccagggtaggcaggtcttcggtctgagggtgcttgttgttgactgcctcagtttcgttgttctcaaatgtggtgagcggggtgtcttctgcgagggttgctttgtctttcttatcaatgagggttgtcttcatagcctcgtctagggagcagctagctctggtggtcactttcttgggatccattgcaggtgttggacttcggagcacgaatggtgggcaccaaatgttggacctgcttgacatgtggttaggtgggcccgatcaatcagagacaagtggaactcagatgcaagacaaaacgttaggtagggaactataatgtctcattctatgtgccccgtcccactacgggacaagggtatttatagggccgttcagggataggtgacccaaagtatggccctaccctcggctgccaac

SEQ ID NO: 175785 - DNA, 469 bp, Zea Mays
tgtcaaaccgccgtggacgaggcgtgctctaggtttgccacgcctagaaacgcgtcgtagactaatacacgtgtcggtgttgccagtaccacatgtaccaggtagaaggccccaaccaagtgtcagcgtctgaagggaataacagagaagacctccacgacgattggggtgcagtatatggcgagagtgccatcgtagctcacgtttgtcatagcggagtagatgaagtagttgaggatgagatgacgacgctggcaacaagtttgtgctggaagaagaagaagacgtaggcgaggtgacgcatcgaggatcctagagttgcggcggcgagagccacgacacacatgaagaagagactcgacgactctagtttagtgtgacaacggtacttgtcggcaaagaaatcgatgatgaacgtgatgcagaccagtgagagagggtgtcgacgcagcatgcaggtgcagtgcag

SEQ ID NO: 175786 - DNA, 529 bp, Zea Mays
cgtggcgggacaatggcgagccgctgtgtgcgcaacaacagcgagcagaacacgcaaggagcggagatggcacgagcaaagaaataaatatggcgccgcgatagcgttccacaagtagagcagtaaatcgtcgacggtggggttgctacgcgagctccacacggggttggggattcggcaaacggcggcacgcacaactcaacagcaggttcgcgcacaggcaatgaagcagagaagaaatggatcggctagaggaagctgaagggagcaggaggtaggaagcaagcacagctcgagctttataggcaagggaggagagtggtttgcggccagatttaatactccattgatgcagattgaaggacagcgttacctactcgaagaaacagccgcgaccattaatggctggaagaacagcaggtgtttaatggagaggaaagaacggacagaaatatcgcagcaagtggaggaggaggcgacgggtcgcggcaggagctcaggcgatgggaggcgagcggacagcggctgc

SEQ ID NO: 175787 - DNA, 591 bp, Zea Mays
gaaggaaaagttcatcaagacaactgttgcatttaggaagcagaaataatttatttgctagtaaactccagtaattgatattgatagcaaactccaaaaatctacaacgctcattatgcataatctctctgcatagagatagaatgcacgattactaccaagtgcacaagtaaagtaacatatgtggtaaaattttagatggatttaccttgtctaatgaatcggacatgaatggatcaaacaaagacagagaaccattggacatgaaagacaaacataaatctccgtgtttggagactgacgcaaagcatcagcgatgctaatcatggattcctcctgtgaccccaatcagacacaaacacaagtagccacgttcctaccctaaacacccagtttcatgcctttagctgctagcttgaaggatgaacagaaggccacatcgctgcatctgaaggggaatgaaaatggatttgcgatggctcttgcgcgtcctggcactgatgggtggagaggtccttgcaaggcgcctccaccatcacagtttatttctccatctccgaccatctgcatatgagaaactctgcctcggat

SEQ ID NO: 175788 - DNA, 407 bp, Zea Mays
gtctgatggtgaatctgggagtttgtttccttggacggaggagtcctcggatgaaggcttggattattttgttgtgttggatgtggctgcggcggagactttgccgcgtgtggagggtgccggggatcttcctagtgcgggtactgggtgtaggcgacgaagggtggtgggaaaacatagtgtgggtgaattttcgcgaagtggcaggcgccgtcatttggggatggagcgtggccgtctccgagtagaccgggttggtaaacgagaattgttgtcttcgccgattggggcgagcataggcgaggggaatcttcggaagctttttgagggtgaggaattgaggataatgttgtttaattacagggagatgggtatcatcccgaaggttgagccgatgtagtatgtga

SEQ ID NO: 175789 - DNA, 623 bp, Zea Mays
gtttcggaactctttgttcactagtttttatcgtccttccctttggccttgcattatttggacgcaataagcttatgccatctacatcatattccagtccctacatgccatacaaagaagtatttataggtacaaatgttatgatgtcagattataaatagttactaacattaaatatacagaatatctgcaatttaataaatttagatttcatacctttctaacatccccatactgtgctccttcacaatcatcatttccaacaagcgtcatttgcagttcagattgatgatgtgcatcaatatttaagcctccatcctactcattagtgcattatagtcaatattacaaataatgtataaatcatcccatttgtttgcattatacataaattacattgtttttttgccataatattacctgttgtcgtgaatgtactgccacatgctcctcgttatcacattgcgatacatgttcaccttcagcgtttccaacatcatcctcttcgccctgcaacgtttaatttttacaattagcaataattaagttctgaataaaatgttcaacaattttatataaaagaacacccacatggttgccctatccagtagttgcaccaccag

SEQ ID NO: 175790 - DNA, 546 bp, Zea Mays
cctagccctcgcgctcgccgctgtcaccatatcaaggcgctatggtgctacccccggtcgagatagccttctgagcatcgaggtggtggtcgaatcgagggaggtcgtgcccctgccgcccgtctcctgctcgcctcctcgcctagctgcattcgtccctcgcccagccacttcccctctcttgtcttgctcgtcacgaatgccgtcctcgccgtggcgcacacgattgttgtagcagctgtcgaacaggtgacaaaccctatctgctttaccttggatttatttcgcgtttttgcttcttcaccttctttagcgccatcacgcttgatttctattgcagtctcggttcctcatccctggctgggtttcgttcggatcacgcagcatcgtgcagcagcaacatggcaactacgtcatcgcgaggcgaagcatccagttcatctccaccgcgaaaaacactggtgagcatttcattcatggtgattttgatgtttttaaaattttctctgatagttgcacatgcgcctcttgcttacccggccgcca

SEQ ID NO: 175791 - DNA, 301 bp, Zea Mays
tggatggcgggttgatttaatcaaacccgagggccctttttgtgaaaagcgcgtgctaaagaggtatgggcttatctgagccgatagatcttcatccagcggccagggtttgatctgatagttaagaatcagcaggcaaacacgaccgtcgatcgcgacatctgtggacatgatctattgacaacgagaggcatctgcgaccctttgataaatcgaacggacgacaccatgccccgggctgatccgtgtgcacagtccgatccgaacgccgatttatgatccaatggtccatacaccttca

SEQ ID NO: 175792 - DNA, 890 bp, Zea Mays
gtttgaaactgctttccaagaacatcatgtgccccaagggatcgttcagctcaaggaagatgaatttcgggaactaactcaaggtggaagatctgtcagagagtacgtgcacaaattcacagaattagctcgctacgcgcctggcgacgtcagcacagaagccaagaagatggtccgctttttgaaaggactaagaccagaactcaagaccatcctcgccagccaagatttcctcagcttctcgcacctctcaaacaaagccatacaagtggagagggcaagggaagaagaaaaaggtcacctcaagaggaaattccaagtcctccgagctcaacagcaagaccggcaccagagaaatcgatcctttgggttcccacccaagggaccaagctacaacaagccagctggacccactccatcacgtttcagtcagtagagtcagatctcctttcaggccccctcagtcgcaagaaaccaaccaccagcaaatgcctgttggcactgcggagaccccagtcacttcaagaataactgcccccagttgaaggcatcaggacctacttactccaactcggtgaatggccccaaaaatgccccagcgcccgcctccaagccaccctcctccatcagccagcagagcaagaaccagtatcatggcagggcacgagtaaaccacgtcgatgttcaagagggtgagcaagctccaggagtagtgctcggtgagtttcttgttgaatttactcccgctactgtactttttgattcaggagcatcccattcatttatagccactagttttgtggaaaagcatggcattccctctacccacctagaaattcccttggtcacccgaaccctagggtcagaccttttgtgccagcttaaatgct

SEQ ID NO: 175793 - DNA, 531 bp, Zea Mays
cggcggtcagagccaatcgaattgctcgtcggcgctgtccaacaccgccgcccgccctcgttgtggttgtggcccttactcaccaccgcctgtatgcatgcgccctcataatctatattcgtttagcaatccgagtagttgctgtcgtgatggctctcgagtccttgtcgcaaaaaccgagagtctcgccggagtcctccaccgtggttggacttgtgccgctgtcatctagccggggggaggaagatgagatatattcctcgttagatgcgctatggacggtggtgattgaatcgggtgaatcggtttggtcgggttgggctgtaaccgtggatcgttgatcggaggggcgagagcactcggggattcagaatcgatcggactgttggatcgagatcagacgttccccgcagtttaccgatttgtttatagggagcctgatccgaaccgtgagatctaatttagacggccagatttggccgataacccttccctagtccatttgacacataagtcctcggggaacatgga

SEQ ID NO: 175794 - DNA, 1024 bp, Zea Mays
cttctcttgtcggtggcacgcttccaaagcgcgagagagcgcggccgccgaggcggctagcccccgctctcgctcaggctctcagctctgccgctttgctttgctttgttaatggccttttttctataacccatatggaccatgctgcgcggattaaagaaacccaaatagcatagacacaagcggtaaagtccatgtgaggaagtttcatctcaccgtggtatgtatctcttcggtttcgggtccggaacactgcatattttattttattttattttatttttctgtggctttctattgggcttttctttctccctccccccgaaccgaatggactggaccacattgtggtagtagctgtttccggcaacaaaacggtgcatttgcactgtgtcctgcagatgggaccggctcacagtctatgctactgccgctcgtatttcgagagcgatgaaacccccatcttgagcctagtgctcgtgtgtgccagcactagtagcggattattctgcacttgttgtcacgatccacgccttaataacattcctgacaccacggagcgagctatcggccaaccacacgaacatgcgcctacgccttttcaatagaaaaatccccatccacccccatggaaagcaccatccgaagccactgtctcgtgcgtgccccgagctcgttttgctcggcttttttttttaccggccgcgccccatcaccatgccatggcggctgccactagtggagctccagcacaatccccgcttctccgacgcctgccacctttggtaaaaacaggaggattcaatttcaatggctgtcgctgccatgtgttttcacaggccctgacctaggctctgagagaggagagagagagagaggaatttaccactcggccgcccccgttcctgtgtcgcccgcgccggacagtcccaagcaggtcaaacctgcgctgctgtgccgctggagagagaggttctaatgctcttctgtcccgcgccgcattaatttcgcgattttgagaggt

SEQ ID NO: 175795 - DNA, 590 bp, Zea Mays
ccaacatagggagtacatgtaatttagttgatcgaagccacttgtaactggggtacactgttatttcctagcttgttttactacagatgtttctttgatgaaaatataaaaaaataggagcacaatgagtggactgcaatgcttcattgaacatggatagtgtgatagcggattgaacccaacaatgactaaatcaatatgttgcagactacgcaattttacttttcatatatgtgcatggcagctgagtactatagtaattaggaaatgatgattgtgtgcaacaaatattatcctttagtttattttctatttaagcatttacatacccaaattaatcatatctgattttggtgatatggagcagcagtaaaatatcaaaaaaatgacgctaccacctaccatatgcagttccttttcgtgaacacaaagaagaaatgcatgccaattgattaggaaatataatttgttggagctaactttaagttttcataagtttcatttaaactcgatcatttaaacctgatcaaaatcatgaactacctttagcattagaaattaaacgtgtgttggcgcgtgcagcagacttg

SEQ ID NO: 175796 - DNA, 1027 bp, Zea Mays
gtctgaaaattagtgaacagggctgactttggagctctgtagttctaaaaatacaaagaatttgcctagggtcaacacatcaaagtctagagctataataggagaacaactttgcttaagtaactaagctttgatcacatacaaagtttggagaaaaataagctcaaagttgtgctgtcagtcactctgatgactgaatttaggtcaccagtgacattggccaaacttttgggtcaaattagagtaagatctattgctcgattgagggtaggtgctatagtcgatttgtatctagatcatagggctacaagtttgctacagatgaattagcaagctcttatacgaaaatacaagatctaggcactacacatctgactgttaagcgctctcaatcaggttttcaatggtagtgtccggattagaacaccggtttcagatgactcaccgccggcgaccgtgcacccagatttgcacccgccacggtaattcgtgcccagcgcagttgaataacgcagaagggtaagaaatatcgcaccgtggatgaactccggtcactaatctactccggccgccgtacccgcctatgtcacggccgcttcggatagactcaccggagttagccacctctcgaccttgcgtcacatgccttggtgctttatccacgctgcagtgagtcaccttagcccacccgatcatcgccggtgagctcgccacggtgaaagccatcaattgcttgcaccagtgcacccttttctctctggccgtcgcgcgtctttctccgaattagttgccaccgctcatgggcactataaattgagcacaccctcagctccgctatgtaattgtgcacccaacacaaccactcgtgcctccaattactcactagagcccccgaattgctcacttccccagaccggttttccgccgccatgaaaaggatctcaccgtgaccagtgcgctccaggtccgatcttgacctctgctctcttgtttcagcatccttacatgcccctaatgctcctcgacc

SEQ ID NO: 175797 - DNA, 473 bp, Zea Mays
cccctcttcggagtcttccaaatgatgagaggcagactcattttgagatgctagctagcacaaacgatgcagagatagatgatgtacttagtatgttggctggggaatcatctgactcgacccacaccgagccgatggctattatggctggacaagagcttggcaaagcggtggagattcggaagcctgaaggtgctcgcccaaagcgtccacgccgagttagccgcccgactacccctgttgaggaaaagaagaaaaagaggcggcttcggtgactgtcatgcttggaccagggtgccggtccttctgctctagttcgtgatgaagtatcagcagaggtccttcctgaggttgatgccaagggctgtgatcatgcacaagctgctatctatatatttgatgaagatgaagaagaagaagaggaagaagtcccgctgatccgtaagaacagccgacattacagaagtagtgag

SEQ ID NO: 175798 - DNA, 298 bp, Zea Mays
gattagattcagattcaatgaaacaattgggatgttggggatcaatgagacgtgggagattggctgtgggatccggtgcgcaacacatagcaacgacacaacacacaaaccaaattattggttaaatgaaaagcggaaagcagaaggtaatcaacaacatgccttcttaaggcccgagagtgatcagcgacatacataccgatgatgaggagcaccttcgtgaccttgtagcgattgcggcagtaatagactcggggaccctcccacttgtcgttgtccgcgtacctgcccatctcgc

SEQ ID NO: 175799 - DNA, 334 bp, Zea Mays
gctcatctccttgaaatctttcatactcccaaggtctgattaagatatttcattttacatgcccttgaccacccttgtttctcgatgatccatgagcattcattttatttcgcacatccttggtgatctcgttaattccttataacttccctcggtaataatttctattacttcaaccattttgttggaaccttacctatcttacccttgattgttttctccacttcgtcagtcttgccttaattctgtccacgattacgcttttcatcattatcacctttacccttatcacctctatatcttaccttgatgtttatcttataccgacccttta

SEQ ID NO: 175800 - DNA, 674 bp, Zea Mays
atgggggggtcttcgttgggtgttcaaccgtccgcgctccccgcaaacggttcaccggccaactctcacctcggacctgttcctcccctatatagttacgaaggccatgattcctgagccatggtcaacgcaaactgtggatcacgctggatgcggtccgccgaagaaagcttgacccgtagctagtactagagagcgaggaagacgtgcgccaccggggtgattgacgggttgccgtgatcacctgagtggggactaccgcagtcgggcttgctacacgctggtgctcgggaatcagctggtcgagaaggactgcgggacgctgggacctgggcggggtttcctgtggcgcagcggtggactgagctcaccggaatccaactccacagtggagccacacctcaccgagttctggctttatcacggcgtggatccaggggttctcggcggtactcggcgctgtagtttttgtaagcagctcttgggggcggcacgcgagcgctcataggaagttccggtgtgcggcgaacctgcggtatggcctctccctaatctaccgtttctcatttcgacgtccatccatgcgaagctggggaagagtctatggtcgctcggtttatggcgatgtcgatgtgtagggcctagactgtgtaggccggtagctgggattggcc

SEQ ID NO: 175801 - DNA, 558 bp, Zea Mays
gcgatggttaagaagctgagatgagagaagtcgcatctagattatatagacagaggaaggcggagatgagctcgactgcatggcgaacgattcagtcgcggccaacaaatatgagtttctagggatcgaatcccccatagatcggcattgcgcatgattcggtcgtcttaatttcctgctacaaggggattctggccgggtggttggaacggtcagcgggatccgcgcgattctggcggcggacagcgtggcgcgccagcgcaggaggttggaggaagcgctggttgctcagctcctcctggtagcgacattaggtgagtgcggcccacggaatccgtgttgccagtctggtgatgaagattctgacgagttggccccacatggtgggcgtgagggaggggacagcgcacgggtccgagagtgtgaccgggtctgctgctgaccggtggccgttagccagtgcacggaattgggctggcgcggttgcatggttagtgggccggggcaaacagaaagggcccaagccgaggctcacatttttctttccttttatatttt

SEQ ID NO: 175802 - DNA, 700 bp, Zea Mays
gaaatggagtcctccctgataccacctacccacgatgcgacagtctgcctcctctaggcgagcacggagactatccacctcaccatgagcatccttgagcacagtgttggtggcgaccaatctctcctgaaggtccaaggaggtctgtaacgaaagagttggcatcccgcccaggctgaaggacatccaaagtctttcccctgtcccgtcgagatcacttggctgagaaaggaagaaaacgggacaagcaccatcacaagaatctagggacgggagaaggaagagcctgtaccctgagtcaatcatctcttgatggatagagcgcaacatcgggagcgctcttccaccggacgcttgcctgagtccataacgggccacgaaggaatcgtcccgaagaaggtagaagcaaggcgcaacaaaacagctcaagggagcaattatttataagagggcacgacgcacgaaaaaataggacacaagccaaacatcacgtatgaaatgaagcgacgatttgacaccaagcttgcgaaactgtggaagtacgcgccgaaacaaaaggcactgcccgacccttcatcagcccccacagggagacactctcccctcaggggctacttttaggggaatgaccctcggtccctaggacccaccagttagagagtgtgctaaggaaaggagcccctaatcgctaggccccacc

SEQ ID NO: 175803 - DNA, 694 bp, Zea Mays
caagaagtcactgaaaggatggattggagcatacttcatcccaaagcgccctcacttcatcacctgcgatctccctgccacccttagcccatatttggttaattaatatatttcctacactaaaagcttcggtgaatactgcagctagatcattcgtgaaaatgttaaagttcgtcttgtttacaaccttaaggtgggtgcatcctgccttctcaaaaacggcggttgtgccccgtgtagcgacaagtgcgcaaaagtcgccttaccccttcatcacttcatcaaacgcatccacttcaccttctacccatcccagcgcaataggcagatcatcgggagcatagctagctttcttccgaagccgccccgatagaatggaagatctcgcgcaaacgcgtggagcaccgggtgacaaagccaaagaacgtatcacgaagatttttaatgcctctgtcaactttgagttctcttctctcttcgttttaacctcttgctttaagttttcaatttcaagatcaagccgagagacattgtcactgtgacttgtttttgtcttttccatttcatttatcaattgttggatgtgtttatcttgctctacaatattttcatccttgagtttcttctctaattctatatctttgtttgatttttgagcttcggtcagatctacccaaagcgattgcaccatatc

SEQ ID NO: 175804 - DNA, 354 bp, Zea Mays
ttgggaagatcacaaagagaagcaaccaaggcctcaatatcttcaggagagggtcgcactctaagacccagatcactatcaccagcaggaggattagacacgaaattgaaaaaggacttagtaggtggcagattccaagcagaataggcaacaggagcaccaacatttgatactttgcctctcaagatcatgtctagccggctcaccaaatccttagcaggaattctcctattagtaacctgagtggagtcggtaacaccactgtacaagtaagccgagtatgctctgtccttcaggggctggatgttcttaaaaacaaaatcagtaaccacagcttcggcggtcatacctctt

SEQ ID NO: 175805 - DNA, 697 bp, Zea Mays
taaaaattggagaacaaagccctctaacatgctttgtcagacgcactgatgggtgttcgtgatggtacagtagctgaacaagatcagattcaatgaacttcgcagccggcaatctccgcgctgcgatccatgctgtccgccacgattcgtgctcagctcgggcaggatattaccgcgaacgtgaaaagattggagggggaatggattgagtcggcttcactatacccacttgcatcagcgacgtggccgcgcgacagacgtcgtcgtgccgccgtttacctcggtcacgacatgtcttaggctattctaccacgtcgtcgcgggttgtggaggataaacatgtgacggccgtaaccttttgccccgtgaacgccacagtggttcgcgccggtgactcaccccctctcttcgaccgccaacttccctcttccaaattcggagccatcactcatggatactataaattgagtggatagctagctccgctagattgttacgaagctagagcaccaatcctagcccccgattacccaccgtagcgcctgaattcggtattcaccccaaatcggttgatgtcgccacagtgagacactccattgtggttagccatccttaggtccgctcctccccttctatgccatgtttaagtatccttgactgttagtgttgctcatcgaccaaactgcttgaacgctac

SEQ ID NO: 175806 - DNA, 272 bp, Zea Mays
atatgttttctgctgctagattaaacatcattggatcattggtgggcggttgggcctgacaggaaactgcttttccttggcggtcggtgagaaggacgatcttacttgcgcaacttatgatacccttgtgcttagttagccaatccattcctaggatcacatcaatcccttgggatggcaagacggttaagtctgctaagaacactaccccacttaaaagaattctgacctgggagcatttgagctggcatagaaggtctgaccctggggtt

SEQ ID NO: 175807 - DNA, 506 bp, Zea Mays
ctttgagctgggaagggttgttcccagcttctactttattcagcaaggcctcagaagattctgatcattgccctttgattttaaagctgtgtgaagaagaaggtacggggaaaaggagatttcatttcgagagtttctggaccaaaatgccaggctttcgtgagttggtggcagattcctggaaccagccacttcaaatttgtggtcatctggagaggatctctctgaagctcaagaggctaaccagagccctgcagtcttgggggcacaaaacagtgggcaacattaaaattcaactgggtttagcaagagagattttacacaggctggaaatggctcaagacagcagggtgttatccccagatgagttatggctgttaagaaaactcaagcaacagtgcctggtccttgcttccctggagagaactgttgcaagactcagatctcgagttcagtatctgaaagatggagatgccaacacttccttcttccatatgcaggcctgc

SEQ ID NO: 175808 - DNA, 656 bp, Zea Mays
ctggagctaaaggatgtggctgtttaccgatgttctgcttggtgtttagacccgtccttggtgcctgcttcaagggagctttggatcgtcgaacctccctttgccgttgatgggatgtcttctggcaggagaacgctgatgtatccaatccgcatcacattctcgtctgccccacggagggatggatccgatcctaagcttcatgctattacttcgggcggggatggttctggtcacgtgcagcagggatcccctcctttttcaagacctccccattcgagtgggagaaggggagaacatggtcattcgggacgtctctcagttcatgagcgtttgggcccaagagatgagaacatgcagcagcggagcattagctccggggtggcagtttcagatttgaggagaactttggaatctgatggggggaccttgtctcctaggctggtagagatgactgatgacatggttcttgtttcaccggtgaaggcgaagcagctgaaagtttattttcgtcaaagattcaagaatgtcctgaaccaggaggaagctggaactcccaattctgtcactgtgcttcctccatccaccacagacgtggcagctgctgacacagatccatctgagtatcctgtttcagatgttgacgctgtgttggc

SEQ ID NO: 175809 - DNA, 917 bp, Zea Mays
aatttttaaagttttatgttggttaattaaagtggattttcgaaaaagaaaaggaaaacacacttctaaatgtgtttctggtctttttctcctcatttccttacagattggtccctggtacactattcatctgagtctgagtctttacgcataaccccctggacttttctaacctctaatctgcggaccctagctaggtttaacagtaaccgtggcaaaagggacagcggagcggcttatcagcgttggtaggattccagtgaagggtcaggtgaggatggggagcctctggtggtcacgtcaaggtacgggtcggtgtcgatggtgcccagagctggtctggccacggactgaggcggtggagctcgtcggcgatgtctgtaccggccataccacgatggtatagttcaattagactgcacagggagcttcactaagtggcagtgagtgtgtgtgcaaggaattgatgaatgggtggctagattacctggaccgagggaaccggcggaaggaacaaatccggcgaggtgatttggcttctccgacaaggtaacgttcggtctgagtggctgggaagctttgctagcctctgggggaagctgcccggggagctagactggactaggataggctggagtggccgggctttggtggccgaagctttggcaagcttgcgggcggtgccacactcgttattttggtgattaccgacgtccaatcgccgacaaaaagtatgaggcgtgcagaagggtaaggacgtagggctgaggcttcttataggcaagggctcgggcacagacgcgttgttaggcgagcggtcgagtcgatcggagctcgtggcgtgcgcgggcgcggtcagagcgcgctcctgagtgccagccatggtcgaacatgtggaggatcgcttctacccctat

SEQ ID NO: 175810 - DNA, 482 bp, Zea Mays
gcccataacctgaaattagccggtgctaaacctagacggggtgatggcgagcacggaagggagattcttacctgcgattgaaggagtagcgagctcgtccacggttcggggcggatctacgacatgaacagagcgtcggtgaggtattcctagttcccagattccgcaaactagcgcactaacctcaacgctacggggtgctacgcaatcactggaggctactgaatttggcgcaagggtactcaccagtcgcgatggcgaaggagactgcgcccacggtgacgcgcgaactctgtgacggcggagacaaattgagcgcccactggtcagccacctgccccataatcgccaccggaccggaccagggacccgggcgaagctttcgggccgcacacggggttccaatttggtgccgagaacgaccgccgacggtgagggcggctatccgcccgctcggttcccacggcccacggcgatcgcgc

SEQ ID NO: 175811 - DNA, 737 bp, Zea Mays
gggtccttcccttgagaatatatacgcggtcctcctccctcgacccattaagcctaggataatcttaatccctagaagccgccgcgacccctgggagaatataatctgtgtctgccgcgcttgacgtctcgccgggccattggacggtgctcggtgtggaatcgtggggacgcgctactggattggaacctgggcgcttctccggctagcgtagttcatcgccgcgctgctatcctccggtgagagtcctctgaccgcttctgcttgttcatccatccgtatagcgttccttagttttggattatgcggcgcgggtctagctgtgttctgtgcgcgttagggcttttactggggttggcgaacgatcggtgttcgtctgccaagtcttgggcatgcgtcagatggccggtaatggcggggagctagtcgcggcgtggtcggccaaacctgacgtcgcgaggttgaagaagccaggggggccctagattctgtgatggacggccaggatgactaggggtagctttttactcggggtcagggtgaaccgtcgatttggcgatgggcccttaggattgcatctggtgccttccttcgatcgggtgaaggaggacctttgatgccagatcgggcgggtatgactggggccgactgtttaaaatcatgatcgttgatccctacgcctacggctgggatcccataccgattcgcgaagtggacagttctaatctggagcgcgc

SEQ ID NO: 175812 - DNA, 694 bp, Zea Mays
attggagcacctgggtgatgggaattcatcactgaaatccttcaagcgctgcagatccacgtaccgtcgcgggtagctcatctgctgggttgcgggagctctaattctcgacctggggagtcatcaggaccctgggtgcgtgtctatggatcaaggaagccgatggagcaagcggggatcgagcaattgctcaccggcgtacggtcttcaccttggagccacctgtaccgtgggcgggatgcgtgggcatcctatatccaggtaaaaagtcccctggcaccttcgctttgtcctccatgagatttttgcggcattcggttctgtgcttggtgcaccgtggcgagggacggccatagccggccatggccaccaccgcgctggagctgtgggtggcggtggttgggcgccgtggggaaggatgacgcgactgccatggatcctctgatcgacggctagaaactgatacgcacttaccccttcgttggttgaataggtgtcgttggatggaaagagaacgctcaggattacatcaagtatttagtaactctcgagcgtcgatccctgttccaacggtggtgtttacgtatcgtttcggctgagatctgatctaatccatacgctcggctgttgatccaacggctgtgaatggccgataccccttcgacccgtcacttttgctaaagagaccctatcc

SEQ ID NO: 175813 - DNA, 421 bp, Zea Mays
atgccgcgggccctatttgggaaatgacggggtagggaccgatgaaacgtggtgccagttttcctctcatttggaaccttttgacaccacgcatcggggagaccttgagataaacgaaatctccttcctcaaatctgagttcccttcgtctattgtctgcgtaactcttctgtcgactgtaagcttcaagtagcctcctgcagattaaagcgactttctcttcggcctctttaacaaagtcgggtccttctagcgtcctttcccccacattggaccacattaggggagtctggcattttcttccgtacagtgcttcgaatggtgacatcttgatgctggcctgatggctgttgttgtacgagaattcggcgtacggtaaactggactcccaatctctgtcgaaagttaacacgcaggctct

SEQ ID NO: 175814 - DNA, 790 bp, Zea Mays
gaagaaggggaaaagtgacctattttgatgggagatggaggggagacgacgtcggtgagaccgtaagggcataaacggtatgatggcgctatgggcccacctgtcaggtccgccaaaggatctgtgacctattttgacgaacgacacagcttaagcgaccctcttttacaactgattcgagaagcggtccatttagtagagcggtaacataaagtgacccatttttgccaaattcctcaatgtaatcctagctatatatgtagtcaaactagctacaaagaaatttgactgcatatatgttcgaatagtcaacatggttgtagagaaatttggattgcaacgatcaggatcgaggaggagacgaatcggccgcgcggaggactcctaggtagcgtgaagtgggtagggacaagcatcgctggaggaccggctaggcctggggaacaatgttaggacgacaacagcacgaccagggacggcggggacaatcctgttagggccggctacgacacatcctgggacggcgaggaggggtcgccgacgggagaggaggctgcctaggggagtagaggtggcagttgaggggtgagagaaggggagatatcccatgggtccttgtagcgtggatatgttccatgggatgcttggtgggctctcgataagtcctctagcagacacaacaaatctcaccgaagaagataatactcagagcaggaaacaatcccgaagaatgtggcgcaaggctgctattcgagcacacctatcgaagaaagatcattgatgctccaaa

SEQ ID NO: 175815 - DNA, 338 bp, Zea Mays
caggtttgttagatggttttgggttaagttcgaggtcacgatgaattgcttgttgtagtctaaatgcgtgtggttatggtcgcgggtaaaaatttagtagtgctcatgtggtgtctaagttaaaagacgaactagtgggtgaaaaacgtttcgacatacatgtataccgaatttgattattgtggtgaacgcgttgttaattgagtatggtaattctaggcacgaaatgactcgaacaaaatttgtaagtcgactgggtagccctcttttgattaatttagctctaacaattggtaaagtgctagaatgattcaagtctttagaatgctgcaattctt

SEQ ID NO: 175816 - DNA, 705 bp, Zea Mays
gtatttccatgcagagcttgactgggttgagttcttaagctccaaacgacatagggcaactcccttatccatttccctgcaaactttttatttttatcgaagacttttttcctgagggcctccaatatcatcccgttagctctttcaacctgcccgttggctcttgggtgtgccaccgaagcatatttgatctgaatgcttttctgctcacagaaatcaaagaactctgaacttgtgaagttggatcccaagtcagttatgatactattcggtattccaaatctgaatattatgtcttgtatgaactccaccgccttggctgaagttaaggaagcgatgggtttgaactctatccatttagtgaatttgtcgatagccaccagcacatgagtgtatcctccctgagctttcttgaaaggtccactcatatccagtccccagcacgcgaacagccaagttatgggtatcgtttgcagttgctgtgctggtagatgttgttgttttgacaggtactggcaggcttcgcacctctggactaattcggctgcgtcactcttcgctgttggccaatagaaacctgacctgaagaccttcccaaccagggttctggatgctgcgtgcactccacactgcccagcatggacctcgtccagaagttgctttccagtagctgagagaatgcatttcatgaggactcctaatgca

SEQ ID NO: 175817 - DNA, 387 bp, Zea Mays
tatgtgtaaggccaaattaaaacaatccctaaacactaatgacattaccgtttcactagttgcacgatcattaaccatcaatggcatatatttcaactgagttatagatgacatggttgaaacctagattgccactcaaatatacagatacacaaaacaataaacagtagcagcattatgagaagttcaggaacaaaccaagacgatagatattatgaaaattggcaaaagaacttaatttggtgagcaattcgctatctaaaatgccctaatcaaagagcatattttttatcgtataggactagttgtcagtttagtggttggtaggaaataactgcaggtgactaaattttagtccagagctgtttggataaacaggctagtagt

SEQ ID NO: 175818 - DNA, 566 bp, Zea Mays
ttacctaaccgagagcttggtcctcgtgtgggcatctttgtgaagggctccaataaggactagggtgaagcttttgcgcttcttgataccttagtaaaaaatatcgaagtcatcgacaagagtttgtatgtctattgccttttagtttccacatttatattgggtaccatggttatgagggtttactttctaggttagttatttgtcgtcgcgtgatagacagaataccaaaatagtaccccctcccattttaggctcaacatgggccttagcgaatcaacctaacccctaccataaccatttgggcccagtccggctaaccgaagagtaagcacaacaaacaccgtgagaatcgtgagggagacaataacttagacaggttcggatcgctggagcgtaataccctacatcctctttgagtggattgggttgcttagaaacaactaagtgtcgagcacaaaggtggccaacaaagtttgagtttgcaatgtgtgagcatgggaaagagtcctcgcgcaggaggtcatcctctcccttttatagaccaagggagaggggattacaac

SEQ ID NO: 175819 - DNA, 424 bp, Zea Mays
ggccggtccgcggcgcggtggcgggtgtccacggcggtgaggtcgccggtgcggttgccgggtgcaataggagggggaaaggggtgccttgtgacagtgagagtgtggcggagcttcgggcactggttaattggactgatgatcactaggaagggggaaatagggctcaccggagcgacgggggaagcacggcggcgctagcttgattcgctcggtgggaggcagaggagttggtcggagctggtgtggtgaggacggggctcgggcggttccttttataggcgcccgggggagggagagggatggaggggacgacgagcgccgacgagctcgccatgatggcgggaatggagctaacggcgattgggacggctcgggcaggcgaggggtgaggggacggctcgggcacagtggcggggtggtt

SEQ ID NO: 175820 - DNA, 770 bp, Zea Mays
atgaggtcggtcccggggaggagagtcagtagtgtgtcgtctcgaccgtccccgaaatggcccactagtcgaggctgcggccgactcaacaccggtgttacgacttcgtgctgggacaccgtgatcccggtcatactcctcccggcaccttatctcattttcgtgccgtcggtcgtgcgaagcgttgatggagctctgtgtgtcctgttggctgttgatggcgtgacgtaggtcgtttggaggatgagtgatgggtagaaggtgattagctgcttgagtaagcagccgtcggtatccttcagcgtctggggttcacaggagaccgtcagctatctgggccagtacccctctgacttcactcggcgtgttcattgcatgagcaaagtcggggtacaagttccgagcaaagagagggttctctcggcgcagccttgcaccttgctcagcttgctctcgttctcgcccctgagcttgtcggcgatcgcggcgatgagagtttcgcctttctcagtgtactcgttcgtcgggagtttctcccacttctgaagcttcatcacgggacatgggctgcaccggatcccgttccccagcttcgtgatgtcgccgtacgttctgacgtctgttcctccgtcgccgcgcttcacgctggggaggttcttccccttgcatggtagactcatcgtcggagatgggtgctgactccaatctccccctgatgaagaggacgtcggggtagaaaggagtcggcgcgatggtgctcttccttctgt

SEQ ID NO: 175821 - DNA, 653 bp, Zea Mays
acagccgctgcagaacctaactatgaaacagcggctccagtcttttctttgcaggcagtggcaggagtccccatatgcgacaccatgcaagtccgggtggatctggggacatcgacgctggtggctctcttggacacgggatccacccacaacttcatcggagaggaagctgcgcgccgcacgggcttggtcatccagcctcgttcgcgtctgacggccacagtggcgaacggggagcgcatcctctgccccggggtcattaggcaggccccgatcttcatcgccgccgaaaggttcctggtggatctcttcgtcatgcctctcgctggctatgatctggtcttggggacacagtggctcgtcaccttgagccggatcatgtgggacttcacagcacgcaccatgtcgttcacacgacacgggcgggaggtctgctggaccgatgtggcgaccgtccgcgcaccgcgtctcgcagcgaccgcggcgggcgatcccctcatcgaggggctgctcgacacgttcgccgatgtcttcgctgcaccgacaggactgccactagtacgtgctcgagaccatgctatcgtcctcaagccggacgcagcgccggtggctgtgcgtccctaccggtacccagcggcgcacaaggatgagtt

SEQ ID NO: 175822 - DNA, 1093 bp, Zea Mays
ctcaataagcactgtccaaaggatcccttcgaactccctagaataaatcaggtagttgactcgaccgctggttgttctatgctctccttcctagattgctactctggatatcatcagatcaatctggcaaaggaagatgaggataagactacattcatcacaccgtttggagctttctactatacctccatgtcgtttggccttaaaaacgctggagcgacttaccagagggctatccaaacatgcttagccgaccactgggcaagcaagtagaggcctatgttgatgatgtagtcatcaagacagaaaactcagacaacttcatcgaggatttgcaacaagtcttcaatagcttgaggtgctaccgatggaaactaaacccagagaagtgcgtgttcggagtaccagttggaaagctactcagttttatcgtcaaccatcaatgaatagaggcaaattcagagaagattgaagccattatgaggatggagccaccgcgataacagaagaaagtacaaaggctcactggatgcatggcagcactgagtagattcatatcaaggctgggtgagacagggatgtcattctataagttgctcaaaaggtggataaattccagtggaccagcgaagctcaagaagccttggaggcattgaaaaagtttatgaccacgctgccagtgctcaagccaccacaccgagctacatctaatcaggtggctgaagacctgctactatatatctccagcacgactcacatagtaagcagtgcgttggtagtcgagcgggcagaagaacggcatgcgtatccagtacaccacccaatttacttcatcagcgaagtcctcggcccctcaaagataaggtaccctcaagtttaaaatctattgtacgtagtacatctaactactcgaaagctccgacactactttgacgaccacaaagtcatagtagtcacacgattcccaataggagatatgctccacaacaaggaagctgttgggagaacagccaagtgggcatgcgaactcaaagctcatgatatagagttctggcctcgcactgcaataaagcctcaagcactggttgatttc

SEQ ID NO: 175823 - DNA, 836 bp, Zea Mays
agaaaatcacaaaggatctctaaaattcttgaaaacacttaaacaatttttttaattatcttcccgatttttttgaattttttgaccgaaccaaagaggtcgtaggccagtttgggtcaccccagaatggagtcaggaatctgctgtaaaaatttgagctcaaacagagcaccgagcaaaaagttatgcctgttttatggaaggtacctcaagttatggttttccagggcacaaattgataggaaccgtagcggcggctatagaacataggggcacaaacctccctgttataagcaataggtaagcgccagatgatgaaacaatgaggggctgcaatgcaatgcggcttgcaacctaatctagggctagcgtggcgagaattcacacaagacggctagcgagggcaaatcgagtaatgtggtgtctcgacttgtaatctgggtaaggtggatgggatagtggcggaaacaaataacagcgatggagcggttgaactacgatgaagacacgacctaaaccagcaacaagactcgacacggacacaaactcaacaaagcaatctgaaacgaaattgcaaggctaaacaagggttctaggacatcggaatatatttttttgtatggcaattatctggagttataggatgaaaaacctaaattaaactagggtaagcctgacgataatacctgagtctttgaataccacttgataagaacgggggtgcccgttcttctgtcaggtgaagataactatcgatttggttgagatgtcacacagacgatccggcttccaatcaacaccactagaacccctcaatcgcagcaccacttctcctc

SEQ ID NO: 175824 - DNA, 370 bp, Zea Mays
gacggcgttgacggcaacggagggaggggggtttcgaccgaagtccggccgtcggcgaatcccgcgacagttctccgccgttggtccggttcttcggcggggaagccgtggcgaagcacgggcgggtgcaggggatcacgggggtggggttaattggaccggcgggggcctatggtggccggtccatggcgcggtggcgagtgtccgcggcggcgtggtcgccggtgcggcatatgggtgcaataggggcggggaggtgtgcctcgtgaccgtgatcgtgtggtggagctcaagcgctagtttaattgtacagaggatcaccagaaagggggagaggagctcaccgaagcgacgagggaggcacggcggc

SEQ ID NO: 175825 - DNA, 571 bp, Zea Mays
gttggttagctttgctcatggggaaggggttttaaaatttcttggaatatatggtctttttcctggggtaggaggtgaggtgcatttcatcaaaattttaccttagccttatattttctctggtagtttacatcataagtacttgggtaaacattgggttgctcatcgtttcacatttttattctttcttttgatttatttgaggtattggccaaacccaagttctatttgtttaactcacttgctgtgatggttcgaggtgtttaccatttttgcagtggtatactagtggtcaggggtctactaaatttttcttgttgttattgcatgtgcccttatatttttaatcatggcctttgttgactttttaatgcctaaataaaattataaccttagattacactagaccagggttccatacagttttcctgatccatatcacttaggcatacaaggaaaattatggtcactctctggtttctattttctatcccctcttcatttttctaaagtttgggtagaaatagtctttaagggatattttgtggcagaaccgcccgaattattcctg

SEQ ID NO: 175826 - DNA, 515 bp, Zea Mays
aggtagtagtggacctggtgtgggtctttgtgagctaactgtttaccttgatagtgaaaatgtggctgcctatgaggatgattttgatatcttaaattagtggcatgagcataactaacctatccaattctttcaattatgtctagagacattatgtctgttcctgcctcaactacttcttcggagtctactttcagtttttctggcaggattcttgaggatcgatgacggcgcttgaactaagagacagtggagatgttggtgtgcatcaaagattgggagctaggccaacagcgggcacaacatgctgtggtggacaatgaattagaggagtccttcaaggacctctggctggataaaggtgctggtgctactaacactttggcttgatcttgtgggttgagagttgagactttggctggatgtaaagtgtttctgatttctgatctatcctgacactttggcttgtaaattgtaataactttgaacatttgaattataaactgagctggtcg

SEQ ID NO: 175827 - DNA, 284 bp, Zea Mays
cttagcacttcatatgtgagctagtgtcgtcgtcactctctatctgtctgatgggcgttgttatgaaacaacggcgtatgacggtatcaacacataaactaatgcctgcatctaaggttagatgattagatacaaagtacaaaggcccactatagtacaccatggtttggggacctctgcccatgattttatatactataggtttctctgtcaaacgaaggcaatcaagcatgttcatgacaatctgtttgaactgataaataaacaagaataaaacagctccc

SEQ ID NO: 175828 - DNA, 807 bp, Zea Mays
gtttacacggagtaccaaagaagatcgtgtctgatcgaggttcacagtttacctcaagattctggagaagctttcatgagaatatgaacaccaagttgaactttagtacaacctatcacccttagactgatggatagaccgaaaggactagccaagtattggaagatatgttgagggcttgtgcacttcagcatggtggaagttgggatgaaagtcaaccttatgctgagttctcatataataatagttatcaggccagtctgaagatgtcaccttttgaagctttatatggcaggaaatgcaggactcctctatactgggatcagactggagaaagatagttctttgggcctgaactgattcaagaggcagaagaacaagtctgtataattcgagagaatttgagggtcgctcaaaccaggcagaagagctatgctgataatagaaggagaccactggaatttgaggaaggagaccatgtgtatctcaaggtgtcaccacttcgtggaatgaaaagattcaaggttaagggcaaattgtcccctcgcttcattggaccattcagaatctttaggcgagttagggagatggcataccaactcgagctacctgataatctatctgatgtgcataatgtgtttcacgtgtctcaacttaagaagtgtcttcgtgtccctgaggaaaaattaccaatggaagagctcagtgttcagggtgatttgacttatacggagtaccttgtcaagattttggataccctgactcgagttacaagaaataaggtgataaagatgtggaaagtgcgag

SEQ ID NO: 175829 - DNA, 625 bp, Zea Mays
gacttaggtaggttaccacatgcccctttccttcggtctcttgcgtcagaacaactccaataactttatcttccgctgcaatgtataatctgaacgacctcctacctgtggcgcctttaccacgggagccgaagacaaatactttctaatgagatcaaacgcttcttgttgttctgcccgtaggtgaatttgacatcatttttaagccaaaggataggagtgaaggcatcaatcttcccggctaggttagagataaacctttgtaaataatttaccttgccgaggaacttctgcatttcaagcttacatttcggaggtcccacattccgaatagatttaattcggtcagggtctatctctatcccatgttcatgaatgatgaaccctaagaacataccagccgacactccaaaaacacaatttgtgggttgatttttagaccatactgacacattttatcaaaggctttgcgcaaatcagctatatgagaactaaactcagccaatttgactaggatatcatcaatttagacttccacagtgtttcccaacagctcgtgaaagatcaaattcatagccctctgataagtagcaccaacatttttcagaccaaatgtcatgacaac

SEQ ID NO: 175830 - DNA, 1139 bp, Zea Mays
gaagagccagtggtataagcacaataaagaatggaggtatgtcaaggcttacacgcggtaaagaagaggatattgccaaggataagataagtaaaacattgttctcaatttgggataggagattggagattttagataacagaaataatgtcatcaccaaggtatggttgagagatgggaaaggtcaaggaaccgctaaacagagacacaacaaaggatggagttgaagattcacaagcaatgaggaagaggatacgaccaagggaaaagtaggtaaagtacaacactcagattgagatggaaaaagaggagattttaaagggtcagtataagataaacatcaaggtaagatatagaggtgataagggtaaatgtgataatgatgaaaagcataatccatggacagagtcaaggcaagactcaccaaatggcaaggcggagaaaacaatcaaggataagataagtgaggttccgacagaagagttgaagtaaaaattcattattgaaggaagttataaggaaacaacgagattaccacaggtgtgcaaaatgaaatgatcactcgtggatcattaataaacaagggtggtcaagaacatgtaagttgaaatgtcttaaacaaatactgggagtatgaagataagcatacataaagatataagagtatgcaatattccaaggatacaggcatgctaagacaagggaattgaaaaggccaaaggataacgacttaacgatggaataggaaggggtctcagaagacaagaagttcatggacatataaactggagtgtttaagtaggcacgagaaattcagatgtgggtatttaaaacaagagtattgaagaatctagggttacgagcatgccaataccaagagacaagaaattgccgaaagatagcgacttaacaacggaagaggaaagggtctcaaaagataagaaggtcatggacatataaactaaaatgtttaagtaggcagtagaaatttagaggcaagtatttgaaacaagggtattgaagaattcagggatacaagtatgttaatacagaggacaagagtttgccagatggtagcaatttaatgatgaaagaggaaagaaccctaaaagacaagaggtttatggtcagggggcatc

SEQ ID NO: 175831 - DNA, 799 bp, Zea Mays
tatgtcaaggtgagtcctcggaggccaccgttaaggatttcacgagtagccgacccaacatggggctaaggcccaccatatatagtcatgaccaggccaagcttgcctcctgggctagatctccgtctccatcaagccccataaagagagaaatcaacaacttcagctacaagtctgagatcctgcaaataggacccggtcctcctcgtgacccaacggatctcgagacaaagggatccggagggaacataaagccctagaggagaaggcattctttggttacaacaacaagcaagggcgacaggagcctggacctcagaacgacttcaggcatggaaaacaccgtctggacctcaggccaagtgaggtccggagttgccacgtgtccgggcaagggaggtagaagcccggaccccctcgagtgcggatcgagcccacaactaggaaagacttgagaaaatagtatcaccacttatcaccaggtcaacccctcacccaagcaggggtccggtgctaacacgtggccagacgcccctagcgtaagccaccgaatgatgcctagcgaaagcctctaacataggccccgccaacattgagtacatatgggacacatacttacccatgccaacagcggtagcttatcccccgcattaaatgcatgcaacatgctaggattataacgtgcgacttttactgttatccgcacgttatcgaggcgaggggcattaacctagggcgtcatttaggcacctttcatcatgacttctactattctttgtgcgttaccgaggcatgaaga

SEQ ID NO: 175832 - DNA, 1268 bp, Zea Mays
agggtgtagacgtggcgcgccgagataagggcagctgcggcgtgtggcgctggtttgttctttgttgtgactgacgtaacggtgggaaacggcacgggtcgtatactcgtatgtagtagatcggggccgtcggtttttgtgggtcggactgacggacggcgcaggtctgcaattgcaaagcgtgcacgtggggttttcttggtggcacgtggaccatatgatctgaaacgtacggatggatcttggcgtgctaatttgagcatcaccgactggaactggaagttgttgaggggaatagtgacgtcgtgtcatactactagtagataggagtatagaagtagatttatgcttcctctctcttttagggcagctctggtcctgaataaaactaactgacacagtttcgtgagacaaagttcggctctcggttcgtgagagttaaggctctctccggtttcataaaaacctctcacaaccatatataccgtatgcacactactcaacggttctctatggaaggtttctatgacctccgagttaattttggagcgtgtctgtgtacgggatgactccttctaataggttgtgtgcctccatattcctcgcatgacgctctatcacatatatctactgtgcaagaccctgtagcttactctatgctcctgccatcgtaccagatgggttccgcataatgtgcttccggtaaggttgagttcgtgttcagtacgacttcatcttccgtcaactcccttgtgtcaccctccagcatgttcgggcacgcgtaaggtgtgtcgtcctgtcctttttctggtacgtgggtggagacttcgatgccataaccctcccctactgccgtacaaataacgtggacatgattttgtgatgttgtgtcttttgtcgcggccgtcgtggaccaacgacgtcagtccagcctcctcccttgcggatcggcttggctcgacggtgacttggtcgttcgccccgcctcccagacttgctcggcggagacttggtcgtacgccctgcctcgcatacttgttcgacggggcttgatcggtaaatgggctagagagaggttcatgggcctcgctttgggtacccctttcctgggaacaaatcattatgagtttatcagactgatttggttgttttctgcacaacacatgaccatacatatgttattgctgcactacttttaccacgttgcaacgcacgagtatttaactagttgtttaatatgtgcattgttgcatattatttaattctcc

SEQ ID NO: 175833 - DNA, 414 bp, Zea Mays
taaaaacagagaaagacaggggcctaaagcacaatttccccaagactcattcaccccgcgtggatggcgggttgattcgggaaaaaaacagggtctctttagcaaaagagacaggacaaaggggtatcctcttatcagatccgttggatgacaatcgcacggcccagaaaagatctcgttcacaataatccggtacaaagccgaggtcctaggatcaaagatcgacgacaaggatttaaagagcgaagaggtacgctctctgacccgttggatcacagatcagcggttcaaactctcccacacctagacccgtcgggagcccttgagttttagatgaacgaccgagatctcaaacaactaaaaagggggaggggtgccaccgatcacatccaagccgcccaaagccaatcggac

SEQ ID NO: 175834 - DNA, 445 bp, Zea Mays
gtcttgttgtgttaatttgttaaagggtggaacatagaaagttaaagatatgtacatgtgatctatcaagggaccgactcgagaatgaatcattccctaatggggagcgcaatcctataccatggctatgaccctcggcccacaagtgctacataatccgaggctggggccatcatggaacacaacggttctcgtgctttcgctaaaccctagctatcacatacacccaatcgagattcaatctctctctagcgcctagtgaccaaaattgtccaaccaaaggagccattgtccatagagatcaatgttcctacaatgccttcgatcaccagcacttgatcccaaggtcctagtatgtaagggagaggaggagaactgagccaggatgcaggcactcaacattcagatcctatgacaaccctaaccgtcgccgcccatctcaagc

SEQ ID NO: 175835 - DNA, 537 bp, Zea Mays
aggattagatcgggtttaattaaagtcgggtcgtccgattaggaatgagcggttaagatgggcgtctgggattttgccttcatcggtcagccagaggtggcgcttcccgcggacacagcggcgccgtcgccgaaggcgaggcagatcggggttcttaggccgttaggggtcggtccgtatagctggagaggttggggatgacctgccaagcgttatggcggggtcggggttgcatgaacgaggctgagacgaccagacggcggagggggagtcctcggcggaccggggaacactccggcgagcaatcgcgcgcgactaagtgcaagacaggggaaaataggggcgggggttaggacagttaccttgagggaagactttggagctcacaaacggcgtccgagcacgacgaggacacgggtcgacgatggctgagctacggtagtgaaccggtgatcgcgtaccgggcgaactagaggggaagaggacgaactaaggggcgtcccgggttgcgggtgataaggcggagcttaccgaggc

SEQ ID NO: 175836 - DNA, 372 bp, Zea Mays
gaaaaattcccggagctttggtcttttgcctctgtcaaggagattaacattagtcaagctcggctggcttcctcgaatgaactgttccacattcccctttctgctgaagcgttcaagcagcttctctcacttcaggacacccttgataatctacagttgcttgatcacaatgatatttggcgatgcagtgcctcttccaattggttttcttctcagaaggtctatgctcacttgattggcacccatcagtcgctccctctcttctcttggttatggaaatctaaatgtcaacctaagaacaaagtattcttctggttattgctcaaaaatagattgaatacctgctcccttctcagacgacgttcaatgcct

SEQ ID NO: 175837 - DNA, 446 bp, Zea Mays
gctagctcaagtgccctcagtttgatgttggtgtttgtttgtctcataggatagcctaaatgctgtcaaacatgccctactggaatgtgtaggaatttcctgattatattgttatttgcttgcatgctcttctaagtgatttggcccttactaggtaccaactgatgtccacctgccgtttctgataatgtataccaagtatgatagcggcccttggcactaagtagctttgcttttgagtactcgggcttgggaacatggtaaaaatagacattaacttcgctccagagctttaagatgataatttcctttattacaaaggcagagtgtccatttgttgaccatttgacggtggctatggtcctatggagtatggaggtcttgagaattcactagtgtatctgcttttataggttttttctcttcattctcttgtgagatgctgc

SEQ ID NO: 175838 - DNA, 749 bp, Zea Mays
cggagatgaattcgacgcttcgacacgcaatgaatgtcctcattgtgctgcttgatgcttgttgggtactgcgcggcatagacaaaactcggcgctggatgagaacagacggggaaaacacgcgtgtcaacgccgaaaaaggtgaaggagcatcaaaatgcagaagaaatctaagggaaagcagttagggttcgtcacctgttcgtgagttgctagaccaaccgcgtccgtaacggcggttgagaaaccttcgccgccacttgcgaagctgcaatgtgcaaatggtggcaggaaaatcagggttggcgacatcaagacgatgcgctagtgtttcaaaaaaaaagacgatgcgctcaaagcttcggcaatgtgacccgcaatggttgaacgtcgaacgtcggttgaaaatccctgcaaaaccctagcgaacaaaacatctagcaagaggaaacacaaatgaggatgttggccaatacctctagggaacggagtgacgaacacacgcttgatatctgacgagggaggtagctggaactaggtgcgtcgcgggcgtcggacgatgctgggaaccaggaccgacagaggtagactgggctgacgcgagggagatagccgggaccataatctgtttcctattacttcgctttcttcctttttttatttttcctattcggttcatcgaggtgcatctagaatatgttgcacgggtcatatggcttgaaggctcccgtaaccgttgccttgaaatc

SEQ ID NO: 175839 - DNA, 313 bp, Zea Mays
atgtgcttttggagtgtcggctggtaagttcttaggattcatcattcatgaacatggtatagagatagaccctgaccgaattaaatccattcggaatgtgggacctccgacctgtaagcttgatgtacaaaagttcctcagcaaggtaaattacttatggaggtttatttctaacctagccgggaagattgatgcattcactcctatccttcggcttaaaaatgatgtcgaattcacctggggggcagaacaggaggaagcgtttgatcccattagaaagtatttgtcttcagctcctgtgttaaaagcgcca

SEQ ID NO: 175840 - DNA, 396 bp, Zea Mays
ggaattttcgggagcttctacaatccaaaaatgctgaactgctacaaattcagaaaatctattggaaacaatgggcttccatcaattgggtcaccaagggggatatttgctctagattttttcatgctcacgcaacggtaaagcatcagcgtaattcaattgcgctgctctctgatgataatgggtcattattttcagatcatgacgggaaagctggtcttctgtggaatgtcttcaaatgtcgcttgggttcttctgacttttcggacaatgttttcgacctctctagcctaatttcgttgcaagaagatttacattggttagaggagcctttcacaaagcaagaaatcgacagcattgttgctgcccttcccaccgacaaatcgccggggcccg

SEQ ID NO: 175841 - DNA, 534 bp, Zea Mays
cgtaggttagggaatacgaaggggaaggtgcagtggtgggggaagggtaaggagatcttgggcgacggtgttcgacggagtagaactagggaaggggaggcgaaggagaccggggaaggggcagcggtgttcgacggagaagactgagagaatgggcggcgctgttggacggaggagaccgacggaagaggcggcgatggtccacgaccctagacgtcgaacctacacgacgttggacgagttgggtgacgaaacaaatgggaacgagtataggggaaggagtggaggtggtacacgaacctcgacggaggacaagcgaggaaactgtccaccagcgacaaatcagatgagacggcggcgtgagaactaagcactcggtagggaggcggtggcatgagaactgctagtcgggtatgcagctagaagaagggtaaaaggtggaaaaatccacttttagtcccttttagttaccctttgtgacaagaagactaaactttagtcaccccttttagtcccttttagtcaccctgtttg

SEQ ID NO: 175842 - DNA, 366 bp, Zea Mays
ccccggcggcagactacgcaccgcggcggcgccatgaccttggcacagcgcccgcgatcccaggtggccaagcacagatccgaatagcccaacgcatgacagggaccaaggcaaatttagcatacagactcataccgaaggtagtggtgacggtggtgctgtcgacgacgcgatgcggagccgcggcggaacaagtgtggaagcgggccacggcggggtcctggacgacgaagtgcggcgacttccccaccagtggtggcccccaattcctcctccacggcgagcagcgacccagcggcgagcaccgaatctcaaccagggcaagcgatcacgccgaccacaactgcgcctcggacacagctccgt

SEQ ID NO: 175843 - DNA, 301 bp, Zea Mays
tactaacggagcaatcggcttaagtcggcaatgacttaaggcggtgcgacatgctcacgcttacttaactcagggtgaccactataccctactaacggagcaatcggcttaagtcggcaatgacttaaggcggtgcaacatgctcacgcttacttaactcggggtgaccactataccctactaacgaagcaatcggcttaagtcggcaatgacttaaggcggtgcgacatgctcatgcttacttaactcggggtgaccactatacccactaacggagcaatcggcttaagtcgtcaatgac

SEQ ID NO: 175844 - DNA, 331 bp, Zea Mays
cgggagtttgtttccggcgcaagaacagggaagaagaagaccctggtaagcgagcccacatgacagcgaccgcgtggcgagtatgcgcttgggcgtttggcaaaacgggctgacgagcgggatgcctaggaacgcctgacccgtgggccctacacatcggtcgcatgcgcgggatgggcaccatgggtcggctggctaaggaagggaagtgggccgctgacaggagagaggtccagacgcgcttgtggcagtgggccggggaaggaaaagctggcccaaaacggtgcatcctgtgtttttatttttattttctttttcctttctatttcaa

SEQ ID NO: 175845 - DNA, 295 bp, Zea Mays
gaaatatgttcttagatgttttcggtagctcataaaaaatagaaatggtgttgattttgtttgcatttacatggcttggtcaattgcttttggtgttactatagttgggcaggtactccaactctgttgcattttgatcactagcttcagaagtacttgaggaatttggtcaatggtagtgaagaatatggtggtctattttgttcttagaagtattttgtcatttggttagttggctgttcaactaaccagatataaacatcagttgctttgtgcaacaccatattatttttct

SEQ ID NO: 175846 - DNA, 502 bp, Zea Mays
ccgagcgggagacccaagtcacgcctcacccgaggccaaccctaagctagaggcacagtcacgactcgctcgaggccaacctcagacgggaaacatatttctgattcgcccaaggctgccttgggtgagaagcgcatttctgattcgctcgaaggcgtctcaagcgacgctccgggagctacccgcctcagccaaccactctaattccagaacatgtgtcggtatgttcaccttctccgctgagggtgtcatagttaacaaaggatgacacgactacatctaatctacctttatcgcccacgacgatgcacagggcgcgatatggggcactgttcccccactccaaccactatttcaaccactttgagcgtggctacaggcaacatccgatcaaggccttgacctcgagagaaatctttgcctcgcccgagctcgacctcgcccaattgccccatcaaacgcacattaaacgccacctactctcccatgaatctcgcagaag

SEQ ID NO: 175847 - DNA, 605 bp, Zea Mays
agcaaggagtatgaacagacctgggattcgctaaccacggtgagggtttttcacggtggccgaaacacagtttgggggaaatgggcaatttgaggttagagggcagccaacgccggtgaattatctgaaccggccgcaaagcagaaagggggtgcggtggccagccggaacagtgcccatactcaatagcggtgaagatctttctaccctgggttgttatccaggcctaagcgagcacaaatcacctcgccgacgtgaatccacgcgcgggggtcgccgacggccaggggatctgaatctgctgatatttttgttactgtaccattgcaaactccttcattcagtctgacagagcaaatggcagagaggtttgctccaaattttatgtaatgactgaatcaactctctgtatcaaagttatagactaataaagcagctacaactttgctacattgtgcacccacaaaaagtcacaggatctagcttagaattaagccctaagttcatgcaattccacggtcactctgaattcagacttaaggcagtctgacagctcgactttgggcacatttttctccaaatttttcatgtgaccatggtttaat

SEQ ID NO: 175848 - DNA, 338 bp, Zea Mays
tatgagtttgtgttgtgtagggaaattgtaatccaagtgaatatgttgattgggattcaatcgaagttgaagacaggtggaccgaggaaggaagacagaatgttactagtgaacaagcattgtatatccagctgggtttgcataatgaggatgtgtttgaatctgctcaaagggaagaagaatcagctcgtcatgttagatggagtaatagagactttttggatggtgaagcatcagctgccattccatgttctgattctgtggtagatgaggaacggattgtttatgacatgaacaatcctgttaagaaaaaaaccttcttaaattttccttcaggc

SEQ ID NO: 175849 - DNA, 494 bp, Zea Mays
gtcatgctcccttaagctgctcgacttctcggattggtcttaatggcaaagtatggctggcttggttagaggattactgcaagcaataacagctcattatgagacaattaaagttagcattaaatttgcaggtgaggggcacagttcagtcaaccatcaatcatcctcacggcagtggtgaactggtgagtggtgactggtgacagttttcgctgttcatctcgctccaacaccgactcaccgagccaacaacgctgacatacaattcagtgccatgctcgttggcgtgcaagcagaaaagccaacaatagtcagaccctgcaactgaatggccctaaaatccaagacgcacagagactgggggcgcacagttcgctcgatcagcagagaaaagacatggccttctgtcggatcagatgtcatcttttgcaaaacggagaagcacaccaatacaaaacaaacgactggaactgacagtgtggactctattattt

SEQ ID NO: 175850 - DNA, 392 bp, Zea Mays
atttttttgctctgctttgcagtttgcacgcacaactcgatcgccccccttcacttctccgagttcttaataatggtgcacggagtgcagtaccaccagacggtcatggtgcctcgggagtccatcctcaagaccgaggcggagtggctcaactctatcaaggccgaccttgtggtaccaatactatgatcactgatcgttaccggtttatgttgtcactcttctgtctgaacatctctacacaccgagtagagcttaactgaacccacttgagcaaacgctggcaggtttcagatgttgtacccgtcgtgtgtagggcagctacagatgctggcattcgatccgtgtgtgtcacgaatttcaggtaagcggtggtcctgttgcttctttgt

SEQ ID NO: 175851 - DNA, 436 bp, Zea Mays
gcagccctttatttgaatccaggtaaattctttaccttgagggataaagacaggaggcaagctgcaagacttcgagctatgttaaacgatgttttgtggaaaatgatcagtgatgaggatgagcaaacaaaaataagtaaacaagcagatgactacgaaagatcagaaggggaatgcttttcaaaggctggagcaataagagaaagagagagaaaaaagtcctagtaagttatactattgcagcattagttagtttgtttgcctgtttctgtttggcactagaactgatctattttttgtataactataacagtcctatggtggggtgcatatggaggactggcatatgaactacaaagcttaggtaaaaagggttataagcctatgttatgcaacttcaggttgtgagagaaattggtcagattttgcagcagta

SEQ ID NO: 175852 - DNA, 577 bp, Zea Mays
ctttgctgcagagcatggagtatgttaccattgggatttgtgagcaaatcatgcctgaatattgactgtcaggccaactgaatcccacttcgatggtacagtagcctgataaagatcagactgccagcgtcggatcttcaccgccggcgacctctctgcgcaaagattcgcgccgccgccgttgcgattcacgtcgccggtgaccagataaggccgctcggtaaaagccatgcgctggacgccactccggtgaaccccccagtaattcccctctgccgtgcggctggagcgataggctcgccggtgaaccaccgcctcccggccttgcgccgcgtggctctgcctttccaccgcgtcgtcgtgactccctattgctgtctcatcaacgccggtgaggttgccacgacgggggacacaaaatcgcgacgatgatgttcttccttatctccggccacccgcgctacctggtcaaattaagtgccaccgtcgaagcctcctataaattgagcccgtgactagcttcgcaacatcatcacccactcagccaccgctaatcgctagcaatcattcgccagag

SEQ ID NO: 175853 - DNA, 705 bp, Zea Mays
gcgattcgtgtcaccggcatcgggattcgtgcttggtggatggatagcgtcgtgggtaaaagatcttcgtcgtcggtgagctgaacgccactccggctagccgcaatccctctccccttgctcaccgcccttgaataaaggttctcaccgccatcaagccttcgccgttgtccgccgcgtgtctcagactgtctaccgcatcaccgtgactcacccttgctctccatcgatcaccggaatagtcgccatgacggttgacacgagttcacttgcaccagtaacctttccctctctggtcgccaccgcgccatcttcaattcaagcgccaccgcccctgggatctataaattgagcccgcagcgagctttgcaacatcatcacccacccagccaccgcgtctcgctaagcaatcattctcctgagctcgcgaattttgaattcgccccaaatcagttctctgccacccaaaaaccaacctcatcgcggccagtcctccacaggtctgctcataccctttttgttcctattctagcatctgtgcatgctggtgatgctcgtcgacccacgtaattgaactagaagtcctctggtcgccaggaacacggttgtctcgccgtgatgttcacggtcaccgtggccagagcaaaccaattggccatagatgaaattaggttgggggaaatgatcgaggtagctccaatttcg

SEQ ID NO: 175854 - DNA, 340 bp, Zea Mays
attttttgagaaaaagagaagaaaagaaattaaaaaaaagaagagaaaattcttaccgctcaaatcctcttcttccttatcctcgggtgggatttttgttgatgccgctcaagctcgtgaacaaatccctgcgccgctttctagcaatggataaattccagccgtggttatctccagccgctgcagaggaaaatctgctgaagtcgtccagctccttcttcttcccagccaaatggctcttccccgcgcagcagcaaatcatctgcttcctgatttttgttcctgacggcgtgccatccctatcctctccctcctctgatttttgctgctggcgtcttca

SEQ ID NO: 175855 - DNA, 982 bp, Zea Mays
gtccctaaactcagaaagagcacatctatggtgcctaaagttatgaagttgtatcgttctggtctcgaaattatcaacatgcacatttcaatcattatatttttataattgtgtaccatctggtctctaaacttatttttgttgtcatcaaaggtacatgtgatgacaccaaaaacaagtttatggacatagatgatacaaccatagaagtgtagagaccaaaaatgtgtatgttggtagaattgttacaaagcatataagtgttacaaaacatgccaccaaaacatagaaatgttacaatataaacataacatagaagtgttacaaaacatagagctgtgatgacaccaaaaacaagtttatggacccagatgcacaactataaaagtgttacaaaacatgccatcactagtgtgtggccatgaactaacattctagcagtggtgctactattacttttggtagaagccacgaaccgacaatgatggttcgataatgattgtttttgagtaaactgcatcagcaggcctcgaccttgacacaatgtgtcacttgggttcaggaactcgaaaaactagcaaaatgggtcctctaacttaggcggcccatgcaaaaccattcaaaattaggtttgctcaaaccagatgtcgatgtggcatgccacgttggagtcacttgggtcctcaaacttttcatgttgcatcacttggatcctcgaacttggcatgctttgtcacttggatccctgaactttgatgagtgtgtaccaatgtggcacaccacatcgacatctggtttgagtaaacccggtattggacgattttgtatgtgccgactaagttagaggacccattttactggttttctaagttcaaggacccatgtgatatagtgttccaagtttgaggactgctactatattttactcattctttttttgtgtagtgtacttgaaagtcgcctagaggggggtgaatagggc

SEQ ID NO: 175856 - DNA, 1305 bp, Zea Mays
cgcaaaagaaactgagactcagacaactaggctatggactgcgggttgattacagcaaagaccagggacttctatgcaagatgcgcgcggtgaaagggtatggtgcgcaccagccgaacgatcacgtttctacggctgagattaaatccgatcgcgaccgaagcggtacgcaatcgtgaccctaggatcaaagatccacggtccaaattcaacgcgcgaaaggggtattctcaaacaaatcagggtcgtccgcgagccaaccaacggaccaggcatcatctccctcccccaatcgtgggctagcacagcggcgagtactgtcgcggccgcgcccccaccggagataatcaacccggtgacccgagtctaaatcactgaccacctagcgctgcgcaaacgagaaagcgactcaagtttaactgggttcccataccgtgggtcgacgcgtgggtggtgccggtcgcgacggcgcacaagcctggcggaaaatggcgacggcggcgagaaattccacggccaccgcggaccttccgatcctccagacgccgcggctacttccgccacgcgctgatgatgtcccctgaccaccgcaattgaccgggcagcgacgggacgtggtttcggcttggcgcacggggtttaagcgcggtggcgaattggatttcgggcatatgacagcgcaaaggggtggatgagggaagaaaaggagccggggacgatcctacttattcccccggggactcggttcaagataggagggaaagcgctcctgacttccggcaatggcggcgagctccccgcacgggtgggtgcgattcgcgcggggcttgggcacgacccgcactgacgcaggggccccgccagtcagcgaccgagcgaaggaagggaacgcgagaggaaagcggagggaggacggtctcttacatgcgggtcccacatctcagtggttagcgcgcgcttgagctggatgacaagtggggccgcggtgtcggcgcccgttcacacgggatttgggccgcgcgggtgtaagctgcttgggccgaaaccagttcctgggccgcgcacacttttctattttctttctgttttttttattttccattttccttttcccatttcaaattcaatcttcaatcaaattttaaattcaaactttgtgataaatttgtccttagtttgaaatgtacagtttgataatactagtgtgaaagatatttattattatttttattttattttatgtagtgtttttcccatttctttccttctcttatttcaaaccctaattctcaatttaggattcaa

SEQ ID NO: 175857 - DNA, 346 bp, Zea Mays
tgcagattcaaggcgcgaagggatacgtatcatcaaatctcgaccgtaaccagggatccgacgacccagatcaaactgccgcacgctttgatctccaccgttcattagaaaattgatggccaccgggtcatctcccaccttacgcctgcagccgagccatagtcgcggcagcgagcttggcagagctcgccatccgagctcaagaccacggcccgaacgccactacccgaaacctacatgacgacgaacagtagaagaactcacccctggtgtcgtagcaaaaccgaccagatcccgaccaagtcgcgacggcggtagcagagaaattcggtgagctcaacccggc

SEQ ID NO: 175858 - DNA, 765 bp, Zea Mays
cttttcctgtgaacgagatcacccgaacagtcactgtcagtgtatcctagtaaagacagaccccctcctccttttttgaattttactccaaaattgattgttccagctatatacctcacaatccttttcacagtattccagtgctctttgtttggagtctccatgaacctgcgaacaagtccaactgagaaagacaaatcaggtcttgtattcaccaaataccttagactgccaatgatacttctatatcttgtttgatcaacttcagttcctcttgcaccggatgtgagctttgttcgttgttccatgggagtgtctgtaggattacatcctgtcatattacactgatcaacgatctttgctgcataagagctctggcagattgtaatctcactctccaattgtctgacctccatacctaaatagtaactgagcaagcctaagtcactcatgctgaaagtatgcttcatctgctgcttgaaaattgtgatttctgtcacagagggcccacagataataagatcatcaacataaactcctaccaccaacaaagaatgaccaatccctttcctgtacacaacatgttccaccttacatttctcaaaacccagaagagttaactcagagtcaagtctggcattccaagctcttggagcttgtttcaagccatataaagccttcttcaatctcagaacttttctaattccttttgggtcttcaaaacctggtggttgcaatacatacacctcttcttgcaggttgcca

SEQ ID NO: 175859 - DNA, 1209 bp, Zea Mays
atcgtcaggtgcgtctccttccccttgcgtttaggagtttgttgcagcgaacgccgagtccaccggagtctgttcgattcggtgggtccgtgatgggggattgactgggggcggaatcttcagcgcgcataaagggcgaacccatcccctctaatctagaccctattcctccacttgaaccccaccgttggcgtgaacaccgagcgaagaaccaaaagaaagtcgccgccaccgctgtacttcctcctcaccgtcgttcaatgcgccgacattagctgttgggcttcgcgatgtcaacggggcgggaatcagagcctcgccaggggagattgggaagcggggttgaggtttcgctctcgaaattaagactcatgaccgattcgaccgagtcctagaccatcagcgtcgctgcttcctccgccgttgaggtaaccttcatcatgtccactctcgtctccgccttctctaggtcctgttaggacgcgtgattaggtacggttgggagcttaattgctcgccggtggcgggcagagtcaccgtgtcaccttgttcgggcgcagggggggtttgagcgggcagatccatacgggttggctagcggcgtcatggcgttcggtcctcggtcgtgttcgttagaaccatatggctcataggacgacgtagccaacgccgacggggcttactccgttgcggtgacatgtgcgccactcagtgcgctgacaggaggtaggagacgactaggtaccggtcgacagtagcttgggggagaagcatatgccgttgatatctagttcaacggctaagattaggagctggcgtactgattggggaaactgtcatggaacgttagatcgtgatccagtggcgcggagtggatctatgactcattaaattcgggtcgttcactgttgatccaacgacttcacgcgcgttacgtttcataaaacttagattcaatctgatggatccacgtctgatccaacagcccattgtggccgatacctcttcgcagcgctagtttacataggggaccctagaaaatctaggaatcaacccgccgtccgtgtggactgtttcctgagtcttagaagttttaccctgtagcccctacactttctggaaaatgaggcccagtccagtacagtttgaaattgaataaataaattggaaaatagatttttaatatgaaaataaatgctaggaattgta

SEQ ID NO: 175860 - DNA, 329 bp, Zea Mays
gcacagtagcacattaaacattgttatttctttatttcattttgttacgaatctcttagttactcttttgtgtgtgtaagcttcctttcttttcttttactaggtttcaaaattcatggcatgctaatgtctgtttttagtgtcacatacttgataagttgtttgtgttgcatacctgaatgactcatgctcggaaatgtttgttaatactattatgcttatcatttctcttccctcaattcagttgcagatagaaaagacaacactgacgatcaaatggaaccatcgattttggcacttgatcgcaacaacacatgtgtaagctctac

SEQ ID NO: 175861 - DNA, 608 bp, Zea Mays
catgaagtacctttgacacaaagtagagcaaaggatagatgcatgggtcactgaagtagtctttcatgaacctgtgaacacaaggttgatatgtacccttgtggtttaggttgtgagtgattgtcaacaagggtagtgccttgggttgagtcagttagactaactagagtgtgaggttgttggtgaaacatgtctcttagcttgtggtgcattggtgtggagtccagagatggtggtcaaaggtgaagatgaaggtgatacgggtcttcaccgatggaccgggtgcaacgaaggacgagcgttaagtcttttggaggagctcgtcatgttgctgacggagttgtggaccagtgggacacatgtctaggatgtgaggagcgtccatggagcatgctacccatgggggtttcgatggttgagcctcaaaaccatccagcgcgacagttcgcaggtttcgccaggtttggacctcaaaacccggtggaacagttctagaggaaattggaggtggtacacggtgtcatcgaggagtttacgtcaaggtgaagcaacattatgaagactgtgtggccgtcagctcaaaattccaagaattggtccattttgcc

SEQ ID NO: 175862 - DNA, 849 bp, Zea Mays
tgtcaaagcatcaagattcatatcattataagaaaaaaatgggaattactatgttgcctagaactggaactaagctgatatctaaattacgtcgagccttaatctcaattaggatgtcttccacgagtcagatcatctgaacatcacataggctatagatcatcgcaataaacaaattcacgggactaaaaactgcaacagagtccacctagatgatattcatactcctgaagaacatgagaacaaattcgatgtgcaaaccttgtgacttcttctctgccaagtggaaggggcatcggcttgctctcgccgttgaactggttcacacacctatgcacggattaattgttttcacggtggcagacataatttgaagcccctccccctccacgacatgttcagatcaagaagcgagcgactgggtgtggagcaggccgatatcctcgaaccattccagctacttgaacctaagaggcgagtctttctgcaacagaaaacaactaagataagagtaaaaatgaaactcgtgtggttcatctctagcagtggttactcatcattgtagatgatgacgacaaaaagaaaaagaaaaaactttggatggttaggttgttgccttgttactaccattgatgccctctataactgtagcaccaacaacttctgtggtctcacgaatcattcaaataacctatagaggtgatgacattgaaataacagctaataaagagaatttatttctgaacagagaattcctactgttagaaatagacacatcagatataagtttagcttttgtacggatattagttggggtcaaattggagactcccaagcacagaaaccgcc

SEQ ID NO: 175863 - DNA, 560 bp, Zea Mays
atgctgaatatggaccgtagatcttcaatccggtggctgtcgtctcgtaccctttcgtattataattataacaggtagatctgatttgaaccatcagatcgggatctaacgaccgatctcgccccatgcttcgtccgtggaattttgctaaagagtccttaacctttatacaaataaacccgcgtaccgaatggaatttttctattgaactattacatggaactgcaccaatttcaaaaagagcttaccgaatggatgtcaaagatttaattgaactgaagaaacaaatagaagaattactagaaaaaggttttattcgccccagttcatcaccatggggagccccagttctatttgtgaacaagaaagatggttcaaggagaatgtgtgtggactatagaagtttgaacgaagtaacgattaagaacaagtacccgttacctcagattgaagatctgtttgatcagatgagaggagctaaagtattctcaaagatagatctaagatcaggctatcatcagttgaagatacggactgaagatatatctaaaacagctttc

SEQ ID NO: 175864 - DNA, 396 bp, Zea Mays
cacatcggctacaaattggtctcccttggtccatcatatggtatgtcgatgcacatgttcgtgtcaccatcacaaccgccgccgtcagttatgcggccgactctagacacaatcgaaccgtccgcgagtcatctcggacagtctggatatatcatagaccatttggtgtatttcgctggacagtctgaccctacacaagcccgcacatagatcactccggtagaaccatacatgattgaaccatataggtgtacccacgaatcattcaccccggtcgtggaccgtccggtcccttacaccagaccatctgaatacgtcatgaaccgtctgggtgtttcgccggaccgttcgacccacatgaatccacgtgcagaccacctaggtcacatcgcacat

SEQ ID NO: 175865 - DNA, 952 bp, Zea Mays
cagaaaagaaagggtgcaacttctgggaaggatgttgcttcaaccgcttcaagcgagcccgcgctgaagaggaaaaaggtgaaggttcttactcaccgatcgcactacattgaaccggccatagtgcctgaatttggtggtgagacctcttcggctattgaagccaaaggacctgctcttacgcagaggattgaagagccggctgcaatgccgaaggctgacaaaattgaagaaccgagaactgaagggacgaaaacatcagaagttctaaacccttcgacagaagtggaggcgccgaagacacaaaaagatctagcagcaacccccaagagaaaaaaggatggctagtgtattagatgtgatggagacgataaaaacttcaagctctactccaggaaaaattgccaacgcttcgaaaacacagattgaatccgagacaaagctgacagaagccgaagctatactgagccaggctgacgccgaagctgggccttcagtgcccgccaaggagaaatcctcggaaactggagaaaaggcagcagaagaagagggtatagaatagattttgcctgaaaaagctgccactcctgctcctgaagcatcttccgaagtccttgattatattattcgacacgcttcaggaaaaagattatctgaagaagaaatttttgaagctaaacactatgcccgagaattgaaatacccgaaaggggccttagtgtttaatggcacagacgaagatgacttcttatattgcctcccagacaacaaagaattatctgtctgccgggagatggccagaagtatgggctttccgaagctcgaagttggcctttgtgccatgacgaaggatgatctcgtggatagccttacgtacaacagtctgaaggtacgaaaattgtgaatttggaattttatgaatttcgaattaatctttggttcttatattgat

SEQ ID NO: 175866 - DNA, 689 bp, Zea Mays
cttgtcttcttcatcaggtagttcacctctggataacttttcatacaactctgctttcttttccagagcagcatagctttctgaaccgtctttcacggctttaagctccagcttatccctgtgcccaaagtgcaatgacagaggaggcatttagttctggtcaatactcacaactcaaaagcatgaaaaaaggacttatggctacgtgaggctgaaagcacaagacagttgcattgaaaccatggcaactcgaaacgctgtatgaagagtaaaaaacaacatgactcatgttgaatggaaataaactgcgaagtaacagaaaattgtggccagggtagcagttaactgcacggaggaagagaacaacatcagatttctttttctatacaagataatatatttcattctatctcttgttagtgtaaattctaaactgccagagaaaaactggactgtggtttgggataagcattgacaatagctccgttgttttcttttgagttggttgttgcttagaaaacgcttaaaaagtgttcactctgattgaataaacaatgtgaattacattccctgaaatcatcaggctgcatggtgatcagagtcaattagtcctcgaccatcctcctattggagtagacaagtttacaaggtgacatataatactgatatgaagaaatactttattttct

SEQ ID NO: 175867 - DNA, 363 bp, Zea Mays
gcttgccctagaggttgaggcgtggggatgcatccgccactaggatgacatatgctatgattcatcacaagaggtcaattatgattctataaccaatctcgtcggtgtagtggttcgtcgtgcatagttcacgtgattctaataacatagttcacgcgttatctatgtcgagatggccgaatcatcatgtctgatcataattctgacgttacgtggaggtcagggcattcgctacccattatgaattccaaccctatcggtacggggtatgaagatatgctatcgaccattttagggtttatttcaatgaagttttttttctaaaatagttatgatggcacacatacatcttttcttttgttg

SEQ ID NO: 175868 - DNA, 536 bp, Zea Mays
tgtcgattttaccattcctatcctgaatgaatggatgcaatgttaatgtcgaacaatagttttgattggcattttgcatcacacatgtactgcacgatcatgataacctacccatttggtgaacatggccgtgcatcctaaatgtgagcctgtttttatgaatctataataatctcatacagggaaaagtgtttttggttaataaatttgtccacagcagtatacactaacattttagtgttttgacaatgcatcatcatcaatgactgtgataggatccttgaccatgtcgtggttgtgaagtgtgtcgggatatgagattgggggttgggtcaaaacctatgatttcgataaggtgccgtggtggctaggatgtagatcggcggcacaataatgatgggacataacacgtggggcagcctttgaagcctaacaaagataattgccttgcttgctttcatttggttacatagttctagagtacttttttccccaagcgaactagaggagtccttatcaatttgggctgtcctttc

SEQ ID NO: 175869 - DNA, 469 bp, Zea Mays
ggtctccacactgtgtttttccaaactttctgggatgttattatgaaggacttgctagcactttttggggaggttgatgccttctaagatctttattttgacattttcatctgccctttcaagagtctccctatgaaatatcttgggatccccattgactgtaagaagttggggagttcccatcggctgaccaaagaagaaaaattggggggaaatggagatgtggaaagctaggttccttagtatgggtgggagtcacatcaatcaacaacagtctttctaatgtcccttcatacatgctctctctctgcctggcatctaattatgtaatcacgaagctaggctttataaggaaaaaatgcttttgcagaatggattgaacactagaaaatataaactagtgaactgagattcagtttgccagcctaaggactatggtggcctaggtttgcttgaccttagatgcatg

SEQ ID NO: 175870 - DNA, 356 bp, Zea Mays
gatcggcttaagtcggcaatggcttaaggcggtgtgacatgctcacgcttacttaactcggggtgaccactataccctactaacggagcaatcggcttaagtcggcaatggcttaaggcggtgtgacatgctctcgcttacttaactcggggtgaccactataccctactaacggagcaatcggcttaagtcagcaacggcttaaggcggtgtgacatgctcacgcttacttaactcggggtgaccactataccctactaacggagcagttggtttaagtcggtaatgacttaaatcggcacggtgcactcacgcctaattaatccaacacaagcacgtttgcaattactcatctt

SEQ ID NO: 175871 - DNA, 353 bp, Zea Mays
caccagagtaggtccctgtgtcatccctgcctctgctaaagttagccaaggccttagcgtgccttaagtcccctccccgtggccggaatggctcatcggagtttctctggcccgtccgagaccttctcaccacgcgttctcccctctatgcccgtggattcatggcctcttccctgccattgagttcaccgtggcgccctcttcccctctgcccaactccggcgaccctggagccactcttgctcgcgccagcctcaactccggcaacctcaccgccgcggagacgaacagcactgcccatggtcgctcatccttcccggtctgatttcccctgttcgatcttgatcgcacgg

SEQ ID NO: 175872 - DNA, 688 bp, Zea Mays
aggaatcgaagcagccgtcgcatcttcaccatatggtggccgccggggagaccacgtcgtcggggactctgggttctccattgccgagcgccagtactggcgggaggctcctcgcctctacctcgcaccggcggatctcgtgctgttgggcgcgacctggatgatggtgttgaagtcggagttcggcgcacggccgtgacctgcactctagggtcggtcgtccctcctccatcggcggtgagtacctcgccctctcccatgctgcctgtaccggtgtgttgtctccttgcaccggcgtcggatacgtgggttgatgtgggcggcggcgtaagaaagaagaagcgtgagagccttcggatccgagatgaagggtggagattagatcgggctcataccctctgcatttttatctcggtcgtagatacggaatctggcggccaggattggacgcagggtttaatcgattcatggccatcgatcacggatccggcggtccctggggcataccgcttggtcagggatccgatctaatctgcgccgtgcgaagacaatccaacggtccacatgtcatggtaccccttcgaccaaccctttttgcatatgagcccctatagaatacagaaaccaacccgccatccctcgcgtctgtgcattgtgtcttaggaataattgcgtgttagcccctgcg

SEQ ID NO: 175873 - DNA, 839 bp, Zea Mays
ttctccagcctcagtgagtggtctgagagcgtcgcaagatcaactaggacatgttcgtgtgcatgggcaggctcgggatccttcagagtaaggggcatcgtgcacaggagccaagcgtcatggtggagccaccacctatcggcgtcaggtctttgcacaccataatccaagataagggagccactgtcaaatccaccttgctctcctctacgaacaagacttgtccaagattgaatccgctcgatagttcatccagtgcacctgctcgccgttgtgacaccatcgcagcaccgcgaaacgctgcggtcagccatgtctaggtgcctatcaccggtaaatgatcccccatgggattcgctcggacatattcatcatgcagaactttggggatctatagtcggtgcggggatgcgcatggctacgatttctacggtgggctcgccgccgcactactcagtcaagcgagggaagacactcataaaccattagatcaaaatgtagtggccaagattagaccgaaaacataattcttcgtttagataaactgggatcatggatccttgatccaagggccagtacgttttgcaagcgtggaggattctcggctattgattgatgatccgatggttgatagtgtgtaccaattcgaaagcatctcgatctaatccaggctctcgaaatgagatcggatggccagggatcacacataccccttcgtcgagctgagccgtgttgctaaagagtccatggggtatttcataaccaacccacaatccatagtagtgtaaagatcattgcatattagtccaaaaatttatgcaaaccaccctacatttcct

SEQ ID NO: 175874 - DNA, 872 bp, Zea Mays
aacataagtcttaagatagctaacataaatgtccattaaccaacaagggtaacagaacaatttaggacattcatgctatactagtaacagaacccatatagcgttcacatatagccatcagttatcagacatacataacacaagcatgagttattgaatagaactggtcaacatatagcaggttcaataatttggcaaagtcatcactaacacaagtagagaattataaaaatgataataaacattattaagagatcaagtccacaacttgcacgacgaagaagttctctttgacctttcagcttctccacaaagttacaggaagttctctttgacccatgatttgaaccggttttgcatgtaaagtttcacattccattagtgaatgtgataggtgacttctcatcttgctatcagctccaacgcccaggaaacaatacagtccatctgatattcactcttataatcgatagaaacaggatcatttggtgagccaatacaaccaacagatggctggcacacatggtcatcacacgacatgagcacagaagcatgagggactcaccggaaaggccatcccggcggtgtctggcttcagtcgcgcctggcggtcatcgtagagctggtactggccgacatctcctcctcccactatgcctctggttgtgcctagacgtcgccgtagaactggtactggcctgcctcctcctagtcctacaacctctccaatgccataactgccgaccaagcgtgagtggcttcctagaggtgcactgatgccgcccaattcgaaggccgcaacttctaccactgagttggttgtcgtcgaggacctcatcggcctcccccgatgacctcatgttgccgacgaa

SEQ ID NO: 175875 - DNA, 652 bp, Zea Mays
cacaatcctcgctagcctcgctcctgatccgcctcgagccaacatcatggcgtaccccgtcccctcgcgtccactccaccgcgatgctagcccaagctccaaggaaggcgcgcccgcaatccctgcatcctgcgccgaccccgcgctcccatcccatcccatccttgctctccaaggtcctagcgtcctggtgctcatacacggcttcggcccccaggcaaagtgacagtggtggtgccaggtctgctcaagaccgatgctgatgaccaagcctggctcctctatgccggtgcgagcgtgtcgaggacacatcatgcttctgcgcttccctcgctcttgtgcctcccccaccgtaacagccacctctgcgtccctcgccacgccccaacccccaaatccctacaccatcgtctgctccccacccttctcgccgccgcgcatgcccgaagagccatcgacgatggctatcttggtctgcgtccccacgtttgtgggcaggcagagatctggatctgctctcatccgcttcgccactcggcgggctcggcgcagcagaagaagaacaaccagctcgccgtcgagtaaggccatgtgtcccgttcgtgtccgcaccaccttttcgccaccgcatcagcgttgcgtctccaatgag

SEQ ID NO: 175876 - DNA, 420 bp, Zea Mays
ttttaataattatcccaaaacaactaactacattacacaactggtattacaatcctacttgaccactagatgtgactactagaatccgcgagcacaaccatacactacatgtgaagcgtaatttaaggaacgcataacgcgtatagacttgactcataaacatagagaaagcgacgactactttttcatgccaccacctctctacttaagccaaaacaattttcctatccacatcaaccaaacttctaatcgagtgaaaatctacacctctttgtcacgaatacaaccatattgcagcatgcactcgagacacttcggttcaacttaacacaattaccactacaatgcacttcgatatacacgttcgacatcacagtgcttcgacaaacccacacttctaatctacttgtcacatccaac

SEQ ID NO: 175877 - DNA, 285 bp, Zea Mays
gccatgcttttgtctgggcttggtatttatttagagcctgtagagcgaagacacgatctccatcgataagatccttcgaagtgggttcgtccacgtcggggacagctgacgaaactgttcgcggggacccatgctttatttcttgtggggtcatggcctccgatccatatagaaggcggaaaggggtgaacccagtcgccctgcactcagtcgtgtttagcgcccagaccgcttcaggtaacaaatcggcccacctgcccttttttcgtcgaggagcatcttctt

SEQ ID NO: 175878 - DNA, 341 bp, Zea Mays
ggaaagtcaagaaccttccctgcacatgatttgtctcctttattgtaagccacgccaggggctcttcctggctatatataacacgtagacggcacgaggtcaagtgcacgtttccagccctctgattgttttccacatggtaccagagccatcaaaatagattaaatctatcttccaccatgtcaacctcctatgtcgccaccattaatcctttggtcggccaagttgttttcgagaagctaaccaaacacaaccacgcactatggaagatgcaagtgctggccatcgtgaggggcgcacgcctggagggatttctcacaggcatcacaaagacccctgcg

SEQ ID NO: 175879 - DNA, 763 bp, Zea Mays
cgggttcattttgcagatttccagggactctttagcaaaacaaccagccgaacgggtatcggccaaggtgggccagtggattacgcacgaacggcgcggattagactgagtcaccagcgaagtggtatgcggcacagaccgtccaatccgcgatctatggcgcagatttaattattctggagtcactctgctccacctgatccaaaatcaagcgccaggatctaatctagcgcgaagggtatgtggatcctaatctggacggttgcccaaggatctgacggtgcccacctgtcttctaccctcggccaatccgcggcggcgcgaacagtctcccccacggccgcgccattaccagagaggctccactatggctccggtgcctaaaacttcaaccgagtggatcctacacaatgcggtgatgaacacgagttcgggcaagcaactattaccgataatcgggcgcgcagtcgcactatccacgacgaggggcggctccaccgcgagtcaatggctccagtgacaaatccaggggtccctggtcgcaaatcccgcccaatgaggtcaccaacgtcttccccgcggcccggtgcaacacttaagcccacgggtttgagcttcgagccacggcgaggatgaaatccccggtggcggaaactccctacactgctccctcacgcaacagcggtggcaagggtaatggcgtttgggtatggcttgaatcaagttaccaaggacacaaaaggggagatttatatcccaagcc

SEQ ID NO: 175880 - DNA, 414 bp, Zea Mays
ctcggggtgtgcacgggcgaacgccagtgagcgctctggcgcctggcacggtgtcgagcacgaggcagcgcagagagaggtcgagttcaagcgcggattggctccaaatctttgagattatggccatgatcctgttgagagatctcttcctctgacattcctttgtcatttgtgtgtggaggcttgcaggttttgctgactggatcaagagatagagaggggagaaatcgggtttgtctcactgccgcgcacagagagaagattgcgggtttgatgtgtccaaggcacgcgtcccaatgccatcttctgatatgaggtagtggggttggttaggcaaaattttgtcaatggggtcattaagatttgagctagggatcaaggtgaacacgttcggtctttggctcaagggctgaa

SEQ ID NO: 175881 - DNA, 631 bp, Zea Mays
ataattctttatcataagtagaataattaagaacatgaccattcaatttttcactaaaatatgcaacgggtttacctccttgcatcaaagcagcaccaatgccaactccacttgcatcacattcgagttcaaaagtcttaccaaagtcagggagttggagtagtggcgcgtgagtaagcttctcttttaaaagagtaaaagaatcctcttgtgactgcccccaattaaatgaaacacccttcttggtcaactcatgtaatggcgcagcgatggtgctgaaatccttcacgaaacgacgataaaaccctccaagtccaagaaaactccgtacttgtgtcaccgtcgatggcgttggccaactctgaatagcatgcaccttggcctcatcaacctcaataccctgtgtagtgacaacatagccaagaaacgatacgtgttcggtgcaaaaggtgtatttgtcaaggttagcaaataagcgcgcggcgcgcaaagcatcaaaaacagcacgtagatggtcaagatgttcagataaacaagtgctatagatcaacatatcatcaaaataaaccaccacaaattttccaataaatgggcgcaaaacctcgttcatcaaacgcataaaagtactagg

SEQ ID NO: 175882 - DNA, 788 bp, Zea Mays
gtgcgctcggatttgtgcccgccgcggtgattcgtgcccagcgcagttggataacacagaagggtaagaaatatcatctcgtggatgaactccggccactattctactccgatcgccgtacccgcctaagtcacgaccactttggataggatcgccggagttagccacctcgcaaccttgcgccacatgcctcggtgctttaaccacgccgcagtgagtcaccttagcccacccgatcgtcgccggtgagcccgccacggtaaatgccaccaattacttgtgccagagcacccccttctcttcggccgccgcgcgtctttccctgaattagtcaccaccgctcatggatcctataaattgagcctgtcgtcggttccgcaaggtagtccagcatataatccacccgctcgtgcctccaattactcaccagagagccccaatttgggatttcccccaaatcggtctgaaacaccgcgcatagtaacctcgccgtggctagcttgttctaggtccgttcaagctctttgctctcctgtttcagtacccatatgtcctcctgatgctcctcgacccgttcaattaagctagaccgcgctacatcgtcgggaacacccgtgttcatctgtagttcgcgctgtcaccgtggacagtgtgattaagagctcggattgtgcaattgagtgaggggaaacaattattaagtgttgaatgaggcctcagccaaattagggtaccggccattgcatgtcttggtcggtacaggttcgccggagctcggttcgtcgccg

SEQ ID NO: 175883 - DNA, 277 bp, Zea Mays
gaagagaggtgaggtactgttgtgagtattgtgagagggatggtcacttagctgcgttttgctttaggagaaatagagatgagaggcagggttctaaggtgagcagaagggacaagcaacccccctctcatggtgtgtgtgatcctcctgctcagagacgcgctgttatgcctataggtgttttacctcatgtttctaggccttaggcagtgatacaacatggtggttgtgcccgacggggtgctagtcatgtgccatatggccatgaaccctcgtg

SEQ ID NO: 175884 - DNA, 700 bp, Zea Mays
cagttatctctcgaccaccctttagccatacatcggaatagaattttccgcttaatgcagtagcgtcggccgaagggtttttaatatcatcagttgaaagtgagaatcctggctcagctatagccttcgcatgttcgcacccgactttctccggattgatacagctccgcgggcactagcaaaggcacaaaaatcccctctgtcactaaggatctcttcaaaggcttcagcttctccattaatccactggttaactccatcgggtcaccgcagatgaaattttgttcttgcgaaaacacaccaactttagcaaagctattcttcaaattcttggcgcattctatagccacatcgtagcatttttctttagctgcacgaagctcgtcaacatttctctgtacccttgatcgttcgatttcagatatttcaagttttatcagctccacattaaaattttcagttgcttcgacaactttcttttctaactcgtgcacttcagctttatgcttctgcttgagaggatagcttagcttcactggattttagcctttcgactaaagatagcaaaatattttcctttgcaagagctttgtttctcaaggttataacctccgatcggaggtttccatgtgctatctgacagcactcgtcctctgcattcttttgagtcttcagagccttactaaggattagaccctgc

SEQ ID NO: 175885 - DNA, 446 bp, Zea Mays
aagaactcatccagctgggttattacaacctttgcctgtaccacagggtgtgtgggaagatgtgactatggatttcattgaaggtttgcctaagtcggatgggtttgatacaatcttagtggtggttgacagattttcgaaatatagccatttcttccctttgaaacatccttttactgcgaaaggtgttgctcaagtctttctggacagtgtggttaagttacatggagggcccaagtcgctggtatctgacagggataaggtgtttactagcagtttttggaagaatttgtttcagctgatggaggtcaagctgctgatgtctacagcctatcgcccacagactgatggccaaagtgagcgtgtcaaccaatgtctggagatgtatctcaggtgtgctgtcaattctcaacccaccaaatggaagaattggttggctctagcgg

SEQ ID NO: 175886 - DNA, 515 bp, Zea Mays
cattataacatcacaaccatgccttctctgtctaactgcattggaaagtgcacttctatctgctccgtgcttcccggtccgatcctgctccggaatttcgtccttcgtaggcagtaaagactctgggacctcacagttactagacattctgccttcctgtttggggaggaaaggagggacacggaggcgggtttgggctcgatttcttttgaatcaccttttctccaagtttccttattgatggaaccagtatattagactaacagtatatcctcggtcgacccccttattgatggaaccagctgtgcactaggtacctactaggatggatgtggtctgcaccggtgcgtctaatagagttgatgaagacgcgaccaaacttgaatggcagacaacgagcagctccggtgaagggagcggggaggatagttctagtgacgacaatccttgatgccgactatattcccaacgatgaagagctaaatagaaatatgccgactatattctaaaataat

SEQ ID NO: 175887 - DNA, 631 bp, Zea Mays
gagtttagtaaaaatccatcggtgtcactggtgttaagttgaggtttatttgcgcgtggaaagtaataatgtgattaatacttagaactcttagtcgatagtagaaattgttttggcttatatagagaggtggtgacatgccaaagtagtcatcgcttcctctatatcttgaatagggtcaatacgcgttatgtgttcatgaattgggaagtaagcacatgatggtttcgagttagagattagtggtttacttgtcgtatgatttggtggatgtgtgaaaatacatgtcaatatgtatgtttataaaaatgttgtggtatatgttgtgtctcggatttcgctaataataggctagccgacgagtatgttgtatagcggcctaggttgttgcttaggttaatcaacttgttagatggctttagttaagttcgtggtcacgatgaattgcgtgttgcagtctaaatgtgtatggttatgatcgtggatgaaaagtattagtgatcatgtgatgtctaagttgaaatgtaaattattggatgaaaagtgtttcgatatacatatatgccggatttgatgattgtggtgaatgccttgattaattgtgtatggtagttctagagcgcaaaataac

SEQ ID NO: 175888 - DNA, 563 bp, Zea Mays
gccgccacggtgaaagccactaatctcgagcgccagtaaccttcttcctctccggccgccagcgtgacttcgtgaaattggatgccaccgctgatggagcctataaattgccgcccccgcctgctccattaagtagctgtgtacccagtaaaccaaccctcgcctcgaatcatccactagagctccccaatttgggatttcccccaaatcaaccaaaaacaccgagcggtgtgacctcgccatggccaacgagtttcaggtccgttcatgcccactgtcctcttatttcagcacccttacttgctcctaatactcgctgacccattcaatttagctaggcagtcctagatcaccgggaacacgattgaatgtccgtcgtgcccgctgtcaccatggacagagcgttttcgagctccgatagtgaaattagttgagggtaaacgcttgttagggcttgaattaggtctgcgccgaagtagagcaccggtcattgcgtgaatcggccagtgtaggctcgccggagctcggcccagcgccgttcaccgtcgtggacggcgagctgt

SEQ ID NO: 175889 - DNA, 466 bp, Zea Mays
cggtgaagtcttcttgtttgggtgcgggtgttgggggttgtgatgtggaggatttggatggtgtggtagtgggggggagaacctgcacctcttgatggtgatggtatacatgattgggttggtgttggatttgttcgttgtggtatggttgctggtggtattgttgggggtggtaggtgtgcgcgacgactcattggttgtcagctggatgggctctgggcattctgtccttggtggccttggtctctaggcaatccctggtggggtgtgtgtagtcttcaccgtgaaacaggcagtaaaatcttcgtgactgttgggctcggcctttgccccttcctcttgtgttgttgccacggttttgagaggggtactcctagcggtgagcagtgtctccagcgggatgttgattggctatggtgtgcacctgttgctggttgtgattgtccctgccggagtcagatggcgc

SEQ ID NO: 175890 - DNA, 582 bp, Zea Mays
gttggctcaaggtgttgcactcttccgtccgatctgagagaatactcgggcgtgatatttcttggacgaagatcccgggtgggacctaggcccgactggatcccagcttagacaacgcgtttgctgccgcgttacgatctctttccacgtgatggaactccaacccttcaaatttgtcctctaattttaggacggctacacagtacttgcccatagaatcagtcgagcaatcccaatctttatctatctggcttatgaccactagtgaatctctgtctaccattagcttcttaatgctcagtgacacggtgatgttcaacccgtggatcagtgcttcatattctattgcattattttatgctggagataataaccgaagtgcatacttgagttgttcacctccaggagctatgaagaggatccctgcacctgctccctacagcttcagcgagccgtcaaagtacattcgccatacttcggtagcctccgtgttgtctaggacctgatgttcagtccactctgatacaaagtcaaccagtgcttgagtctttattgctgtgcgaggtcggaactctatgtcgt

SEQ ID NO: 175891 - DNA, 487 bp, Zea Mays
taagaggacaaacgagaagagaagatctagaggggtactaacctgagaagagggagacaacacagctagggttcactcgcagctgagaaccgatcgaggtcgtagtagagcgatctaacttgagaagagggagaccacatagctagggttcactcgcagctgagaaccgatcgaggtcgtaggagagcgatccttgtgaagcaaatgaaatcaaatgagaagacaaagcagatgaaagtatatgagtagccaagaaaggggttaacctctcgtcgccgacagcgaagcagatgaacccgagaggggagaacgaagcagatcgacagagaagcagatcgagctcgtccgcgggcgtggtgtcgtcaccacgggtcgagagagatgacgacggcgagcccatgagcacggcgactgcgagtgaacccgagaggcgagagcgagtgaacccgagaggagagagcgagaacgagagccgccgcggcggcgg

SEQ ID NO: 175892 - DNA, 319 bp, Zea Mays
cactgatggttgtctttgaatttgctcctcctcatcatccacttgatcaagaggcacttcaacatcaacactttcatgttcaccttccaccacggttggcatcctttggggttgatgaccttcttcaagacttggatgacttgaggtttataggtttgcttgggtcgaggatttatcacccaccacctttgcgctcacatcaaaaacctcattggtcatccacaaggttccttcctcatcatccttttcttgaggtctcacttcacctattgcaagcttctttatggcctcacaaggtggttcttcatttcctgcaatg

SEQ ID NO: 175893 - DNA, 419 bp, Zea Mays
ttgcaatgagtttcctaatggctaacttgttgaggatgttactaactagtgcttgaatcacctaagacagaatctgaacaacctgtttaaatactaatagataaaaagcaaaccgacacagcagtaaagcagtagagagtcatgttcccagaatggtttgttcagataacaaccacaagtagtgttttgttgctttatccaacactttgatgttatgcagtgcaagccagcgcatggatcaaactttgctttatctttgcttacataaggatgcccttgtcaggtgtcagcacagatcccattagtactttggaggcaaagtcatggggatgctgtgatgtagctatgtggcagactctataatctttcagtacagtacatgttgtgtataaatatgtgtttgattacttgtacctaga

SEQ ID NO: 175894 - DNA, 693 bp, Zea Mays
gtttggcaacaaggaacgcacccatcattaccggcttgccttccggtgttgtagccacctaggtataataaattcgtccagttttcttgaaattcttgcccattgaagtattgcccgtgttcccctttccttggttggagttcccagaattctgctgaaaaatagttttattatgcttcgggtatgggcagtccttgatgaagtgtccggactttccacagttgaagcaaccagtggtagaactgggaagagtagggaaacgggtaccatgggcactcggctgattggtaggagcgggggcagtagtgggacgaataaagacaggctgcttgaatggatatgaaggtgggcgaggtgaagaacgattttgattaaaaggtcggatcaccaacctggttctcttctcaggcccctgattagacctatcacctccaaacccttttgattttccatgtcctgcatttttggcttccactaccagtgttatactaatagccctactgtaggtaaggtccaagcatgttgccattttccgttgaagcctgtcattgagtcccctcataaaacaattctttttctttagatctatattcacttggtaaatggcatactaggagagatgattgaatttgttgagatactgcattacagtatctcccccttgctttaaccggataaactcttcttatttca

SEQ ID NO: 175895 - DNA, 589 bp, Zea Mays
tgaggtcttttcaatgcattatttttcaatgctagagttatttaagatttgtaacagtgttaaaaattatcttatttgtagttattactttattggtgtgaatgatgtcacatgaaattttgaggcaaatcaaatggtttagtttaagtactacaattatctttgatacctgtctgattaccaacatgatgccaaatggaacaatgcttattattgaggcacttgtagttgttcacgtgttttctcaacatactccatcgacccctttgttggtaatatatgtggcattttattgattgaatgttcagtcataatgaagcttgcttatgattctgcaatttcataattgtggttgcactataactgtagtttttcccctgatctacgtaattgttggcttcagcctttatgatatttcctaaaagattgtttttatgattgtacccatgcttctaagtaaaggaaaaatgcattatgggactctttggtggcttgcattagcctatatctaggcttctgcagtgtacttcgcctgtttggttgtggaaatctttatgcaggcttaaacaatgttcaaagtactagctag

SEQ ID NO: 175896 - DNA, 879 bp, Zea Mays
ccatatagtgattggttcggttacccagttgaaaagacaatgcaaccagaagaaaaagaagaaaaaaagtatccagctaaccatcaatttgttagaaactattagtgatgattgtaaatcgttgttagaatctgttatttcaatcatctagttgcctccatgtttacagtaaaaaaaccttggttacagttgcacctgggtcattcatattttaatgtgtttattatgctactactttttcagtgagaagtgcaattaatttgtgaaaagtgggcatctcctttttgcagaatttcaatgtgttgatgctgaaatttagaagcaagcaacggcattttatactcactagtgtcccaggcaaagttgcctagcagactgaattttcatcctgccacttctgattgccgtcggccgccacgctgctttcagtgccgacagttttaggccatcggatagtcggctgtcccaacaagggtgttggtaataatgccctgactttgagacgtggtggagtttgggatcgtcttggccctcgtccagcaggggctactgttgacgcgaagcacccggctcatcgacggtctgtgtgggaattgggataggatttcgcctgctgcgatgcaccatgagagggggcacagccgactgatgtggccaaccatgctggtaagtgtctcccgctgttgttccaggagccaaggatgtgcagggcaggcggcctcgtcgtcgtggaaagagatggcaaactccggtctcagctcctacctctctagcgccatcacatccagtaggatctgatgcttcgcttgagcctgtgactggagctgatcctgaagggctttctagtgaaaaatttccatcgctcgtattgaaaattag

SEQ ID NO: 175897 - DNA, 417 bp, Zea Mays
ccacctttgtttgaagtgccctttcgcccaggaagtctggaatcaaattctcatttggaaggattgacaatgccacagcaagcaaacccatcaaacttcgatagcattagtgtgtggtgggaatcggcggcttctcacatcacgagagaccgtagtagagaattcaatggaaatgtgatctacaccatgtggaatatctggaaagagcgcaaccgaaggatctttgagcacaactcgctgttggtgatgcaggtggcagggaaaattaaagagagcctttcactcttcaggagcgctgctatccattagcatctgggtctggtgttagtctctagttgtatctaggctcctgctggtctatttcttctagtctcaccacgcaggaggtgtattcctgataagtgttgtctgtttctg

SEQ ID NO: 175898 - DNA, 869 bp, Zea Mays
ctccctccaatgcacgaagattgggctatcaccaatattcaacctttgccagaacatgaagtgcttttccctgcggttagagatgtggtctgagaatatctagttgagcatcgaaggctcggggtgagggatattcagcgctcacacctgggtcaggttttggtgcagtttaacagcgtgctagatagagaaaaccttgttttgcttgggccccagcaatatcttgatgccactttcactgctcaaaggcataatgatgcctggaaccacatggcacttttttttaaccgtgagtgctggctaatgctgttgggatttcctctagactatcgctcctctgagtacttgcaggctgccattggctctttcggcagattaatcttgtgggaggaggacaggcacaatgtgactaggactatgcttagggttcgggtcacatctcttgaggaagtcccctagttcattgtcttttctgaagcagatggtttcctcggagattcctggactgtgcaatgcgagatcattcagcaaaatttgctgggtggtcagcctcaagatgaagacccagttccgatggtccctgaagatggtcaacagcttcccctcgcgttctttagtctgggccaatctttgcccgctgcgggatgggaccttaacttctcgccaggggaggatgttcaggtttagcctgcagatgatattcagggggaatgggatcagtggattgttaatgctcctcctgctcagcagttttagcaggacttgcaacctgatgagcagcatattagtaatcatctctctggcttgtcttcagacagttctgttggtcccaacccgggtgctccagtgcagaatgggcaaattttgga

SEQ ID NO: 175899 - DNA, 340 bp, Zea Mays
gtcgatgtctaggttgccaagcgtgagggtgaaggaaccatggtcgaggatgttgtcttggatatagttgtgatcaatgtagcagttgagtcaactaatgtcaaggtataggcacaatgatgcgtcgtggggttgatggaaatgcgttcaggaagttgtcgtggaagagggcgatggcgaggtcgacgtagtcagggccgtcgaagacggggacacaactgagagagttcatgtagtcaagctgccaaggatgaagcgtgcgttggggtagccaggctcgataacacgttgtggatgaaagtacgaacctatcgtgatttcgatcccacaacaagtagat

SEQ ID NO: 175900 - DNA, 820 bp, Zea Mays
gtcaaatcctcattaacgttgagttcttccataggtaattgttcctccggtactcttaagcatttcttaagttgtgacacatgaaatacgtcatgcacatccgacaaactatcgggtagctctaatgggtacgctacttcaccttttctttccaatattttgaacgggccaatgtagcgaggagatagtttacccttaaccttaaatcttttcattcctctcattggtgaaactttaaggtatacgaagtctcctacttcaaagatcaactctcttcttctattgttagcatagcttttctgtctcggctgtgttgtttctaaattctctctgataatctgtatttgcttttctgcttcttagagaatttctggaccaaatacttgactttctccggtctgattccaataaagcggtgttctacactttcgtccataaagtgcttcaaacagtggcatttttaaacttgcctaatgactgttgttgtaagagaattctgcataataaggcaaactcttatcccagcttctaccatgctttagagcgcaagctcttaacatatcttccaacacttggtttgttctttctgtttgcccatccgtttgcggatgataagctgagctaaagtttagcttggtatctatggactcatgtagtcttttccaaaagcgcgaggtaaattgggttcctcgatctgatacgatcttctttggtactccatgtagacaaacaatccttgacacgtataactctgctaactgggcttctaagtaggttgtcttcacaggtataaagtgtgccactttagtcaacatgtcca

SEQ ID NO: 175901 - DNA, 385 bp, Zea Mays
aaatttagtgggtgggtgaacagcagtagttctagcagtttctgggaatttttcgtgggtaattagtgataaacagtatgagaatcatgtagatctttgtcatacctttccaacgagtacttatgcgctcaattcggagttataaattaggagatatcgtcgtttgaacccgggtatgtggctgtcccaaaaaacagatttctgcaggtgggcgtacagcagtagtattagcagtttctagggatttttcgtgggtaattagtgataaacagtatgcgaattatgtagagctttagcataccttttcaacaagtacttatgcgctcaattcggaattataaattaggagatatcgctgtttgaatccgggtatgttgctgtccaa

SEQ ID NO: 175902 - DNA, 434 bp, Zea Mays
ataggaggatggctaccagtaggtggtatgtactgattcttgcctagttgccaggtccatacaggatggcgacatattataggttcagtggagccatacatgctaccttgataacagactaaaatctctcaagtcaaagtttgtaaataaactatcttgataagacgaggcctcccaaagcttgatatccactatgaagtaggaacccaaattaccgatcctaagcatactacctgaattattcataaatcatagcagacaacctttttagaatacataacacagacaataacataatggtcctaaacatgaagatgtccacaatgtggctagcagcactaaaatcaccagtatcggaagatgtcctaaacatgaaagtttgatattttcaatgacaagacttgaaacctgaaaaattcaatgacaaaatcacc

SEQ ID NO: 175903 - DNA, 390 bp, Zea Mays
ctccacatttttaatgcatgaaccacgactgctaactccaagtcatgagtgggataattctgctcatgaggccatagtgctcttgaggcgtaagcaatgactcggttgtcttgaatcaagacacaacctagtctagtgccagaggcatcacaatacatatcaaatggcttgctgctgttgggttgcgctaacaccggtgctgtggtcagatgctgccttaatgcatgaaaggcatcttcgcacttctaactccaaacaaacttggtttcctttttcaacagcttagttatgggcttcacaattcgagagaaatccagaatgaatcttcggtaacaaccagctaatcccagaaaactccgaatctgacggacagtcgttggcggcttccag

SEQ ID NO: 175904 - DNA, 441 bp, Zea Mays
accgattgggttgctcttgagccaacttcacagccgccccagtcgagcctgcttccactactacgactgacggacccgaccccactccttccaccacttggggtccgctcgagccagctcctgctgatactggaggagttgaagctgctgttgagggggaggccacttcctcaagggaagctccacaacatattcagcgccgtcacccacctcagcagatgatcagggagcttcacgagtgagtcactcgctctaggtcacaacacatttctcattttgctcactcaggttttgttgctacttttgagccccgagatgttggacatgctttatctgatcctaactgggttaatgctatgcatgaggagcttgaaaattttgaaagaaatcaggtttgggttttggtgccacctccttctaactatcatcccatcggtacaa

SEQ ID NO: 175905 - DNA, 696 bp, Zea Mays
tgtgagcatgtcgcactgacttaaggtgtttctgacttaagccgattgctctgttagtagggcatagtgatcaccctaagtcaagtaagcgtgagcatgtcgcaccgacttaaggcgtttttgacttaagctgattgctccgttagtaaggcatagtgatcaccctaagtcaagtaagcgtgagcatgtcgcaccgacttaatgcatttccgacttaagccgattgctccgttagtagggcatagtgatcaccctaagtcaagtcatgccgatttcaagtcaagcccaatcgaagtcagttgccaatcaagagtatgaacgcctttggaaaatgaaagctttattgatgatgaaatcttctggttacagagtacaacttttcttcaagggtttttgaggcattgctaagggtagaactttctaaggtgttctatgttctatgagttccccacttctgtgccgtcgatctgagtaagtcgatatgatctcggccgtgtgatctctgatacgatgaacggtccttcccatggtggtgacagcttgtgtcgtccctcccccgttagaattcggtgaaggaccaagtctcccactacaaaggatcggtgccgcacagctttgtcgtggtagcgcctcaaggtctgctggtacctggccgactgaattactgtgttcaatcgttcttcttccagcacatca

SEQ ID NO: 175906 - DNA, 446 bp, Zea Mays
cggcgttcttcgatcgatttgggggtaatcccaaattggggagctgcggggaacgattggagctgagagttggttcactggatgtacgactacctagcggaacgtgttgaggcttcaatttatagtgctagcgggcggtggccgctaatttgaatgaagatgtgcggcggccggagatagggaagaaccctaggcgcggtgaatacgtgtccagaggcgtggcagttgttccggcgatcaacggtgagcaggggtaagtcgtggcgatgcggtggaaagggtaaacacatggcacaaggccgcagactgcccacgtcgcagtgactagaatcacggtgaccagatctttacttcaccgaagttatctccccgccagcgaacacaaatcccaacgacggcgtgaatcatagcgtgtgggtcatcggcggcgaaggggaaagaagggg

SEQ ID NO: 175907 - DNA, 304 bp, Zea Mays
tcgctgcttgcagcaagttatcttggcttctttgaagctagttatctgaagattgatcctacatcgtgaagatcgggcatcgtgacgcatcagaagggcattgtgagggcctttttcgacttctgatggggaatcttccatttttattattacatgtctccgcctctttcaaaaccttgccccctttgcgaggaaaagagtacaagccttgatgtagagtgtgtgtgttacaagggcgcgaaggctctaccagacgccttacaaatagtattttcgtaagttgtctacattccatgagtggtcg

SEQ ID NO: 175908 - DNA, 369 bp, Zea Mays
gggggacagtccacggcgaagtggctcggcggcggcgctaatcgactccagcgaggaattaagcgcagtagggtgcaatagaggggaagagagagggcagaggaggttccttacctcaaggcgaaccccggggactcctcggtggcggcgaaggcgcggcgacggcccgggtcgacggtggcggaccacggcgactgcgtagaggacggcgggtgagcgcgggcagaggaaattagggagggagaggggaaattggggcgtgtcccgggttgcggacgtcgaggcgaagctcaccgtggcagagggcacggcggggctccaacgtcgacggaaaaacgggctcaggacggcggcggttaatggcggcgg

SEQ ID NO: 175909 - DNA, 1214 bp, Zea Mays
ccaagacacagcgcgccactggtctggaccgtggattagttttacaaaaacagagggtctcttttgtaaggttgacgcagcgaagaggtacagagccatttcggccgttggattagatgtgatcgcaccagattaaatccgaaccaaaatgaaccggtacgcatccaggatcgctcgatctgagattggcggctacggttttatgagatccagatctaatcggagccgtccagagagcgatcaacggccaacgcctattgtttcccccacggtggtcggatctaaaactaacgactctgatgtaatacaacgaaagggatatgcccaaactaatctataccgtccaaagctggatttgcggtccctaggctttcttctacctcacgatggccagggacagcggagtagaggccgcagcggtgtatgattggcaggattctcgccagtgccctagtgtacggatccgagattaactaggtgctacttgatacgcgcagtaagtataactagatggatggggttctcaccgaaggttctggcgttgtggtctgttcggtgtcgaagttcctgcctggtgaggaatcggcctcgctcgatctcttcgcacacacggtactctctctttctgagtgcgacagtgaacaccgcctcccttgctggattgcaagcgcagcagcgaccccgtggtcggctttcttccttggtgcgccaagaacatgaggtaagcgcggcggctgcaatgattacctctccatatcagttcacgttggtggcatctatggctcgatctctctctctgtattggcggtagtgtttggcttctcaggatgattatggctctatgggtcaggagcatgcaccaggctcctaatatactccgacgtattgaccagggaatacatatagctggcgtaacaaccaacagctggatacgggagggcggctaggtgatccgtgtttgacgcgcgagtctgttacagccgtagaataggagattctgttgaatccacacccacaagcagcgacccaggaagcttagatcacgtttcgtgaggacttctgatggcttgcatgctgacctcattatgatgatagggtgacgcaggctccggcaaggagattaaagaattgataaaaaaactacatgtgatcatgggttgctatatggagtgggctgcgcggtacaagggagggctgggccgactaccgtggtt

SEQ ID NO: 175910 - DNA, 760 bp, Zea Mays
gtcgagagtagctttttagctaaagcgattggaggtgaagctggatccgaagatgatagcgatgacttggacattgaagaggacaataacaacatccgacccatgaagccgagccatgttatcttcgaaaaattaatgaccatgaatgggcatattgaggtactaaagaattcacactgcataagtgatgttgatccggtctgccttaggggtgaagacaatacaccgttgtcgaagaaggatgaagtggtggtattccaaagatttctgagggctaggattcggttcttgttgcataagatggtggtaggggtgttgaagaggtttgacatttatttgcattagcttactcctaacacaaccatgaggatggggttttcatttgggatgtacgaagccaaggcatagagccaagcgctgagtgtttctatcagctccatgaattacactactagacaaaggcagttggcaaagtgcgtattcacaataactttggttgttataattttgcatattagaaagaatctcaattcctagctctcgcatactgcagcaaatggccaaagtcatggatgaaggaatgattttatatgaagaataacttaaaataaatagatgatatcaagggtatagttcacaagcctattatacccgccttcgggcttaagaggccaacttgctacatggactttgaagctcagactgctatggttgccttcaataccttttgcatgtatgttggaattcgagaccttatcta

SEQ ID NO: 175911 - DNA, 650 bp, Zea Mays
atcaatttggacttaatatgaattacacaagtgtctagtattgtttttgtactaaaaatcgttttctaaaatttattatccaccttctctgctctctggactatgcgtataaaacagataagcacagggtttactatgcaaatagttccaagactcataactccccgcgatggaccgcaggttaattccttaaaaaccgaggggctcattcgttaaaccgactggtggaaggggtatgaagtatccagatctgtccgatcctatacctacggctctgattaggttgaccccataacaaatcgatatgtaatctgagcccacggatctttatacgacggccaaccttccatcacatctgacccgcccgattcactaccgacgactcaaatcttatgcctgaagggttataatccctatctaatctccctcgtccattcacgatcgaatggcaggaagcccttcttctaccccacgtccgaggccgagcaggggcactcgcgccctcgccagagagcacgccggtgcgcgaccaatccacgttctagcgcccatttacccgagcggttaggtgctacgcgaagccaaagagagggcaaacttgattgtggtttccgtaccttgaatcgagatggcagtgtccctgatcacgc

SEQ ID NO: 175912 - DNA, 410 bp, Zea Mays
tcggcgaggacgcttcgggcgaatactatcagatctctgaatgtccaaagtttttccagactctgggatgggtgctacagctagtgtttcaacagggaccgaatcagaggaatcctcagccaacatgtctagcatggcacttatttctatgtcactcggatttaaaggcatctcaaaatgaacctgcctctcgtcatcggggatttcaccaagcgaaataaccaaagcctcaacctcttcgggagaaggtcgcactctaaggcccaaaccactgtcaccaagaggaggatttgacacaaaattgatgaaagccttggaaggatgcagactccaggctgaatatgcaacaggagcaccgatattcgacaccttgcctctaacgttcatttcaagccggcttaccagatcca

SEQ ID NO: 175913 - DNA, 1055 bp, Zea Mays
tgacagcctggattaccaaccttccagctatgaaacagtgcaactgatgtagattgacaaggggaaaaaagtcttgattaggggaggcattctaaatatttaggccttgaaatatgatcacctagccactttagttttgaattaagtggtcctcagtaccacattccacaagctttcggcacaagaactttctgaaagggtaaaaatttgactatgcttacaaaaaagattgcacctacttctccaaagagaaaccaatttaaaaatccagctagtaaatgtagcttctatgagcctccaagtgctccattattggttacaaaattttgcagataattaacaaggtattccatttgaagaattcagtggagccggctatactgacgtcttcatgaagaatggataccgacaacaaagttggaatgttcctgtcgtgcattcaatctgcagtatttgaggaagctactggtattacacactttcattcaatctcccatctgaatgcagcacatgctggattatctgagcacagaggtacaggtcttgcaaggaatcaacagcaccaccaaagggagaggactgtcctagtacctacttgatcactccctgcgaccaaattccatgactttgagcatgctattccgaacaaactctcatcccaaaacgtgggaagtccaacccttttgcggaacaaacacctgacatatcaggccgctgttttaaccacgacaagagataaaagatggggatccccaagctgacacctctgagcgtaagtaggccttcgatctagctaagcattgcagcgaattttggatggcaagcctcggtgcatccgaaagcacaaggaagacgcgcatgacctcgtttcgcagcgattaccgtgtcggccatacacgagctgtggaagcggaactcaacagcacagggagggaaggaagcatagcatcaggtctccgtcgtccccaccaagattagcaaggactcgaaaaagctaagctgggtaccgcaactcgcaagcatgtggctgcaagtaaatcgagcgaggagacgca

SEQ ID NO: 175914 - DNA, 534 bp, Zea Mays
cagttttagaaccttgccttcctcttcttctgcagtgaacctggggggctgtgtaacatatacctcctcagtcagttcaccattcaagaatgttgacttcacatccatgttgtggactggccacccatgatgagctgctactgccaatagaaccctgacaatctccattctagccactggagcaaaaacttcttcaaagtcaattccttgtttctgcacatatcctttgcccttggctacaagcctcaccttatacttgacaactgctatagattcatcatgcttcaccttgtacacccatttcagactatggcccggtgtccctttggaaggttaaccagcgaccatgtcttcttctcttcgattgatgacatatcctctaacattgcttttgtctaatcagtgatcttcagagcttcatccactaaatatggctcctctccaatggctatcagtaattcttcaatcgcaacatcaccaccttgttctgggacattctctgccacgaggacactctccagcatacgatatctc

SEQ ID NO: 175915 - DNA, 636 bp, Zea Mays
gggaatagatgtcatcctagggatgaattggctagataagtaccaagcaattatcagttgtgataagaggataattaagttggtgtccccactaggagaagaagtggtagccgagttagtctcacctaagccaagtaaaggaggtggtcatcagatggctattgatagcaaggagccagattcactcgagattatcaaggttgtgtctgaattcccatatgtgttctcggaagacttaccaggtatgccacctgagcgtaaagctgagtttgccatagagcttcttcctagcaccgcccccatttctaaaagagcctacataatgtctagaccagagttggttgaactcaagaagcagatcgatgagctgtcagagaaaggttatataaggccaaccacctcaccttgggccgcccctgtcctgttcgtggagaagaaagatggcactaggaggatgtgcatcgattatcgagctctaaatgaggtcacaatcaagaacaagtaccccttgcccagaatagaagatctgttcgatcagttgagaggagccagcgtgttttcaaagatagatctgaggtcaggttatcaccagcttaggattcgaccttcagacattccgaagatagtatttgttac

SEQ ID NO: 175916 - DNA, 450 bp, Zea Mays
ctccttcaaaatcaatcggcgtattagttgggatcgggatcgttcaacctgtggctctacacccaaatgattatctcgtcttgcttgtggtgtgggcggtacctgaacaatatagctccaacgattttttggtggttttccagtatgctagggttgttttgttagtttatgctgaggcctattggatggggtggatgcccagttctgtccgagtagcgtgctgcaaccatgcttcattggtacttttagatgtacaggagcaaatatgaagtcaaaaggattgtaaacatatagaatgtatctctacgaccatctcttattgggtatgtccgtatgtgtggaactttatggcttaattccctccacgctgcaatctcctcaattattgcagatttgtagtgattgtgttagcacctgggtcctcggatataagcattatggatgtcaagc

SEQ ID NO: 175917 - DNA, 684 bp, Zea Mays
gcatctccaagtggtcgttggcttcctcaagctccttctgcacatcatggagctagatctccaagatatcgatagtgttatcctagatctccacctgctgctctaaggttgcgatgcgctggcttaactgttccacctgtaggtccttttccgccaattctgaagacaagtcgaccacgaagtcctcttgactgtcgagggtgagcttagtggtctgagcaaggttagtgaggtgtgccatggcattgctctacagggcctgaaggcggtacaatgcgctcatacactgaacaatgatcctcccaacttggtcgggatgcatggcccacacatccttcacgtggttcactcggttgcaccacatggggccatccctcttctcagcggggaagagtcccagtgggtgcattaccatcttgaagggatggtatccacagaaagtcatcaggatcttcatagctgcggcctcagtgatgtcgtccgccctgaatccaatagtcttggaatcaagggaacgccaacccggctgcagagggtgagcctccatagtcagccaaactcggcaacggggcacccgatgctcctcgtacaactgcaccgtgtacagagggggtgtagggtaaccagcggagctgagcacctcccacaagatggaagggaaaccctcgtgggaaaggtagtcgg

SEQ ID NO: 175918 - DNA, 737 bp, Zea Mays
ccgtcgccggccagccgcattcctgccttgtgccacgtatctccaccgcatcgccgtaagccttagagactctccgttgatcgccggaatgaccgccacggtaggagccacgaatccattgcgccagtactcttcttcctcctccggccgctagcacaacctgctcgaattgaccgccgccgctgtcgctccctataaattgagccccccaccagttccgtaaagtcctaagctaaccagccacctcgaattagccccgatcgttcgctgaggtccgcgaattcggagtttcccccaaatcattttccgccgccgtgaaacccaccccaccgtggccagaccactctggtaaagttccgcgcctctcaagtattgttctagcatctatgtaggcatgtaaagctcactatagcatccgcttgaccaattcgggcctggataattgagaacataagatcgacgccgcggtttccgccgtgctcgtggaccggtcgttctcggggtgttcaggtccaattgatgtatgttccgaggctgtcgtaggtcagtaatgcctccccggcagttggccgtagtcgccgtcgctggccatggccagtacgaaccacgtcggtgacaatctgtgtgcgcgccgtggttagggagcgggttggggaagaaaagaaagtctagggacatttttacaaagtgtcagcaactggattcaatagtgtttggacttccttggcttaataaaa

SEQ ID NO: 175919 - DNA, 294 bp, Zea Mays
tttttaattcctctttgtgtttatgatgcatgcatgctggaagtaacgttgcctctccaagaatagggtgctttttagggcatccttagaaatataagtactggcccacggggcctaattaattagccacctatattcccctctatgcctaaggcctttcgtcctaagtctagcggtctagtcatgacgatccgtagcggtttctaggcaagttttaggttttgaaaattggtattcatggtttattgtccttctttgtggtggaatttgctccgatactagctgtggcgggac

SEQ ID NO: 175920 - DNA, 839 bp, Zea Mays
gtgtgatcagacattatggtggaaaatactccttagacacgtcgcagtagcagtagtctgaaaacaatgaaataatgaatggtggaggaataagtgctcaggcacctgtttatggtgaagaagacatgctaaatggagacagcaagagatggacataactttatggagattgtcggagtggtacattgttagcactaatcctgacatgcatgcgtgcgatgggtcggttagcttctagaattgttagctgctgcatgggcgcatgcaaaggatgctcaccatgttgtgcggatgagcggcatgtgtgatcgtcgtgatccgtcattggaggatctacatgcggtgagtttgttgcgatccgtcgggcggcgtcggacgcgcacgacaagctggcaagcgtggagttcgtgctagcatgtctgtccagctatataatcatgtgtactgctcgattgtggttatagaaagcaatacagaagctgtgtgtgtgtgtgcagtcagggagtgtgagcgccatagccattacttgttctagctactgttcatcttccttctctagcgtcctatgttctcgagtgttttgagcgcctgagatttccaacatttggtatcagagccagtttgagggtgaagatagcagtcgagggatccatttccttcatcggaggcatgctggtggtggccggcatgtggcggtgctgaagctccggagtgtgtgccgcctggaaagaaggcgtgtgtcgctcgaaacgaaggcgtatgtgcgccgtcgggcatgcatcgtccaaggaagaagatggcgtatgtgcactaccaggtgcgtgtcacccggatcaaga

SEQ ID NO: 175921 - DNA, 688 bp, Zea Mays
actcagtctcaaaaattgaggcttaaaatgataatggttttctctacacaaaaatattaaagtttggggcaaaggggatgctttgaactacagctcttttctaggagtgggttttatcttaagggatacttttgctggtatctaggtataatattatgaccttatgccaaattttagccaaggatacctactggttattttatgggaattttccaaagctttagggtttaatggtgctttctactactactatatttgaaaaatgtctaacaacagatttctcaattttcctatcttcttctttgcgcaagagcaatcattctttaagttggttaactttgctcatagggaaggggttgtaaaatttcttggaatatatggtctttttcatgggtagggggtgaggtgtatttcgtcaaaattttaccttagccttatatttttctctggtagtttacatcataagtacttgggtaaaaattgggttgcttactgtttcatatttttagtctttcttttgatttatttgaagtattggccaaacccaagttctatttgtttaactcacctactgtgatggtttggggtgtttaccatttttgcagtggtatactagtggtcaggggtccactgaatttttcctgccattattgcatgtgcccatatatttttaatcatggcctttgtt

SEQ ID NO: 175922 - DNA, 402 bp, Zea Mays
cagcacgctaacttgaatcttgtatgtgaggcatcttttctcaaacatctgcaacccaggctcaataatgtgaagaaccgaatcacgttggagtttctccgggttaaagcaccaaactttgacaacaaacgaagatagatcttgcttgagcaaagtgtcagggtgcacttcagcgatcaaacaggagtcaatcagaatactctttgccgtagaaagtgcccaagcatgctcagggatccctctgatttccaagtctaccagccctgacattatcgaagatgaggcgtgtgagcatctcgtccaccgcttgaatatcaggctgaaacgaggtcctcttagaatcttgccgccattaagcacccttgaagcagtatcttcgtcaggtaaaaacagaagaaaatc

SEQ ID NO: 175923 - DNA, 504 bp, Zea Mays
ctaccaggccagtatcaagatgtcaccatttgaagccttgtatggacgaaagtgccagacccctctgatgtcgtccaatgtaggggaaaagacactggaagggcctgctttcattaaggaggcagaagaaaaagttgccctaatctgcaaaagactactcgaagctcagagtcggcagaagagttacgcagacaacagaaggagagaactcagtttcgaggaaggagattttgtctacctcaaggtatccccaatgcgcggggttaaaatatttcaagtgaaagggaagctagctccacgattcatcggcccctatcctatcattggcagaatagggcccgcagcctaccgccttaaattgccagaatccatgtcagatatccacagtgtgttttatgtatcccagctccgcaaatgcctgaaagtgccagaaaatcacatcgaagaagcgacaattcagattcagaaggatctgcagtaccgagaaaagccagtgaagattct

SEQ ID NO: 175924 - DNA, 629 bp, Zea Mays
gcagaaagctttttcaatggagcccttaatatattgatatgtgtctctcatgaggaaataaagaaaatgatgtttcctaactatagataggtttagaacttttattttctagaaaagtagttaaggggattttcttatgtgtattctggttcgtaaatcctagagagcacttgaacataatatgatctggagttctggacaaaagcacaacttaccttcaataagaactgaaatcttaggagaaaaggtaccagacctcaggattaaagcccccagaactgacaggtagtgaatacaaaccgaataactaaatgttaaaaaagactggacaatctttcagaagatagacaatataaaatgcactattggttacagattagcagcatatcctaccgccaatatacacaccgcccactcatgttgcaccctttgatactctttttgcagcagtaatagtatgttgcctggcatgtgatttaggcgctgagccttttttttgaaaaatgagcattaactgaacatcataattactactgaataaaggatatgtaggcattacacaattagagatttaccccaagaagattctttttaacatagtcaaccacgagggttcttgagtccccaat

SEQ ID NO: 175925 - DNA, 375 bp, Zea Mays
tggacccgtggaaactggtgctttatatagtagagatatagcctacaaagctcaactaaaataggctacaacctctttcctcaccacgacattcaacaactatgtttgtccttcgttcgcgccaccagcacaccggctctagcgtggtagcgcacacattcgtgcctgactccgtggatgcttcagcatagtcagcactgctgcgtagagcccagtgtgtagcacactgcacaaccacacaggacacaaccacaagtcagtacgcaagaccaatgcacttccagaagctagcagtgtgtaggcgcccagcggtcagcgtaagacacaacctaccagcgacaagccttcaggctgctatagcaagctagccctgca

SEQ ID NO: 175926 - DNA, 537 bp, Zea Mays
aaccgcgcctgggctggattgatcgcttggcccaactagcacacctcataccgcgcggcccaactgttgtttgggcgttctgtcgcgaggggcccactgcgcagcctacaccgccacacgcgtcactgggatgtgggacccaggcgtcaggcgtcttcaactaaccgcgaaaccaccggagctgctcctcacgatggctgtggcagctccgatcactccgggctcgccctccccataaaacctagaacgtggggtgcccccttggtccgctacctcgtgaaccgtcgatagccacctgggttcagggttttccactccggtcaggcaaggggcggggcaggttttcggccgccgccgcaaatccgcgttggtagtcgaaatctagtgcaattgtgactgctcggtggtagtctaggtcataaccaagccttcgggggagttaattggacagcgaaccaccgcagggttgggaattgctcgccgaccattcaagttcgccgcgaattcgtctggtaccgcgggcgagcagctccgccc

SEQ ID NO: 175927 - DNA, 647 bp, Zea Mays
ttttgaatgtttgctcggccgaaggggtacggggtgatcaccgccgttggattggatatgggcgcgccagattaaaacactactccagcgaaccggtactcagtgtgaccccttggattcaaatccgacgacctagattttaaacacacagatctcaccgtagccgcaggatatgagatctacgattcattttccccacgcgcgaggggttacggaagatctaatccaagccgcataatgtcgatctaacggctagaggctttccccccactcccctttctcctaccggcgtcaacacgacggcgcctgactgaggcacagcggcgccattacctcggacccgaatcccatcaccctgtgcccgaagctcaaatctactaggtgcaacaccatcacagggccaaagcgaatacagagcggggcgtactcaccagtcacgagggtgaagaggactgcgcccacggtgccgcgcaatccacgcacgccgatgacgaattgatgccgccctgctcgccgactcggtccgcaaatgggctggtctccttcgcagcaacctggcgaaggtctttgagtcatttcccggcactggacagcgacgggtaacgcaatcacgacggcggcggcgggttcgtttccctcgatgagca

SEQ ID NO: 175928 - DNA, 627 bp, Zea Mays
caagggtcatcctcctcgtcaagcttctctgtcaacctggcctcacggggtcatggaggcgggcacatgttctgtggtcgcggtgcacgtggccgtggcaacggtgggcggggacgcgggaacttcaacaacaactctagcttcggcaagcagaaggtccagtgtcagatctgcaagaaggtgggcgtccacacagcatccgaatgctagcaccgttttgatgagaactttgtccctgaagacaagagcgtcaacgtcgccaattatggtgagtatggtgtagattcaaactggtacacagatactagtgcctcagatcatgtcacaagagagatggacaagatggtgatccgtgaccgctatcatggtggtgatcaagtccacatgacaaatggatcagctatggacattgaacacattggtcatgtcatctatcatgcgtctggaagaaaaattcatcttaaaaatgtgtacatgttcctagtgctgcaaaaaaccttgtatctgttcataaactagctgcagataaaaatgcttaccttgagttccatccaaatttctttcttattaaggatagcatcacgaagaaaatcctactggaaggaacgcgtagaggaggactctacc

SEQ ID NO: 175929 - DNA, 416 bp, Zea Mays
gacctttagtcgttgaatgaaattttttcgcctcctggagctagcttttcggtgaaagaatttggtgttggcatcaccgaatctaaggcttgacatacgggaattatgccttttctgtgcccattcaataacagcatagccaaggatacgcatcttcagtctgcttcggagacttgactcgaagtctgacaaccgcctattttcttgtgctaggtctagcctaaggagaacttccatggccatatgcacgaacaacctagaatcaggaacaagcctgaagctccatcccctgagcgcccgggctgtgctctggagtttatagaacagcctatggaaaggttcatgatgttgggtcggcttcgaccaagcgtgctccaccacctgcttgaaacccggtaaaaccgtccagaaattct

SEQ ID NO: 175930 - DNA, 591 bp, Zea Mays
cggtcccaaggcgcgccgattcgccattccctaatccgaagacttctacacgacgcccgaacgatagcgcatcgattaggggcacataccattgattgaagatggcagggagactcggctgcagtgcacagcgacatcgcggcggcaatcgtgttccatcgagcaattatcggagctcaggcgaccctcctcccatacggacgccacaaccatcttcctagctacactgcaaaactcacgacctatcccgaaggctctacgatggtgtgagtgcaatttttggactacgacggcttccacttctctcccatggcggaggggagctcgtttcttttatggtggcacgtggtcatggttggatgggataaggagaagaggtcgcggggcccgacttatagcctgcggcgaggacgagcttggctgacccggtcctgaggcccgcgcagatcacagatgactggtgaagtcggtccgcatatcacgctacgagaaaacgcaatcccgatttggatggggaagaagaggagcagtggttccgggtcccatccgctagcttcctgcgtgcgatcaaggtcaacctggggtccccat

SEQ ID NO: 175931 - DNA, 476 bp, Zea Mays
gtagcgggggcggtctgcctgccattgccgtttggtcaggcaggcacctgctctcgcagtctcacgtgcgcgtgggatggttgggttgcacacacagctgctgggcatggactttcagtgagtgagcgttcagttcagcaggtgccaactgccaatgcaaccccgtgcattacctgacccatagcgatatcatactgcattgcaacccgtgtccgtgagtgactgaaagtactgtagactattaccactacgcgctgtggagctcctcgattttgtctagtacttcagctacatcaatacagtaggggagtgagtagtaataggaaatgtcctgtctttagcctcccgagaagttgatcagtggccacctcctccccgtttgggaacagtgacaggcgcaacgcaaggcaagcaacgcgggaatctccgttcgtcgtatcgctgggaaaaggggattctctttccttccacctccg

SEQ ID NO: 175932 - DNA, 620 bp, Zea Mays
gcaattgccaggttctagctcctaatcgctctgcccacggtgatagcgcaaactacggatgaactgaggcgttcccggtgatcctacgtcttctagctcaattggtcgggtcaagaagcagcaagagcacacaagtgcagaaacaagagcgaggagggcgtaatcggacctatggagagctggccatggcgagctcacacacggcagaattcttgactgattttggggagatctcaaattggggagctgtgggggacgattgaaggtgagggctggttctctaggtgcacaactacttagcagagcaggcttgggcaccaatttaaagaatccaaggtctgtggctcctaatttgggcatggcgtgctggcggccagagaggaagaaggtcattggtggctcagtcgtggcgttcaccgatgcagcggttctgagatggtaagcctaggtgtgccacggttactactgcgcagtaaagagacacggcgtagcatacttgaggtcatcggagcttccatgacgacaccggcggtccgaccacgtcgcacggttacagacacggttgataagcttcaccccgcgaccaaatccgctccccctccgatcttttcacccgcccg

SEQ ID NO: 175933 - DNA, 668 bp, Zea Mays
gtacctgatcgtggctcaactgaaccactccaccgaagccacatctcctccgtttgtttttttattgtttcctagtcgtgcttgtgtcaccacgaaccaggtattgttgatatcagccatgcacacacacgcgacatagaaatgaaagtatggaactcgtctacgccacggtctctggcagtgcgcgcccgtgttgatttagcactggccagtaggtcccctggcgcggtcgttcccccaccgaaccgaatctagttgcgcaatcgtagggcaccaaacctttcgtcgaggacgttacaacaaccaagccatctagataaggctaatcctctccttcggagtataaaagcaaagcaacgtgacccttgtccatcatcagaggaagcacaaagcaccaccatcgccatgagatgagagccaagcagagtagtagagagagaagaacaggggttagccgcgtcgtcgtgcgaactctggtcgtgcatgcagaagatgtccatggccttttcgtgagcaaacagagacgagagggccgaagattccttgccggtcactgacctcagccaagctcgtagccataagccgctatgaccagctcatcgaaattcgagttccctcccgaactctagcgataacttcgacaagtaattttccaccatcatgtcaac

SEQ ID NO: 175934 - DNA, 864 bp, Zea Mays
cgctcacttgtacttggctatgtgtcgtgtggcataggttatgctagatatgtttaagtttttgagagttggtatatcttgctagaggccaatgctaattgttgattagaaatgctttttaggtaacggttgttggttgcatgaatctacagggttacacacttaagggattagaacataatgatacttgcatagttaactctagtgcaagtgggagactgttggatatataccctagagataaccgattggacccgttattaaactcagattggatatgatgcacacgatttttagatttctaacacgacataattgttggtagtccattagtaatgtctacataatagaaagaggtgcaaaacccacacttgtactattcatcgcatgaatagtaattcgtgacattgctattcatcatgtgaacaatacctcctcctccctccacctccagatcatgttcaaacatgaggtgctagcacatcttcatgtgatgttcatgtcttaaacatatggactattttgaaggtggttctaatttgcatcctacattatgtcgtacatttacttttcagcactgatacatcaattacatgtgcttcgccaagtcttccactctgttgcttgacgagaaggtataatatgtggtcatatatttgcaagtgatcatgatttatatggttaatcttgttcaacgataactgataatgtgtagcaaatcgcattaccaagagccttgaacccaccaagtgtaactaactcacctcttaagggcgtcattttgattctttccagcaataaataactcacctcttaagggcgtcattttgattctttccaactaaaactaactcaccacttaat

SEQ ID NO: 175935 - DNA, 397 bp, Zea Mays
gggcgcactatttacagagaactcaagggcctcaaggtaaactgtcctagacacagtaaacagttgaatatggacggcgggttgaattcttgtttacgagggggctcttatgaaaaacatgatcgcgaaggggtatctagaaaccctggccgttcagatcagatccagaggccaggattatatcacaattactttaaaaagggtcgcacactgactaccactggatcatgatcggacagcgcactatctctcacccgccctcgaccgcaggatcactgatccacagcccaaaccgaaatctcgaatcggtaagcttcggttcaatcgtaaccgtacaacccgagatcaacggctccagctctctcccctaaccaggcggtcaactcagcggccccgc

SEQ ID NO: 175936 - DNA, 1330 bp, Zea Mays
gccacgactccgccgcggggagctccggcgagcccatgctggattggccacggcggccgacatagtctatggcgacggcatcagcacacccatgaaccgaagcaaactcagtcacgtgctcaacccaaccgcgaagattctagacctaggttaccgacgacggttgcagaagggctggaccgacgatcctactctcgtgaccaccgcgaggtagagcttgaacgaagggcgtgggaagcttcaacaacttatgagggtctcggtgctcgcgttaagtcgatcggggacaacgtaggttaattggtccacgcggaagctgtccacgacgccaaattgagacgtcgcaaccccgttctatgcaacatgcaacagtagagctagaaattccaactgggtgagcttcactaacctttggagagcacggaacgagaaccacatgagcatgcaacggtctggaacgctttggccacggcgaggtggtggtttcggtggtatggtcaccactcaccaggctgggcgttggctgtgaagaacaagggcaaatcgacctggggattgagaggggaactcaagccgcaacacaaactgcagaggtaccaagggaccagctagagctcacgaacagcagggttctctggatcagcaatcaagtaaaagcaataagaaagttagggcagggttccctgaacttagccaacacttgatgaagagggactccaagggtgccagcactgcatggctgatacacgtggatgcccaacccaaatagcaggccacccacaagctcaacacagaaacaccccccgtcccagactggagacagtgaacaaagtgaataaggactctattgcacagccccacaacagtccaagccttgatattttgcagtatggagagaccccagatcttcagggatgtatctcaactcgagcacatgggtggagtacagcagagagaggatcttgttcagtttctcaaaccaaactctgaagttaactgaaacaggactgctgctccattccactcattactgtttaagcccttggatctcacatatccccctaacaacagaccagacttacttgaccaaaattactctccaaaccaagccctatcactttggtataacaccccagggctaaaaacttattgcacaaaaactatgatgccctaaagtagagaaaaaccaacactgacagctcaatctcaattgactgaaacaacccataccgaactgacattgagttgtgtaacataattttctccaattccttcccagtaacaagcccaactctttatataaaaattgttcaccttataacaatctcca

SEQ ID NO: 175937 - DNA, 496 bp, Zea Mays
gcaagctggagccgaaatgggagggtccattcatcgtcaattcgaaggcatcccccagcgcgtacaggctagtaacgccttccggcgaagacttagagcactcctagaacattgacagcctccgaaaattttttgattaaccctcagggcccacgcgcccttgtaattcatcaaacaatgttattccggcccgcactcttttcctcccgggggtgaggtttttaacgaggcggagccatgtaatataccagcaaaagcccccgcaaaaacaaaaactcaggtgcaacatgtcaaaaaagatcgcttcgacggtcttcggcattcgaccaattcgaagtcaccgcgacaggtagcgcagactaccctcgcgtgcgatactctccgtgcaaaagttgcctaagggtgcagccggaatagcacaacaagtgcacgacacgaagtctcactccacgcaaaagtcgcctaagggtgcagccggataagcacaacaagtgcg

SEQ ID NO: 175938 - DNA, 318 bp, Zea Mays
gttggatgtggctgcggcggaggcttcatcgtgtatggagggtgccggggatcttcctagtgcgggtggagggcgtatgcggtgaagggtggtggggaaacatagtgtgggtgagttttcgtggagtggcaggcgccgtcgtattgggatggagcgtgaccgtctccgtgtaaaccgggttgataaacgagaattgttgtcctcgtcggctggggcgagcataggcgagggggatcttcgggagctttttgagggtgaggaattgaggataatgctgtttaattacaaggagatgggtatcattccgaaggttgagcc

SEQ ID NO: 175939 - DNA, 711 bp, Zea Mays
gcaccgcgattcacgtcggtcgccatgattcatgcgctgtgacttgtggataacggtgaacgagtaaagatcttggcgcctggatcaacttgggtccggccgcggctaagttccccgtaccactagctcatcgaccgatcgggataaacctcgccgtcattggccgattaccaccgtgcgccacgtgctaaagtgttagaccacgtcactatgaattgcgtctcgcatgcacggtgatcgccggtgtactgccacggtgaaagccactaacccgagcaccagtgatctcccacccctccgaccgccgcgcgtctcaagcccaaattcatcggccaccgcttagcgatcctataaattgatggtcgggtctgttgtgccatgtaatcatgaagccaacgcaccagctattgcctcaaatcgttcaccagagaccgcgaatttcttacttcccccaatcctgtttctaccaccatagagacaccctcaccgcggccagcttattccaggttaattcaagctccccgatcgtttgttctagcatccttaagttctcctcaagctcctcgacccctctgattgaactagaccaccgtggatcatcaggaacacgttgttcctttgattgtccgcgctgtcaccgtgaccagaaccaattgggtagccattcgtgaaattgagtgaggggaaacgctcattaggtcttgaattcgg

SEQ ID NO: 175940 - DNA, 638 bp, Zea Mays
ggtttatggaaggagagagggggaggggatccgtgacgacctgatatgtatatatatagaaagaataatgggtgggagatggttgtcgattttgtcctggatcacgttgggaggcggggtgaggctaggtggtttcagatgtgtcagggtcagaagcacacgtaaaacggacgagttcatcggcatacggctggccgcgaggtgacacatggtcgcgagcgcgctagcgttgtaggacacacaacgcaatggggaagacaagacatgcgctggattccctgccttgtgacaaagcttaggtgggggttacttcgagcaacggtggacgcgagcacacagtgacgaacgacagttctccggcgaggttgcaagctcatcgtgtgcggcatcgaacttgcaagcacgacgtagtctatttgtgcaggggcatggttgtgctctacagtgcataggaactggcgaggcggggttgctgtgagcggtgcagtgagggcgggcaggaggttgcacgcgcggtgcatgggacgttgcatgatgaggcgaggcgaggtggagttgatggaggtgacaatgaaggggtagacgaggttgcacgcacgatgcatgggacgttgtgtgacgaggtgaggtgaggcaag

SEQ ID NO: 175941 - DNA, 425 bp, Zea Mays
cgatccttcgcagtgggagacttggtccttcgccgaattctaacaggggaaggacggcacaaattgtcgccactatgggaagggccattcatggtagcagaagtcactcggccaggatcatatcggcttactcaaatggctggcacgaaaatagggaattcatggaatatagagcatctcaggaagttttacccctagctagatttcaaaagctatcggggcagcattgtattctgtaatcggaaaatacatcatcagtaaaaagacttcattctcaaaggcactcgaactatttattatcaatctgcatgcttactcgacttagggtggccactataccctactaacggagcaatcggcttaagtcagcagtgacttaagacggtgcaacatgctcacgcttactcgacttaggatgaccacta

SEQ ID NO: 175942 - DNA, 385 bp, Zea Mays
ttcttagcatccttccgtgtcgtgcccacctcttcctgcaattgtgccagaacaaaggcagtatccaaatttcgaggtctttgaactaaaacaactgatttaatctcatcacgtaggccatctataaatctcataatatagtaaagggggtctgaaatggtgctatatgccttgagttgatcgaccagctgagaaaactgttctacatatgtggcgacagttgtggtttgcttaatgtgaaaaagctgtcgaataaggagttcgtgctgatcacaaccgaaacggtccttaatcatgcaaccaaactcaggccaagtgatgttgggtaattggggttccacagactgcaaccaacgtgcagctgggccagtgaagtgcattgtgg

SEQ ID NO: 175943 - DNA, 504 bp, Zea Mays
ccaagatctgcacgctaaggtgctccaatcggccgttgaactatggcagaagcaaacgcacacgtgttcgacgcgggctgacactcgggggcgcgcccagagcacgcccgtgcgcgaacccccacgcgtccgcggccgtccgtgaccacgcccgcgccacggctataaagcccgccccagtgcccggccatcttccccgttgcatcccctgtcccgcgcccaactccccggagctcgcccatagctccggcgacctctccgcgacccgctagagccgcccgaggacaaccaccgtggccgaaccgtttcccgccctcctccactcgatccaagcccctaggtagcttccctaggaggccgtgaagcttgccaaggcttgaaccgaggacccccgccaccggaaaggcgcaatcgtgctcgctggagttcggaaccccgccgacgcacgtggaccggttgagtctctgcgccattttccgattcactgcacacatagcctctacg

SEQ ID NO: 175944 - DNA, 1073 bp, Zea Mays
gactatacatatctctaatactcatccacagtcacaaggggagggaattggatgcagagaccggcccaaaagtcactaaacaaatgtagatgcaatctcttagtcatgatgttcgtgaactgatgtgtagatgcgacatgtagcacttgaacttgccttaaagcaacctcacggacgaagtggatgtcgatctcaatgtgcttcgtgcgacgatgatgaattggattggcagtcatatcgactgaattgacagtagacaatagtcgcagaaggaatccggacatgaagcttctaaagcaactatcatagccagcaacactccacaactgaaacaggacattgtagtctgccacttggaagaccaggagaccaaggtgtcactgagaaaggtgcagaagctcaaggtagaacaccgggagtttgggtagtctgtctagtcgacatcagagtaggcagcgatggatgacacaccgctagtgcctaggtgaagaccgacatcgagggtgcccttctcctagcataggatgtgctagatcagtgcgaggtggggctcttgttagtcatgttcgaagagacatacttgctaaacggcgtaggtgaggttgggctatgtcagcgtgattgtgtgaggtactgtagagcgccaaccagactccaataaggggtcagcaatagggtcaccatcagtcgtagacaacttggacttatagccaactagagtcgccgtgggataatactcaaccaagtcatctggagccatcgtggggtgacactcagccatgccaacccactggagcagaatgacggcgtactatctttgtgacatgagcaagtcgttggagcagcgcatgatagagatgccaaggaagtgttggagaacgccaaagtttgtcatggcgacctcagagttgacccaatcgatgatgcgctatagtagagcaggagaggacacctacaatacaatattgttgatgtcgcgtagtaggtagacaacatctcaatctttataaatagacacgtgccagactacgctatagagagctatgcttgcaaatgtaggtagcaaacccctg

SEQ ID NO: 175945 - DNA, 2985 bp, Zea Mays
cgatgacccattggaacttgcttgcgaggcttctttcttttgaagtgcgcagaagtggaagaagcatcacttgtgttgcagccttcttcctcaacactcaccggcatagaagagagcacttcaaaacggttgctcaaggctcttttatgaggaggaaggtaaggtactattgttttgccaccagcatgatttgaggacacacccctttgtgccttactagccatggaatttgtaggaattgccagctctctttgctttaagctagcacgtcttgcacacacattagcagcttgttttgcatattttcttcggcgcgggtccttttttatgaactcatgatgctcaggtaactttgctaaagctttggcacgtcgcatgagctcaccttcaacattatctgaagatgtagatgctccaggcaataaacttcttaaatcttggcatatggtcctttctatggaagcttgaaaagcttgcattgcagcattttgtatcctacggtactctcctctttgttgagccaagattgaatcagccacataagctcgttgtgcattggtcaaagagtctattgaattgttaaaattggcccaagctttgtggatgttgcgttgtcttcggcgacgtcgctttggagatgttgaattttgtgcagagggccaagacaccaccacctctgatgatatgggatcagatattgatgcagctggatctacatgtccccttgttatgtcattgaaagagagatgaagcccttgccagcggagttcatatttgggttgaccattgctgggattatggaccagcatagggataaattctggagcttcgacccgaagtcgacttttggtggatgaatcactgtcagtagatgacaaactattttccatcgtcatagctttctcttcattagccggatgtcggggatttatttcttccaccgcttcacctctttcttcgggatttgacccactatcgtcacttgtctcaacatggaaaccatggttgcgcagcaaacacttatggcgccttcggttatcctcgctccccttttcggaggcagcttgacttacaacatgagaaattacctcattccacatccgattcttttgtttcgcaccagctgggcaagctgggcaagttttaatcctctttgtttgtggatcctcaacaaagtgcaactgtgatctttgaacttccccatcttcattgttgtccatggagttggtactgggataaggggattgagtgacgtgaaggtcacatccatactccttttgtatcatgtccccaaccatgtatggtacaacaacatcagtgcatgcatacttgatttggttttctgtcaactgtttgttatcccaatgcttgtaacgtacgttcgtacctttacctccaatggccacgcccaacaactcttgtgcgagtgttgccaggcttggcacattgttccactgtctatctgaaattatgaatggcgccatggcctgtaactccaccttgttggagagctcgatttggtggccttcccgtagcctatccaaatcattagcaattgcaacaccgacaaaaacatgatcttcatccgccaggaaactcttgaggttgtcggggatgtcaccagcaatgcccaccttgaagagaaggcacttcttatcgacgcatatttgaatgagggctatcctcttacggtcattttcaaaccattcggtatctaaacccacgatgaggggcttaggctcctcgccgcggacatcccgcaggaagcgctctaccgtcatggttgcagatgtgactgcgacttggacctcacttttaccgactatgatcatcttgtgttggtccgtgaaacaggagggatcgctatggagcttgggcaatgagtcactttctgccatcacagcctttcttttgtcaataggacgtgggcggtttatttcttccgccacttcggtcccttgtttgccgtgaggctgcgagccctgaggttggtcctgcaacactatccccccatttggaggtgggaaagactttgttgatgttgaattccttggaggtgcccccagtatgcttggagaaggtgtggaggaatcggacccctgcttctcatgagtgacagcaggtggcatcgcttccttttcctttggagaagatgaagacaccatcagcactgttgacttggttggtggcgcctttctagcacagatgggccactcccccagtgtgatagggtggaacagcttaggcgtcatcatgaagctggagggcttggcgcccttgtacttggatgaatcaggagttgagttagtaggtgtagccttgtgccaatttgcagcgcattcgttggtggccgccacccttgctttggcaataactcttcttgcccgtcgcttggcaactttggacatgacgggggtgaacccctcttcagctttggaattgacctcttggtcatgagcaactacagccggcgacgtggccgtggtttggagtgaaccagcactgttggaagcttgaatgggacccatgggaacatcaacccacatggaaccgaagcggatggtgacgaagtcttgaacacgtgcagccataccttcatataagaaacccatttatgagttttcttgaatggaatatcatgtgcacataatttcatttgaccatttagatgcaagctatatgatgcaaccatgttggaactcaaagatgaggggaaaagtatgtcccaccgggcgtgccagaatctgatgtcgggaaaacgggcggctagggcccgcctccacgttaacagagacgagtttggttttagttagatttacatgggacaaaaagtaaaagaacgggtattgcgagtccatacttccataattcttatatttgcataaaaattatgttaattacatctccgaagagaacacccctgattaagagttccaacatgagtacatgaaaagatgattacatcatgtagcttcctattacaaa

SEQ ID NO: 175946 - DNA, 783 bp, Zea Mays
gggattgcataaaaatgatgacaaaaaatcatttgtacatgttaacatggaagttaacagaacacatatcagtaccaagtgtacatcaaataaatgatacattacatcagaatctttgtgatgcaggccaaataaggtaacacatggccagtgtatttatcaaaaattcagaaccaacaggtcaatccaccaaacacagtacataccaactaataatggccccgcaccaccctactcaagagacaacacacatcactacatcagtaactatgaatgaaaaatataatccgtgtttgtgaaattaagtttacagtcggtggtgatttagtagaaagcttcagttaaattacgtgtgtgctggttacagatcaggacacaaaaagcaatcacaacaacactggagaagcatcgtctactctggtaaatctatcctagtgccagaaaaggtccggtacatgtgaaacaagaattaaaattataccatggagagtaccaaaacagaggttacacttaaagtggataaggttatatatacatatacctaccttggctagagtctccgtccattcgaacaagcttcgatagaagacacaactcgcaactctccatagtgtcttacagttttgccttccttccctcctcctttgtaccgtgctatgtgcacactatccaccagccatctttatggctctattaaccatcttcatggctctattaagtattaaccatctccatgtccaagactccaaaccatgatctccagcccagctcgcaaaggatttt

SEQ ID NO: 175947 - DNA, 637 bp, Zea Mays
tacctgctgtcactactcatgagaagcagggggccgattcgtccataccttgtccaaggaattcaacatcaacaaagtctttcccacctccaaataggggctcgcaacctcacggcaaacaagggaccgaagtggcggaaggaataaactgcgatccctcttgtttcatggaccaacacaagatgatcatagtcggtaaaagtgaggtccaagtcacagtcacatctgcaaccatgacggtggagcgcttcctgcgggatgtccgcggcgaggagcctaagcccctcatcgtgggtttagataccgaatggtttgaaaatgaccgtaagaagatagccctcattcaaatatgcgtcgataagaagtgccttctcttcaaggtgaacattgccggtgacatccccgacaacctcaagagtttcctggcagatgaagaccatgtttttgtcggtgttgcaattgctaatgatctggataggctacgggaaagccaccagatcgagctctccaacaaggtggagttacaggccatggcgccattcataatttcagatagacagtggaacaatgtgccaagcctggcaacactcgcacaagagttgttgggcgtggctattggaggtaaaggtacggacgt

SEQ ID NO: 175948 - DNA, 509 bp, Zea Mays
caggcactgtagactgtccggtgcgcccatatcgcgttttaaaaaaaggcctccagcccgagaccgagccagaggctccattctctcccccgccagcctttctctctgtcccgctggcgactcccactcccccgccggcgatctccgaccaccggcggccaccgtctccgactgagctccggcgacctcgggcccctctccttccctcctcggtgagcagccctgttctcctccctctctgttctggtgagcagaggctcccatatccaccctcttgtgcattcttccaaaatcttgtgaattcctgtgaaatccagtgcaaccaagttgtgtattgtgttcccctgtattccttgaacactcctgcaggttcttagctccttcgggagggttttcacacctcaaatggccatttcaccgaaaacctaattccccgcacgccagtgacgccacgtgctcggtaaaatgcccaaaccagccaaaaatgctccaattgaacccaaattttt

SEQ ID NO: 175949 - DNA, 479 bp, Zea Mays
agaaaatagtagccgcagctggtgaaatctgactcaccgtcgacctcgccattggtggtgtgccaaggagttctctggacagggtgtgggcgggcgcatccgattagcgctagagttagccgctaggacaccctgaattcttcgccggacaaaggtctccgccgtgctcggtagattgtgggcaatacaacgttaatctgggtaacaatgcctctctttcagtttgccatgacctgtgctacgttttttgcctagccgtacttcgttgtgggccggggttggtcgcgtgcgtgttatctggcgagcttcgccgtgggaggatttggtagcgccgcggcagtgccggccgggtggagacgatggtttttggaccgtcgattctttcaggggcggatatgattagaagcgagtttaccccctttggcgctttaaatcgggaccgtagaatcgtggggtagcggtgtggattagatcacagt

SEQ ID NO: 175950 - DNA, 476 bp, Zea Mays
cgcggaccgtctgtgataggcagataaatcgggcagaggcagtcagattgtcactttcaacacttgtctctttctctctcacactccacacgccaaaggtgattcttgtcgtttgtgagcggacggtgaaccaaaattgcgcacggactgtccgggagattgtttggagttcatcaaccatgtcttcatctcggtatttcaaaatctcatggaatttgtctgatttattcaaatttggggtttcatagggttttctctctgatctagaattaggcagtggaaatacaattttgattggtggaattgctcgtgttactcattgtgaatatggtgcaaaaatttgaatggatttggatggttattttctgtcaaatcgatgattagatggatggggcgactagggttctagaaatcgcctctggacggtcgcggaccgtccgccaggatggcgtggacagtccggccccctagcgcag

SEQ ID NO: 175951 - DNA, 339 bp, Zea Mays
gttttcaagggcacaaattgttaggaaccgtagcggcggctatagagcacatggcacaaacctccctggtataagcaataggtaagcgccagatgatgaaacaaggaggggctgcaatgcaatgcggcttgcaacctaatctagtgctagcgtgttgagaattcacacaaggcggctagcgagggcaaatcgagtaatgtggtgtctcgacttgtaatctgggtaaggtggatgggatagcggcggaaacaaataacagcgatggagcggttgaactacgatgacgacacgacctaaaccagcaacaagactcgacacagacacaaactcaacaaagca

SEQ ID NO: 175952 - DNA, 605 bp, Zea Mays
ctcaggagagctggagcaagctcacccacagatttcccatgtaaccatttatcagtccaaaacaacgtattcaggccatcacccacaatagagcaaacagagactgagaaaaatgctgctgcatttggatgcacctgaacgtcaaaaactgaccatggccgttcaggctgggtctttttaagccacatccaacgcatattcagagaccagcctagcacctccaaattgtggattccgaggccccccctactgataggcctgcaaaccttggaccaaccaacaacacaatggcctcctctaacatctgtccttcctttccataaaaaccccctgcgaatcttgtcaatagctctaattacccatttggggcagttaagggcaatcaaatgataaatagggattgtagtgagaaccaacttaatcaaagtagctctcccagccgggctaataatagcagccttccatcccggtaccttttgaattttgagctgtcatatccttgtcttgtgaatatttcagctgccttttcctgtgaaagaaacatttcgaggttttggagctgccttttcaacactttgtacactgtttactgccacacaaattgt

SEQ ID NO: 175953 - DNA, 298 bp, Zea Mays
gtgcgcccagcccagacgctgcgacggtccaccgtcgactgccgtgcactcgcgcactgcgcacagacgctgcaagcctgcgatggccattgctgaccgccgttgaagtgatggaggacgagcaccacaagcaggaagtccacaaccaagtgcgtccatcacctgcaagtcgcggatcaagggttaaaataatggggaagaagccattaccatcagctatgcaaggtaatcgtgggcggggccaagttcgtcgaggttctggctctcaatcgacaactcaaattcctgttgtggtagc

SEQ ID NO: 175954 - DNA, 395 bp, Zea Mays
gaacccgaaggcatttctttaactgagacacgtggaacacattatgcactgcagacaaggtttcgggtaactaaagtcgatacgccactggcccatatctttcaagaataaggaaaggaccaatgtatcgaggtgcgagcttcccttttaccctgaaatgtgttacaccctttattggggagaccttcagatagacataatctctaactggaaagtataaaggtatccggtgtgtgtctgcgtaactcttttggcgagcttgagctttcttcaaatgataaattatttgctgaactttttcttcggtctctttcaccatatcaggtctaaagaagtacctttcacctggttcagaccaatttagcagagtacgacatcgtcatccatataaagct

SEQ ID NO: 175955 - DNA, 383 bp, Zea Mays
ccgcctgtgccacgttgaactggcggatctgctcctccagcttcctctctttctcctccgcctcaagctcgtgctcggccagcaactcacctcaccgggtgagcatttcttccctaaaggcgagatccgtctctcgcctggcgaggtccatctcccgcctgtccaaggactgttccttcgccttcagattttcctcggcgagggcggcatcgctggccttgccctcgagctcttactcccacttttgcagcctctccacagccttgatctgctgggcccactaggcttctagagtctggtccagggcactcagcttggcctagtactctgttgtgagggcctccctctaggccacggcctcctccctcctagccaccttcttc

SEQ ID NO: 175956 - DNA, 661 bp, Zea Mays
atggcgaccacgtaacaaaggagcacagtgaggtagaatggtggagtgagtgacacggcgataaaagaaccgagtcacggtggccgccggtgaaatatctccggtcaggctccgtctaggtccgcgaaaccatgacacggcccgtagttatctcaccgcggtcgatccctcccccaattcactcgaacacatccaaatctacagtgcctcggatcttttcgttgttcttcagatatttcctgtgctctgatctttagtgttttactgaaccgacctcctttcacccactctatctcctaattcttgttaagaacagggtgatcttcattaataaaatttgttcaccaaacaacagtcttcaagtttactataggattgatggatcaattctgcttagattctcagatttggtgctcccaaatcgactgcatctcactaagaccatggtgttctgaatctggctttcagtattgcccagttcgcatggcttgtttctgacagaacaacttcacaccactagttctttgatttttgtacagcaacatagtaagtcgactgtaccaaagttactcccctacaaaccagctttaactttgttatagaggttttagttaaacacccattaaatcgagctccacatggtcctaaagttggtcctata

SEQ ID NO: 175957 - DNA, 324 bp, Zea Mays
cattggatcatgatccattaccacccctaagtgcatcacattgcagtttcagtaaagcaaggataattggtgaaagcatcaaccatgataaagcagaataatgtggtacaagtaaatactaaattaacagtgtcggtttttaatacctgatcaaggctctgaccaggctcatcaggttttgtaacagaagccttcaccaacactgagtagtaaaccttttcaatcttcttgtttctatcttggctaggcgcttcaacttcatcaatataggcgacccgaagtgatggatatctgccaaaaaaatgccagttatgttattacaat

SEQ ID NO: 175958 - DNA, 581 bp, Zea Mays
tctggttagccttcaggatttatctataatagattttgactagacccttaaggatgtcattcctgaggatatgctgtcggagccgcctgatggtgatatgatggatgttggctcttaccttctagatgtgggattggaggtgtcccgggcagcatctcgcgtgtcgtcgaccttggaaggcggccttcgatgccaagaggttggtcaatattgcccgactcccatggaggtgactgaggatccttcagccttagaggtggctgttgtagaaaacccagcccccaagggtggtgctggcggttacccagcccccgagggtgttgctagtaatgatccggctcgggtgggtagcgcaggctgcaacccagcccccgagggtgttgccggtagtgatccggctccagtgggcagtgcgagctctccttcccatacctccatggatgtccacgtcgggtcgtctccaccacgttccgatggagtgatagtgatgcatacttctttagcttcaagtgagggagtcgccttagaggtcggcgcatcgaatgccagagttctgatatctgctggtagagctgaatcat

SEQ ID NO: 175959 - DNA, 909 bp, Zea Mays
cgaccacggttgtccgcggagctgcgatggcggaggaaacacgacgagaaaattgcggctgttgagagcatgaacccacccaagcgatgttatgacggtattccgggcggcatgatgaggcccatgggtccaattccgaagagccgcccttgccattagctcaaatcacctgcagcggcatctcacgatttctctctcgtgacggtgaccttctactgagcgatggagttacctagtgccaatcgttccattgagcagaggtggggaaggaggcgctctcgtcacgattttatagcttcagcggaggtcggttcgcggtggttgtaacggaacccggcgactccgcgcggaaacaatggtggcgactacggtgttctggtagagaagataggtccgacaccatgggcctactagcagtgatacgagggagagactggagcgcaccgtggcgcgcgcggccgagaggttgagcagtggccccgcaacgtcagcgaaagagggaatacgcaggcgcggggagggagcgactgacggtagtggcccacatgtcggcacttttaccttcatgggccgcgcggtgagagggatgggctgaggggagggaattcagcctagaatccagtttgtccattttcccttttttttctttttaatttcttttctaattctaatttgaaatgcttaaaccaaattcaatttcctgttttgaatttcagattccaaacttcattaaaaatcccaatataaagataacacctattatttatttgtataatatattttattttattctctttttagtgtctactcatttcttacttctagcttatttccaaattcaattattcaaactcaaatttatactcttgtcttaattttcagatttgccaaatgtatcaattgaaatac

SEQ ID NO: 175960 - DNA, 718 bp, Zea Mays
ggatgaattgggatgagtgactgtgtgtcacgggctagctcatttgttgacaaaataaaatatctttcatgagccatgcgtgtttggatttagcgttgtagtggaccacattaatgtatccaccagaatttggtcccctttgtggggtttagataagaaacgagtgcctggtgagcaaaggtggtttggaagactatatatgttttcagaaacatgaataatgtaattaccgggattgcaagttgctaagtaagattgttagattgtctctataatagatcatgtatatgatagtgtactgttttacactatagacaatactatttacaggataatgttcaaaatatagagggtgagatagagagctgctagagccaaacttagacaatgacgctcagtttataacttgttggaattgtgcttgtgtctttatagtggcaacactagtaggtagggtcagatttaggtagagggtcaccaggatggtctccctaggcccctaaattagatggacccctccttatgttttcctattatatatgtattttaatttccgtacactaaaaaaaatctaaaaaacgataaaaaactgaagttaagtttacgaaaaacatcaatgtcttcgatgtatattttttagtataacaaaaagatagatttttattctaatatatttgttacttattggatcttatttacatgcatatgtgatggcggc

SEQ ID NO: 175961 - DNA, 612 bp, Zea Mays
gtgacttctcgccgtatcaacccgagagccgctagaacttctggtggtggtaaccaggagggtaatcaagaagtacctcttcctccacctttgccatacacacccgagcagtttttcgtgcaaattttgagagctcaaaggaatatggagaacttgcagcggaacatggaagcggagcttcgaacattgctgacaacacttgccatggcaacctcaagaagcacatggggtcaatcagtatagcagttttaaggatttcatggacaccagaccgcctatattcaaagaggcaacagaacctttagaggcagatgagtggatcaacactatggagcagaagtttgtttgacgatactttcagatgatctcaagacagagtatgcagcacatcagttgtaggacctgcatggatgtggtggtctcatttccataccgcctaccctgaaaatgctccctttgcttggcatcaattcactgcaactttaagaggaaactacattccacctggtctaatggcaatgaaggtgtctgaattcatgagattaactcagggcactcaatcagtgatagagtatctgcatgctttcaacagcttgtctcgctacgtgcctg

SEQ ID NO: 175962 - DNA, 902 bp, Zea Mays
tagcatattattctagcagtaggggtttgttaatgtcaagttcagctgtgacataatcgttgggggggaattgcaaggcacaatgagctaggacaactcacagttcgtcggtgcatcttcctcgctcacgtggaaggacattttcggtctcatgctgaaggtactggagctcatcctgcagctctgttatctgcccgatcaaaccatatgatgacacatattctggtgacgttgcttgggaacctacaaaaaatttttttgaaaagctgaatggattactccagcttgatagtcaaaagaacatcccaagtacatgtggatataggaattgtaggtggagccagcttactcgagtgactgctaaggatatccctcacagcatgaagataagaatcactgtcgtcaactgatccctcttcaaacatttcagatgctgcttgatcaattaaattgtaccggccctatatatccatgtagtagacactctaatttgtaagaacacaagtggaaatgataagaggctaaataatatgctgtcttaacggatgaactcggctacaataccaggcggccatcaaaagctgagaagtagccctgcaattccaattctacagctttcagaaatgagtaggcactcgatatttttatctgttcttcgagctggcaggctatctttagaaataggtgagcagcaagttgattgacaagatggttgatgaactgcaagatataaagagtgtctacgtgaccacttatcaggtaaaaagatgggttgctacaagcaattgtcaaactcataaggcaccttcttctgatgacttatgtagcagtcctggcgcagaagctttaaattgtgatctcctagaaggtcatgaattcatagttacaaacatgccatacta

SEQ ID NO: 175963 - DNA, 949 bp, Zea Mays
gggaggccgtggagaaggccatggacaacggaaaccgcggcattggcgcaggactcgttcgtatcttcttccacgactgctttgttcgggtacgtacgtcatctcatttcatcttattatatgggatacacatgctgcaacttattggtgctcgatccccagaacacctgtccgtgcttctagcttcgctgtgggcgctgcctacccacaagcgggagagtttctctggagggtggcgatccatccctttccgcccgccagactttggtcctcagccaggagggggagggggtgagctcgctggtgaaacttcagagaagatggacccaaggctgaaaccctcacagtgggatcggtggaactctaaggaggcgaggaatccacccaatgcttggggaagacaccgcaatatgagctggcgactccgaccctcacacgtgaaatctgagggagaggtgattggatcatcatctggtgacatgaataacccaggtaaccctaaatccccgactctccctgggatgctggaggtagaaggaagtcgtcgcacattctgccaaaaatgcggtgatgaaggtcatcatgccagagattgttctagggctttgtggtgtgatatctgcatgaaagagactcatgtaactgcgaaatgtgtgtggccaagacagaacaaacctattatgccattagtgggaatggcagcagatggtttgagtttttactcctctcagtttggaaagaacatttccaaaaaaccaaagaggagcctgttgggattagtcaaaattgtggaggggattgtgtctgctggtgatctggagagggattttagcttccatttcccatggggacgaccctggaaagctgataagtgtcatcttggtttcctgatgcaattcccatcacaggacaggcttgatgaactgaccaactttactgagttgaagat

SEQ ID NO: 175964 - DNA, 321 bp, Zea Mays
gtctacttggatcactaacagattggagagggttagaggagagctggcgtgggcgcgtggcagagttctcccatgcatactgatacggccagagcatagtatagatcactttagctttgtcgcttgctttatccagagtcaagcttggtaaatttggcttgcctttacggccaaggaagaaccgtatttgatgtctaaagatcgcccaggaatgcgtgttactttctacaaaatgagtaagtactttatgcagattctgttgggactcgaaccgccgcgtattatccaaaaaccgagaagattgtcagacgaggaacttcc

SEQ ID NO: 175965 - DNA, 489 bp, Zea Mays
tcacagagtaaccagagtgctcaaacaagggagagagagcgatgaactaacctggaaagggctggccgcggtgatgggtggtttacggtggcggagagtcgatttgggggaaatatgaaattggggagctgtggggaatgatcggagctacgagcgggttctctggacgtgcgattacctaacggaacgggctgaggcttcaatttataggatacttaaacggtggtggccaatttggtcgagcaacgctggcagtcggagatggagaagaacctggcgcggtgaattcgtgtccatcgctgtggcaggctcaccggcgttgataagacagtggtagggagctacggcgatgtggtggaagggttgagacacgcggcgcacagccgggaggcggcgttcaccagcgagtttatctgctcagccgtagggtagaggggaaagcacgagggggggtcaccggagtggagcccagctcaccggcggtgaaga

SEQ ID NO: 175966 - DNA, 570 bp, Zea Mays
agcccccgttcgtgcgttcctgggactcccctcaaggtaaccgtcctagccccacccttactttcccctgtctcgcatttacctgcccgcgatttctcgccagagtatcccccggcccgttgaggactcccctccgtcgtttggtcgcctcagcccccattcacacaaaaccgaccccgccatagtgctcgccgaaccctccccaacttctccagctaactggactgacccctcgcgccctaggagaccagtctgccttgcctccggcgatggtgccgccgtgcctgtggggagcgccgcccctggcttcccggcagagacaaagccccctagcacgcatcatgtccacccaaatctaatcggacggcctgatttcaattaggccagatctaatcccgaccgcccgatctagatctgactgctccccactctctcaccgacgccctgcagctggggttggccggtcaggccatcttgccataggccgctgacgcccctggcccgctggtcaggcacgcctgcgttcacgtgcgcgcgttcgctcggccatatctaatcctggcctttgct

SEQ ID NO: 175967 - DNA, 477 bp, Zea Mays
gaagattctgaagatcggccgtggcgaccaagccataccatcttcggaaaatcaactatcaaacaaagtcacgttgatgctatgagaggaagatacttccgcgacatgactattgtgagggttggaggagacagctctgctcctgctcctaaagtaaatgaggtggttatctaccgaagctttttgaaagcagggcttcggttcccgttgagcaggttcttggttgaagtgctaaagacgcttcaaatctttcttcatcaacttacccctgaagcaataatcaggatgggtttgtttgtttgggctgtaagaagccaaggattggaaccaggcgcgaagtgtttttgcagcatgcatgaacttctgtacgaggcgaaggccaccgggaaggagcagtatcacaacaacttcggttgttacggattcgttgcacgatccaatgcaagccatccagttcccacattccgaaagagatgg

SEQ ID NO: 175968 - DNA, 482 bp, Zea Mays
gtaacgttgttaggtgaatgcgtatgttggctgctgttgcacgtgcgaactgctgtgtggaagctgctgggtcctcctctattatgtgtggcttgtggcgggcttggactgctctcatggcttcgtcacttggaactgctcgtccgtccggtcctgcgtgcatctctctctcctagctggaggcgtggtggcctggtggtttctctgtgtttttctttttacgacggcttctcttgttggctagggttggcatcaggggcccggtcagctatgctccctcagcttttataggcagcgaaccaccgcaggcagagcagagataaagattccaactgcatccatctacaaacaaggatctcgacggaagagataaaagcatgcagcacaattgccgctgccctactgcagccttgactctcgtcaattggatgaccaaaagatgccaccgtctaagctcttttctttgtgcagctgcctgtttg

SEQ ID NO: 175969 - DNA, 884 bp, Zea Mays
ataccctagaccagacatcgttaagtgagacggctatggtggaggtagacattggggggatccaacaggggattggacatgccacatggtgatgcgcctagtgcacagattatagatgaagggcaaaggggtgttcctatgggcacccccaccaccatggttgtcacttgcaccgaaataaaaaacaccccaaaccccacaacttcgaccctagactgaagggaaggatgtgtagagccaaagacaggaggtacaagacgagtgtgattgtgacacctaaggtatgggtggaagagggcggtcatgaggtctagcccctaggggtggagctatagagagtagcagcatcatcaaagcaagaaggcaacccctttgtgagctcctcgaggatgaggttgttacggatccaaatacatatgtgatcgtagcgctcattgaggccatggaaaaggttgaggatgagcatgcgatcagagacggactccccaagatcggagagggatgctacgatgcccttcatctggcggtagtactcaatgactgagaggtacccttggatgaaggtgggaaatgttgtgtcgacgtggagaacgtgagcctcacgattaccaaggaactctcttagatggcaacctaggcctgacgggaagtgcggccatgcccatggacgacatcgtggagctcaatggtgacgatctcgaggatccatgagaggaccacactatccacgcgccactaggagatagttacggacacggtgtcggtgaggacatggtcatcaaggacatagagctaggggtgaggaggaaaaggtcacaccagtgggcataggtggaggaagttgggtcaaggatgataggaactagagattggatgttctagac

SEQ ID NO: 175970 - DNA, 407 bp, Zea Mays
caacagcgatagaaggacgcccgacgccaccgacccttccacaaagatcgtcggcaacgggatggctacaaaaactacatgactagtgtcaagtccactttatgccatacgggactgattaccatgcacttttcaccatacccatcgttgtttcaacaactatgactcagacgtctcgtccacaagatggcctcgggtacgcgtccgagccccgatcatggcctcggctctctgtttggtcaagatatgggctataggggccaaacatcctcaaagataacaagccaggatagggaccattctggtggccatactgctacaggggctcgggctcgcatcctctccacattacgacaaccctggtactcctgggtttcctccttgaggctataaaaggaggagtccag

SEQ ID NO: 175971 - DNA, 770 bp, Zea Mays
attaataagaattctgatggtatttttatccaagcaggttcagattctcctggtttcgctgtagctggtatgttaccatcaccaatgtctagtatccatttgctgaattcagcaatatgagttctttccttatttgttaattctgctgaagctagcctcatattttctgtgaggtgaagaacaacaattgatgaccaaagtggtgagtttgttattgcagcattaacaatttgtgcatgatctccaccttctataacaggcaagatttgtcttggatcacctcctaagacaattactttacctccgaaaggagcattggtagatgtagatgcatttaagtagagcaaatctcggagggagcgatctaaagcttcaaatgcacatctgtgtgtcatgaaagcttcatcccatattattagagaagttgattcaattaattcagctagcattgttctcctttttatgttgcaagtagtagattcatctagatcgcatggtatcttgaatcgtgaatgtgctgtgcggccacctggaagaagcaaggatgctacacctgaggaagcaactgctagtactattttttattggctcataggtgtgtgatgatagcattccataagaaagtttttccggtgcctccgtatctagacacaaagaagaatccaggtttattagcaatgacagtgtctataatagagttaaaagcatggagctgatttttgttgagtctggaatatagaacatgggatagatgtgatagttcatcaaag

SEQ ID NO: 175972 - DNA, 961 bp, Zea Mays
gaattttctatggattatacaattcctagcacttattttcatattaaaatctattttctaattaatttattcaatttacaacaggcactggactgggactcgatttccagaaaggtcaggggttccgacgtaaaaatccctaagacacagtctactgttaatgaggacggcgggttggtttctggaaagcataggggttcagacgcaaatcaacctaacgaaggggtatggcggtatctgggtcgcacgattgcaaatgaacggtgcggattaggtccagattaacttcgaaccggcaccgcatcgaggccgtcagatatgggaatcacggttcggatttaatgactcgaagggatacaccagatttgatctaggccattccctgcacgatcggcggttgagggccaactttcccctagatctaatctaagccgtcgagtacgcgatcaatggtcacgatctcacaagcgaaaaggggtatgcaggggtgatcctggcccctgatccgtgaatccatggctcaaaaccccacacgcctgcatctaatcccaaccgcatgatggatatccaacggccccacgcatcatcttcttctcccctgacgggccggccacggcggcacccgagtgcccaaggcggaggttcgccagcgtgggctctgctcgtaccgtccgacgcccaatcctgaatcaacctagtgctaaacgaagtagagaccacgacgaatagctctggggcatcacttacctgcgttagtgacgatggtggcggcagttcacgcagagatgcaaaccacgacggagggggaaagtcgtcgagcaatcgccactgattttcggccacaagagctcaacgagaacagcagatacgatccacccgagagtgcaaagctatctctcctacaagttccaccggagcgacggtggtccctagttcacccgcggcggtactccgccttctc

SEQ ID NO: 175973 - DNA, 550 bp, Zea Mays
cattttctcaacttaaactggacaacacacaagtcacataaaacaccatattttaggagacctcacatgtcgagcatcaatttataacctaagtgactcaacctcaatcatggttgacaactaccacatcacctgatttatctatttggaataccgcctgcctagcgtactactagtaccccgcattttgactcaacttaaaaacatagaggaagcgatgactacttcggcatgtcaccacctcactacacaagccaaaattattattatttaaccacacgcctagataagcatgatttcaatttaacttgcctatattttaaatttcggcataagcttggctattggctaacaaagtgaccattttctaattaccaacatacaccacctttcaccatttgtggatacttgcacgacacacagctattgtaatacatcacaagtacatacaaccccatcagtaaagcaccagcacatttccgaaaattccccgagactacgacgacaaggcatcgatccgccatacaacaaaactcatgacgaagccgat

SEQ ID NO: 175974 - DNA, 566 bp, Zea Mays
aaaatatataaataaatgtgtcatttcatatcaacatcttggactagtacatctagttcaaattcaaagtttacagtcgaatttggattcaaatttaagaattcaaacatgaaaagaaaagaagaaaatagaaagaaaatgggaaaaaaccctaacctaattgggcctgcggcacccaatttggcccactgaagaaaaccaactgtgcggcccaggactacctgcacgcgcacaaccgccagacactgacaggtcgggcctgcgtgccagcggctgcaaacccgcgcgcccacgtactggagaccagcgccgacagtagggtccacggggcagtctctcgttcgcgtttcacgcgcgctcgtcgtctgtctccgctacgctgaccggtgggccggagatgtcaactccttcctcaactgaaatccgcgcatggcgggcggcgtagtctcccctccccttcttccggagctgctggtcgtggctccgaatccgtaggatcggggcgttaaatgccgtgcttgcccacgaatcctccaccctaaaaccacacgaaaccagccgtcctc

SEQ ID NO: 175975 - DNA, 480 bp, Zea Mays
ttagcttggtatccatggactcatgtagtcttttccaaaagcgcgaggtaaactggattcctcgattcgatacgatcttcttcggtactccatgtagacaaacaatcctcgacatgtataattctgctaattgggctcccgagtaagttgtcttcacaggtataaagtgtgccactttagtcaacctgtctactatgacccatattgaatcatagccatcccgagtacggggtagtccaactatgaaatccataccaatttcttcccatttccattccggtaccttgagaggttgtagtaatcctgctggtctttggtgttcggctttaactcgctgacacacgtcacataatgcaacatgagtagcaacatctcttttcaaaccgtaccaccaatacttttcctgaagatcctggtacatctttgtacttccagggtaaatagagtaagccgaatcatgagcttctctcaagataagtt

SEQ ID NO: 175976 - DNA, 629 bp, Zea Mays
gtgctctatggcccgaggggttcgtaggtcatgagtgggaggcataccggtgccttcactatggctcggtgccaagcgcagttaatgcggtcagtcatttatgacgggttggtcttgggctagatgcaggatccacacgagtagtttccctctggcatgtctggccctcctatcaggttctaccaagcctgacccttggcttggtgttgcggggttcgtccggggcgggttctttcagggtagacgttatctatctcctccagccgaccaatgggccccgggtgccagggccctttccccagtgtgctcactgaccgatgggccctagggactaaggatagtatccctaacagtagcccctcgagctcctgggggagagtatttcccctcgggggctgttcttgggttgagcgatgtttgtccttccacctttcaagcccctgtgatggttgtctcttcatgaggcgtgccatctttaggcatggtctattcctccgtaaggtggggatgggtgcttttccttcctttcaaaagcttaagcgagcgttcgttgtcatcacctccaaaccctccatcctcaggctctcgcttcgaatggggtccaccgaggggttgtctgtcgtctcgtc

SEQ ID NO: 175977 - DNA, 871 bp, Zea Mays
gttttagggcccaaagctttgttgacatacgcgatcagatgattgtcttgcatgagaacagcaccaacacctaagccactggcatcggtttccacacagagttgtttggtgaagtccgactaggcgagcactggagccgagtgaagagcagttttccgtgtctgaaaagcggcttcgtggtgccctgttcattggaaaaccgacgatttctttcagtaggtttgtgagaggcttactgataaccccgaattgtcggacgaattttcgatagtaaccgtcgagcgaaggagtattcataagcgtgtaagttatcaaccagtttagaaaattcgtcaatgtactcagatactgagctagattgccggatgtggaatagtttctgaatggtgatagtgtgttcatcacgaccaaagcagtcttcaagtccaggacatgtgaggtgttcttctcaacagattgaagccaacaagctgtcgacccttctaaatacattgtggctactttcacccacatgctagtatcaacacaatacatatcgaaataagattcacaacgagaatgccacaatttgagattctcaccatcgaattttggggaaaggcattttgggtaggttactgcgaacatgtgtttttaccatgacaccatgtgtatcactaagctctatgtaaatagagagcactaaaatgaagcaccaatttctttgatatgtttctaaacttctatacatttcaaatggtcggttagggtggtatttataggtgccaagtccaacaatagctattaccaaaagtcgtagcaatctgcatatgcaccgaacatgtctggtaatagcactagacatcacatcgtcctcctaacaatttgatag

SEQ ID NO: 175978 - DNA, 743 bp, Zea Mays
ccctatctggtctcacttcggcatcaggaggccgtctcttgcccttgggaatgacgtagaagcatgccaagctgcgtataacatagtttgcacatatattggcaccagggatttggtccaagagcacattgcgtacagagtgtggcctctctcaagcggctgggagatgccgaacgaagctgcttctgggtctagctaggatggtttagtttacctgaagtacatctttaggtaccgaaatcaattcgatgaggcaaatgatgactggctagattgcattgaggcaactagcgacgagttgcttggtgcctacacgagtgccgaggatgatgccctgacagtggccttcggagggcgaggcaagaagagattgtacatggtctttgatgtcattggttttgtgtacctagactattgttatcccccacgaaagcagggaaagaaaaaaggctgttgctttggctatctctaccacacagaagggaaaaaagcttaaagttttgacgcaccggcctaggtatatttaaatggccaaagtgtcgaagcttgctgaagggcattctgctgttgagctagactactccgctcttgctgaagccgaagtgccaaaactgatggtaatagcggaacagaagaaaaccgaaacgaccgaagtgccgaagcattctaccgaagctaaggagaaaacagccaaagaaccagaattaagaaagtcgtcagagcaaccgaaaaccctgagcccg

SEQ ID NO: 175979 - DNA, 342 bp, Zea Mays
catcaacccaagcgacgcctacaatcttgcctgcaccattagtttcattgattgattctggagccaattcttgagaaagaataccgccagcactagtagcatcaacattttcagcatcctgcttagggtcatcctcaagcacactgaccacactagcaggaataaactcatccctgtttcctccattcataaccactgcggttgcctcatcttcaacgtcaccctccttcttagctgattcttttaaggcttcttcaccttgagcaagctgctgcagtaatccttcatgcgtgtgagtttcagcttgcatctccccatcccatgccactgtaagacccattt

SEQ ID NO: 175980 - DNA, 676 bp, Zea Mays
aaataccctgttcaatcttttcttcccccggcccccgaaggctatggataaggcatcatcttcggccttggaatatgtcccaagtagctcgtcgctggtagcttcaatgcatttcaactagtcatcatttggttcatcaaacatctccctaaatctgaaggtatatttcaatcggactaggccaacttcactggattcggcagtagtctccttcggcatatcccagttctccacaagtggccacaccctataggctatgtgctcttggactatatctcttgtgccaacgaaggcacaaacattgctgaaggccttctggcatgcttcgacgtcactttcaatagtgaccttcggccttcgaaggccgaagcgagaccagatggggtgctagataatttccttgatgtcttcccttttaatcagatcattttaaacataaaaccactcctccatctaggccctgggccacctttttcggtatgtcggcaccgggtaacttgcattagagcgggcaatgaacccgtagcaaccaaagttgttgtggtattgttctttgctggtagccttcatctcgtataaaagctcgtgcatattacagaagcactttgcactcggctccagcccctggcttcttacagcccaaacaaacatccctatcctaattatagcttcgggg

SEQ ID NO: 175981 - DNA, 932 bp, Zea Mays
tttctattcaagactaaatctttgggtacaccccatcctttcaagtctccttttactacttattcccatgtcaacttcagtcttcctctttctctcttctcattgctatcgcgccttaggatcccactatggtctggcgcttctagaggtctccgttaaatatgtccaatccatctcaactgatattggacaagcttttcttttgtccataccatctaacaaaagaacatattgtctcaacagaaaaggtttgtaccgtttgttcataaatttattatgcttatggagaagaaaaattgtagtgtagattcttgtggaacagcatatgtgctatgttctattccatgtatgactgaaaatcgggagattttaccactgtgttgtctatatgtaatactggacaatttgtgatgtagggtaacattagagggaggtggatggcataaagcatagttgctgggtggatgtggccctgaaggcctgaacctcaatggcgtgacagcagggccatgctcagttcatcacaccctcgaggcaggaacagagtaggaatggaggtaaatctttgcctacagcatccataggtttatatagggctctaatgacatctcccaatcgatctcccaaagtttgtaagagcacctctaagagtctttctaaaactcactctctaaatcatcatttggagagccatttgcataaaagtcgcattctatatctttccactcgtcaacagtttttctatattttgtgcgcactctagagagccattctcactctctatttttagctagcgaaaaatccagaataggaatggtcatatttagataacaattagaaaagctgttgtagggtatttttctatcaaaatttatattcctaacatttaggaaaggaatggagaattagagagtctcttagagtttctgtaa

SEQ ID NO: 175982 - DNA, 645 bp, Zea Mays
aaaagagacgttcttgccgatgcttgaagactttaacgggtaggtacccatgtgctgcggttttaccgcagccacctggttggaaagccaagagccatgtccccaagaattttgggaaagaccgcggatgcgataggaggaactgcccctaaaatgacgcttgttgttgttggagtagcagtcatcaatagccccctgacaatgagagcctctcccatcccaccaagacctgctccgaagatggcgacctccacgacccggatcctccctattgtcatcatccctccggtggtatcttcccttcctgcatcctggtaaacatccttctctcttttctctcctaaagagtcaggaaccccataattccacttgaactcgcgccgccttttgcgatcctgaatgttacgcccttcaatgaaagataggtcctccacaacatcaacgtgaattagcagcttatatgaaagaccaaacttaagccccataggcgctgagtggtgcacttggaactcagacgaagggaattcatctgggtcagtaatggttagccacacttccttagcaataccacttgggttgatactccaagcccataggtcataagtcctagtgcgctcccgacgacggttgtgctcgtctacataa

SEQ ID NO: 175983 - DNA, 513 bp, Zea Mays
ctccttggggtcgtagtacgcctcgtccgccgccgccagcttgccgccgatccccgacacgcccctgtacagcggccgcgacatgcctgctgctgcggatggatctcacgaggcgcaccagtgccgcatggagcgcgacacgcgggccgccacgccactgggccgcagcagcgagcaattccgcgatggcctgcgctgctgccgccgccgccgccgccgctccactgagcgctagcgctattgcgtcctcgccattacacgagtaatggggagagagaaggtagcagcagcagtacagtaccagaccaaagtagcaatcgagtgaggcccttcggcgtttccctccagaatcccttcgccgttttacccacgcgtcacaggacagaacggaagagcggagagatgaacacgggacgggacaggacactgacaccagtataaatagggctggagattacggtgctcggatgtctgagtgacaggtaggccatggtccactggacccgcggtcgg

SEQ ID NO: 175984 - DNA, 548 bp, Zea Mays
gcggccagtgactaatccatgccagccattatatttgtgtgcacttgttcgttttttgtttatttcaaataggagctggtccagagcgctgcatgcgcgcatccgcataatcacccagatcgatcgacctaattagtcagctcaccagtaatcggcagcttggagcgtgcgtgcgttggactgtcagctcaccagccgccacacacacacacgtccgtctggtggcaccactcctgtgcactgctagctgtccacttttgctgcctgcctggcaggcaggaagcagcaccaacagaattattatactcccaaagttccaaaacgtttcagcatactcctacgtactgttggcgggaaacagtgactttacaagggagctacaacaaaatctgctggagtttatatgattatatcacagcagcacagccttgctagctagctattatttatcctggagaggctgggggagcaagcaatggaaaagggggttatattagttattactcatgtcttttaaagcacgtgtgcgaaatggcgacatatgtact

SEQ ID NO: 175985 - DNA, 554 bp, Zea Mays
cgtggatatgttctgtgctactgaatcactggattgcaattgttatgtactgaaaccagttacttctcggttctctgtccatgctgatacgtctgtgccatttctctgtgctgttgacgcatttcagtaacagctgagtcccgagggagaagaagaaggtatcctctgctatgcccacgttaggtcagcccatgagctctatcatcgccttcatgaccgattctttgcttatctcccctattcttgatcttggctcctgctgttgactccatctgcctgtcttgcagttcatggaagacccaattggctcatgttctatgcaactccatgcagtggagacattgtggattctgtgatgggctaattgcactattccctgttgatttcagaggcaggggtgaactgtgatgggctaatcgcactattccctgttgagtgtcaggaacagtcacaactcgtaacaagttgaaggaaacatttatttatgctttttatatgctatcagctgcagcaaaagttagcacagatgctgtccacccttatcaagattgctg

SEQ ID NO: 175986 - DNA, 427 bp, Zea Mays
taaggacaaaattaaagtgagctataatgagagaactacctgtatggctgtaaggtcttgtgaaactcaaggagtgtttggtagggtggcttaccctttgtccaggcttagataatactagttttgattgtttggatgcctgactagcttctaagcgaggcttgagcgagccaaaaagagtgttggcgcctacattgccggaaacccttgaggtctgcgtttccacaaagctaggcatgtataagtgtagtggcccacatgttaggatttggctcacctccttgctcctttgtgtctttgtcgagatctgtatccaccatcgacatcttcctcgcgagcaccacaaccacgatcggctcacctcctcttctactgtcgtccaccaacgagcgtcgtagccaccgtcagctacaccaagctccgccga

SEQ ID NO: 175987 - DNA, 675 bp, Zea Mays
atcgtgcataaggagggaatcgggcgcgctgatccacggtgtggagtgaatccttcgccggagttacgtctccgccgcgttttcgccgtgcgccgcgactttgctcaaccatcgtccgtttctggtgagtaaaccctgtgccatactcactctggcccagtggtagtctagcacctagtgtattagggttttgcgcactggagccatggatctaccttgtccggcgaggcctccgccgtgcactgggcgccgcctccaccgtgtgtgcgtcgggttggggtagccgcgcttctaccgtagatttcgagttcgatggcctagattagaattcgcgtgactattcagcaggttgatccgcgccatcaggtgatgatcggacgggcgcgtgtaggccttgtctactttaaatccgtgccgttgatttgctgccagagggcgctgatcgtgtcgcatcgtcgggtgatccataccgtgggaatcaaatctagcaaccctagtccgcaccgactcggtagagccattggtctaatcgtcgccgtcttggcccgatctgacggtcgcgattaagcgataccccttcgcgggtcaatttcgctaaagaatccccgtgaaacagagaaaccaacccgccgtccatattcactatgcactgagtcttggacatcttaccccgtg

SEQ ID NO: 175988 - DNA, 440 bp, Zea Mays
ggttggagactgttggcggctaggttagaataggagagggtactctaaattagactgtagatgggctaaaaaaggcccaataactaaaccctagccaggacgaccaggacacataactcggacgactagtcgccctagtcgacgattagtcggacgaccaggacgactaggtcttctagtcgagtcgtccagcaaattgtgtcctaattgccgaccagcccgattaatcgtgattagtcggacaacttgaaatcattgtcagtccatcgcgtcagtggcaaggtttcttggatacggtagtggttttgggacaccgcggggctagtagtgcttgttgtggctaggtagagacagcgtctagggagcagaataaccatacacgtgaggagatagggacgatagcaacacaagtgatttatagtgtgattggttttgttggt

SEQ ID NO: 175989 - DNA, 421 bp, Zea Mays
cgcgggaagggtccgtccctaaactgcattctcaccgaatatacccccaagcgatctactaggattactcgggggctcgggggctgcatctagcagatgcgcttgcgcgcacccgggatttcggtcctcaaacagaagtaaatggactcacgctcagcgcgtgacgaccatcgcgggaagggtccatccctaaactgcattctcaccgaataaacccccaagcaatccactgtgattactcgggggctcagggctgcatctagcagatgcgcttgcgcgcacccaagattttggtcttcaatgatagcctccgcacaactccaaggagttgcacgaaggctcgggggctgctatcgggtacctaggaaccaggtgcccaaattaggcccataaagcgcaaaacgacccactcaccaaccgg

SEQ ID NO: 175990 - DNA, 744 bp, Zea Mays
cgacgccccgaccctgccacatgggcaggttcaggggtaccacgtggcaaggaaagataatacaccccagggtgcattatcgggtccggacccccgcggagaaacaccggacccctgtacgcatagcctgagcctttgattatggtccgggactcccaagaaggtatgtcgggtccctccgttgggccctaggttcctctaagtagggtccggaccacaacaaggacacgggatggggggaaccccagcatgagtaagggtctggcgctggtacgtgtctaggccttgccctacgctccccgctcaggcggagacccgctgctgccgtgtggcttgtggcccgtgacataagccaacgggcggagcctaatgtaaggcccctaaagccgcacagtctcttgatttaatatggagaggacgcgccgcctgccaccacgctgacagacgatgtgccctctcagcatttaatgtgtcctgtccactccgctggcagacagcgtcagggtaaccttgcaggcggcgcgtctgtcaggtctgttaccaaacagtgcgcccatgctatgcagcgcactgtggatatcgtcccttgtacaagaagcttccccagcacgccaaggatacgcaaatctcgggtgtcagggcacgggaaggttgccccagcagcgaacattagtagctccaagtgctatatacattttgtccctgggcccacatgtcggggctcagtacctttgtgcatgcccc

SEQ ID NO: 175991 - DNA, 496 bp, Zea Mays
gtaattaaatatcttttccgaaagaaaatatatatccttatattttttttgcttatgcagttaactagaacttccagattgcaagtacgagctctggcatctcatgcatgttacccctgaaatgctaaacaaacacccctctggatttcttgtcaataacagttgcatatttggtattgagttcatcaaagttgtcgctaccaaagcaaaaacaatgttacaaatagtgtttgtcgggaagatgaaagtctttgacaagaccaatgtttacactctgaagaaatgacccaacttgccagagtttaaaatcggtggtacatagtgataatcttttcatcttgcaatacttgacatgtaaacaaaacatcgagaaatttgtatatgtaactcaattctttcttagatctgttgggttcaactgtgctgtacatttcaaatcaaagctatgatgattggttaaatgttgtaggttgagaacatgtaaccaattgtaaat

SEQ ID NO: 175992 - DNA, 313 bp, Zea Mays
atttaacaacgaataaaactacatttgccatagcataaaatagtactttatttgtaacatgaacgttttttaaaacagagcggagtactgcatttaaaacagcaacagagcaccacaggtctcgtttcatggtgcggagaacgccagaagtcgtccagcttcccgaggcagcggctgcgtgggcgcttctcgcgaaccgttggccacccacttcctggagaagcgcttgaagaagaagctgggtaagaagttgaccgtttggttcggtttctggcttctgacggccacaatctccaaagaagctgatccaaac

SEQ ID NO: 175993 - DNA, 313 bp, Zea Mays
cgtgcctcggctcgactaagttggcccggcccgtgtcgtgttcgagccgtgctgacctggcatgacccattggccgagtatagtctcgaccaatatgacatccccatgacccccaccataaacggcacacaccccgtcaacgccccgtccgattgagagggaattatcgggttgacgaggacatagagaccgaagcgtgtgctggtgcaccgtgcatgacccaatcctattggttatgcttgggtcgacccttaggcccatgtcacggcacaagcctagtatagtttatatagcaatctgttaatagcccacg

SEQ ID NO: 175994 - DNA, 566 bp, Zea Mays
tatggatcttcacttacagctccgctcatctgagggcacacctcttgctgatccttctcggtatcgccatattgtgggaagtctggtctatcttactgtgaaaagacctgacatagctcatgcagtacatatcttgagtcagtttatgagtactccaacttcggtgcattatggacatttgcttcgtgtcctacgctacttacgaggaacatccactaggtgtctttttatgctcaaagcagtccgcttcagctttatgcttattctgatgcaacatggaccagtgatgtgaatgatcgttgctgtcatgggctattgcatttttcttggttcctctcttattgcatggaaatctaagaaacaagttgttgtttctcgctctagtaatgaagcataacttcgtgcacttgccaccactactgcagaaattgtctggcttcgttggttactggctgattttggtactgtgtgtgatggtcctacacctcttctatgtgataatactagtgctatacatattgctaatgatctagtgaaacatgaccttcaaaatcacattggcgtag

SEQ ID NO: 175995 - DNA, 627 bp, Zea Mays
aaggcgacgcacggctcggtcaatgcgtaggggacgctgaagttgacggcgggtcggactcggagttgtagacggagctcgcgacggcggggtggattgcctagggttcggccgccgcggtggagaagaacgagggctcggtctctgcggtggagaagaaagagggggcggcgacaccgcctccgcgattccaggccccttccgcggtgaagaaaaacaaagcgacggcgtctctgcgggggagaaggcgatttcgggtctctgcggtggagaaggtgaatgcgacggcggtggaacggcggcggggggggggatctctatgggttcggcagccgcggtggagaagaagacggcggcgattgagctagggttcggctgccgcgagcgttacgggtgagttgagctgaaaaaaatgcgtcctcggttgctggattcgtgggcccgatacacataaaatgctggcgaaatcaacatgaaggcccatggaccgacacgtggattactgtatcgtaaacggacacataagacatcgtattatgaatatttatgtggggactagtacggctgcctagattgcgggaacacaatcttttcgtgggcccggatgtccgaaacatgcgcataccc

SEQ ID NO: 175996 - DNA, 523 bp, Zea Mays
aaaaaatgtcgccccacttgtgttttcattgacgtttggtaaccgaaactttcagtggaaatttgaacataccgccgatttttagctcttttctactagtgccaaacagcttccaagttccaaaagcctcttcttcaacctcgctattgcttctcgctcgccatcgccttcccatcactggccatctttggctagccttcaggactcaccatctttggccggcgcgctttgccgccctcctgctccctcccgcgttggttcccgtggctccactacccgcacgacctccccaccgccaagcactcgcgcaacacatacctccctctcccttcgatcaccggtgaccacttctctggcagccacgaccgtccctaccctcgcggcagctcgactagggccactttcgacctcgccgtcacccatctctctgccacgctcaccctcgcaggacccgtgcccgccgaggctggtgcattggcgctcgccccactccgtgtcttttgacctcgacgactgctactac

SEQ ID NO: 175997 - DNA, 385 bp, Zea Mays
aaattctttttcttcctgaaccttgtttgtgcatgaaaaagagaggtattggcatcaccttctttgagccacccaattcgcgatttcaaccttgccatggtacgagagatagaggacagggcaagggagtgcttcttgagcatgttccggagccacaattcaccaggagataaggaacgattgtcctgcgccacctctaattgatgtaggagctccctagccatctcaagctgcagcttaatcctcccaacttttttgtcattccagctctgcagactcctagccgttgtctttaatttcttggccaaagtgatgagtgggcaaggccctgctggaacagacgcccaagattgagctaccacatcatgaaatccctccatcctag

SEQ ID NO: 175998 - DNA, 298 bp, Zea Mays
tcaaccaaccctcccctgattttctcgctgccagtccggattgtgcggagggtagctaacaacttcaccgctggccgcgcggatttaacaaacgccgcgcgaaacctcgccgcgcatctcggatccctcaaccggatgcatagcgatcggtggggaagggttggcactgaccctgggtataaaaccggccccgcagccccccctgaaacccagtcggcccaccgtagactgctcgcttcgtgcagagagaaaataggagtgcaccgccgccgtcgttcgttgccgccgccaccacttg

SEQ ID NO: 175999 - DNA, 986 bp, Zea Mays
ttccacctaaggcctcattcggttgtgcccaaccagaccaggttgagcctggaatgggaaccaatccacgttaaaatccaggcccaagaaaaatccaggatcctatttcttttcgtgttcgtttaagcccattggaattctagcccatgggtttggatttttttttgacttgaggaggttctggatcggatccaggagtcgtatggtctggaaaaaaccctggaagcgagtgagcgagcgacggcggcggcgcaagcgagacactggcaagctctactccggcaagcttctcttcggttggatagatctactctccacctctctctccctgtctttgttgcttcaaagaggtcgaagtgggtagatccgtttggtaccttcaccaggaggcaaaagtgggcagatccggccatacatgaagatgtgcttgctgacggggaggccgagcgatggcagcgcacagcggaacaggcggatgtctcgggacagcactgtcttggcgacgagtctgcatgggaccttccggcgggttggagagctgcggcggagcgccggtatgacctgctatggctctcgccataccttgccgtagtctactagtctttttctctaacgtcgctggcatgccgactccacttccgcagcctgcttctccgtcgccggccgccgccattccagttctcctctccagctctgcccgtcagtctactagtctttttctctaacgtcgctcgtagcctcgtcgagtcgctcgcacgccgactccactaccgcagcctgcttctccgtcaccggccgccgccattccagctctcctctccagctccgcccgtagcctgcttcttcgctcacggcttgtttgctccggtctgagtgtccgtttgtcagatagaaaaaagaccttctatttgcctgatagtaaaactcagaaatcaagcgttctctggatgcttgagatatattagatgaggatttctgcctagcag

SEQ ID NO: 176000 - DNA, 338 bp, Zea Mays
aaagcgtgcaatatgaagctgcttctatttgcatttgaacaagcttcaggtctaaagatcaatttccataagagtgaggtttttttgtttcggggctgcctaagagaaattagaacaatatatagaactctttggatgtaagctagggaaactccccatcagctacctttgtattccaatccatttcagaaaattaagaattagggattgggctaaagttgaagagcgctttgaaaagagccttagcagctggaaagggaaacacctgtctatcggaggatgcttgaccttgattaggtcagtactcagtagcttaccgatgtatatgatgtccttct

SEQ ID NO: 176001 - DNA, 531 bp, Zea Mays
cggtggggatggctgaggacggtcggacaataggggatgggcggcgatgatggggaggcggtggggatggagaggaggtggtgcgatgacatgaatggtgaggaggaggcggatgggatgggcgaggacgatggggaggcggtcgggatgtccatcagggatggccatcagtgatggcacgatggctgttacggtgaggaggtgactcaatggcgtggatggagtggaggcggtggcggtgatgggcgagcacgatggagaggtggaggggatgggcgagaaagagggtggtggcagggatgaccgccggcgatggcatgacagcggaaatgcaaggaggcagcggcacgggttggcagaggagcgggcgagtgaatacaatgaggtcgcgggtgcgttagggtctaagttcttaattcttgtcgagtgcccacgatctagcactcgaagaaattttttgtttttttgaaaatactttgccgattacccctaacaggcactgagcaacccactatttgtcgagtgtctcaa

SEQ ID NO: 176002 - DNA, 334 bp, Zea Mays
ctggctaaccggcgctctggccggccaagaccaaccagtggtcggcaccgccgtcctccttcaacctccggctcctaggcacaaacgccacatcctccccagtacgctctctctctcccgatgctccaccggcgaacacacagaccggaccagaacacgacaccgccgttccccagccgatcgacgcacacgctatctgagccctggagtcgccgaaggaatactacatgtataggtgaataaatatacgcggctgggcaaaagaactcacccaaggtccaggcgccgcagtcagatcggtggcgaagctccagtctagcgaagattccgccac

SEQ ID NO: 176003 - DNA, 676 bp, Zea Mays
gctgactttagggcactgtagatccaaaaatattgagaatttgcctagggtcaacacatcaaacctatagagctttgaaaggagaacaattcttgttaagtaaccaagcactgatgctgtgtaaaaattggagaaaagcaagcccaaagatggtttgtgagtcagccaaaaacctgaattttgatattcagtgacatgggatgaactttgggagtcttttcgaagatgatccagtaagtgtttgagcatggttaccctagcaagattgtagctggtttattaggctatcactttgatacagagagttgattcagtccttatacaaaatctggagcaaattggtaccaaatatgctctgtcaggccaactgaataagctgcgccatggtacagtgaacgggatggatcgggttcagataacctcgccgccggcgacctgtgcgcccggattcgcgccgacgtcgtgattcacgcccgaccgaactcagataagcactcctcggtataaagtatcacgctggagataaactccgaccattgttctcaccgttgtcgtgtcttgctgtagttagtcgcgctggcatcaccggcgtttgccgttatccggtcgggctacgtgcctcgacgctttacctcgtcgcggtgagtcactagaaatcgcccggtagcactggttt

SEQ ID NO: 176004 - DNA, 639 bp, Zea Mays
agagagcttagaatttggggtgcttggcttcgaaaagaaagaacagggagagaagggagcaggcatacgtggtgggtaatagtctccggcgatggggtggagaagcgaggcagcgttcgcccggtcgtcgttggtggtaccggtgaagacccgaccgcggtggtggcagttgctgggtcagtcattgcatggagagagatagcgagtgaggtaaaggaaaggactcttgggttggattgagccctcgtaagatttgggcagctgcgaccggcgactgaggacccggagggggggcaatttcgcttcgcgcattgcgtgcggcagtgataatcgcctcgccgaggaccaacaaatccagatccgatcgccgtggctctcctcggagcggtggcagaggcatcaacaagagccgacggaggattcgagagggagggggacaggacgcggcgatgtttgggatgagtgggagcacgtccgcggtagaggcatcgagccgagcaacggcggcagaggatccggagggggagggaagcacgaagtatgggagagagaaggggacgacgacctcgcgaccagagaaacaagcggactggacgaccgagcaagacatccaacccatccgaacggccacgattttcc

SEQ ID NO: 176005 - DNA, 494 bp, Zea Mays
gccccctcagcttcgctgcaaccggcggtccaactcggggggcccaagcccacatgtcatgcaaccggcgcgccggttactgagtgcaaaaaaaccgcaccgccgcttgcgccaatgccacgtcttttcgggaccgtcacgggagtctgaaaaggtaaacttttcagaaccagtgcagtgactcgaggcacccccgcgcatggcccaacagtgacattaagtacgatggtcacggaccagttagccgtgggagtaggcataacagttggcatggccataggcgggccggtagtaattgcagcaacaggcgcgcaggagcagcggtccaaccgccaatcagactctggtcccacctgcaggctcgcatcctcccctgaggcgggcccgggggccactgtcggtaccctgaattaggggtaccctcttctacggtatgaaggcgctgcacccataccgcacctccaggtcatacggagagcggctcccgaccccac

SEQ ID NO: 176006 - DNA, 965 bp, Zea Mays
ttcatgttgaaggacaaatatgtaatattcatgccactacattaatctaagtccaaagctcactacataaaactcctatctgtaatgtgcgtaagatttcccaaataaatcaccacaatagcatacattgcccacaactggatgattgtggttggggattttatctgtatgcttttagaacatctcggcattagggggaggaatgcccatatagtgtaatgcctcaatattctattaaacacacataagccaaactgaacctgtcgttcgatgtgtactcctatgtatatggagtttgctagaaatcgttgaggattaaccatattggtttgaatgcttctacctgatgtagatgtggatatacccgggattaatatcatatccacatttgacttattggcatttgatctattctgcggggacgcctgcggatatgatccatcgaccttagtcaaaacatatgttctgattgcagattcacgtggtctgtgataactctcctccgattaattcaccctgatggtgattcgcctcaccaagaggttcatcttgatgatgaaattcctagcaatgcgcgcaatatcattgtgctaggaatacggaacaacaaatcttttgtttttgggaaatgacaaagatcattattaaatgtgggagacaaatgtgtcgacacctatcttgcctctatagattgcaaagggatccaaaacaaagtcctaggcatgagtgctttaagctctcttaccgggtcattgataaatgcaatcgaggctgaaccaagaatcgcaaagtgaaagtcgcgaactttaagttcggacatttatgggcactattgaaataatgtgtggtgaatgcgatggttcaagtggtcttgtaagagacccatcccacatatgtgttgaataaacattgttctgctatgtaatatatctggcaaatggcatgaattaaaatatgcagttaat

SEQ ID NO: 176007 - DNA, 707 bp, Zea Mays
tgatcctgacggggttatccggtggattaacggcaaagacgaagcttttgaggagatcctcagtgataggggggacttctgtgcttttgctggcgcccgtggggtcgtgtcggtccttgaaaaggtcagctgcgaacatggcaaggctgtggttcagccaggattctcacttacagtcagcgatattaaaatccctttggccgaagccactgtactaagtggaaagttctattccgaagtatggctgaagggtggccgagagatagctgacgaagctatcagaaagaatgagaaagagtctcacaacgccttggaagaggccaggagaactgaaaagttgctgaatgtgccagacttataggtatatctatcatgacttatcttcttaaattattttagcttcggtactagcagacacttgtattttggtgcagctgagctctctccccctctagagccatacgatcctgaagttgatccatctcttaagggggcgcttgacataattagaatagctaacgacgccattgacgaagctgtcaacatactactcgacaaagctgctgacaaagttttaaaagatgactagggcctatctattgagagtttagaatctttgcatgtagtttcatttttgtaagaaacaattgctaactatttgcatatttaatgatgtaatatatctctttgtgagccgtgaaaccttc

SEQ ID NO: 176008 - DNA, 785 bp, Zea Mays
attctcagcaataacccacacagtatggagtctagatttaggtttggccctagaactccaaggcacaacggcaatcttggcaccagacatcttcattttaagctcaggaaagcttatcatttcatcaagacgttcttcggagggaaactgcatcagaaaccccgaatggcacttagtagctttccacatcttattccaagggaagtggaaaccgaaatctctctcaagatcttcagccgagactaacccctcaatcactttaaccagaccgataaaaaccctttttggttttttggtcaaaggtttagcaaaatgagacaaataaaaccctaatccatctgcagccaatccaacaatgggcatggtgggtttgttttgcttaggaagaacacagcgagaagtaacatgtgtctccttacggcaaatatcacaccacaaagcgttaaagcagtttctggcatgatgtccttcaacaccgcatttctggcagaaagcagggcgaacaagatctacatctttcttcagaggcacaggggagacagaagggttacctggttgagttccctcgccaggatgaggggacaacacaccctcatgttgctcagattttccgagagtaggcttcaacttccaactaaggtttcttgccctgttccaagaatgaggaccctgcggcttctccatcggaccccaacgatcccactgggagttctgagggttcttgcctttcggatccatagcagagattttcgaggggcttcgaaaatcgccagaacccagatgag

SEQ ID NO: 176009 - DNA, 1292 bp, Zea Mays
gaaggtctgaccccagggttcgggtgaccagagggatttctaggggtgtagaggggatgccatgtttttccacaaaactagtggctataaatgagtgggatgctcctgaatcaaaaagtacagtagcgggagtaaattcgacaagaaactcaccgagcactactcctggagcttgctgggcctcttgggcatcgacgtggttaactcgtgctctgccctggtactgggtcctgctctgctgactgttggaggggagtgccttggaggcaggtgtcgaggtaatcttggggccattcacctagttggagtaggtaggttcgggtgccttcaactagggacaattattcttgaagtgactggggtcttcgcagtgccaataggcatttgctggcggttggttgcttgcaaccgagggggcctgaaaggagctctgactctgctgactataacgtgacggagtgggtccagctggtctattgaagcttggtcccttgggtggaagcccgaaggatcgagctctctggtgatggtcttgctgctgagctcggagaacctagaatttcctcttgaggtgccctttttcttcctcttttgccctttccacttgtatggctttgttggagaggtgcgagaagttgaggaaatcttggctagcgaggatggtcttgagttctggtcttagccctttcaaaaaacgggccatcttcttggtttcggtgctgacatcgtcaggcgcgtaacgagccaacttgtgaatttgtgcacgtactcactgacagatcttccaccttgagttagttcccggaattcatcttccttgagttgaacgatcccctggggtatatggtgctcatggaaagccgtttcaaattctacccaggtagcgcccctaacggtcgcgctgaaggtatcccaccatgctagggccatcccagaaagttgatgagcagccaattgaacatgctgattttcggggcatctgatggcttccagtttcctcttgatcgtgtgcagccagtcgtcggcatcgaggggattgctggatccagcgaacgtgggaggcttgagtctcagaaattctctcatcctgtcctgtggtcttccaccacctgggcgttggttctccagacttctagtgaggacttcaatgagtcgggtttgattggctagaacttgggccaaatctagtggtagttccggaggtgcggggaggtgggtctcactcccttctcctccagcttctccttctgctcctaggggaaaccctgctccaatcctggaggtggtaggca

SEQ ID NO: 176010 - DNA, 473 bp, Zea Mays
attttcctctcgtcgagcctgttctggatctcgtgttcttttttgcgagatcaccgaaccgcttctcctcgcgaaaagcaagtcacttgcatctgccatccccgactacctcgtcgacccttcgtctattcccccggtctacccttcgtctaagtctatcccttccatcaatctcacctcgcttcatctcgtcgcgcaacgctcgtgcgtgcaacctcctcctcgcttcgccacaccccacctctatttatatacgactccttccctctacacagataggaacttcttccctggatccggatctcgcgagcagcagttaccaggtacgcagctctctcatcctcccttcgtcctataccgacgctcagatctatagagctgcagcagcggtcgccgtcctcgaagccggtcgtcccctgcgctacggtagacgctcgcctgcccagtgcagtgccgcggcagcgacgacccac

SEQ ID NO: 176011 - DNA, 634 bp, Zea Mays
atttatgggagcctcataccgtattcatggaagcccttttatgtcagtctgtcattctagggttgtcggtggtgtcagtactagatatcacaagcgttttctggaggatgtgcaagtttaccgaaagctagaatgtggaggggatagaagcaagctctccatgcctacacaagagacctatgaggttgaatcacacgttatcgatgaccaagagtgcacatctaccatagcatatgtagtgggtgactcaagatgtgatagtccacggtgggcattgaccatatcgccatagtgtgaagctcaggtgcaccttaaagcacacaagttaccacagtgccacactggtgccatgccctggcttacataggcctgaacaccaggggtaagcatgacgctaatacaattgtactatcgcgttaaacaaggcatagtacgtcttacgactctatcaactcctttactaataatgacgttgatagctagccacgtggtgggtctggagcccaacccttgacctggggacgataatgggggggggggctagaagacgtggcatgtcgggattccaataggttcgtgcctaccggagccctagtgaggtggttgtccaggccttgcctactagttggcggag

SEQ ID NO: 176012 - DNA, 728 bp, Zea Mays
caccgaactcgtggggtgggagcttgttaggcacagacagatgacagaggcagactctcgggtaacagagtagtttgattattctttcttgctttccaagtttagttgtgtctaataccaaaagccactttacaatagcgcagatgctttccttttatacttgagatcaaaaagcaaagtcacaacctaacaaccctgtgattctattacatccagttgacaccaatgtattttggattcagcttccgtgctcgcgtacctcttcttagtttctggacagcttcagcttccggcttcccttcatctccaacagcttcatctcctgtcccttcctggtccggtccaccattagagttgttaacatattccccctggagatacagcttgtccccaagctggtgctgcagggaattgttgcttcagcactgcttcatcttcccacgtagctagagagacatcccaatccaaccatttaaccaacacatgggaaagtgctttgcctccacgccaaaccaacttggagtccaatatttgttcaggcacttgcaaaccaatcgacatatcgggtactaatgagctaacaggtgtattggaaccaacttgaggcttcaactgagaaacatggaataccggatgaataccacaacctggtggaagagccaactcataagctacaacattaaccttgcgagcaatggtaaatggaccaaagaacttaaaagccaatt

SEQ ID NO: 176013 - DNA, 530 bp, Zea Mays
ataaggttcatgaagaaggcgggtgcattggttagtccaaagggcattactgtaaactcatactgaccatactgggtaacaaaaattgtcttctgaatgtctgctttcttgattctcaactgatggtatcctgatctcagatcaatctttgagaaatatttggccccttgaagttggtcaaaaaggtcatcaatccgaggtagtggattcttgttcttgattgtaacttcatttaaggatcgataatcaatgcacattctcatgctcccatctttcttagcgacaaacaatactggtgctcctcaaggggatgagctaggacgaataaaccctttctgttgaagttctgcgatttgaagcttgagttctgccaattctgtgggagccatgcggtatggtctctttgcgattggtgtgatgcctgggaggaggtcaatgtagaattccaattctctttctggaggcattcctggcaactctttaggaaatacatccatgaattcttctaccacagatatgccttctgctgc

SEQ ID NO: 176014 - DNA, 639 bp, Zea Mays
gccttgagttcatatattacatgtggtttgcgaaaggtggaatatggagtctcctaatgatctaatggtaagcgagagagagagagtttttggtgggggtacctctgcagccttatatagccgactttagagatatccctgtacaagtcgttgagtctatctaagtctactctctgttgctatgagtatgcctactcctccggcgctcggttaccttctctggtttatcatccgagtgatccggtgtctggtcgcgtgagggacgcgtcttcagagctcaagtaacccttccgcaagacacgcaagctgatccctcctcaaggcacacacgccatcggtacacccatgcggtattcttcatggccttcatctattccgcgcgcttttacttcgatcaccccttgttccatcatgacgaggcccacaacacaccctactagactcagaggcctctcaggcggaccccttggagatgtatctacatcttagtgacccatgggatatctatctcgcacaagccctcgaggctcaagacaatttttaggacaattggcttgaggctcctagaatagtctaatattgtctgattgcctttcttgggtacaactttccttcacgctctgatccattgggtgcgcc

SEQ ID NO: 176015 - DNA, 648 bp, Zea Mays
gccttagggctagataatctctccaacatcgagaaaatatccctggctgaccttgataagctccttgaagggtttggggatgcattaggaggcgacgcttaggtgtagtgtaatcatttgctgctatcatgcttgtatgaacttgtttgatgaatgaaataaagatggttgttttgaaagaaaaaaggaaaagaaaacaaattgcatatgcatagtagtaatccctctcttcctctagcaaatggccatggatagagccgcgcctgcagcctcaggaaacggggcaagaatccacataggcaacgaaggagaggacaagggagaaggaagtcaaacctaccttcccacacctctggaggtgccatcagatctggcccaagtcctagccaaccaaacccgactcattgaagtcctcaccaggagcttggagaatcaacgtcagaaaggaggaagaccataggacaggatgggagaattcctaagggttaagcatcccacgtttgtaggataaagcaacccaccggatgcatatgattggctatgcacagtcaaaaggaagctagaggctatcgggtgcccagaagattagtgcgttcagctggccgccatcaactcaacggaatggcatgcattggtgtgatactttca

SEQ ID NO: 176016 - DNA, 710 bp, Zea Mays
tatctttattcttttaaaacattagttttgtgtgtcgtgcgtcacgtgtgaagcacgtagagtacatatgtttttcttcccacatctcacctaacaaatagatcattacatcccagatgggctgtgaaaaaatacccaagcccaacatgacacgaaaccacacgcaacacaatgctctcggttagtaccaccttgctagatgaaggagaacgagcgaccgaatgagctataaaaagaagtgatctctattagttcatgggctcaataggacatgctattttctcacctcacatcgattcatcatgggagtgatgagcatgtccttttatggaatgttttagatacattaagaatcaatgctttcatttagcaatttctaaatgagatttgactatttaacaacccacattctagcattaaagagaagtttgagaactatgagtttcatatcattaaccaattgttgtaaaagctcgttaaagacgaagctcgtttgaaagtctcatgatgttcacttgtcacattgtccaaatatgcatgtcatagaaagcaatttggatagctcggacggtgaaggtaaataatgttgtgttgctaattttattttagactgcacaaacaaatcaattaatggtccttctcttaagccgattcataagaataggcaagaagatataaaacttacttttggtcccgctaaatgtgactaa

SEQ ID NO: 176017 - DNA, 555 bp, Zea Mays
taatcccgccttgtgcttcgcatcgcattagtgcactcgcgattagtattgtaccggtggatggccggaattgccgagctccggcgggggcaccgccccgaccgcgtctgctgcgccgcgccgatagccgaggtgatagggagtgcaggagccgtggatcgttagatgggcagttaggattgattggagctggcatcttgggatggaacgcgatggcgcgtccgatcgcgatcggacgatccctgatgcgctcgcgtttatttaaatcagaaccgttcgcgcgtgatccaacggcttggatccgaaaataccccttcggccgcaagatttacagaagagcccttcagttattagataagtaacccgcagtccactcgggtgttcccctgagtctgtggaatatttacgccagaacccctatactttctagaaaatagtgcccagtccagataattaataaaaccaggaaaatcatttagaaaatggtttttagtacaaatttaattgcagaaacttgtttaaattgtagaaaattcatatgaactccaatttggt

SEQ ID NO: 176018 - DNA, 432 bp, Zea Mays
tagtgatcgataatgaatgtgaaggtcttgtgtgtttgtgctgatggacacggagtggtgaaggatgaacattatgtcttagtgatggacaaggagtggtgaaggatgagcattgagtcttgactgaagaactagagaaaccaggtgactacctatgatggttaagaactagggatatcaacaggcatgaagatgtggtagagcggatcatgttgccgacatagttgaagaccaacaatatatgtgtttagggcatgggtgatgtgtatggagtatgctacctatgaatgtttggtggttgaacgtcaaaactactcagcgatgattttgtggatttgggctcaaaacccctggcacagagaataggaggcggtaaatagagccattatgaagggtgtgtcaacatgaagcaactttatgaagggaacatga

SEQ ID NO: 176019 - DNA, 773 bp, Zea Mays
tttaggaaagaatacgcggaggcaaagtattgtccaaagtgtaaatcgtctaggttcatggaggtagactttggtgatggacagaaggtgcagctcgacatccctgtgacaatcctacgccaccttccattcatactgaggatccagcgtctatacatgaccgaggaatccgctaaaccgatgacatggcacaaaaatggcaaactatacaatcctaacaagttggtgcacacatccgatggtaaagcatggaaacacgttaatgccattcaccgtgagaaagccgaagaggctcgtaatgtacgtgttgcgctggccacaaatgggttcaatccctatggaatgagcgctgccccatacacatgttggcccatgtttattatccacatcaatctccccctcggagtatgctttcaaagacagaacatatttgtgtcgttgataatgcccggacactcggggaataaaatgggcgtgtacatggagcctttgatgcatgaattggtctgtgcttgggaggaaggggtatggatgtatgaccgagctacaaagacaaacttcaaaatgcatgtttggtaccagtactccatgcatgacttattaccaacgtatgggctattctgcgcctggtgtgttcacggtaagttcccatgcccattttgcaaggaagctcttaggttcatttggttgaagaaaggtggcaaatattcatcgttcgataaacatcgacaatttctccctcctgaccatccattccacctagacactaagaa

SEQ ID NO: 176020 - DNA, 653 bp, Zea Mays
cggcgggacagataaatgaggtctgaaaaggccgaaccggcagcgacgggatggctttggctggacgcggcttgtcaatcgctgtggcctaccgcctaccgcctacgggctccggcctctcttcctcttcgtctgttgactctgttcccttctgcttgactgtggccgtacggcgatttgctgccttgaatacgcatcgaattggcaaacgctgtgaaagtctatcgctcccgacctataggacgataggataagaaaagaaatggttcaacaggctagcagcagctaggagcttgaatttagaaggccacaatctcaaccgcaatgcatgcaagtgaaactgttctttagtaggaaagggtaaaggacatgccggtggccggtggtgatttgattttagtagccgcgtgctttaccactttaccggcaaccaatcatatcagtactaactaacatatggaatctgtgcccagccacataaaagcagcaggtggtgtgaccatgtgtgtggtgagtcaaatgcggacatgtcagtccctgacattttttaaatctaccgcgcgcgggaagacgcgagcgcctaaagttaaggaaaatgtatagttaagagcaagacacgtcaaataactcgatagtgaagagatggcattgat

SEQ ID NO: 176021 - DNA, 503 bp, Zea Mays
catgatctcatcttcctctgtgatgcctagcatgtgtacggtgattgttaagtttaaacttgtcaatcaacaaactattaaaaagacaaacgatccaatcaatcggaaactgatccaacaaaattttagaatgcaatcaccctggcacgcacgaccacccctcgactgtcgtcggtcaggcatccacctagcgcagcgaaggacgtattttcgttcccgacgttgagaccgctgggtgaagcgccatcacgaccgtggaggccacacaattggcatcccaaggcattcgtccgggagaccccaacggtgcaacgatgacgcgtgcggggttgggatcttctaggccagagacaggtgcacgcgagatcatcgtgcggcagtcattgtgggccttatgtacgatgcgacaacgacctaacgcactgcagattccatgcggattcaatccaaggagattccttccatgacctacgcacaaacataatgtacactcctccgttgaa

SEQ ID NO: 176022 - DNA, 334 bp, Zea Mays
cgggacggttggggctagcgatatcggcaacgagtgcgcacggacgaagatggcggcaatagtgaaggcaatgcggggacgaatagtctggtactctgccactctggtcggtgctcgcctgctcggtgcgtggaggagaaaaacatgatgggtgtgggcctattcgaagaggtagggatgggcgagggcacgcatcaacacgaaacagaatccgtatgtccgtgaagcacggtcgtgcgagatagaaaaatggagtggattggacaagagacagagggtggcctacacggttgatttgtgttattgtgtgttggtttctccagatagttttcct

SEQ ID NO: 176023 - DNA, 439 bp, Zea Mays
ttcacgagtacgtgtctgaaccgacgtacctgggctgcagtagcatgctgaaggtcgagtagacgtggatcggcagccagtggtcgcacctcagtctcgtcatgctccctaaagcgaggtggtggaatgggcggagcggaaatgggagcgggagggggagcagtggaagctggagtggtggaggtggtgggtacagcggaagtagtggatggctctagagcagcaggagctggtgaagtgggaggtggagtagagacagtggcggaaggtgtggagggagcagtggagcaaggccgagatgcgaggcgacgaactcgataggctatctgatctgaggagatctggagctgtcctccttgctcatcctgctctgctgctactgccgctgcaagtgctgcacgagcggctctgtccatacgacgcttctttctgccctcct

SEQ ID NO: 176024 - DNA, 402 bp, Zea Mays
gcgatgctcccaaggggatacaccagctgtgggcccactccggagaatgggtgtgagggtcccagacgggaccctagaatttgcagctgcttaaacgtagcatggctgatgacgttgaggtctgccccgccgtcagtcaacacatggtgcagccgcatgttggcgatgataggggcggtgatgagtggtagtatgccgacccctgccatgttgtcggggcagtcggatgccccgaaggagatggtggtgctcctccatcgttgatgtggggcagccttcgagacccctagagttgccgacaggacctcacggcgtagggacttgacattcctgcgggaggtgagttcctagctcccgccgtacatgacgtacaacttcttgcggtggtcgctgtcatccccg

SEQ ID NO: 176025 - DNA, 473 bp, Zea Mays
gtagtttgtcataagctttaacagtaatgcagcagtctgactgtatatgtacttagcataaatgtatgtgaaaacctgcgtaactatgcgttgtgtaatgcataagagggtaagcctgtgaaccatgactgtacaaaaatgactgcgtaagttgtagtgcaaactggcataaatgtctgtgtaatttgtcataagctttaacagttatgcagcaaactgactgaacatataatagggtcaataattatatcgtgaacatgcatacgtccagataggttatgcagttatgcagcaatctgaatgtacatttatgcagcaatctgactgtacatatgcagcaatctgactgtacatatgcagcaatctgactgtacaaacatgcataagcctttcaataattatatcgtaaagtccggtcaagaaagatgcatacttcgaggttattgacataacaatattgtacagaaacctgg

SEQ ID NO: 176026 - DNA, 325 bp, Zea Mays
ctggattttgtcaaatgaacacaggaatcacaattacaccaggaaatatttgtatcttatggtcttctactctctaccagatgaatcatcatctccgacatccaccgttcgttttttcgacgttgatgtctcattccattgcgaggctgcagctatgattttgttccttgaaccaggaggccgtcctcgcttacgtccagataggttagccaatcgaaccctattatcctcgacagttaaacacgtacggctgttgtgaccatcagttatgccacatttctggcatttcctgctcatcttcttagctcctttcacacccaatttt

SEQ ID NO: 176027 - DNA, 776 bp, Zea Mays
ctgagccctacaaaatagtctgttaaacactctgatggtaacccaccatggtacagtaactgaaacagatcacaagtttagcccctctcaccgccggtgacctttgcgccgtgatttgcgctgtagccgcgattcgtgctctcaggtgaggggataatcacggcggagtaagaatcttggcaccagataggctcgggctcggtcgcagatgagtttcaccatacccacttgctcgccgatcaaccgggatagacctcatcgtcgttggccacttactgctgtgcgccacgtgctcaagcattgtaccacgtcgctgtgaatcgcgtcttgcatgttcggtggtcgccggggagcttgccacggtgaaagcaactaatcccgagcgccagtaaccttcttcctcttcggccaccagcgcatcttcacgaaattggacgccaccgctgtgggagcctataaattgccgaccctgcctgctccgctaagtaattgtgcaaccagtagagcaactcgtgcctcgaatcatccactagagctccccaattagggattccccccaaatcacccaagaacaccgagcggtgtgacctcgccgtggccagctcgtctcaggttcgttcatgcccactgtcctcttctttcagcacccttacttgctcctgatactcgctgacccattaaatttagctaggcggtgctagatcaccgggaacgcgtttgaatgtccgtcgtgcccgctgtcaccatggacagagcgttgtcgagcctcattggtg

SEQ ID NO: 176028 - DNA, 591 bp, Zea Mays
ccgagcacgagttcaccggcgtttgcccagagaaccccgtaccagcggctgcacaagccatgaccaccgtagaccggccaagccagccatcctccaccccatccgacccttgggatagcttctccgaacctcagtgaagctccccgagccgaggatcgaacaatacctcaccggagacgccagatcgacgtcgccggacttcaaccggccatcgtcgcacgtagaccgagccccacggtaagtcattcttcgattccttgtacctatagcatccttagcatcccgtgaagctccatgtgccatttgattgagccctaccgtcgtgagaaggctggagcacatgccgccgacgagcccgaccgcctgcgcacgcgatcaaccctatttcggccatcaccgtcgatgatccgcacctcgacgtgactgtcagaacctcccggacctcacccagccctttaccggaccttcctcaccaccaataagctgcgccaccctttttcctctccgcggttactgttgcaatgtggaaggagcccgggttgaaagaaagaaaagccagggggtttttgcgaggttagtgactcagggaaa

SEQ ID NO: 176029 - DNA, 357 bp, Zea Mays
tggcgactggcgtggaggtcatggtttgctggtggaggcagttcgttgtgagagccaatcggcgcgaacgcgagaagcgggaggctggctggggcgtgtcgtgcagaggatgcgggaggtgacacggttgttagcgagcgtgcacgggcctgggggtggagtcatggtttgcttgtgtacggtagaggtgagttggtgtgcgttttggtgcgagtggagaagcgggcgggagtatgttgtggagtgggcgggtgggacacgatgactgacatggcatagaggttgcggatggcgtaaaactgacgactggcgcgaaggtcatggtttgcgggcggaggcagttcgttgcgagagcca

SEQ ID NO: 176030 - DNA, 351 bp, Zea Mays
tgtgctgaatgatgccagaagacagcatggcttgcacttgtgtttcaatctcagttttcagtgtaggagggtaacggtatggcccgatagacactggtctggctcccgaaataagtggaatggcatggtcacaggctcgactggggggtagcccttcgggttgttgaaacagatcactgaattctgatagaactgcttgcaggtcttcaggaaattgtgaaaaatcaatagcaaaacaagcagttgtgagtggaaggagttggagtactgtatgcggagggtgctccggaagattgccctgcagcaaaaccttggtattgttataaggtagcagcatccacttgttcttcc

SEQ ID NO: 176031 - DNA, 965 bp, Zea Mays
atcgaaactaaataaaatctaaatgtggcccacaaggccataactaaatgtatatacatcgaaactgaatcctttttacatgtcatggtgcttttctttttgagacacgcaacattaaacaaccaaaataagaataggtttctataatcacatacctgaagtgcataaggtccccttttccctaggttcaagctcagtctgagatttaatttctcctttgtctgcattcactatcttcttttctctagctttgtgttcaatcagagagtccatttttacttttactgattcacttgttctacattcatgcatcataggcacggaaccaccagatcttgcttcacaatccatgtttatgtcatcaatatttgcctgatcatgacttgaagtagcagatcgtttggtggcatgcacttgcgtggcagtcctatttgacaactgtttcacatgaggttgactttcccgcataggagcatatcgtttctggttttgcacttgcatgtctctcctaccaggggatgttgatttcatattggatggctgcttcatgcttgaaggagatgcaggatgaacccgcctttgctgcatagcagaatatgacctatcctcaagttctgcttgactatgacttgcatcagcacatcgtttcagggcttgcacatttttatcactcctgcttggggatacacaattcatattggacaagtgttttgtagttggaggagatgatgccttgcttggctgcgacaaagtaaatcttgatgtaacagatggtggcctctctctactcaataatgccacttcttcagaagagatgaacttcactttagcattttcaaatctgttcagagatttgggacttattatttgatgcactacgctgctttgactgaggtgcaacttcgaagtttccctctcgctcgtcatatcacgaccatgacatggcttttggagctccgtttgcc

SEQ ID NO: 176032 - DNA, 891 bp, Zea Mays
ctccctcccattaactccccggagcaataatcaaccagaatttttgctttctctgtaaattgttcagtgcttagatttctgtgacttacgacttatcactgattggtactagcgggcctttacttttcgacttaattttgcacagggggggggggggggggggggggggggggttgaacgctgtatttctgattcattgcagttgtattttatttcaatgccttgtcgtcgaacccttaagtgatccattctaattgttactggttaagggcttaaagtatcagctttagattgcaaaaattgcaaccggtaccttcagcttccatgttccaagtgccaaccaacaatttccatgtcgctgaactccatcgaccttgaaaactttgagtacttcttcatattcaacgtttatgcacataaacaacagactgccagcgaggacatgttagacatgtgtcgattatgcgtgcagttgggttaccttaccacttgagttgtattaggggttaggatagagctggagttgaattttatattccagggggccataaatgtgaggcaacctctgttgtaaccatgagatgaattggcagctagtttggatggcggcgagaccgttggatcgcttggatgccggtataactgcttttttatggggagctggtgaggcatgctagtagccatgccaaggggatgtaggcatatcgcaaacctagtgaggtgtgcctgttgtcatgccccagggatgtaggcatatcacaaacctcaataaaaaacattatgcctcggtgtcgttctcattcacatatttttctttggtggttatgcttcggtgctctttggtggttaatagatcctttcgggtttcgatctaaccgtgctctcaaacag

SEQ ID NO: 176033 - DNA, 458 bp, Zea Mays
gagaaacagagggcagcaaatgtgatgaggaataatcagatgttccaaaggcttgggattaatcagttacgcacgctgatgactggtacaagagtaaggagcaaaaatggtggtccagaggaatcagggtctttgtttgacggtgaggagagcaacgactccgagaaagaggaggtaagcaagtttgtaattcatctatttgtttcctcatgttatatataaatatatcattacacttgcatttgcaaacaaattgatatgcacatgattattgtgttattcctacaagattcccatgttgcaaaaggtgtatgtagccataactccactgatgttgctgacaaacctacacaaggaacacaaggatctaaaagggttgtggcccctgatgttcatgggcaacaaattagattcactaggcaaaggagtgctgccataaaccaacaatcttctctaag

SEQ ID NO: 176034 - DNA, 883 bp, Zea Mays
gcttccgcggctgttcgaagaacggccagggcagacgccggtgctccttcccattccccggccatctctatccccagcgtcgaccctccatcttcctctcctccccactcccctcttctccaggccggtaacggtcgtagtaatggccaacgccattaatggcgtttgatggttgtcagccgccattcatcccttcccagcgtcttctctcctccccactctataaaaccccggtcgcgcccttggagccttgccctaaccacagccacctcgcgctctcctctctcgctgtgtagctcgccgacagagccccgccgtgcccttcaccgccgaccggagccagagtgtcgttcaccaccgcatcgttgaagccgcgaccccggtgaccaccactgcccatgccccttgttcggccgtcccgctcccactcgccgagctccttgcgcacaaaagctagccagaggtagaagatgaacattttgtgttttagtccctggctttgtgtagatcttgttcaggtatttttcagttcagaaaccattaaaaagagatccatgtttctttcttgctactccctgatgtatacgtttaattgtgaaccagcacctgcagcaatatttcgatatgggcattttatatttcgaatataaataagttatgttatgatttattaacttcgtaatctagtactagaaacatttgcaattaacttctcgttttaacgcatgaaataatattatgttagtagttgttaagtgtagtgttgtagataagaaattgaaaggggcactaggccacatcttcttcgtcaggttaaggtttagatttttgctagtcatgatacatgtgttcatacgcatattgcttattcactacgaagtag

SEQ ID NO: 176035 - DNA, 591 bp, Zea Mays
catcttagaaaatctatccacaaccacaaaaacactatctctccccttctttgttctaggcagtcctaaaacaaagtccattgaaatatcctcccatggtgcattaggaacaggtagaggcacatagaaaccatgaggattaaggcgtgacttagctttttggcatgttgtgcagtgagcaacaaatctctccacatccctccacatcttgggccaaaagaaatgatcagcaaggatgtcttttgtcttcttcacaccaaagtgtcccatcaaccctcctccatgtgcttcctacagtaataacaaacgcatggagctagctggaatgcatagcatgttagctctaaaaacaaacccatcagttaggacaaatttgttccaagttttcccctccttacagttcagcaacacatccttaaaatcatcatcatgagcatattgtaacttaatcgtttccaagccgaaaattttgcaatcaagttgggacagcatagtgtaacgcctagacaaagcatcagcaatgacattctcctttcctttcatgtgtttgatgacataagggaaagattcaatgaattcaacccatttagc

SEQ ID NO: 176036 - DNA, 367 bp, Zea Mays
acatggatctgacttgtgaagcttgacaagtgagcgacaagacatataaaatagatgtatatttacagacttttccaaggttttcccccaaaactatctgttagcaacactaatatctcaattcaaccaccggcagcaaagtactagaatataagagaatccgggtacatgtgagaggaagggaaaagagaagtatagatttctagacagagaagatgaacactagaacacagggaaatgagaatagagatggatatgtgtttcttctcaatatttgatacccccatagcttgaatcggtctccttttatagctgaagatgtccatttgtcacctgtcacagatcccatgtggcaatatgctgacat

SEQ ID NO: 176037 - DNA, 654 bp, Zea Mays
cgcgcaaggaggtccgcgaggtcccggtcgtgccacggcatgcacacccacaccacaaggagatctccatgcggcggccgatttttttttctcactccagctccggcgagaggcacgcaacggcacaggtggaggaccaaggggtgcgacggctggattttatagccaagttgcagaatccgcacgcgcattgatgcagcgaggatcggctggttgttacggccgaggtccgcggagtccgtcctgatccatagcagagaaatcggtcggctgtttgaagagggcgaagctgaccactagggtccacacgcgagcgcctggagccaagcattttgccacgcgcagacttgagccgcgccaggggagaacagggattgggccaggagtcgctaaaattggcccaaatggttctgttccttttctttttaaatttcagttttgttctctagttttcaaatttttactccaagttcaaattcaaccagggttttggaaattcaactttatagttaaatgcgcagcacaaaaaaaatccaacataacgcaaagtatatatttgtttattgtttatttattcgtttataagtacatacttttggatatgttactccacctaattgttttgtgaacaatatttttgattgtataatctcg

SEQ ID NO: 176038 - DNA, 806 bp, Zea Mays
ggttggtcctgattgggttcagcagacatctgagaaggttcgggaaattcgttagaaatattttggccgctcagagcagtcagaagagttatgctgatgtgaggaggcaggacttggaatttgcagtgggggatcaagtccttctcagggtatcacctactaaaggagttgttcggttcggcgtctccgggaatcttagcccaagatacattggaccgttctctatcttggcctgggttggcagcttgtcttaccgcttgcagttgtcggattccatggtaggggtgcacccggtatttcatgtctctatgttgaggaagtttttgcgggatccagaccatcaaatcgagttggaaccgattgttgtgcagcaggatctgactctggagtgtcgtccggtgtgtatcttggagtcctcggagcgtgtcatgagaaggagatcaattaagtatgttaaggtcttgtggactaatcagtctgagagcgaggctacttgggaacttgaggagctgatgcggcagaaataccctgaacttttcgttatgggtgagtttctttgtcttcgctaatctttcttttggtcgttccgatagaagcaacggaattcgaggtcgaattcttttttaaggggggtagagtgtgatacccaattttctgaaaagaagttgaagtttattttttctcttttctccgtgtcctgtgttattggggtttggagttttaggaggcatacctcagtgaaacagtagaactttttttgacttgtacgctagggtcgggagcacagacatgagagcgggtttggg

SEQ ID NO: 176039 - DNA, 1116 bp, Zea Mays
cgaagtgactagcaatttgcaggctcaaatggggttaaaccaagacaacatgcaacttgcggtgaatgagtttatccctcaatagtaatttatcaacgaatcagaataaatggcccccgaagatcctatagatttggaaggggattttcacaatcaaacaaatgatcagtcacatgatttaattttcttcgatcaatcgggatgaaccgcttgttaccttagagccattgggcaagatgtcacctttaccatagaagacctcatggctagaatttatgggcaatcttcaagctcctcaaaagattttaagattagctcaaccccataacttgctcagttattcgcatggtgggaaatgtgaagattaggctaacaagtgacaactacctttaaatttgctgtctaatatggtatggttgaacttctaaaagtgcttatctatcctcgctcctcggcttgatgatttaggcctagaaacggctggcttggcaattgtacctttcaaacctgcatgggctactcaacttctaaccctttaggcctctattttggtttcacctagatctgccccctcattctaacatggatgtctgtactcctgtacttattgagcaggagggacatcaggttgggggcttcgatgcctcctaggggcccctggtggcctctagggtggtgtatgatagcatggtgaacctgggtgcatggcttaaaattcctaggctaacatctatttctaaccctgcttccactagttgtttcttaggtttgtgggagtccaagactcaacttgattatgaagacccaacttgttccactggcagatagacccaagaagaagagtagaatgatttatgaacatgtcaacctagaggcttcgtgtcagggatatggtcctcggttcatggggcccatcagatggcaagcacactggggaaatggccctgacatctgcggcccatcggttagctagaggagataggtaatgtctaccctaaaagacccccctcggacgaaccccgtggcactgagcttggtgtcgggtgtagcggaccctaacagggggccgagcgtgtcgaagggaaaccactcgagtggatcccgactcgagacttg

SEQ ID NO: 176040 - DNA, 517 bp, Zea Mays
gtgaagtgtgtgctaggtttgaatttaggcgaagaaaaagagatttgggcactcggctcggaaacgatcgcttgaaacgaggaatttggtgaaatttaagcctggaaactcggattggcgtgaaatttggcaaggatgttgctggaagtgttgtaaagatgcctgaaaaatttgggttcaattggagcatttttggctggtttgggcattttaccgaacacgtggcgtgcgaggaattagggtttcggtgaaatggctatttgaggtgggaaaaccctcccgaaggagctaagaacctgcagggatgcacaaaacacacagagacacacataccatactagatttctcaggatttggagtttttgcacaaaagggagaagtgggagcctctgctcaccagaacagagggagaagagaactgagggagtggtctgctcaccgaggagagaaggagagggacacgaggttgccggagcccagtcggagacggtggccgccggtggaggcagatcgccgg

SEQ ID NO: 176041 - DNA, 548 bp, Zea Mays
taacttcttacataaaaatttgagatctaggcacttcttttcgctctgtcaggcgctctaaatggtgttctgatagtacagtgaactgaagaagatccctggtgcagtgcaccttgccgccggctacccgtgtgcttggattcgcgccggcgaggtgattcgtgctcactggtgcccggataacgcttcaaggaaaaaagatcttcgccgcggatgatgccaggggctggccgccgtaccccccttgctttacggccggctcagataagctcaccagagtaggctgcccaccgatcgggtgccacgtgccttgaatctggctcgtcaccggtaagcctgccacggtgaaagacacgtagctcttgcgcaagtgttcttccctctctccgaccgccaacacgccttgaccaaattaggagccaccgctctaggatactataaattgagcacacccctagctctgttaagtcatcgcgaagccaaagcatccgctgctacctccgattagccaccagagagctccaatttctttctctctccaaatcagt

SEQ ID NO: 176042 - DNA, 481 bp, Zea Mays
ctttgtttgctgcatttaactagtgtttgaatttcaaagcaaatttgaactcaaatctattgaaaaatagagaaaacagaaaaaggggaaagcattcctactgttgggccaaaactagcccacctcggcccaactactccacttctaccttgtgtggcctgctctctcgcgccctctcacgagagtggccgacgggtggaccccactgctcagcctcacctacaaagtgtgcctattcggctgggaagccacattgtcaaaaccaccctccttatcctaggattggaaaatgtggacattattttgggagccaattggatgacctgacaccaagtagtgctagatgtagccagttgcatcgttgagatcaaatccgcaatctgtgggagtttcaccttacttctgcccagccaagattctactcgatcatgtgcttttgctatgatagagttacccttgaagaagattccagtggtctgcg

SEQ ID NO: 176043 - DNA, 333 bp, Zea Mays
tattttgctgctcttttgtgggaggagaacagcaaaaggccgttggtctttgatgatgttccatttaccgagctagcagtagcagctgacttctgcgtgcgtttcactttcacggaaccgagcgccacgtttctatcacggcgcagctttcagttatcgtttccttaactggacaggtgggtgcatttgccaacaggcgcagatggacccacgtgtccccatgcctcttctggtgggccctgagataggcccattaaatttgggccgatgggaggagacagcagctcagcatgggcatcaactctggtggtcctgctactgccaccctctgtt

SEQ ID NO: 176044 - DNA, 619 bp, Zea Mays
ggggcacattcgaatgaatggatggttgtaacaaaggcttttcttgagcacgctttcaaagatgcaactggtcgtctaatgaagtgtccttgcaatcgctgcgagaacaagtggcctcagaagaaggaagaaatggagaaacacctttgcaaaagtgggtttatgccgaactaccttgtatggtaccggcatggagagtctattggacacgttgatgcggaggtggaacttgatgacgatcatgataggatggacgacatgttgcatgatcttggtagggaggttgaaatgaacactgaggagccggggcaacttccacgtgatgctcaggaattcttccggctactcgccgcgggagaagagagactgcacgagcacactcagatgttagttcttgggactctcacaagactaatggcgataaagtcgaagcactacatctcacacggtgcttacaacgacatcgtccaactaatgggcgaggttctcccggagaatcataagttgccaaagaatatgtacttcgcaaagaagatgttggctgttcttgggatggcatatgagaagatcgacgtgtgtcccaacagttgcatactattctttgaggaggatgacaagc

SEQ ID NO: 176045 - DNA, 609 bp, Zea Mays
caagattggacctgaatcaagctagccacgacgaggcccttttcacggtggcggaaacccgatttgggggagatgagcaattcgtggtctctggtgaacaattggaggcaagtgctggtgcttcggatgggtaattaccctacagagctcatggcgtgctcaatttataggtcccttgagcggtggccagtgaatttgaaggagacgcgcggcggccggagagaaggaggggcacgagagcagtgattcgtggcaattgcggaataagaagccacgacggtcactgggtgacgatcacatctcacggcgacgtgtctaatggcttgaggtgtggcacaatcgtggtgaagggcgcaaactccagtgacggccgcaaggccacgttgccggtgcaagtggtcgaggaacagcgaggccacagtagcccgaactcatccgcgacgtgatctttttacggtcgagcccaatctacttccccgcggcacgaatcacggtgaccggcatgaatccgagcgcacggttcgccggcggcaaagttatctgatcctgggatatttttagtattgtaccatcagaaatcctattcagagctcctgatagccagatttg

SEQ ID NO: 176046 - DNA, 378 bp, Zea Mays
cccggtcactgacccgacggaggattggctcctgatggatgaggtggtgctttcctggatccatgacaccctcacggctgaacttcaagacatcgttcgtgtgtcggacgatacggctcaccggatttggggtgcccttgaggctcagtttcttggcaaccgccagactcagattctgtaccttgagaccgctttccgccagctggctcagggcgatctctctgtggacgggtactggcgtcagatgaagacgatggtagacactctccgcaccctcgaggcccccatcaccgatgagagcctcgtgctcatcctcctccgcgaattgagccctcgcttcgatcgcgtaacgcccatccttacccgcatgaagccgtt

SEQ ID NO: 176047 - DNA, 1492 bp, Zea Mays
ttggaatttagtgtgataatgggaaaatctgaagtctaaagtaagaatttaaatttttttgaatctggaaatttgaacttgagtaggaaaaatggaagaaaagaaataagaaaatagaaagaaagaaaagaaaaagggacagaacactgttgggcccgcggatcccttttctcggcccatttcacctggtctactgcgcggcccaactcccctaacccacgccgacgctgacttgggggccccgcatgtcattccgttcctctttcctcctcacagaaacaagcgagcatggagatcggtcgttgaatcggccacacatttttttccccttccgaaccggatactgcgctgtgattaagcctgtcagcgtttcttcctccatgaaaccaaaaagaagcatgccgccatccgcgcaactgaaatctgtttctgcgccgcacatctaccaacctccccgcggactcgagctgagccgtacgcccatatctgaaccaccatgccggctctatcttcttccccatgactgtcgctaacggaaaccgtgaaatctgccgcgatcagggtgttccggtcatcctctcgggacatatattggcggggccatagacctctttccccatcctagtaggagctagcatagtgttgcctcgacaaatcgccgggcttcatcaccatacacggagagaaaaaaaacggggcccccatctactgtaaaccccgccgtggtggccgttcgaagcatgcagcaggggtaggatgtaccacgtgcacgtgaggctcgtgcttggtgaaaccgcgggatgcgctccgccgccgcgtctggccatgggggaaaagttagagcttgcgcagagaatggaggaaggatgtgacgaggtccgccgtggactgattttcgtccacgcccgtgccagggcttcgattgtgaccaggtagcttcgcagtgtcgtggggaagcgattcctaccactgaatcgtcgtgtgggtggccggagctaggccaatggctcgacggagcaattggcgccgctgtggatcgctccgcgccgtggccgagggccacaccaactccaaccactggtaagccacctcgattcagatcactcggatttcctccttgcgttgcaccgacctcgagagcgaatagggtagtggatagcggtggcacagccgccgtcaacctgggcgccgccgcggttgggcaaggcaccgcccagctcgggctgagaaagtagataagcgccttgccgttggatcgatcgccaacggctaggattagtggatcgcctaccccttcgtagcttacgatctgggccatccaatctcgatccaacgaccgtgagtgtgtacccctttagatttatgatgatataatcatggccgtcggttcagatctagcggctgagactccaagataccccttcggcctcaacaattcgctaaagagaccctgtgttttactaaaatcaacccgccgtcccatactgttgtg

SEQ ID NO: 176048 - DNA, 528 bp, Zea Mays
gcctacgggtcgggatcttgactctcttcggcttcggcatgctggaagaggtcgaggtggcaattttccttttccctccttactttcgaacagggaaacaatagtcagatacacaaacccgatcacatcaaaaactctatccagactcctttttcctcgagcaccaaaggcaatggtcatggcctcgtcctctaccttcgtgtaggctcccagcagctcatcactggttgcctcaatagcatctaaccaatcgtcatttggttcgtcaaactagcttctgtatcggaaggtgtgtctaagataaaccaaaccaccctggccagagccagcagcagtttccttcggcatctcccattcactcacaagaggccataccttgtaagcaatgtgttcatgtaccaaatccctggtaccaatataagtgcacactgtgttgaaagccattaagcatgcatgcacctcattcccaattgcattcgatggccttctaatgccgaagcgtgaccatatgggacattagataatgcc

SEQ ID NO: 176049 - DNA, 379 bp, Zea Mays
gagcagatttggggccgtctgggccatggcccattgagtggaggcccaggcggtggcggcggctcactctctgtctctctcccctagtagtagtccccctcggacctcgccgccaagcctcggatggtatcactgtccgcctccattgagtgcctgtgccggggaaacttcgcggccgcacaggtgctggccaacacatcggtgtccttccccagcctcggcgaccaccaccgcctcccctgccacagcaatgtcaaatccgagtccacccccgcgtccgccacctccgtctcgcagccgtggtcttcgccggctacgagcacccaccgggtgtgccttcccactcccctctctgccgctcgaaaccgaccatcccaac

SEQ ID NO: 176050 - DNA, 385 bp, Zea Mays
ctgtgcacaggggaggtggctcgtgatggcccgggctggcgctcggaggtggcgacgacggctgagtgtccggcgacaactggctttggtgactccgggtgccagggtcgacggcgacaactggcatcggctctggtgcatgacagtgtgatgcacgcgacaaggtgttgtccagttccgtgtgcctagccggagggggtggcgtccgacgcagctatgcggctgctgcggcagccgacgtgttggtacccctctgaaagggtgtgtgtgggatgtctgggcggcggcaacgatggaggctgcatgctttttcctggggtcgtagcctaacgatgtgatgggggatattttgggcgaaagccttggcgacaatgacgctcatgag

SEQ ID NO: 176051 - DNA, 426 bp, Zea Mays
gagcgtaataccctactccactgtgtgttgggttgttgtgaaagcttgagagctgagagtctaagtctaagttcggtccaagtgtccctgtccctttgtaacattgcatgcctccccttttatagctcaaggggggcacgtacaagggtgctgagccccgacatgtgggcccaggaatataatggatgtaatacttggagttgctggagcaatcttcttgcaccctgacattcgcgatctgcgtggtattggcgtgcaggggaagcttccctggcaacgcataagtgatgatggacacagtgcaccttgcagcacgggcgtactgtttggcaatggactggacaggcatgccgcctgcaggatggcctggacgccgcctaccagctgagtggacaggtcacaataaatactgaggcggcacatcgc

SEQ ID NO: 176052 - DNA, 703 bp, Zea Mays
aagggctgatttcatctctaactgcgtattgtagtatctgctaattattctgtgggtgtatatattgtatttgtcggaaacaacattctgatcggccgtagatccatgttgtcatggtaaagctggtttctttttcttgtcattttctctttacttcattcttgttcttttttcactttgtctatccatacatattattattcagctgtgaattaggcgactggcgccggcgcgcgatggtacgcggctgttgcaagcgctgtgtatttcctgtggttgtgtgagctgtaggcgcgtcgatcgtccgggcatgcatggaaggcagagtgaccgagacagactgatgacgatggtgtggtgtgtgtttaggagggcaggcagggtcacgggaatcccatctatgaaccacgtgcgaacgtgtaccagtacctgtacccgtgtgtatagtaccgggggctgaccggcaggcagctagcgcaagcgcaactgaggctagagcctagagccaagctctctcttcggtctctcggtcagcggcacaccgtacacactagccttatgcccttatcctctttcggtctgattggttgtccggttggttagagcctggttcatacccagatacaggctgagcgtagcatgtatacatgaatgcaactagttaatttgttacgtgtttggtttcctgtaccgactccgccag

SEQ ID NO: 176053 - DNA, 753 bp, Zea Mays
ggtaagtacaggggctaacccgcaagatctccaagacacagcgctccactggtctggactgcggattgtttttaaataaacagaggggctctttagcaatatgggcacgacgaaagggtatcggtgaatcagagccgttggatcgagcaccagcggtccagattagatcgctattcgctatgaagcggtatggaaaactgaccattagatcaagatcctagggttctgattttatgttagcccgatctgccctaagccatcagatagaggatcaatggtcacgatttaatcgcgcgaataggtatgctatcatctaatcctgaccgtccgtcaagatcaaacggtcccctaccgttcttcctcccataaccgaccgtgcggcggcgtcagggtcacccacggcggggttccaccggcgcacagccgatgcggcactcccatggtccaaccggccatacgaggagcaattacccatcctagaatcaaggtgaaactctactgagaatccgtacctacaataatggcgccgtaacctcggaccacggcaagagcgacgctgaaggcagagcgcccgcaccggcgagcgattcttccttgatacggttggaatccgattcaatcgggctccacccggattctccacgcggcggtgatgccatccccgctgattcctcgaccacccagtgctgtagcccgggataaactcacggcggcgcggaggtggtccaatggaggtggccgcgattacgccct

SEQ ID NO: 176054 - DNA, 582 bp, Zea Mays
caccccaccctcggccacatgagaccccagagccccactcactctccccctccctcatttgcacacctatagagcctcatttcaacccccaccctgcgctgcgtgcatgccagggaggagccgtcgttgtccgctgccgtcccgagcccatttccccgtcgacgtcggagccctaccgtgccctctgccacggtgagctctgcctcgacgtccgcaactcgggacacactccaatttcacctctccctcccttatttcctctgcccgcgctcacccgctatcctccacatagtcccggtgccgccgccgtcgaaccgagccaccgtcgcgccttcgccgccaccgagaggttcctggggtactccttgaggtaaggaacctcccctgccctctccttttccctcccatgctctatgctgtgcttgatttctcgtcggagtcggttggcgccgccgccgagccacctcgccgtggggcgtcaccctccagtgcccctatcgcgacttagccctcgccattgggttccccgcgccttccccaacctccccagaccatcccggttgccctaggacccacggagcc

SEQ ID NO: 176055 - DNA, 576 bp, Zea Mays
ggtttacatcggccgatcctttagaggagattgacataggagatggtaaaactccaaggccgacttttgtaaacaagaccctggagaccgatcctagaaatgagatgatcggtctattgaaggaatattcggattgctttgcttggagttacactgagatgccaggattaagccgagagatcgtagagcatcggctgcccattaagtctggttccagacctttcaagcagagagctagaacatttcgtcccgatcttctcccatgaatcaaggacgaaatccaccagctactagaagctaattttattagaccttgcagatacgcagagtgggtctccaatattgtgccggtggagaaggagtcaggtaagcttagagtatgcattgattttcgcaatttaaatagagcaactcctaaagatgagtatcccatgcccatagccgacacattaatcaataacgcatcagggaatagaattattagctttcttgatggtaatgccggatataatcagatttttatggccgaagaagatgcgtctaaaatggccttcatatgtctaagcttcattggtt

SEQ ID NO: 176056 - DNA, 861 bp, Zea Mays
cagggacgacgggttgattccaactaaaccaagggtctctttaacaaaatcaccgtgtgaaagggtacggggtctgctcaacctttagatcaaaaaccaacagctgagattagatctgtgggcgagggcatgcgcgcgtgggcgagcaaggcgcttacaaccaagccagcggtgttagcgaccaaggaggggggcgcgcagaccagtcggacccagcgccagggggcgcaggtgctgatcgatgggcccggacacagggtgcgtgagcgtgaagtggtatcccacgatctcggccgtgcgtcgagatcagactggggagatcaaagtcgggagggctggtaagctgcgggcggcgacggtcctcttcgcggcggtgaggtcgccgaagttggggcgggtgcgtgctacggcggttccggggtcgccggagctggctagaaacgaagaggaagactcggcgaactcgctggtggggttgttgccatgagatgggggtctgagaggggagaacggcggaggaaaggctccgggcgggtcgggacaattccggtgaggaattccggccgctaggagaggcaatcgaccgcgataggactcggtctagttccagtggaggtgggggagcactatgggccaatgtccgggcactggacggggttgggttggccgaacactatgcgggcgcggtgagcaagcgcgaccgcacaccggtgaggccaaattggctataggtaggcatgaataggcaaaaccaagcacgagaacggatgtctcacctcggggcggagctcgaggtggcctggcgtggcttctggcgagctagatgacccgcacggcgggcgcgggtctccgacaagatcg

SEQ ID NO: 176057 - DNA, 670 bp, Zea Mays
cggacctgctcgagctccgcggaatccggtgaattctgttggcgtaacggtttccgtgagctgggtggcgcgctgcgctggctttaaaaggctatactgccgcactcctcgcgactcaaccattggatagcccaaatttcttgtcgccattgacggagggagagaaccgggtgggagagttcgctgccggtctggggtggcgaagaagcttgtctgtggcgcatcaccggactccgccgcgaccttgcgctgccctctgctcgaccgcttccgggctctacgcccttttactctgctcggcgccctattccttgagtcaacggttcatcgccgaccaacgccgcatcgtgagctaagcttctgcgcgccatcaccttcggtgagaattctacccctcggttcaccatcgttgccgtagtgtgtagcacagtttacatcgaggattggggtagtggtcggtgttttcgctctcaccagttatggcgccgccgcggctgaaatcacgtcaccatggtaggagttgggggatagaagaaggctaggcgtcgtcagtttagcagtcaacggtgcagatctatctagggtgtagccttccgcgggtgggcgatctggtccattagatcataaatggacagccgcgatgtgatcctgacgttttaaatccaaaccg

SEQ ID NO: 176058 - DNA, 567 bp, Zea Mays
gttgtgtaggagctacaaaatagaattcgcatttattgaataatgaaattgttttgtttcatgcaaattagcaaaagagatgccatatttgactgaaaaaactagaacttgccttcagtttcttcatctctagctacattgccttcagcatcacctgtactgtcatgaccagcagatgccatgtcttcctctgcagctctgctgaaatgatcagcaagtccagctatagtagggttgttgccttcagcatcacctgtactgtcatgagcagcagatgccatggcttcctctgcagctctgctgaaatgatcagcaagtccaggtgtagtagggctgtttggtatgtcatcattagcatctgttggttcctgtacattgtggtcatctgtctctgtagagtgaagccttttttatgattgctcctctggttgtggacctgccctcactctcttgctgaacctaattcctggagccatgttggggtttctcttcttctttgaagcaagggttgtgtttctagctcttctagataactgtccacaaaaaatagtcatgtgcatttaagag

SEQ ID NO: 176059 - DNA, 653 bp, Zea Mays
tcttaagtcgttgccgacttaagccgattgctccattagcagggcatagtggtcaccctgagtttaagtaagtgcgagcatgttgcaccgtcttaagtcattgccgacttaagccgattgctccgttagcagggcatagtggtcaccccgagttatgtaagcgcgagcatgttgcaccatcttgagtcgttgccgacttaagccgattgctccgttagcagggcatagtggtcaccccgagttaagtaagcgcgagcatgttgcaccgtcttgagtcgttgccgacttaagccgattgctccgttagcagggcatagtggtcaccccgagttaagtaagcgcgagcatgttgcactgtcttaagtcgttgccgacttaagccgattgctccgttagcagggcatagtggtcaccccgagttaagtaagcgtgagcatgttgcaccgtcttgagtcgttgccgacttaagccgattgctccgttagcagggcatagtggtcaccccgagttaagtaagcgcgagcatgttgtaccgtcttaagtcgttgccgacttaagccgattgctccgttagcagggcatagtggtcaccccaagttaagtaagaatgcaggtcaatcattaacaaactgagtattcttgaagcctttttt

SEQ ID NO: 176060 - DNA, 362 bp, Zea Mays
ctggtcgccgtccctctgctcgttcatcttccctgtgcccagccatggcgtccggtcgcgtcttcttccctggcgtccgcgtgctgtgaagccccacgacgctcatctctctctgcttgtcttctccctgctcttgctcgcgtccagccatggcgcacccgcttcctggctcgcctacacgcgcgtcagctcccctctgctcgtcgcgcgcctgctccctagagctcgcccctgcgcgcttctctgcgctccgcgcgtcccatctctctggtgcctcgcccagccgtacctccaactcggattcaatccagttcgcctatctccctgtgctcggctcctggttggagctctctgacgccgcg

SEQ ID NO: 176061 - DNA, 968 bp, Zea Mays
tctccgaccactcctcccgtctgggctagccacgcacaccacccgagagacagtgtagatctgaaactgcggcgtggaccttctctccctctcgttcgtcactcggttcacggtggcactctcaactccttgggtcattgcgacatttggctcctcggcgttggcacaagatggatgaggagggggtgctcaggttatatagccaagaggagatgcctacgattgtaatggtcggtccctgatcgtaaccaacttgttcggttgtatttcccttattattaaagcctgatggaaacgacgcctatgagcccatccaagtcaccaaaaaaattcctagtcgttcgattgtggatcgttggttcattttccctgcattctctcccgtgcgcccgtcgtttttatcgcctttagagatttcaaggctgctctcctcgcttgccctcgctttctctcttcatcctccgtctctcttcctctagctcacgctctgtgaggggctcctggcgtcgtgtcctgcaccctcccccctcccccggctccagcaacagccgccatcgcttttgaatcgtgaccccgcagtccaggtaagcggcttccatctccacgccgctcaaacgtcgtcacccgccaccccccgggccccacctcacttgctctcctcaaatgttgtcgtccgtccgagggattcgaggggaccacgtgcgacgtcctcagcgccattctgcccatcacgtacctctctgtgtgccgccttcacccatcctcccataccggggcaacaaacgtggaggcccgcgacagcagccacaaggaatgcgagctaccaggcaggttggtacactatgacgctaaaatacctacccccttagcaacgcatgaccggaccagagccctggtttcttccccactcgtgccatgctgccgatgtgtgggcatggagccaagcactgttgttaggtgtgtttccc

SEQ ID NO: 176062 - DNA, 1296 bp, Zea Mays
gaattggctcaactttgaagctttgtaacttccaaattaggaggagtttgccctagatcaacacatcaaacctatagagctatgaaaggagaacaattcttattaagtgaccaagcactgatgatgtgtaaaaattggagaaaagcaagcccaaagttgggctgtcagtcagccaaaaacctgaaactggatattcagtgacatgggatgaactttgggagtcttttcaaagatgatcaagtaagtgtttgagcatggttactatagcaagattgtagctggtttatcaggctatcactttgatacagagagttgattcagtccttatacaaaatctagagcaaatcggtaccaaaaatgctctgtcaggtcaactgaataggttgcgccatggtacagtgaatgggatggatcaggttcagagaacctcgccaccggcgacctgtgcgcccggattcgcgccctgtaacgtgcagataataattcccagagcaaagatctcgccgtggatatggtcggggtactgtggccggcctgtcactgtacccacttgcgccgcgacgtggccacatgaccgtcgccacgatgatcgccgttcatcggttttcgccacactactagccatgctaccaccccgctatagatcactaaagccagtctcgttgtcactggagacttaacccagtaaatgccacgttgagcggcctccggtgactcctctcgtttcttaccgatagccatccgccgctcaaattcgtcgtactcatggtcggtctctataaattgatgcctcagtgagctccgttagattatccccaagccagagcacccaccctcatctccaatcatccaccatagcgcttcaattcgggttttcccccaaattggatctccgcgtcgccgtggatagctcttccgtggctggacaactctggtatgactctgcacttctcgtatgatttttagcagctctgtgtacccgtgaagctcgtcgtggcagtcatttgaccaattcgggcgtgattgaatgggaacgcgggctcggcgtcacgggttccgccgtgtgcgtgggtagaacactctctaagtgtgccagccaaaattgaagactgttcttgggtcgccttaggtcgggaatgttcaccccgtagctattttagacagccaccgccggtcatggccagtacgagatgcgtggtgctcgacgacgagcgcaccgtggccatgggtctatttggagaagaaacagaagtcgggggacctctgtgtaattgtcagagagaggatgaatagtgg

SEQ ID NO: 176063 - DNA, 564 bp, Zea Mays
gtgctggcgccaaaaccacttggaccaaataacaaaaagtggccaaattacccaaggcacacccctgaaaattttgaaatcaatccaaggtcgtttgacatggtttggcatcagttttgtcgctggtgaacagtgcagacagacaagacttggcgcccacatatcttgtaggctagggcagatcttccattggaacttacacaaactagctagccctaggtgccaggaagaaatcttgcacaagacctttggcgagattcgcacggttgtgacctcttcaggctcaagaacttgggtagatgaacacgaccacgtgttcgacgtgccctggcaacaccagagcacgccctcggcgctcaacccgcgcgtgcagccccgcgtcgtgccaacccctcgcctgtggctataaagcccaccttggcctcgaccgtacacccccgcgcgtccctgacccagcccgggcatgagttcaccggcgtttgcctagagaaccccgtgccaacggccgcgcaagccacggccaccgtagaccggccaaactagccatcctccgccccgtccgac

SEQ ID NO: 176064 - DNA, 494 bp, Zea Mays
gcagtgccacgcacgtaggcgacagtgccgggcaaagaaaaatgcctagaactggctcaaactttgcagatagtttgcgcgggcgggaaagatgtccactgatgaagtatcaacctgagcaactcagaaatcgaagcgcagattcaaaaccctgagaaaagtggggttttgttgggggttttctaggacgaactcaacacaaggtcgaaggggatcacaactacaaacaacaccatcttgacataagaagtgatccaaagagtaaatctcatccaccaacaaatcccaacagcaccagagaaacaagaactcgatggttctccaaaatcctcaagaacaaagagatgaagaactcaagaataaaagccttcagaaaatcagcaagggcacaaactgaaattgaagccaaccgaaagttgtgggtcgggccgacgacccttccttagatgaaacaatatagctctcaggcacagtcgacaaacaaaatcgttgcg

SEQ ID NO: 176065 - DNA, 604 bp, Zea Mays
gtccagggcctttgtggaattacttttacacagcagtgggtcgcgggttgttttctaattttcagaagggctctttagcaaaaaggcaacggcgaagaggtataaatagatttcagccgttggatcctagttcaagcgctcagatcagatcttacttaaaacgatccggatttcttcaggagcccttggatctgtatcaaacggtccatagcctatctgcgggttggatggcagggactgatccatccgtcggtccccagatcaacggttctgattcactgcaaccacacgacgccccagcttctaatcccaaacgtccagcagggatccaacggcccaggtaacttctcctacctccagcttcccaggcacagacaccacgtcctccccaatgctctctctctcccccgttgatccatcggcgctagccaagacccgacaggggcaccccggcgactcgccggcccctaggaccgcctccttaccatgaccgccacacccgcacccgaactcccgatgcgcacctaacataacgcagaggaaaaggaggctcaccagcgatggtgtccggcgttaaccgccgatgtttcgccgcccgcgcagc

SEQ ID NO: 176066 - DNA, 723 bp, Zea Mays
ccgcaatttctcgcccgatgtccacctcaaactctacgagctagtatttcttgcttagccttcaacccaaaggattacgaattccacaaacgccaacaggctctccttgcaagcctctctttttaagttacggggcacttgtcatgcacatgggcgaccgagctcttccatttatatctctaccactcctcatcggtgaccggacgaacgccgggagaaacaggccgatccgtagctgcctgcacacatcggtgatcgttcgatccatgtgcgattgattgatcagggaggagcgagtgatataatgccttgcttggcgcaagagttccacccgaagctgcccgcggcgaaccactactgcaagtccttgtcgtcgctcatccgggagacctacgcgcactgccatgtcccctgcgtcgggatcgccgggtggagctccggcggggacagcgacgacgacagcgtcctcgacgaagcgcgagataccaagcaggtaaggactggctgatatgatgtatagtagcgcgtagctcccgatccagtccttggtccgttcacggaattcgctaagccctccatgaatgattgtgcaggtgatcctcagcgagatgaggagccggcagatgaagaggcggtccaggtgcagcgtggactcgccgacgccgctgcccctgccgtcgtcgagctccgctttcgcctggtcgtactcgtacgctccgctcg

SEQ ID NO: 176067 - DNA, 498 bp, Zea Mays
aactccttggttgcttggtatcttcatacagaggtacgctgaatgtaggactgcttcggagatgttgagtgtttgtctttcgatgattgcgttgtatgggaattctatatcaactatttcaaacacgacctctgttgttcttgtgttgttgacatagctgaaggtgataggcatagccaactttccaagggtcatcacttgttgtccttcgaagccacatacaggaaaggttggatcttgaatcttatcctctagttcctgcatctgtctaaaagcctttgcaaatataatgtctgtgaaacttcctgtatcaaccaggacgttgtgtaccatgaagccctttatgacacacgagattaccatggtgtctctaaatggttagtccttgatatgaaggtcctcttgggagaaggtgataggaacatgagaccacttggtcttgatgtcgggtccttggagacccacatgctgcacccatctttgggattcttttgtttt

SEQ ID NO: 176068 - DNA, 588 bp, Zea Mays
aaactgcaggacccggatagatttagatccatagatcgatggagtcggagtctgtaataatgtttaattcagtgtcttagtctagtcagtcttagttagagttagtttggttatctcttgttggatgcttgacatgatgaacatgtaatgaagttggatctttgtaatgattgtcaccaaggtgtgggtatcccctgcaacttggtgtagttattaataaagtcagttacttagttgggtaatccatttatttccactttcctctttatttgagaagttgtcagtgaagatggtcaattgttcggtgatgtgaagattttcgtatatcttttcttatgatgaaagactgcagagtcagatttgatatatgtgtgtggtttctatagatgtctgagaacaggcgcagaggtgcgaggcgtgcatagcctgaacagcaggcaccccaagaggaggcagctccgcagcagcatttgccaccgccacccccgatgaccattgagaagatgttcttgatgcagacccaggcagttcaggcaattggtcagatattagcagcaatgcagcaagctcagcagcagccaccatcac

SEQ ID NO: 176069 - DNA, 499 bp, Zea Mays
caaggaaccagtagataagactttaatgctcccacaatagttcaaacttggatattttcagtagagttgagacctttagtacctgagctctatacttcatccatatctcagctcaagcacataagcgaagtacagcaggaagataaagatctccagttttcagactagcactgacttaactaaaccagccactgctacctcggttgcagacctccctatcgaggccccatcatttcacaaacccctatggcaataggccagacttacttaaccaaagctgccctccaaacacagctctactactttgttacaacaccccaggctacaaacttacagatcaaaagttatgatgccccaaacacagcaaaagatcactgaaacctccaagtttcagttactgaacagcaaaacctcaacttgacagggaacatttggacacaacttactccaagttttacatagcaatagtgagatcatgtttaacaaaacttgtcgacca

SEQ ID NO: 176070 - DNA, 736 bp, Zea Mays
cggatgccgaagctgaagctgaaggagttgctgaagccaaatatgttggtgaagccgaaacaacaatgtcagatatttttgcagatgtggctgcggagacaaatgtagctgcagaagaaaccatagccacagtgccagataaaggaaaataaattgctaatactccttcggatgagagggattttgaccttcggcacctgggcgatcaggaattgtccgaggaagacaagttggaactgaaagaatttgcaatatcttgcgattatcagccggggtctttgttcttcggcggggttgatgaagaaattttaggatgtattcgctaccgcgccagggtgaagataatcggcactctgtctaagagtgttggattcccaaagctggaggccgacatcagcggttaccgatggcaacacattgtcggtagcctattttattccaatttcaaggtgagatcttcgtctagatttttgttacctttgtgatagattgggttctctaactttaatttgttttgcagagcatgctgttaagcaagacgctgaaaatgcagtaggatagtgaggatagaaaacacaaagtcatagttaaaggcttagaggttaaaataaaggaactttaaacttctctagaagaaaaagacatcctactgcaaacagccaaaagttccctcgcagaatcacgatcccaaaatactatgttaagcgaggaactgaatgaagcttgaacgattttg

SEQ ID NO: 176071 - DNA, 371 bp, Zea Mays
gtgcatcgaagctacaagcaacgaactgcttggaccatattcaaagatagaagataacgcgctatctgcgaccttcggagggcggaaaaagaagaggctgaatagagttttcgatgctattgggtttatgtaccctgattaccgttacccgctgaaagggcaaaagagaaaaagcacaacttctggaaaaggtgatgctttagttgatctaagtgaggccacaccaaaaaggaaaagggtgaaggtccttactcaccgaccacgcttcatcgaaccggcctcagtgcccgaatttggtggtgagacctcttcggctactgaagcaaaagaacctactcctgcgcagaaaactgaagagctgactgcaacgc

SEQ ID NO: 176072 - DNA, 618 bp, Zea Mays
ggcatccggaacggtgactggtacgtgacatggccgtccatgtaccggccgctgcagctgatcgcttgcctcgcccccgaggtcctggactggatgtccgacgccatgtacaaggagaccacccaagggaggcggccgctcgggcagaggatcatggaggccaccggagccaaaaggctgtacccgccgtcgcttctgcaaccgcggatcaaggcggactagagactagactagcaggaagagctaggaacatgcagacgcagatgcaatgcagcatcaaggtctcaagggtgcagccgcttttataatctatattagtacttctcatcccaaactgaaccaaagccaacatgcatgtgcagatcgatccactttaatttatttgcaccattcttcactgtacacacaatttcttggctactgtacgtttctaaggattcccttgctttcgaaggcttttggcacctctaaaatgcaagttctttgcttgattcgttcgtcgtctgaatcggtgtccagaagcgaaggaggaagaagatgagctcatgattaaacataccatataattaagtgcagaaaaacatagatgtaaaagctatgtcaaaaaatgtgtactaa

SEQ ID NO: 176073 - DNA, 1036 bp, Zea Mays
ggctaggattagatcttactatcgccgaaaggggtactccatcggcgcccttggatcgagatccaacggtccggatattatgaacccgagatcacgctgcagctctccgattcccatcgtgcggcccggattgcatcccggccgaagggttatcgttcctctaatcggagccgttcaacaaaagatcaacggctcacaactctctcctacctctcgatcccctccgacggctcaccgcgccatgccgcggcaaagccctcgccggagcgacccaattcgcccacccatgagttgattcgccaaatcagtgggtgcaaaatgaaattaggaagatagtgaacacagaagtgggagttttaccgaggattaggtcaccgggaggcctgcccacggcgcacggcggaggtcttcactacggcgacgaattgagcttgcgcaggacaccggcgggggaaaattgacggcggccgaagctttgccgcgccaagcaggtacccaggctctagcgcagaggactaatcgcggtgtggatgagggcaatcacgacggcggttctttcactcggcaacaatggcgggtggaaatttggagaaacaggggcagccgaaggaaccaacgagttaccaggatgtggggaagtcgtccgcttttgtagccagcgcgagacggagtcaagccacggggaaatcgggtgacccaacggcagctccgaggtgttcggcgtggaccgcaaatcccgtggagacgatgactgggagggtttgaggcttgactgacgagtgggccagtccggcagagagggacacccacggatggcaaaccctgagcggccgggcccaccgaccagccaaacggacgagcgcgcgagagaggctgacaactggggagtgggccgcgcgtgagcaattcagaggtgggccgaaagctggtctgcggcccaggtaagacctcttcctctttttcttttatttctacatttcttttctttcttttcaaatcccatttgtattcaaatttaattcaaacctttggggct

SEQ ID NO: 176074 - DNA, 541 bp, Zea Mays
gttcttgattgtgacttcattcagagctcgataatcgatgcacatccttctagtgccatccttcttctccatgaataggacaggggcggcccaaggtgaggtgcttggtctgatgtaacctttctctgacagctcatcgatctgcttcttgagttaaactaactctggtccagatactctgtaggctctcttaaagatgggggcggttctaggaagaagctctatggcaaactcaacttttcgctccggtggcatacctggtaagtccttcaggaacacgtctagaaattctgacaccactttgataatctcgagtggatctgcttcactgctatcaatagccatctgataacaactccctttccttcgctcaggcgggactaactcagtcatcacttcctctcctagtggggacatcaacttaattgtcctcttatcacaactgatgactgcccgatacttatctagccagtttatccctggataacatctattccctgagtactcattactatgaggttagcgggaaactctatccccc

SEQ ID NO: 176075 - DNA, 1111 bp, Zea Mays
caggaaccagtcgcgtgggtgggtatgacacgtgggtccatttggtcagtgcaaccgtgtccgcatgcgtatcgctgagtgtggccacagggtcggactcatcttcttctcgatgcggtctggtgtgcatttccggccagagatctctcgccgccttgagtccgctcggctgcgtaaccgatctcgcgccagaatcggactttaggaaaaaccaccgaacaccctcgccaatcgggggcccactcgtcgggtctatcatcttcttcttagcccctcgtcgtaaaggattgctaactatgcgcggtcgtcgttgctgctcgtccgggatccgcgctaactgaccgggtctcgggtgacggaataaaggcaggaatatccaatccccagcctccatcctcaagaagccctcacctctgccgcctctgtactcgccccacccttatggcgcgcgctcctgcctgcatgtgcctgttgccgcaccagctaccgtcttccctgtgcgtggagccgagcggctctatcacccaagacctagagaaatcgcgggaggtgagagaagagatctacaccggcggtgttcgtcctggcgccggatctcttgtcaccggtggcgagcatcccctctccctggtgcactaaccgtagttgagctccgttattctctttccttatgctgcgatgtatccgtctgctagtttgtaaccgataaggacggggcctgggaatcatcggtattttggtggagatcggcggcgggtatggcgcgtccaccgtgggggcggtcagttaagccagtcacggcgccccggtggccctcggttgctctggtgctgtctagcggagagagaatatgggaaacgagaggtggaagaaggcccttggccgtgggatttgcaagcagcgggcaggattggtctgtgacctcagtcaatctgggccatcaaacttatgtggacggttaggattcgcttacagcataacctttcctgcggatcgatctcggccaccggttgtgtatcgaacggctagaacctgatttgtgtagatcaccacgctaaatcgcctgtgtctaaggaatcattcagtatagtccctagacttttaggtatta

SEQ ID NO: 176076 - DNA, 927 bp, Zea Mays
tccaaatatttcgcttccaactgatttaccattgtctctgctgttgttggcatactgacattgacttcaattctttctccttgtggactggttaatgtaaccatcctcttggcacaagatattactccatcatacttggtcaagtagtctattccaagtatcacatcgattccacttgactccaaaattatcagatctactagaaagcttaggcctctaatttcaatcttagtctgagggcatgagtgagtggctctaagttcacctcctggtgatcgaattaatagtttcttcttcaagggatagtttggtatattatgtttttccacgaatgactttgttacgaaggagtgagatgctccagaatcaaataaagctgatgcaggtatggagttaataagaaacataccatacaccacatcggcatcttcaggaactgattccgctgtcacatgattgactcttcctctattctggttctgcgaagtcttgttctgtgcagatccacgagcaggtgtgttctggtcagtcctctggttgctgttcttctggggtgtctgttgattatgccttgggcagttgttagcatagtggccaagttcgacacacttgaaacagccattcagttgcactagggtagttgtgttgttgttcttggccagtttgttcacgacgcttccttgacgattctgttgttgaccactagacctttcaccagtctgagtgctacttctctgctggttctggtactggttgctcctgtgaccttgttgtccagagcgttgtgcttgatagttgttgttcccactctgatttctggagcggaactgagaaacttgggagttgttttgccgggtattcctgctggtctgcccttagtactttctcttatgacctgacagctctttccttttgcttttaaggcca

SEQ ID NO: 176077 - DNA, 510 bp, Zea Mays
gtgcgatcgaactaagtggacacccaggcgaagaagtgagaaagtgtgggggaacatatcagacttcaagtgcaacagaatactcgtgggagcaaccatcaagaatcacaagataatacttacaacccaaaatactctgaacaggtgaggcccacaaatcacagtgaattagatcaaaagggcgcacgacttgagtggagtgaggaaaagggagcctaatatgacgacccaactgacaagcatggcataaagactcatggtggccttgagtacaatagaggacaaaactactagacaccttggacataacatcgggacgatgtatgaccgagccgacggtgccaactagtggacgaagcggtagtagtcaaagcaggtgaggctgacgaagatggcgaagtagtggatgcaggaaagcgaagggtgtacaggggcccagagctgtcacaccacacaagaagactttgagcggcaagatccttcactgacaaaccaaaagggtcaaactcc

SEQ ID NO: 176078 - DNA, 360 bp, Zea Mays
cgtcgctatagttgagtcagtcggcatatgttttattagtgtcagacgatcagtcggcaaaagatgtccgtcgctatagttttatcccgacggcacttatagcgtcggatatgtgtagtcggcatatgtttttagtgactgattgtaagacggtgcaagggcttttagcgactacaatgaagtcgcggatcctaggttgtggtgtagtggttctcagacgtgtaatacaagtcctcaatcctacacaaatgtcaagagcgatttaacataccaagtgcaatggagtcacggaatgcattcatcgtcgcagagtcgtccctaccaagcgcattacgagcccatggctgatcggccgcgtaa

SEQ ID NO: 176079 - DNA, 442 bp, Zea Mays
ctctggtgctttgatttcattgcaaatgggatatgatggcaggaaggtgctcaggacatgtgtttctttgtagccaggagcccaggagagtctgactatcattcaacggataagaacggaccagcatgggttcccatgctaatggcagcacctgtgcaggtgacggtcctccaccaatggagaagcggaaagaaccggcttttcctcttaaaacaatgccactgcatgctaacggctggttgaacaacatgaagctgtcctcgcctactgctgtccctgtgaacattggtaacagtgttgcttttgatcccatctaccgagcttggactgtgagtctacatcttacctactaactgagacccacgtagtcgtagctgtaagagctggcattgacagccagtttccttgtcatttgcagcagaagtatccttcagctctgaac

SEQ ID NO: 176080 - DNA, 3248 bp, Zea Mays
ctgataatgtatcatcaagtagatcagtgtttgcacgtgaccccttgctggtgtgcgtagatttggcctgagtctactggcaaagataattcggacgaagagttcagagcagatgccttgtcttgcaaatgagcttgtattatgctaatgttttttccttgaccaagtccggacacagttgtgggggtcgtatcttcccggtcaggttcactatcaccagggagaagagaatatttgacgactgctgttcctttagcaggttgatcaatgtcaccctctgttaaaaaaaatatactgtatatatgaatcatgtaacagtaaggtacgcagaaacaacctacgtagaaaaaaatgtgcagcattacctgcaggggcagctactgttgtttcgattacagctgacataaaaatcctatcacaaaagaatgaaggatctcgaagaaaccgaaaagcattgttgcaccagataatataattgtacgaacgtctagttccaagattagaaggttgcaccacgagagcatgtccctcaggttgatcataataagaaagatgccgccgaacacaaatttgaagtgtttcctttcggctcgagggagagtaacttcgaaagttcaaactatcaattacattatcagcagcacgataatcaaaatatgggatgagttgatcatagttaaatatgtgtgcggagcgatgcggataatacaccaggttgtcagaacgttcgccacgcctatgagtaataccaccaaagaggctgctcataagtagctccattgcagaaactgatatggaaaatggttgtttctcattcttcgtacgaccatctcgaataaataccagtcggtgacctcctgggaatcgcagcgaggatcggcccaaaaaatctagcgagcgcagtccccgaccatcaccatcaaaatcccaaaatatatgatgtgcctctgttataggcatgggctgttccaacttcgtcaaatctatgacaaaaggaggaaatttaactggacaatgtaaggtcgctgatttccgagcttgcttccaaaaagaggcgaaccagcccatgatgaaatgacccgggagaaaaagggaacactcgctcgcggaccgtgtcccactaattatattatcatgaatattatccaaacaattatatagaaaagccaagcttgcgacaccaattgctctgcgaacgccttctgatatctgaacggccatatgaaatacctcaggacgaatgtattggccagcttcgacatgaatgcaataagtgcatagccaagctgctataaatgcagcacagtaaaccgttgaaggatatatagatcggtaagataatgtctcggcaccaagaatggctgcaagacagtcaccttgaaccgcgacatggaaacgaagcttctgaagtaacggatctttagggtcagcaaagccatccaataaaggactgccaaaagaatcagctttatcatcaaaaaagtggtctaaccaagcggtaagactcactaatcctgggcctggctgcagctctgatgggcataagctagcataaatagcataaagagtctccaagtgaccatggacgtcagagcaaggaggaataaattcttcataaagacgacctgaaatagggatccccatcgcatcagagatggtatgtagtggatatcccatctccccttgactggtaaccaatgtatgtccgtcaacattccaatatgtcaagaaggcagctaccaatgatgggtcagcttgaaaacaataaagtgaagctagtacaccgcgatagatatcagatttttgcagcatacttcggtcttcgtggttcaccagcatcatacgggcccatattaacatcttccgacatacaggcacatccaatcgaagctgcggccgacagtcgttgaaccaccttgatgagggatgcttgaccattttttgggctagtgtggaggtcgagctaggaatgtcgagtgacctcttggatgagtccagtaccgggtgaagaatgtgtgcacgaccagcgtaatctgacacagacggttcttgtgggttcttttgaatgccaaagggaatattatccggggtggtggtcgagagggtcctcgacgaagttggaacacgacatcgtttccgattttttcgttcttttccaataatttcatgtgctggttcagtaacaagctgataacctcgtccaaggcctaaacaattagccaccaaagtcataaaatcatcaggattttctcctttcgcatcgtcgacgttccctgcatgatgcattactgagtttgcatctgcaaagaaatcaaaatctttgcgctagagatatatctcttcctcttcctctagcggtgcttgttctgcaggcccactaaataaggtataaaatgtgcgctcgccagggctcatattctgaaaaatgggaggcaaaagcataagaacagttttcttctatggtatgttaataaaaaaagagaaaaagtaaagaggatacgatatacggattacccgtgaatgtacattggtaatgacgcgtctggtattcggggaaggatcgtgacgctggtgtgcagaggggctgatagtctggcttggatgatgatcaggcctatcaccagatctaattctctgccctgctacttcttgggtgttccagtcatacgagcgagggaaggatggccgagcatgaatagtattcatattctgcgggaagtcaccttggcggcgtgatcgacccctcagcggcatggcattaagtctctgaattgtcaacttggcaagaaagctaaaaagaggcaacagaaatagttgaagattcagaagtatgtagccaatattcagatccccgttagtttatgtgtgagatctgcagatataatcagagaagctgtcagacctctttgctagcttatggcagcgtgtcaccgaaactgcaaactacaaaaaaaaagagaagtagcagggccttcttgttagcatgtgcttgcgtgctgcaataatagcagatgcaatatataaaataaatcccaagacctctcgctagcttcttgttgaccaatagaaggaacgttggcaggaggtgtttgaaaaaccaagctgattagcgtggtgccttttgatcaatcccacggtgaacaaatatataggttgcgatccatgcattgcatctataactgcctcagtaatttgagggtggattctcaggtttccaccaagttgaatccggaatttctgcgcctccg

SEQ ID NO: 176081 - DNA, 304 bp, Zea Mays
tgctcatcccttcggctgcttcgtcgatcttcttctggagcttagagagccaaaacattgtctccttgcgcgtctcgatttgttgatgtgtcactttgaggttgttgatctcctcatcaagttcctcttctcccggctctaggctactggtcttcctcttttggttccttgcctccctaatgagagctttgtctccttgattaggtattacttctccaaagtattagcttgagcacaaagaaactgatgagtgatgaaggtaaaatagagttaggtaatgtgaccatgaataacatagtacagg

SEQ ID NO: 176082 - DNA, 812 bp, Zea Mays
atatctttcggtcaaacaagatgtctaatgagtgaagtatattggtaccgatctacgagaataagggagattcaaagttgtactaattaccggagaattaagttgataaagcatattatgaagttgtgggagagagttattgaacatagttttcgaggaataatgaggttctctatgaaccaatttggttttatacttggaaagtcaatcatggaagctattttcttgataagacaagtgatgaagcttccatgttaggatagaactgatgctgttcatgacaagtatggacgtgttaggatggttaatttcaaaagctaatctagaaaatctgctgcaaccattgtcttctagacctttgcaacacagagtgtccttgtatgctgatgatgtgatcatgtttttgcatccaaaagaatctgatattcaactggttctaaaaaatttagagatttttagagaagcttcagggctgaaaaccaacatccaaaaaagcagtgtgtacccaattagatgtggggaagaggaagtggcgacccttcaggaatgtctcccttgtgagatctcttctttcccctgtaaataccttggcctgcctctgtctttgagcaagctttccagaaatcaaactcaatacataatcgacaatatttctgaccagctccctgggtggaaagctgacttgatgactagagctggaagaaaagtgcaagttcaatatgttatgacaggaatgatcatctaccttgcaatagcggtggacttacctccaagagttctcaaggatattgataaaattaggaaaggattcc

SEQ ID NO: 176083 - DNA, 524 bp, Zea Mays
cccgacggtggcggagctccgcccgcggcggcgccatcgttggcgagtagcgcgcccagggccctgtttcaccaaccatcgtgcttcctggtgctacgcgatgtgctaacagaggcaaacgcattggaggaaaaacataccgaggattgcgcgggcagcgccctggtcacgacatgcggcgaagagcccacaccggcgatgaattctagtgtctcgactatcccgccaggtctcgcgaccccgctcctaggttcaccatggccccgtgaacgaccatagcattactccagccacagaccggcagcacgggcagcttacatcggtagcagcggatcacgttagacagggagaagacgagctgtctggagctcggtggtgctgcggcaaggcggaggaagccacgacaccgggttgatggctgtaaggcgcgcacagcaaagcatccaaggagttcctagatccctctggtttgaaacatcagcaccggtgaaacgcgctcgaagcggcctaggcgactcgcattg

SEQ ID NO: 176084 - DNA, 563 bp, Zea Mays
ctcagagtctgcgtttttagccttcgacagagattgggagtctagtttaccatacgccgagttctcatacaacaacagccatcagtccagcatcaaaatgtcaccattcgaagcgctgtatggaagaaaatgccagactcccctaatgtggtccaatgtaggggaaagaacattagaaggacccgactttgttaaagaagccgaagaaaaagttgccttgatccgcagaaggttactagaagctcagagtcgacagaagagttacgcggacaataggcgaagggagctcagatttgaggaaggagattttgtttatctcaaagtttccccgatgcgtggtgtcaaaaggtttcagatgaaaggaaagctagcaccccgtttcgtcggtccttaccctgtcatttcccgaataggacctgtggcataccgtcttgagctaccagaatccatgtcagatattcacaatgtgttccatgtgtctcaactccgcaaatgtctaaaagtaccagaaacccgtatcgaggcagaagcaattcagattcaaaaagatctccagtaccggg

SEQ ID NO: 176085 - DNA, 633 bp, Zea Mays
gttctgttagccaaatactcttgcaccaagtctctggtactgatctgttcagccaccactctaaattccacttcggccagttgatagggtgaccccaattgcatgttgcataagggccgggttattccgaagctcaagctcagaggactcatgaccatggtcattagcttctccctgtttttctcatcagcattcatataaaaccactcaatttttccagctggttggccactttgtgcggtagctgagggccggtaccttcgtatcctttcgatacggaaaattataacaaccaaaattttcgtgaagaccatctgccctggccttcgtctgatagtgcagctcatgcactcgacagaatgcttcggcatctgggctcatcccttggcttcaaagggcccagataaagacgctgagcctaacaatagcgttaggagtcaactgatgaagatatattttgaagttctttaggacttcccctatcatctcgttcaagggaaatcgcagccccaatctgaagaagctcttgaaaaccacaacttcatccttcttcggctctggggtagtttcttctccagcaaatcaaacaagtttgctttcatcttctccaaaatagcccagcttcatcatcat

SEQ ID NO: 176086 - DNA, 380 bp, Zea Mays
cctcaggaattggagcaaggacttccctagttatcgaaggcgaggacgaaggggaagggagtgagacccacctccccacacctccggaaatgccactagacctagcccaagttctggccaaccagactcgacttattgagatcctcacaagaagcctcgagaaccagcgcccgaatggaggaaggccgcagaacagaatgggagaattcctaaggctcaagcctcccacatttgctggatctagcaatccgcttgatgctgatgactggctgcgcacagtgaagaggaagttagaagccattggatgccctaaagaccaacgtgttcacttagctgcccaccagctctctgggatggctctatcctggtgggacactttc

SEQ ID NO: 176087 - DNA, 426 bp, Zea Mays
tgaagttctattttgtcactttcatgttatttgattacgtttctctctaaaaacctttgtaccttgttctaacacttcgaaggagtgttaaatcaagaggacgaaggtctttacatctaacttgtgttgccatgatttttgatacctttaggggaattgaaatcaagaaccaacacttaggccctctcactccctcctccctccactattcctttgcccacactggccttgtcgtccacctcgctacccatgcccgtctcttcacgcactctccccgcctcatctccctcctacttggtgctggccaccgaccccacttcaccacctccctcgacgagctcctccaccgtgtggcgttcacgctggggcctagttgtaccactctatcatctatcctcgacacgctcatctccatgctcgccaacc

SEQ ID NO: 176088 - DNA, 409 bp, Zea Mays
taattcatctggaaaaacatctgcatactcacagaccactggaatctttttcaggggcaactccatcatagcaaaatcacatgactgagtagagtcttgactgggcagaaataaggtgaaactcccacagattggggaattgatttccacgatgcggctggctacatcaagcactacttggtgtctggtcatccaattagtttttagaataatatccacattttccaaacccaaaacaagaagggtggttttgataatgtggatccccagttgaataggcacactttggtttaattgattagttgtaattttacccccaggtgtggctatcatgaatgacccttttgtgtgatagaaaggcagttgacattttacactgaacttttggctattgaaactatgagatgca

SEQ ID NO: 176089 - DNA, 454 bp, Zea Mays
cttcactactcagcccactccccacccgagtcgtggtgctcgtcgccacgtcgggatcctgcaccagtataactactttgccttctaatccgcaccggcagatgggtaggctattagtgggattctaccttggcatcacagcaacccccgccctcgctatctcacaagggtcccgtcgcgccgtcgcaacgcgacaatgtttgtcgcttgctgccaccatcttttgcctcgtcgtcgccatctaccgtcgcatcgtcgcctgccctcgctatcccacgcctattgtcgcctcaccgtcgtcattttgcggtgaagtcgctgactctccacaccgacgtgctgatgcgtccgcttcgccctaacgtccagtccccgccagtccacccttttgttctctccaactatccattagggtggccaaaatgaagtttcagtattcatgttattttagaac

SEQ ID NO: 176090 - DNA, 366 bp, Zea Mays
tgctggtcagatcctttgacatacagattgactccagcttcaaccagagagcagcgacggttttctccgccagaacctcctgcaggatattgttagccagatgaaggtgaatatgtgcgagcgccttacgatccttgcgcctctcctcatcagtccatgtcctggcgtccttgttgccaaatctatctagggcatcatccaggtcgcgattagactgcaagagaatcgcctgcatcttcacctgccacagcgagaaacgcgtgtcgagatccagcagcggaagatcgtacttcattgttgtcgacatccgtgcgccggcaggaaaccctatcacaccgatcaccaaacaaccaactttgataccac

SEQ ID NO: 176091 - DNA, 605 bp, Zea Mays
atccagtcaacgcgggcgagctccgcgccttcggttgcgggaccgacggaggatagggacgggccccactggtagcgacccccacacgtgcatgcgcggaacagaagggaggaggcgcgagcacgaaggatcccaacgaattttcactggatcgagcttcgcggatatcacgccaggaagagaagcagtgtccaactgaaaagcaaatagaggagggagacgaccctgagcatggggcccgcaagtcagcgatagcacattagtgcacgcaacggctgggacacaaggtagatgggccgtcaggagggaaaagaggcccattcggtagaaaattgctttctctttttttattcttttcttcctttctctttttttatcccaagtttaaatccaaacttgattgtgaactttggattttaggttaaatattcaaattgaaactgttaatatgggaagacacatttatgcatatttttttctttatttttttttctagggttctcctttctctcttctctattttctattttattttcattttcaaattctagtttttaaattaggtttagctccaatttcgactttaatacatttttatcattatt

SEQ ID NO: 176092 - DNA, 271 bp, Zea Mays
gagtgcatgagctgcattaccaaacgaaggccagagaagacgggctacatgaaaattttggttgttataacttcgcgtatcgcaaggatacaaaggctccggtcctcaactatcgcaccaagtggccaactagctggaagagtgagtggttttatattaaggctgatgagaagaaaagagggaaactgatgacgatggtgatgagccctctatccttaagctttgggatgaccagacccttgtgcaacatgaagccagggtcagcatgtcc

SEQ ID NO: 176093 - DNA, 696 bp, Zea Mays
ggaataccatgcagtcttactatctgatcaacataaatttcagcatacttctctgtcttgtgggtggtgtgcactggcaagaaatgagcagtcttggtcaatctgtccacgataacccaaatagaatcatggtgcctggaggtattgggtaatcccactatgaagtccatgcaaatgtcctcccacttccaagatgggatgggaaggggttgcaaagggcctgctgccttcaagtgactagctttaattctctggcaggtgtcacactcggatatgtacttggcaatttcccttttcattctagtccaccaatatagagatctgagatcatggtacatcttgttgctaccagggtgcatagagaatttggaaaggtgagcttcatctagtatctgctttctgagctcagggtccttgggaacaaccaatcgatctccaaaccatagaattcccttgttgtcctgtcggaagcacttgtatttttctgccctttgcttgaccatatttttgataatctgaacacccttatcctcaatctgtgccctgactatctgctcttgcaacgtgggctccaccgagatatagcttaggtcacccgaagaaacaacttctaggttcaatctgcacaactcatcacacagggtggtcactcccacatccatgttcacacaattgcactggacctttctgctcaaa

SEQ ID NO: 176094 - DNA, 1387 bp, Zea Mays
acgagcagttgtttctttgcaggaccactgacaatacataataattcgtttgtagttttcaacttttcatggggaggtggcccatgttttagttgattaggtactgagcctgttctgtcatgtgcagctcatgtgtactttgcaggagtcatgacctcatgggacccaaccctgagatgagatgttggggatgactatgaatctatgatgggctgatgactgaccacatttgaccaattctttgcaaacatgagttctctgttagaactatatattacttatgatcaggtataaaaatagaatcctagagatatagttggtttagacctactacaacttaagtaacaaagtcctacaaggacatgtaacaattgtgttgactatatataatgaacatgggcagcaacctaagggcttaagatcttaagccgttccaactatttccacactatcaatcaagcattgctgcatgatgagatttgttgcacagttcggaatagttgaagtggctaaaacttgatataattaaaactgatttagagtcctagtactattcaatgtggcaccatctctttgccactcaaaaaggcgagcatattagcggtctttatattgggataccatttgctatataagacttataagtgttccagtggacagtagagtttgggtgttttttaccaaagaaatggaatggagtgccatttgtgacatgcagaaaaggtagcattagggaacatttggaccatgtaaggtgtattcagggggtttgaggcttagtgatgttagtagtaggtatgatgaatatatgacagatgactggtttatgttagtcttgtgtggctgctcactcagagtctacgccggaactgtttgttgcatttgcatctatgtcctgcacactcctgcacactcataggtcttgtcaccaagggctgtcttactatagcttgctcttaaggccatcattgtgaactaccgcatgcactgcacttgtcaactattggtacatccaactgttctgatataactatcttcattaatactgaatatgaaactggaatttaccacttgtttcttagtgtttgtagcatatgaatctgatcatttcctccatgtcacttttacaaggcctgctctctatttatagaatctatttgtggcaagatcagcacatgattctccattttctttatgatatatttatattcacaattttgtgtttgcttccatatatcaagattacggcagtaacacaataagctcagttagtggaagctacttttttctttaccattgctgtaaaagttgtattatcaaaggatttgaaagatgcgaaaggagacatgtcacatgctaaaattattgggtaaagcaaaaaatctgg

SEQ ID NO: 176095 - DNA, 816 bp, Zea Mays
gaattgagcatcaagatctatagcaaagtcccgatcactagggtgagtgggagcaagagtgctgcaagaagatcctatggaggaggatgagaggatgatagacgaggatcatcatggaagacgggtggtgcagactgatgggtatccccagcaacgaactcatcaccatcggcaacatacacaaaggggacaccataagtttcctggtgccattcattgacctcaggaaaaggtgcatgaaggggcacatcttgtgagcgagggggaatcgggtgacctaaagaaactgactggtggtgcagattctcatcagtttctcactgagccagttgatgcacatcagcagagatgtcacggcacatggagaataaagctacactcccatgagctagccgagctcctagaccacgaccacaaccataccctcttccccgtccaccccggtccataggacatggagtggaggcaccccgagaggaggaaggatgggagggatcagtagtgggaggctcatcagaaccagcgagagcccttgtcatcctgcttgtaggattatttggatcagtccaaaagggggtgtaaggaatgttcttggtgcttttttcatacctaacttgggtgaccacttcaatcattttcataatgaaggaggcatgaaggcatcccttgagaggagagcacgaagcatggataatctcttgccagatcatgtcaaagacattcagcctggacctgtcatttggcttcatgaaggcaagaagtaccttgctctcacccaacacattcatttgattcccacattttggaatgagtgtc

SEQ ID NO: 176096 - DNA, 511 bp, Zea Mays
gaattagccatgggcgtgctcgaaacgggatcgccagcgatcctctgccgtggggcttggctgccgccggtgtctggtgcgtgcgtgaagaagacatgtccaggggcgttgatctgttaacgagtggcgcagattaaatggtgaatgccgattaggtcagatgtagtgtgggtcgtccgattctgatcgatcgggtgaaagtcaatttagggtatttaaatctagaacgtccgaatcggatctattggctcagattgcataacggttcgctggggggtagatctaatcggggccgctagcggttgatcggacggcccagatacaaccataccccttcggcgtgtacatttcttaaagaacccttctgtttatagggattcaacccgtggtccgtcctggcagatgactgagtctaaggagtttttatagatcgacccctgtgctaatcaggaatcgaggcctagtccagacagtgagaaaacttataaaataatttagaaaagagattttt

SEQ ID NO: 176097 - DNA, 594 bp, Zea Mays
cgcgcccgcgcccgctgtggagtttttgcagaagggccctcgggttatagactaaatggatacacgttcgtttactgtttccccgcgtcgctgacaggttgcaaaaagacccctgcaattctaattcttcgcagagggagatccccgacggcgccgcgcggaggacgaactccggtgagcgtgcagaccggccgaattgctccaagaccggtgcctagactaagaccaaaccaaattcatgaccagggaagcattttccccaacctaattgcgcgaatggtcaagaggggtgctctggccataggggccgtgaacatggtggctagcccgtcgtgttcccgatgattggggcatctacattcaaattgatggcttggcgagcatcactgagctacgagaagacttaaacgaggtttgaattggacagagctttaccagaaccggccggccatggtggacttggtttcacggtgtccttcgactgttttgggggaagtaagaaattggagcttgctggtgatcggctgggagcaatactagacgtgggggtgcgcaacgatattgcgaagctagtcacgggctcaatttataggc

SEQ ID NO: 176098 - DNA, 944 bp, Zea Mays
cagccccacacgcttgcgcatacggtcactgacgaacgagcccgcttagtcgatagtcagccctcacgtgcctaggttggtcggtcacttacatgtggggtcggggcgtcagaatcgtccctatccacgggatatcaatcctaccgaactgttgcggtgcgaaagtcgtctgaaccacatttgcgcggattttgttggtcgtgaggtataaaaccgggggccctgcgtccctcatccatcttgtccaagcgccacggaactgtgaggggaggggattatagcggcgacgaaagagagcaatcgtggaccgccaacgtgattctctgccctcgacagggtttggagcacgagatcgtgcccatgtgttctccgagacatgcaggacctgtgcgaggaggagtcccagcatcccggggtaggcggtggccggaattcctcaccggtggacgggcacagccgcggatccgctcaattgcgatgatagacgccctgcaacacgactctcagtaagatcttaccccagactcttaccttggctctgaatcgtgtaaaatctccaccggattcgagttttgggcgggatggttggcgcttgccgataatggcactgccgtgatggctgcgggcaccatcgtgtccagccggcgtaaagggtggagtggtgccacccattgatggtctaaacaacggtcaggactagatccagtgtctggttcggtcagatggatgtgatccaccccatctgaatcggagggccagtgatgtatctcgcgtacataaaattcgaagcgcaggattaaggtccaacagccacaatagcttatcgattcgacttaagtgagatctaatctggaccatggcctttaaatctaacgactcggatcgctgcataccccttcggccacgcgcaaaatttcataacagaccttaggattttataaaac

SEQ ID NO: 176099 - DNA, 804 bp, Zea Mays
cgactgtgcacccggattcgtgcccgacgcggtgattcgtgccccgcgcagatggataatggcaaggaggtaagaaatatcgcaccgtggatgaactctggccactattctactccggccgccgtacccgcctgagtcacggccacttcggatagattcaccggagttagccacctcgcgaccttgcgcaaggtgccctggcgtcttaccacgtcgcagtagctcgcgttatgcatatccggtgatcgccagtgagctcgccacggtgaaagccactaaccgcttgtgccagtacaccctcttctctcgaaccgccacctggcgatctcaaattcacgggccaccgttcaagggccctataaattgagcacaccctcggctccactaggtattcaagcatccaatccacccgctcgtgcctccaattactcactagagagccccaatttgggatttctcccaaatcggtccaaaacaccgcgcgaagtgacctcgccgtggctagctcgttttaggtccgttcatgctctctgctctcccgtttcagtacccttatgttctcctgatgctcctcaaaccatccaattaagctagaccgcgctagatcgtcgggaacacttctgttcatccgttgttcgcactgtctccgtggacagggtgatttagagcccaattccagcagttaagtgaggggaaatggtcgcatcgagttgaattcggtgtccagcaaaggggagagctagtcgttgcgtattccggccaatgcaggcttgtcggagctcggcctggcgcggttcgccgccg

SEQ ID NO: 176100 - DNA, 585 bp, Zea Mays
gtcggggttgccagagaggttggggaagtcttggcaaacactaaggcgaggtcaggatggcgtgaacggggccgaggccgacagatcgtggaggggaccctaaggtgaacccagggctgctccagcgagcaatacccatcgtggtgggggttaatctggcgctctacgaccgacataggtttcggggagagggtagggatgctctaggcctgaattcaagcttggggaggggttgcagtggccgaacgccgtgaagaagtgatggtccaacaaagggggctccagcgacacaaaattcatcacggtaaagcgaaattggcgcaaactagggatgagggagagtcacttaccctgagacagcgcttggggcggcttggcacggcgcgtggaggctccggttgtccggatgtcgaagaatcacgacagcggcgaattccgatctgcgcagggaagaggttgagcgtggaccaggcagaagagttgaggaaaggggaaaccatcgcgggttcccggtgcaccaagctcaggcgaagctcaccgtggccaaagcactggcagaagtccagcgacgacggtagaacgacg

SEQ ID NO: 176101 - DNA, 450 bp, Zea Mays
tttgggggaaaagggagattctccggctatggtggctaatcgagggtgggagcgggtgcttcggcttcgcaatttagagacgaagagttgtgctcggttgatttgaacggagggggtgaggatgcggtggatttataggcgcagtgagccactgtcatggccatggtgataaccatcgccggccttagctggtgatcaacggcggcgtcgagcgctatcctttcctacgagcttgccacgttccgccgtgatagtaactcggtcaaatcagtgagggtgtggatgaacgaagaggagctgcgccgatgaccggatatggccggagtgattagtggccgcgtggcggccggaatcatcacgctccaccgcggcgatcttaccgggatcaagaagatctttgcgaggagatgcacgccgcgcgcccatcccgaccctggcgcaaatcacgac

SEQ ID NO: 176102 - DNA, 1016 bp, Zea Mays
ttaaatcccagcataaacgaagcggtacgcaatcctagccactggatctaaaattcacggcaatctctcgcccaacccttcaactaatcgtgatcgcacaatttgaatcggatggcggtcacgatttggttggctcctaggccggaacagggcgacgcccgcaccctggccacgacggcgaactctccggcgagtcgcccaggcgtaaccccgcatctgcatccgccctgattgaacctacacgatcaccgagccaaggcaaaacgggtaagaggtaactcaccgaagctcaggcgacggagacagctgccctcgcgccacgcagattccgcctcctagaagagcgacgacgagaaattacgagtgtgatagtggcccctgacctcagggcaacgctaccgcatgcgcccacgcaagggagctccccgacatacgcctaggtaccggaaagcccctaatcaaagtacggcgcggcggcggcgttcttccaagaactcgacggcgggcacggtggttaagcttttggcatgggtcaaaacggagccgtgacgcatgccaagggacagtcttataccaaggccgagcaacggcccgaccgacatccctagagtgcccgcccccgtgaattccggtgcatccattggcgtggccgatttcctcggtggagaggacaagtctgaccagtgggtcactagagccagcgacagacatcagcgccgcgcccccgtgagagatgtttgatgagcgggcccaaagagcagagtcacagaggagaggccgatggtgcgcgcggtgtgtttgtctgacgtgagggccccgcgggtcggtgtaacggagaggagaagacgcgggcacgactgacttggagggcccacatgtcagcgctgtccgctgttctgggccgcgctggtgagtgtggtaatgggccaaattggtgacggccggcccattcattgcacagctctgtttttatttttattttctcttcctttttcctttccttttattcctaattc

SEQ ID NO: 176103 - DNA, 986 bp, Zea Mays
ccaatgtaaaattttgggcattacaatatttttaattatcgttcgtatcgtaggtataacagtttctcaactctccggttagagctccatgctttgtcgtgccgaagccatgtcctatattagcttagctattccatgccttactcatcaatgttttaaatgtgcggctaagacccttgcaaggttaataatatagccgactgttggccgaaaccatataaagacctttgcagcctttcttcttagtacgtgtggttagctcttcattgttaatgtaggaccccatatgtctcactcacaaagtgtctgtgttttgaccaagaatcctaccgactagtgaattagtgctgcgtgtccaggcccagatgggtgatgcaaggtaacacaagtctttatcctggttcgggcaaggaaggccctactttcagtaaaaggggatgggacttatattacttgcacctaagtgcttgtaatagggaatacaagctggtcgggagaaggaaaggatcccaagtccctgggattgaatgaggcaagtgtcgatatccacgtggaggtgaaaaccatgaagtcttctcccctacacgaagccccatactactctatttatatagcctaagggccactaggggcgccggggtttgtcgtatacaagagaggaggcgtgttcgagcccctgtagccggtatggcctttgtacttgttgttgacttgagcagggaagggttggttggttcctgtatttgcatctttgaccgtacagagagctgagggcagtgcctagggttaggatacgtatccgagcctgtccaacgaggaggttgtccgagccatagtggttggagcaatggtaagtatggcgaaaaggttctggcaatacgtagagtatctgacgtcaactctatagcttctagtgacgtcgagcgtccttttgtcgatattatcaaggttaaaaccacgctcgagtgagcgcgaacgtcttcccg

SEQ ID NO: 176104 - DNA, 301 bp, Zea Mays
gtgatgaactggaagccacccacgactgtccatcagattcggagttttctaggattagctggttattaccgaagattcattccggatttctctcgaattgcgaagcccaaaactgagctgttgaagaaagaagccaagtttgtttggggtcagaagtgcgaagatgccttccatgcattgaggcaacatctgaccacagcacaagtgttagcgcaacccgacagcaataagccatttgatgtgtactgtgatgcctctggcactggactaggttgtgtcttgatgcaagacaaccgagtca

SEQ ID NO: 176105 - DNA, 599 bp, Zea Mays
gctccccaatgacagctgggccccacctgttgccgtggttcttcctctgtattgtggacccggcctgtcatcttcttcttctctccagcgaaacaaacggcaactccgtggcaattccaaacggaaatcgcgagcacctcggccgattcgcggaactcctccctagattcgggtcgatccgatcccgtgtccgcgccgcagcctggtagggtcgcgccgttatcctctttccccaaacaaatcccacatgcggaccgacattgccgtgttcgctgtgatccgtccgccgctgcgccacctgcgcgtcgacccgtgcgcgatttccgcgggcgcctcaaccaacctccaccggggcctataaaaccaggaaccattgatgtaggcacgaaccagatgccagaatatcacagcatcgaacagggatagagctggccgcctcatattcatcaatcagagagagaaagaatcgagctgcgccattgccctgcgtgttcgtcgttgtcacgactccagtgtcgtgccgtgaagctccacctgtgcgtgtcctcgccgcgtggaaccggcgcccggggctcgggatttccttcaccgtcgtccgc

SEQ ID NO: 176106 - DNA, 758 bp, Zea Mays
gggtcgttgatgcaattttccttttcgtcccctgctttcgagccagaaaacagtagtcaggatagacaaaaccaataacatcaaatactctatttagccttttcttgccacagacaccaaaagcaatgttcatggcttcatcttcagctttcgtgtatgcccccagcaattcatatgtagtcacctcagtggcctcaaccattcgtcatctagctccccaaactggcttctatagcggtatgtatacttcaaataaactagaccaccttcacttgaactattagtggtctcctttgacatttccaattcattaacaaggggccataccttaaaatctatgtcctcttagaccaagcctctggtgctaatgtaactgaaaatagtgttgaacgccaccaggcaggcttgagccttatcattgttcataatcgagggccttcgaatgccgaagcgtgattgtattggacgctgaattatatctttcacatcctccctctcaatcaaatcattcttaacataaaaccattgcctcatccaagatcctagccatttcttatgaaacattggcacatcgtgtctcacattagaacggtatacgaaggaataacagccaaagttgttgtgatactgttccttccccattgcctttgtctggtaagataatttgtgtatattgcagaagcagtcgacatctggttctagcccctaactcctcattgcccaaataaaaacccaaattttaattaaggcttcggggg

SEQ ID NO: 176107 - DNA, 302 bp, Zea Mays
attctctagagcatgagttcattcttcaggtaatgttgcacagtggcttcaggcccagatggatgagctggattagggatattctccggtctggcacgtcttcagttcttcttaatggtgttcctgggaaaacctttcactgcaagcgtggggttaggcagggagatcccctctcgcctcttctttttgttctcgcggcggatctgttacagagcatcataaataaagcgcgacagcaagacctactcaagttaccattggccgagaattgtggtcaagattttccgatagtccaatatgcg

SEQ ID NO: 176108 - DNA, 496 bp, Zea Mays
gttcttgacagtgatttcattcaaagctcgatagtcgatgcacatcctcttcgtgccatccttcctctccacaaataacactggagctgcccaaggcgaggtacttggtctgatgtagcctttctctgacaactcatcaatctgcttcttgagttccaccaactctggtccggacactcgataggctctcttgtaaataggggtggtgcctagtataagctctatggcgaattcaaccttcctttcaggtggcatacttggtaactcctcggggaacacatctgggaattctgacactacattgatagcctctgatggtttaatctccccaatatgggtggtgacttggtgacaactccctttccttggtcctgacaagaccaactccactaacacttcttctcctgataggggcactaacttcaccgttctcttgtcacagctaagactggcctgatacttggttagccaattcatcccaaggatgacatctata

SEQ ID NO: 176109 - DNA, 1011 bp, Zea Mays
attgtgaatgcttcaaacatgcctagggtggaaccttccctcgaagcccatggctgcttcggtatatctgtgtagctcctcccttatctggcagaattcattgtcgacccttatgtattggtccatcttctacaataatctctcaagagagtgtggaggttttcttgcaaagtattgggctactggccctagtctaagccctttgaccatggcctcgatgacaatgtcgtcctagactgctggtgcctgggttaaaagacgaataaatctttggatgaatgaatggaggtactcatctatgtcctaggtacactagaacaaagcatgtgcagtgactagctttgaatggaagctggtgaggaacatctccttcaacttttggcatgaatttacagttcttggtcgaagcgacgagtgccaggtctgagccacattcctaactgccatgacgaaggacttcgccatgactactgaattaccaccatacgaagatatggtaccttcgtaattcataaggaattgctttggatcggttagtccatcatacattggcaatgtaggggtctatatagtggtggcccgggtgtcacctgtagctctggtgttagtggggatgcttcgtcatagaggaaatcttggaagttgactagtgcatgacgaagattctcttggttgaagtccttgtaattttggtccctgtagttgttctggtcctgcgcttcaatgttgtgcatttgtttagttgcttcgtcaatctttttctgaagctcataaagacgaagcaccttctctctgcgcttctccaattgttggtggattccttcaagattgttgatctcttggttaagcgcttggtcttgtggttctaggctgatggagagcttcatcttttggtttcttgcctccctgaggagatcttcgtcccattggttggtgtccaaggtccccaggacggagccagttgttattgccttcttcagtgccatggtgtgagctgtggtcgtgagatca

SEQ ID NO: 176110 - DNA, 534 bp, Zea Mays
acaacacccggccgagaggaagaagacgacaagcccaggcaattgaacgccgagattctagggcgagactgataacgcccagcagcgggagacctccaaccgttgcaaactgaggccagtttatcaggggaagaacccagacgtctgaacacaaacgtcctagtccgaggctgatgctcaaagccactgggagacttaatgatgttacgaatcggaatagcattggcaccagtgagagggagcttaacaatatccgcaaaggataaactatttttgccccgcacctgctgccaagaagacgcttcttcctccgaaaagatcttgaattcatgcttccagttaggtccaccaaaattcaaaaggttgaagaaagccttgaattcctttcgatcaatgcacccggaattgtaaatatggaaacccacagccatcgaggaaaccgaaaaccgaaaaactcggtcagcgagctggagcacctcgaagccagaagcgaacccgccaagggccgcctggaggaggtgaccaacagaatcc

SEQ ID NO: 176111 - DNA, 405 bp, Zea Mays
tttaaattttccatagcatcattaaaagaagatcctaaatcaactccaattctatgagccacatccataagaacagcattatcagtattcagaacagagaaagaattgtaggacgtacctttgttgatgaaagcatctttagcaatagctcttgcagcaactttatcagcaattttcatttcctccgaagattccagtctgctgctcctcctaactccttctgccacctcaccttccataggtcctccttttttatcaccagcattcttgctagcctcatcagtaataattagattcagtttctttttctcttgagtgggggaaggaataaattcatcatccttgatgaattcatccaactcctgagaatccaacaaatcatcttcactttcattgtactcttca

SEQ ID NO: 176112 - DNA, 1113 bp, Zea Mays
tcagagggatttcatcctcttcttcatcatcttcatcaacaacacggacagtacacccattggggtcaacttcagcaggatcacacccattggggtcagcagcggttagatcatgaccatcagtttcagcttcagtaaaggcaggcactggaacttcctcagcagtaggaacagaaggaccggcatcctgatccaagctagacactcgacgaagacgtttcttcttctttttctgcccctcagcaggagaagtgggctgattggctcggtgagggcgcttcgggtgaatactgtcggacctctgaatatccaaagcttcgctagcttctaggatgggcgctaccaccggtgtttcagcaggggccgcatcagaggaatcttcaactaacatatccagcatggcacttatctttgcatcactgggattcaaaggcacctcaaaatgaacctgcctctcgtcgtcaggaatttcgtccagtgaggcaaccaaagcatcaacttcttcgggagagggtcgcactctaaggcccaaaccgctatcaccggcaggaggattcgacacaaaactggtaaaggccttggaaggaggcagattccaggctgagtatgcaacaggagtgccgatgttcgacaccttgcctctgagtatcatttcgagccggctcaccaagtccacagcaggaattcttctgttggttacccgggttgaatcaaccaggcctcggtacagataggccggatatgctctgtctttcagcggctgaatgttcttgaaaacaaagtcagcgaccacagcttctgcagtcagacccctttctttcaacaatccaactttagctagcagagcccctgcctcagccacctcccggtctgtgggggattcggtctagctcggagtgcgaacatccggctgtctccctgaccgtggggggagggaattcccatgattctccatgatgaaccattccaggcaccatcctttgatgttgtccttgagtggtatgtcgaggtagtcagtcttcctcccatggcgcatctccaagctcgcgcccccaccagctggtgctgccctccggccatcctaggccgacagtggtacaaatacttccaaag

SEQ ID NO: 176113 - DNA, 323 bp, Zea Mays
ggaagatgtgtgaagacaccagcaaagcaggcagtctatttaaaggggtgggaggcaactgctcatctcctaccatggtcactgaacagtcgcaagtattcaataagccattcacatcatctggaaataagtcagcggcagacgccgtttcacgtaacacgacaccattgggactaaggtcaactgcttggacgatatgattacaccctgcggtcacgtcaagttactactcaagggcagtttgctaaacgctcagtgcaccaagctgtcccttggctacacccattgggaggggacgtccaggaattttcaatagattttcc

SEQ ID NO: 176114 - DNA, 411 bp, Zea Mays
ggctacacgggttcccctcttccatcgtcattgacaaggaccctgtgttcacgagacatgtgtgacgcgacctctttaagatggccgacgtcatgttatgcatgagcacgtcattccgcccccagacagacggcaaaccaaggttgttaacaagatcattgcaatgtacttacattgtgtgccaggagatcgaacacaagtttggctagattggttgccctgggcggaatactgctacaacacctcgtaccactctgccctgcgcgccacacccttcatggtggtctacgggcagccaccctgcctatcctgccataccagtcgggagcggcgcgcgcgaagacagttgacaagctcctaagcagtcgtgacgacatgttggcgaaggctcgccaacgccttctccaagcc

SEQ ID NO: 176115 - DNA, 477 bp, Zea Mays
ataagggaagtcacagagctggaggcatcgacgcactgtctgatgatagagtgtcgacagggacaatgttgagagcatcattcggggagacctcagctccaacaacaggtagtggattcccagcatccgtatcactggcctctaaggtgaccggaccgacaagagcagtaggcgaactcatcaccataggtcccttagattgaaccggtgatgacccgacatggatgtccatggaggcagccgaagaggaaccaagctcggcacccttgggggctaggtcgtcctcagcaccatcctcgggggctgggttatccacagtggcacctccgaaagctgaagcaccctcggtcatacccacaggagctgggtgaccttggcaggcaacatcaagagccagtgtgtccccgtgagccagaccaccctccaagttcgacgaagcgagagaaactgtctaggttatttcttgcccgacaggat

SEQ ID NO: 176116 - DNA, 1390 bp, Zea Mays
gaggagtcttcttcggattagggcaactttttcttctgcctccttgatgaaagcaggcccttccagtgtcttttcccctacgttggaccacatcagaggggtctaacactttcatccatacaaggcttaaaatggtgacatcttgatactggcctggtagctgttattataagaaaattatgcatacgacaaactggactcccaactcttgtcaaaggtcaacacacaagctctcaataaatcctcgaggactttgttgactctttctgtctgaccatctgactgggggtgataagcggtgctgaagtctagcttggtgcccaaagcttgctgaagactcatacagaattttgaggtgaactgtgttcccctgtctgacactatcttctgtggaataccatggagtctgactatttctttaagatatatccgagcaagggtggctcctctgaaggtagtttttactggaatgaagtgggctaccttggtaagacggtcgattataacccagatagaatcattccctttttgggtccgaggcagtccgattacgaaatccatgcctatttcttcccacttccatttgggcactgggaggggttgtagtagacctgcaggcttctgatgctctgccttagttcgctggcaagtgtcacaccgggccacatactgagctatctcctttttcatccctctccaccagtatctggtcttgaggtctaggtacatcttggtggtccctgggtggatagggtaggctgagttgtgagcttcatcgagcaggattcctcgtgcctctccctttggtatacacaaacggtccctgaaccaaagggttccttcttcatctgtcttgaggtccgggatttgttctttgcgagctctctctgcaagacttgtcgtcttggtgtccaggcgttgagccttgcgtatgaggtcttctagcattggcttaatttctaggctgccactatctcccaaacaagcattcagttgagctgattctctcttccagtcttccaagaagttggttgctttctccccgaaaggttttcggctgagggcgtctgctaccacgttggccttcccggggtggtagtggatctcaatgtcataatccttaatcaattccagccatcttcgctgacggagattgagatctggctgagtgaaaatgtactttaggctcttgtgatatgtgaagatgtgacatttgttcccaatcaggtagtgcctccatatttttagggcatgcactatggctgctaattccaaatcatgttttggataattttgctcatgcggtttgagtaggcgtgatgcataggtgatgactttctcattttgcataagcacacatcctaaaccttgccttgaagcatcacagaag

SEQ ID NO: 176117 - DNA, 640 bp, Zea Mays
gcccaagcaccaacagtaccaaatgaaatcgtcattgaagcaatgatcaagaggcttcaatcgagaccagcagcacaatattttgctaggaagcctcctcaaactctagagaagctccttaaaaaatggatgaatatatcagggccggcaatgatttttgacaaaggagagaagaagccttcaggtactccgaggtgacaaggagctttggtggaagattcaatccaatacacgtcagaacaattcaccacccaagccaaagtgaagacaaaacaaccataattaagggcaacataatcactcccaatcaacaggggctcaacagagattcttcagaccgccaaccccaagaggaggaaggggaggaagaagcttcgaagggagatacaacattcagccaagaagactattctgcttattttatggagaagataagggcacacaacaagaacctaccaggttacaattcaaaagcagaaagaaattgccaaagctgaggcaaggcagaatcagccgaagtaggtcctccatattgcttcatattattctccatacatcccagagtatgtactcgatcaacagccaatccagtagccttcagcttcagtagcttcagcaagccattctctgaccagatgag

SEQ ID NO: 176118 - DNA, 485 bp, Zea Mays
tatcccgaatctgaatattatgtcttgtatgaattccacggccttagcggaggttaaagaagcaatgggcttaaactctatccatttagtgaatttgtcaatcgccaccaatacatgggtatatcccccttgagctttcttgaaaggtccaatcatatccagtccccagcatgcgaaaggccaggttactggtatggtttgtagctgctgtgctggcatgtgctgttgctttgacaagtattggcaagcttcgcatctctgaactaactcggctgcatcgttcttcgctgtcggccaatagaatcctgacctgaaaaccttcccaactagtgttctggatgctgcatgtatcccacattgccctgcatgaacttccttcagaagttgcttcccagtggacgggagaacgcatttcatgaggatgcctgacgcgccccttctgtacaattcctccccaatgagtgtatagtgagccgactgcctgg

SEQ ID NO: 176119 - DNA, 577 bp, Zea Mays
aaagtttggaattcaaacttgagattgatttgaatttaaaatagaaattggaaaatcagaaaaaaagaagagaagacctcaatctgtgctacctaggttgaatccacgtgttggcccaacagccctgtccccgcggcccacttatccccacctttttcgtttttcttcgtatcactgccgatcgggcccctatcgcgagtgcttcaactgtgttgcgctcgcatacccggtggctgccatgtgggccctctagtcagcctctactggactcgctcgcatgtgcgccgacattctaggcccactgctcagcctccccacctcctcacacggacccacactcaccgctcaccggtatcactgccatgtggggacaggggcaccagatttgtcttccacgccgtgagcttcgcaacggattcgacacaacctccgcgcgcatcggccacggctcgggcatataaatctgtgtgctccgacccgcttatgaaatccatcatgagaggaaaccatcagctggcaagggaaccagaggaccgtcaccgaggaggaaggaaggattgctgccgcggaaaggaaa

SEQ ID NO: 176120 - DNA, 543 bp, Zea Mays
taataagcataaccaagtttctagaagcttctacaatattcatgataaaccttaatcataagcaagacaactttctaggaacaactatggataaccatgatgtacatagccttatagaactccctacactaatcatgataagtcatgaagcctagatatttttagacctccctagaactatggtgatgtgtcatggtgaggtgtcccccatgtaaggtggaggtgacacatgcatggtgaggcgtcactcatccatggctcgtaggtgcctatataaggatgtgcccctcttgccatgacataccatcccacccccatccacacattcaagggcaaggtagaagtaaagtagtgttgaagtgtaggagcccttgcataatcatacgtgtccttgttgtaagtattttgctttgctgtaaaatttctatttgctcagtgcataagttgtgatccatctaaaggagtgctctgcctcctgggatcacaaggcttcatctgtaggagtgctctgcctcctggaagcaaatatggctggctctgccg

SEQ ID NO: 176121 - DNA, 312 bp, Zea Mays
ggagttttctgccttttcttctccccttctctgttttccttcaccgcgccaccgggggcgaatcgcggacgccgctcacctcccccatctcctccccaccacgtcgcaaacccatcgtcaccatcaccgcctccggccgcggctcccatcctcgcgtggccgtcgcgatccactacgagcttctctcgtccggtcttccgagtctcggctacctgctcctacgtcgaatcctcgggccctgctgtcgccaccgccgaatcctgctgcactcgccgcagccggggaacgcggacggcctgcgggagcttggcg

SEQ ID NO: 176122 - DNA, 2254 bp, Zea Mays
acctgaacagccttttcataaacaatgtcctctttactcttcccttccttcagcagctcaaacttgcttaatgcttccttgcatttctttgaccaatccccctgcacgataagtgtatagaaatccgttaggtattttgatacattaaaaaacagtgtcaagaagatcttcatgcatctgcttcagaggaaagagccaagtgctcttcaatcaaaatcattctgacaatcaagtcatatgatcaaaatgtgaacttaagaatagcttaaaaattcatgatcatgaaaagcgtatcagctaagttaaatcattgagctgaatggaccaagcaaagaaataaaggttttcccggtacaaataacgccaaagatgataacaaataaaacataccatatccatactgtcagttcgggtccatgaaaatgatgatagaggatgactttcatataacggccttctattgactcccttctcgatatctgctaaatacagatgtacacttaagtataactaggggaaaaggatagagcaactagcgcctgtcaggctgttgttttcatggaaggcctcatctgcaaacagatgttgtctttactagtgttcaattgtcacttcacaaaatgtaattcacacaaaactcattacatgtcaatcatatggcttcagaagattattttatcaatctcctacatatcgaaaatagtaaacgatagaacagaaagcacatagaaaaggcttttgctattgttccagtgatacagatgtgaagtattttgctaatgtagaccgcagataggtaaaactgtaaattgtgctacagaaaaaaagctcaatatcaaatcagtgcataaaaattgaatggatattatgtgccagactcacaataatgtacatgcttttaaaataaataaaaatataaacaaaactgagagaaggagatgtgctgtgtaggcaattgtatattgaatgagactatgctaaccccccccccccccccgtcggagcgtcgaagccttagaccgagattccgtgatgaccaaagtaggtagcacattggtgaagatgtctgcatgctgcgaggaggtcgggacgtgaagaacacgaatgtcaccgagagccacgagctcacgaacaaagtgaaggtcaatctcgatatgtttggtgcgctgatgttggacggggttggaagacatgtaaacagtactgatgttgtcacaataaaccaaggcggtgcggcgcagaggggcatgaagttcctgtagtaactgacgcagccatgtgacctcagcaacagctcggtattcagcctcagcgctggagagggggacaatgttctgacgcttggaggaccaagaaatgagactatcacccaaaaacacaacaaagcctgaggtagacctgcgggtatcaggacaaccagcctaatcagcatctgagtagaccgccagctcagtctgtgcagaaggccgaagtaacaaaccaaggtgaagagtgtcgtgcacgtaacgaacaatgcgctttagagaggcaagatgaggctcgcggggggtcgtgcatatgaaggcagatctggtggactacataagagatgccaggcctggtgaatgtgagatactgaagagcccctgcaaggcttcggaaatctgtaggatcagacactggattaccaatagtgccagaaagcatgggattgacatcgactggggtggagcagggcttgcactcagccatgctagcggtcatgaatgtcaatcatgtattgtcgttgcgatagaaatagtccggttgccgtgtgttggacctgcatccccaagaaatggtaaaatttgccaagatccttcatagagaattcctgctgaaacaaggtgatgatgcagcaaagaacctcggtggaagctgtcagaacaatgtcatcaacatatagcagtaggtacaccatatcatctctgtggcgataaacaaataatgaggtgtcagacttagcttcaacaaatccaatagagagcagaaacgaggcaaactgactataccaagctcgaggtgcttgcttaagaccatataaggaatggttcagacggcaaaaaaaatccgaaagcccaacaaggcacggctggtcatacgatgatgattgacaaagctgctgcatggaacaaggcgggctggcggaagcccaacttggcacgggtagtcatacgatgatgattgaccaccggggataccggaaatgccccacgggggaggtgagctggaggag

SEQ ID NO: 176123 - DNA, 387 bp, Zea Mays
taatggcgtgattggttgagtggcttccgtgggccggcctcccacgcgcctggctggccagcgaaggcctttctccccgtctccgtgcgtgcagatggatggtgaaatattggcctagcctgcatgtgtacatgcaggtcggtatcgttacatacaagcaaccaatcacaatcttgtatccggtcaaagcgtgtggagagtctggttgcttctatacaggcaaccaatcacatagtaaatagtctaaggggttcgcaggcacatgtatctcatgcttgtccgttaaaaattattggccagagtatgctattggatctcttcacgatagtatccacaatttttctttttccctaaattataattctattatagcaaggataaaatccc

SEQ ID NO: 176124 - DNA, 486 bp, Zea Mays
gaaatgctcttagagatcaaattgctatgcagatgtggaatgattataataatcattagtattattttgatgtaatagtcattggctattgtatactatgtagtcatggctagagctttgtgtaatatgaactatgagaatattcttgtcgacctcttgcacgagcacaatcgtgtgaagtaccagggccagaatggttgggcgctagaaggttggtgttctatgacacaaatgttcaatgagaagtgcccgttggctaagtttacaaaggcacagatctaggaaaaagaataggaacttaaggcaaactataagttgctgaaggaagcccgcaagcaaagtggtgttggatggaatgaggccgtgggtatgatcattgtggaaccaccaatatgggcaaatataattgtcgtaagtttttgactaatcattcttatttcatttgactaattattcttatttactttcgattttggttacaatcta

SEQ ID NO: 176125 - DNA, 515 bp, Zea Mays
tcgacattgcgcatacgaaagggttacgcatagaatatcctttgtagactgacggtgatgatcatgtattagtatagtgtttcattttggtaataccatcttccttttatatttcactgttagtacttagtagtacatattcttaggaccattgaagaaactttccacgtggtttccttccttgacccattcttttcttacaatggtggaactactggaccaaaagatacttttaaacacgccagctgaaagacggcgtcttcttgaagaggttccagaaatcgttcctgatacagagtacagagaaaaggaaactgaactccaagttgcggcaagcaactcttctcaagagattagaggtgccaacacttgatttttttgtttcttaaagcacttttacctttgcatctgtttcacattcataatggtcccgaatacttaaatcgttacatgctcgatccaaatcgacttccacttcgtccgtgagtgtgtcgccgtcgacgatgtctaggtcc

SEQ ID NO: 176126 - DNA, 606 bp, Zea Mays
tttatgtgttcatgcctcacatcatcgatgtcacctcaacattctaagcttgttggcctgaggtgtcactcctccccgtcggtcgatcctcccttgagggccatgtcgtctctgatgtttctaacttgactcacctcactaggtccacatggattgtgtcatgtagatgtggatcatcaacatcatcttcgataagcttgttgaagccatcgttgtgtgtggcgccctcgcccgtgccacctagcttggccttgagccacagttccttgataaccataaaacatgacctcttctttgatgtcatcttctgcaccttcacccaaggggacctcactatcaccaactactgctataagctcaaaggcatgtccgatgccctccttaatcttatccgaccatggccttgtcctcaacgtccttcgtgagcttaatggtcatttcaaagatatctggcttcatcatcatcatggacgtcccttcccctctttcttataggcacgcaactacctccttattgaagagctcaccatggcagcagttcctctagccatcacacttcataatgcggctactaagcccagcagtgctcggcactatcccctgcgc

SEQ ID NO: 176127 - DNA, 593 bp, Zea Mays
gtcgacttaagccgattgctccgttcagcagggcatagtggtcaccccgagttaagtaagcgtgagcatgttacaccggtaagtcgttgccgacttaagccgattgctccgttagcagggcatagtggtcaccccgagttaagtaagcgcgagcatgttgcaccggtttaagtcgttgccgacttaagtcgattgctccgttagcagggcatagtggtcaccccgagttaagtaagcgcgagcatgttgcaccggtttaagtcgttgccgacttaagccgattgctccgttcagcagggcatagtggtcaccccgagttaagtaagcgtgagcatgttgcaccgccttaagtcgttgccgacttaagccgattgctccgttcagcagggcatagtggtcaccccgagctaagtaagaatgcaagttaatcatgaacaaactgagtatctttgaagcccttttttattgatgacatatttccattttacagagtacatcgtcgtcccgatagcttttgaaatacagctagggataaaacttcctgaggtgttctatattccaggagttcccgacttctgtgccgtccatctgag

SEQ ID NO: 176128 - DNA, 706 bp, Zea Mays
agctcgcggaagcataccgcgatctaggtgcgcggactgcagatttcgatgtgcccgaccaagaggccagcctccgcttcctcgaatggttgcaggaggagctggtggtgctctcgactattgtgcagggcttcatgtcctacgcctcccttgtcacatgcgagggggccatgaatgcgttgtcccgcgaggggtgcaaacactatgaggtcttcgaccaatcagatgaaaactttgagcatgaaatttttaaggccgaaaaccctgtggtaaagcagtccacgggggcactcttcgatcggatgtggggtcctcatggccgggaggcggttagggagcagtctgaccgggcgagagagcaggtaaagcttatcttttgtttcgtgtggttgagtgtgggtacgtgtggttttgctgaatgagtgtgttgttgctgcagatggcgcgtgccgaggatgtcgaagaccttggagatctaaatggcgcgtggccccgaggctgaggtcaacccagtgctgcccgaggctgaggtcaacctggcactgccctcggaagtcggtgaaggctcctccgctacacctgtgtctactgtgtccggtgaaggctctttgccagcccctgcgccgacgacggaggaccccccgaaggcggtggcggagccggcagctgaggatcccatggcggcggccgggccttcgcaggtggc

SEQ ID NO: 176129 - DNA, 927 bp, Zea Mays
tgttgcgggagttggagtggaatttaatattcatgacctgggaggaagaactaccaggaaagtcatgagatccttgcatattatttccgagaatgagggaattagtcaggaagccttggatgaatatactcagcttttcaagtgccccctgacccgtagtgaggtggaggctcttgctgccctgtttgggtggagagcccctgagttggttccccttcagtaagggtgttgttttctggttggtgctgtaaactgtgtgtttcttaatggatccatccaaaattcttatttggaatgtgcgaggtctcaattctcgtgctcgccaagattcagttagagaattagctctgtccgttaaggctgagttagtatgtttgcaggaaactaagatgcaatttattgctagaagcaccttaatttctgttttgggtgctgaattttctgaatatgtcttcttgccttcgaatggagccagtggaggaattctggtggcctggaaaaatcacttgagattcacaggtgcgagcagagttgataatcatagtgtctccattcagttccataagcaagaagggggtacctggtggttaacctttgtatatggtccccaaggggatgaagagaagatctcttttttgcaggagctaagaaatgttagagagggctgcaatggaccttgggttgttgctggggatttcaacttaatttacaaagcctctgacaagaacaacaacaatttcagcagagctatgatggggacgtttaggcgctttatcaatgatctcgcccttaaagaagttcctctccatggtcggcgttttacttggtcaaatcaacaactggagcccgttctggtcaggttggacagggtcctatgctcagttgactgggagtttcttttccctgatgtgttgctgcagagttctg

SEQ ID NO: 176130 - DNA, 645 bp, Zea Mays
cctgatccagacgtcggaggcagtcaacagcggaatctagtattgggagcgcgtcggagatggacgctggccgcaccaatgccgggatgggactcatccccaacggtactagcgctgtgcttgcctcgctagcccaagcggcgaagcgctgagctccggcgcgttgctctgcccggaggtcgtcaagtgtcttcctcaacacctccactgcctgggggcccggggccgactgcgtcgcctacgctgcctggaactggcggacctgcccctccagcgcctgcactttcccttccagacgcttcactttctcctctgcctcgagctcaagctcatccagcagcttgttccgccttgcccacatctcctctctaaaggcgaggtccttctcctgccaagtgaggtcagtcgttcgtttcgctagggaggcttccctcgccttgaggtttccctcaacccgagcaatatcactggccttgtcggagagttcctgctgcagcttctgcagcttcgcctcagccgcagcttgcttgtcccgctgtttctccagcactgcattataagctttcagcttatcatggagtgctgtgacggcctcctccttttggtctaggtgttttttattcttggccaagcttctctccttcc

SEQ ID NO: 176131 - DNA, 396 bp, Zea Mays
attccctcctctgttggtcttgccatggtagagcccttcaaccttgctcgggtgctgccctcaaaaaggaagataggaaaagagggtagaattgaagatagtccaacgaagaatacaacgaagaaggcaaaaatcaagaaaaggctcattgcggacttgtagctgcaatacctgaatttgctactgtcatgaagcagcagagactgcatgtaatagctcggtaatacatgtaatttgctattgttgcttgtatgcagcaaagtcatgaatttgcttgtaatacttgttcacttgaatgcagcagagtcatgaacttgcttgtaatacttcttcacttctgcagttttacttgaatgtgcagacttgtggtcagtcaggtttgcttgaatctgcaga

SEQ ID NO: 176132 - DNA, 509 bp, Zea Mays
catgaggaccaggaggttgaagcgaactgttgcgcgccccttatttcttgccgccgtctcttcccacaaccactctttcgctctgaaacaatccacctgagctgcaccaaggagcgagtcgcaagaccctcgctctcgctcgctcctgctcctgcatcgtcgacctagatagcagtgtcagatccagcgctcgaccatggcggccgcctcggcgtcgctcgaagacctcaagaacgagaacgtcgacctcgtcagtcctcctgcctccgtctatctccctctcctccctgcctgtcatagtcatgcaacgtagttgagatacgagattctgcgggatcacgtgtgtttgccatttcgtggcgtgggtttgcaacaggagagcgtcccgatccaggaggtgttcgccgtcctcaagtcctcgccgcacgggctcacctccaccgatggcgccagccggctccagatcttcggccccaacaagctcgaggagaagaaggtctggtcctgag

SEQ ID NO: 176133 - DNA, 542 bp, Zea Mays
gaatcacgaggatggggactcaccggtagaggtgttgcgcagaggtcgggccgcggtggggagcttcacggcgtgcactcccggctccggtgagcaattcttgccgcactagagccccacaggcgccaatcctaccttcgcagggatccacgcgcccgtccgaatgccgggactgggttgcaggagcaaggcggcgatgattttgcggttcgacggcagcggcgacggaactcacaactctctgtccctcgattttatggtggtggcagaaagaagaggaggctagggttcagtgtcatgccttatggacaccagggaggtcggtttggggcgccagctgcgacggagtcaaccccggaatcacgcccccactccggtcttcgcggcgaggttggttggattcggtggagaaggaagcgctgacacagatggcccacgggtcggtgactgagtcgcgagggaggtacgcctggacagtggtccaccggcagcgaggccacgccaaaactctggggacaccgactgacgcatgggcctgcctg

SEQ ID NO: 176134 - DNA, 293 bp, Zea Mays
tggcctagtcctgttaatgtgaaagaattaagaagttttttggggcttgcgggctactaccggaagtttgtgcgacattttgctgtgattactcaacctcttactgccttattgaagaaagggagtctatttgtttggtcccaagaacagggatcttcttttctggcagtcaaggcagctttgtgtgctgctcctgttctggcactacccaattttaatcacactttctgtattgaaacggatgcctgtagaaatggtgtgggagctgtcttgttacagcaaggtcacccttt

SEQ ID NO: 176135 - DNA, 290 bp, Zea Mays
cttcttcggcaacgggacattcacctttgcaaggcagccccaagtccgaagatgcgaaagatctagcttccttcttttaaatccttcatagggtgtggcctcacggttgcgaggcggtaccctgttcaggacatagcataccgtgagtactgcctcgccccaccagatgtcaggcatccccgaactttgcaacaaagcattagctaagtcacacatcgttcggttctccctttcagctaccccatttgactgaggtgaatatggagcggtggtttcatgaatgattccac

SEQ ID NO: 176136 - DNA, 490 bp, Zea Mays
ttgagacaaaacttgcaaggcaacaaaagggaaagcaatcaaaggagagataggtaaaacaccagtctcgaactgggttggaaaagatgagatttaaaggttaggttcaaattaagcatctagataaagacataaatattgtaagggttaaaggcgataacagacacgagtgtacgagaagagataaaggcacagaggaaccaaaggtacaagtacaacaaagaatggagttaagacaaggcttgcacacggtatagaagaggatatagccaagggtgagataagtaaaataccactctcaaatttagatgggtgaagggggagatttttaaatagtaggcatacgataagcatcaaggtaagatcaagggatgtcaaaagtaaaggggataacaggcaaaaacacatcaaagggtggagtcaagataatactcgcaaagtggtgaagtaaagggaaaaaataaagagttagataggtaaggttccaaca

SEQ ID NO: 176137 - DNA, 1046 bp, Zea Mays
acggagtccgtgcgccttgggataaagtcgtggctccttgggccataaatacggcgcgccaggttgaatttttaccttactcgccataccgcaacaaccgaaacctagggtgagggtgcgccgtcgagacggacagaacaagagtgtgcattcgctgattcgcgcgctcgaaggtgtgattctcggtcagtggggctcagcgggaagggcaagatcagccgcccatttctagcgtggaagagagcatcggcggtgtccagggtgttgggaatttctcgacggagcccaatcaattccaccaattcgccgctcgtcatggtcgggatcggctgtagtgaattgtgaggtacgtgaccgttcgttgcattcgccagacgtagggcatcatgtagcgcccttcgaattagtgtgttgcgtgtggtaccgaggatttgagggagccgaccatggcaccaccgcaccgggaggctgtgtcaccggtgagtctagcggatgggggaagacaactttcgtgccatcggatccggaacggacgggcacgattagaagtagagtaccgtttcgttctgggaaatcttagccgtcggatcggacgcgggcggtcaagattagatcacgacacactagttcgcggattaacctgatgtcgtccgatttccgtcgaatgtctgagattggtggctgcataccccttcacggcttttgatctggaccattgtatatgaaatcgtgtggttggcgcggttcataggtttagagcgcattcggttcacagatctcggatccaacgtctctgagtgaagtggctttaagtgccgggatgatttaatctgagtcgtaggatctagatcctgcaaatgataatagatggtaccccttcgaccgtgaatctttgcataagagaccctagatttcttgcttatcaacccgcggtccaggacattagtaagatccttatagagtgacacgagaatttgcaaatttaaccccgagctactaaaaaattatgcgtgtagtccagagaacagaaaatcaaaagaattcat

SEQ ID NO: 176138 - DNA, 642 bp, Zea Mays
tctagcatggtgcccttcctccccacatttctggcaaaaaaatcggcgacctagatctagatccataggaacggggggagtggggtgattcatgttacctggatccgcgctctcgccgaatgttgcagcctgcatatcctgtttggactcaaccttcatatgagggggtctcaaacgccagctaaggttccagtgtcttccccaaggaggagagttttgtctctgtggcttagggatttggcgatcccatttcgtattctttccttttggatccatcgcggtcgagtctttagggatttggaatccaatccctactctcggccacggatcagaagggggtagaggacgaatgggaacagatttccaaccaccacagaagctagttttcaccgaggaaggcaaacaccaaagggaagaaaggaaagcagcgaggtgaggaagagggcgacccccaattaggtcattgggaaaccctagttttcctctgcgcgtcaccgcactggagagacgaggagaatgcggagaagacgtggaggaaatacctgtggaatacaagggtttcaccgcacagattgggccaaatccatttgtctcgcctctcttcttcatgttcggagtcgacacccctgaagtccatccgcg

SEQ ID NO: 176139 - DNA, 551 bp, Zea Mays
cgtccaggtcacatacagactcggatttgggtgatctttatatggatggaaagctaagaagataaacattcaaatagagctggtaccaggtccaaattcatgaggagtcgacgaaaaaatattccacaagttggtgtccagaatctgtctcagtgctgcgccactgtctttggccctttgggtcgtgtatcttgtcttggcccactagggttgcgacgagggggtcatagacgccccaaactcctttatccaaccaccaccccctcctctagggttgggttttcttagtttcattctatcaagaataggacacccttcattcggttgtggaaccccattcgtgagttgaatcgaatactttctgtgatttggtttcttctccgggcacttgctcgtgttcttcgattccgcaggcaagagtaagccttcttggcaaggtcaatcgagctgcagcttggttggtaaccagaggattcgtggtgctaaggttgcagggttcatttcttcggatttgaaaccggatcggtgtgtctcgaatctgcccaaatcga

SEQ ID NO: 176140 - DNA, 479 bp, Zea Mays
tggtgctcaacatatgccccctgccttttggtggaggttgacgaaccaaaagcatatgaactaagcctgatgcaagccaccggctttttcaatccaatatggtgatcattcaatagagccccaatgcataaaggccatttaggaccgcatctttctcggccgtgaccatttgatcaatggatcaaaaggattagaatggaggtgccccccagcctgaatagatagagggagtacacatgtaccatgggttcatcgttgtaccattccatacttgaacagggcaacacatcgacgatgagtaggtgggtgggaagcatcctggcatgataggatgaacaggcgatgcttgttgcgtcgtctttcgggctgttttacttggccgttttgttttagtggatgaccggggtttctttgttggccgatcgcatagaacggccttcttgctagcatatttggctagcaattgatcgaatgtaggg

SEQ ID NO: 176141 - DNA, 440 bp, Zea Mays
aaatccaacatgaatacagaaataggtggaggagatattggcgaacgcaatagaaggatgcctactggcggtggtgccgtggggggggacttgcccaccacgcagcacagatccacgacggcgaaacgggttcggccataagtccacgatgacccagtgcatgaatcccaactcaatacggccctaaacgcatctgggggacatgaggaaggcaaggagcttaccagagtttgaagttgctaaatcgctcgccatgcagtgcagcggcaatgcgtccacgctcaaattccggtaagaaattgcccagttgtgagaccatcgcgtcactcgtaatccatgcacggcggctatgaatatggaggcacacgtccgctgcttttctctagagcgaccgagacggcaacggtgctaatcctccacggtccgaggctcttctctcc

SEQ ID NO: 176142 - DNA, 518 bp, Zea Mays
gcagaggggatgggacgacaccgtccatacactcctacgcatggcaatgtaccagactacattgtaacctacaccaaggcctacatctatgtttcgattagatggggcaagagagtaggatgctaggagatctacgtgaagaccaagggaagatatatgaccattgcagaggagatcttggtttgctaggattcgtctctccatctcctatacatttaattattagattgacaggcccacttatcggggctcagtcaccatgtatgtgtctcccttgggctataaaagggagggctcacccaagttcatctggaccacggtgaagcaaccaacaaagcaatacaacacacaacgaatgtagggtattacgctctggcggtccgaaccactctaaacacttgtgtgcttgtgttcatccatctctacaggctaaccctaggttgccccctcatcttaaattagggcgggttaacccgaccggaggattttcctccgacagtactaaagtttagttcgtg

SEQ ID NO: 176143 - DNA, 492 bp, Zea Mays
attcaaatacatccttaattactactttcacctaacctaagcatgtacattagtttattactacttcaacacggccacactacccttgcagtggccttctactcctccaaagggaatgtacggaaagggttttgaagaggtatatcttgccatacaaaaggccttgaacaggttcatcttcccacacaggtcttgtagcgaataagggtgtcaatccttgcactatcattctttagcatccgctcaagcttgcccaacctcacagtcagctctttgtcatgttccttccacaggatatcaacatagttgctaagcctcttattttcagcttcgagcaatttcatctttttggccagggtggaagtagttccaccgcacttccttttgttgctgtcgacgcccaaccgaaggtgaagccagtgttatatgtcattatttacaataaacaactacaaataaacacgtggtgttgacatgttccatatgaaatga

SEQ ID NO: 176144 - DNA, 385 bp, Zea Mays
gtgggggtgttgtggctactgtatcctgacatagggaggagacgtcatctagggcgtttcttggtcgacaagaacctcgagggacaacatgctacgcgatgacacctgaccttaactcgcttcgtcgtaccctacgacacatgtaacgagatccctctctcaccttggcctttaaactggaaggaccatagtttagaagacaagcaatcacttgcatacatcaccagaacaagtcattcacaaagcacttgcaaccgcatgagcactcactccagagacttgggagcttgatccctctctagcttgtttgcaaccccctactataaactagtgcagggtaacatgaatcactcaactgaacgtggggacattctgcctgaactag

SEQ ID NO: 176145 - DNA, 445 bp, Zea Mays
atagcccaatttcttcatcataaccatatcgtctgctgtcacagtagatttaccaaactcaatgtgactgggtttcgctgggctcataatagtgtaatcctcttcatcttcgttctcactcccttcaactacgatttgcttagcttcagcattcaaagtaccttcggcaataggcccctctggcacaacaagacccgactgtctcatcacttctgatattggtgccgtatcagttgcttcagcttcgtctccctcacgagacactctagcagtagatcgtactatggccatttcaatgatcacactttttttgaaacgaagctaatctcaaatgccgaagcgtttgctcgaaaatgcaatccagaaagcttcggctatggtcaaattttttaacagcgcaacagtgcgatggcaatgaatattgtggtaactcctcaccaacccg

SEQ ID NO: 176146 - DNA, 671 bp, Zea Mays
gcggtgaacacactctccggcgagcctgtaccagccgaaatacgcaaagactaagcttcttactcagtcgacaccaaattctacacctggcgaccctaatcccacaactaattgcactaatccgggccggaatctttctgcccacaacgacgatgaaaaccggagacaaaccaacatgttctagatgattcaaggtggtctagttcaatcgaacgtgtctgtgagcaacaggggacatgagggaagctagaacatcacacagaagggcatgaactaacccgtagacatctggccacggcgagatgtctcacagcggcgttctgaccgatttgggggaaatgggaaattgggaaactctggtggacgatcggaggcatgagctagtgctttggatgcgtaattacctagtggagctcacgggggcagcaatttatagagtcctacgacggtggcgtccaatttgaaggaagtgtgttggctgccgaagagaggggaagtcactagtgcaatcgctatcgtggcttttactggggcagtgtcttaggcgatgaacaagctacctaaggcggtctactgcgacatggtaaggctttgaggcatgtagcctggccagataacggcgaactccggtgatgccagcgcaattgaccgcggcgggacacgacggccgg

SEQ ID NO: 176147 - DNA, 1373 bp, Zea Mays
atcaccgacttaagccgattgctccgttagtagggtatagtggtcaccctaagttgagtaagcgtgagcatgttgcaccgtcttaagtcgttgccgacttaaggcgattgctctgttagtagggtatagtggtcaccctaagtcgagtaagcatgagcatgttgcaccgtcttaagtcgtcactgacttaagtcgattgctccgatagtagggtatagtggtcaccctaagttgagtaaatgtgttgattccaagtttaatcaaatcaaagtcaatcgacaaccaatagtttgaatgcctttgagaatgaaatcttttattgatgacggttctccgattacatagtacaacgttgatccgatagcttttgaggtcttgctaagggtaaaactttcaaagatgctctatgttccatgagttccccacttccgtccatccatttaagtaagccgatatgatcctggccgagtgacctccgacacaatgaatggcccttcccatagtggtgacaacttgtgccgtccttcccccgttagaattcggtgaaggaccaagtctcccaccacaaaggattgatgtcatatagccttatcatgatagagcctcaaggtctgctggtatctggttgactgaattactatgttcaatcgctcttcctctagcacatcaatatcctctagcctggtagcttctgcttcagctatgctttcgaataccagccttggtgccccaaacctgaggtcggcaggtagcactgcctccgaaccatataccatgaagaagggggtgtttccatgcagagctcgactgggttgagttcttaagctccaaaccaaataaggtaactctctgatccactttcctgcgaatttttcattcttgcgaacactttcttcctgagtgcttccagtatcataccattagctcttttcacctgaccattagctctcgggtgtgctactgatgcatacttgatttggatactccgttattcgcagaaatcaaagaattcagagctagtgaagttagattccaggtcggttataatgctattcggtatcccaaacctgaatattatgtcatgtatgaattccactaccttggctgaagttagagaagcaatgggtttgtactctatccatttggtgaatttatcgatggcaaccagcacgtgagtatagcctccctgagctttcttgaagggtccaatcatgtcgagtccccaacatgcaaacggccatgttatgggtatgatatgtagttgatgtgccagtaagtgttgttgctttgacaagaattggcaagcttcacatctctggactaactcggctacgtcgctctttgccgttggccaatagaaaccagacctgaag

SEQ ID NO: 176148 - DNA, 829 bp, Zea Mays
tatgtggctaactctgatttcagtgagattaggccaactttggagccttgtatttcttaattcatgaggattttgccctaggtcgatacatcaatcttgtagagatatgataggatcacaactttgattaagtgactaagcattagtgctgtacaaaaattgaagataaatggacatgaagttggactgtcagtcactattaaagactgaattttgactgaaagtgaaatcagatgaactttgtgatcgaattgtgggggatttagtggatgtttgcgcaagacctttgtaacaaagttgtagctggattatagatcaacaactttgatgcagaaggattggtgagttgctacacaaaagtttgagaatcaatccctctaactcgctttgtgaggcgctctgatgaatgatttccatggtacagtactgaacaagatcaggtgcagtgtatctcgctgccgctgatttccgtgcctagattcgcgccggcgctacgattcatgctcggtggtgcgcgaataatgacttggggtaaaagatcttggcgctgggatgagctcggaccctatcaccggactgttcaccgtacccacttgccggcgacgtggctgtgcggccgtcgccgtggctgccgccgttcactcggtcgcgccacaccttaggctgttttaccacgtcgtcgcgagtcgtggagagtaaccagtgaccgtcatagctcattagccagtgaccgccacggtagctcgcgccaataacttacccctctctccggccgccagcgtgtcttccccaaattgggcgccaccactgttgatctcgataaattgag

SEQ ID NO: 176149 - DNA, 733 bp, Zea Mays
aggaatttggctatagttgttatggcaacattgtagctggaacattggtctacaactttgctgcagagctttgggtgagatgccatagaaaattgagagagaattgaccctaaaccttgactgcctagcgctctgaatagagcttcccatggtacagtgatcggatcaggctgccagctcgatccctcgtgaccgacgacccgcgccgctgttgcgattcacgccaccgatgacccgataaggctgccaggtaatagctattcgcctggagatgactccggtgactaaccaccgtacccccttgctttgcggcctgagaagataagctcgctggtgacagccgtcgcacggcttggtgccatgtgccctggcacctccaccggatcgccgtgaaccactgtaatcctctgtccatcgccgaggggccagccacggtgaccggacactaagcacttgcgccagtgaactcccccttcctccgaccgccgcgcgtcaccactgaaattcctgtccaccgctgttgcgctctataaattgaagtcaccacgagctctatagtatcgtcacacacccaaccaccagatatcgtcctcaatcgcccacctgagagctcgaatttcggatttcccccaagagcactcgcgaacactgtaacaagacctcgccgtggtcagcccgtcataggtctgatcatgtcttccttgttcttgttttagcatctttatgtgctagt

SEQ ID NO: 176150 - DNA, 524 bp, Zea Mays
gacgaatcaagttccttctgcttgttatagtatgatggcatgtttttgtggtgtgccctttgtcctaaccacaaaacaagcagaatggcttccttggaggtgcattggaccttccaccaaaacttcggcctccccttatgcctctcatagcaggtggacaaaacacgttatgtgaaggttgctgctgagagcttgcttgctattgggaaattacttgctgctggcccaactgaccctgagactgggccatcttttcctcaccctgcatcagcttgtgaatgcttcgaacattcctagggtggaaccttctcccaaaacccctagctgcttcggtgtatctgtgtaactcctcccttctccgacggaaatcattgtcagcccttatgtatttgtacatcttctgcaacaatttctcaagagaatgaggaggttttcttgaaaagtattggcctgctggctttactctaagccccttgaccatggcttcgatgacaatgtcgttttggattgctggtgcctgggct

SEQ ID NO: 176151 - DNA, 836 bp, Zea Mays
gtcggaacatgtacacgtactatggaaaaagagaagtactcgtgtatcatgtgggtggtacaacggaaaatatgcactgtttcctcaagcccgcatgtagagatcatttatttacatattaaaatgggtgtgcagaaaaacaaacggcaccagcaccacacgtggtcaaggattgacttccgcacacagtccccaccaccccaccctccaagtccaagcttccatccaatccgtgccgcacagtagcgcacgtgactgggagcgagcagacaagtcgccagtcggtagtggaagcagcagaactttgacgagaccaccggaaccccctccaaaaagaaaaaaacggaagagactattaaaagtaaacggttgtgtgaacagagaatgagaactcgtagtccctttccattgatctagtacatatttatacacagtgaaggggtgtctttgtaccccttcgtggattacagagagagagaaagagttacaacttttcactaacagacaccttttcactaactatctctatttcccggagtcctttgcttcatgcatcctggcgacgaacggttgtaccttttcctgaacgggtgtcttttcataaagatgagatcaccgttgaattaattcttaacactcccccttgatcgaatccatttttattgagatcaacttggaatatataaactaacaatctctaatctattatgtctattattatcttgtaaaaaccctgtgggaaaaatagatgatatgacatatgtcctatgttgatattacctcattaaaaactttatatggtaaaacctcatcgagggaaaaatccatagaaagaa

SEQ ID NO: 176152 - DNA, 690 bp, Zea Mays
caagcaaccttctgcggatcagtgcaactttctcttctgcctctttgacaaaggcaggtccttctagtgcttttcccccacgttggaccatatgagaggggtctggcatttccgtccatacagtgcttcgaatggtgacatcttgatgctggactgatagttattgttgtaggagaactctgcgtagggtagactggattcccaacttctatcaaaagctaacacacatgctcttaacagatcttcaaggactttgttgactctctctgtctgcccatctgtctgagggtggtaagcggtactgaaatctagcttggtgcccatggctttctaaaggcttgtccagaatttggatgtgaactgggttcctctgtctgacactatcttccttgggatgccatggagtctgactatctccttgaggtaaatccgggcaagggtggctcctgcaaaggtagttttcactggaacgaaatgggctaccttggtgaggcggtctattattacccagatggagtcatttcctttctgcgtccggggcagtccggttacgaagtccatgcctatttcttcccacttccattcaggtatcgggaggggttgtaataggtcagcaggtttttggtgttcggccttcgtccgttggcagatgtcacatcaggccacatactgagctatttctttcttcat

SEQ ID NO: 176153 - DNA, 403 bp, Zea Mays
cgcgcccacgccctggcgactttgcacagagaccctcgggtttttaactaactgggaatgagttctttcactgtttcttgtgtcactgacgctttgcagaagagtcctcaaacttctattccttcgcagagggaggtcctcgacggcgttcacgcccagccgaactccggcgagtgcctgcaccggccgaacggggcaacggctagggttcccgagcggtggacatcaaattggacctagcccgagcatttcccccaagttaattgcatagttggtgagctatcaagctctgtccacgtgaactgaatgggtggcggacagatgagcttgttcccggtgaccagagggttcttagcgcaattacgtgggtcagcaagcatcatggagttatgaggaaactcaa

SEQ ID NO: 176154 - DNA, 622 bp, Zea Mays
agattagcaagttctcatgcagaaattggagttatgggtcctgcaagttggtcggacagaggctctgaattggagttctcatggtacagtgaactgaagaagatcttcagatacatcgcctcttgccactggtgaccatcgcgccgtggttcgcatcgtcactatgattcgtgccctctggtatggagataatcacggtcgcgtaaagatcttggtgccagataaactcagacccgatcgacgaggagttcgccgcacccacttggattgcggtcggccgaattggtcctcgccggcgctggccgcttaccaaccatgcgccacgtgcccgagcgtcttaccatgtcgcagtaggtcgcgttaagcatacccggtgatcgtcggtgagtccgccatggtgaaagccactaatcgtttgcgccagtgcccctcctcctctccgaccaccgcacgtctccatcaaattcaccggtcaccactcaagcactctataaattgcaggcaccctcggctccgctaagtagtcaagcacctaatccagtaacccgtgcctcaaatcatccactagagcgcgccaatttcaaagttcccccaaatcggtttccgccaccgtgaaagtgtc

SEQ ID NO: 176155 - DNA, 416 bp, Zea Mays
tcgaaaggcatggtggtatagcagaaggctccaaatggtgtgatgaaggcagtctaggaaggagagcatagagcagccagtggtcgaatcaactacctgatctatcctagggagttcgaagggattcttcgggcagtgcttattgagatcaatatagtcgacgcacatgagccaatcaactttattctttttgagtacaagaatggggtttgctagccactcagggtgcagtacttctctaatgaatcctgctgacactaggcgagctaactctgcacgaatagcctctctcttatcgggcgtgaaacgatgtagcttctgtcggatcggtctcgcctaaggatacactttaagtttgtgctcggccagttctctcgggactcccggcatgtccgcaggttgccatgcgaatacat

SEQ ID NO: 176156 - DNA, 490 bp, Zea Mays
gctcatcggtccatccgattgcatctccacccgtgacgatagtacgctacacgtccccctgggccctgagtccctgacccccactccaaccccaccaacaccagcaccgccgtccgctacccttctcgcagactcgcaccatctaacaaccgccgccccgccaaacccgaaccagatctggtacgtgccgcccctcgatttggcgcgctcgatccggcctcgtggtgctggtgatatgccagtccctaactcaaatctgggaggttccactgaagcgagattgtagtcgcgaatcgcgggcgccgagatgcaggcgcgtgtggcgtccatggaggacgtgaaggaggcgcggcaggcggccatggcggcggggcaggggagggtgcttccctcggggatgctcaaggtgttcctggggttcctgctgctggccgtggggctgtccgccgtcggcatgtacatggcgcggcacgcggtggcggcggccgcg

SEQ ID NO: 176157 - DNA, 790 bp, Zea Mays
gtttatagttcctatccgaagtcatagcggtgtcgtagatgctccgcgtagaaggggccggatgggctgcacatggtgatttcagaacttgagtttctaacacgtcgttgatctttgaactatcttctccaggctgctttggttgaacttgagagtgattatattacttagacaaatatatctagtggctttccaactaatctaagtcatggatcttgaccattttaattctctaactcatatttcttttttgtgctcaaactagctttaaaatagtgaatttatcgattccgggctttccaacctctctagatgtattgaatacattcctcggggtatttagaacttattcaaagcgtagaactattcatagttcatttattccatatgttacctctatttggttggatctgagttgattgtgacttagaaattaaattgttgaacttatgaacctgtgaatcaaagactaggcaaactagttagtctgaatgattttgatggtcattaaacaccaaaatcaatataagaaatgatttaagaccattttccttttaacccacgtacccgcgtcggaggtctcgccggagggagggacagagagcgtcgctaggactcaagaaggacagggcgacgatcgactacgaccggtgaagccgcattggggcacaccggctcgagagtcacaagctcgcacggagttgcagggctgggggccgttgtggcgcgttctttgaggactctgtgatcgttgatggtggattgtatggtccatttgtttttttgctaa

SEQ ID NO: 176158 - DNA, 806 bp, Zea Mays
tgctaactagatttatgtgggtgagcttttttactatcttggcaccttagttgcttcaattaggatcttttgtcagatgtttgttatagttagaggggtgtagtcttggctagaccaacatagtattaattccgcatttatttgtgttatccaacataattagttttgtaaaggactattcaaccccctctagtccgctatctcgagcctacaagtggttttagaccctggttctctcatttggtggtcttaaccgacccaagtgtaagtaggatggtgactaaaggtctagtggttacttgtgatccacacatttttatggcacacactttgcatagtggaaagcttgtatgagttattattttcgtgttattgatacaaaactgtggtggattgtgagtgttggcttttctagtcccttagatgagaaaacaaaagatctcacccaagccaaagaaaaatgcttacatctttaacaccaagctactaacattttatatcaatggataagtgataaggtgttcaaggaaattatgtatatggagaccgcccatgatatttggacatatcttgatgatgtgtatatgggaggatctctagcgaggatgttgagcacatccacaacatggtggttgtggaagattgctccacctcatggtcaagtcatgatgatgaaagagataccacaagttcacttgataatcatgattgtgatggctcaaactcaagtgatgcaaatgattgttctatttcaagcatacttgatgaatatggtgattgttcatgctcgaatgatgatatcgcta

SEQ ID NO: 176159 - DNA, 740 bp, Zea Mays
gggtgaggcccgatcttcaaagacgcgggggaccaatgatgaccaaattgtttgcgacgttctagttaacaacccttagtctaaacacaaacttagcgatgcaagacacactaagacaatccgagggcatggacaacaggaaattcaacatgtcacatacaaacttgggagagtagtgaggggagaggtgagctagtgagaaccagacggatgatgtcagcctagcgacaatagagtgtgggtgaacgacatattggaaactttcaaaaaaactacgttgcatcaaggtaccgggcgtttcaaacctaaggttcaagagggcgaccgacgttggactaagtggagacataggcccccactcaatttccttggtttagtagactttttaccttatttattgtagttacaaaggcttattcgttagtaatcctttgtttagacccccactcaatatttgggctgccctagtaaggatcgaaggaagggtggagaagatagtaaggatagaaggaagggtggagaagatgctaccggaccttcattgacgcgttggggaagctcagaattcacccgacgctttctctttagtttggaggtgaccctagtatgctcgatgaggtcagagttgttcgctggaggcaagcacacacccttcgaaccaagggggagctgacttgagagggttagagttggagcacgaccgagggccaccagggtcgtcgcgcagatcacccattggg

SEQ ID NO: 176160 - DNA, 349 bp, Zea Mays
atgggaaatgccaaaggaaactatcagcaagtctgacgaaggtgggctggttaggttgaaatacaccttcagatatgaaggtaagtttattgagccagatgatgattggctgaagtgcatcgaagctacaagcgacgaactgcttggaccatattcaaaagaagaagataacgcgttatttgcggccttcggaggccggaagaagaagaggctgaatagagttttcgatgctattgggtttatgtaccctgattaccgctacccgctgaaagggcagaagagaaaaagtgcaacttctggaaaaggtgatgcttcagttgctctaagtgagcctgcgccaaagaggaaa

SEQ ID NO: 176161 - DNA, 274 bp, Zea Mays
gtggggatgaagattctgaagaccggccctgcggctaagccataccatcttcggaaagtcgaccattaaacaaagtcaaattgacgccatgaagggaagatactttcgtgacttgtctattgtgagtgttggaggggacaacaccgcccctgctcctgaagaaaatgaggttgttgtctacagaagctttatgaaggcgggtcttcggttcccattgagcaaatttttggttgaagtgttgaagatatttcagatctttcttcatcaaattact

SEQ ID NO: 176162 - DNA, 334 bp, Zea Mays
gggtgacttcattatatagcttgataggctagggttacattagggttacaatgtacatgggccaatgggccaggcgtcccatatgggctgtcatagatacattccaacaccctccctcagtctaatcgggagtgttacgaacgcaaagactggacctaaaatcagtaaataactgtacaggtaaccctttggtcataatatcagcaaactgaagtgacgatggaacacagagcacccggacctgtcctaaagcaaccttctctcgtacgaagtggatgtcaatttcaatatgcttcgtgggacgatgatggacggggttggcagtcatatagac

SEQ ID NO: 176163 - DNA, 779 bp, Zea Mays
cttggacacccctcggttcgccccctccccctctggtttgcctggtccgcaccggttcactgtcgcagctccgttgccgttaacccgtgtcctcgctatgccccggacgctgttcgtgagtccctgagtcttccctcaaggtaatcgtcctatccccgcccctaatttccccagtcttgcacttagtcgctcgtgattgctcgccagagtgttccacggtccgccgaggactcctccaccgtccgatcgcctcaccccctttcctgctatcccgatcccaccatagtgctcgctgaatcctccccaacctccctggctacccagaccacccctatcgccctagaaacctcggtctatctcatctccggtagctgcaccaccacgatcatgaacagtggtgcccctggctgactggagaggacaaagcccctagcgcccgatcctaaccgtccagtcttgatcgaatggtccggatctgcggataacgattcgcgtgtccgtggaacccgaagcattgatctgagatctatcgaccagcacgtcctcagcacactgctgacccgtgggccccgtgcgtcagtgcctcaacccaccccgagcccacctgtcaggccctcgcagcccatgcgcccgcgctctcgctcactattctaatccgaaccgttgattggagattggacggctagcgcaaccccgtaccccttcttgtgtaattttgttaaagagaccctcggttttccgagaatcaaccgtcgtcctttagtttagcgtgcatgccc

SEQ ID NO: 176164 - DNA, 378 bp, Zea Mays
gatgaattgatcttgtcctttgtttggtgacaatataggacacgctatgttgtcattattacttgcgcgctccttggtaacatacaaccagcatgtatgaatccactgctcaagctgctgctgtgttgctcgatgttcaaagcagtgtgctgaaccagctggtgctgttttcctcatatgttgtcgacagctatagctcgcgcacacacacatacgcttctatgacagaatcagtgcttgagatggtgcggtggtgcacggttctgcctccagcatcagccacgcgcgagcagagcccccgcccccggatcccacgcatggatgactgcaccggatccactcctcccttggaaggagaatctcgcctctcggtcctcg

SEQ ID NO: 176165 - DNA, 444 bp, Zea Mays
gtggaagtgtccacgcaggtgcgttaggttttaattgaacattatgacctcctgtcctttccgattggtgaggtggtccaatcagcataacctgttgtcgctcctaggtgggtaagcgaggtcgctttggtggccagtcactggggccgaccttctttttcacatatttagacaataattgatcaaaggttgggatggatttgaccaaccgaccaactgcctcgaacgtgttagttttccacgtacctatttctggtcgtcgtggtttgaaagtacgtggtcgtcgtggctccttggcgttgccggaccatctactggaatgatccggactgtctagcaaggtcccaaactgtctgcgtatgtgtatcggaccgtccgcgatgcgccgaacaggttcctgcgttcggtcacttgtttgtgattgccccccagcgtttgtgatgg

SEQ ID NO: 176166 - DNA, 632 bp, Zea Mays
atcatgttggaaagggagatatctctatatattcaattggcacggatgatcaattggccgatatatttacaaagccattggatgaaacgagattttgtacactaagaagtgaaatgaatgtgatagatctctcaaatgtggcttgaggttgaatgcacatgtgtagtattgcatttcgcttctaaatatgctctctacgctatttattgggtatttttgatgaatttttcattctagattgatctaagtagtttgatatgagaatgtgtacataatgtgtgtatgcatgcatactaacccttgaattggtcgaaatgtccatatatgagcatcaaatcagatttgaaattcaaaatcagaaagtggacataatttgaaaaattgagtatcaggtcgcggaccgtccgcagtattaggatctgaatagtccgaggtagcagtgtaaatagtctgagttaccagggcacggaccgtccgccgcccctgcgcggaccgtccgcgacaggcagttaaatcgagctaagccagtcaacttgtcactttcatccgttgcctctcctctcacactctccacacacctaaaggtcacttttgtcgattgtgtgcggaccgtgaagggaacttgcgcacgg

SEQ ID NO: 176167 - DNA, 581 bp, Zea Mays
aagaagagaccgagagagagagaaggttggccgccaggggggaaatcgaggttcgatcgccgtgggggccttcaagctttgccggtgagctttgccatggcgcggggaacgtttccgtggccccttctagcggattgggttgtttgtgactccggaatcgctcaccggagcaaccccatcgccgcagatccgccacgaccgtggatgggtccctgcgccgcgacgttcgtcggtatgatcacttccgttgtgttcgccatcgcttccacttcgtaatgatcccattggattgaagaatagcgcgccggggtgatgtgtcgcgtgcaccggcgatggcgccgtcgcatgggctaggcggcgtcgcctctgctcaggtgttggcgttggggaggataatgggaggcaactggccgtccgtcccactgtgatcggctaggattagatataggcatacccttcgatggatcgatcctgattcgttgatcttggatccatccgctggcatgggataccggttcggggtggtgctcgatttaatctgagccttccatctcaaatccagcggccaatcttcacatgta

SEQ ID NO: 176168 - DNA, 919 bp, Zea Mays
catggaatcccatttcggttcatttttcaggcgcgtccagcaatgcatgaaatgaaaaggttttttgtgtgcggtagcatatagagttgcagctttggaagtctacaaatgaattggaaaaacatgtgagatcatgaataaactttagtacacatgaaaccatattcatacttatgtattacaaaggcagttattttaccttgtcgttgtctgttaggccactctgattttcccttaggactcttgcgtagaacccagcatatttgcctgtttcagcccttattttgtcccatctgctgctcaaagccctatttagtctcattggaaactcccctctaagtttgttgtaccttttctcaattctagcccatagaccctccttcctctgctttgtgttaattactgggtcactactaatctctagccaagttttgcaaagcaaaatgtcctcatcaggtttgaagttctgttcctttgtcctcctacctgtcctaggtgtgtccgaaggtttggtagggctgtttacttcttggacactgtgctctgcttctgattccaaatttatagggtcagtcgtgtttgtcacatgggtataaacctggggaaatggactaggtggtaccatctggacttgacccaaggatgtttgtggtgtaggaccacctagattcatcatagcaaaatatgggttccatggattgcggaagggaaatgaagatgtgtcattaggtccctggggccaggtaggattgctcatgtggcttgtactaccactcatagtagcaggatgggtttggtctaatccttggccctgccagaactaaggatcccacatgggtggtgggaaaatgtggttacctgaactggggccggcaccaggaggtcgaatatgtgagtttcggttgttctcagccattct

SEQ ID NO: 176169 - DNA, 468 bp, Zea Mays
catcgtcgcgattcgtggagtgtaaccagggattgccataggactttgccccaatgtgtgccacggtgaacttgccttagtaaaaatatcctatcaccgccatgatcctaactttgatcaaattcggagcaaccgtggccggcttctataaattgagcgtctcccttgctccgcctccttgttaggaacctagcgcaccactcctcgctttcgattatccacagtagcccaggaattcaaaaatcccccgaaatcggtgatccacgccgccacgaagcatcttgccatggtcaaagccctctaaggtaattatggtcgggcctaagagtgttttgagttctcttacatgttgtgatgctgatcgacctgcccgatcgaactatatcgtagccagaaccccgaaacaccgtgtcgccaccgtggaacgccaccgcggacactccctccatcaactcaccgctctgtccc

SEQ ID NO: 176170 - DNA, 532 bp, Zea Mays
tgcttctcttttttaaggatgaatcgacgtagcttctatcaaactggttttgcattgggggtagacctttagcttgtgcttaaccagctccctaggaaccccatacatgtctattggtttccttgcaaacatgtctcagctatcctataagaaccgaatgagtgtgtcttcttatttggcagagaggatggaattgatgatcgccatcttggatgtgttggggaggccaaggcctatcctcttggtttctttagttggctagattgccatagacaaagttgctttagtcaccaggatcggtagatcgtccttcgttagcgtggttgtgtccacagcaagctgcttttgcgcagcagaggtgtccatagtaacgaccatttggattgcttcctgatggcactccatagagctctagaaattttcccctcaccatgcggatgccctgtggccctggcatcttgaagaccaagtatggacaatgtaggatggccatgaatttggctagcctaggtcgtccaacgctggcgttgta

SEQ ID NO: 176171 - DNA, 533 bp, Zea Mays
catataacggggcagaatcaatgaaggatccagagattcggatgataaagccacaacatgattcacaaggaaaaagattaccagatccaggtgaaaagagaggtagtcgcaggagatcgattaggatgagcagcagaaaggttatgaagattcaggacaggatctatggaaagaaacatggccttgatatggtttgtgcaactagacaccaaacaacaattttttcctttctttgacacaacaagtgcacaaggagacttgggttggtctagcgatcaagctatggggttctataagctgtgtaggtgtaaattaaagggtgaaacacacaagggtcagaatatacaaacacaagcatgatttttttaaaaagaggttttacttgctaaactcaaggttgtttggagggggtcttttcatgagcagaacagacaacattttttttggttaagggaaaaaggactaagcagttaccgcaccttctagatagcaaggcaagagaaatcaccacctaacaagactaccaaaacaac

SEQ ID NO: 176172 - DNA, 446 bp, Zea Mays
gtgtatacatttgggctttacggagtcagggaatgagtgctaatgccaaagggttctgcagagtggacgaactccactatgagaccaaagccagagcagacggcctccacaagaacttcggatgctacaacttcgcctatcgaaaggacatgaaggctctagtggttggatatcgtactaaatggcctactagctagaccaacgagtggttctatgtgaaggattatgagaagaagaggaaaaaactcatgagtatggtgatgattccattaaagttgagcttcattatgacaagaccactatgcaatatgcaactcggctccccatgctagttagctaaagttcaattcatagttgtggccgagcacattagtactcaagatttagtgcaagaatatctagcgaataaaaccttcccgacataaggcggatggggaatgccgaag

SEQ ID NO: 176173 - DNA, 553 bp, Zea Mays
cggggatctccatcgtcgcttcgtcgtgggcgtgggtctctgcaccaccatcgggggtaataacccatccattctcttcgtatcacgttgtgcttcgtgtagcgtgtctccaattcgagattagctcacttggcgacgatcggggcgctggaggaaggtctccgccgtggggattttgcgctgctgcccgaggtttggtcggaggttgaaggcgcgccgtcgaccgtccgatttggtgggcggtcgggatttgataaagggctgggtctgtgcgcgccgttgattttggagtgagcggtagagattagaaattggcataccctttcggcgttttatcatccgaccgtcgaagttgaatcggatggttgcgcgaggttgtagacgtggccgaactctggccctggatctttgatccggtggcggctactgctcagggctccagctgctgctttgggcctaatctggaccgttgatgctcgatccaacggccgagggatcacggtaccctttcgtcgtgcccattttgcataagcgcccctctgttttagcgaag

SEQ ID NO: 176174 - DNA, 508 bp, Zea Mays
cggctatagaattggtacgcctcgtccacattactaaatgtcataccgaccttcggtaccaatcgttgatctatactatcatcctattcaattaatggagtcgtcatgcagtgcacatatatataaaataatcttatagcatggtgaatttctaggacttcataacttgcacggacaatataacaaatacatgtgtattcggtgacttcataacttgcacggactgtataacaaatacatgggtattcatttgaacttacatggctttggagaatgtgtggtgtgtcttggtcatgttcaccaattgtcctcatgggtatccgctgagttgctcccaccaaacttggatgaattgtgttgctgtcttcaagaattcctggcgtcggtaacacagttgggggagttacagcatgccagccatcggtcgtacagggtgccgtcgtcgccgtagcttctccacactgctccgatcccctggtcgtcgccatcatgtatgccctaactctcc

SEQ ID NO: 176175 - DNA, 798 bp, Zea Mays
ctaccactcataatcgggttttgcaacatgtatttgatcacatcggtttgaccggaaacggtgcaatgattagacaacaaataacatctacacttggtgcatgcataaaacaggcataagcataacttctcgatgaaagtgtaccttatttcagaatccaccagcctctgacttagataggtcaccacatgctgctttcctctggtctcttgcgtcagaacagccctaataaccttatcttcagctgcaatctacaatctgaacggtactcctacttgcgttgcttttaacaccggagccgaagacaaatattttctgatgagatcaaacgcttcctgttgttctgcccccaggtgaattcggcatcatttttaagctgaaggataggggtgaaggcatcaatcttcccagctaggttagaaataaaccttcgtaaataatttatcttgctaaggaacttctgcacttcgaccttacaggtcggaggtcccacattccgaatggatttaattcggtcaggttctacctctataccatgttcatgaatgatgaaccctaagaacttaccagctgacactccaaaagcacatttacgtgtgttcattttcagatcataccgacgaattttatcaaaggctttgcgcaaatcatctatatgagaactaaactcagccgatttgactacaatatcatcaatgtagacttccacagtgtttcccaatagctcgtgaaagatcaaattcatagccctctgataagtagcaccagcatttttcagaccaaatgtcatgacaaccc

SEQ ID NO: 176176 - DNA, 1211 bp, Zea Mays
gccgaattagcaaaagtgcgcgacaaccagtctctcacccaaagacggccagcaggccacattacaatacaagttgcagttacatacactcagcgagggcaccacatactacattggctcaaccttcgggatgatgcccgcctccctataattgaacaacattattttcaattcctcaccctcaaaaagattacgcagatccccctcaccaatgctcgtcccaatcggcgaagacaatagctctcgtttaccaaaccgatccactcaaagacggtctcgctccatccccatccgacggcgcctaccactttgcgaaacctcgcccacgctatgcttcgacaccacccttcgtcgccggcacttggtcctcgcactaggaagatcagccaccttgccaacctccacccgcggcgaggactccaccgcagccacatctaacacagcaaaataatccaagtcttcatctgaagactcttcggtccaggaaaacggactcccaaactcaccatcagacgaaaaagacccagatccagaaccagataaattgtcattggcaggcactacggttgcggccgccacaaaattagtatcgtcagcagcggttgcttgcgcaggcccatacgtcgaaacctgtgcagcaaccgagtttcagtatcacaaaaacaaaatcttacacctgatagccctagctcctaccccgccacctgcgaagggccggccgacgctgcagggtctttggcagctggttcgcccgccaccaccgaagtgtcctcaccagtcggcgcagcggccggcacagggtcctcgccagcacaggtcagcgcggaggtcaccatggggccttcactaacatcggacggcggcgccagctccccctcaaccccctccttctcacccgacgcctcgggcagcgtgctctccaagtcctcgaggtcttcgacctcctcatcacgcgccatctatagaaatagcatactcattcaacaaaaccacatataaatacacaaatacccatatatataatcacaaaaacaactccatacctgctccatcacccggtctgacctctcccggacagtatcacgaccgtgagggccccacatcctatcataaagtgtccgaccgatcgcttcagcaccgggtcctcaacctggaagattccgcgttcgaagtcttcgtccgatcggtcaaagacttcaaagtgcccgcat

SEQ ID NO: 176177 - DNA, 712 bp, Zea Mays
gggggtgttgatggaggtgtactctgaactgggcaatttagaatctgatttttggggtgaactgaatgtccatctgaaaatctgaaaaatgaccatctaaaaatctgaaaaatgaaatgaccatctgctagaaatgaaaacagaaaactgaaaatgcagaactctgaactgggcagtttagaatctgaactttgaactttggatttgggcagtttagaatctgatttttggggggcgtttgatggaggtgtactctgaactgggcaatttagaatctgatttttggggtgaactgaatgttcatctgaaaatctaaaaaatgaccatctgaaaatttgaaaaatgaaatgaccatctgctagaaatgaaaacagaaaactgaaaatacagaactctgaactgggcagtttagaatctgaactttgaactttggactgggcagtttagaatctgatttttggggtgttgatggaggtgtacactgaactgggcagtttagaatctgatttttggggtgttgatggaggtgtactctgaactttgaactttggactgggcagagtttacaatctgaactgggcagcaatctgaactgggcagcagagtttactcagaacacccaacaatctgaactgggcagtttacaatctgaactgggcagaacagttgatgcttaaatatggactgggcagaactctgaactgggcataac

SEQ ID NO: 176178 - DNA, 942 bp, Zea Mays
cggcggcctcttgggccgacatctaccgctccgtgcgctctccgcttcctcctgggttcactcgtttctggggcaagcggatctccgggcgaaaaactctctggcgcggccctgaagactttgcttctctcgcctcgcggtgcggtgaggtcttcttgtaccgagttagggtttcctctggatttcgttgctcgtattctttttcgcatctctcttcttcgctttctcggctttggtcgctcccgtcgtcggtccgctccagttttcacggtggttggtttgagtccccgattcgtccgccgcttgtggaagaagagtggttgcctttgcctcgctcgatttctgcgtcgaagatggatccaaaaggtcgaaacccttactgggatcgatggggtcagaaggatgcgcctcaaggatcccaatcgtggaacaagaatcggaacctaagctggcgattgaagccaaatcttggcaaatcggatgtcaaggaggacatcgtgacttcatcttctggcgatgggggccaatcaggtattctcaaaacccccctgctgctttgaaaaaagagattgagaatgtgcgtcgtcctttatgtcaaaagtgtggggtggagggtcatcatgctaaagattgttttcgatctctatggtgcgatatttgtcacaaagaaactcatatgactgctcgttgtgtcttgcccaaacaaaacaagccatgcatgcctattgttggtatggcggctgatggattagggttttattcttctcatttcgcgaaacccttgtccagaaaaccaaaaagaagcttcatcgggttggtaaaggttgtcgagggtctgatttctgctcaagactttgagaaggactttggttttcattttccatggggcaaaacttggaaagcaaccaagtgccatgccgggttcttgatgcaatttccttc

SEQ ID NO: 176179 - DNA, 388 bp, Zea Mays
ggagggccaccgactgtcaggggccacccattggtgaggaggcaagggattcgtgtacctagaaagcacctgtccccggataaaccatgaggcaccaagccaagggtcgggtctagcggagcaaaagagggggagcaggcgaaccgaaaggaaaccacttgggagggttccttgcctggcccgagactaaagcgccataagtggctggccacattacctatgcttgatagcaggtcatagtagagagccagtctgcccccactcatgacctgcgtagcccctcagcttacagtgcactcatgacctgtgtagccctttgttcagtggctcactcatgacctacgagaccctcggcctgtgaagcacacatgacctatcaagccttgac

SEQ ID NO: 176180 - DNA, 637 bp, Zea Mays
tgcccatctgatcccgatctaacggtaagcgtttaatgaatcctaaagttgttttccaccgtaggatcacacatccatgaccaccatttggccggtcaacgcgacacaaggcaactaatcccagccgttgaagtccggatcgacagtccctgagccatcaccaatctcatgaccacccctgacggcacccaccagcccgcggcggcggagttcgccggagaccacgccccggcacaccagtgcactcaattcccatgcgaatagttctacaggaaatacaatcgaccgcgaactttaaggtgaacctattatcggtagtgatgcaacaagggctcccatccacggcgaagtgcggtttacggtggctggatgtttccggcgaggaatcccggaggcgttagctatgtttcctacgtggcgcgactttgactaccttctatcaatccttgggaaggctcagagagtacctcgatagtccggtcgaagcagaggcgaagtatccccgcagcggcaccgtgatagcaccccgctgccgcctccatggtttcgctggtagttcgtgcgttgcaatgcgattgcggtgtacagaagggtgagggggttttgtcgtagctcaaatttatgggcgggctcgacc

SEQ ID NO: 176181 - DNA, 518 bp, Zea Mays
tgaaaagtataattgttttatgcatgtgatcgatgattgggatagtcgaggcgaatgaggagtatgattaatcctgttagagtcactatgttgttgatgccttgtgcgtaacgtggggacacgtatgtgcgtgtgtgctgtggtgtattacagtggtggtggcgtaagatatttgattgaggtgtgcgggtatatgccataatatggttgtactcgcaacgaggaaagatgtatgcattgtgtaacacgacacttaggtcggtattatataatcttgtgaaggatgctcatgatggtcgtgtgattgaggagtaatgtagtggcaagcgcgaagtaagtttagtttttcaaacggttagtggacagtatctatcggtgttgtcatgatttttgttgtatggcaatgtgatgcttcactttatcaattattgccttctatgcccatcggataaataaatgtcttgttgatcgattagaggtctaatatgaacgtgatcgcagcccaataattattggag

SEQ ID NO: 176182 - DNA, 373 bp, Zea Mays
gttttgtggtggttttcattgatgacattctggtatattcaagaaatgaacaggagcatactatgcacttgcatacagtacttcagagactgcgatcatcgcttatatgctaagttgtccaagtgtgatttctggctgagggaaattaaatttttgggtcacaccatttatcgggatgggatatcagttgatcctgagaaagtgcaagaggtgatgaattggaaacctcctaccaccgtacggcagattcggagttttctggggttggcagaatactatcgacgattcattccggatttctccaggattgcaaagccaatgactgaattgttgaagaaaggagtaaagtttgtgttggggacttgttctcaaa

SEQ ID NO: 176183 - DNA, 629 bp, Zea Mays
ttccgttcatctccgcaccagaaatcgtcgcattaggggggaattttgggtcgggatcctcggtattcccagctccggccaagctccgccgcggctctggttaacgccgctggcaatggctggagggggaagtgggcgcttagcccttggatgggaatggtgcggttaggattagatcgggggggccggacaactcctggccgtccaatctagacgtgcgggtaggattagatcctgataccgattcagccgaagcaaacagtgaccgttgatgcagtatccggtggtggagatccgatcttgaactcattaaacgcggaccgtcggatcgggatccaaggaccctgattgcataccgattcgcgcagtttggagtttaatcctggcgctcggtttctaatcgtgcggccagatttgaccaataccccttcgctggtctcttttgcataagagtccctggggaaaccactaatgaacccgtagtccgctcgggtgtctccctgagtctgtggaattcttgcaccgtagtccctgcacttcccagaatttggtgcacaatccaggaaatagagaaataacatttaaaaatgattcttagtacaaaaacaattccataaacttgtttaatc

SEQ ID NO: 176184 - DNA, 581 bp, Zea Mays
ggtctatgggtcggaggcagtgctacccgctgatctcaagtttggggcaccaaggttgatcttcgaaagtatagcagaagctgaggccaccaggctggaggacattgatgtacttgaagaagaacggctaagcgcggtaatccaatcggtacggtaccagcagactctaaggcgttatcacgacaaggctgtgcgacaacgattcttctcagtaggggatctcgtcctccgccaaattctaacgggggagggatgacacaagttatcacccttatgggaaggacccttcatggtagcagaagtcactcggcccggatcgtatcgcctcactcagatggatggcacagaagttgggaactcctggaacatagaacacctcagaaagttttatccctagctgtatttcaaaactgctgggacgacgatgtactctgtaaagtggaaatatgtcatcaataaaaagaggtttcaaagatactcaattcgtttacgattgacttgcattcttacttaactcggggtgaccactatgccctactaacggagcaatcgacttaagtcggcaacgacttaagacggtg

SEQ ID NO: 176185 - DNA, 1007 bp, Zea Mays
ctcgaaggtccaggatggaaaaccaagaagcgccaaacaactcatccaacagctcatcgatgattggcaccgggtacttggatttaaccgttagagcgttatggtgtctgtaatcaacacaaaaacgccatgagttgtctttcttttttaccagaagcacaggcgaagaaaaggcactggtgctatgctgaatgagcccggtctgcaacatttcagccacttgagattcaatttcatccttcattgctagagagaaccgatagggtcggatgcttactggtctggcaccttcaataagggggatagaatggtcacaaaaccgactgggcggcaacgtcgcgggtggctagaacaggctctcgtaattgcggagcagctgcacaactggagcaggcaaggacaactcaatagaacgcagctgggctaatgcaggttccgttaccgtaaccggccagatctccagtatagtgcatgcaggaaccaatggctggcaaccttgtaacaccactgtggaacctgaatgtggtaatgatagccatttatgtttccagtcaactgtcattgggctaaacatctccagccaatccatgcctaatatgacgtcataatatggtagagggataactttgaaggaatagcagaattccagaccatggatataccagctagcttgtggcagctccactgtacattgcacaacttcaccattagccatggtaacggataagggagtgtccagacgtgccaacccagacaaggcagaagtatgattagcactcaggaagcaatgagagctaccagagtctaataaaattaccacatcaatgccttgaagttgaccgcgaagtcgaaatgatttagaggtagtctttgtagaagctgcttccgtggatagcaatatcatgaattgttcagcagaatctacaaattcggcctcagattcaggttgatctgacgacaacatttcccatagctcttgaacatcatgcaactgcacggtttcagca

SEQ ID NO: 176186 - DNA, 930 bp, Zea Mays
ggccggggggatggggtcctcatcttgagcttgcccaccaagcatgagttgctgaataatttcacattgaacagtccaggagtcaccagcaaagccctcagcctccgaaaaaacaataaattgggggacctcatcaagtgaagtgacacgaacacgaagcaaagttctagagatattactctgatcctcctcccagagaattagtcttccaaacgacccaatggcggcctgcaagtactctgaagaacgataatccaatggaaaccccagaagcataagccagcactcatggttgaaaagaagagctcggtgattccaagcgtcattatgacggaccgcggtgaaagtagcatccaaatattgctgggggccaagcagaaccaaattatcccgctccagaacactacgaaactgcactatcacctgccccaagtgcgagcgctgaatggctcgaacaccgaccctacgatgctcaacaagatactccctgaccacatctctgaccgcagggaacaagacctcgtgctcaggcaaaggatgaatattgataatcgcccagtcctcatgcattggcgataaacgctgcgagactgacctgaccatgatcccacgatgctggaccaccgaggcgctgaagcctggtgggaggaacggctccgggtctacgcgccggtacgcccattgatagattctcagagggtcaccggagagccaaagagcaaaaggagcggtttggggttttggtgaagtgacacccagcgagagctccaaggacgtttcgggcgcctgttcgtatatttttaataagaccgccctggcaaattcaccgaagcaggtaaaggtgggaggggtcccacccgtcagggacccgggggaagggcggaaccaggacccgaagtccaagaggtgagacgacccctccaaaaggca

SEQ ID NO: 176187 - DNA, 945 bp, Zea Mays
ggtgtgtgctaatgcagaacgaaagagtcattgcttacgcatcacgcctactcaagccgcacgagcagaattaccccacccatgatctggaattggcagccatagtgcatgccttaaagatatggaggcattacctaatcggaaacaaatgccatattttcaccgatcacaagagtctgaggtacatattcactcaacctgatctcaacctccgtcagcgaagatggttagaactgatcaaggattatgacctagaaattcactatcaccccgggaaggccaatgtggtggcccacgccctcagtcgaaagccattcggaattaaaaggaccaactttctagaagactggaagaaagaatctgcacaactaaatgcatgtctgggaaacaacgacagtctcgaagtcaagccaatgctagaagacctcatctgcaaagctcaacatctagacccagagacggcaaggcttgtggagaaagcccgcaaggaacagctcccggaccccaggacagataaccaaggagtcctttggttcaaacatcgtctgtgtgtaccaaaaggagaggcccgagaagtcctactcaaggaagctcacgactcggcctactccatccaccccggaactaccaagatgtacctagacctcaagaccagatactggtggaaggggatgaagaaagaaatcgctcagtatgtggcccgatgtgacatctgccaacggacgaaggccgaacaccaaaaacctgctggcctattacaacccctcccgatacctgaatggaagtgggaagaaataggcatggacttcgtaaccggactaccccggacgcagaaagggaatgactccatctgggtaataatagaccgcctcaccaaggtagcccatttcattccagtgaaaactacctttggaggagccacccttgcccggatctacctcaaag

SEQ ID NO: 176188 - DNA, 670 bp, Zea Mays
gaatcctgaaggtctgcaaataatgtaagatgccgccgagcaccggatcgtcaaccttataatggacgaaggctggcggactctaataaccctgtacctccaaggccactaccatccatccgatcacaacaacgccaaaaggctcaaacacagaagcagagacttcgcaatcgtcaacgaccagctatacaagaaaggaaccagccagcctatgttgaaatgcataactaaaaccgaaggcttagagcttctccgtgaggtccacagcggtacttgcggatcacactcaggaccaagggcccttgcagctaaggtcattcgttagggattctattggcccacagtcatatgcacggccaatcgagtaacccgatcgtgcgaagcatgctagaaattctcgccccaaacaggcgccccttcgcaattcatcaagctcattgcccacacctgtccgcttcaacggtgggggctcgatattgtcgggccactgcccacagcccaaggcaacctcaaattcaccttcgtcgctgtcgaatacttcaccaagtggatcgaggctagggccgtattcacaataacatctaagacgacacaaaaaaatttctcgcagattatcgaatgttggttcggagtcccatccgaattaacagacgataacaacaagtagttc

SEQ ID NO: 176189 - DNA, 594 bp, Zea Mays
gatctcaattttgtaatgattcccccactgataaatgaaacctattctcgtgccaacctgttgttgcatattccgctcttgtgtctgacagttcgttagcatttagaggtaatgttcgagtgatgttattttgctacgaccaaaactctctcgagctatcggcctgtccttttgcgcccgacttagtgtgccaacccatacttttgttggcgtcctcttgacctctgaaccctagttcctatttttcctccgctgctccccaactttctaagttctcgagtccattcgcgttttgtcccagaaccgcgccgtttggaaaatcgtgatggcgcccaagaaaataaaacagagtgttgccaccctagacatccctccgatcgatcccaacagccaactccatttcgttggtaaccatgtttctgtcatttatgaggctgaccttctacatcttgttgaaattggtgttctaccgccgaaggaactatgttcctggcggatctggcacggagttattgtcccgacagaggatactcacgaggcggttatctttgtgcctttctcatccggggactggccctgctagtttctcccttc

SEQ ID NO: 176190 - DNA, 618 bp, Zea Mays
atttattaatctacaatgcaaccctaacgtggacttcccgtgcatgcatgcattcataaattccgcaaggaccgcgtccttgtgcttgcacacgtcgtcgccccggatcttcatcctcacacctgcaaggatccgagcacatgcatgcatgccgtacggtggtgtacccacccaagcacgcacgagctctcacccaccatgatgggccgcacggccctttccctgtttcaacggggtaatcatggcactcagccgtctgcagatacccagatggacgcacttcaccgctcataataatggccttctctatctctatggtcagctgcgtgcgtccctccctatcccacgttcacggcgatggcgtgcgggtgccctggggcctgggccctgctgctgcgtgcgcaatttaccatgaccgtcggtagacaaatcctagccgtccatccgtcgtggtcccgcggctgccgtgcccgagcgtgtcacgccaggcttgtattgaccaacacaagctgttccctgtggcttggtacgttgcgttcggggtactcccctcactcctttcgtgtgctggtggcctagtgcacagcgggggggaaaattgcacgccgcacacgctcg

SEQ ID NO: 176191 - DNA, 722 bp, Zea Mays
agcacttccaaattttgataaaccctttgccattgaaacagatgcttcgagtaaaggcattggggcagtgctactgcaagataatcaccctttagcctatgtgagcaaagccttgggcgtcaaaaatcaaggactctcaacatatgaaaaggagtatcttgcaattctgctagcagtagaaaaatggcgccaatatcttcagacctcagaatttgtcatttattccgaccatcgaagtttatcacacctcactgagcagaaattgacaacaccatggcaacaacatgtgttttccaagctgttgggtcttcaatataaggtggtgtatcggaaaggggtctgacaatacagctgcagatgcattgtctcgacgcccgatgtctgaactctttagtatttcttcagctactcccgactggttgctgcaagtcttggacagttatagcagggatgaacaagctcagaagctattaactgctctggcagtaagtccagacacttcaggacattatacattgaagacaagacttattcggtacaagggaagagtatggattggtaatgatacaagtctccagcttcagattatgtcagccatgtacgacagtccaataggaggccattccggatttcctgtgacatatcgctggatcaaacaactcttttattggtcatcaatgaagaattcaataaaggattatgtggcttcttgctctatttgc

SEQ ID NO: 176192 - DNA, 468 bp, Zea Mays
aacctcctctcaaactacctgatgaaaacttcccaggacaggactcctggtgaggagtgagctgcctgcacgcctctccaccaaatttgagcctcccccttcaacagctgtgtgccaaaacaaacacgatctccatacacaatctcgaaaacatccatcttatactccacataagtcagccaatctgccgcctcaaccggagtaccacttccatcaaaggtgtccagcttcatgcccatccactgcatcagagagagaccactgacgggaaggggcacctcagccctaccacctggagcagcacccacagggacaacgcccctgggcactcctccacctccggtaccctgagcagcaccagcaggggcaacaggaatagcttgcctcagaatggccaactcctgctgcaaggcctgcatcgcggctaacattgccgccggactcatagaatccccactaggatcttgt

SEQ ID NO: 176193 - DNA, 543 bp, Zea Mays
gatttctgactccattctggggtgacccaaactcgcctacgacctgtttggttcggtcaaaaaattcaaaaaaaatcgggaagataattaaaaaaaattttaagtgttttaagaatttcagagatcctttgtgaatttatctaggccacaatacaactctgtttcaagtgaaattttgtgtggttccatcctttgtgtttttggatcagtggtaaaaaattcagaatatttcgagctcttttgatggtactccttttgaaacgcgcctttgatttctactagtgctgaaaaatctgccctatttacagaactgtcgttcccactagatacttgtacctcctttcttgtgctttggtccaactgttctattacattttctaggccagcaactaggacgagtacttagaacacttattcaacattgctatctgttactgacttgtgtgccacatatatatatatttagtcagccttcccatagctccaattttctctcgagcagaacaggtactcttttgcaatcacacccacgctcgttggaca

SEQ ID NO: 176194 - DNA, 525 bp, Zea Mays
tggtcaaggaagtggagcgagcgcaacaccagttgatgatgcaatccgagttagcggacgcagtagcagagcgggcggcaatggagaggaacgagttgtacgccaaggtggaggagacaggcaaggagatgtcacaactgcgtctggagcagatgggaagggaactgggagatgcatcaggaggatcggaagaagaactccctaaccgtgatcagaatcgatttcctcaacaaaacagacaggtgaagcgggagcaaggaaatggaaacagagaagggtgacacccatttgatgctaacaaagaggtactgcctaaacttccttttcccaagtttggcagtggagatccagtggtttggattgatcagtgtttggattatttcactatctatcgtgttcctgagtcaatctaggtgtccgtagcaaccatgaatttggaatggaatgctgcccagtggtggagatgtcataagcttagtcatggaattgggaattggtaggagtttgttgcagttgtgactgaac

SEQ ID NO: 176195 - DNA, 695 bp, Zea Mays
cagtcattagcttcagaatttctgctacttcggtagcagagggcatcgaaggagtttcattctctgcctctagctcagaagaaggcattatgttaagctttcacttcttagaaattgctatttttggctcttcagctgttcttggtttcttcaaagctttttcatcttcctttaccaatcgggcagcttgcctattcagaatgatgactattctttttctttttatccttttggctcctccgtcgagcttctcatattaaggggagctgtacaagctcatgtttcttcccccccccccttctttcttcttcgacattccccaaccgctagaagttggaaatgtcttgtttgccaaatattcttgtactagatccctagtactaatttcggcagcaaccaccctaaactcaacttcggctacctggcatggagagccaagttgcatatggcacaaggacctggtcatcctgaagcttagtttcatagacttcatgaccatagtcatcagcttctcccttctcttctcgtctgctttcacataaaaccattcatttgtccacctggttggccatttggtgcgatagccaatcactggagccttcatatcttttctataagcaaagttgtagcaaccgaagttcttatgaagaccatctaccctggccttcatctgataatgtagttcatgtacccgg

SEQ ID NO: 176196 - DNA, 339 bp, Zea Mays
gcatgatcagacctggaagtggctggccacgacgagggtgcttttacggcggcggtaaactgatttgggggaaaacggcgattctccggctaggggagctaatcggagacgggagtggtggctatggcttcgcaatttagagacgaaggtcgaagctcggtttatttgagcgaagggagcgaggatgtggtgaatttatagccgcggtgagttactgtcgctagccatggtgataaccatcgccggccttagctggcgatcaactgcggcgtcaagcgatagctgttctcacgggtttgccacgtccccgccgcgacagtaacacagtcacatccgcgc

SEQ ID NO: 176197 - DNA, 915 bp, Zea Mays
aagctgttggcctactctaccgatagcaggataggggccgacgtagcgtggggctaactttccttttgcttggaatcttctaacacctttcattagggaaactttgagatagacgaaatctccatcttgaaagctaagttccctcctcctgtcgtcagcatagctcttttgccaactctaggcttcgagtagtcttttgcgaatcatggcgactttctcttctgcctctttgataaaggcaggtccttccaaggccttttctcctacattagaccacatcagtggggtttggcatctcctttcatacaaagcttcaaaaggtgacatcttgatgctggcctggtaactgttgttgtacgagaactctgcatatggtaaactagattcccaatttatgttgaaggtcagaacataggctctcaacaaatcttcaaggactttgttgactctttccgtctatccatctgactggggtggtaggtggtgctaaagtggtgcccatagcttgttgtagactcaaccaaaattttgaggtgaactgcgttcctctgtctgatactattcttcgtggaatgccatgcagtctgactattttcttgagatatatccgagcaagggtagctcctccacaggtagtctttactggtatgaagtgagctaccttggtgagatggtcaattatgatctagatggattcattccctttttgggtcctgggtagctcaatcatgaaatccatgcctatttcctcccatttccattcaggcactggaagaggttgcaacaatcctgcaggtttctaatgcggttcgctggcacatgtcacattgtgctacatgctgaactatgtcctttttttattcctttccaccagttcggttttgaggtctaggtacatcttggtggaccctggat

SEQ ID NO: 176198 - DNA, 506 bp, Zea Mays
ctcgtggcatcaatttggatttgcgctgatgaggaaaatgctccttgcgcaagtgaatccaaaccaagtccctcggttcaaataacactttcttcctatgcttgttcatgcttgcagccttgcgcactgctttgagctcaattgcttccttggtcttctcatgtatcttttttatgtatgcagcacacttggaagcttccatattggttctttcctgcaatggaaggggcaacaaatctatcggagcaataggtttgaacccatatacaatttcgaaggggcataaattagttgtagaatgtactgccctgttataagcaaactccacgtgtggcaaacattcctcccaatctttcaagttcttttttaccattgttcgcaacaacattgacaatgtacgattcaacacttcagtttgtccatcagtttgggggtggcatgtggtggagaacaaaagtttagtcccaagctttgcccacaatgttttccaaaaatagctcacaaac

SEQ ID NO: 176199 - DNA, 501 bp, Zea Mays
aaatgtgccagggaaatttcctccactcgctgccaaaccaatcctgagaattgaataacagctaatttcctcttcatcaaccccctccaattcccttgttaccaaaccattatgtatgcaacgctatatgaggagcagggtaacagagactaggttgctggctcaggttggggtgtcaaccatggatgggtgctagaatgaaggggtgtcagccaaggatggacggctagcccagggagggtgtcgaccggggaggagcgaaggccagggaggcaccacagtggaggtcaccgaccaaggtgaggtacgttggctggatagggtagagcatgctaggtgctagccaaaaagagggcagcccgcagcccaggcaccaaccaagaagggcaacgatgggtgttggccaacaaccatggaacattaggcaacaggggcacacagccacacacggtgccaacaaaggtggcaggttagcctagcagcgggaaggcacaggcgcga

SEQ ID NO: 176200 - DNA, 588 bp, Zea Mays
gctgtcgtctcggctggtaagctccgccataccctccccatgaactcgtcgtgtgtgccgtcgcgtttggtccttcatgcgctcccgcgcttcatgtgcgtagtctgtgctctagccaagctctgtccgcttcgacgagctccggccggtgaacgttgcaggtcgcgctcgggcgagacatcccttcgtggtcggtgagccgtgctgtccccttctctggctgttcgctcgtacaggagtagtgcgtcctcgtcgcgtcgtcatcgcggctaagcccagccgacgagcctgcgtagatggctgtgtggcgagcaccagcttgcctatgccgtagtgcgtgccatcgtccacaacctggaagaactgctcgtgggccccaccgatgctatttcctctgtgatatgcatgcagccaatcgggacaattgccccctaatcccctcatgcacatgcacgacagagcatgcactctccacaatttccttcatgcgggcaactaatagaaaattaccatcacacaagatctcaggacttttctatggctgtgatttcgtagccctctgagcggccgtgctctgaccaatagaac

SEQ ID NO: 176201 - DNA, 399 bp, Zea Mays
ggaggcactatctaattgggaacaaatgccacatcttcactgatcacaagagtctgaagtatatcttcactcagccagacctcaacctccgtcaaagaagatggcttgaactaatcaaagattatgaccttgagatccattaccaccccggaaaggccaacgtggtagcagacgccctcagccgaaaacctttcgggataaaaggaaccaactttttagaagattggaagaaggaatcagctcagctgaatgcatgtctgggagacaacggtagcctagaagtcaagccaatgctagaagacctcatatgcaaggctcaacgcctggacacggagacagcgagacttatggaaaaagctcacaaagaacaacttccgaaccttaggacagatgaataag

SEQ ID NO: 176202 - DNA, 490 bp, Zea Mays
cacctacgcgctttatagagtgcactggtctggtaacgctttgagcacacagccaattgttctactagtgtaaattagtgtagctttacttctagttcatacctaggttttgttcatttatcaggttcaaccatatgtttgtgtcaccttatcagcctgtcaaagcttttgtatatgctgcttagaatagccctatcgcttatcttgctgctattcaaatctatggtaaacaatggttgtcacttctttcacagcacaaggagaaagcatggttttcaagttcagtgaagtcgagattgcagtactttggaccacagccaggcattccggttctagatgatgagcatgtgatgatgagcatgttaagggcgttcatctcgatcctttagctggtccagtagatgccttttgccttctggttcttgatccggaaaaggttaggcatccctttttttcactttcctgttgttgctctcatgtattgtactac

SEQ ID NO: 176203 - DNA, 294 bp, Zea Mays
tggcatgcccgttagctcctcgggaaacacgtccggaaagtccgacacaaccttgatagcctcgagcgggttgggctccttactatcaactaaaatctggtgacagactccctccgctgatttaggcatccttagctcggccactacctcttctcctgacggggacttcaatgttacggtcctcttgtcacagctaacatttgcttcatacttcattaaccaattcatccctaggatgacatctatcccgggggtgtctattactattagatcactggggaaccctatccccct

SEQ ID NO: 176204 - DNA, 1896 bp, Zea Mays
gtccaattagtacttgcatgaactaactcaacatgtaattatcatgagtacctccttggactaactttgacatattattatactgtattttactttggaagtcattttctccgttaagatgtgaactttacttctttcgtttatgtgaatttgtgcataatagtaatccatgacttctcaacgatccctgtgccaccaataattcatgaaattccctatatgccatcgtctgtgttggcctgtagggatttcagtgattttgctgtggtacagggataattgcatcgaatttgtgtgtaatccctctgctcaaatttattgacgcggttctttttctatgtaaaacggaggaataaaactcttcatggtcttgatggagcaactttgacaactatgtcttgccttgatgtattcgtagtggctacaagtgctgacaatttttgcaagggccaatgggtggtatccagttactgacgacagggcttgtttagttgattccttgtgagttatccacaggtttgatgcagaaatctgatgtggcccctctgcttagatgtcacgatgtgatccctttgctttagatgtcatggaaaagttgaacctcaagtcacgaggtagaacaacaggacttgatgtgtcattattgggttcctaacaagctgactgtttagtgaggcgcacctcctgtcaggtgggtttccgtacatttctttctgttgggctgtccattgaaagattcctccccatgaaaacgtactgtgtgtggcccgattcgtccagccgctttggtatgaagcttttgcctcgcctttagaaagagtttgaggaaacaaaagtgatcttgtcaacttctttctttttttcatttcagggaactcagattcctattcctccatgcaagagctttacgtccgtccgtttgccacatgagaatggccggctggtttagtcttgaatcatcatcatgattcagtacacatctacctttgctggcgaccaacattagcctggtgcagtgcatggtctgggcttgcatgcatgcaatgcccccgggatctccgttcctatctcttgggttgagatttacatatgaagcatagctgaaaaggttgtggtccgccgcagcagatgctgaaggccccaggtatgtgctggagcgtgtggctgttgcctcgtctcaagtcccggctatatgtccccatgcatgcctacttgtctgctgtcgaaacctctgcggacggacgttgcatcgtttcagaattacgtcacatggtcatctgactgaagagggttcacatgacgattcatcggtgcagcttggcgtggaagcaggcatgtgagctgtgtgcccctctacgcctgggcgtcgtcacatgaccaggtgaccgaccgtgacgcctgtttctccctacagcagtcaagtttgttctgtcgatcatatgatggtgttcaattccttggagcaaattacccctctcccgggccccggcagtaaatacacggttcgtgctctattgtttatttgcgtgtggaaggaggtggttcagatgacccccccccccccccccccggatttaccgagaatcccggccgaggtgtgtgtgtatgtgtggtggttatcttgattcgccaagtattactattactgtcactgtcagtctcgaaaggaaagaaagcgagacgaaattatggactgggcgacttgtgcgcctcaacaggtactctgtgcttcacgtcttgggaactgctggataggttcattttacgtgtctatctgcgggtgaaaatccttcctctgggaatcttgtcgtggctaatttgtcgcttacgattgcaattactccctccgtttgcacaaaaaagaaatgcagttttaagtgcagtcgttattcgctt

SEQ ID NO: 176205 - DNA, 361 bp, Zea Mays
tgcaggtgacaaagaagacgatacgaccaagggaaaagtaggtacaatacaatgctcagattgagatggaaaagagaatattttaaagacttgtataagataaacatcaaggtaatatatagaggtgataaggataaaggtgataatgttgaaaaacataatccatggacagagttaaggcaagactcgcaaactgacgaagtggagaaaacaaacaaggataagataagcgaggttccaacagaagagttgaagtaaaaattcattaccgaaggaagttacgaggaattaacgagatcaccaaggatgtgcgaaataagatgaatgctcatggatcattgagaaacaagggtggtcaagg

SEQ ID NO: 176206 - DNA, 308 bp, Zea Mays
gctgggtcaagggtgacccgtttatagccgatgtgtttggcaagggtggctctgtattagactctcgtgatggaaagctaggagcagttgatttctcgtatgaacgtagatgcattttaatagattcatctacatattgctttaaccgatctcctcgatgatccatgaaagtcgtaagagatagatctggagcacttacagcgggaccttgaagtggaggcaggagagattccatatcgatctccccttgacggatgatcttctggtggcgatccaccgtgaagtgtgacaaatacttttccgccgcc

SEQ ID NO: 176207 - DNA, 837 bp, Zea Mays
gcttatttttaacatatttgttatgaacaatggattgccacaaaccactagaattttctagtctccaaatccattttgccagcaaagcttcattcattttttgcaaatccagaacaccaagaccacccatatttttgggagaacagactaaattccattcaaccaaatggtattttttctggttatggccaccctgccataataaccttttcctaaagaaattcattttttcagcacgaccttggggcatttgtacaaagagagcatatacaaggggacattggtgaggctgctgttgatcaaaactaatcgaccccccaaactgagaaaccgaccttgccaggagcccaatttgttctcaatttttccaattatgggatcccacaaagatttgcacagcttcttgttatcaattggaacccctaaatatttcatagggagaccactgggaggacaagtaaagatgtcagcatacagatgttctttgttacaagcatttcccaaccaaataatttcacttttatgaaaattaatcttaaggccagacatctgttcaaagatacaaagaataaacttcaggtttctagcattttccagatcatcttgaaacagaaaaatagtgtcatcggcatattgtaaacaacagcagccaccagaaataatatgtggaatgagacctttgataataccttcatctttagctttttgaatcaggcaagcaagaccatcagcagccacattaaaaaggagtggggaaaaaggatcaccttggcgcacacccttatgagttttaaagtagggtcctaccacatcattagttcggatagcaactttacc

SEQ ID NO: 176208 - DNA, 465 bp, Zea Mays
acaaggttgcattagtctcatcctcactttgttgcatcccttttaagaagtgtctatgcttaattatacatttttgggcctgttccggtttgtatcttgggtacaatgatttagaaactagtatgtttttatttatcttgcttaccccaacttgctgggactaaaaggctttgttgttgttgaatgctttttatcttgccctctgaatctaaaatatatatatcaggtaaatgatatggtattttctgttatgcaactgcagacatttgtagcttaatgatccattcataaatatatattgtttccttcagttcctattgttgttggctagttggtttgtgccatgacaattgatgcttcccatgttggggttacatgaaacatgatatcataggaaatgcaaacttagtgttttgaatacattattgagattttgcgttccttttttccaagctccaagatgcc

SEQ ID NO: 176209 - DNA, 337 bp, Zea Mays
gacgtcagacgcttgcaagacgagctttctgaatgggatctggcggttgattgggccgtcaactcacgttcaatttcttgggaccacaaagccaaagctcgtgctcgtgtgactgagcttagtgtggccctcgacaacttgcaagtatagtgcaatactttacatgaggaagtgcatgtattgtatgcccgactacacccagacgtgccttccgacactgctatgggagccagaccgtcaggaacaacaaacaaaggacttgacgaggagttggacctttttcagccccctccttccatgaacctgactgatgaatggtctccagcggcaggaaatg

SEQ ID NO: 176210 - DNA, 502 bp, Zea Mays
tgaattctcacatagatcccaactttctatgtgcccatatatgtacgctgcggtggtgagattgggaacatacctaatgtacgcatgggaaatctttcatggattcccacgtactaaaaacataggggaacttgtacatgcagtacacgtagttaatcacaagtcaggagcgtacaaaacttcctgactccaaccataactagttggaaatgacaattcttactgatggtcattaatgatctgaaattttcgaatctatcacatattcatcatatcctttatggatatcattctgaataccaagacaaacaatcatcattgtaagcacatttggtaaattcagtagtgtggaggctaatgtgctcaagcttgagacattattacttaatggtcatgtgttgtccgaaggacacacttgaggtcatcatatagatgcaccaaagaaccatataaagacttcaatgtccataccatctttgtaatggaccacactcgttctttt

SEQ ID NO: 176211 - DNA, 789 bp, Zea Mays
cacgacgtgttcccggcgatctaaggggtcctagtctaattggcggggtcggggagcatcagggacacacaagtacactgaaatgaaagagcagagggtatgaggggacctgagatgagctagccacggcgaggcctctttcacggtggcggaaagcagatttgggggaaatctgaaattggcgagctctggtgagcaattggagacatggcttggtggtttggtgcttgactaccctacggacccgtcggtgtgcttaatttatagtgtgcttgagcggtggtgcttaatttggatgaattgcgctggcgaccgagaggggaatgagtcacgatggcgatctactgtgacaatcgcagagcgactgaactacgactgtcattggatggtcactacggctcataccgacgcgataaacttcctaaggcgtggcgtcctcacggtgaacggcgaacacgccggtgattgccgctcggccacgtcgccggtgtgtactgatgaaccatcaagcacacagtacattccagcccatccgcggcaagatctttcaccccgtgatcgttatcatcgtttaatttagcgtgaatcacggcgatagcacgaatccgcgcgcgtggtcgctggcggcgaggtctctgacctggcgatccaatccggtcactgtaccatcgtgaagcttcatcagctggcctgacagagcatgcttgggatcgattttgctctatattttatgtgatgactcaaccaatactctgcatcaaagtcgaagcctgataaaccagctctaac

SEQ ID NO: 176212 - DNA, 530 bp, Zea Mays
atcaaattgaaggattcaatacaacatttgggacttaggctggctccagcaagagccggtaaatggttctctacgctaaatctggcggtcagcgacctcctgtatccacccaacaacgaacggcaaaaggtccggtaaatttagagcgcgtgaccagagactgtaaatgtggcgaatctcagacgtccgctatacactgtctctctccctcccgcgcggagacggaagcttcctctcgcgccctcttcctgtagcaaagctctcgtcaacgacgccggtaggatcctggcggatgtactcggacacctctgcgaagctgggatccaaggtctcgaggttgggcgggttcggcgacggaccactcgccgccggtggaagcttggagacgagaaaaggaagcgcagagatccagggtctcgaggttgtcgtcctctgtttggtgattttccagcgcgcgcagctccggctcgttcccaatggtggtcgtggtcgcctctccctggcgcgctctgcccccatcgccgcgcgcc

SEQ ID NO: 176213 - DNA, 1062 bp, Zea Mays
atctggaccgttcgatcaaacgtggatggctcggattagatccacgcctcacccgaaccggtacgcatctacagccgttggatccgagatctgcggtctgagtttaatgaagctcgggccacccagaaccgaccgatccgatctaacggtcccgatcgatcacgcgaaagggtacgccctgatctaatcttagccgttcatcgccgaatcgacgggcgcgaatctctctcctcccccccgacctaccaagacggcggcgccgccgcgattcccacccggttgaactccggcgaggtggaatcggtgttccccaggtgctaagcctcaaattgaatcgagatttaccatgcgggaggcgggacgaacacgagggatggctttcttaccgaggatgcgcagtgcaggggcccggccacggtgtcgcgcgggcaggcagagaagcacgtcgacggcgagaaattaacagccctccgcaggcgctccttgccaacggatggttcctacacgtgtggcgggggcgtgtggagttgcagaccaattcgccgcgaccgataatccgaccaaggtccgattcaacggtggcggcgcggctccaagcttgcggcaggactcccctctcccagaactgagttttcagtggcgccagagggattaggagttgggtttggctcacagcgcgagttgcccaggcctaaatacccaaggcgaagccgcaacggcatcaccgggattatgggcacggcgagatcagccatgcgggtcttgcgcgaggtggttgaagacgacccctgacatcccgggcccacgcgccaacgagacaagcgaggaagccgagtgcgccagtgaacgcgcgatggagaggctggcagccgggtcccgcgagacagaggcgcgcgcaggcgttgggccacgcagggggaaactcaagttgggccgaaatggagtctgccggcccaggtaaggatttatccttttccctttttattttctgttttcttttcttttacttttgaatctaagttttgaatttcaaatttgtgatgaacttgtactcaaattttt

SEQ ID NO: 176214 - DNA, 408 bp, Zea Mays
atttggtacagcttgctagctactctaaaaacctggctcgactctggcgagccgctctaatccgagtcccgagctcgaaccaacttgtgaacctcgaaccaactagtgattagcatcatctgccttttggttagttgggatatattacctaccgagcagaaaaataaatgcagcctctgtgagcatcgttaatttgttctgtcctccacagcagttcataccgaagggagaacagatttttgccaccgcccatccattgccacccacgtaaatgacgtccattttctcggcttgaaagagccagcttcgcttcaccgccacacacggcaaattccacctttttgactccgaaaacaaccctccgatgacggcagtgaacggcaatgcaacgaatttgttcgtggtgat

SEQ ID NO: 176215 - DNA, 537 bp, Zea Mays
atctttgtttatttgacttatgactaccagtgaatcaccatacaccatcaacttcttgatgctgagtgaaactacgatgtttagcccgtggaccagcgcttcgtactctactgcatttttggatgctagaaacaaaagctagagggcatacttgagtttttcacctctaggagcaataaagagaatccctgcccccactccttgcagcttcagcgagccatcaaagtacattctccacagttcagcaacctctgggctttccgtgacctggtgctcagtccattctaatacaaagtcaaccaatgtctgagtctttatcgccgtgaggggtcggaactctatgtcatgagccccgagctcgtacgcccacttggctattcttccaatagattctttgttgtgaagaatatcacctatcggaaatcctgtgactactatgactttgtggtcgtcaaagtagtgccggagcttatgagcggttagaagtaccgcgtacagtagcttttggacttgaggataccttatctttgagggccc

SEQ ID NO: 176216 - DNA, 458 bp, Zea Mays
tccttatcgtcgtttgagctgattgtcgggttctccttttgcagtgtattttcgcgtggtcaagggctagggcggaggcgcagctgtccgccctggagcagctctgtgtgggagccgcccattctgaagtaaagctgtgtgagcttgccgagctccgctccaggaccgaacgacttgagagtgaggcggtccaactacgctcctctgagggtgagggtgccaaggtcgaagccgatcacctccgggaagaggagacccaacttcaggggagcctttgtgaggtgagtctccgggttagggaggccgagtcgtcccttggtgaggccaatgtccacctagagagggaggatgcggagctttcgtgagagtgcgacgctactagaggtaggtcttttccatactcttatgccttctgttgttggttgcttttgccttccctcctcctcagagctccggag

SEQ ID NO: 176217 - DNA, 311 bp, Zea Mays
tatatattgacacaaaaaaacagttttaactaggaatcaggagttttagctaggctcagatgaagacatcttacacaaagcatgtgcatgtactaattaagcttccaagtcaaagcatcagtcttaaacatagaacagaacagaggagatggaggaggagcagataaatagcaaagggggagactggaagactggaggagcagcagaactatggcgtcgctgaccctggcgggcggcggctggggaagacaggaagagccgaagaggacaaacagacaggtggcgacggcagacctggtcgactgtggaaa

SEQ ID NO: 176218 - DNA, 2299 bp, Zea Mays
tttttagatgacatcttgatttacagtgctaatctggaagagcattactatcatctcaggctagtgttcaccaagctcagggagcacaagtttttcttgaaatacaagaagtgtgcatttgtgaaacaagagttgaagtatttgggccatgtgatttctagggaaggagttgccactgatccctccaaaacggcagctatgttggactggcctcaacctaaaaatatcactgaattaaggggtttcttgggactcacaggctactacaggaaatttgtgagtgggtatggagtgatagccaggcctcttaccagattattgcagaaacaacatgggttccagtggtgtgaagaagctcagaccgcttttgaggctttgaaggtagctatgtccactactcccgtgttagcattgcctagatttgatcttccatttgtagtggagactgatgcatgtgatctgggactgggggctgtgcttatgcaacaaggcaaacctatagcctatctcagcaaggctttaggggaaaggaacaggcacctgtccatatatgacaaggaattcctagccttgatcatggctgtggaaaaatggaggcagtatttacagaggagtccttttgtgattaaaactgatcacaagtctttaacctttctgggggatcaacaactgcagtctgacctacaaaggaaggcaatggctagattgatgggtctgcagttccaaattgtatacaaaaagggcaaagaaaatttggtggctgatgctctctccagggtgggaactgtgatggcattagctgctgtttcggaagtgcaaccaatctgggtgcaagaggtgatcaactcatatgtcacagatgcagaagcccaagagctcatcacacaactgttgattaagagtccgaatgaggaagggttcagtttgcagcaaggcattatcaggagggaggggaagatctggattgggtctaattctgccctgagaactaagttgattgctgctcttcatgacagtgctgcagggggtcactcagggatgcatgcaacataccaaagggtcaaaggagtgttctggtggaaaggaatgaagacagatgtcattctgtttgtgcagcagtgtgcaacttgccagcaggccaaggctgagagaactcatccagcaggacttctccaacctttacctattccaaaaggggcatgggaggatgtcactatggatttcattgaaggtctgccgaggtctgaagggtttgacacaatcatggtgattgttgatcgctttacaaagtatgggcacttccttccactaaagcatccttttactgcttcaggggtggctcacatttttctggagcaagtagtgaagttgcatgggttgcctaaatccatagttttagacagggataaggttttcactagctctttttggaagcacctgttccagctcatggatgttaagttacttatgtccactgcttaccacccacaaacggatggacagagtgaacgtgtgaaccaatgtcttgagatgtatctcaggtgtgcagtcaattcccaaccctcaaagtggaaatcttggttggccttagcagagctctggtataacaccacttttcatacagctcttggttgtactccattcaaagctctttatgggtatgaggctcctgtgttagcagttcggtatacaagtgtggtggaggaccggtctgtgcaagactggttggctgataggactgaattctctagtctgctcaaggaacaattggccagagcacagaatagaatgaaacagctggctgacaaaggaaggattcacagggagtttcagataggtgaaaaagtgttgttgaagcttcaaccttatgctcagcagactgtggtgaatcgaccatgtcccaaactagctttcaagttttttggaccatacacagttgtcgctcgcgttgggccagttgcttataaactggggttacctgcagatgcccaagttcacccggtgttccacgtttctcagctcaagccttttcatcccaattatacaccggtattcacacatctgcccaggttggctgatctctctaaaacaggggtagttcctattgcagtcctggatcgtcgtttggtgcgcaaaggcagtcaggctgttccacaagttttgattcaatggtcagacattccaaaggaagctgctacctgggaagactattatgtggtaaagaacaggttccccgatgtagtcgcttggggtcaagcggatattgaagccgggggagttgtcacagacagtgctatgg

SEQ ID NO: 176219 - DNA, 625 bp, Zea Mays
cacggcataaaccaccgtaagtagtgcttctatgagtttgtggcacttagggcatcattatttacttaggaattcgatgtttgggagctggacacccagtgcggcgctcgccggtgagccatccgccttgagtttgggcgccgtcgtgcttgtgcctgggttggggggaagaagaaatcgtcgtcgtccgatcctctatggagggtcaagattagagctaaataccccttcgcgtaggagtagatcctggccgttggcgccagatcgtaagcatcacattagatcgcgagtaattgaacctgaaccgtagatctttgatccgacgatcgggcgagcgtaccggttcatttaatggccagtctaatctgcgccctcgactttggatccgacgatcagaaaaccccataccctttcgcatagctcatcttgcaaaagagtcctcgtagtattgatgaataaacccgcagtccaccctgtattattctctgtgtctcggggtttttatctaggcacccctgcgctttccagtatttgaggcccagtcctgatagttgataaaaccaggaaaactatttagaaaatagtttttagttcatatttaaatgcagaaacttgtttaattcat

SEQ ID NO: 176220 - DNA, 547 bp, Zea Mays
cagatattagtacgagatgggatacgagaaggaagcactcaagagatcatgattactgagcttctcagagacacgagggaaccaagacaacagcaacatccattgaacctaatggacacactgtctagagaaaaaaatcgataaaacagtgtcatgatcctcagagaagagtatgagaacgatcatattgagatattagactgatccacatttgatacatgagaacaggttatagcagataaccagataacggagcagaatcaatgaaagatccagatattcggatgataaggccacaacatgattcgcaaaggaaaagattactagatccaggcgaaaagagagatcatcaactcagatggcttctaggttgagcagaggagaatttaatgaggattttggacaaggtttcccaaaaaaaaagaatgtgaggctagacatggtttgcgcgaacagacaataaacatttttttacataaacaagtgcacaaggaagctttagtcgatttagaggtcaagctatgggaatctacaagttgtgtaggtg

SEQ ID NO: 176221 - DNA, 818 bp, Zea Mays
gcgaccataaccatacacatttagatcacaacaaacaattcgcagtgattacgagcataaccaagtcatgtaacaagtctgctagctagagcaacaacacagcccgctagacaacatacacgtcggcttgcctattattatcacaattcgagacacaacatatatataacaatcacttaacgcaatcgactcctacttaacatgagttggctaacgacgtgactatttcccaattaccaacctacaccacctttcgccatttttggataacctgcgcgacatacagctagtgtaatacatctcaagttcattcaacccatcaagcacatttcagaaaatttcctgagactacaacgacaatcgatcttatcatgcacataaaagcatcacaagcatatttacggaacctatcggttaactcgatcgacacactacacatgttcttcgcccttcaaaatttatcgcacaactgaaatcatcccacttgccaatgacaccaacaatacctactgatatattattcacatcacgagcacagttacatgccgcatactagtttctaacataatcctcatacaactcataattcaaactaatcactaacaataaatcacgcacgacagatttcgcctcaaccggttaatttatttggaacaccgcctagcgtaccactagtaccccgcattttgactcgacttataaacatagaggaagcgatgactacttcggcatgtcactacctctctattcaagcaaagaaaatttccacctacaacgaccgaacctacccatcgagcacaccttatattttcccgtct

SEQ ID NO: 176222 - DNA, 859 bp, Zea Mays
agttcatatggccacaggtggtggagctgaaggttggaatgcactgtgaaaggtgcgtcaaggccatcaagaaggcgatcagaacgatcgacggtaacaagccggccatcaacccggttctttcctacaccacaaaaaaccgctcgctctgagctcttgtgctgttgaccatgcttgcggtcgtgcgcatacagatatggagagctatcacctcgagacggagataaacaaggccacggtgacagggaaggttaccccggaggaagccgtcagcagggcactccgcaagagctatcactcaatcactctgagcttttctacaccagcgcatgataaacacgcgcacgcagctgtttgagaacgtgtccaccaggctgccttgcctaacagcgtcctagtagccttccatccttgaccaattctgctctgcaggcgttgattcagccgtgtgaccgtgtctcggctgacctgcctccattggccccgacatccgctgcaggcactggcctgcaccgccgcttccccgaacggcacggccgtccgtcccgttcccgtcgcgccggctcgttcgccagaacgctggcttgcggcggtcgttcgtttgaacagttgtgcatgcagctgcggcatgcatggggtgcctttgccatgccgcactcgtcagatcagatgccgcgtgaacgaacgctgtccatgcaaaagcaagctcggaagctcccagagtcttcgcccgtacgtctcgcgtcttttctcgtctactactagctagcaaccatttaacgacgagagtgccgtatcgcggcgttttgccttgcttgcgcgaaaagaagcacggcgcggtgcactgacagagacagag

SEQ ID NO: 176223 - DNA, 1268 bp, Zea Mays
aagggaagagagaagaaaagaaaatataaaagaaaaggaaaaataataaggaaaactgcacttgggccctttcttcctcgcccggcccaatttgtgtttcatctgcgtagcccagttccacttcgccaaaccctagccatcggtttcctctcgccgccatgcgggcccatgtggccagcctcaccgcgcgcacctggattcctcctaccctcactagtgcgtggatcctgcacgtcatcgttctcatccgcgctcgcacaaaatccacgcgggttggttctcagttctcacctccgagatcgcagcgaccgcaactaagcacctggtgatggggcccatgagtcagccaactctcccttgcacacgcgctcacccagtgcaccagaaccgtgggtccgagtcgtcagccgcgaccgcacccacctcgccgctaatggcggacgcgcgtcgggaaattggggataggtagttgaagaccgggtcgccctgctccttggactataagagctctaccatcgtaaccctctcctccgcatgtgccaacagcctctaccctaacgccgtagtccatcgccgagaacacagagagaggagtggaggtctagggcgccgccgacgtcgtctgcggtcgtcacctccgttcagtactcgcgtacaaattccggggaagcttcgtgtcgtgagggacctgggtagacctctcgcatgggaattggccggactcgcggggaatttctctctgtcgctcaaggttcgccgccgaccgcatcacaacgtggctgggaacctccgcaccataaacaccggtaagggtcttctagattgtctcacatactttggtagaccgtgtaggatcgatcggatttaggatcaaggctcttgggtgtcggtttggccaactccggcaatggcgcggccgtggggactggggaggctctgcgccgccgtggtttgggtctgctgagcggctgggaggagaaacgcacatgtgtcattgatcaaggcatcaacgaccaggattagagaaccgtaccgctttgtgcattgactcctggccgttggatccaattctggtggccagaattaaaaccgcgatacccccttagcagcatttagatctggccgttgatcggcaagccaatggtgtagaccagacttgagttaagaatagtatggaccgttggatcgaaatccaatgacttcactcagtggccaatccaaatctgatctagcgcactcatttctaatcgtgtgtctctggatggagg

SEQ ID NO: 176224 - DNA, 331 bp, Zea Mays
ctggtatcgtgctgattggattactgtgttcaaccgttcttcctcgagtacatcaatgtcctccagcctggtggcttcgacttctgctatgctttcgaagatcaaccttggcgctccgaacttgaggtcggctggtaatactgcctctaacccatagaccatgaagaaaggagtgtttccatgcagagctcggctaggctgggttcttaggctccagacgacatagggcaattctcttatccattttcctgcgaacttttcattcttatcgaagacctttttcctgagtgcttccagtatcatcccgttggctcactcaacctgcccgttg

SEQ ID NO: 176225 - DNA, 876 bp, Zea Mays
ctttggcttcggcaccatgtcttggcgtttcgactggcccggctgcaggaaccttcggcaattcagtcagttcttccctaggggtggcaggagcgggttgttctgcctcaacagtggaagatgttccttctccaagttttggcaatatggttgtttcgatgtatcttggctggtgcattaagaccttgatctttttgcccttcggcacaacagagatggccgaagtggcagttttccttttctttccccgctttcgcgagggatagctataatcagagtatacgaaattttttcttcaaaaactatattcgatcttttctagcttcagccttcgaaggacaaggtcattttatcatctttggcccttgtgtaggccccaagcaattcgtcactggttgcttcaatactgctcaaccactcatcgtttggctcatcaaactcgcctctatatctgaaggtatattttaaatagaccaggccgccctgactagacccggcagcagcctccttcggcatctcccattcactcacaagcggccatactctgtaggtgatgtgttcttgaaccaagtctcttgtgccaataaaagtacacacagtgttgaagcttctctggcatgcttctatatcattcccaagagcagtggctagcctgctgatgccaaagcgagaccaaatgggacgttgaataattccttttatatcatccctctcaactaaattattcttcacataaaatcattcttccatccaggctcctggccacctttttcaaaatgttggaactggatagcttacatcaggacgaggcacaaagccataacaaccaaagttgttgtgatactgctccttgctagtagccttcgtctcatacaa

SEQ ID NO: 176226 - DNA, 1193 bp, Zea Mays
gcgttgagcgcggcagagctccggcgagctcctggaccggccaatcggggcaaggataggtgctactgagcggtctacaccaaattcatggcctatcaatggtttccccccaatcaatttcatatttggtgatctattttgctctgtccacgaggacagcgaaagctatagacattagttcgtgttcccagtgattggtgggcttttagtttaattggacggtttggagagcatcaccagcatacagggacatgagaacaacgcgcgaattggacggtgccttaccataacggactgaccacggtggagtggtgctttacggtggcggagaccaatttaggggaaaaggggaattctccggctatggtggacaatcgagttgaagaacgggtgtgtgggcttcgtgatgacctaacgcagctgcccgggggctcaatttataggcagcttcgtcggtggcgcttaatttggccggaccgtgcgggcggccggagatgaggaagaaccttggcgcggtgaatacgtgtccagtggcgtggcagttgttccggcgatcaacggggagttagagggagtcacggtgatgtggtggcgcggttgggacacgcggtgaacaacggcgatggcacgacgacggtgagcagctttacccgcgggcggtgagcaagggggaatgaactatggctagccggagtggcttccaggtcaccggcggcgaagatatttgaccccgcgatgttatcgacttaccccgagcgtgaatcttgacgccggcgacgcgaatcacggcgggaaaggttaccggcggcgggatttttctgccgcgaccgatctgatccgctgggggacactgtaccatcgcgctgcttcatcagagcttctgacagtcaatgtttgggctcaattttctctcaaatttccatggcaacctatctgaggctctgtagcaaatttgtagagctacaaaccagcaacacttcgactataggggttgaactcatttgagcactggatcaaggtttaattcacactcaaagttgaccctgttacactgaaaagctgaatttcagaatgaaaccagcctgacagtcaagctttgagcataattatctctaatattttctcaacaactatgctcacactcttaagcaaagttgttctccttagtttggtctacaattttgatgtggtga

SEQ ID NO: 176227 - DNA, 989 bp, Zea Mays
atcctcaagcccagaagctactgtatgcggtacttctcactgcgcgagagctacgtcagtacttcgacgatcacaaagtcatagtagtcacaagttttccaataggagacatagtccgcaacagataagcagtgggaaggacagccaagtgggcatgccaactcggagctcacgacataaagttttgaccccacactacaatcaaaacccaggctctggtggacttcatatcagaatggacaaagcatcaggttcctgagaacccctagaggtttggaatatgtacttcaacaaatcattaaattgcaaggggcaggggctgggatccttttcatttcccctagagggggccaactcaagtatgcacttcaactcgtgttcccatcctccaacaacgcagcagagtacgaggccttgatacatgggctcaacattgttgtgtcgctcgacatcaagagactgatggtatatggtgactccctagttgttatgggctaggtcaacaaagactgggattgctccactgattcaatgggcagctactacactgcggtcaggaaaatcgaagataaattcgaagtcctagaattctaccacatagagagggatcgaaacgcagcagcagatgcactgtcaaaactaggggcaagccgggcacaagttccaccagacatttatgtccaatagatacaacatccaagcaccacaccaggaccaacggaagaatgcaaggcagtggagaaggtagagccagacccgaaggaatggagggaaccaattatcaaatacatcaaaaatgaggaggaactagatgacaaggccactaccgagcgcattgcaaggcaatcagcccattatgccatcataggaggattgctatataggagaggggcaatcggtgtcctcatgaaatgcatttactcaaccatgcgaaagcatctgctggaggaaatccacgcagggaaatgtggaatacatgcaatatcaag

SEQ ID NO: 176228 - DNA, 449 bp, Zea Mays
gttcgaccacgactgacactcgggagagcgctctgactgcgccgcacatgccacgagctccggtcggctcgaccgcacgcccaaccccatgaccgtactcgagccctcacctataagaagccccagtcctcggccttgccctctcgcacaccccataccttttaccagcgactggacgatagtaatcactagagcaccgagcgtggtgttgtccgcaagcttgctgacgcatcaaccagctcagaccagccactccagcctaaccccttccagtctaactccccgaccagcttctctagaggctagcgaagtttcccagccactcagatcgaacgatacctcaccagagaagccataacacctcgctggacttgtcccttccaccggttccctcggttcatgtaatctaaccatccattcgttgattccttgcacacacacactccctg

SEQ ID NO: 176229 - DNA, 414 bp, Zea Mays
gtggaggttgagtgggcgttctagagggtttgaataaggcatcgagggtgggcactgggcagttgccggagtccccacaacgtgggcgcgcccacacctcgcgagtggaggaatagttatgggaggggagggaggggagctgacgtgcaggccagcagcatgcgcgtccgcgagcacgagtgcggctgatgggtcgggcgcgcatgaaatggtcttgcaggtgaatataggtgaggtattcgggcatagaggccaggtggttacggttgcgtccgagtgagactagcatgcacgaaaaggacaacggattgaggagacgaagccgacgcgcgagcttggaatgacaacgagaggaacaagtgaggggaaaacggttgcgcgcacaacacgtgaggcactacacgacgaggtgag

SEQ ID NO: 176230 - DNA, 489 bp, Zea Mays
tccactgcgccagggttctcctttatctccggccgccagctctgcccgaccaaattgaacgccaccgttgaagccctctatatattgatggcccgggcagctgcgctacctcatcgcgaaaccagagcccccactcccaccctcaatcgttctccagagttcaccaatttcgaattctccccaaatcagttctccgccaccccgaaatccacttcaccacggccagccctttcccggtcagttcatactcctctctccctcgtttaagatttctcttacgactattatgcttgtcgacccacacaattgggttaggaaccctctggtcgccgggaacgcgacggtcttgccgtgatgctcacggtcaccgtgccccgagcaaaccaataggccttagatgaaattgggttgggggaaatggtcgggatggatccatttgtgtgtcagccgctcagagaccctagtcattgccccattcggccggtacag

SEQ ID NO: 176231 - DNA, 807 bp, Zea Mays
ggacgatgtctcgttgaggatgccgccgccgccggaggcgtagttgacgccgttcttgaagatggtgtccgcgtccagcgccgggtccaggaacgcgggcggccgcggcaggcccatcttgtcgcccacgatgtcggcgacggtgcggccgttgcagaacctgccgttgggcatgccgcggccgaggtcgatgccgtaccacgggagcgcggcgcgggcgaggctcttggtcaggtagttgttgttgcccacgtcggacagcgagtcgccgaagatgaactgcaccacgtcgccgcggcacagccccaggaccagcgccgtggccagggcagctgccagcggcgccttcctatcccaagccatcgtgttgtccggttctctcctaggaaacgagacgcgagggcgagcgagcgaggctctctgtcacgacgaggtagccggtcgagaaaggaggcctcttattagcagccgacgatctgccggtgcttctaatggtttgtcagggtttgactggatccgcgtgagcaggtttggaggttcgggatggtgatcagttcttgggttttgaagcattgtcttgaggtatatggatgtggtttgatgcacctaccaacctgggaagtggggtggcaagtagaggagttggcctaacatcagtgctcgcttactcatcagctggtctctatcagtgtcagcccagcagcgacttgcaaataaaggaacaaggcaatttcaatttgttcagatgaatcctagcacgattactggaaaacctcttgtaatattgttaacgagggggcatacttg

SEQ ID NO: 176232 - DNA, 1018 bp, Zea Mays
agggtggcaactcaagagcggcattgctgtgttgctgttctccgagcccatcgaatgcagcagagagtctgtccacgcttcgctttggaaccaggcatgccagtcaaccagtttcacacctgtaccgcattgttgtaattcattgctctctatggtaaacaccctttcaggacaaagctcataaaggctcctccgaaattgattcctgagtcagtggataacaccaagaagcccgccgtcgagactcatgatcaagatgatctgcgggacaggatactgagcaaggtctgtagcaatgaacccgaggtgatcggttatattttagccttcatttctcgttgccagcatcttactctgaaccaaacttgtgttcagctaaggttgagcctgaaggaggaggatgtggatttgttagaagaactgttcgtgcaggaaggcatcatcttcgatgccagttccgtcgtggacatcgactcggtgttccgggacactgcaagcgaggagatctcgttgctgatgcaagccgtcgaggagctcaaagaaactgtggaagaggtagcgcaaaaacgtccaaacctcccttgtgtccatctgcctgccgggacacgataatgttctaaatctgataggcgttgcagctcacggacgagaacgaaaagctaagacgtagcctccaagtcgcacaggagatgaccactcaggcccagctcgccgccgccgccgccgtcgctggagctgcccggagccgtactctgcttgatttcgtgccggcagtcctcttccggccatttgggtttgtaccagagtgacgacagggtcaatgcccattgtcctgtgaggctgtgaagaaccatacacttgggatatagtagatcacgaccatggtggtacacagtatataatagttgcaatacagatactagactactgatatccttggaacttcagtctgtttgaaatacggcgagaatactgatagctatgtcatgtgtatcggatatttttcgtttttttgtgt

SEQ ID NO: 176233 - DNA, 953 bp, Zea Mays
ggaaaattgtaaaaatgtgtaaagtaagatggagtcatcacacaatagatggggctacatgggaaacaaaagatgatcctagagttaactatcctagtcactgccaccaaagccttcctttcaattaagcgactctagggtataaattcaaaccttgtacaacttcctactcacatttcatcgaacgctaagccagtagaggccctagtcatctgcaaccagtgttgctgcagccattgcctaagctactaagagtgttccactctcaccaatgcattctcacctttgtctccggcacaattagcttcatctacacctggtacccccgcaatgagcatcaacgtgaaatataccgcctcccacccatcaaaccatgtggagcgagccccaccacgactatcgcaccattgccagttgcttctaatctaggcccacctctctatttgccaccaacatcgttgcctgtaggtaacaagtttgttgtgcctttcctcgcattttattaatcccatcaaacccttcaattgctcaacatagtagtttcgagccgcggtgaacaccctcacccaatcagacactcccaattgatctgccataataattttgtgctcaatgcgtttgccatggcctataatggtgtggcaacaaatcatagcccctgcccaaccacacactgcttggtctagcatagccgacaagctcgtcgttgtagagactgtcatcgttgtttattcatcgcctgcatagcccactttataatcctgagtattcacatgcgatccaacaactatacacccacgataccagtaagccgatggtcaaccaggcgatgatagcatcactttttcaagagacccctatttaactagaatcaactcattgtccactctagttctatccatggactacaaatatagttttcaaaccctgcttgtttaaaaacaaaataaaat

SEQ ID NO: 176234 - DNA, 591 bp, Zea Mays
caataaaatacatcaggttctgaggaactgttagactttagactccaatactccacaacctaaatagacgataaatgatattaattcaaaacagacgaggcggcgaggtctgctgtcgtcgtgtcgaccggcggcgaggtctgcgtgctgtctgatgcctgctacgaggtcggtcggcgaccttggaccactgcagttggacgacgcgctagacctagatagacatggacagttggacacttggtggcggtggacttggaccgctcggtggcggctgtagcttgtagggtttgccctgtattgctgcccgcctgcctgtacgtgggagcatgggcggtggccggtgggtgggctggttacttgggtttcggtagttgactagttggttacttggtttagtgactcggtgggtgggctgtgaacgcatgtaggctggcacttgggctaatgggttgtacgcatgtatgctgtttgttttgtaggcccctgtagcttgctaaatatttccgggttcgggttattcgggtaccggcaggtggtacccgaactgcctagaataatttcgggtttcataagttggtacccgaaatt

SEQ ID NO: 176235 - DNA, 679 bp, Zea Mays
ggcggactagggtggggccttcgactcccctgctccctggcccctgcagcactgctctatccatcccattcccgtcccatccactcccccataatgatcgtgtacgcatattcccacctgtttcgttgtgcgttctcacactcgctcgcatcagtcagtactactacaatgctactcctcctcaagcattcatcatatacacaaacaaacaaacaaaaaaggagaaaaaaaaacacgtagcccggccggccccttggctcatcaactatacttgggtcaagtagtcacttctacaaccaatatatgtgcgtttacacattgtataatatagtcagtaagtagggggtggatcgcacacggcgaccttgcaggccgctggaaccgagctgtcacctgcctgcctaccgattgtgccacagtcacgtacgtacggctcacgtagacagaaacagaacgcgacgtagcagcagcctctggcgtcgcgcatatggctcgtcggttcgtctccgacgttttactgtgtccacgtttaaccattcgccggccaaacgtctaaatttcaccgccacggccacgcgttattcctctgaaagtgaaagggatgcgtgtctccctttcagcaggtacgcagacgactcgatctgagccgggacgcatgcacaccgacgacgacgacgcc

SEQ ID NO: 176236 - DNA, 1201 bp, Zea Mays
ctcagttgttaagagaaattttgagataatggagcttgaagttggactgtcaggttattaggtctgaattttcagacaaacagtgcaactcttgagactttgagcatggattcaattatgatccagcatggatctgcccatggcagctatgacaaacttgtagctggttaatagctctccaactttactgcagagcatggagtatgttaccatagggatttgtgagcaaatcgagcctaaatattgattgccaggccaactgaatgagttagcctatggtacagtaacctgcttgggttcagaacacttcaccgtcgtcgatcactcctccgccgcgattcgtgtcgccggcgttaggattcgcgctcggggtgggtggataacgtcacgagatgaaagatctttgtcgtcggtgagatggaggtcactccggtgactcaccatcaccttctcctttctgttttgcggctgagcagataagctcgctggggaaccaccgtcgcacgaccttgcaccacgtatccgagtacctccaccacatcaccgtgattcgttttagcttcccgtcgatcaccggagtagtcgccacgacggttgccacgagttcacttgcaccagtaacctttcccctctccggccgccaccgcgccatcatcaattcaagcgccactgcccctggaatctataaattgagcccaccgttagctccgcaacctcatcacgcaccacaccgtctagtatcgctcccaatcttgcaaccgtgagctccaatttcaagttttccccaattctgttctgaaacaccacagggtcgagctcaccgtggccagtcctccacaggtttaatcataccatccttgttcttgttttagcatctctgtgtgctggtgatgctcaccaactcacccaattaagctaagatcctatgaatcaccgggaacgtgtagattgttagttcatccgcgcgctcaccgtggccagagacattggtgtagttgtttatgaaattaacttggggaaaaccttcactcggccctgaatttggtttagaccaacgtagagcgccagtacttgccccaatcggccgacctacgtgctcgccggagctcgaccgcgcgcgatgccgtcgtggatcaagcagtgtaaagaaatagaaacttagggtcctttctgcagttgtcagtgacgtgctaaatagtgc

SEQ ID NO: 176237 - DNA, 543 bp, Zea Mays
gaactccaatgagagcaacagggtgaaaaaacatagacaagagcacaacaacaacaaagaacgaagaacataagcgcataacaacaacacaacttcctttagagtattcttgcaaatatgggtgtttggatcactttgccttgttgctctaatgcttaggaatgaatcagtagctctttggtgatttggtgactcgaggaggctggttagggggactatttatcgcccaaatgccttaaagagccattaagaaaaacatgctcactctgctctatgatggcacaccgtaccggaccttgtacctcaatctctgaaatcctcattgacgccttccttctgatgttggcactagaccagttcgatgaaccaccagaccctgtgccacgctagctagccattgtgtcgctcattggagcctgagatagtcgttggacctcggtggtctagtgcacactagattaggctgatgtgtctgagtcttctagcgtcttctgtagcgctatctgtgcaagtggtccggcgggcaccaaaccatgatctaat

SEQ ID NO: 176238 - DNA, 624 bp, Zea Mays
tgaggcgaggagtggtgctctgggcacgtaacaaaaagacggagcagggagagccttcaattttatagtgatcactcgtgcgcttcgcgaatttgggatgagagcgttcacagcagtgccctgatttctttttctacggccgagcgtcatggtagacaatggcgcgatggcatggctagctttctacagccatgagagtatgacacaagagcatggacaccatgtagtatagaggcatagtgagggagagccctgccgccggtgacacggtgacatgaagcactcaagggagtgccacgcgacggcctcatcttttacccccccccaactcaatctgcggagcagtgaatctgtccacagttatccactctccccaggtacgaatctcccaggtgagcgcgaatctcattgtaggatcaccagcgttgggttcacagaaccggagatcgttttcagttactgtaccattgcagatcccattcagtacgtctgacagagctacttaaggggccttttctttgatttccatgtgatgagccactaatatgatttcatcaaagttattctcctataaactagcttcaactttgtcacagagatcataatcatttactcactggatca

SEQ ID NO: 176239 - DNA, 656 bp, Zea Mays
ccactattgaatctgtcgacaggagagagggcgtgcgacgtgtggagtggggcgtcggtgttgacctcgcccacgactggcgttcggggatccgtggtgagccatggtgcttcgtgtggattgccggtggatcaccgtagcctgatcggggggaatcgaccctggggtggcccgaatccatcactgtaaacatcgagccgctgcgtcgcgtgggcaacaccaaagtcgctccgatccgcggtgaggaacatcccatatagtttgtcttgctcccctctttgtttcacacgtgttcgcgctaaggttgggttgctggtgcgctgtgccagtcttccctggcatggcctccgccgtgtggatcgggccgcaccaccgctctggtcgtctggggaagaacaagtcgtggccctagatctaggagtgaacggtggtgattagatcacaggagtgttgcgcctcgtccatagatttaggatcggtcggccggtgttgatcggaacccgcatgtgatccaaaccgtagatcagaaatccgatggctatttccgcgcgctggtttaggatatcgacgatctaatctaagccctaggattttgatcggacggcccagatttgagaataccccttcggcccggatgtttcgcaaatgaacccccc

SEQ ID NO: 176240 - DNA, 500 bp, Zea Mays
tccttctcttgcttcctagcttcttgctgatagctagctgtccacactattgatctaatgcttgaggacatgggaaagattaagcaagtagatgaaacaattgtgagggcaagatctttgactacattcctttattcccatacaagggttttagcactcatgaggaaattccttggtaaggatctagtgcgtgctggtattacacgcttttctacaacctatttgaatttgaaaagcatgttaggcaacaagaaagagttaggaaagctgtttagatcagatgaactcaatgaaatgggttacttgaaaaaggataagggaaagaacgctagcaaaatagtgaggtctgatacattttgggaaaatgttgattgtgctgtcaatttttttgaaccactagctaatgtacttagaaggatgaatagtgatgtaccagccatgggtttcttatatggttgtttgttggatgcaaagaatgatattgccaaaagatttaacaa

SEQ ID NO: 176241 - DNA, 611 bp, Zea Mays
ggcggctaaagcgttgtgttcccggcgatcccaggcggttcggttcgattaaagggtcggggagcatcaccaacatgtaagggtgctagaacaagaacgagaagggaatgagaagacctggggaaggctggccgcggtgatgggtagtttacggtggcggagagtcgatttgcggcgaattcaaaattcgcgagctttggcgaaggactgctagcgattagcggtggctgggtgcgcgatgatgttgtgaagctcactacggggtcaatttatagatcctcggggcggtggcgcttaatttgagcggacagtgggggcggccggagatgaggaagaaccctggcgcggtgaatacgtgtccagtggcatggcattaactccggtggtcgacggggagtttagagggagtcacggcgatgcggtggcgaggttaggacacgcggtggacaacagcggtgacacgacgaccatgagcagctgtattcccggcagtgagcaaggggagaagtaccgcggctgaccggggtggcttccagctcgacggcgacgacgatctttctaccccgaagggttatccggttaccagcgggcgttaatcttaacggcggcgg

SEQ ID NO: 176242 - DNA, 704 bp, Zea Mays
tgatgccccaattaactcgcgcgcctccgaaaagggcacgtacgtacgccactacaacaacttgggttgctggtgatgccccatgcaacgtggtcgacatgtttcactccggccgggtctctttggcaaaaggtgtgcttcgactttactactacgtactgtatcagtaccggccgtagcaaaagccggtaaaacccttggatcctggcttcttcacccgtgtcgatctcaagcggccgacttcattgtgcatttctgcccacgtgcgacgtagagctgagaacgggccgggtaccagtaccagcagcggcgaagcacggagagcaatgccaataactgagtgatggtggtgctgttaatttggcacatttcggtgcatgcatacacatgcgccttatctgtttttgtagcattgttcaccaaactagtaagtatactactactagtctctagctgctgctgcgtgattgtgattttggaaacatatatatggacgtccgtccttgcttgtttggccgcaggaaattcgtataattaattaactttagcggttaaaaatcaacaataacatctagtatatcatctatttccaacttcactctacaaacattgtcgtttatagttctgcgtcttcctatttcacactatgtatccactcattgtccagcgtgagggatctcaccaagtactgtaactctttagct

SEQ ID NO: 176243 - DNA, 849 bp, Zea Mays
caggtttatggctgtcaaatttttgtacaagcaagataataaggttatttacaactcttctatatggcttttctatagaaaacatgatttagttcctcaaacatacagcacaacaaaaacaacacgtgcagcccaaaacagcaatttataaattcagcttctatttacttcaaaaattgccgcgttctagatactcaacttattctaacttatatcaaggcacacttaagcattgtcacacaatagatgacgtgacggctacatagtcatgccatcacttcaccccacaatcccaactaacaaaataactgtaaccgaacttggcatttagccgatcgattcctagcccatttttcataccaccactacacgatatgcctaatacgttaaatgacttgttcacaattcacatacatctttaccaaaacattcccacatcgcttgcaacttagcctaagcttcactacacaatttcaggacatctacttaattcatgaatatcatcgtcacacacatcgactcgatttgaattaaccacacatgtctatcacataaatggagcatttcaacaaatatcctaaaacaaactaacttcatcacacatcttgcattacaaccctacttgtcttatttgaagtgtctactcgaaaccatgagcacaatcatacactatatgcgaagcataattttaatgaacgcataatatgcatcgtcacgacttgacctataaatatagagaaagcgatgactactctggcatatcaccacctctctatttaagccaagacaatttctaccatcgactaagagttctaagtattaaataccttactactttacacgcacaat

SEQ ID NO: 176244 - DNA, 345 bp, Zea Mays
ctgcctcggatatggacagtcttttataaaatgaccagacttcccacagttgaagcagccagttgaggaactagggaggacagggaaacgagcaccaggggcactcggctgatttatagaagtgggggcagtggcagggcgaatgaaaacaggctgtttgaatgcataggagggtggatgaggcgaagaacaattctgattaaatggtcggatcaccatcctggttcgcttctcaggtccctgattggacctgtcacctccaaatccctttgattttccttggcctgtattcttggcttctactgccagcaccgtgctgacagctctgttgtacgtaagatccag

SEQ ID NO: 176245 - DNA, 1601 bp, Zea Mays
cttacgagaacatgaagtctctaccacttcatgaacatgaaagatggagatggaagatgtcaattattcctaattctacaatcatagtgggagaggaggatagatcttactaacccaatgataccatggtcgtagtagggggaagataaatcttattagacctaataggttatgcacatcgggctagcgacttttgttcctatgtcgccatattgatcgcctccaaaatagcaaagggatagcacccaccaccaagcaatcatacaaccactacaacatgaagcttgaacctagcgcccatgaagagctccatgatgaacatactattcttgatgcacctacccttggcgtagtcaagtgtgctgcataccttgggtctagttgcatcctaggttgacactcctccaactacaacgagcagaagtctctctgaatggtcgaccatggtgcgccaacaaaggtaaaaagccaagggcatgaataatgtgcacgcaaggcaacgacagtgcgctagtgaacctggccggatttggggtgtggacgctcatgccattagagtcatgttttacagtgaggttggtgaagttgggcgctagtgtggatgagagatgaagctagggcgacaacaaagcgacgtacatgtaaggcagcgtacttgcggcgaccatcagtgccttctaggtgatgtccatgtctacatgtattttgtagaaagctgactagttcatccttgggaaattgtagtcccttaatgcgtctggaatttatgttaatgcacaaaatatctcagattctataatcctataacaaataaaatctcaaattttttgcttgtaccttgaatatacacatatttttagcacatgaaaagcaccaaatcacacgtattgccttcatggttgcatccaatacgagaagacaaaagaccatagcctagaattatttgagccgcgatgaccaccttacgtcctatctgtaattacattgtttgagaaaaccctaagttatagattagaatgaccacaaaacttatcatcaaccatcactatgatatcaatttgctttgaaccacatataatctcattacatgtttccagctagtatagttcatgatttgtagaaagtggatgaatgttcagcttgccatgaggtaggagggataggaagatgttgaaatggaggggcatgggtgcctccctaggtttgttgacgtcaatgacacacaacctgcccataattctcatccaatgtcgcaatttatgcatgattaacaatggagccgtagcgactgaaaccgtggagtatataccactccatgcgaacatggaagatgtcaattatcctaataccacaactttagtgggggagaaggatatatcttacagatctagtaggtgatgcagaccggactagaggctttcgttcatgtgttgcaatattgattgacacacaaacaacatgggatagcacctaccaccaaacagtcatacaacaatcataatgtgaatcttgaaccttgcacgcatgaatatctttgtgatgatcgtgttgttcttgatacacctaccctcgatgtagtcgagtgctattgctgggttttt

SEQ ID NO: 176246 - DNA, 370 bp, Zea Mays
atacggtaacctagcatctaatctgggccgtccacgaaaggatcgatgaccgagatcgctcgccacccccggcgacgaatcgcgacggcagcgcggtcagcacccgcgacggtgcgccatgcccggcgacccaagtcctcggtacaacgcctaaacccctatttcgccggtgcaacatgatgccctacctccgacgactgcaatggacgatcaattacctcgcagtttgttgcagacgaacccgaccacgacgagcggcagaacggtgggattgcttgagctccggcgaggaattcagtcgacgaccgaggctatcccggtgccaatctgccaccgacgcattccacgggccccggcgaatcaccccgga

SEQ ID NO: 176247 - DNA, 416 bp, Zea Mays
tggttttccgtccttaaccccgcatcatgtataaaaatcttctttaactagatataattactagggaagagaagtacctcacagtcaccactcaccagtaaactggcggtcataaatctttgtggtagcaccttgcaatgagtctgatacttatttttgtaaattctatagaattgtaagcacaattgtagttgttactttatgaaatagcgatgcagagcaactcatctttgcccacaacatttgatttgctgtgttttgaaaaagaaagggattgcacaccctttattagaaatgacaagtaactaagtgagcttgttatcggcatatcattaggagatctgcttgtgtcttttgttaaatatcagcaagggattttgaagcatgcaatccaatagtctaagttaatgttttct

SEQ ID NO: 176248 - DNA, 450 bp, Zea Mays
gcagggaagttactcggattcattgtcagccaccgaggaattgaagctaacccaaaaaaaatcgaggccatcatgagaatggaagcgccacaatcgcagaaaaaggtatagaggcatactggatgcatggcagccctgagcaggttcatatcaaggctaggtgagaaagacattccattctacaaattgctcaaaaaggtggacaagttttagtggaccacagaggcacaggaagctctagaggcactgaaaaagttcctgactacaccaccagtactcaagccaccacgccgagccatgccgaatcagccagcagaagagctattgttatacatctcctgcatgactcacgtggtgagcaccgcgttagtagtcgagcgggtggaggaaggacatacatacccggtgtagcatccagtctacttcatgagcgaagttcttgggccctca

SEQ ID NO: 176249 - DNA, 457 bp, Zea Mays
tgatgggctaggatccagcaaaatcctatggaggagagagataagaagagagagaacagagtgggagattcgtgacgcgcctgtctcaagctgactaagacgtgctccttcacctcccatttgttgttctggtgatgtgcatgttgtccatagactgcgtgcgttgttgcacttgtactgtcgcattaactgctcttcacgttgtagttttttggtcgatagcggttgaaaccattaccattactcttatataactaatataattgaatgtctcccgcagacactcaccctagccctcgctccccctctaaccccaacgtaggctccactcttacgtcctcgtccctacccctcctccacctcccgtcgtttgtccttttctacctgctcatcacacacccacccacccgtcaagatgggaggacctcatgtgcttccttgcgctgctccatggtcg

SEQ ID NO: 176250 - DNA, 514 bp, Zea Mays
gttgtttaattatagggagatgggtatcattccgaaggttgagccaatgtaataggcgatgcccttgccgtgtgtatgtaattgtaatttgtatggcgatgtggcctgttggctgtattcgtacgcttgtattggtccggctgcgtacgtgggcgactttgtgcagagtgtctttgtaatgagagacttcgattaatgttattccggctgcgcccttaatcagctattgcgctgagtgtcttttgaataaaagactagcgcacttgtgctattccggctgcacccttagacgacttttgctcggagtgtcttgtaaataaaagacttcgattaacgctcttgttgagctattccggctgcacccttaggcgacttttgcatgaagtgtcttgtaaagaaaagacttcgattaacgctcttgttgagctattccggctgcacccttaggcgacttatgcgcggagtgtcttttgaataaaagactgattaacacacttgttgtgctattccggct

SEQ ID NO: 176251 - DNA, 621 bp, Zea Mays
ctccttgttcgagatgctctaaggtgactaaaaatacacttaaacagtgtttgcaattcatttgtgtgatttcggttcaaactaaatgcatctaataagactatttattctatcatgtagtagtagtaactcaaatgtcccatgcatgcatacccgaactcgtagtttgcaagttttagttacaagttctaagtcagttgagtataatattatggtgtcggcagtgaacaaatatagtgatcatgatattatattaatctacgtcaagggcgatgacattatattagtctatatgcagataatgtgcttgatttaatcatcattaatgctatcatattttgcaatttttcgttttactgtatacgtgtaggtgaaagtccatgacattaaagattttagtagtttaatttatatatctccagacatcagtaactgtattattagccagctgagacaattctgccttatctgtgattagggaggtgtgtcgcatgcgtatatatatatgctctaaaccgtgacaaataaaaaggaacggatagagtatttagcaaaagaataatgtgtccatatacttaataaatgatacttatgtcatacaaaaagtatgtacattaattt

SEQ ID NO: 176252 - DNA, 609 bp, Zea Mays
aactaagagttggtaactgtatggagtttatttggaccaagcagatcatccttaaagttcttggcttactagtgccatttatattttgtactagaaatacattcacattatttaacttttgggcttgttgtcaaactgttaatattttgtatattgggttgaaggaacattctccatgagtatttaatgagagttaagtgttccatcttcacatatgcaagctagtttgagtgaccatactcctttatatcttttgaggactttgggacaatgctgtgcactccagtactttcataaatagcatgtagatccaactgctcaattcctgtgcaatgatgtcaaattaagtttatgtttaactaaactttgtgattttaaaaatatgtggagtagcttttggatatttccagcacttcatttgttcttttcgaatgcttcatttgaataaactttgttgtaggccaagggtttttgagagctgtaagtgatgagtacaagtgaacttacgattgagtttctcagtcaaaaaattacgattgaattcatattttataccatgatgagcattgggatcttagtcaccaagtgaattcgcttgcgattgtaagc

SEQ ID NO: 176253 - DNA, 559 bp, Zea Mays
gcgaagcctaccttggaattcttcctcatttcagtttgtggaagtacttgtatcattgtcggcctaggatggctagggggcagcaccagctcatgggtagtgcgagtttggagatgcgccatgggaggaaaacagaatacctagacatcccactcaaggataacattaaagggtggcacttagagtggttcattgtggaaaaccatggcaagtccctcccctcggtcaaggagacaactagatgttcgcgctccaagttggattgagtcccccacagacttggagataacagaagccaaggttctgcttgctgagatttgtttgttgaaggagagaggtcttactgcagaagctatggttgcagactttctttttaagaatattcagccactgaaggacagagcgtacccgacttatttatatagtggtgtcaccgactcaacccaggttaccaacaagaggattcctgctgtggatttggtgagccgactggaaatgatccttagaggcaacgtatcaaatattggtgctcctgttgcctattctacttggaatctgc

SEQ ID NO: 176254 - DNA, 819 bp, Zea Mays
ctggctgtttgaataactaattaagaatcatgtgcactattcctttgtttcgctgacagtcgcaattaggcccctgtatttctatttcttcacaatgtcgggtccacgacggtggacggcgacgagccgatctccggcgagctcgtactggccggaatacgcaacggctagtcctttcctttgttcgacatcaaattctacccctggtgactctaatcccccaaccaatttcactaatccggaccggagcactcctgctcacgacgacggcaaaaaccgagaagaaacaatggtgttcagggaaatccgttacgatctagttcaatcaatcaagcctacaagcaataggagactctagagatgctagaacatttaacagaggggcatgaatcaacctcaggcaggctgaccacggtgagagactttcacggcaggattccgactgatttggggaaaatggtcgattgggcggctctagtggacgatagaaggcaagagctggtgctttggatgcgcaatgacttagcggagctcactagggcagtaatttatagggtctatcggtggtggcgtccaattttgtgatgctgcgctggcggccggagagagagaagagtcaccggcggtgatctatcgtggcgattgcggggtaataagctacagcggtcactgggtaacgaccatgactcacatcgacgtggtaagatatccaaaggcgtggcgcgactgaggaaaacggcgatagccacgacaatgactgtgcggccacatcaccggcaagtggatgggtgacagagcggctatagggctctgagttca

SEQ ID NO: 176255 - DNA, 519 bp, Zea Mays
ttaagatacttgcacttaaaagcataaatgttaccatcctttggctttcctccatgttgtaggtcttgacttttcgactcaggataattctttatttcctacaacatcgatatcttccctcgagatgatatgggtttgagatatagtaatttgaaaaataaccttggatcaatcatggatatagatcattgaagattgatagcttcagttaataaaaatcgaattgactccctcaagcaccccaaagcttcataccatctccttctcctgcaaagcttgtcaagcacattttggtacccatctcttgatgggtccatcaaggttagtcaacaaagatctagggacccaaacgtcctttgtgctagcactaggtaagctccttacctttctagcacaagttgcaattttgggttgcctagttacatgagaattaattgacaagctaggagtgggattgttaccaatgggacaatccttgcattgatgtcccttctttcggcatatgtagcataggcgatc

SEQ ID NO: 176256 - DNA, 393 bp, Zea Mays
aatttctaatcctattttctggttttatttaattcccggactaggcctcaattactgtaaagcgcagggggctcggggtaataatctgcagacacagggaacagtgggagtggacggcgggtttattctgcgaaaccagggggttctttatgtaaatgtgcacaccgaaggggtatgggaggatctctgccgttcgatctaaagggaacgtccccgattagactctacacctgcgcgaactggtacgcgccagagccacaagatctgaatccaacgccgcagatcaactctcccctcttttaatccacagcgttcatcaacacttggacgacgccgattcacctaggcgaaacggtatgtccccgtctaatccagaccgttcaatgaaggatc

SEQ ID NO: 176257 - DNA, 424 bp, Zea Mays
gcttttgatgtccataagttgaaagaatcccaaacaaacatggtctatgtctatggaagaaaaatgtccaccatcgacaccttagctgaggacacacaaatggagggtgaagcaacacctcacaaaaccttcactttcatctctcacaatcgagaggcccacaaacagaagcataaaccaagtgtgtcactctcaccaatctagaagaggggggagtataggaggcgacgctaatgaacttacaccaatctacctcatattttagccttgtcattgttggtgcccttctattagcaacccgtgcactaattatcgatagcaaaatagagaattagctagtgtaggagctaaagatttagtgttagcgtcttcatcatccacctggtactctttctcaaatcacacagactctctataatgtcat

SEQ ID NO: 176258 - DNA, 520 bp, Zea Mays
caatgcctcagatttaaacaaccgcgatctcctcccaaccctccatctatcgatcaacggctgggatcaatcacgccgaagcagcatgcgccctctaatcgtgaccgttaattccaatatcaacgttcgcaatccattctcccacccatctctcctaccgcagacagcacgcggcggcgccgccctgctctatggcggagggcgcaccggcgacatgccattccacgagccgatgtcccaagctttgaccgatcagcacgacgcaatgaggaggccgaggcgaactcagaggaggacttcttaccagtgatgtgggcgcagactgccccagccacggtgtcgcgcggcccacagcggagtaggggctcccggtgagcaattccggtggctacagggtccttcccccgcccctgacgcccccataagctctcatgcgcatctccgaacccgacagtgcaccattcgagtccccaacaatggtattcctccgattagccggtgacggcacgatgacagtccc

SEQ ID NO: 176259 - DNA, 604 bp, Zea Mays
ctcgagcatgagtaaaagcctcatccttcgcctccatgaaaacaccaatgagtagcgagaaaaatcatcaacagtcaccaacacataccacttccccaaaaagatcatacctgagcacttgccaggttgcttggtcatcaccttggcgacgggggaatgggaagcagcaaccattttaccatgacgacaagggtggaaaataagatatttttcatatttcaatttggtcaatccttggatgaggtcaagtgagcttaattgagacaaaagatcaaagctcaaatgaccaaacctcctatgccacttccaaatctaagagaaagaacttgccacaagacatcgagaagggtcacaagagtgggaaaaatcaacacgaaaaactcatccaaatggagaaatctagcaaacaagattttccttagcctccaaaacaagagaaagctccttaaagtgctcatcaaaatcatcctcaatgagtgtcacgagagacaaccttacctctcagcatgtcccggaatgtgatatattccttgtcaatcatggggtcgaggctagagaaccatctagagctttcggtcatgtggcgcgaacaaccataatccaa

SEQ ID NO: 176260 - DNA, 561 bp, Zea Mays
ggaagacagtgttattgtaggcgccgtcgggtagggaggtggtattcttgggaagttctccaaagttcacgttatccttgttgtcccaattgcttccagatcgtcggtcaaggaagtcgggaatctttttctccatggtggtggagagtgaggttgccttgcgggtgcaagtcttctgtgtggtgtgtgactatgccgatgtgtttccagcagagcttccaggcattccaccggagcgtgatgcgacttttgaaatcaaactgattccgggtatgcagcctattcataaggcctcgtatcggatggctccaaaggagcaggtggaattggagcggcaattggatgatctgctggctaagggtttcattaggcctagcatgtcaccatgggcttccccagtattgtttgttgagaagaaggataaaagcaagaggttatgtgtggattatcgtgctttgaatcaagtgacaatcaagaataaatatctgctacctcgtattaaggttctctttgagcagttgaggggtgctcaggtgttctctaaaattgatttgaactctg

SEQ ID NO: 176261 - DNA, 958 bp, Zea Mays
cgggagcccagtaccgcggcgctcacccaactggtttaagcacgagatgtttcaaattgagggcacagggagcacgagtgagacacgggcagcacgatgcgcacaacaattgacactggataaacaaggttctggtgggtcgacatcatggcagtccctgcggtgtcgagcccgcgtttaggtcaagctaaaacaataaggatcaaacggacccctgggtgagcttcacccgcctataaagatgctagaacataagcttgtgggggttaagacataccacaatcgtctggccacgtgaacacccagtttggaggaaattagtaccagcgtcagaacaaccaggcagctcatcttcctaccccagcaaccaaccagaatggccaagcagccccagcataagtaggaggtcatgcatgcttctactgtggagaacaaaatcactgggcgaagaactgtccaaagaaagcagtccagcaaccgccagcagtcaatgccccagcaagacaaggagcaccccagcaagcaccaggagtccgtggtcaggcctacaaccgtggaaaggtgaatcacctagaggccgaagcaatccaggatgctcaggacgtggcagtaggtatgtttctagtggaatcctacccagcaaaagtattatttgatactggtgtcacgcattcttttgtttctatatcttgggtagaatcacataacatccccatagaaccaatgatcccgcctttaagagttaattcagttggggggaaagttcagtctgataggatttgtccgaatctaaggattgaaataagggggtagacttccctgctagcctagtagtaatgggaactcaagggttagatgtcatcctagggatgaattggctacacagaaatcaagccactgtcagttgtgacaagagaacagttaagttggtgtccccatccggaaaggaagtagtaac

SEQ ID NO: 176262 - DNA, 300 bp, Zea Mays
cttgtatgatgaggttgtgtgccctcgtttgtctatgcctgcgaaggcgttgtgtacttggtctggtatgttttgttatgctgtgctggtgcgcgtatagtcggtcttggcgcggacagtttggtgttgtcgtttttgcttttgttgtgctaatccggctgcacccttagacatcttctgcacggatagtctatgcggtagacttcggtttctttgcacttgttgtgctagtccggctgcacccttaggcgacttctgcgcggatagtcttcgcggtagacttcagttttttcgcacttg

SEQ ID NO: 176263 - DNA, 378 bp, Zea Mays
atcaaattgtgtcttcactgaatctagaccgtgtgatcgtaatggacggaccggattagatctcactcgtatcgcttcagccttaaaatctcaagccttgatttctgatcgggcggtcccgagctgacctaatctaattagaatctccaccgttgaatctagatctagggtccagcattgcttaccgactcgcctaagccgcgatctgatctcgtgcgtttgatttggatcgggcggcacatatcagcccataccccttcgccatgccaacaaaccccgcgcgatgcgtggatggcgttgaccttccagaatctgcgagctgggaaaatctgggtcggaatcccatctcccttgagcatataaatccattgccacggc

SEQ ID NO: 176264 - DNA, 861 bp, Zea Mays
cgtgagcatggagaggtggatgctcctccggagtcgaacacagacaaggacatagaccaaatggaggacatgttagatgacacccgacatgagtatccaacactggagaccgaccgacccccgccagaggaagtgcaacagttttacaagttgctagaagccgcagatgcaaaagcgcacgagggcatcaacatgactatacttttggtcgtaacatgacttatggtgatgaagttaaagtacaacttctcaaataactgctacaacgatatcgtgaagctaattattgatctcatcccggctaaccataagataccagagaacttgtatcaatataaaaaaattgtcctgggtctcgacatgaactatgcgtgcgaaaataattgcatgttgttctggagggatcacgagaatgacacccattgcatgtactgcaacaaatcaaggtatgaagtggtggtggacgaggaatggattgaggttactacaaaagtcccggtgaagtagttgcagtacatgcctattacttcgtggcttaaaaagttgtttctaaatcaggagacaacgaagcaaatgagatggcacaaggaaggggatcatcaggaccaagatccggatatcttttgcatccatcatatggcgaggcatggcaggcacttgaccgttttgatctagaattagcaagggacccaataagtgttcgtcttggtttgtcgacggacggattcattcctttcagcagaaattccactccgtactcgtgttggccggttttcatgatgccatacgatctctcctaccaaatgcatgaaagaagaggtcatgtttcttgctttggttattctgggccctaaggatctg

SEQ ID NO: 176265 - DNA, 810 bp, Zea Mays
cgaagatcgctagattcagtgtatcgccaccggtgatcccgcgccgtgatcatcgccgccattgcgattcgtgctcagtgaagtgcagataactgctcggggtaagaaatatcgcgttggggatgtgctcgggacactgtttcgccctggccgccgtaccccccttgccttacggccggtccagataacctcgccggcgttggccgcttatcgaccatgcgccatgtgccttagggtgttaccatgtcgtagtaaaccactgaagcgtgtccgttcatcgcctgtgaccttgccacggtgaaagccacgaatcccttgcgccagtaacctcccctctctccggccgctgcgcgtcttttccaaaatcagccaccaccgccgatggaaccaataaattgctgccctagtgagctccgctaagtagttgggcacctagtgaaccagccctcacctccaatcgtcccccacagctccccaatttgggatttcccccaaatctgtcaagaacaccacaatatgtgagctcgccgtggccagctctccacatgtccgatcacaccctcctcgctcttgtttcagctctcttgtgtgctcttgatgcttctcgacccggccaattaagctagaacatgtaggatcaccgggaacgcctcgtttcatccgtagtttgcattatcaccgtggacagagcgattaagagatagaactttgcaattgattgaggggttatggtcgttaagggtacaattagatgtcagccgcaccggagcaccggtcattgcgttttctggccgatacaggctcgccaga

SEQ ID NO: 176266 - DNA, 558 bp, Zea Mays
caagtatgatgcaatcttggaatgtcctttcactgctctggttatttgttcttcaaccataaacgtagcagagcaaatttgttttccattggcatatggtgactatttatttgatcgattgattgtggttaatggctcgaggtatctttcaagaacgttgatagttacaccctagagactgacaacacaacttgtacaaccagcagcgtgttgtgcgtgcccagttctgagtggggcctatcttgagtgagacccaagcaaatgaaaagcccccatcccccgcccaaatctgccgttctctgggcacgagcaggaagcaagcatctgtgccaagattgccaaaggagaaaagggcgaccgggggcaggcagacgaatccaaaaacctcagcatcaccagcggatcccaatcatttacatgccgcctcactccgtccttccgcacgacgctctagtttacccagccatcgctgaatgagccacgcttgctccaaagctcacacgtgccgcggtctccgctcactgctcgcttcgcttcaactactcagctctccgtctc

SEQ ID NO: 176267 - DNA, 286 bp, Zea Mays
ataatatcattatcattttgtaccttctgttcacctctagccatgaggcataggtgagaattcaatgatggtgatggtggtggtgaagagaagtccccagcgatggcggtaactttttcatcattttcttcacttgaagaagagccacttgatgactcaatgtcagtgagctagtcaccaacaatgtatgcctttccatttttcctgttgtggaacctcttgtgcttcccatccttcctcttgaagaatctcttttcctttttctcatcatcattgtcatcttctt

SEQ ID NO: 176268 - DNA, 770 bp, Zea Mays
agacttcaattgtagtgcccgccgatgaaaatgtgcctggctctgtgtttgaatgttttgagtccgacggtgagtctgggagttcgtttccttggacggaggagtcctcggacgaaggcttagattattttgttgcgttggatgtggctgcggcggagacttcgccgcatgtggtgggtgctgaggatcttcctggtacgagtactgggtgtaggcgacgaagggtggtgggaaaacagtgtgtgggtggattttcgcggagcggcaggcgccgtcgcatggggatggagtgtggccgacttcgagtagacggggttggtaggcgagaattgttgtcttcgccgaatggggcgggcataggcgaaggggatcttcgggagctctttgagggtgaggagttgaggataatgctgtttaattacagggagatgggtatcattccgaaggttgagccgatgtgataggcgatgcccttgccgtgtgtatgtaattgtaatggtggtgtggccggttggtcgtatttgtacgcttgtattgttccggctgcgtatatgggcggctttgtgcggagtgtctttgtaatgatagacttcgattaacgttattccggctgcgcccttaggtaattgttgcgctgtcttttgaataaaagacttcgtttgacgcttctgttgtgttgttccggctgcacccttaggcgacttttgctcggaatgtcttgtaaagaaaagacttcgaataacgctcttgttgagctattccggctgcac

SEQ ID NO: 176269 - DNA, 400 bp, Zea Mays
tctaggcattgcaattcggcctctcaggcactctgaatcagggcttcgatggtatagtgtaaagatcatatcgccagttcagataactcaccaccagcgaccgtgcacccggattcatgcccgtcacggtgattcgtgctcggcgcagttggataacgcagaggggtaagaaatatcgcgtcgtggatgaactacggccactattctactccggttgcagtacccgcctgagtcacagccgctttggataggctcgccggagttagccacctcacaaccttgcaccacatgcctcagtgctttaaccacgccgccgtgagtcatcttagcccatccggtgatcgccgatgagcttgccacggtaaatgccaccaatcgcttgcgccagtgcacccccttc

SEQ ID NO: 176270 - DNA, 806 bp, Zea Mays
cgggttggtgaggagttaccacatcattcattaccattgcactgttgtgctattaaaatttttaaccatagccgaaggtctctgtattgtattttcgagcaaacgctttatcactggagattagcttcgtcttagaaaaagcgtagacacaaatggccagagttcgatccactgctagggtgtctcttgaggaggacgaagccgatgctgccgaaatagtgcccatatcagaagtaatgaagcgatcaggtctagttgtgccaagggaagttactaacgaaggtgcttccaatgccgaagctggacaaactgtggttgagggtgagagtaataatgaaagcgaagaggataacaacattctgaacccggcaaagcctagtcatcttgaatttgaaaaatctactgtaacagaagatgacatgactatgatgaaaaaactgggttatttcggggaatctgagagcaagcttgttcgatttgctagggaagaggtaatttcggagccgagggaggacgaagttattgtctttaagagcttcttcagagaagggcttcggttcctcctaaatgacatgataggggaggttctaaagaacattgaaatataccttcatcagctaacccccaatgctattgttagactaagcgtcttcatatgggctctccgaagccaaggaatggatgctaatgccgaagttttttgtcgggtgcacgagctacactaccagatgaaggctagagcagatggccttcacaagaactttggctgttataattttgcgtatcggaaggatacgaaggccccg

SEQ ID NO: 176271 - DNA, 429 bp, Zea Mays
attcataatgaaatggcaagagtttgttccactaccagggttgattgtgagggggatgaaaccgaagctaccgagactgttccgatttctgaagcgatgaagcggtctgggctagtaacatctgaggatgcacctaccgctaaggcagagcaggctaatgttgaggagactgagtctgaagatgattatagcagcgcagtgccaagtaaacccagccatctggatttcggaaaatccaccatctctaaaggtgacttacctaagatgttgaacctgggctatttaagcgaagcaaagaaagagctggttcgttttggtggagaagaaactactccaaagccaggaaaagatgaagtagtgatcttcaaaagtttctttaaagctggtttaagattccctttgaacaagatgatcgctgatgtgctgaag

SEQ ID NO: 176272 - DNA, 671 bp, Zea Mays
gcaacctcgaccgcatgattaccaatcaacggcccgggttgatccccaccaatcggtacactgatcctaatcctagccgcacacccaacgatcaacggctcgcgcatctcctacctcctgagctatcggcgcagcgcagcgcagcgcacgtggtcggggtggcgccaacgccggagttcggcaattccggccatctaccagcacactcctaatcgtgagtgcagtaatacaatcgaagcacaaggcgggattagttggggggtaatttaccgaggatgaagacccagcagaccggtactcgacgtggtgcggattcacggtggcgcgagagcaacgacaagaaattggcgtcgctccgcagcctcaccatccaattgcttggcacagatggcttcccccggcgaagacgatactccacgatccgactccgagagcggagaccccccagcgacggctatccccggcggcggcgcgaatcgcctgcagcccgctctaattctctcgattgcagtgcttcggttgtgtaagggcgtttgcgagctaagagggggaaagagaggtgcgggattacctttgtacccagcccagcctaccctcttccgcggatttcgcggcgaagtggttacggcggccgaattccacggtgagcatccgcgcgaggtgggtgaggg

SEQ ID NO: 176273 - DNA, 551 bp, Zea Mays
ggaaggaaaattttcttctcgtagggacatagagacattccccgattaggaatttctggttgccatccctagttcagatgcaaagttgcacgtcttttgtaggattcagactgtcaacctataaaccttcaaaccaagaatttaaatgacgggataagactgtctccagcggatagtataaaatagggaacacggaattatagatgacattgtttgatattatttacagaaagaggtttgaaataggggatgcatagaggatgttgataagagatttgctagagatagcctaagccatttactagcaatcttcttttaagcatctccaacagtaacttatcgcagtgccacaaattaaattatagggctcaaactacaaaaaaaactgctcgaacattgccctatttttacaaggtttagggtttaaaatgccaaaaatatactacaccttattggactgcccaatatctagatctaaacgatcggatgcttcacaaaactttcctttccaaacgaacgcagtagattaataaattttggttaatcacttg

SEQ ID NO: 176274 - DNA, 683 bp, Zea Mays
ttgaagattttgctcagtattatgaacctgccaggctaggtatacctaggcggttcggcgagactccagggctgcgccatcatccggccgtcatcaataagattgctagagtcaccattcttccaaagagtggggacaaaagcaggatccatgacaaattctgaaacattattgatcatgtcatgaaaggggaggtcatggatgttgttctttttatgatgcaccagttaaatgatctgaaggtggacaagaaccagaatctggcatgcaccatatattatggctttgattaaagccaaaaccagattcgaagggcgatgtgaaactgctcacaccccattcaggccattcaaaaatgaaattggttttcttaccaggcctctcacaccgtttcctgataatgaggaagctcagggacatgcttttgatgatcagcctacagcgcatcccgctcagcacatgccacgacctccacctccaaagcagcaaggtcagtactggcagcctgccccttgttattttgatccatattttaaccagatgcatcaagggttccagactcatattgatggttagtttcaaagcatgatgtcacatgttgatgaccggtttgatcacatgcactccacatttgatggtcaattctctgacttacatgagcgatttacagttgttgacactca

SEQ ID NO: 176275 - DNA, 862 bp, Zea Mays
ctcacctccatccacggcggagaccacgccggcgttccctgattcggcgcgcaggtgtaccaaactccgtggaagctctatgaaaacgatgtggagattcaaacaaacacgcagggggtttccttacctataatcgcacagtggaatcagctgcccacggaggagggcgagcccgcggcggaacacagacaacggcgagaaattgtcctcaatccaccacctcccacccccgatttctgtcagggacacgacacacaggttcgcgcgtaccttctcgacccgaaaccgaccctacctggacagtgctagggacaaactactacggcagcggtggcacgcttcttcacggctgcccgacaatggtggcctgggcgcggtgcgattcgagggagctagggagacgacccgagctttatacccaggtatggggcataccggccgagcgacaatctcggaacgtggacttggtcttggcggatgcaacggcgcagcgcgatcccggcggacacggctttggctgcgacgacagggggagagggcggatctgaccgcggggccccaccaagcagagacgcagggaaaggagtgctagatgaacggggatagcggggacggctgacgatgcgggcctgcggccagattcgcgcggtgccgaggcaaagcctacgcgaccgcggagctcagaaggatgaagacaaggctgacaccccggtcccagtcgccagccaaggtgagcccgcctgttagtgcacaagggaggcgcgggttatgggccgtgcggggttgggagccaagtgggccgaataccatatttgcggcccaatttaggtagttttcctctcttttttttcatttcttttct

SEQ ID NO: 176276 - DNA, 662 bp, Zea Mays
agggccatcccgtgtggaatcatcggccagggcaagacggaatcgctcgtcggggtgtacccgccaccgtgtggccgctagtcaccatgggtaggggtctgtgctgcgtgtgtaccggtagggcatccatcctccagttcctctacgtctcatttatgtatagcagtcataggatcagagtttcgggcttaggatcgatgggtggcgcggtccggccatggcctccatcgtgcgggtcttggtgtcgctgcgtcttgcctcttggggtagaagatgctctgttgccgttagatgcggagcatatgactgtgattagatcgcctaagagaactattcggtcgttggttctagcgtccgtggctccgatctaaagtcgctcatcttttcgggctgatttaatctggggtgttggcgctagatcggacggtccgagttgcatacccgttcgaattaatgcagatctaattatagccacaaattgacgatcagatggttcacgatgcttggtaccccttggtcgtgcgcaatttgttaaagagtccctagatttataggatatcaaaccgtgctccactactgtgtaaaagtaattcggtataggcccctgttttttataaagtgcaccatgtgctttctggaaattgtgttcgcagccgaggaag

SEQ ID NO: 176277 - DNA, 1703 bp, Zea Mays
cgaagagaccgctccctgcatgttgccgcgtcgacaaggcggactacgagtggtcattcatgatcgctttcccagcgatggcgcggagaagaaccggggccttgcagcgggaaagcttatcctccttccggattcgctgcaagagctgatgaaagtagccgaggtgaagtttgggaaggcagcgaggagggtgctcaccgtcgagggcgccgaggtcgacgacgttgcggtgctgagggatggtgaccacctggtgttgtgttcctaggactaaccactagcaagtagtacaagcacggccgattcgcttcacctaacgatggcaatggatacacgaaactcgatactagatggctaaaaccatatagatactgaagtcatataattcgtatgatgacacatcaatctgtcgaccaaatatcatctaactacatactacgacgataacacaactgtgccggcaggatttgacagacataataaagccttctatggtgctaatgatgacacacttgcctgaagaacaagagcaatccttgcagatgttttcaagctataaagatgtgcaataacgtctgaacaggtatgtccttaaaaatgtatacgatatttactgagtattttagattgtattactgagtagttcagattgtattactgattattactgaatattattgagtgctactgagcactttcaattgtattaatgagtattacgaagtatttattgattagttcaggttatactaccgagtattactgattattgtttcgaattgtattacagattattactaagtattattgggcactttcgattgtattactgagtattattgagtatttactgattagttcgagttgtattactaattacttcacactttatttagtatttcaaaacacaggccatgcagatcgctaagaagatgatacaagaagcactggtagtggttgaagttgtaccacacgacgttgttctgcatgacgacataccaagcacagtgcatcaaactgaataactgatcatgtagcaccagaagcagaagttgttgtcgtctcagtgtccgcaccaccattgcggacgacaaaaggcagctagaagaaactattactggctcacgaaaatgttccacccccacaactctgaaaaatatggcaaccatcaagcgcatgcatgtagttcctatttttgtacagattcaaaaaatatggcagatcatagaagtttccattgcgtgcgcgcaaattttgaatgatattctcgttcccactgcacgcaaaattagatgacagaaatcacgcaaaagcataaatccttatagaacgttgcataaatatctacacaatgcatcaaaaatgatgaaaaatcctaatatggactcaatcaatagccccttgtgcataatcaaagattggacgagacggcgctggaggatgccgctgaggccaccggatcagagaatgtcattgccggaggacgccccctgaagccacggatcaaaggttatcgaaggaggacgtccgagacacgccggatcggaggagttcgtcgccagaggacacacgaccgcaaactctcgcggcccatgccttgcgagatcaccgctgccaccgaaaccactcgcgcctcacgtggccaccgtcccggagatggccacgcctcgtacgaccaccggagcaacccacgtacccacgcc

SEQ ID NO: 176278 - DNA, 689 bp, Zea Mays
tcaaggacttgaggattgccaagaagggggaacaaaagaagaaaatcaatatctcttcaaaaagcctcaaccatgcctccataaaaggtaacatccaaggtaagaatcaagtcacactttacactaagagaagtaagaagtgtagtgaatgctttgaaaaggggcactcgattaggtcatgtccctatattaaaaatgacttaattattaataaggatgataaactttgttttaaatattcgaagaaggggcactttattaaatcttgtccccatttgaaacaaaaaggcatagtgttagaaaagaaaatattcactaaccatgtagcaagaaagaaacaaggaaagaagaaatcttcaagacttgaagatcgcctttgctacatatgccgaaagaagggacatcaatgcaaggactgtcccattggtaaaaaccccacctctagcttgtcaattaattctcatgtaactaggcaacccaaaattgcaacttgtgctagaaaggtaatgagtttaccaagcgctaacacaaaggacttttgggttcctagatctttgttgattaaccttgatggacccatcaagagatgggtaccaaaatatgcttgacaagctttgcaggaaaatgagatgatatgaagctttggggtgcttgagagagtcaattcaatttttattaactcaagctat

SEQ ID NO: 176279 - DNA, 280 bp, Zea Mays
tgtctacagtgtccaaccaacttgtgattgaaaacaactacattaagaaccttagcctcgcgcccagaatagagagacctctgcatcagtgattaccctctatacctgtactctctgagagagcaccaaacgagcatgacagcgatatccggaagagcccaattattcccagtgaacagcgcgagcgaccccgggatgaagcagagcaccccatttccaatctggttccgtgcaccccccgcaatagatccccggcggtggacccggcccctccttccct

SEQ ID NO: 176280 - DNA, 666 bp, Zea Mays
gtgatgaccatcatccgatcccgatcagacggttctcgttactcctatccgaaacgctacgcagtcaccaaatccggccatcaaaaggagatccaacggtcgggcgatcatctcccccaacccaaccctggacatggcggtgccgcccacccgctcggccacaagatcgccggagaatgcaattcgccgcccaaacgagctataatccaaaacgacaagcactacacgttgagtactgaagggcgaactcaacggaaggtggctaaacggcggcggaatccgaagcggggcccaaccacatcgcacggttttcaccgacctctggtgagaaattctgatggccccagagctctattttgggcgcggattgaaattataccgacacgagggattaccgaaactagcagagggggggtttctcaccggaaggaaggcagtggattgattggctgtggcatcgagcgaccgcggcggcgctggcaaggtgtcgccgaggaggattcacgcacttcggagaaccctgcgcgcgacgggcccccaacgcatggccagggcacacttgtggacgttcccaacttctcggtacccgacggcgatgacggcgacgaacttctcttctcccccggccgccgcgagctcaagctttccccactcgcactcaacaac

SEQ ID NO: 176281 - DNA, 491 bp, Zea Mays
gcccgattcgcatactctgacaaatggggtcgctttggtgaatagtggttttttatagtccaatggtgtatctcgagcaaccattagaacattctatcgatccaatgctcactagaaacaacccagagtgaggatttgcactgatagaattgtgtcattgacctacatcgcgccattctgatggctaaccctagcctggacgagccaatatacatagcatatagtctaatggatccaacctctcaattcgatggtacatccagtgcacttcaagcttggtttgatcccatttcctcaaatgtgtcaacttcacaagtgttctaccatgtgtgcaagtgagttaccattttcacaaacattttcaaagagtttttcacatcatcactaggcctaatgcatatgcaatgaattatgatatctagtgacacttaaataaccgattcaaccatagagttctcttagggtgtgtttggttcagctttctgaactag

SEQ ID NO: 176282 - DNA, 821 bp, Zea Mays
gagatgactacctggaaagctcacacgagaggtgacgatccaggcaggacgggagacggcacacggtcaaacaaggtcactgaaatgacagaagaggtgagcatgtattagtcacatagtcataagcatatgaaatgtgaataaatacatacacagagacacgagacgagacgatcaagaagtcaaatgccgtgaaaacgacgtttgacggataaatagtgacataggaggtttggaattcgaaatgaggcacgaaatgatatggaattgagccgagacttcacgaataggtttatataggtgaatatgagtgaagtgtatgcttggtttgaatttaggcgaagaaatagggatttgggcactcggctcggaaacgatcgctcaaaacgggaattttggtgaaatttaagcctgggatctcggattggcgtgaaatttggcaagtaggttactggaagtgttgtgaaggtgcctgaaaaatttgggttcaattggagcatttttggctggtttgggcatttcaccgagcacgtggtgtgcggggagttagggtttcggtgaaatggctatttgaggaggaaaaaccctcccgaaggagctaggaacctgcaaggacactcaatgaccacaaaggaacacatttcacaacatggattcactgggattctcaggatttggaatattgcacaaagggtggtgcacagcctaagagacagagagatagagagacaggggagaaaacaaatctgctcaccgagggggaagaagagggagacgaggtcgccggagcccagtcggggacggtggccgccggtggaggg

SEQ ID NO: 176283 - DNA, 408 bp, Zea Mays
caccgacagatatgcggcccgtcatggcctctattggtcattccgatctcgaggtccaagcatggcggccttgcattggagacccaagcccaacacaactagcttcagtttggtacacctagtggctcgacggtccggcaacaattagcaacagcgacatgcacgtagaagcgacagttgagtttaagcgcagaaacaaccccagccccaacagtgtatagttggcgacaagtctcccaagcagcgcaatggctttttattgcctctcacttacaagtacagttgtagtatctgttcatgtatgcacacactcacaccaaaacgcacaccaactcacccctaccgtacacaagcagaccgtgactccaccctcctcaggcccgcacacgctcaccaacaccctcgtcg

SEQ ID NO: 176284 - DNA, 491 bp, Zea Mays
agtgttttcatctgggttgtatgaagccaaaggggtcgtatggatgctgatgcgttctgcaatgcccatgattggcattactagacgaaggccagggaagagtcgggccttcacaacaacttcaggtgctacagttttgcttatcgcaaagatgtgagcggtccggttctggcctatcgaacaaagtggcatggcgacgtgacgaaggagtggttctatgccaaagtggattcgaaacagcgcgaggacttcaagggaatgctgatgagccctttggaaagtaagtttttctttgaagaagccaaagtgcgaaatgagtgaagccgcagctttcagtgtagttatcaagaagattgggtcctaagatctggttcaagaggcacttgcatacagcatatatccaactcggactggatggaagttgtcgaaggaagtgaaatgtaatgacgaaggacttattactttagcttttgatttcaaagagtagtcca

SEQ ID NO: 176285 - DNA, 448 bp, Zea Mays
cgaagcttgactttcgcattcaaacgaagctccagtttagtgtctgcttcgtcagaagaagagcttcggaagaaaggttattaatttccaagcaattttcaagaaattcaaaatcaaatggccagagtgcgttctactgctagagctgagcgcgaaggagacgaaaccgaagctgcagaaactgttcctatctcggaagcaatgaggcgatctggtttggtgacatcggaagacacccctgctgctgaagcagaacaagcagatattgaagagactgattctgaaggtgatcacagtatcgcagtaccaagcaagcccagccacatggacttcagaaagtcaaccatctctaaggctgattttcctaagatggtgaagtcgggctactttagcgaagatgagaaaaagctgattcgctttggcggaaaagagactaccccgaagccac

SEQ ID NO: 176286 - DNA, 285 bp, Zea Mays
cttggcggcacgacggaccgaattggggaaaattggtgattccctagctagggcagctaatcgggggtggaagcaggtgctattgcttggcaaatttagagacgaaggatggagctcggttgatttgaacggagagggtgaggatgtggtgaatttataggcgcagtgagccactgtcatggccatggtgataaccatcgccggtctttgctagcgatcaacggtggcgtcaagcgatatccattcttacgggcttgccatgtccccgccgcgacagtaacatgg

SEQ ID NO: 176287 - DNA, 613 bp, Zea Mays
atgtagcatcctgccgatggtgataggcccagagagggcttgtggttcgtcgccatcgacgaccttgagacgatcaatcgcttcttcaatcgtcatcgtggagaggtttagcagagactcaattgagcgagcgatttgcttgtacttctcggggatgcaacggaagagcttcttgacggctctctcctcatcgtaggtgtcgtcgccgaactgcaccatcttctgcaacagagtgtttaggcgaatagcaaagtcatcaacatcctcacctggcttgaaggctaggttcttccactccttgcgaagtgcctgcagtgtggtcttgcgggcacggtcgctgccgatgcgggtcgcagcgatggcgtcccagacttccttggcagtccgcttctgggaaagcgaaaactgcatctcgggcgggactgcaacaatgagggcatctagcgcccgtcgatcctcgtagtagtcgacgtcgccgtaccaaactgcttcccacatgtggcggacctagagccgtaccctcatcaccacgccccactcgacgtagttggtcttggtgagggtagaccacccaccgccgagaccgatgtccctgacaacagcctggacctcg

SEQ ID NO: 176288 - DNA, 427 bp, Zea Mays
aaaaaaatagagctgtttgagtatttcttcctcaatccaaaaaccgctgccacatcagccagaaccactttaactggccttaggggccaaaactaaactgaattgaaagttgggatactcaaactaacattattagagttagggtcaaaaggctatgatcgacagtcctctacttctgcatgcccctcacaatcaggcggcccttagttatatcgcctaatgctggctgtctactaacaaactgctgcccagtccccctattcttactctgaccaatccccctattcttactctccagatcctaacttgcagtagcagctcccctaacagataactatggcccagaattagatactggtggctgctggcgccttcttgttcctagtttattgctttccaatgaaagtgttcacaacataattgtcga

SEQ ID NO: 176289 - DNA, 879 bp, Zea Mays
ggcatagtggtcaccccgagttaagtaagcgcgagcatgttgcaccgtcttaagtcgttgctgacttaagccaattgcaccattagcagggcatagtggtcaccccgagttaagtaagaatgtaggtcgatcatgaacaaactgagtattcttgaagcctttttttattgatgacatatttcccattttacagagtacattgtcgtcccgatagcttttgaaatacaactagggataacatttcctgaggtgctctatattccaacagttcccaatttccgtgccgtccatctgagtgagacgatatgatcccggccaagtgacttctgccactatgaatggtccttcccataggggtgacaacttgtgccgtccctcccccgttagaattcggcggaggacgagatctcccactgcaaaggatcatcgtcgcacgaccttgtcgtgatagcgtctcagagtttgctggtatcgcgctgattgaattactgtgttcaaccgttcttcctcgagcacatcaatatcctccagcctagtagcttcagcttctgctatgctctcaaagatcaaccttggcgccccaaacttgagatcagcgggtaatactgcctctgacccatagaccatgaagaaaggagtatttccgtgcagagctcgactaggttgagttcttaggctccaaacgacgtagggcaactcccttatccattttcctgcgaacttttcgtttttatcgaagacctttttcctgagtgcctctaatatcatcccgttagctcgttcaacctgcccgttggctcttgggtgtgccaccgaagcatacttgatctgaatgttcttttgctcgcagaaatcgaagaactctgaacttgtgaagtt

SEQ ID NO: 176290 - DNA, 457 bp, Zea Mays
tttgctcagctttacatacatgatcctgatgctgagctacaaagtaggctccacgtttttgagagcgatgatgccggtgctgcttgcccagactccgctattacacagtccttgatggagatgcttgatgcgcataacgagcttgtaaaggcctttcgttgtgctcgtgaacgcatagaacaaacacacaatagcgagataacgttacgtttattgggttgcaatactagacacgatgtccaatataatttgccttcgagcggtgagatagctgccataattgttggtgattactcatctgctcagtacacgtacgatgtccttgttcatgctaagaaccatggtctcaaacgtgtttcgcatttgcatccgtgctatatggctctgcagtacccactcctttttccctatggtgaacatggattccatcttggcattaggtatgcggatgatgacg

SEQ ID NO: 176291 - DNA, 598 bp, Zea Mays
atttgacatagggaagagaccttacaagggatccttggcaagatttgcacgttaaggcaaccaaaaagatgcttcgacaaggtcagaagtaaacctccacatgttcgacctcgtctggcactcgagaacgtgccctgaccgtgcccgcgcatgccccgagcgtaggtcggcatgaccgcgcgcccatacccatgctcatgctttcgcctataatactgccgaaccctttggccttgctctctcgcacgcctcgcaccctcgcaaaggcctgaacgccgatgatcgctagagaaccgagcccagcgccgcccgcaatctcgctcgagtctcggccaccgtggtgaccaccccatcccctctctacccaatcaagcttcactgttggcttcccaaagaccagtgaagcttcccaaactctctgaccgaacactacctcgtcggagaaaccgaatcacctcatcagacttcatccacccgccgatgcacgtggtctaggtaatccagcgaacaattctttgattccttgcacacacccatttcctatcacccagtgaagcttcacgtacggtttgatttaactctatcgtcgtgatctggc

SEQ ID NO: 176292 - DNA, 1314 bp, Zea Mays
gtgctcggatattttgttagaaaacactttttagtactgaatgtcgttattgttttcccattgttagaatacaacagtatctacaattgcagaagtaaatgtagtgtgatggttttgaaatttcttcgtatttcgcggggcatagaggtcgctctaagatgagtaattgcaaacgtgcttgtgttggattaagtaggcgcgagcgcaccgtgccgatttaagtcattaccgacttaaaccgactgctccgttagtagggtatagtggtcaccccgagttaagtaagcgtgagcatgtcacaccgccttaagccgttgccgacttaagccgattgctccgttagtagggtatagtggtcaccccgagttaagtaagcgtgagcatgtcacaccgccttaagccgttgccgacttaaaccgattgctccgttagtagggtatagtggtcaccccgagttaagtaagcgtgagcatgtcacaccgccttaagccgttgccgacttaatttgattgctccgttagtagggtatagtgatcaccctgagttaagtaagcatgcaggttgacagtaaacaatttgagtgcctttgaagtctttttattcatgatatatttcccagtttacagaatacattatcgtcccaatagcttttgagatatagctaggggtaaaacttcctaagatgttctatgttccatgagttcccaatttccgtgtcgtccatatgagtgagacgatatgatccaggccaagtgacttctgctactatgaatggtccttcccatagtggtgacagtttgtgccgtccctcccccgttagaattcagcggaggacgaggtctcctactgcgaaggatcgatgccgtatggccttgtcatgatagcgcctcagagtttgctgataccgggctgactgaatcaccgtattcaatcgttcttcttctagtatatcaacatcctccagtctagtagcctcagcttctgctatgttttcaaagatcaacctcggtgccccaaacttgagatcagcgggtagcactgcctccgaaccatagaccataaagaaaggagtgtttccatgcagagctcggctaggttgagttctcaggctccaaacaacatacggcaactctctaatccacttacccgcgaacttttcattcttgtcgaaaactttctttctgagtgcttccaatatcatcccgttggctctttctacctgcccgttggctcttgggtgcgccaccgaggcatatttgatctgaatgcttttttgttcgcagaaatcaaaaaactctcagcttgtgaaattgg

SEQ ID NO: 176293 - DNA, 291 bp, Zea Mays
ggccgggaagattaatgcgttcaccccaatccttcggcttaagaatgatgccgaattcacttggggggcagaacagcaggaatcatttaatctcattagaaaatatttgtcttcggatcccgtattaaaagcgcctcaagtaggagtaccattcagattatacattgcagtcgaagacaaggttattggggctgttttgacacaagagaccggaggaaaggagcatgtggtgacctatctaagtcggaggttggtggatgctgaaacgaggtacactttcattgagaaatt

SEQ ID NO: 176294 - DNA, 449 bp, Zea Mays
ccttaaaggaacaatcaagtgaagagttctccttttgtctctacctctattcatatcaacttggttttgattctactaacatttattataaaacaagtttgtcttgtttagagttgatttttgcaggatcacctattgacccccacccccctctaggtgctctcagcactattcatgttcattagtacttagtactacatgacaattattagtgtaatacgaatttttataatatttaattacgaacacagaataattttaggtttgagaaattcattgtatatgatatctgaatgttcaatcattattctccttttagttcaaatgatacgttaccactcgatgagtttaatgcaattgtagggtatgttatattctacattctgatggtttgatttttgctagatgttcatgcctttttgttttcaacctttagtgaaagcaccttt

SEQ ID NO: 176295 - DNA, 1097 bp, Zea Mays
accaaatcagccctcaaggaaaaaggtctgactgccgaagctgtggttgccgatttcgtcttcaacaatatccagcctttgaaggacagagcacaccctgcatatctgtacaacggcatcaatgatagcatccgggtgacaaacaagagaatccccactaccaatttgctgagccgactggatatgatcctgaggggcagagttttgaatgctagtgctcctgttgcttattctgcctggaacctgccatctcataggtcatttttcaagtttgtgtccaatccttctgcccgtgatggtggtctaggtcttagagtgcgaccctcccctgaggacattgaaggtttaattgccccactctggagtctcccaaagggtgagagacagactcatttcgagatgtcagctagcatggacggcgaggagatggatgttgtgctcaacttgttggctggggagtcatctgagtcgacacatgccgagccaatggctatcatggatgggcaagaacttgttggaatggagacgacccagaaacccgaagaggtccgtccaaagcgtccacgccgagtgagtcggcctaccgcacccgttgaagagaaaagtaagaagaggcggcttcggcgactgtcgagcttggatcatggcgcgggtccttcggtgccggtttgcgatgaagtgccggcagaggtccttcctgaggttgatcccaatggttgcgcccatgctgaagttgatcccaatgggtgtggccgccttgaagttgatcccaatgggtgtgactgtgcaccggctgttgtccgtatatatgatgaagatgaagaagagaaagaagaagaagtcccgctgattcgtaagaacagacggcattacagaggtagtaagggggatagtgacattccttctctagctctgtcagcccttgtcacccttcaggaactgtcaataacggattttgatcaggcccttgaggaggtcgtccctgaggatatgctatcggagccgactgctgatgacatgatggctatttgttcggaaattctagccacgggattggaggtatcccgagcagtgtctcgtgcgccatcgactttgga

SEQ ID NO: 176296 - DNA, 334 bp, Zea Mays
cgcttacttcaaaggtcttggtcgaggacctcgatgctggtatgggtcgccatcccccttcgatgtttattctgtgctaaaacatggttagtcatggtcggataagtctgatcgaggtcgtgttcggccttcgctccaacactagcccccgaggcatcgggtcaacttgatggttcttctcatgctcttgtttctaagtttttagatattatgaacatggagttggagatgagtatgatgtgagagctcaacttcttgcttggactacaaatcaagtaaacccaagatgggacatttgtacaccaaggcaagtacaccaaggatgtcctaaaaa

SEQ ID NO: 176297 - DNA, 429 bp, Zea Mays
aatagttcgagtgcctttgagaatgaagtctttttattgatggtgtattttccaattacagaatacaatgctgccccaatagcttttgaaatctagctaggggtaaaacttcctgagatgttctatattccatgagttccctatttctgtgccatccatttgagtaagtcgatatgatccaggccaagtgacttctgctactatgaatggtccttcccatagtggcgacaatttgtgtcgtccttcccctgttagaattcgacggaggaccaaatctcccactgcgaaagatcgatgttgtatggctttatcatgatagcgcctcagagtttgctggtacctagccgactgaattactgtattcaatcgttcttcttccaatatatcaatatcctccagtctagtggcttctgcttcggctatgttttc

SEQ ID NO: 176298 - DNA, 604 bp, Zea Mays
ctggtcgaacaagtcttctattctgggcaaggggtacttgttcttaattgtgacctcatttagagctcgataatcgatacacatccttctggtgccatctttcttctccacgaataggacaggggcggcccaaggcgaggtgcttggccagatgtaacctttctctgacagctcatcaatctgcttcttaagttcaaccaactctggtcctgatactctgtaagctctcttaaaaatggggcggttccaggaagaagctctatggcaaattcaactttccgctctggcgacatacctggtaggtcctttggaaacacatctgggaactcgaacaccaccttgatactctcaattgggtctgcttcactgctatcgacagccatctgataacaacttcctttctttggttcaagcgggactaactcggtcaccacttcctctcctagtggagacaccaacttgattgtcctcttatcacaactgataactgcctgatacttatctagccaattcatccctaggatgacatctattccctgagtacccattactatgaggttagcgggaaacgctaccccccttatttccacacttacattcaaac

SEQ ID NO: 176299 - DNA, 287 bp, Zea Mays
gttgctcttaaccgtgagcacggttgacatatcaaatttagaatctgcagagttggtacaactttacccataagtcatatcccatctagcctaggttgattggacccgtaaacacttcctaggtgaatggctagggatccactatgaggctttcacaaaatatccttaatacaaagccacccgctaaggtttccatgtcagtattgctggccctttgggcgaggtaacttagccaatactatcaccccatgttaacatgagctgccaccaaaccactgtcgcccctc

SEQ ID NO: 176300 - DNA, 452 bp, Zea Mays
gcagcgacgacgaacggcttattgtgggtggcgcggctggaggaggcaccgctatggagggaccgacagtcagagcagtgcgcgtgtccagagagggagccggagacctgagtgcagcttggggatgagcagaggggagcgtgtgggggacagatatccccgggtccactagaaggctagaagacctcgcgaaaggccttgggcccattgtttcgcaaggccatcccttcgtgggcctggggaggaatgtatggcagagtggatcgacgcaagattggatcaactcgagcccaggcggcccaatgaatttaagaattatccacagcagtgatccgattctcccgcgctgcgccctcaggcgtcggaactgaatgatgataagtcggcagaattataggaagataagctcagtcggttcactattacttaggcgcactttgttatcatatccg

SEQ ID NO: 176301 - DNA, 1366 bp, Zea Mays
ttctgatttattcaaagaccgagaccgagcatgagcagcatctccgtctcgttctgggtgccctaaggaagaattagttctatggcaagttgaagaagtgtgcattttggctgtccgaagtggctttcctggggcacgtgattaatcaacagggcattgcggttgatcccaagaatgttgcggctgtggtggagtggaagagaccctctagtgtctctgaaatccgaagtttcttggggctcgctggatattatcgtagcttcgtaccaaatttttccaacattgataagcctctgactagactcttggagaaggttgttctcttcatctggtccaatgattgcgaggtcagttatcagacattgaagagcaagttggtggacgcccctatcctagctttgcctgagagcggtaagcgtttcacagtttatacgaatgctccgcgtattggtcttggttgtgtgttgatgcaggaaggcagagtgattgcttatggctcaaggcagttgagaaagcatgagggcaattacccaactcatgatcttgaattggccgcggtggtttttgctctaaagtcgtggagacattatctttatggcgaggcttgtgacatttacaccgatcatgaaagtctcaagtatatttttactcagaaggagttgaatttgaggcagcgtcgatggcttgaattgattaaagattatgatttgtccattcattatcacccggggaaggctaatgtagtggctgatgcccttagcaggtccggggttccaaaagtggccttgccgttcatcgctgatctggaccgtttggggatcgctttgtgttatgtcggcaccgctagcgaggagactcgaatgcttattcaatcctccctcatggagagagtgtgtgcgactcagcagcaggatcgtctattgcaggaagctcgaaagagggttggtgatggtaaaccacgggagttcaccattgatgagaatgatttggttcgtttcaggggccgtctttgtgtgcctcagaaatcagaggtgaagatggatatcttgagagaagctcataaaacgccttacactgttcaccctggcgaaaccaagatgtaccgagatttgaagcaaaacttctggtggaagcggatgaaggttgacgtttctaagtatgtggccgcctgtgaagtatgtcaacgcgtgaaggccgagcataagcggtcggcaggtttactgaagccattagaaattccagagtggaaatgggagcatatcaccatggattttgtggtgggtctacctcgttcccctcggggcagggatgttgtatgggtggtagtggatcgcttgactaagtctgcacattttattcccatgaa

SEQ ID NO: 176302 - DNA, 944 bp, Zea Mays
gttgatttgactctcttccggggtctctttagaaaatgttacaccgcgaaggggtatctgttgatatgggccgtcagattagaaacggacgtcccagattaaatccgatcaacccgaaccggtatgcagtgagggccacaggatgatccatcaacggcccagattaaaactcgcccagatccacaggatcggagaccaaaggccccgattcactcctgctcccacgatgcgcacgcctgattacagccctccgttgccaatccaacggccaacccatcttcttctccaacgctacgcgtatacctggcaccatttgcccaacccgaacgcccagtcggccgcgatgcgcaacaccaagccaatcccagctaccggccggcacagtccaggccctacacatcgacaccgccataaaccgagcgaccatagactcttccccggcttcgcatggatggacgtcgaaaggagaaacggtagattagggagaggccataccgcaggttcgccgcacaccggggcttccgatgagcgcacaggtgatgggggatggcggccacgggagcccggttttatattcgcaagggagcggagtcaatcacgcaacgaccggcgaacttttcgcaggcggattcggagaaattcccagcggcaacgtcgggttgagttgaaccgagctcggagttcatggcgacgtgcgatattcacgaccggggcttggtctttatactccccagaccgattccaaaccgccacggctggattcccatggctattccacggtgcgtgtatgaggagaggaaaacccgcgcgggttgttggagcttccctgcgactggagtctgcacaagcgagtcgcgcgggtcttcacgcgagcaggtgcaccatcagcgccatacgcgcggtcggggcagtagcgaggctaacggcgctcgcagagctcgcgg

SEQ ID NO: 176303 - DNA, 508 bp, Zea Mays
cctagcctaactgggccctgaactcgtattcggcccaatacgcattttcgcccgcgcggcccaacttgccacagcaccgtgcggcgacaggtgggtccccttcgtcggtcggccggtgctcatctgtgggcgcccctcacctcttcactggcgcgtgggccccagccgtcaggtccatctcccacgcgagctccaacaagaactccgcgggtccgtcttcctctgctggcgcgaacctctccaccggctctcccagatccgcaaccgactctgcgctcgaatcgcgggaacggattgacccggtgtgctgttgcctcctctccctacgacttcaacagacctcgcgcactacccgtatccgtcgcggcttcttcggggatccgttgcaacgaagcgtgctgccgcatcctttggtcagcacgaactccagtcccctgggctatacaaatcgggcatcgtgtttcccctgcgccttccctcctcatcgctgctcctctacattttccca

SEQ ID NO: 176304 - DNA, 466 bp, Zea Mays
cccgcggagggggtcccgaccgccagtctgacgaactaccacgccgctctcgtcgagggtcggcagcgtggccaggaccgccgttcgcagccctggatcatcacagagcgtcggggtgtcctgggggataatcaaggattcagggacaaaggactcaccagtaatccccttcaccaggagttccagctcctcccaggacagattggtatccgacctgcgctggatcctgccgatatcattcgggctagtgaaccagcagcgcaggcatggcctcctctgcagcggcatgacccggcgcttcaggaagtctccgaccacatgcatagaggtcagaccaccggttgccaaggtcttgatcctgtccagtacgggcaggagctctggcaatagcgatggcttggtcctccaatgcttgcggtcgagggatggcctgttgctcggtagggcgaggcggtcgttggcctcg

SEQ ID NO: 176305 - DNA, 554 bp, Zea Mays
ccagggtccgtccggagtttttgttcaggagatagaacagccaagcaacaccacaggacatgctgaagaatgcaacacggtagagcaggcagagacagatcccgacgattggagagagccaattatcagatatataaaaaatgaggaagagctggatgataaggctatagcagaacgcattgcgaggcaaacaactcactataccatcatagggggtctgctttaaaggagaggtgcagtaagagtcctcatgaaatgtattcactcggctacggggaagcaactgctggataagatatatgcagggcaatgcaaaatacacgcggcatcaaagacattggtagggaaggctttcaggtcaggtttctattggccaacaacaaagaaagatggagcagaattggtccagaagtgcgaagcgtgccagttcctatcaaagcgacaacacttacccgcctagcatatgcaaactatcctagtaacctggccttttgcatgctggggactagatatgatcgggtcgttcaaaaaagctcagggaggatatactcacg

SEQ ID NO: 176306 - DNA, 1624 bp, Zea Mays
cagcattacattcgcgttcatgcttgtactgttgcacctgaaaaacagaatgaattaaacagaggaacatataatctcttttcttacttataaagagacaacacaaaccagacgattcagttgttgaatttctgcagcttgctttgcacactgttcatcacgagccatctctcgcctgatagctccagccaagaccttctccacagcctatatagaaagaagatatgcatgagtgttttacatccaacttaactgatgcacaaattcatgcgccaagcttcttttggtttacttactttcagaaaatgtcgctgcttttggtcatcagatggtactgtcacatcaactggtactagttgtaggtccctgcaagtactgggatccctactctcatttgcagaagcttcaagcagacaactaggaaccagagctagagggttatctctagtttcgtattcttcaggatcagtctgaattgcaacatcaaccttgcaaggttgaatatccatgattctagcatttaatccaaccgatgctctcttccatgcactattattttggtgactttcaatgacttgaagtcccctctgtatactggcggcaatgtttaatttgcattttccatctccaacatcagtaccagtattaaatttattagcactacagcaggacctttttatggatatcaaaatcttatccctgtcaagatcttcaacctgtgaagttccagcacttacattcattgaagcttggaaacgtttggattctttaacattaatagaagacattgccatattttcatgattgtagggcttctcaacatcattctcatcaatttccatttcctcgtcactatcttcttttatacattggaatgttgtaggatgacccaaactcattttcaacagatgcaaactgcgcctagggttccatccagtggcaaagctgccgctgttcccttctatgcctccattagatttcattcggtgaagttcatcctgcattgtaggatatagaaaataacacattactgatgagcatggtttcaaaagcgatagacatccaggagtgctgggcccgcctagacccctaggtgacaaggcatcactgtttcccaaggcaagctgggtaagcctagaccgcctttgcaacagggccgatgaggttcgaatcaaaacaacaataatatagagaaacttggctgtcagatggtacacaatcataccttcaattgcctgatttgctcacgcaacgcatttacatcttcaattttctcttcattaactacggcattgttttttatagctttcgcacgttgagcaaacctaagtgtgcttaacgtttcactcttacagctgtatgacaacaaagaatgtgcagtgaggaatcaggaaaccaacattgactggccacagaatgaatgaattgctgcctgctggtcaacttagatagtacctttgggacggtgaaacagcacaaatcattgccagtttggcattgcctccaagggattcttgtaatagaaatgtaagcttggaatcacgatatggaacatggtgcctttgttttccagactgcgatatttctgcaagtatattaatcaagtttctgcagtgaaaaagaa

SEQ ID NO: 176307 - DNA, 587 bp, Zea Mays
tcggccaaatcctcactgctcagcccaggaaacaaccccacaccacgaggcccactgcactgctcctacctctctgaaacatgtcgcacgcgcccggacacagacatgagggcccgcgcgttagcaggtgtattcacccggcgtagtcggtcgcggaatgagctgggaaagggacgaacggaattctcggatttcggctgagatttccccctctcccgcgtatataacttggtgccgatcttctccaccgattaacgagcccgcagatctacaattcgtcacagcgagaggagaagagaaccctagttggccgcgccgtgagggagaaaacgggtcttggcctatcttcgtcgcgccatcaaccgggctcttgtattgtgccttggcgcttcccctagcttgtgggagggtgtccgaagccgcgccctctggaatccttgcccgcgtcttcggaattgctcgccgttgccaatgcgccgccgcgaaaccggtgtctactgtgggcaaggcagggcactactcgaccctcggtgagttctcccttgttaggtctgcctcggcctcgacttcgtgtagcataatttctc

SEQ ID NO: 176308 - DNA, 392 bp, Zea Mays
ctcttgtagagcaatgagaaatgccaaaggaaaccatcagcaagcctgacgaaggtggactggttaggttgaaatacacctttagatacgagggtaagtttattgagccagatgatgattggctgaaatgcatcaaagctacaagcgacgaacttcttggaccatattcaaagacagaagataacgctctatctacgaccttcggagggcggaaaaagaagaggctgaatagagttttcgatgctattgggtttatgtaccctgattaccactacccgctgaaagggcaaaagagaaaaagcgcaacttctggaaaaggtgatacttcggttgctctaagtgaggctgcgccaaagaggaaaagagtgaaggtccttactcaccgaccacgc

SEQ ID NO: 176309 - DNA, 587 bp, Zea Mays
ccttccgccaccgcctgctgtgccgcgcagctgcacccgcacattctcaagaggggcctgctccactgcgagccctactcggggacctcgctagtggggttcttcgggcgaagcgggcgcttcgacgaggcgctcaaggtgttcggtgaaatgaccgtaaggagcgttgtcacctggaattgtctcatctattcgtttgtgcagtttggacacagccgcgctgcagtgtcctggttcagggagctcgtgagaagtggcgatggcttgtcagatggctcgtttgttgccatattgccttcgtttgggttgccagagcaagttcatggtgtaatgaacaaaattggaatgggttccctctcagcagttgcaaatgcattgctgaattcatactgtacttgtggtgcaatagatgtggcagagaagctattcaatgagataatgtttagagatgtggtttgttggaatacaatgataactggttttgcaaggagtcatgtcccagagagagcttttgagcttttcttgagtatgcaacgtcagggcatttttccaaatgaaattacatttgccagtgttctgtatgcttg

SEQ ID NO: 176310 - DNA, 618 bp, Zea Mays
gagggcgctcctgatgaaggcgcccatgctactgaagtggagcaggcagacattgaagaaggtgatattggtgaagaagagattgattataacaccgctatgccatcgaagcctagccatttggattttggaaagtcgactgtgtctgaagctgatatggctatgatgacgaagctaggctacttcagggaagccgacaaggggttgattcgctttgatggggaagaaactatcccgaaaccagaaaatgatgaagtggtggtctttaagagcttcttcaaagcagggctgagattttctctgcacaggatgattggagatgtcttggaaaattttgagatttaccttcatcagctgacccctaacgccattgttaggctcagcgtgtatatttgggctctccgaagtcaaggggtggagccactcgccgaagccttctgccgagtacacgaacttcattatcagacgaaggctagggaagacggactgcatgagaacttcggctgctacaattttgcttatcgcaaagacatgaagacaccagtggtcagctatcgctctaaatggccgacgggttggaaatctgaatggttttatgttaagattgatgagaaaaag

SEQ ID NO: 176311 - DNA, 375 bp, Zea Mays
ggactaacaacggtatgggtgtgcttctatgtaacacgacagagagggattcatggtggacctatccgctgagattgtagagaagatcctccagattgaggagatgggtacccgagtccgtgagctctaggagcaagtggaagtcagggacaacaccatcgaggttctagagaaccaactataggacctgaagttggagctcgatgatgccaacgagcacctcaagatccaccactaggagcagcaaactgatatggaggtagatgaggacatcgaagaggaggaggactcggaggagttggggctagcctctaacctggacaccacgagcttgttctgttccggtggaccgccttcacctaagtctagtgtcgc

SEQ ID NO: 176312 - DNA, 909 bp, Zea Mays
ggggatttttgcaggtatattacatggctctgcctcattaaaaacctcaccccctgggaggaaaagagtgcgggccggaatagtactgtttggtgaaatacaagggcgcgtaggccctgaggatttacacaaaaaatttgcggagattgtcaatattccaagagtggtctaggtcttcgccggatgacgttgttagcctataagcgcttggggatgccttcgacttgacgatgaatggaccctcccactttggctctagcttgcccctcgactctgtccgggtggttcggacaagcacgaggtccccttcgttgaattctcttgggatgattgcgtggtcgcgccaggccttcgtttgagcttggtatttgttgagggcctgcagggcgaagacgcggtctccatcgatgaggtctttggacgttggctcgtctacgtaggggacggctgatgcacttgttcgaggtgacccgtgctttatttcttatggagtcatggcctccgatccatacagtagacgaaaaggagtgaatcccgtcgtccggcattcggtcgtgctcagcgcctagactgcttcaggtagaaggtcggcccatttacccttgctgtcgtcgagtagccttttcttgatagcagtgaaaatcttgtcgttggcgcgctcgacgacaccgttagattgcgggtgatatactgaggcgaaggcaagcttggtgccgatggagaagcagaagtccctgaagtcctagctatcaaactatttgccattgtcgactgtgagctcggacgggacttcgaaccggcaaacaatgttttgctagaagaatttctgggcagtcttcgacgttactgtggatactacccttgcctcgatccacttggtaaaatacttcgacggcgacgaaagtgaac

SEQ ID NO: 176313 - DNA, 396 bp, Zea Mays
ggaggaggactcgcctgaatccgataccagttgatatgggtgttctcggttgtaagagcgcgttcccggccgcagcccagattgagtaggctggggcgacaccgggagagctcgccggcgacctatggtaatggttggcggaaccaccggccgtttatcgtcggcaacgcctgctgctgagtttgtgggaacaagacgtcccttttctctctgtcgcccctctctcttttattccaaatcctttttcctaaacatagaaactagggagcagtataatgctcaataaggtaactaatactaccattacaaaattgagagatacttgctgctaaataagccgcagctgattactttcctcaactactgtttcctaaaatacaccctattcggttgggc

SEQ ID NO: 176314 - DNA, 1061 bp, Zea Mays
gcgggatcggcgaagtgaatgtaagggggtcggagaggtggggcaacgcgtggcatggttagaggcaacgtggtgacgcatggtgtgggtggaggctacaaggccgcaggtggcacggtcgaaggcgaaggagccatgcatggcacagaagaggtcgctgggaccggtggtaggggaaggggactaggggaggtacttagacgagatcgacatcgagaagagagttgaggtcgagatgtggggaggagccagcaaggggaaaccatcctcatcgaaaacatgtcgagagatgatggtgcaacgagtgagaaggtcggggcaccgtaccccttgtggtcacaggagtacccgaggaaaaaggtagcgtgctgatcggggcgaaagtttgtggggaacgatggcagaggtattaggataggtgcgaatcatgcgatcagtcttgccgttttgaggggaggtgcaaggatatgacatccgcagctacatgtcgtgcaagagaaagaaggcatgagacatggagttatcgaactcctgcccgttgtcacactgaacaccccagatggtgcaaccgaactgagtcaacacccatgcgaagaagtgagataaggtggggaaggtgtcagacttacgacggaggggaagagtccagaggtagtgagagaagtcatccatgatgaccagatagtattggttaccggaaaagctcggtatcaaaggggtgagcattgtgggacatggaagaggtgaagggtaagtgattgtggtgaccaagctgacaagcatggcaaggcgaggtaacgttgccgcggggtggggaatgatcaaggtggacgagagtcgagaaaggacgtcatggctggggtggccaagacggtggttccaagtggaggcagaggcagtggtgacgtgggtggagggtgtggcaacacgtgatgtgggaggtatgtccggaaagtgaataggatagagagtgggaaagagttgtcgcagcgagcgaccacaacacgagtggtaagatcccagatggtgagcctccggggatcaaactctatggaacagtg

SEQ ID NO: 176315 - DNA, 925 bp, Zea Mays
cgcacctccacactttaaggccacgactccctactcgaccgcatccctatccctctgttattctcgccctactagccgccgccataccctctcgtgcctcgccatcgccgtgaggacagaagcacaatcaccacgcgggaggtccgccgcggtgggaaacctacacacccttgcaattggagcgcgcgattggccaaggagcttcgcttgatcgcgggggagctgctcgagtctcctgcggtagagcttagggctaggaaaccgccaattgctcgtcggtgtccgactttcatcaccggggcgcaccttctcgtggccggacttttttgtcgcttgaccgctggtgagcattatctcatcgcctctgctactatctgcattacgcgtaactccgtcaggatcaaaggttggggtccgggttgatggatctgggcacagtggcaatggcgccgccgtatactacacggtctccaccgttgtcgggtttgagtgaggaagaagcgtgtgcgttgtcagatcttgatggacggtgtggattagaaatagtataccggttcggcttgggcttgtcctggccgttggattatcgacgtgggggcgagatcggatcgtgcacataataaatcagcccttgatcatagatccgatgaaccagattgcgtaccgattcattaaagaccagatctaatcctaagcgctgaacccagatccaacagtcagaaaccctagatacccctttggtcctgtaaaactgcaaagagaccctctgttattttagaaacaacccgcgacccagtctaactgttcactatgtctagggattcttacactggagcccctgtgctttctggaatttgacgcctagtccagagaagaataaaaatagagaaataaatatagaaatgggtttttaatataaaaataa

SEQ ID NO: 176316 - DNA, 291 bp, Zea Mays
agcccccgagggtgttgccggtgacgatacggctcaggtgggtaacgcaagctataacccagcccccgagggtgttgccggtagcgatccggctccgatgggcagtgtgagctgcaacccagtccccgagggtgcccgagcgagctctccttcccatacctccatggatgtccacgtcgggtcgtctccaccacattctgatggagtgatagtgatgcatactcctttagcttcaagtgagggagtcgccttagaggtcggcgcatcggatgacaagattttgatatctgc

SEQ ID NO: 176317 - DNA, 330 bp, Zea Mays
ggaaatgcacaagaaaaaaagggaaaacagttttctcctactgggctggctacctcacttttggcccagttctctgcaaccggcccatttcttctcccgcactcctccatttctccacgattgcgcgcacttacaccaggggcccggtggccagtctgttgacgtgcgccgtatcactgatctatgggacccactcatcaggacctcccccttcctcgctcggtctcgaacagaagccgtggacgccgccatggattcttcacgattcttcacctgattcaatgcctatctgatctcttcccgggttctctcccaagatccatgcaccgc

SEQ ID NO: 176318 - DNA, 428 bp, Zea Mays
aaactggtccccttttcttttgaaagggagtaggttgggctgtaaaatgccaaaactcagatcgatacaacatggcaaaaatttcataccatctgcaaaaattacaaactgacaaatcttgcaccatgacaaaattccttgagaaacccagggactgctcagacaaaaaatgatttgactcatgcaaactaagacgacaagttgttttgtttggcagattatgctagcagaggatgcggatgtctaagtgaaactgtgatttattaattacatagagtgtaattcattttatttaattcaggagtactgcaagagttctagttatagaagaacactgccagttttttatttttttaaatatctatgaaggtgctttggactgatgtagtggattggggtaccagtatcaaacatacaactttattccc

SEQ ID NO: 176319 - DNA, 670 bp, Zea Mays
gagtcataaatcaattttataatagtctgtatcaacttaggagttctagtatactctatgttgtaaaggattgaaccctatatataaatacaaggacgttggctctatggagggtgcaacgcttccaggcagctgtttttacagatcttacatgacagactgtggactggcgagtagcgacagacgcaaacgtcacagtctccaggacgacaactcctgtgcgctatgtggacagttggtggaaacaacagaccatatgctcatccccttccctgcatcttttctagagaagtctggtttagtcttctgcaaccagcaagactgcatgtcttcgtggctacggcagattcgaacctgacctcctggtggctagaaccaaggcagctgctcctggcgtccttcagccatggctttgattcattgacgttgttggtttcctggatgatctggaaacagcgtaactgtcgggtgtccgctggcacacttggttgagctggttttagaagaaggcaacacctgggtggtggccaaattctcaactgtttcagccttccttgctagagcgcaggtgacaggttagcctagagatgttgtggggtctatgtcgatcagtgttcaccaatgtagacgagcaggataaggccttggccaatttgtctgtttgccttat

SEQ ID NO: 176320 - DNA, 1293 bp, Zea Mays
agaaaaacagaaggacgaaggagaacagaaaagagaaagcttgcaaaatcactcacggtgcttctagaaagagggtggggaagtccttattcatgaaggatctcagagacaacgcggtgacaaccttgactcacgcttcaatctcagacaacgcgagcggttcaaaggaatgtcagttaggatcattaacgctggagtacctgtgcattgcctctgacgtgccatcagatgctgaatttggcagtgcatgaagatgcgcaccagcctcgcgcccgtgagaccttacttcttcaacgtactgagcaccgccacaagaggctccaccttgcccttcagtcctagctcgcccagcgatgccaatcgtttgtcgacacttgctcccgatcgtgttcttgacatagaaccactcaccctcttgtacaccccccccccccccccccgcgcttccagccagagcaatgttggaagttggccaaaccgacatatagttagtctcgatggcccggagttacccaaccactaaagaagtattgccacaacttctagtgggggtcaatccccaggaacacctcgcacagtgtgatgaagcatgccatgtgtaggacagagttgggatgaagagcagcttgtagaagaagagcagcccccgcatgaaggggtgtagggggagcccaaacctgcgctcgtagaagggcacgagcacgacaacctcctcatcctgggggcacggcacaccaccctcctccaatctccaccgcgagattcccttggggggagaaacaatttcttctccaggccgaggaagcgactatcctggatcgagcagactgggaacaacaccattcacacgaaactagtaaggcgggcgtgagggcgtaaggagctacaaaccaacggaaagcttccagtagaaggaagaaagcaagcgctcgagtgcaaagaaacacccacaaaccaactcagagcatccttttctctacttatgcaagggcctagggagcccaagcagcgcttagaaggacggcccacaacaaacaagcattggggaatctgtcgccccaaacacgaaccaccttgggcgccaagcagtgaggattgtgcgttttacaggatttgcgctgcttaggacaaagcgccacaagggtgtaccgcacagagcgtgtagtcaaaggatgtgacggttacctatgccaacacgccaccagcatatggatcgacggatgggccgatttgcgtcccatcaggctgcccacgccaagaggcgtcatgatgaccatgccttcttaccatggc

SEQ ID NO: 176321 - DNA, 402 bp, Zea Mays
tctcgctactcttgggtgttctttatgacggcgaaggatgaggcttttactcatgcttgagatttgattcttcggttgcaaaatgagtttcctaaaaatgccatgagagctatacgcagtgacaatggcacataattcaaaaatactcaatttgcaaccttttgtgcttctttgggactcgagcatcagttttcctctccgtatgtgccgcagcagaatggtattgttgaacgcaaaaattgaacccttgttgagatggccaggacgatgcttgatgagcataggactcctaggcgttttagggccaaagcgatcaacactgcttgccatgtgtccaatcgtatctttctttgggcttttctgaacaaaacttcttatgagctgcgatttggacggccaccc

SEQ ID NO: 176322 - DNA, 368 bp, Zea Mays
cgaacaccaaagaccagcagcattgctacaacctctcaaagtaccggaatggaaatgggaagaaatcggtatggagttcatatttggattaccccatactcgtgacggctaggattccatatgggttatagtggacagtctgactaaagtggcacactttatacctgtgaagacaacttactcaggagcccaattaacagagttatacatgtcaaggattgtttgtctgcatggagtaccaaagaagatcgtatcaaatcgaggaacccaatttacctcatgcttttggaaaagactacatgagtccatggataccaagctaaacttcagctcagcttatcatccgcaaacgaatgggcaaacggaaa

SEQ ID NO: 176323 - DNA, 636 bp, Zea Mays
cctccttcgtctcttcaactgtcacatcaatgtcgaggcatgtgggagcatcaaggctgttaaatacctgttcaagtacatatacaaaggccatgatcgtgcgtctgttgttatgagagatgcgagcaaggcagccgatgatgttgatgagatcaagcagtatagagatgcaaggtgggtgactcctccagaagccttgtggaggatatacggctttgagcttagtcagatatctccacctgttatgtagcttcaactccatcttccaaacatgcacatggtggcgtttcacgaacggcaaatggtcgagcgagtcgtcaaccgtccaggtgttgataggtcgatgctcacaacatattttgaggcgaacaggctacacgaggaggctcgtggcatcctatatcatgacttccctgagtggtacacttggcagagtggtaagggcaaagtatggcaacggaggaaacgagatacaggtggacaagtcggtagaatagtctctgctcatccggccgagggggagcgctactatctttgtgttctcctaaaccacatgactggcgccacctcctatgtggatctaaggacagttgatggtgttatcctatcgacttttcgtgaggcagcagagagaag

SEQ ID NO: 176324 - DNA, 667 bp, Zea Mays
cccccgtaacaaaccatgttggacttcgtgtgtgcactgggaaatcttcgctcccagctctggaccaagggaaacccaacagatcccccgtgactgtcgttgttgattggatgctatagattcacgcacttctcggggccatggaacccctcggctatataaaagtgcttggctccgtaacaccccctgcatcctgctgccagtgccggaaagagagatagaagaaaatggctgccaccctagaaaacctattggcgaccgtcgggtcccctatgggcggtcggggagagccaccagtgatgcctgcatgtggccgacgtggttctaggcatgaggaccccccagtggttcgccaatttctcaacggagttgggcgccacggcggacccgcaccaagccatggtcgggggctgtcggcatgttcatcctggtaagaacactcctacctagttcgttctggtctcttctacgcgtagcaccattcagtttggggtttggggctctagggcgcaacatcacctgctccggcgagtgcatcgccatgggagctctgctccaccgcgctgtcccgcgttcaagcaggagggagacaggaatcgcgcaccagccgttgaccctggcgcgggcggtacaaattaaaacgtagcttaccccttgacttgatggg

SEQ ID NO: 176325 - DNA, 403 bp, Zea Mays
ggtacccaaagtagtcacatgacctccttcgggtccatttgtcgagcaaccctgcgccggaagcagacgataaggtcttttgccaggcaagcttgcgagccggagcgaccgaccaagtccctactgagcaagcctgcgaggcggagtggccgatcagatcctttgctgagcaaggctatgagacagagcgaccgatcaaatcccctctgagcaagcctgtgaaacagagcggttgatcatgttcttgaccatgtgacatagagctaccgaccaagtccccatcgagtaagcctacgaagcagagcagccaaccaagtctctgttgagcaactcagtggggtggaggtcacaatctagtgctactaacccacatcagctatgactagacgtatcaccaccaagc

SEQ ID NO: 176326 - DNA, 751 bp, Zea Mays
cctagaataaccttaaatgggccatttaagtaaaaaggaagaaattggtaaaaagaccatgaaaaacatggaatcatggcttaggaaaattataaaagttgaagtacactaattaggctacaatttctattagaaaagtttggccaaaataattaattaaaatccccaaaaaggccatccaagtggagctctctagggaaacctgaaaattcagatttctgaatttcagccgtcacctagaacttgagcacgttcaccttgatccctagctcaaatccttaagaacccattgacaaagttgtgctaaattaacccctctgcaacgtgtgtgaagatggcatcgagattcgtgccatggacacgtcaaatctaggatttcatctcgggttttagcagtgagacaccctctgcagagctcgcccgtgcccttaaagaccacccccggacgcggcacacctcattcctcgcatacccccgctgaccagaccccgtccttagctccgacgagctctacgccgcccacccaagccacccgagcaccagccaccacgaccagccttttccagagacccctagcctcacccaagcctctggacagcttccccgagaagccgtgaagcttctccaagcaaggattgaggccctacctcaccggaatagcgagatcaccgtcgtcggacttcggccgcccgccaccgcacgtagaccgagctatcaggtgaaccattcttcaattcctcgcgcccatgcc

SEQ ID NO: 176327 - DNA, 474 bp, Zea Mays
acaggtgccacaattcttttatttcctcttgttacttttgttgagatctgatcaccatcattggataagttggcacgaccattgttacgacattgggattcctgaatatgtagaatacaataaggatatgcatatcaaattcattgcgaacccaaaactaaagatagataattgagaaactaagaattaataagtactgtagtgacctcttcattagaattgtcagtgttttcaccatcatataaactctctgattgctgaggagagtcgtctttgttgtttgcagctgtagcagtcatcagtgatttcagttgtccaaggcctagccgttgaaacaattgattgttcttcatcatattcatagcccttattttctcgtaatcagttggcataggttctgttaatgtaacacaaagtaaaataaaggaatacaatactgaaacaaaataaattaagaaggtattgccataaaga

SEQ ID NO: 176328 - DNA, 343 bp, Zea Mays
accttgccctgctgccatgccggtatctgaagtttgttgatcagctttgtcttcaggcgcgacagcctttgtctcaatgagcactgcaggcccagcttcggcttcgacttggaccttggatacttcgacaactttcttaataggagcaggggtcaaggtctttgtggtctccataacagcatctagcacgctggccatccttctcctcttgggagctgcggcaggacctttttgcatcttcggcaaatttgcctctgctggtgggctcagaatttctggcatttttactgtttcttccacctttggctcttcgaccgtatcatccttagcttcggctggcccg

SEQ ID NO: 176329 - DNA, 792 bp, Zea Mays
cacctgattcagcagtaggagcgtcaggcagctgagcagactcgccttgccatagagcaggcttggatgatagctgaccaggctcgatgtaatgaggagcttcgcctctcccagcaaaggcaagatgacatgatgctagctctagttgaaaacattcaacatcgctaggacatgttccagcagcagcttctcgtagatagggcgaagcactgggccttcatgtagtttatcttcagcacaccggtgctccagtgcctccaatccagtcggctccgccccctcctcttcagactgtaatagttctagcgaattagagtcagtctactagagttgcctttttctcgctctatccaatcacccttgacttgtccaccgaggccattggagtcgagagtgttcaagagatagtgccacttatggttccaacagtttctactcctttagtggcagtgtctatgccagctccagccctagaaccagctctagcaccagctacagctccacagtctctgtcgtcagatgcttttgagtcagccccaggtccagcctctaccaaagatattggatcggctcttacttgtaccttgataacatgtttgagctgactcctctccctcgcctagatgcgcctgctgcacctcctcaggattcgtagattagggcctactttttggtacttgacgccaaagggggagagaagagtgtatgagagttagggggaactatgagagttagggggagctagagagagatacttttgatgtttcatatgttatgattgtgtgatactct

SEQ ID NO: 176330 - DNA, 797 bp, Zea Mays
ttagtgatgctgctagaataatttacttttcagtgttgtgtttcggttaatattattcatggatatgtagtttcagtttatctcatatatttcctgttgactagcaccttactatttaaaaattgtcactgcattctttgagttataccttgagatctctgattctctgatgcatgtgttttggagctgaattattttctggtgtttgtcaccttggaacacagaatcatattgatctttgctttcctttgcactgctcaacatcatactcatttactgtaccatttttttcagcttgcagtcatactgatcagaattgttattgttctttttcagattcagattgtagagcagctctgtctgtgtttgtcaccttggaacacagaatccatactactctccccccataaggtgtgtggactccctaacaacaatatgttgtgaaattacactgatttttgcccgtgcgttaggaccaaatgattgccccatctgttaggaccaaatgattgacccatgtttttgttattgtagtatattacaacctctcgctaaataacttgttttctactagacacattggatgtgtacatacttatgtttggaaaaattggcagcctactaaaaaatacaatggatgtgtacataaggaataaagtataaacttcttgctttctcttttaatttgatcatatgaggtagtctgggaggggaattacttgatgttccttgtctcgacgcttttacacttacccacagaccatcattctgctccactttatcgcagtcgtcttatc

SEQ ID NO: 176331 - DNA, 466 bp, Zea Mays
gagggaagctacacaaacctgaaggcacgaagaccaccccacacatgcagagaaactagggctacagctcaaggtctcaaggacagggaagaggattcactgatccaggttctaaagcaaccaggataggggcagatgtcctcgagttcagctggactggtggagaagtatgaagtcggctagaacttgggggaaatctcaggttgtgttcttgtatgccccaaacaaggacagcagttgcagctagcttggacttccctttggggtcatatatagagggtaaaagggagccaacatgctccatctttctcctgcatgactaccacgtcaaagagaaacacagtgtgaccaggagtactctttcactgcatgttggacagcactacaaatagttcaagcagctgagtcaccactagatagttctctaagttgttagttgtatcttcattaaaaagggactgcacaa

SEQ ID NO: 176332 - DNA, 644 bp, Zea Mays
gcagctaagaccgttgcaacaataggaatggaagcgtaagagtcactgtagtccattgctaatttaaatgttgcccatcacaactagacaacgttttttcagaggcaaaagaaaagcgagcaaagaaggccacaattaaatctaagacctatttgataacagtggcattcagactgttgtaaacaacaagaaggcacagagaggcagaggatgtacctagaattagcaatgccggaagccaagtcatcgccatcaccagttttatcagctgagcctcccaatatcttcctcgcaacctgcctggtagctgaggacccaccttttgatagtggcgttggcgaccttgcacgctatatcgaagtgcataaagtttgtaaggcgacctgagttggtggcaacaacaaattcattgagtgttcgaaagcatgggttaccttatccttgccgtagtttttggtgctctgtggtgtctgagaagagatacctccagttgggacagagtctgctgatgtagacttggatgcagcccgcgcagacgaaattgatgaaggttgggatccactgggtgaaattggaacctgacctccatcaccaatctcggcgacaaccgtgttaacctggaaacacacattgcctaaagcaaa

SEQ ID NO: 176333 - DNA, 416 bp, Zea Mays
gtgggtgtgtcttacaggtagggacgctaagaggtggcccgcgggtcagagtcgctggtgaagtggggttagtgggggcgggtatgtaatcatcgcagggttaaagggccatttgggtgtggtttattattaccacgaggggaggggagctcgagctcgctgctagtgctaatggcggagagcgatggtggcagcgaggcgcagagtccgagccctgatccaaggtccggggacggggcgaaccctgacccgcgcccgccgcggccgcagctcaccaagtcgcgcaccatctctggttctgttgcagcctccatattggccgctgatagggtagcaggaggaggaggcggaagcggcggaggcggtctaagggacagcatcctcgttcgccgctcctccacggcgcccctcccgcc

SEQ ID NO: 176334 - DNA, 661 bp, Zea Mays
ctccatattcggcaggccacaaagggtgacagggacttcgctcccgggataatgcgaagtcttggttgtcgccgtctggtgcggcctatcggagtccccgcaccagcgatcctgcgaaaacaatagaaagcaaagtggggtttccgttagtttggagccaaggcgggtttagactccgctcaacggtcttcgctctacgatcgaggttgtgttcggtctcctccccaacaaccatatcccctgtgtggcccagattggtacctccattcccaaagccaggatttttcagtttgagaactattgggtggatcacccgggtgtattggatgcttggaacaagcatgtgcctgcaacctctagcgttgcacgtatggtggcgaagtttaaaaatctcagatataatcttgagaaatggagcaagtctatctccaaccttaaaagtatcattgataattgcaatgaagtcattcttgtgcgggacaaattagaggaacaaagagctctctttcttcaaaaaaaacaatatgaggatccttataaaaatcagttgccaagttcttgaaatttcagaatgtttattggaaacaaagatacacagaaagatgggctaagctaggagatgaatgcacataattcttccacgcaactgcaacaaatagat

SEQ ID NO: 176335 - DNA, 506 bp, Zea Mays
ggactgacgctggaaagtgactaccatcaattgctcctatgcaatccttgaagtgtggccaaaatctcgcctctcgcaaacgaggatgaatctcgatgaaatttgggcctttaggcttgattatgtcagatgacatcttatacagtgcattaaggacttcaatatacttgcgactaattgtttccaaggagtgaccaaacttattccttatctgcctaaaagattgtggacccccacatgcccacaagaaaatgccaagagcttccatagtactgacaccccggtttggaagcagaccataattttcgaccaacgtgtcatgcaatcgtctaaaaacagttcgtcgcatgcgaaacatgtcaaagcagtcgttactattctccaacgttctctcaacccattgaataccagtttcaaccaatgttcttctaggaacctgacttaaaggcctgccccaaatgtctacagcatatagagcaacaagcaattctgcatctgtgtcatcc

SEQ ID NO: 176336 - DNA, 561 bp, Zea Mays
cacgatcctgggtgctcggcgaacatggcaaaggacataccagaggcagatacggtctctgcgacggcacccacgacgtgaggcggattggctgccgatttcacggtacgacgagcaattccatgagtgtcaatccatagtgcgcccaagcgaggttctccatggtccaccacaccatggtgaacacccgagattacatcctggatgccaatcgatgctgagcgcgagttagggtgtcggtgtatactctagattgtcgcggcggcacacttcttatgcacggctatggcttgtgcgcattcttataggtccgggatcaaggaagttggctagcgcacaactcggcctgaacggtttcaacggcattgacgaattgctcggggaaatcccaagaatcgcggcatcgcgacaacgattccgatagtcccgagctgggagaaacgcctggcaccgtggcccacatggcattcaacagatggtttcttgcgagcgcgagcggctggcgaagcgagccccacatgtagtgggataaggtagcgggctcgcggaacaacgccttgc

SEQ ID NO: 176337 - DNA, 471 bp, Zea Mays
gacaatctttaatgaaatgtcctgcttttccacaattgtagcaaggatatttagtgccggtgggagaaggcaagcggggaacttgagtatttgcatgtggaagctggtttggccagttggcgggacgaatgtaagtggggtttttgaaaggataggtagttgaacggtaaggaacatttgtagaacgagcagtcctgattaccacctttttgcgtttcgccgatgactgagaaaaccctgacctagaacctttccatgcctccttcacattttgatgtactcgcgccttttcttccacggctatggccacacttattgcccgattgaaggtaagatcatagcaagtggccatcttcttttgcaattttgagttgaggcctctcataaagcaatctcttttcttgatatccgtgttcacatgctcaatagcatactgagaaaggttgttaaacttcccaatatactgcatca

SEQ ID NO: 176338 - DNA, 511 bp, Zea Mays
tagactgtccggtgtgcccacagacagggcaacttttgggcttatggagaagccaacgactcctaggtcccttagggctataaaaggatcccctaggtgccttgttgtagacaccaagcatctcaagtacacactacaactctaagtctccgcgaccacaccctctagtgatttaagagagatttgagtgttttttctgagctgtaactctattgctttgttctcgcgctcttgtcttggctttttatgcatgtgttgctgagttgttgaaagttgcctggaggggggtgaataggcaagttaaaactttttcaacaaaaactagaagcaaactgggtaaaactaaattgatcttaaattcacccacttaactttgaaaatgagatgttctaaatgatccacagggttcaaagtagtagatctgagaaggacacttctcaaaatccacaccaaaaagatataaacaaatctttcaaggaatggtgagagaacgaagaacatgtataagcac

SEQ ID NO: 176339 - DNA, 350 bp, Zea Mays
ccgccgagtcggggtgccaggaggtgtaccgcgcgctcgtgaacgccagagtctccctgctcaacctgctcacgcccacgttctgactctgacgccatctgctcataaaaatttcttggcgggccagacgtttttgccatcttgagtgagtcgtttgcggtgtgtaaatgatgtaaataccccccctagtgcttcggattgcaaagggaactagtcctggttagccgagaacccttgcggcgctttgtctcccatttccgtggccctcttctctgcttctgcacaagtggccaagtagacagacatttcgatggttttgcaagaaaaattagcaggcgagcggatgacaa

SEQ ID NO: 176340 - DNA, 1002 bp, Zea Mays
ggatgaatgaatgcaatagtagcaatagatgaatcgtagacaaacaagttgcggggaacgtggacaatttgtagcttcctggattagatcaaacgagaacaacaaaaatttgacggatgctggaaggcttcaatgatacagtggtaaattctttcttataaaaatgaggtagccaattagatcagaagagaatatgctaggtgtgcttgtatatgacataggcttaacaaacttgataagcaaatcactcagagaaaccaagcgatttagcttagtagctacatcccaaatagtgaccattcctttctttgaagctcaaaggttatcactctgttgaagaaaccacaaatattgcaatcattttgctcaacgaggaccgacagccgcgcaccagtccgctaccgccactcgctacgaggaagcctgggcacggagaagcatcgcggtcgccgccctgctcctcacgctcgcctacgtcagggggctgctcatgttctttcttgacgagaggctatccggctgctctatgggcggggcggcggtgggaggcccatgcccggcagtgacgatggcctcctccgtccgtccgtcggccctccccaaccccgaggacgcgttccctcacgttcaacctgtatcgttgtaccgcaacgaccactttgtgtttgagcgtctctagctggacatgcgcgacggatttgagcatcgcgggctcacgacgagaatataaccacatgttctgcttgctcatcgatgtgtctaattcaaaagggaaagtcctacaatggttgggcattcctttcctgaatattgtgtttctaggtctgttgcatgcacatctccctgctatccatcttctcatagctctagcatttgccactctccatgcatcctcatgtgaagtcactcatttgtccctatcgcgactgtgtgaaggtggacagatcttcattgctgttgttggcctgctacaacagcacttggacaggcggatggatcttc

SEQ ID NO: 176341 - DNA, 610 bp, Zea Mays
aattgaacccttcccgagcatttcccctaacttaatttcagaaatggctaactggttgactctggcaacgacgaccgcgagcggagcaaagggttgaacgcattcccggcgattaagggggactcagttcaattgggttggttgaggagcattaggggagtatactaatactgaaacaaggtaacagagggcgtgaacaaacctgggagtggctgaccgcggcgaggtgttcttcgctgtgtgatgaacccaatttggggaaactcgaaattcgtgagctctggcgaacgattgagggtgggagcgggtgctttggtttcgtgatgacatagcgcagccgactcggccttcaatttatagagggcttaagcggtggtgctcaatttggccaagcagtgctggcggccggaggggagaaagagtactggcgcaacgaattcgtgtcccacgccgtggcagttactctggtgatcaacagagagcgagagcaggtcacgacaatgcggtggaaaggtataaacacgcggcacgaggccgagaggcggcggtcaccggcgtgcttatcggatttcactacagtgagcctggtacagcggccggatttatttac

SEQ ID NO: 176342 - DNA, 558 bp, Zea Mays
gggtctgactgcagaagctgtggtcaccaattttgttttcaagaacattcagccattaaaggacatagcatacccgacttatctatatcgaggcctcgctgattcgacccgggttaccaacagaagaattcctgttatggacttggtcagccggctcgagatgatacttaggggcatggtgtcgaacatcggtgctcctgttacatattcagcctggaatctgcctccttccagggcttttaccagttttgtgtcgaatcctcctgttggtgatagcggtttgggccttagagtgcgaccctctcccaaagaggttagtgctttggttgcctcacttggtgaagtccctgatgacgagaggcaggttcatttcgaggtgcctttgaatccaagtgatgcagagataagtgccatgctggatatgttggctgaagattcccctgatgcagcccctgctgaaacactggctgtagcacccatcccagaggctgacaaagctttggatactcagaggtctgatagtgttcgcccgaagcgtcctcgccgagccactcaacc

SEQ ID NO: 176343 - DNA, 1217 bp, Zea Mays
aaacggagatcaaaagaatcagaaataatctgtgccatagtctcagtggtgaacaatgcagttgcccagttgtcccgttcaaattcctgaactattccgctcattgtcgccaccagtttgctgatttcttctttgatttccttgatgtaggcaaatcaatgatacattatttagagcgtgattggttgcctgctcggcccagcctgagcgtatccagtcattcaggcccatggcggcatgctaaagaggtgcaataggctattgtttggttactttgtttcatctcatgatggcccattagagcttgcctttggttgcaaggctgtacagacacttgagcatggcaagcctcccaactagagaacagaagacaccagtcatgacaacgatgttctttctcctcactaagtatgcaccttttcctcttgttgcctgccgcagacccactagtagcacctgcagctgcctcctagctcttcggagcctccccaaacagccttgaaacatcatcaaccttcatggcatctgtttgtagtgagctctcagcaaagtaagatgtggtacccattgcaaacttgccagttgcaagaccattgccaaagatcacttccatctgcttgtaattttctatttggcatgtttaagtactcagcattcttagcccttcagggtgtgcctatattgcaagctcacaaatgttagtgtaaggctggaattaggttagtgggcacttaggaaaggttacaaaatcacagatacaattaacatacatcttgatatggccacctatagtgcacttcatctagactgatcatgtgtcattcatcatcatcatcacaaaggggctatttgtttcggtttttcgctagattttagccgtcatagtcgacttctagataccagacacagaaaaccgaacgcttcgcatctcagtgcgcttcaatgaaaatcatttttttttgtaaaaatcgcctaaatctgttggaactttgttccatatgctcttggcaagttggtggtgcgataaggcattgggaagcaagagtgcagcatggcaaagcgacctagattggtgatgctgggaatggttaggtttagcggtgcaggtgcagggcggcgactagtcactagagcgtgagctcttgcgtgctcagaggagatttcatacattatttgctccgtacaacaaaaaaaagtaaaaaaaatatctgtatccg

SEQ ID NO: 176344 - DNA, 875 bp, Zea Mays
tggttccccaggtgatgcttttggacaggacgacatcgttgattgcaactcaatggtacgtatgggtgcacgccggatcacacaagagtttataaaagttcgggccgctggaatgcgtaacaccctacatcctgtcgaggatgagtatttgagtattactggtgtacacgggttacaaatgagctgtgggcagaggagggtgaattatcctattgatctagtggtggcgtagttgctatgagaaggctaatgagctatgaggtagtgaatttatgtgacgagatgattcgcgttcataggggtaccccctcggccttatatagatgcccagagggttatccctttataggtcatgatgatgactatctaactctatctgaatctatcctttaacgtggcatgcattcctatttattcggagttcggtcgaccttaatccgagttatctctgagtatctaactcttcaagtatgtgccacttcattgtgtgaggcatcaacgctccttctgcgcataacttggtcgttcggtcttcgtctccctgggtcgagctcatccaaactagttgcggcccgagagtgtgccttgctatgcaagccatcagaggcccatctagcggcccatggggcgtttttgtgctcccacccaaggttggcctcgagcgagtcgtgactgtgtttcctatccaaggttggcatcggacaagtcgtgactgcgtctcccaccgaggttggccttgggtgaattagaactgcgtctgccgtctgaggttggcctcgggcaagtcaaaatagtgtctcccgtccgaggttggccttgggcgagttggaacaatgtctctcatccaaggttggcctcgagcgagtcggaactgc

SEQ ID NO: 176345 - DNA, 595 bp, Zea Mays
ctagatggttgttcattgttgttttggtgctcgtattgtaggatgcatggtggcccatgcgtattttgctcgggactgttgcgaaaacgatttatagcaaaaaaaattggggacttttgctcggatacggtcgtcataggtgacttcgcacctttgggtgtttcgcgcatttgtgctgatctggatgcacccttgggtgacttctacacggatatggtcgttgttagacgacttcgtacccttaggtgcctttgcacatttattgtgttggtttggctacacccttaggggacttttgcacagatatggttgacgttagacgactttgcacccttaggagtcttcgcatattttttgtgctagtccgactacacccttaagaaacttttgcacgaatatggttgtcgttagatgacttcgcaccctaaggtgtcttcgcacatttattgtgctcgtccggctgcacccttaggtgtcttcacacattaactatgttggtctgactacacccttagacgacttttgcacagatatggtcatgtcgcgcatgacagttgatttttgtttactgtcgtggtgatttcgctagctgtcg

SEQ ID NO: 176346 - DNA, 648 bp, Zea Mays
gtggatctagcgatccatggtaacatagttcttaacatcttggatagcgatgagggagccagggagacaggtccataggggtacctgacatcgagcaacgagcaacgtgctatgactctagcaattgcatgagagcgagcaccgggcgatgtgttggtgggcaccaggcaatggcgatgagactaacacacgacgcactagtggaccggtggcacattgacgcatgtgtacatgttgggcttgggtagcctgatagggccttgagctggcactacaggcaaggacgagtgactttagatgtgggttgtgctactgtggcatgagtgttggttgtcttagccatcacgtctaggcgtgtggcggtgggccggtgtccagtagatgaatttgtgaactacaatggctttagagcttgactacatgagagatgactgaggactttttatttctgaaattagcatctcccacacgctgattttttgggtagatcgggtacttcagctactagaatgtttgacccaaaattgccttaataattttgggtattgggagttgataccctaattgttgtttgggttcgggttatttgggttcgagttttgggtatcggatcttttgcccagccctaggcacgaggacgtggatggg

SEQ ID NO: 176347 - DNA, 799 bp, Zea Mays
ttagtgtcgcttttcaccctcagactggtggtcagtcggagcgaactatccaaaccttggaagatatgctgcgtgcttgtgttctgtcttggaagggtagctgggaggatcatctctcattggtcgagttcgcttataacaatagctgccaggctagcatcaagatggcaccatatgaggccttatatggaaggcggtgtatctcccctctgtgctgggagaattttggagagagatcggtggttggtcctgattgggttcagcagacttcagagaaggttcgggaaattcgttagaatattttggccgctcagagccgtcagaagagttatgctgatgtgacgaggcaggacttggaatttgtagtgggtgaccaagtccttctcagggtatcacctactaagggagtcgttcagttcggtgtctctagaaagcttagcccgagatacattggactgttctctatcttggctcgggtgtgcagcttggcttatcgcttgcaattgccggattccatggcaggggtacacccggtatttcatgtctctatgttgagaaagttcttgcgggatctggatcatcagatcaagatggaatcaattgctgtgtagcaggatctgactctggagtgtcgtccggtgcgtatcttggagtccttagagcgtgttatgagaaacagatcaattaagtatgttaaggtcttatggactaatcagtctgagcgcgaggacttgggaacttgagaagctgatgcggcagaaatatcctgaacttttcgttttgggtgagttttgttttg

SEQ ID NO: 176348 - DNA, 660 bp, Zea Mays
tcaataaagttggtcgggggtatcaggggcacacaagaacactaaaacgagagggcagagggcatgagcagacctgaatcgagctggtcgcggtgaggattctttcacggtggcggaaactcagtttgggggaagtgagaaatttgtggtctctggtgcataattggaggcaagcgtgggtgcgttggcttcgtgataacatggtgcaacagacccggccatcaatttataggatcgttaagcggtggccggggatttggacgaagacacgcggcggtcagaggaataggaggttactggtgctctggttagtggctttcactgtggcagtacaccggcgatccccgtgcatgcgagacgcgatttacagcgacgtggtctaacgctttagcacatggcaggagatcgacgggcagccaatgctggtgaactgatctgcgctggccgcaaagcatgggggtacgacggccagctactggagttatccccaggcgaagatcttttgccccgaagtgctatccggtcactagtgagcgcgaatcgtaatggcggcgacgatcatggcacggattcatcggcggcgaggaggggtgaacctaggatcatgttcaggttactgtaccatggcgcagtctactcagttgacctgacagactgtca

SEQ ID NO: 176349 - DNA, 1148 bp, Zea Mays
cgcatcgcgctccgatggaatgcccggtagttccactggaaacacgtcggcataatcacacaccacacggatgtcctacacccgcaaggcagcctcactctccaccaccatggagtaagagattcccgacttctttgaccgacgatccggaagtaattgggacaacaatgagagagtgagctttggagaacttcccaagattaccacctccctacctgacggcgcctgcaataacactgtcttccaaaaacaagatatggctgcgcgatactgagttaaccaatccataccccaagataacatcaaatgaccctagggaaatcaccacaagattagctgaaaatacctcattagcaagaatgacggaacaacccgggtagaccgaacaactactaatggagccattagcagaactaaccacaattgggtgacccatcctctgcacggaaataccagcacgcgacacaaaattctccgaaacaaatgaaaaactagcgccagagtcaaaaagagcatgggaatcaaacgagttaactgagaccgtacctgtcaccacgtctccctgctctctgccatccgtaaagggtagcacatatgctccagaaacacccgtagaagaggaagctcctagagtgaaattaacagaagaaccccacagagtcgtaggatgaggcaggcgtggagctccaaacttggatggtacaagagcggttagtgcaggagtgggcgtggctaggtactgaggaaaagcctgcataggcacgaactgaagagtcccgggcatatagaactgctgctgaggggtggtatagaaaattgctgctcagcgcttgacatcatgttgacagtaccctgcaaagaggaagaagtcactggctcccatttaagtttcccattgagattcctcctacacaccacatccttgtgatcctggtgcaagtatttaacaagttttccaaacgaacgggtatcggctgatctcgatcgcacgatcattgatcaacggccaagattagatctgagcgcgagcgtaaacgggggcgcgcaggtgagcactgacaagcgagccaggggtgtcagtgactagggagggaggcggactgaccagccaggcccaggggcagagtgcgcggacgtgaatcgatgtt

SEQ ID NO: 176350 - DNA, 729 bp, Zea Mays
cggattgaagaaaccccatggaaatattttttcaagtttgcataccaaaatcggtatttgttgctcaagcttctccatcatctctttctttatttctttagcacaaagatgtctgtaaaagtaacttagctccgctaatgctttccagacatcatttttttacaaaaccatggaacataacaagagtctttccattattatgtggtagtcacgactcttcaacccggaaaacttgcccgtcttcaaattcatagaccttctaaagcccacggcgtaaccatctgggaactttaagtttttcaaccatttcataaattgtttctcccttttaggtttaagactgaaaggagcacgtggcttcttctggttctctcctatctccagagttggtcgtctacaaattaaggccaagtctttcctagccttagggttgtcttttgttttgtcagtgatattcaggcaagtgctgataatgctttcacccatatttcgttcatgttgcatcacatcaatgttatgcattagaatcaaggctttcgtataagggagtacccatagaccacatttgtgagtccaattattctcggttccataaccttcaaaacgatttccatgttcgtttaatttcaaatcattaagtatcgcgataatctctggaccactaagacgcttgggtggtcccctcgtcacaatcatgtcctttttaaaagcgttcctatcgaacctgaa

SEQ ID NO: 176351 - DNA, 385 bp, Zea Mays
agtgatgctagactagttgattctatgtgtctctggtgattagatttgctagtaagctttatagaggaaggcaaacttaattaggatgattggggaatgacaaagaagctaaacatgtgcttatgacgatgaaggaccttacaacgacagtgttctatttcgatgaacaagtactagcaactcagatcttaatcgggttaaagagatgggttaggcttagtaccttgtagcaaagcttctggtatgcttcttggcaagaatactatcggagacaagctatgcatgatgaggtggcattgtgaggtgacggtgaccataggctggccaatttaggcctctaaagttcacttggttggacttctggatgttttagagtctggcaaag

SEQ ID NO: 176352 - DNA, 503 bp, Zea Mays
ctgagtgctcttaggaagaatcaattttatgacaaattgaagaagtgcgccttttggctatccgaagtggctttcctgtggcatgtgattagtcagcagggcattgcggttgatcccaagaatgtcgctgctgtggtggagtggaagagaccctctagtgtctttgaaatccgaagcttcttggggctcgccggatattaccaacgcttcgtaccaaacttttccagcattgctaagcatttgactagacttttggagaagggtgttctgttcatctggtccagcgattgcgaggtcagctatcagacattgaagaacaagttggtgagcgcccctatcctagctttgcctgagagtggtaagcgtttcatagtttatatggatgcttctcgaattggtcttggctgtgtgttgatgccggaaggcagagtgatcgcttatggctcaaggcagttgaggaagcatgaagggaattatccaactcatgatcttgaattggccgc

SEQ ID NO: 176353 - DNA, 558 bp, Zea Mays
gggggtcgggatcatcgtccccgcgcgattcgcgggcgagctcaacgaactccgcaaacgcctcccgaagatttcgccgccacgatcggactcgacaacctctacaccgcctctttgtatcccattttccctgggccgtgctcacggttcgccagagccagccccgcgtcagcagagtggagaaaagggaggaggagagatgtgcgtcgccgccggggggattgctaaacgctaatgactcataactgggtttgatttcgtcgacgtcgtcgggtgccttggagggtgtccgtggtgtcctcgtccgggttcggtgggcggaaaaccggcgatttctcgccgttgccagtgctccgccgcgtatccgccttcggctgtggtcgatcgacggcgcttcatcattctgggtaagtagccctcttcaagttcactcttgtccccgctacgtttagagcccattaccttaggaattcgtgcattggaggcttggattggggtgcgcgccgatggtgcgccgccgtgcgggctagctacgctgcgcatggccgtcggtctgag

SEQ ID NO: 176354 - DNA, 1035 bp, Zea Mays
tcgaacttccatcggcgggcgagatagtctttggtctttctcccgtggctatggtggtaccggggccttccgctcctttcttctaagtgatccgagcccacaccgaggtggatgatgtggacattgtagtccgatcaccaagggtgttgcatcggttggctgggtcacaggtgcctgggcctagccgatgcgagtgtgatcctttgtggggtacagactggttgaggtcttcatgctttagagttcatcatagtagtccttgctaaggttatgtggggcgagcctgcgtccgcgataggatccatcggaggatattgctcctcggctggatccgcgatgcggtgcagaactcccttctggtctgcgatgcaggagacggatccagagtggaaaacctccccggtgttgaaggtgattgtggtgttgaagacgactaccatggagtcgttgtgaatctatgtcgcgcctcctacctgggttgccagctatcggtgtttatgttctgactcacactacggggtaacccacatagtgattttggggaggacggcaccgttgattgtgacttgatgatacgtgcaactctggaacacaaggcaattatacgggtttaggctgcttgaatgcgtaataccctatgtcatgtttggtgctgagtattaaatttgtgggtagagtacaaattacagttgagttgcgggtggtgatggatgagatctcctatcaatctagtggtggcatggttgcgatgagaggaatgtccagagagagttttttaggggttccccctcagccttatataactagctagggagacatgcctttacagatcataacagcttgtctaatcatatttgagtctatctacgttcgcttctattcgcacgttgattcttgcagagtctagtcacctgaattatcctccacgtatctcggcgtcctattgtgtgcaaagtatgccttcagcgatcctttctttgacgggtacgcacagacagctgccttgcgccacatttcttcgggattgcctctaac

SEQ ID NO: 176355 - DNA, 625 bp, Zea Mays
aagaggcacgattgtttggagatgaagcaaatgcggggaaggtaaccgcagtgcacagtgtgggcccttatctaggtagactctcccgcacacaccctcggatcaccgcgcaaaatcccaagtgacgaccacctataattatcacagttaggtcgctagaagcaatattgtcgttcacatgcaggttagaaacctcacctaaggtggtcccatgggccactatcgatatctcatatctggggtacccactactactgcctcaaggcagactcctgcacgattaactctaaactatacgctaagaaactaagtaggcatgccccatgtctccatgtgtacttagttggtgtgcacttagggctacccctacgggtctagacccccatggctgaggctcgtatccccgcaaacaccactaaagtccacacggggtaggccctggtctgacgtgtgtaaacgcctagacctgaggcattgagtcccggaccccaaaaggtgtgagtccgaggcttgctctgtaagcgtgcccttggcccgcacgatctgtgaaagcaggggtctggagtcgccatgtggccctagggcgcgtagcacaacccttcgtctcgaagtaaactctccactt

SEQ ID NO: 176356 - DNA, 830 bp, Zea Mays
tatgcatcatgtttaaactacactaaataaattttcccctcttatggggatatggcgcgaaccaagaccactcagcgcaaatcaaccgggcctcatggtgtaccctggcatcagctagcctctagacatgaaggaagcagcaatggaagcaacgaccctataggggatttggaggccagagtggagtgactcaggtctaaactatgccatgggtgtagggagcatgcgcgcgatagccgccgcatcactgaactatcatcagaagttaatcgcctgcaataggaaattacgggacgcgatacaaccattgactgggccgtaaattcacgctatttcgcttgggattgtgaagccaaagctctagcctgggtagcagaacttagcgcatccttggagaacctacaagtgtattgcaacaccctacatgaagaggtgcacatgttgtatgatcggctgcatccgagcgtgccaccagaagttgcagcaatgggagtcggaccatctggaacaactgatggaggacctgatggggagttggacctttttggagcccctccttccatgaaccttgcagatgaacggtctcctgaagcgggtagtggaatagctaaggacgaagaggattatagtagtatagtttaggtaatgtccttatgtaaaataaataaggaagtcgagttgtatactgagtatgtataattattacagttcagcaatgtaataaagatggtgtgtgtttggcatgtaataatgaggacatttttcttcctcagatgccatcgcgaactcatgctcatgatggggcaggaacatcccacggcggggagaac

SEQ ID NO: 176357 - DNA, 594 bp, Zea Mays
ctgtgcactgccataggtagagaaactcatatccgacaccggtgaccttgtgcctgggaatctcctcttgggtcagggtgcatcgcgattggttggtgaggtcgttcgtggactcgacggcagggttcgaccatcagggcgacggtgaatgctcaccggagccgctgcgccgccgtgatttcgcctgattccgtgggcagagctcctgcgcgtgcgattacaggtaagttttcccccatcgtaactgcgaaagtatgaattccgttttgcgcactttttggtgtcggatgggccatcgtgcactctgacagcgctcctccggtgagaaatcaccatggacagtgcactaccgccgtactccgctgtcagggttgacggggacctctgtgtcgttcgatctcaattcggcgcataggattagatccatgcatcatttcagcctgggctcctcactgacgtcgatctctgacgtgggaaatccaagccgttccttaacctttaaatgttgtagccttgatcaccgatctagcggtccagatcgcgtaccccttcgtcatcatatcaggtccatcggatcgaaatcgaatggcccat

SEQ ID NO: 176358 - DNA, 807 bp, Zea Mays
cccccgcgcgctcgaatccgcggagctcggagtgcctgcgccgatcacgggggtagttgcgggcgccatggaccgactccccggggctataaatccgtaggcctagaccggttctcctctattcctcgtaacccaatcaccatcgccgtagaaccgtgagatttacgccgccgtcgttgctgtagtctcgcgcctgcaccgccgctccggtccttgtggatggcagaggcgagtcaccggtgcgcgttgacgaggctcctgcgtgtcccacacgggagcaacaactggtagccacgcagccgtgccgccattgccgagaggagagaaaacagagagagagggtggcggaatcgttccgtcgctgtggttgaactcggtatcgatcggagaagctttagcgggtctctgcggtggtggccgaagaatcggattggaagaaggatttggggcggcaccggaaatccacgctggagctcggtgtccgctgctgcccgtggtcgaccccctccatcgtctcccagctgcggtatgtagtcccaccatgtttaagtcactttccttgtcgtgaatcgtggccggaatgagtgcggggagcattggggcgcgaaattgatgaaccccggcgtgggctccgccgtgcgtgaagggcggcgccaccgtgcgcgggtcttggttggggaagagtcgcgctggccattggatgacgatcgggcggctcagaatcacccataccccttcggcctggacattttacttaagagccctcgagaaaaatacgaatcaacccgccatccacgcggggtgaat

SEQ ID NO: 176359 - DNA, 631 bp, Zea Mays
tgtcgaaggaggctgccgcctgttctagccaaagtgccctgatttatcagaagtacacatttcgattcagggatcggtttgatgagccaaatgatgattggttggatgctgtagaggcgacaagtgatgagctgcttggagcctactcgagggctgaagacgaagctatgacagtcgccttcggtgctcgagggaaaaagagactgaatagggtttttgatgttatcgggtttatctaccctgactactgttttcctgttcgaaaacaaaaggggaaaagcaaaactgctgcttcggcatcctctagcgcagaaagtgaaggtcttgacacgtagaccatgacgcattgagatggcagatgtgccggagcttatttgacgtgcaggagttgccacttctaccatagatctaggtcatcctgtgccagtcgaggctagtacaaaaccgaccgaagagccgaaattagagaagaaagcagatcagttaaaggtgttgagcccactaggtacaatagtattgccgaagccatcaagcgttctgcagtaactccaagaaaaaggagaatggctagcgtgctagacactattttggaatccgtaaagacattagctcctgcctctgccgaagctct

SEQ ID NO: 176360 - DNA, 730 bp, Zea Mays
ctgggcggacagcttcttgcagtcacgttcctctcccttctttttctctcttacttgtggaccccacacgtcaaggctattttcttctccatcgttgcttccagaatccagaccacacgaacgcgccgccgctcgcatggactcgtcaagcaccacgctggctcatccctgcgtctcctcgactgctcgccttacgtggagcgccttcggctaccgtttctcctcttctctccccactcacgtcctcattcaagcgaccgttcctctgcagtaacaccgccaccgcgccattattggccaatgaagctctaccggcgtctgttacaccttcccacacctctacaaaactcgaccgtgcccccatagagccagtccccatccgtcccaagcccactccgagctccccagccgcacctccatcgaactccctcctctgtggcttggtcctcgccgttcaccgctgaccagagccgctcgccgctagagccgttcaccgtcgaccggaactccgaagccgacactgcgtcccaacgaccttcccccgacacccgactacctgccccattcgtcctcgttcactgcacaagagaaaggagaggtagaaaaagaatattttgctgtctaatccctatagatagattattttgcgtgagattatttcttagttcaaaagagttagttaatcacgatctaacttctgtggcgaattataatttttagttgtgaattt

SEQ ID NO: 176361 - DNA, 446 bp, Zea Mays
tagagatgaggaattatggtgtaggtgtgttcagaattttagactgattatcacgattaagatcaagaagttcctctatgcatacaagttagcgacaaagattagtagcagcaagaagagggaaaacagtgacacgatgaaaaatgaagaaggcaagaaagaaaaaaagaatagcgcacagtagataagtaccttccagatttacaaccgaggaacagacgaaccctagacagagcactaatggtgtcccaccttgcactaatgccatcgtgttccactcttccatcagttcgccctgaaccagatccacgcaacgtgagcggtcactgcatccacaaagcaaaacatcaccaccgatcaatcagacaacctcctaaaggaaaacccccaaatcgaagccccgactcccaaatgaatccagtagcctgttaatcactatcaaatcg

SEQ ID NO: 176362 - DNA, 993 bp, Zea Mays
gcgacctcctgtccttcctagatgcttactctggtttccatcagatccagatgtctaggcaagataggaagcataccgcttttgtaactttggatgggctttactgttatgttgtaatgctttatggtctaaaaaacgccatgccgacatttgtatgggcgatgagtaagacctttggtgacctgtttagggacaggatagaggtatatgttgatgacatcatggtcaagactaagagagggtcgaccctagtggaagacttaaccctggtctttgacaagctgcgggcaactcgcacgaggctgaacccggaaaagtgcgtctttggtgtctccacagggaagttgctaggattcctagtttcacaccggggcattgaagcaaacccagagaatatcaaagcaattgagacaatgaggcctccggcccgaatcaaggacatccagaagcttacggggtcactggccgcccttagctgcttcatctcaagactggcagagagggcgctacccttcttcaagctattacggaagttcggcccattctcttggactgaggaggcaaaacgagcctttcaagagttgaagcaacaccttgtgtccctaccaatactggtagctccagagccaggggagtcgttgtacttatacattgcagcggctacagaggtggtgagcatggtgctggtcgtcgaaaggacagcacaacatccccaggggagtcaaaaagttcccctaggagaaggtggtggtccgaccaccacgatggtgatggaaggtcaagagtttgagggctcgggaccaaccgcaggggaccgaaccatccagaagccagtctactacgtcagcaaagtcctccatgaggcaaaggccaggtaccttgagatgcacaagcttatctatgctatacttgttgcgtccaggaagttgcgccactattttcaggcacacagggtcatggtggtgacctccttcccgttaagggccattctcc

SEQ ID NO: 176363 - DNA, 398 bp, Zea Mays
cagtccgtcgtcgagctcaaggacttcctggaccacaccgccatgctcgccatcccgagccagaagagcatcaccctgcagtcccggacagcggtggctcactgagaggagatcgtcgtcaactccttcatagcctcgagtctgatctgattctgatgacgccgcaagaacctcgatcggttcagcatcgcagaacagcctgaacaggtacggtcgtcggtttgtagctgtaatcttcagagggcctatctcattttttcccccatccctccctctctctcggttggattcgtttgttcagtgtcggtggtgcaagtgttcgcctcctctgctgggagagcagatgtatagatctgttgagcaaaaaaaaaaagaagaagtgttcccgcaaatcaagc

SEQ ID NO: 176364 - DNA, 600 bp, Zea Mays
ccacttaataaaagtattagtatcaatatgtcgaaaggtaagtaaattgaggtggagatctcaaggttgatgatctaaggtcctggatgaatgggctcctcgcaatcagtacaacacagctctattgattatcacccatgtcacatggatgaccatgccaagaaggcttattcctacaagcataatcgagaacataagcaaaaacagagaagttgaaatcaactgaatcaattatgatggtgggggttcaataaaccgataatagatggtattgttcttgatggattcaatctaaagcaaaacacacacttcaatatggtggtggatactaaatatataaggattgtaggcatgcaagacccctgaacatgttcttaatggactccaacacaatacacgatctaacaagccaaaatatggtaatgcagtatccggacacaatctaggcactatcttatttcaacaattcaagttgattccaaataagtttcaaagtgagataagttaggttgaaaagcttatctccttagcttaccatcattataaagaacgtcgaaaatagaatttgtatgtgtcttaggccttaattttggtgtgaac

SEQ ID NO: 176365 - DNA, 654 bp, Zea Mays
ccttaacccagcagggggtagggtcggaggggcttcttccttctgctcagtctgacatccttggtgtttggtcttcttgcggatttttcttgcaggggcgagcttcttcagtttcttgtcatagtccatcttcagggtgcggtaagcctcacgggtattggtttcctcgccttcagctattgcaaggctctcttgaagggacgccttttcccctgaaagttccctgaccttttgctccagactttccacccgggaggttaggtaggtgcagtggagggtgaggtcatcatattggttatcaagggtgtgaaggtatccagccatgtagacgatggtgggatcattctcaataggatctcctcctgacaggacctgaagtcttttcctccaggtgggggtattcttgttgctgggtggaaagtagcgaaggggggtttcaaagatcaccttgttgtagttctggcatagttgtcggagggctgatcgggcaacattctggcaagtatctggaaagcggtatccggtaaaagtgacttggaaggaaggatgatttggatagtttcggctttctcccaggtagactgccatagagcatttctccattccgccctcgagatactccttccagacgtatttaggcttcttgcggattcc

SEQ ID NO: 176366 - DNA, 634 bp, Zea Mays
tgattattgcatcatgttgggttggtatcttcatcagtccttcccatgtgaattcatcctccttgtcaccttgtagcatttcccttagcataatgccgatgaaatccacaaactgtacagaacacacgggcacaaaaggaggatacatcaaattaagcacaagactaaaacatcctcttattgaaactgacatatcctgattggcacacacctgaaacttatcaaaccaccgtcgattatcgttgaaatgaatcaaattatcccatggtccatcgcctactccaacaagcacaatcgacagggggaaatcactgtagaaaacaagaaatacatcaagtttcttttcaagaaaactaagaacaagttgttttgtcatcaatccggcgagtgtatattataagaatatgcctatcaacagcatgagtttgccttcatatcacatcatgttcctagtgtaacctggcatgtatgagagcctgaataatcctttcttctaggtagttttccgatcttgcttattccaagttgctcacataaggaggactagaaaacattgggacctagatcaatacaagaaaaaatggccttagcaaaagcacatgatcattccaatgtgtaacactatgaattaacc

SEQ ID NO: 176367 - DNA, 659 bp, Zea Mays
ccaatccggcattagttcatatattcttgagctcactctctctggttctgcttctggttctggttctccaatccactaactaatccagtgagtagcatgaatgaatgcagtacagccgtttttcccagtgggtcaagcagtgcaaattctgagagagagagagagagagagcaatgagaagagggcaggcatgggttttaaaactgcaaattgttgttagggatagagatgctccccctccagcgaaagggagtgaaattaaaagaagggatgaagggttgttgacgtgacacccaattgttgggcaccaggttttcgacgaaccctagcaaagctagccatctttgtaaccagacatgtagtcgtaaagcaagcggcgaagcgagtattggtagacaggaaaatagagtagaaatgaaaaggagttaagtggcttttggcaccctatgtacctaaaattatattcttgtaacatagttttgttttagaggctgtgaaaaaacatatacattatagtatacttagagcagctctaagagattagctaaaaagttttagtcaaatttactgatttaactaatctctaaaatagattttaagaaaagagagagtaagggctaattcaaccgactctgtaaaccaacaataaagacggcgag

SEQ ID NO: 176368 - DNA, 770 bp, Zea Mays
atcaaataaaaagcataaggttcagtatttttgctcaatagttcatattatttggaatccagcaaaattggtttgactaaatttagttaaatattcctcaagttatgaatttcctaagtgctctgttcattaaaagaataaacagaattagttaaaggaaaatagttttgcatcggggtccctgggcttgtttctatctaagtcatttaaaccatgcccttgaagcactattcacaggagtctctgactacgcagaaaaccccctggggtgactccaaattaaacccgcggtccttccccttaggaaacaataaccgcggcggaggaaagggcggaggggcttaccggcggcgatattgctccggtgaagtggccgagggtgtaggggaagtcgtgacgatcacaccgatgtgcggatcgtctccgggaatggtcggagtaggccagtccacgtgcgcaggcgggtgagttcgtcggcgacaagtattcccgcctgctcacggcgcgatagtccaattggttagctcgggaggcttgcccaagggacatagaggcggtacacggaaggaatttgagaatggcgcagagacttacccggtccacgttcgtcggtgagcggaagaagtccggcgagggtgattcgggtctctggtgaggttctgccgggtctgagagcttggggagcttcacgggtctctagcagagctaactaaacagctggcgcagactgggggtggctggagtgagctggccgcagtggccgaggctcg

SEQ ID NO: 176369 - DNA, 507 bp, Zea Mays
aggggctgggctaaaaacgtgggggccataataagaaggaaaaacaagctatcctcgatagattagatgctctagataagaaggcggagcatactcttctctcccaggttgagatggattacaagaacaatttaaagaaaagactggtggaggcgctcagggaggaggaactgaagtggtaccagagagcgaaagcgaaaaatctgcttcagggagatgcaaatactcaatacttccacctcctggctaatgggagacataggaaaactagaatttttaagcttcaggatggtaccaatgttatcgagggagatgaaaatcttaagcgccatatcacttcttactataaagatctctttagaccacctgaaacctcgcatatcactctggatgattctattagaggggatatctctcaggtttcggtggaagaaaaccaaaggctcactagtaggttctctgaagaggaagttaaggctgcactcttccagatggaaaataacaaag

SEQ ID NO: 176370 - DNA, 420 bp, Zea Mays
ttggcttgtcgtacagcacgggggatccaccgatcgatcgaggatggcgcgagtggactcagtggatccgagaccgaccgatcagtgtggtggagctagatagtagtggcactgtagaaacgcgaccgcgatgcagaggtggagtgaatgctagctgctgcttcgcctggttggcttggctggctgatccggagagatgaggtagcagaagcatgtggcgtgccatcgagacgggcttggacgagacctgtggcataaatagatggccgtggagccgtgccggcgtacgcccaggcccgggcggcgccgtgtgttttgaccatgaggtggtgtgggtgtgggagggagaagaagatgaacgggggaggatacgttggttgggctcccggctggagttcgcagtagtttggtggtgttggg

SEQ ID NO: 176371 - DNA, 440 bp, Zea Mays
cgcatacatacatcgtctatatataagctggcaacagggacgaaattaaaaccatatggtgactcagctacaacttggatttgatgatgagcgatactatacacatgcacgactagctcttacaaaactattgatcgcgcacgtctagctgcaactaatcagcatgcactcgatattggatgcaaattaattgacgatgggtccatttgactacatacctaataagatttggtgtcctaactcctaacatacactatacaagcagcaagcactaattaagacattaattattaccgcattactttaacgagaattcttctttctctcttatcaccctctgcattatatatattccccatgtcccacttgtcctctctcctctctgcgtcgtccctgtgggcgagagcacgcggcaatggcaccttggatttggatcgaat

SEQ ID NO: 176372 - DNA, 360 bp, Zea Mays
tggcgaaggcagggctctgcaccatctaatcacccaaaaagggcatcggtcaaagcttgacttcgcccagaccccacccgagagccaacgaccaactgctcatccaggctgcacaccgaagggcctcttcatttctatctcctttcttcactttaaattatggaaacaccaaataacaatgcgagcacaaaatggacaccccttaaacatcctctagcgccacataaaaccagaaatcccaccagttaccccacttgttcttggcacactgaacaatttcaactacttcggccaacttcttccaagtccatggtgtgaatgtgcaagacctaaattgggcaatcaatccaccaatcttct

SEQ ID NO: 176373 - DNA, 697 bp, Zea Mays
ccgcccgccgcgaaagggtatgcgatcgtctaaccttagccgtccactaacggatccacagctcacaacccgtcttctagctctggtcctaactccggtggtgccgcccatccgctacggtggtgcgtccccggcgtgtggcaatcgcatccattatgccctaatttgacccccgaaagggtcctactctatgctggcgcctacaagaatcggatgaacaaacatgtaccggcaatcgaagccccggcgatgctggccacgcgacggtgcgggtttgcggggaagactcgactacggcaaggaattcctgcccggttcatgtcgcgttctcccaactcctgccccaagtgtgatccgcgcaaccacacgaatttctaggacgagggtatcaggatggatgggcggtgacgacgcagttcgaagacagcggcagtgaactaccgtgtttctctctaggggcgtctggaaggaggtgaaaagagacaattgtttcagctggacaaagagaaagggaaattggccgagagttttatgccgcccaggccggatagtggggttgttcacggaggtcaagatctccggcgagctccagcgcgagctgggcgcggtcggcgcggggagaccggtacgacccttacgaacgaccccagtcaggtgtgacgcagtccagcggggaccaccggctcgagagggcgct

SEQ ID NO: 176374 - DNA, 327 bp, Zea Mays
acacttgtcaccagttctcttgtaataattggcttctgcttcatctgcagcttgggagaatagctcatcctcagcctcagcctcatcagacttcttcttgtaataagccgcctctacctcttcggcggcctgagacataaactcatcatcttcctcttgagcacgtaatcctgcctcagctagtgcgatgagctcactcaaccttgatgtgtcgtcctcttcttcttcatgtaatcctgcctctgcgagagcgataagctcactcaatctagatgtgtcctcctcctcctcctccatcagctcaaccgttgccattttatcctgaac

SEQ ID NO: 176375 - DNA, 376 bp, Zea Mays
gggagcagaagacgggaactgaccggagtatggctggcgacggtgagcttgtttcacggtggcggaaatcggatttgggggaaactccgaattcacggacctcagcgaacgatcggggctaatttcaaggtggctggttagcttaggaccttacggaactggtggggggctcaatttatagggagcgacagcggcggcgatcaattcgagcaagttgtgctggcggccggaggggaagaagaaccttggcgcgcgattacgtgtcctatagcgtggcagtaaactccggtgagccacggagagttcagaggaggtcacggcgacacggtgaaagagttgagccacgcggcacacggccgagaggcggcggtcgacg

SEQ ID NO: 176376 - DNA, 1363 bp, Zea Mays
ggccgccaacgatcgtatatggagtttatactaacatcccctcgtaagatcagttaacagcgcaaaagtctggtgccctagtttcttgtttcactgacatctacgctgagaccctcctctattccttcatttgtgagtcccggtcctctacccacctccggtggtaacccaggtcgagcacctggccatggcacaagcgttcgccacaggtgacctactgtattggaaataaacattcccgcaccaactttggccttagttgactaatcccctcaaccggattgatctgtgctgaccctgaaccccatctacatccgacgacaggaggagcgcaaccttggttaagctacgcccaaggtcatttggcagtagcgtttaatccgatgccgcagctagcatcaacaatacatctaacatgtgattcttacactgattgacttggggaacactggcctcgctggtcgacgcggacatgctagacaacagcattcaccaaagattctataccgttctaagcactgcaccacgagaaactttaaacggcccggccagagagctttacgagtacttaatggctatagaacacaaatagcgcaaaagaaatttacccttgaagcagctaaccacgatgaaaggatgaaaaggctcggcgtggtcaccacgtccaaggcaaccaatgatataggactgggaaacccctgtgatgtttagtagagagttggaatggtcatagaacatcagttattgagtttcaaatgaccagaatcgaagtaatgggagagaggcaggaatggtttcagacccaatactccaagcaagacatagtgtgcacgatgggttcactaggagccggttaaagagggctctggaattccaacaaagacagagttatggcacgtggttgcactactatctttcacccaggatccatgaacagagggacacggtgtggtggtttaatgtggctttgacagcaattccaatcagctgcgtcaccaccttcaggataagtttcagtctgccacacctcctccgcttgggcggtaaaatgccccacgtaaccccaagcacagcgactggttgaagcagatctttacttgccgagctgagagggtaaaagaatggggctccatttactgacagcacaacaaaccaacagctgagtcaccagtttctagatgagttccagttctgcaccgttttccccctcgtctggacagtaaaaatatcccacatgatcaccccaaaactccctagaaaaactagggaatggaaatatttctgctattgatttctttttactcaagtctgaacatgttcaggtcaatagtaggatcaacttagccttcctttttctcctaag

SEQ ID NO: 176377 - DNA, 704 bp, Zea Mays
cgggatccgatccacacaagatccccaccaccgcccgcacgtgcatataagtgggatcacccccggaccgtcagatcgacaatcaatggcccagatctaaagtgtcgaagggatattagttgatataatcacaaccgtccattagaagatccacgacggcgatttttccatcccaggatctaatcaccgccacactattaaaaatctatggttctcaacctttcttagctctatccaccctaggctgttcgttataagatcaacggcaatagcatcttcttcttccccgagctcgcgctacggtagtctgccagtcgggtccagcgcacagcgatcaggcgggttctagcctaccgactggagcacgaccaggacccacgcagtacaggaacgacgacgaacaccaaggccagaaccttaccggcgtcagtagcataggccgagccgcccacggagatgctgatccacgacggggccgactggtgatcctcgccacgcgcaccaatgaaggtcaggacgatcccagtcccacagagcaacggttggagcccacgacgaagcaccagtccaccaagttcttcccccctttctccctctctctcacagtcggcggcaatggcgaggatttcggcggctctaccgtgatggaagctaacaccgaggccacaatccaccccgtatttatagcccgagccaggtcaaag

SEQ ID NO: 176378 - DNA, 785 bp, Zea Mays
ccttcttcgaagctgcgcgctgcgcttggggatccgcaagaaacccgaatatgtctggaaggagtaccgtgaaaatggaatggaaaaatgctctatggcggtctacttgggagaaagccggaactacccaaaccacccttccttccaaattaccttcatcgggcaccgcttcccagacacttgccagagcgttgctcgaaaagccctcaaacaactgtgtcaaaactatagccgagagatctttgagacccccctccagtatttcccacccagcaacaaaaacacccccacctggaagaaaagactccaggctctgtcaggaggagatcccatagaagatgatcccactatcgtctacatggccggatacctccacaccctcgacaaccactacgatgagctctcctcccactgtacccacctaaactcccgagtggaaagcctagagcagcaagtaaaagagcttaagcaagagaaggcatccctccaggagagtctcagcatagtagaaggcgaggaagccaacacccgtgaggcctaccggaccttgaagatagactttgacaagaagctaaagacactcgcccccaaaaagaagatccagaagaagaccgctaaccagggatgccagatagagaagaagaagaaggcctctctagccctacctccccccagaatagatgactggtccgaagaagaagatgtatccctagccagccttgatgatcttctcaaggcatttggagacaccttagacaaggaactcgctagtacctcgaagaacg

SEQ ID NO: 176379 - DNA, 365 bp, Zea Mays
ggaggcctctacccgcacaggggtggaccgagcgcatgcattgctcgtggcgcgtacgaccgcctttgatgcatctggcaaggaagtgggccttcgctttctcgagtggttgcaggaggagctggaggtgcttccgtcgatcgtgacgggtctcatgtccttcgcttcgctcatcacctgtgagggggccacgaatgccttgtcccatgagtgatgcaggcacttcgaagtctttgatcggtccgatgaagacttcgaccgtgagatcttccaggtcaaagatgcggtgctaaagcggtctgctggggtgctttatgattggatgtggggccctcacggccgcgacactgtgcggggaaggtctg

SEQ ID NO: 176380 - DNA, 832 bp, Zea Mays
tactgcccttgcctcgatccacttggtaaaatactcgatggcgacgaaggtgaacttgaggttcccttgggccgtgggtagtggcccgacaatatccagcccctatcgttgaagtggccatgtgtgggcaatcagttttgtgaactgcgaagggttgcccgagcgaggagaaaatttctggcaggcttcgcacgacctcgtgactcgattggcgacgcagattatagcgggccagtagaaccattgacggatcaccttggcgacgagggccctagggcccgagtgagagccacaggttccgctgtggacgttgcgcaggatctagatgccttcggtttcggtgatgcatttaagcatggattgactgacccccttcttgtatagctggccctcgatgattgcgaagtcccgactttgatgcttgaggcgcttggcctcattgacgtcgcttagatggtaatatccttgcaagaacaaggttattggtgcccgccaatcttcggtcatgacgaggttgactatgcgatggccctcggtgtcgttggttatttgtaggccctctggactacggacggctggcgtggcgatgacgtggtagaacacgtcggagggcaaggcttcgcctctggcggctgctttggccaatgcattggcctcctcgtttctggcttggtccacatgttgcaaggtaaaacccttaaattgtctctcaagattgcgaacagtcgtgagatactgcatgagtgcgggtcttttgttgaatattcttttttgacctggccggcaaccactttggagtctgttttgattatgcaggtagtgacaccaagcg

SEQ ID NO: 176381 - DNA, 757 bp, Zea Mays
cggcggtagcgcggcggcggagcgggaggcccgcacgaccgggagaggggcggcgactgcgcctgggaggaggggaggggcgggcggccggaggtggcgtcgccagggagtggcggctggtcgcctgggagaagaaaaattacaccggctctggtaccatgttgaacagtgaaaccctaaccctagtagggttgggaaatatatttatactaggaatagttgggcctaggcccattacagagggacccggtaggggtaaaccctaatacacctaatatagttctaaacagaggacatggtcacatgggcgctagggagggaggagactgagctggggttggaagacgagggcatcgatcacactgtgttgtcttatatagttatattattcttaatgcctgttgtttagaatgactgacccactagaatgacttgacttatctctcagtagttctcattaatgactgaggttaaaagatgaaatgactgagtttgttcacttcatttcttgtaatacctatttttagaatgactgactcactaaatgcctcctatctcaattattctcaagaataactgaggcaaagaaatatgaaatgactgagtatttatataataactgagtttgttcactttctttcttgtaatgtctgttttttttaaaatgactgactcactaaatgactcctatctcagttgttatcatgaatgactgagactaaaaagatggaatgactaagtttgttcacttttttcg

SEQ ID NO: 176382 - DNA, 648 bp, Zea Mays
agctggtgctgactcggacgctggctaaggtgccaaggctgctggtgttggagcaggaacattgatggccatggcaggagtagtaactgcagacactggaggcactagtggctgagcactgatagctccgacgacctgagtagagaagtcgagagtgactggctgaagcagagagatagatggaccaaaagactggagctagggtcatgactggatagctggcaccactaaggcctgaagagctggagatggagcagactgcactggaggaacgagaacaccgatatgctgaagaatgtgagtcatgaaggactgatgctccaccatgtcagccaaaagttgatgctagagggtgtcctggcggtcctgaatggtatggaacatagagagcatccactcaaacatctgttgttgaatcgttgcatgacgggcctgctcggctgtcaggtgagcctgctgctaggtaagagatcgaagaatagcggctagagtaggatcaatagctcgaggtgcagccggaggagcagcaatggagccatatgcctcgtgatcatgggaacgaggcggcatagggggcggtggcggtatctcgatatcctcatcatctgaatcggaagaaatatctatagtggcaccctgatcctcgaa

SEQ ID NO: 176383 - DNA, 345 bp, Zea Mays
cttaatgatggaacaaaggattaagccatactccaaattcacttaagcttaaactggtgacctagatcaactcggccatacccaacaacttgacctacataacagatctatcttagcctcttgtcccaaacccggatggagacaccaaagaacaagactggaaaaggacaagatcaacctcgtcaaggaaggagagaagtcaaactcgatcatcagatgcattaccacccaacgaggagtttttcctcaccataaactttcttacaccaggatattcttgccctaaccaacccatctttcgtcctacataataaaatgaatatacatatgtatacccatactttc

SEQ ID NO: 176384 - DNA, 377 bp, Zea Mays
atcacggtgaagggcgcaaactctggtgacggccgcaaggccacgtcgccggtgcaagtggtcgaggaacagcgaggccacagtagcccgaactcatccgcgacgtgatctttttacagtcgagcgcaatctacttccccgcggcacaaatcacgacgaccagcatgaatccaagcgcacggttcgctggcggcgaaattatctgatcctgggatattttcagtactgtaccatcagaaatcctattcagagctcctaacagccagatttgtagcgccgagatcatagatttttgtataataacttgctaatttgtctgtagcaaacttgtagccgttcatactatctacaattcttctatagcaacaacccccaat

SEQ ID NO: 176385 - DNA, 583 bp, Zea Mays
gaaagcgatgtgtgacaaagcaatggacaaggtcgtccgtgccgggcgaatcatgatgagaagacctggtgttgcggtgcctaaagacatcgttgctgatgttctcgctgcatctgctagtgtgagcgaaccttcttcctctggtaatccttctggcaaggttccctgcaaaaatgctcctgcatagtgatttgtttggatgagaaaatacttttcattgagttagtattcttagcgagatagtgtatcatggatttcatgtgcgtgtgatcacgctatgcttgaaccgattgttccgttagcagggcgccaagatcaccctctaatatgtgagaatgttgtattactttgaggtgtccctgacttgagctgactgttttgttagtagggtatagtaatcacccctagtcatgtaagcatgagcatgtcgcaccgacttaaggcgtatccaacttaagccgattgctccgttagtagggtatagtgatcacgctaagtcgtgtaagcgtgagcatgtcgcaccgacttaaggcgtttctgacttaagccgattgctccattagtagggtatagtgatcaccct

SEQ ID NO: 176386 - DNA, 359 bp, Zea Mays
aaaaaccacagcaccaatcaaactagtttctggaagcttatagaggatatgggtacaactgtgaagtatctaggagaagaagactgaaaaggtaacttgagtctgcaggctcgcctcaagcaaagctcgccgtcgggttcagggtctggtcgctcaatgacctggtgctgttgctgctccttggtatatatagtatctgcagctccttgggttggcaggcacaggctcagtaagtcagccaacgctgtgctttgtccatgtccccatccggtacacactacaactcctggtcctcatcgatgtgggcgatgtggatggggatcgatgaaggcgaacaatactcttctttataggtgtac

SEQ ID NO: 176387 - DNA, 2254 bp, Zea Mays
gaaagatagtttccttcttgtgatttactttaaatcagcaatatgccaaaagagaagttacttggaaggaccgaatgcacacaaagaatttccttggatggaactatggaagcacatgaaaaccagctatgagctatctacaagaatgaaccatgaacaagactctagaagtctagatttagattctttaataatgttactatactgttgatgcgctgtgtatatttgtataaggttttcccttctctttttacttctggttggtgctcatgctgggtttcatctccagcctaccccaatgtgcctaggattaaaagacttgtgtacttctgattaacaatatgctctcatctggcattcagaaacgcaattcataaaaaagaaagacatggtttcaccgtgaaaagcagttcatttactgtattttttcaactaatttgaaatttggaaatatatagtcaactaaaagtttacctatccagcactccaatcttgcgcaaggggaaattttaattacatcaggtggatcaacacttatgtttaaacataatacaagtgcaacacatccagtcttcatctgcactacaaaatccatcattagtaaatattgtgtaaagggaatgtatcaggtgcaaaccaaccacttggtccaaaccgtgcaagcagtcatgataattttccaaaacaaccctcccatcgtgcatcagttttcaaaataacccttccacttcccctgataaattttccactgttttcaagtgtcccactaatcgggattaatcgcgattagtcaggcaggtcgcctggtagtggttgatcagccggacgactcgactagagtatcaggtcgtccgactagccgtcgattaggggcaattagtcgtccgactagatggtaaatcgaccagaaattgtccaggcgactagggttttctagtgggctagtgggcttctatttttttggcccgtctacattagtataaaggcaattcctctcctctgctgagtccagaacacaggctgcggctccagaacaccagtggtggctccaaaacactagcgacgagatgagctctcatctcaaggtccccccccctgctcccccctcttctctccctttcctatctttcctatcgtctgagttctgatgaatctgaatctactggtggaggagaagctgctgctgatgctttttgattggatgatgatctgctctaggtagtaggtactgcattactgcttgtagccttgtattcaatatttcaatttcagttctgatgtagtgctatatgcctatattgcctttcagtctgttactcagtttcaatttcagactttcagacttatataacgcatatcgcaatatttcttgtatatacatatgtccagaaatatataggacagttaggggatgaccagaggtcgaccagaaccgattaggcgtcctaattgtcgccctaatcacgattaggcgcctggtcggtcctctggaacgaccagctgttcgccctacctgaaaacaatgatattttcaaatacaccctcccaactccaccaacgtgttaatttgcacggtttacaccaagtggttggtttgcacctgatacattcccttgtgtaaaagatgcggaaaacttataaaaaaaactgtgaaccatcccatggacaaacgaaagaaaacaatagaatgacaataaattccatgataactaaatcagtaatgtgtggcgcaaatcaagacaccaaacagaacaaagggaattaaaatagtaaatagaagaaataagctcagatgtaggtttttaaagtcaacatggtcctcggataagtgaacataagctgcaaaccgaagtgactttgcctcaagggtcaaaggacaacttaatttacatggtgcataaaaaatccaaaaaggatctaatgtttagaaattccaaacctacccaaaattgttttggacaaaaggctatgctgttgttgttgtttagaaattccaaacagactgcaaaaataaaaaaaaagatctaaggaaaacagaacatttacatgtacagacagacacttctttgcccaagagaatcaacaatctttaatgtttatcacaggataacttgaagatcataatgttcaaccccatctttatcgccaaaacatcctatctaccaatcatatatcatgcactctcatgccaactttgttgctggaatgtcttaagcctccagtgacatcaaaagattagggtcagccaactttt

SEQ ID NO: 176388 - DNA, 891 bp, Zea Mays
tgccacaaagctttcgttgaaatgatgatcccaaaccatgttgccgtacgtacactagtctacaggcactgtaactgtagagggaaagaaaccgtcagggcactgcactgctcagtctgctcgcacggatgctactagatcagcgccttcagcggttaggcgggggacacgatctagccatagcgaattattggccgttgggtacttgggtgacccagccgcttgctgtcggtcgagtcgtaggccaggccacgcagggattcgagttgcattgcgctccagatcagctcgaaatctcatggattcgagtttcaagtgtcaaggacaatctggctggagcatgcatgagaaggtaaactcgagctcttcaagcaaagcaacacacggccgaatacgaggtctgtgtccgtcctacatacacctctcggcgcagcttccgtgttcggtcggtccgttcccgaacctgccgccggagcatacctgaccgcatttctctacctcctcccatcgatggtgtaactttgttcacggggtatttgtttcggcttgaaatcggattctagccatcagcattagcttctggcatcgaaacgttccgcttctttttaagtgaccgtcgcttcgataaaaatcgttcaaatcaacgtgaacacagaatctatggaatcgtccctttctagatcctaatctatggaatcgtcgctttctagatcctaaattctatagacttgttcgtagttctcttggtatttcgattctccctttgggcccgttcgtatggaccggattggtctgtttccaggttccttccgggtggaataaattgatccggtttggaatttggttggggccatttcaaccgttcgtttagctttgacctggaagcaaaac

SEQ ID NO: 176389 - DNA, 563 bp, Zea Mays
gcttaagaatgcaagccatgttcttgtgaagaatccagagataattaagttcaaagtcgagctgtcaggctacccctggactgaattttcagtaacagtgtgatggggtgaactttgagcccgattttgaatgagattcagtgactatttgatggtaagcattgtggcaaagttgaagatggattataggtgtgtaactttgctgcagaaagttagttgagttgccatttgaagttgagagaaaaattgccttcaaccgggactgacaggctgtctgaatgagttagtcgccatggtacagtgctccatatggattagactgccagcgctgctcgctcatcgccggtgagctgtcgccggtggtcgatcttttgctgcgattcgtgcactgtgtgcagtagataggctcgacctggtaaaaatccggcaccgggttaagctacggctaaggccgccgtacttcattcccccagctcatcgtcggttggatagcctcgtcgccgataagctaccgccgttgcgcaccacgtgtctcagcgcgggacttcatcgcggtgactcac

SEQ ID NO: 176390 - DNA, 292 bp, Zea Mays
ctttcccagattattcaagcactatagagcttgatatagttgttatggccacttggcaatataaataaatatatgatgccacacaacacaagcaaataaaatatagagctaaacaaaattgtttatgaaggttgcgcataatgtgactttagggtcttgaacaacccaccacaatctaacgagtacaagctctagcatctggtgtcaacgtgtgtgcggccatcagggctacaacagtatagcaagccttcgtaataagcgcaacaggcacaattatgactctatgattggg

SEQ ID NO: 176391 - DNA, 504 bp, Zea Mays
ccaatgtaagtaatacaaacgagctacaatctcttaagaattatgtagatgagcagcgagaacaaatgcaaaatatcatagggggtatgcaaaacgactataggagactagcacgtgcatttgataaatctagcattgcaaattttccttcgcacgaggttgagttaggaggtaacacacgtaatacatcggttgtaggttgtcacgaccaacccttttatgggatgacgatggacacgtaccctgagcaaccgcaaatcggcagtaaatcagccgatctgcacatgtccggaccatccgcccgtgatcgcggaccgtctaggccagccacagtcgggcccatctctactactctatatgttattattgtaggcgtccacactctgttgtgttctgcctccgcagtccgcacccgcgacaccgccgccgtgattcgcgtgacccccacccccgcgcgtggaaatcctcctgcgccccgccagcccaaccagcccgtaactctgc

SEQ ID NO: 176392 - DNA, 367 bp, Zea Mays
tcttcgttgacggaggttgagatctggttgagtgaagatatacctcagactcttgtgaccggtgaaaatgtgacacttgttcccgattaggtaatgcctccatatctttaaagcatgtactatggctgccaattccaaatcatgggtggggtaattctgctcatgcggcttaagtaggcgtgatgcataagcaatgactttttcgttttgcatcagcacacaccctaagccttgcctcgaggcatcacagaagacgacaaaatcctgatggatatctggtagtgtcaaaaccggtgcggttgtgagtttctcctttatgatctggaaacttccttcacattttggggtccacaaaaatttatggtct

SEQ ID NO: 176393 - DNA, 432 bp, Zea Mays
gggacacagagacacttcttaagttgagacacatggaatacattgtgcacatcagatagattatcaggtagctcgagttgatagaccatctctccaatttgcctaaaaactccgaatggtccaataaagcgaggggacaatttgcccttaactttaactctcctcaatccacgtagtggtgacaccttgaggtacacatgatctccttcctcaaattccagtggtcttcttctaatatcagcatagctcttttgcctggtctgagctaccctcaaattctcccgaattatacaaacttgttcttttgcctcttgaataagttcaggtccaaagaactgtattcccctagtctgatccaatatagaggagtcctgcatttcctgccatacagagtctcgaacggtgacatcttcagactggcctggtaactat

SEQ ID NO: 176394 - DNA, 574 bp, Zea Mays
catgccaaacttgcctgacctaacaagaaacatgccttctaccccttggcttcgcactcctagagcacaaccaacacccctcgatgaatatacccccaaatgaggaagacaaagacatttttcgagacaatgaagcctcgatgtcaacaccaaagaccaactactcctcaagagtctctgcatgtgcaacaaaaacctgcaaacacaagaagagaccttagcagccaagagaaagcatagcaaaatccaagccaagatacaccacctcataggaggaaagagaacgatccagagcccttgaacaagaaattgcacacctgcaaagtcaacaatttgcccccatccttctcatcatacagttatattgaatgcctttgacaccaatatcgagcacacctcacatcagggcacgtttcaaggtttcaacttcacagacaacaaatgcccctgtcggcaagactttaggacaccccatgaccttgcaactatagagcgggcaactggcctagatacaatggtaaaaccaacccttcacaattcattatgagctatcaagttgttgtagcttcatctg

SEQ ID NO: 176395 - DNA, 370 bp, Zea Mays
tgggaggtccaccattaccgaagatgatatgcctaagctgatgaagttaggctatttcagtgaggccaaaaaggagctaattcactttggcggagaggaaattactccgaagccggaaaaggatgaggtggtagtctttaaaagcttcttcaaagcaggattaagatttcctttgaatgagatgattgccgatgttttgaagaagtttgggatttatcttcatcagctaactcctaacgccatcattgggcttagcgtctacatatggcccctccgaagccagggggtagaaccgtttgccgaaggcttctgccgagtacatgagcttcattatcaaacaaaagctagagaagatgggctgcacaaaaac

SEQ ID NO: 176396 - DNA, 614 bp, Zea Mays
ccactgcgcacaccgtcaggagcccagaacacgcacaacaaatttacttgtcggaccgaggttcaaaacaccgacaattggtgcactatgtaggggtctatgtgttcccgatgaagtttcccaagcttcggatggctagcaacgacagtggcgcggtttgggctcccgagacgaccgttcattttgggagtctagatttcatcgtcaaagaagaagaggagatgaccagggccccagaagccccaactcgttcgacgagtgacctacctagtgttgtcagaggtctcaacgacctctagctcgcccccctcacaaggagtgtgggttggctcgtaccgaggtcatggggtgttggaccccgttcggatttgttcctagacatcctcctattaggatcagaggacggagtcacctccctacttagtgaggctcgttgcaatcccagctaggagttccttgtagccaacacgacgggggaccacttcacccgcatggaaagccagagcacttctgcagtatcatgatacgtgccacgtccgcccacctcagctcagcccacctccttaataatcaccaccgggctcgagcctttcatggagcatccatcatccaac

SEQ ID NO: 176397 - DNA, 623 bp, Zea Mays
gtaggacgtggcgctaaggtcaaattcgaacaagtcggtcgtctaccggtgcagcatggaaggtcatgaggacaccttgtacacggagaacaagatctagttatacctgaagaccttgatctggggcaccgtggacttaatttgtgtttggcaatgcccaggccatattccagagctgcccgctgctggtgcgctgcccaccgaaaggcaaagcataatgtgctgatggagtaggactgctacaacgccagtcgcgagtccgatttctcgttccacatgtgcactatggaagcggcgtcgggcgtggacctcgatggcatggagacctaccttggctacccctataggaacttctcccacgtcgccttcatcaagaagtctctcagtcgcgtggtcagccccaacggctgggtagcgtggaacatgaacaaggtcgtcgaggataccacccgaaccatcgtctacctggaatactgcaacgacagcgccgttgccgacacgtccagccatgtcaagtggttgggcttccgcgtcctaaacgccaccgccgaggtggccgcgtacacggcggacatgttcatcaatgcgagcaagtgggtccctgagcctatccagtatgacca

SEQ ID NO: 176398 - DNA, 762 bp, Zea Mays
tcagatcatttcttttgttgtttggtataggatggcttctggaagcggtagtatttatgcaagtacgggcgcatcactgcctctcatggaacaccagttggtactagtcaatcagcaccaaagccaccactacctattgtgatgaagcaaacatctacagatcccacaacagttgttgttggtggaggctcagcacttgttattcatgttgataaaaatgtcgttgaaccattagagcctgctgcaaagaaaatgagagagaaaaaggctacatctgaggtttgggagcacttcaccaagtccatagtggaaaaaagggagataatggcaacattgggaaggaagtttgggcaaaatgcaagaagtgctcattcaaaactcgtggtgagtcctcatggggcataactatcttctggaatcatatgaaagcaaatcaccaattgactagagggcaacaagaattgcatcttcagagtggtgcaggtaatagcacagttattcaaaatttcaagtttgatcctgaggaaagcctaactaaattctataaggcaatcattatgcatgactacccctttaagatggttgaacatgagttctttgttgatttcatcaagtcgttgcgtccacactttgcattcaaatgtcgtacaacaactaggaatgatataatgaaaatacacttggatgaaaagaaaatgttgtttgaccatcttaagtcgctttcttgtcgattttctgcaactatggacatgtggacatcca

SEQ ID NO: 176399 - DNA, 467 bp, Zea Mays
ccatgaggtggcaaggcgtcagcgggagactgacgacaaccttcgtcgtcaagcttccactatgggtattcccttcgccccccgctcgcctgacgtgcctctccatcctcctcccccagagatcaatgagtggcactagcaggcctacggggtgccatttatgacagcagacgacgaagaagaagaagcttattttgatgatcgtgagctgtttgtcccgcctccctatcacggggatccgggtcaatcatcctctcaccctccgccccaggatccttctggcagtgctcctcccctggatcagtctggggaagaacactttgcctctcacctggcgcaccacttctttgctcctcatcagcctcctcctaactggtgatctttggattggcggctctctctctttttggtttttgttgccaaaaagggggagaaggtttcttagactggcagtaccttctatttat

SEQ ID NO: 176400 - DNA, 596 bp, Zea Mays
taaggatgctagaacaaatgaccagagcgcttgaactaacctggagcaagctggccacagcgagggcaaaccgagcggagttcttgagtgatttgggggaagtaagaaattggagctctctggtgaacgattggaggcaagacttggtggcttggtgcgtgattaccctacggagcttgcagtgcgttcaatttataatgggcaagagcgatggccggtgaattagacgacgacgcgcggcggccgaagaagacatgagttactggcgcgagactcagtggcatctaccgtggcgacctcaccggcgacaagccagtgctaccgagcggtttctagtgactcaccgcgacggagtaaagcatcaaggcacgtagcccggtcggataacggcgaacgtcgttgatgccagcgcgactaactacggtgagacacgacgacggtgagaacagtggtcggagtttatccccaacgtgatactttacaccgaggagtgtttatctgagtttggtcaggcgtgaatcgcgacgccggcgcgaatccaggcgcacaggtcaccggcggcgaggttctctgaacctgatccaccctgtgcattg

SEQ ID NO: 176401 - DNA, 600 bp, Zea Mays
cacgttttacgctgaaatcaacccatgcaagaacccacatatgattgtacgtgcgtgatttacacgccgtaatttccgtcccaatcgccattacgaaaaaaaaatctatgatttacactgaaatttgtactcatttacgttgttttggtttacgttttacactgaaatccacccgagccagaacccgcatgatcggacgcacgcggttttcaccctgtaatttttgggcccattcgcccttactaaatagatctacggtttgcgctaaaattagtacccatttacgctactttggtccacgttttacgctggaatatgtctgagccagaacacacacttatacgccgcgggggtatacctggctggggcttcccggtactaacggtatatatatagacacgcacattacctattaagccaatagtgtagacaccctagcacaactatgtccccgctcgactcccccaccccgtgatgctcacgcccctgccagcgaatccgtcgcctaggacattcaccgcttcgcgtccgcatcctccgtcccctcctaccccgcctccccgtccacgagattgccactgtcgttccacccccgccccc

SEQ ID NO: 176402 - DNA, 535 bp, Zea Mays
cccaactcgcgtgttgcgcgcgcacactcactatcacatgggccccattggccagatgttaaccgcgcgtacgcaagcctccagcgccgacctttgggctcggtcccgtttgcgctatgcatctccttcgcgtactcgctgcctgtggggccgatacgtcatctctatcccgtaccagtcttcaacacacagaccacgctcctcgcaacagaacaccaccaaactcgccgggacgttgagctacctctgccgttctcgcgctcgtgctgaccgcttcatctcgcttctcagtgcataaaagccatgcgtccagtcccctcctccctccatcttcttacacttgcgaccctctcgattcagccacaggggcatgacaccagggagaccgagctccgctgccgccgtagaaattcgtgcactggttgcggttcggggccctctggtgggcaccggagtatagctcggcgctcgcgacaatggtggcgacctgataaccgcgacgcgccgatggacctctaccaatttctcattggag

SEQ ID NO: 176403 - DNA, 630 bp, Zea Mays
gttaacaatggctagttccaacaactagctgacgttgacacgtatcagcatgttcattgcctttaccggggtgtccgatgagtacacaaaaaattgtattgctttgaatggctagttttggtcttgattggctatatataccaccccaaccagccatttgagaagtgtagaagctgagaaacattgctagagagtgaagactccattctatagctctagacacccgagtgcttaaagatcatatgatgattagcctatgtgcttttgtcaagtgcataatttagttagaccgctttattagtgcttgttccaagtttcgcatagtgattagaattgaggttagacaccatcaaatccttggtgcttgcgcaccattgtatttgtattgagtggggcttgtaagtcttgcaagatcacataccaactgtgattgtggtgtggctattaccatataccaaagggaacaaggtccatgatgtttcagccaaaaattcaatattggagacgacgaagagcatccgagagagatagaaaccggagcaccacttgtgtgtaaaaggtcggaggctatccacagagttatctggctgagagtgaaaggaacgacgacatctaagagagatgaattgg

SEQ ID NO: 176404 - DNA, 560 bp, Zea Mays
tttgccggagttggaggtccaccactcactgtgaccagatctctctgcgacgcactgtggggtacgtgctcatccattgcatttatcatgtttagggcatcgtgcggagcgattcgggtctgagctgtgcgttcgggtagagctttggggcgttgcggccatggcgccgccgcgcctagcgtctgcgccaccgcgtgggatcggtgagagaggggagttgggtcgtgccgtcggattcggtgcgaacggccggatttgtaccggacgagtccccctaggcgattcgatcgggaccgttagatcggatcggtcggttctgggtgactcgagctacatttaatctggaccgtagattgttgatccaaagattcctatagcgtaccggttcaatcgcgtgcggatgtaatcctggtcgtccaaagtagatcggacggttgtgagcgccccgtaccccttcgtggtgcacttttgcataaagatcccctctggaattatagattagaacccgcggtccactggactgttccctgtgccttagaaatcttaccccgagacccctg

SEQ ID NO: 176405 - DNA, 602 bp, Zea Mays
gcatcgtgatcttttgattgaagaatggaatttccgcgagctattgcaccacaaggctgctgagttacttcggcttcaaaaaatttattggaaacaacgggcctccatcaaatgggttacggatggagatatctgttccagattctttcatgctcatgcaacagttaggcatggccgcaattcaattgcgttgctctcagatgacagtggttcagcctttacagagcatgacctcaaagccaatctgctctggaatgcgttcaaacgtcacttgggttcctccgatttcgtggacaatgtctttgatctgcctagcttgatactctgccgcaatgacttgcattggctagatgagcctttttcaaagcaagaaattgatagtattgtggcggcccttccttctgataaatccccgggacctgatgggtttaataccaactttatcaaaaaatgttggccgattatttcacaagacttctatgacttatgtgatcaattttaccacggggatgtttgccttcgaagcattaatggttcttatattgtcctgattccgaagaaggataatgccagagtagtgggcgatttcagaccaatctctc

SEQ ID NO: 176406 - DNA, 314 bp, Zea Mays
tatgtttgatggattgccgatttcccagcaggcggggattccacccaaatgttgtgtaataccaatccaaactgttgcttacatgctattccagaaactaaggtccgtgattaaacaagctaaaacattgaaattcagatggtttgatctaccagatagtttaacagatccaaatatgatagatcagcatactatctagtacaccttacatgggctggacattgagctgtacatagtcaaataagtgatagaaagtctggactttgtaggatatatgcaccagtttcgactgattggtccttacatgcttgtaa

SEQ ID NO: 176407 - DNA, 489 bp, Zea Mays
ggcggtcagaagcatagcccaaacctggtattcatcactttgaccaagaactgttacttcatggcagaagttaaaggatatgcttcttaccagcttcccgagtttctagtcgaagcctgtcactacataagccttgttctagtgcacacaagactcggacgaatacctacagtcatttgttcgaaggtttctctgccttcgggctcaagcacctgcaacctaggatgacgtcgttattgaagctatggtcaaggggctcaggccagatccagtagctcagtactttgccaagaagcctccccactccctagagaagttgttgcagagatggatgaatatataagagctgacaatgatttctgccagagaaaggaggagatctacagataaatcaaagccgccaggggcttcggaggaaggttccacccaagacatgtttgaagtatccataacccaacacaatgtgaagagaagacaatccaatctcag

SEQ ID NO: 176408 - DNA, 462 bp, Zea Mays
ttttattgaattgggtggactgtgggttgattgcagaaaagggcaggggcttttttgcattttggcgcggttgaagaggtatggagcttttctgaccacgtgatcttaaatcgacgatcccgactaaaagggctatccatcgaaccggtacgctacatgggccctcggatctagatccaacgaccagggttttacacgactgaattataatctcaaacgtctgatttgatatcaatgctccagatccaatttccctgaaccagccacttacttctaatccgggccgcacatctgaaaaccgatggtcacgattagatcccccaagcgctatcccgtgaacgaatcacaaccacatgatcccgatccaacctctggggagtcatcccccacctcacgacagaaacccggcccaggccccagtttacccgaaggcgaacccaccggcggaggggctaaatcatt

SEQ ID NO: 176409 - DNA, 844 bp, Zea Mays
cgctggaacccctcatccaacttcttcatacaatcgtctaatttcttaagctccgcggttgacaaattagtcaggcttgtgtcgttgtctaaggaaacgtcgttgcgatctttggggtcgaccgtcatgaccaatctaatacatctaacctaatagatatgatatgatagatccgatcttttcatccctagcggagtcaccaaaaagtgtttagtctcctttttgggccaaacactaatgatccctagatctcactcacggagaacaagaccttgggaaacctctctacgagatggtagatgagatgtaagccaaataacccttggtcagttttaggtcacctctgtgatggcgccttcttggccaaatggaaacgaaccctagggccttctcgtgttgagcatgaccttaggttcagctctatgaggtatcagacggtccgcgataggtcaccagaccatccacggtaggtcgtcggaccgtccgcggtagggcagcgaactgtccgtgatggcgcagagatcttgagtgaagtggatcttgcccccgtgaggggccttgccagggtagtcgtcttagggtcggcaagccacccaagatggctctagacaacatagagtcgaataaaggtggagattggagttgtggagctacaagtaaggctacgctatatctagatctaatgcatgaacattaaataaggtaaagtagactgattcgattggaacgtgttcaaggattctcaatggaccgtaccccttataggtgtaggtctggacccgttcctagacgagatctaacatattgccacgaataggttaggataatcatacatgggataatt

SEQ ID NO: 176410 - DNA, 1195 bp, Zea Mays
gtccagggaccctattgtaagttttgcctactagcaaggacggcgggttctatttcataaaagcaggggactgtttagcaaagtttgcctcggcgaagggggggtacgggttaactagagccgccagatcaaaatcccacgcaccagattaaatgaatcctttaagcgaagagttacgcaatccttgccgttggatcttcaaccaggcgcctggatccacatcggatggccgagaagagttcaggtcgaaccagaatccgggatcaaatctcagcccttcatctgggattgacggcccatattccaccccatcgcccaagcctggtaacggcggcgctgcctatggccatggcggggcatcgccggtgagcctgctggatggcggtcctgtgctctagatcccaatccggggagcgctacatggagacgggatcccaacaacagatatagggttcacgtaccaatggtgaggatgctgatgttctccgaccacgacgctagtggtcccgtggcagagcagcggcacaggtgagaaattctggtggccatgaggttcttctccgcccaacgacgacaacgcaagcatcgaagctcgccatcgaccaacgaaccgaggccaaccatcacgcgctcgttgaggatccgcacaggcgcacaatcactctctctctcccttccaactctgcacgccatggttactggattggtacaggagttcgcggcgacctgcgctttatagccagcatcgacccggtcctccaaaatgtgcgcgcagaaatcaggcggaaaccgtgggatcttcttgagtttgttacggaatctgtttcctgcagagaatctcgccgcgttggttgaagatgagggaggcaccgctgacaatgcgggcccacgatgcagagcaagcctaggacgcgcgtgctggggcgttggcgagatctcaggcggggtaaatcggcgttctgttgtgatcccgtgatccagttgcgtcgaccccagcgaaatgtgcgatggatgtttccgtcgccgccgcacgaggtggaggacgacccaggcctccttggcccacctgccagaggcgcgagacgccaagttgaccgttatggagagcaaagtgcctcagaggctgacgagagcgacccaccgacagaggtccacgcggcgcgcggcattgaagcggagttgaggaagataccgc

SEQ ID NO: 176411 - DNA, 756 bp, Zea Mays
gtgccagactagagccgccagaggataacgagtaatcactggcgtcggtccatctctaggattttgagcgtccagtctgggaagccggaacgtggtgggtggaggatcctggcgccggaacgtggtgggcggaggtggtcgtcggcttcagattgaagaccggcagggggctgcggtggatgaatacgccaggagaggaagatatcttggccgcatgggaagttgggcggcaaggagcgtcgggtcccgacaccagtggggtggaagacgacggggtggccgccgggtccggggtggatgccggcgtgaggctggtggagaggttggcgccgggaggggaagggacaggggcggaagatggaagggcaggagacggaagggcggccatctatgtcgtttattccgcggttttctttatacagccaaccaaacacatgcttgcataaagtcaacacatgcggtggtcaagataagatgacgcggacaaccaattaagccacttgtttgtgtcaacccaatatgacgaatgtcttaccacttttgtgaagtagatcaactgcccaacatagcctgatgtcacttgggagtgttggacaatcaaagaatagaaactaaggagaactcatcgacagttactgtggagatgtataagtaatttgaattaagttgggagaaacaggatgtggaaggaatcacaataatgtataaataagtattagtatatatgcggtataagcagaaaacatatttataaat

SEQ ID NO: 176412 - DNA, 517 bp, Zea Mays
acgccaccgtcggcttcagcgtcaaaaacactagctgccgaagctgcgcccaccgaagctacaactgccgaagctgcggtggccgaagccacaaatcttgagggcgtattttctgatattgataagatgattttggatatggccacggaagaaactgttgcaactgccgaggaaaccctggccacagtgcctggaaaaggggagaaggtgtttaacaaagagaagaagattaccgaagatatttcggaggacttcaattttcaaaacatgatcggttaggagttatccaaggctgaaaaagaggagctaagagattatgctatatcttgcggctaccagccaggagcgttgctcttcggtggcgttgacgaagagagcttaggatgcctccgggaccggactggagcgaaggttgtcagcactctatcgaagagtgttggctttccgaagcttgaggccaacctcagcaagtaccggcggcaacatatcgccggtagcttgttttattataatttta

SEQ ID NO: 176413 - DNA, 631 bp, Zea Mays
aaatttccttggtggttctctattttcatggtggccattgaaagatctatttttcctccaagcatggtcgcttgggaggaaccgtctatgtcctatgaatccaattttgtttgtcagacattcagagcatggattctcatcacagtgcacacatgcgaagtaacccttagtggttctgcctgacatgatacctaatgcaggatagtcattgattccccatagaatcgttgcacgcaggctgaagtctttgccttcatatgcatcataagtagagacaccattccaaagagtcatcatgtctgctatcaaaggttgcatgaacacatggaaatctttgcccgatgattttttgcctggaattagtaaagcaagcatgtaattgggttggtctatacacatccaaggtgcaaaattgtatggaaccactatcactggccatatgctatatgaattggtcatcttaccaaatgggttaaatccatcagtagcaatggctaacctcaaactgcggggatcatctgcaaaagacttgaaactatcatcaaattctttccaagcttctccatcagcaggatgtctcatttcattctcaaccggtaccctcttttccttgtgccatcttgcatactgt

SEQ ID NO: 176414 - DNA, 450 bp, Zea Mays
accgactccaaggagtcgcacggaggatcgagggctgctgtcgggtacctaggaacggggtacccaaggcaaggcccacaaacctctctctggcccatttaccaagtcctcgtcgggtgtcgggtaccataattaggggtacccagatcacaaccctaaattacctagacacttgagtaagtagaggtcacaagcaaacacgctcccaaccttaccaaggcacgagaaacccaagtcatgaattgctcgaggccaaccttgggtggccaacctcgggtgggagacgcagtcatggctctcccaaggccaacctcggacgagaggcgctttttcgactcacctgagggcgtctcgggcgatgctccagaaggtgcccaactccatcaatcaactccaccgacaaactctatgaggcggaccaaccgaccaactctccgatgaccaactcac

SEQ ID NO: 176415 - DNA, 476 bp, Zea Mays
agctggtacaacccttggagggtggatggtgggtctctagtgcaatggttgtatagctgactagtgtagaggccgatgatcgcataatggattacaatgtggcatcgaccagcggtagctgcgatttgagcaataagaatatcttgtaataatcacaaagacttcctttttccagttgtctgcagagcgacagttcgaccaatgcatctgtttcgggcctatacccatggaagttgagcaagtacttgtcgcaaagggtcttccctgattcgattgaaagaggaggcaatcttgaataccatgtaagggtcgggccttcgaggcgatgatgaatgatttggccatggtgtggtcgtccccctaaggatgcgacaatagactgataggtcattatatagtgagtagggtctatgctaccgttgtactacgatttcctactatagtgttattgttttctcctcctctttcatgatcag

SEQ ID NO: 176416 - DNA, 470 bp, Zea Mays
aatgcacatcctttttgtttcgtccttcttctccacaaatagcactagggctgcccaaggcgaggtactcggtatgatgtagcctttctctgacaactcatcaatctgcttcttgagttccaccaattctagtccggacactctataggctcttggaaataggggcggtgcctggtataagctctatggcgaattcaaccttcctttcaggtgtcatacctggtaactccttgggaaacacatctgagaattctgatactacattgatagcctctgatggtttaatctcctcaatatgggcggtgacttggtgacaacttcctttccttggtccagacaagaccaactctactaacacttcttctcctgatagggacactaacttcactgttctcttgtcacagctaagactggcttggtacttggttagccaattcatccctaggatgacatctatagttgtatcctgg

SEQ ID NO: 176417 - DNA, 523 bp, Zea Mays
gttagttcagttggtggaaggacccaaactgatagattttgccctagtgcaaaggttcaaataagggggatagagttccccgtcgatttgatagttatgggtaaccaggatacaactatagatgccatcctagggatgaattggctaaccaagtatcaagctagtcttagttgcgatgagagaacagtgaagttagtgtccctatcaggagaagaagtgttagtggaattggtcttgtctggatcaaggaaagggagttgtcaccaagttaccgctcatattgaaatgattaaaccatcagaggctattagtgtagtgtcagaattcccagatgtgtttcccgaggagttaccaggtatgccatccgaaaggaaggttgaatttgccatagagcttataccaggcaccgcccctatttccatgagagcctatcgagtgtctagaccggaattggtggaactcaagaagcagattgatgagttgtcggagaaaggttatatcagaccgagtacctcgccttggg

SEQ ID NO: 176418 - DNA, 788 bp, Zea Mays
ccagaaaacagtggctccaacatctcaaaggcacaagtttttcggttattcaattatgcacaaccacaagatcgtgttcagaacaatctaaatcaatagataaactaaccctctaaattacatacccatgttaatagtaggaaaagcaaattaggtgaaatttattaggtagatgggtgggggccttaccacgtgcggcggacggaggtcgcccaggcctgccaatgggcacgacgacggggtgacaaggaccggcggcgagggttagggtttgagagcagtccagtgcggaaggacgaacgggcgtggggggagctaggtatgaaccgaatagggtgggccatgagacggcggacggcggaggatctcctctgcaaagatgcacggtgggatgggcaggaccttacctcacgcggcggacggatgttgccgacgcctgctcctttctccctgcagcggaccgacgtcgcgcgcgacgggtgacgaggaacggcggtgagggcgtgaggcgggggcacctgaggactggtgggggcgtatgggtgctggtcagtgcctgatccagacttctcactgcatcgtcacgatcttcctccccatgcctcgaaagcatcgcggcgcgcgcgcggcgagggaggagctcgacggcgccttggttcaggcgagacaggggcgagtgctatgtgcctgtgggggaggggaacccgtggcggggcatcaggaggcgggtgtagtgggcgggggcatggaggtaggagagcgcgacaggggcacggacgccgaaccgg

SEQ ID NO: 176419 - DNA, 623 bp, Zea Mays
caggggcacagggcgcatgtgcgcgaagcggtatccgcgatctgggccgtgcgatcaagatcggacgggggaaatcagaccggggaaggatgaacgactgcgagcggcgctgctcctctccgcggcggtgaagtcgccggaattgggacaggtgcgtgctagggtggctccggggtcgccgggattgggcagagagggagagaatgctacgacgaactcagtgacgaggaaaaggccacgaatctgaggacaaagaggggagaacggcggggagaaggtctcaggcagaccggaggaactccggtgagggattccggccgcggggagggggtttgaggcgcgctaaggcctgggatagcttcagctgaggcaggggtaacacagggatcaacaccggggcactggaccgggctaaattggcctgtcaccgcgtgggcgcggtggaccgccacggtcgaacaccggcgaagccaaaattggccgagcacagagcaaaattggggaaattaagcatgggcaaaggtgtctcacctcggggcggagctcggggtggcttggtgcggtctctggcgagctagatggcctgggaagcgcgcgtgggtctccggtggcgtctggcgacg

SEQ ID NO: 176420 - DNA, 584 bp, Zea Mays
tgttttttatgaccgaatcaaagtcgtgtaccttgtcaaatgtcgatctcctagaagggcagagatgccaataaagcggtggggtcaagcgacgtctctagctcagagatagggcttcctatgtcgccaagcttgttcgtcgcgaagacgggtcacatcattgcgacgagcgagacctggctttgtcaggcgggccgatgtcgcgacgacgacggggcgggggtggaggcgccaggaagggtcggggtcgggcagcgttgcgtcaagaggaggcgacagtcgaaacgggcatcgaggcaaactggtttaggtggcatcgaaaagattagggtcgaagtgatagatgcgaggactgggttggagaggatctgacgaggaggctcatgacaaggttgttttaggcagctaacaactgggttggagaggatccgacgaggaggctcatgacatgattgttttagacagctaattgttaactggttttagctaggttgaggtagctaaggactaatgattatttaaagggtatagctaaaaattagttggtcaatcagttgattcattctaaatttctcagctaattt

SEQ ID NO: 176421 - DNA, 399 bp, Zea Mays
cgaagagcaaaaagttgaaagtccttacccaccggccacgttatattgagccggccgtggtgcctgagtttggcggggagacttcttcagctgctgaaccaaaggagcccattcctcctatgtagaaggctgaagaaccggctaccatgccgaaggcgccctcagccgagctagctgagttaaagactggtagggataaggccaaagagccaaaaactgaaggaacaaaaatgttagaaattttaagcccttcggtggaagtaacagtgccgaaggcgcaaaaaagtctagcggcaactccaaaaagaagaaggatgacaaatgtactagacgtgctagaaacagtaaaggctttaagctctactccttcaaggaaaattgccgaggcttcaaaaatgc

SEQ ID NO: 176422 - DNA, 473 bp, Zea Mays
ggtgggaagtaacgaaggggggtttcaaagacctctctgctgtagttttggcatagctgtcggagggcttttcgggcaacattttggcaagtgtctaggaagcggtgtccagtgaaggtgacttggaaaggagggtggtttgggtagcttcggctttctcccaggtagactgccatagagcacttctcagttccgttctcgtggtattctttccagacgtactctggcttcttgcggatccccatgcgaagcacgcaactccgcaagagatgagggaatccttccacctctgagcagtaggatgtcctaatgaccaaagagccttccatccggtagaagaaaagaagggtctcttaatatcgggggaaaggagagaagattttcttagaggtaagaggtattttctttttaaggcaaacttttatggtcggggctgcgatctacggccagtcctatgggctctgataccacct

SEQ ID NO: 176423 - DNA, 652 bp, Zea Mays
ctagggtgttgaggctatcttctctagctcgacctggaatgatgctggtttggctccctccactaagacgcagaggaagatgcatgtacttcgtgtcatgcagttgctgccggtaggtgtggctgagataccacagagtctgcctagcagcatcgctgaccgaagcagcgtaggttggatagcggtgtcagggactcatgagttgatagagtcctgaaccccctatcccctacatccatcaccctgacgtgaatgcgagtcatgtagtagcatgctcggggaggctcgcacactcgccttgtctcatacaaggataggacgtaggttcccaatgcatgcggcacatcttgcagcaggttggggaagtgccctgtctcgaacattgatgcataatgtgtggtgacaggcctaaaccccatgaagtagtcctgctgaacaccgttggcttcttcgttgacattctccttgtcatcctcgtcgtcgtcatcttcatcatcgtcccagagtcgtccaggctgatgatctagctgcgaaggccagtgactctaccaacggggtaggaatacgcagaagttcctccgagctatcctccaagatgactccacgctccactcgaatgtgagggagatccactgaaatttcctcaactacc

SEQ ID NO: 176424 - DNA, 787 bp, Zea Mays
ggatgcaagagttaccaccctgtgtgatgaattgtgcaagctgaacctggaagttgttccttcaggtgaattaaattatatctcggtggagcccacattacaagagcaaatagtcagggcacatattgaagacaagggtgttcaggttatcaaggaaatgatcaagcagaaggcaaagaaatacaagtgcttctgtcaggacaacaagggaattctatggtttggagatcgattggttgtccccaaggaccctgaactcagaaagaggatattggatgaagctcacctttccaaattctccatgcaccctggtagcaacaagatgtatcatgatctcagatccttatactggtggaccaggatgaagagggaaattgccaagtatatatctgagtgcgacacctgccaaaggattaaagccagtcatttgaaggcagcaggccctttgcaaccccttcccataccatcttggaaatgggaggacatttgcatggactttatcgtgggattgcccaatacctccaggcaccatgattccatttgggttattgtggacagattgaccaagaccgctcatttcttactagtgcataccacccacaagacagagaaatatgcagaaatttatgttgatcaaatagtgcggttgcatggtattccaaaaaccattgtatctgatagaggagcactgtttgtggcacgcttttgggagcagttgcaagactcacttgggacccaggtaatacgaagctcagcataccatcctcaaacagatggccagacagaa

SEQ ID NO: 176425 - DNA, 622 bp, Zea Mays
cactagaggtcggagcgcggcaacgcaggtcggccaacgatggaggcgcgacgcagatcggccagcctggcacaacgtcggatggcgtacgcgacaagcgatcgggagggagggtgcgggagccctgaagctttcgaaggaaggaacggtcggcaggaggacgcgaatcgaatctaagtttcagatgcgggcgtctttttgcaaatttgcttcgagaagtgaccacagtcacaggatcaagatctgacggcactcgttcatagtttccatggtttgcacgctttttaggtttgcaacggatacgttgcccacaattaaacctgacacatgaacctcttcttcaacctcagaccaggaccactgatagggtggtgcggtggactcggaggcgcgggttagccgcgtcgaagatggagggcgtcacgtcgtgggtctgccgaggctggcgtgcgtcggcgccggtcggcccgtgctagggcatcacacctcagctgagcacaaagggcgtcgtggactcgtgggtcactagaggtcggagcgcggcaacgcaggtcggccaacgatggaggcgcgacgtagatcgaccagcctggcacaacgccggatggcgtacgcgacaagc

SEQ ID NO: 176426 - DNA, 902 bp, Zea Mays
gttcagctactttaccggatggtgtcgtgtattagaaccatcatgtgaaatgatttccacatctctggccatcctttgctcctgcattttctcctccatttctgcaatgcgttgttctagagcagctttctcactttcagcctttttgtgggctaagacttccatttggagtctagtgggtgtgtaacttctcaagcctggggtaccaatatcttgtggagttggtcctagacccaaaactcggacacgtcctcttggctctttctctccacaaacagcagcaaaagcatcaccttcttgaattgttctttccttcaactctggatgggcctcaacaatttcctgaatttgatgatgcatgcgattaaagtatatgtgaattccatctcaaaaaatctagtaagtttattccttacttacatgcaacctaagccactcgtgaaaggattgatgttgcatgcggttgatgtctcgtttattttgaagaccaattgatgatagatagtgagcatgcttgctgcaatggtcattttatcacttcaacatgcaaaatgaagtgttcatgtgatgacaagatatatagataacttactccaagtaaggccctatattgcaatagttgaacaaaacatatctgtgggcttgtagccatgtcttgtggtctaaagtaactatgcattttccagacaatccacgaccaattctatggaagaaaggagtcatagtacaatcttcatcatttgaaactatatggttcaattgagattctccatgtaaatagagagaacaaaatgtaaggcatttagtaaacatagaccactccatgattgatccttcacaatgactttttgtatgaacagaacccttcaatcccattagatacctatgcacataaataaaag

SEQ ID NO: 176427 - DNA, 664 bp, Zea Mays
cttgcgtgcgacaaatccgtgcaaaagctgcctaagggtgcagccggacaagcacaacaagtgcgcaacacaaagtctttaccaaaaagacatccgtgcaaatgccgcctaagggtgcagccggacaagcacaacaagtgcgcaacatgaagtcttcactaaaagacatccgcgcaaaagccgcctaagggtgcagccggacaagcacaacaagcgcgcaacacgaagtctttactaaaaaacattcgtgcaaaagtcgcctaagggtacagccggacaagcacaacaagtgcatgatacgaagcctttactaataggcatctgcacaaaagccacccaagtgtgcagccggatacacactacacgtgcgccgaaggccaagcatcaccctaatggcgcagggtacgttacaatcgccgctgtctgacatagtcaaacaaaaccaccgacagatacaaccaagcacgtctcttcggcacccacacattgtcgcagcaagcgaagtccccatctctttccacaacaaacaatatcacagtttacatacacacaacaaaaggccaccggccactttgcacaaataaatacctaccacattttgttgccctccctctttatcgcgagccaggggagggcagcgttttcactcactaccgcaatacaa

SEQ ID NO: 176428 - DNA, 489 bp, Zea Mays
tttccccgcggcacctacattatgtattccctggtggatgtgggaatcgagcttcagggctggggattcgtgctcgccggcgtattgccaccgctgtctgggcgccgcgatcggtgggtgtggctggaggaagaagatggatgctgaccgttcgattgtagttgggcgatggagatgggatcccatagtaatagaactcgggccttcggattgaaaacaagcggtagagattaaatcaggcgcttaccgagtcggggttctaatctggtccctggatccaggatcggacggctctgaatcaacgatacccctttgccgtgcacttctttcaaaacagcccctccgtttctacaggttcaacccgcagtcctggcgccagccgatctgtgtctaggaaattttaccccgagccccctgcatctctgtttaatatgcgcacagtccagaggtcatgggaaattgaataaataatatcaggaagtggttttt

SEQ ID NO: 176429 - DNA, 907 bp, Zea Mays
gacacccatgaccgtgatgctggctggattgtttgtgggggcttttcggtattatattacatggctccgcctcgttaaaaacctcaccccctgggaggaaaagagtgcgggcctgagtgacattgtttgcagaaatacaaaggcacttgggccttggatcttaaataaagaatttacgtaggttatctatattccatgaatgctctaggtcttcgccagatgatgtggctagcctataagtgtttggcgatgcttttgtcttgattatgtatggcccttcccactttggctctagcttgccccgggactctgttccgatggttcttgtgagtactaagtccccttcgttgaattctcttaggacgacattgttgtcacgccatgccttagtttgagcttgatacttgttcagggcctacaaggcgaggacacggtccccgtcgataagatctttggaagttgatttgtcgacgttagggatgactaattggtttgttcgtggggctccatgctttaactcttgcagtgtcattgcctcagatccatacatcaggcagaagggtgtgaacccggttgctcggcattctgttgtgttcaatgcccatatgactttgggtagttggtctgtccatttgccctttttgtcgtcgaggagccttttcttgatagcgcagaagatcttgcccttggcgcgttcgacgacaccgttggactattggtggtagacagaggcgaacactgccttggtgccgatggagctgcagaattctcggaagtcctggtcgtcaaactgcttgccgttgttgactgttagctcggatgggactccaaaccggcagacgatgttctgccagaagaatttctgcgcggtcttcactattattgtggagaatgctccgccctcgat

SEQ ID NO: 176430 - DNA, 305 bp, Zea Mays
tggtgctccgtgcggtgctggtgcgtgattccttcctgattcttctctatctccggtccggtggtccgcggctccgcgccttgtatggtcactggctcactgcctcactggtgcagtagtgcccctgctggctgcttagacatctataattttgttatgttttcattttcctcccattctcgccctccttctaacctgttcggttgctcgactttctctggtgctcggctggtccttgcttgctgttgctggtcgctctgctaggctgctcctcgggccttggctccgttccgtcgtctctggtg

SEQ ID NO: 176431 - DNA, 970 bp, Zea Mays
aaaaagaaaaaggaaaaaggtgaatagtaacgggctgaaaccagcccgatacggcccatacccaggcgaaacgcgtccgcgcgcgcccgcgctggcatctttgcatagaggaccctggctgtttgaataacccgtaaagagtccttagcactattcacatgtgtctttgacacttcgcgcagaggcccttcactttctaattcttcacgaattgaagtccccgaccgaggacggcggagcagcggctccggcgagcccgtacttgccgaaaaactcaactaccagtgctctggagcggttaacacctaatttgacccctaataaccattacccctcaaccaattttaaggttctagcccctaatctctctgcccatggtgacagcgcgatcaacggacaactcgaagcgttcccggtgatcctatgtgttctagctcaattggccgggtcgagaagcatcacaagcacacagggatgctaaaacaagagcgaggagggcatgatcggacctgtggagagctggccacggcgagctcacacacggcggagttttgactaatttggtggaaatcccaaattagagctctctggtggacaatccgaaacacgggtgggtgcgctggatgcttgactacctagtggagctgatggcatgctcaatttatagggcccgagggcggtggctcatgaatttggaatcgctcggtagcgaccggagagaggggagagcactagtggcttaatcgtggcattcaccagtgcaacggctcaaagattgtaatcctcattgtgccacggttactaccgcgcagtaacgagccacgacatggcataactgagatcaccggagtttccacggcaacaccggcggtccggccacgtcgcactgctacaggcgcggtgataagcttcctccgcgaccaaatccgctcccccgcgagatctttttacctccccgtggatatccact

SEQ ID NO: 176432 - DNA, 402 bp, Zea Mays
gcttgagtgggaccgcaaggactacaagagggacctctagaaggtgttcgcccgtgagctagaggtgacccggaaggagaagaagctggccaagaaggaggagcacttggaccagagggaggaggtcatcacggagctccaggcgaagctgaacgccctcaacaaaatcctggaggagcagcgggtccagcagaccgtggctgtggagagtttgcaaaggctacagcaggagctgaatgacaaggccagcagctttgccctggccgaggagaacctcaaggagaaggacgcctccctggataagcgagcggcggacctcgcctggcgggagaaggacctcgccttcagggaggaaatgtttgaaaggcgggagaagctgctaaccaatcatgagctcgaggc

SEQ ID NO: 176433 - DNA, 460 bp, Zea Mays
gaagttttgttatggatcccctggatctatttgacttcttggctaggttgataggattgttctttagtattaagattttcgactagatcgataaagacgatattatatcatagtggttttctaatccctaatattgctatataacccttgacttcttatactcttgttttcttgccattgtattgtcatccttggacaatatctaccttgatatattgaaccctttgtctctacttctctccttgataatgcccttgtattttgtatccttaaaaaaattctcatatccttggttgtatcatttatcctcacttcactagttcatggttatcttatttcacttttggccaccaacaaatatgtcttgtctaactccttgataatccttacccaactctttgatattattaatatctttcttattccaaaccttgtatcaccttttgttttggttgaatga

SEQ ID NO: 176434 - DNA, 398 bp, Zea Mays
aaagcagaagtggcaagggtgattctcaccagaggttctggcagcggcactgttcggcgatggagttcccacccgatgaggagccgaccacgtcggttcttcgtgtgtacagtacgcccgcttggcgtgtgatggtgacttcccccgcggtgtgagtccagctatttccctggtttcctggttgttgcgcggtgatggtctgcacaatctcccttctgcctcagtgccgatcgcgatcggtggtaatggtggtcacggtggccacgagctttctgcaggccatggagagatgagaggagaacgtggaggctagtcttatagccgaggatgatctcgcctggcggctaccatgcatggcgcttggtttgttacggagcagtgcggctattgcggccaag

SEQ ID NO: 176435 - DNA, 378 bp, Zea Mays
cggtgatgatgctgcttggtatcccaaacctaaatactatgtcttgtataaactccaccactttggctgaagtcaaggaagcaattggcttgtactctatccattttgtgaatttgtcgatagcaactagtacaagagtatagccttcctgagctttcttaaaaggtccgatcatgtccagcccccagcatgcaaacggccatgttacatgaatggtctgcagctgctgtgcgagcaagtgttgttgctttgataggaattggcatgcatcacacttctggactaactcggcagcatcactttccgctgttggccaatagaaaccgaagctttctcgaccagagtccttgacgctacgtgtattccacactgccccgc

SEQ ID NO: 176436 - DNA, 1031 bp, Zea Mays
aaagaatattattatgaatttaatgctactgaaatggatcaaaaaggacttaaaatgaattgcttatgaattaaacaagtttctggaattatttttatataagaagtcatttttgaattaattcttgccaataaaccgagaccaatggactgcggacatcatttccgaataatctaaggtcgattctgcaaaatccagagctccattgtaattactttataactaggttggacgacgagttgaattgtaaagattatagggtctcttttgcatagtcgcacggatgaaagggtaactacgaaccctggccgttggatctcaagccaacaactaggattagatcggatcccgaataaccgaccccctgttccaaccctacgatcaactgtatatggctcggatcttaaataactaagacagattcctacgcgtctaatacttattcaacgacgcagatccaacaacccaaaacgttacgcgtgatttaatctcatgagttgaacctccgattgatggtcaagattggaccacgccgaatgggtatggatatctaatctaaaccgttaacaccagatccacgactcacgctccttctattacccttgacttactcggcggcggcggctgaggcaccacggcggcgccatgaccggtcggtcgctgaattcgaacaccaagctaccaacacgctcctaaccgaaaaatatggagagcaagaataggcaaatcatcctgaggggcttactgggagttgaggcggtgacgcggccggtcgacggtgaactgcggatccagggcagagctcgacttcggcgagggattcccagcaccgcagatgtcctctacatgattattcccgcccacaacttcgacacacaccggcgaggagcctgagacccaatccgggggcagaggcgccacccaacccaatccttgcagcagtggctcaacgcactccctctcctctcatgttctctcaatttggccacaactgcactttgagggtcgcgacgatggaaacagtgtcgacc

SEQ ID NO: 176437 - DNA, 538 bp, Zea Mays
tcattgtcgggggcgataattagggacacccgaattatcccctaacagacacactcagagagataaggactaaactcccaagaggtgacagccgagccacctataaaagccgagacatcgccctcgagcggcactccgcctcgccctaggacgacaccactcactccgtctcgcccgaggtcgctttgcccgaggccacctcagcccagtccgtctcgcccgagctagtctcgtgtagataagacaagggcactcggaaacaggtaggggacatgcgcatttaatgcatgtgccaaaccgcgcagtggcagcagagcacagtggtggataagacagtgatcacatctaagcgtagcagtatgattacgcctatgccaaacagtgcgcacacgccgcctgacaccctccgatgggacgcctaaatacgacaagccgagcggacgagtcttcggggaatccacctcgcccgacccaagctcagcccttggacaagctctccgccttgcccgagctcggcctcggccaactactatgccac

SEQ ID NO: 176438 - DNA, 441 bp, Zea Mays
aaaaggcttcattctagatttcataagcttcaaacttcacaatttctgtaccttcagactattgtatgcaagactatctgcgagatcggccttcgtcatggcgcaaaggccagcttcgagcttcgggaaacccatacttctgactatctcccggcagacggataattctttgttgtccgggaggcagtaaaaaagtcgtcctcggttgtaccattaaatactagggcttccttcggatactgcaattcccgggcataatgtttggcttcagaaatttcttcttcggatagtctttttcccgaagcatgtctaacaatataatcaaaaccttcggagggtgcttcgggagtaagggattcggcttctttcgccacacttttctcaaaagctatattagtatctggagttattccttcgcccccctgctcggttgggacaagc

SEQ ID NO: 176439 - DNA, 373 bp, Zea Mays
ggaaatctaaaaattcagatttctgaatttcagccctcacctagaacttgagcacgttcaccttgatccctagctcaaatccttaagcccccattgacaaagttgtgctaaattaacccctttgcaacgtgtgtgaagatggcatcgagattcgtgccatagacacgtcaaatctgggatttcatctcgggtttcatgagacaaaccaaacttcatcactccatatctttggctccagtcaacaaaacccacaagcctccacacataaacgacaaaggaatgtcaggtgaagagatctctcaacggggtcatggccttaatcgcaaagatttggagccaatccgcgcttgaacatgaccactctctgcgctgc

SEQ ID NO: 176440 - DNA, 372 bp, Zea Mays
ggagggcaaggcccggacacgtgtcagcaccggacccctgctcataccagggtcctcctcgttccgggaccctgctgaggttcggacatacccggaggctctagacttatatgtataggggtctggtgtccttctgagggggtccagacttactgggatgtgttgtcttttcttgccacgtgtcaccctttggcctacccatgcggtggggtcaggcgccgtcccgcgcgtggctaggagacgtcgcatgggtgcggcgtcttcatgctgtagaagagggtacccctgatttagggtaccgacataaactatttcaattgagcaagataactttttacattgtatcgctcaattagtaaataggaatgcctt

SEQ ID NO: 176441 - DNA, 565 bp, Zea Mays
agtgctctgctggggcgctttatgataggatgtggggccctcacggacgtgacatcgtccgagagatggccgaccgagcgctggcacatgtatgttttgggtttggcgaggatgttgtgtgtgttcgttgtttgaaaccttattgtgctgccttcataggcgatgagggaggagggccccgcctgccttgaaagctcgccagcccagaaggatgctgcggtggaggcaggggtggaagagcaatccttgctccaaggaggcgacgctgagggtcctgcagcggcggacgcttctgagcaggttgcgaggatgtaattagagatagcctgactgtttgttttgtgtgtgatactgaagatcggttgctgcgcaggttccgacgtctgggcctgtgcaagcaaactgtgatgatgacacaaatgatgatattttgatggatggaaatgtggtgtttcttagtgacgcgtttggcgaatctaatgttgggtcgtggtcttcggaaggtgaaaagttggggagcctattttcttggacagatgacaaatcctcagaagatgatttagat

SEQ ID NO: 176442 - DNA, 613 bp, Zea Mays
ccaagtctcacgcctggctcatccagtcatccttgcgtcgacatgcggggctcgggtggcagccactcatcctcacacctttctatcacctcactggcccatgggcccagcctcctgggggcggtcatccgcaggcgcagacgcgcgcacttcatctgcgtgtgggtccccctaggcaggaccatctcccacgctgacctcaaacatcaatagttccaccgtgtcgccgccgtgtatctgggctgattccgctggcgtcgcgcgaactcgtggacacgcatctcacgcctatatatgtggccgccaatgtccggtttcttcaaacgacaaaccaagcaagccaccagcaatgggtggaatttggggtgaaactgagaggattaccgccgttgttgatcacgtgcttcgcctcgctctgacccctggaaccagcccctggagcttctccatgtggcgtggatggcgcaccgggcttcacctgatggaattgcggtccaggggacctgtaatttctcgccgaagcttcttcctcaccgctgggtcgccctgcatgtggtcagtacttccacagccttaatcgtcggtgagtcttgcctcctgtggttcgccttgt

SEQ ID NO: 176443 - DNA, 478 bp, Zea Mays
ggctagatgccatagaggcgactagtgatgagctgcttggagcatattcaatggccgaaaatgaagccatgacaactcccttcggagctcgaggcaaaaagaggttgaatagggtattcgatgtcatcgagtttatgtatctagactaccgttatcctttgtggaagcaagggaagaagagaaagctgctacctcggcgacttctagcgcgtcgaggtcaaaaaaggttaaagttttgacgtgttgacccaggcgcattgaaacggccgacgtgtcgaagctaattgaggggaccgctcctatctctaagccaagttgctctatgcctgccgaagctagggcaaatgtgactgaagagccaaaaatggagaaaatagcagagcagttgaaggcgcggagtccaccatacgcaacggaactgtcgaagctgtcaaacatccctacaggaactccaaggaaaaggagaatgactagcatg

SEQ ID NO: 176444 - DNA, 651 bp, Zea Mays
gggtgaacaccatcgtagcccgcaggtagcaggcgccgcgacctggctcgatggttctcttggttgtggctctatggcaaccgacaaggaaaaaccactgagctggcaagcattgggcggagctgaggtggcgaacgggggagccgcgaagcggccaatgtcgaagggcgataggcggtcgacggatgcgcctcggagggcgtcggacgacgggtggtgcggcgcgtgccatcctcagcttctggctaaccaaggttgggagaaaacacgaacacaacacttgtaaagttctgttgaattgagtgaaaaattcaggtccattctagacacgcgtcgaacactaaacaccgataggtatgccatactaggagtacaactacgcacgatcctacagaggacccacaacgataacccagaggagctgatctctctcttgtagaaaatagatctcctatgtaaggtccaaccctttagctacaaaagggcaggccctctttcttctcgacactcgagcacacctattataacatgctcaaagcaatactacgattaacactacactggagtagggtgcgaatccgaatcagtataaacctcatcttagatttctcattgaacccctggtggttcaacattcgaagtgagtccacg

SEQ ID NO: 176445 - DNA, 382 bp, Zea Mays
gtttcaccattgaattaaaatgaattattgtagctggtaagggttgtgcttagtgcatattaccccttcataaaagactgttgttttaagacattgatgttgatgtatagctgcatccaaattcgatggtgtgaaatcgtagtgttgattgcatctatgacttgctttgagcttcattgcatgttgtttcatgcttgatatcaggttgtgtagtttccttagacaattagtccgaggtagaggttcttgtgttaattaagaccaataatggacccatgttttgaatggtggtgctatatggggtaccttggatgctttgcttggaagtggtcgaattcgagaacgaattgtttttaaggggggtagagtgtgataccccaat

SEQ ID NO: 176446 - DNA, 316 bp, Zea Mays
gcactagcgcctacaatcttgactacctcatccctattctttgtttgggacttatatggagaatggcatcggctgaatgcctgaatcgggtcgggaagcacggagcagatagaagtgcactttccaatgtagttagacagagaaggcatcgttgtgatgttataatgctgaaggacaccaagaagagattatggcctgtcatccaccatcactgcccgttatttgtgggcttcaccgagggctggaaacatttggtgacagcaaacgaccttcgggctggggacgtctgcgagcttgttaaggggccagacgatgg

SEQ ID NO: 176447 - DNA, 842 bp, Zea Mays
tacagaggaggctaccacacaggctgcgccacggtgtgccatcaggtattcttattgttgagttgaagttttattgtcaagttgaagttttaagtaaatgatttttattgtgaaataataatctttcatttgcaggtttcgtcggtccctcacattgaagccttctaaacccttcgatcagcggagggttattgaaccgaaaggcaccagggcatggaaggaggttagttgggacgggacgggtcatcgcacactagtcctcatagagttggggatttgtttgtgattcgcctacccgcgatggtgacagagggtggtcgagagatagctgctcattactgggctcattgggacctgaagccgtacgggaacgacgggacacacacaagcaaagtgtgggatttgttttgggtaagtctcttgtgatattcaaattgaattcagattttgcatttgtaagtctttggtgatcttcaaatttgcagggccaatttcgtgtgtgcgacccctataccttggatgatccatatgtgtgtgaggtattcaatggctcagtagatagagttgtaaagggcatgatgtataaagcacgattgagggcggtcatagtgtaccaaaagcgtcaggggaactattgtgacatggatatggcaaaggaaatccacctgacggctcagcagtacaaagagagtgaggtggattggttgagccaccattcggatgcttgggcgtggatgttcaagtattgggcttctaaggagtttgtggccatatctaatagaaatcgtaggaatcggttgagcaagccagggttccacttcttcgaggcagatggacacgct

SEQ ID NO: 176448 - DNA, 515 bp, Zea Mays
cacgctaacagccccccgcaatcttaaccggtagccacaaggttgagagtgggtcttagtcgctgcaacatttgtttagtagctggcttggtgaagatatctgcaacctgatctcctgaagcaatatgtcgaacatccagatttcctaatgcaaccttctctcgaacaaaatggaaatccacttctatatgcttggtatgagcatggaacacaggattagaactcaagtatgtagcacccaaattgtcacaccacaaaacaggcggtcttgactgcataacatgcaattccttcagcaatgattgtatccacgttgcttcagctgcaccatttgctaaagccttatactcggcctctgtagaagatcgtgatacagttggttgcttgcgagcattccatgagataaggtttggcccaaagaaaatggcatagcctccagttgaacgccgatcatcaatgcatcctgcccagtctgcatcggtgaagatgcttagtaaactagatcttgatggtcg

SEQ ID NO: 176449 - DNA, 586 bp, Zea Mays
ggccaggctggcgcgtggcaaatatgaggttatgaccaaaaggcgggataagtagaataccactcccaaaatgagatgggaggttggagattttagataacagacataatgcaatcacaaggtaggatagagtgatgagaagggtaaaggagacgacaaacaaaacacaacaaaggatggagttgaaaactcgcaagcgacaaggaagaggatacgaccaagagaaaataggtaaaatacaactctaaatttgagatggaagagagaaggttttagaagacaggtatgatataagctttagggtaagatatagatgtaataaggttacaagggtaaggatggaaatcgtgaaaagcacaaccaaggatagagttaaggcaagactcacgaagtggcgaagtggataagacattcaagagtgacatagttaaggtttcaacagaatggttaaagtaatagaaagtattatcgagggaagttataaggaaacgatgagatcatcaaggatgtgcgaaatagaatgatcgctcatggatcatcaagaaacaagggtggtcaagggcatgtaagtcgaaatgttttaaat

SEQ ID NO: 176450 - DNA, 797 bp, Zea Mays
ggaacggcaggtgttcaatttgcagtcaagaccacaaggatgtggtgtgtaagaggaatcccaatgggaagctcagatgggagccagtgacttcctcctcttctcagggcactgtcaacatgatgtcaagcgctgagcagcaattttaagttccacttcctccgtagtagttttatgtgcctgggacttctcagttcgtgccggtgcagggtttttctcagtatctggctgcgcctactcctgcaccgactactcctatgccatctcagtttggagctccgcgtctgcctcacccggcggctcagtggggttcttctgttaatttcactccaggagcttcctcttctgcgggtatttccggagcttatgtgctacccgctgcggatggcaaagagcaaggagacgtggtgacaggtacgatttcagttgattcgtttgtggcccatgctctttttgactctggagctagctattcgtttgtttcggaggattttgtgtcgcaggctggtctttcggtgcagaggttgggtcacccaattttggttagttctgctaatggctccattagtagttgttcagtttgtcaggggtgttccgtcattctcgctaatgaggtctttttggccaatctggttgtgattaccttggggcattcgatgttatcttgggtatggattggttatcccaatatcgcgcaattatatcatgtttttggaagacagtgttattgcaggcaccatcgagtagggaggtggtattcttgggaagttccccaaagttcacgttatccttgttgg

SEQ ID NO: 176451 - DNA, 1546 bp, Zea Mays
ccgtagcagctaccttgtcttgcatcgcgaatactttgctgtggatgttatttcaatgagaaaatatgtattgttgaggttagctttagctgcgttccgtttcggtattgaagttgttcctgctcttggattgagctggtgttttgattattcagattggcattttgtctcttttaattgcattctggggatcactcatcgttttaattaattgaggatgatttcgttcagcgatttgatcattccctgcttctgtggcctagtttgctaggcttagcacacagttttcctattatcagcttggtcttatggtcaaatttttgatcttttatttgtcagcaattcgtattgtttggtttggtcaattcattaagaatctgagattaagtgacaaacttgtcgtcttcaaatgttttgacctttgctagctcgaggtgaacatgtcaaagaattccagggtaggtgtaggtcttactttcttgtttatatgagatacacacgtggactgattcctcctgttgttctggtaaattttggttggtagttagcttgctgaaatctagagatgttatcttaaatccttcattctatgattcatctgtcattactagttcctttcaccaatgaatgtagttacccaagtggaaaacactaggctcttgttaaattgggaattctgggactggttactgatcatattaccatatcctatttttaagtatatagttttagggtcttagtgaatagtagtcatactcctgaattttttgtttagtccaatctaggatcttttaggatttaaaaaatttgatggtttcaattaattcttcgccctgcaaagactttgaaccatttattccatcttactatcaatgttatcagatcatatgattgaggctagcagtaagatcaccgatcagaagagtaatcatcgaggttagaaaaagcgttaggcagtttctaggcgatgacccaccgcctagagcctaagcacgcctaggtgttttgtaggcgtttttgccaaatttgcattcaacatgtatagctgaataaattatatatataaagagagaaggaccaatagacataccttggttgatacaaaagtgatattcctacttagttgatacaaaagtgatgttcctacaagtggacaacagaccatatcaacaatataaatgatacaaaaatagggaaatagggaattgcaagttaggtacttatctgaatgatctcatccttctcccatccatcagatattatcaccagcaaacgatagccatttgaaatcacaatcatgtacggatagcagcaaagaaaattaaatggatagtagactagcagtagacctgatcaacccgatccgacccacccgaaaaaacccgacccgaccaatgcgacgggcgggtacagaccataatttttgacccgcaacaatcaacgcgccgtgttttttgacccaaaacccgacccaaccatacccgaaaaaacccaacccaaagccaaaaaacccaaccctacccgaaaaaacccgacccgacgcgcc

SEQ ID NO: 176452 - DNA, 296 bp, Zea Mays
caagttcaaattccttccaaatcttgtgaatcctgtgcatggttgtgtccctagtgctccattgaatatccctgcaggtttctagctccctttaggagggtttccctacctcaaatagccttttcaccgaaaacctaaacctctgcataccatgtgttcggtgaaatgtccaaaccagccaaaaatgctccgattgaacccaaatttttcaggcaccttcacaatacctccagtaacatattcgccaaatttcacaccaatccgatataccaggcttcaatttcactcaattcccc

SEQ ID NO: 176453 - DNA, 465 bp, Zea Mays
cgggttttgaggagcacaaaaaatcacggagcgaccgagcacagtccagttctgttaaacgtggcagagagtggtcatgtgtagtgtgcaagctatgtgtttcctcaccatatgcaacctgaaacacaatgcaggtagagagtatagtaatttatgaatgagttatgagaagcaagcatgcaataaatgtataactgaattacttacatgaccactaggtgtctgataaaaaaggggggtcgtgtaagttggagtgtcatgagatgcatcaatgtcacctccctgacccaaaaacaatgatactatgtttaaagcctcattcatgtgtcaattaaatttaatcgataattgagattacaatggagaaaacaaagatgaaacatatacatgtttttgcggtgtggcgtcaaacatcggcaagtgggaagacggatatgagctcatagggttgcagtctggtacatg

SEQ ID NO: 176454 - DNA, 420 bp, Zea Mays
gtttggctctggtgttttgtgtctgatgattctgggaattcgattgtgtggacagaggagtcttcggatgaggacttggattattttgcagcgttggatgtggctgcgggggagacttctccgcgtgtggtgggtgctgaggatcttacgggtgcgaggactgggtgtaggcggcgaagggcggtggcgaaacggagagtgagtaaattgtcgcgaagtgataggcatcatcgtggtgagatggagggtggttgtcttcgtgtggatgggactggcaaacgcgaattgaggataatgctgttcaactacagggagatgtgtatcatcccgaaggttgagccaatgtaatgtgtgatgccctcgctgtatgtatgtaaccataatttgtatgatgaggctacgttccttcgttgatccagc

SEQ ID NO: 176455 - DNA, 361 bp, Zea Mays
ggcaggtgtccgcgataaccattgtcaccgtggctagggcgttgtagtgtgccattgctgaaattgacttaggggaatggttctgggagatccaattcggtgttcgccactcggggccgccagtcttggctccctctggccggtccaggtgctcgccggagctctgtcgcgccgtgcaccgtcggggacctggcgcggtgaaggaatagaacttcaagggccttagtgcaaactgttagtgactctgagtaacagtgatggaacccgttcccagttagcgaaaaccccgagggcctttctgcgaagtctccaccgcgggcgcgggcgcgcgcacgtttctgctgttactgggtcgtcctgg

SEQ ID NO: 176456 - DNA, 481 bp, Zea Mays
agcgtaataccctacatccactatccgtaagttgtattgaccatgtcccttgtaacgttgtgtcccctcgcttttatagtttaagggaggtacatacaaggatgctgagctccaacatgcgggcccaggagcataatggaaggaatacattatgtgaatatttaatgttgacagcacacaaagatctttgctggacgctgtgttgcttctccgactggctactgccacgtcttgccgtgtccgcaggtgggtgatggcttgttgcagtagaatacggagtagcctggtacgcctgttgtgcgtagaggcatataggcggagccgttcagattccctccgccttagtaacacatgagtaatcagcgggagtcatgatgactgcagtccatgcatcattgataggcagtgacccttttcttggaaacgcgcgagtaatggtgagtcattgtccttgctatggtaacgtgtgagtaacagcacg

SEQ ID NO: 176457 - DNA, 685 bp, Zea Mays
caccgcggtacctctccccttaatcaccgccctcggataaggattctcaccgccgttaagccatcgccgttgcctgccgcgtggctctaactttccaccgcatcgccgtaagccttagtggctccccgttgatcgccagagcaattgccacggcgctggacaccaagccactgcgccagtactcttcttcctcctccgaccgccgcgcgtccccactgaaattatcggccaccgccgttgagccctataaattgaagcccccgccagccccgcaaggtcatcacacacccagccaccgaaaagcactagcaatcgttcgtcagagagcttgaattttagttttcccccaaatcaagtttccgccaccacagaaccgagctcaccgtggctagtcctccacaggtttaatcataccatccttgttcttgttttagcatctctgtgtgctggtgatgctcaccaactcgcccaattgagctaagatcccatgaatcaccgagaacgtgtagattgttagttcatccacgcgctcaccgtggccagagacattggtgtagttgtttatgaaattaacttggggaaaaccttcactaggccctgaatttggtttagaccaatgtagagcgccagtacttgccccaatcggccgacctacgtgctcgccggagctcgaccgcgctcgacg

SEQ ID NO: 176458 - DNA, 526 bp, Zea Mays
gggacctcttcttctcattctcagcctcatccaaggacctatgttcgaactaggaagcgtccaaggaatactcaagatgttggagaagaagatggtagttatcatgatgatgaagatggtagtgatcatccagctgaacagtcagtacaaactcaaggagaagtggatgaggaagaagaatctgagtcaggtggaggggctgctagtgatgctgcttttcaattggatgaggctctactgctttaggtcaatagtaagtctgtagttctattatgtacttgcctacttggcatttatatactagtaagtctgaattctgaaatctgaatttctatgatgttctgaaatatgaattgtccactctccagtctccattttgtccagttctactgttctattattcatatttgttttgtttggtaatttggttactttgatattgcctcctatatgctatattgctatatgctatgcatatatatcaatattacattattacacatatatataattatatatataggtc

SEQ ID NO: 176459 - DNA, 434 bp, Zea Mays
cactccccattccttgactcgtttggcaactgcccccacggcggagtgccatttgaatcccccacgtcccctcgcctcgctaccctctctctcattcttggacagacacctagcgccctcgccgtgctcacctctccacgcaactgccgcgtgttcgccgctcgcaaagtcgcgccctcgcctcactggagcagtccccgaagcctcgccacgtccgtgttctgccctcgcaatccgaggtgagtttctcccctcgtctactctctccctctcgccatacgccatctacccctgcaccggtgagacccctactcgcgctcctagcccctcggcgcggtgagctctctcatccctggtgcccagaccaaagtagaccctgtcggccctgtgtcgtgtcctcccctccctgcgcactcatgctccgcgcgcgacaa

SEQ ID NO: 176460 - DNA, 605 bp, Zea Mays
acgcagcggaagcgtggagagcctgtccagccatctccctggctttgggccccaccagtgaggcctcctgttcatcttctccaagcaactgcctgtgagccgcgccgatgcctccaaaaccacctcccccactcgacctggcccccacgtcgccaaaaaaggtggtgtgtcgtctctccccttcctcccttgcaagcaggaagccagaaaccgccctcgtcgttccccagagcgccgctgcatcgcgttcccttgcctcgcctatgcgctccatagtccgtgccgctcgcctccgcccaggccacccttgtccgcgtcgggtgactcctcgctgcccgcctgtgtgcgcgcgcttgctgctgctactcctggccggccttggcgtccagggtccctagccccatgcgacagcagccgctgccgagccacagcaccgtcggcaagcagcccttccccatggccgttgcaatgcgtctaaggaagaagaaaggaggaaagcattctatgcggtccgtgggttgaaggtggaggccccacttgtcgtttgataggctagaggagcggctcatgcaggtacacgagaggtattattagtgcaatgtaga

SEQ ID NO: 176461 - DNA, 573 bp, Zea Mays
caaaattgttctaaactaacccctctgcaacgtgtgtgaagatggcatcgagattcatgccctagacacgtcaaatctgggatttcctctcggagttcagcagtgagacaaaccaaacttcatcactccatatctttggatcctatcagcaaaacccataagcctccacacacaaatgacaaaggaatgtcgggggaagagatctctcaacgggatcatggccataatcacgaagatttggagccaatccgcgcttgaacttgacctctctcggcgctgcctcatgttcgacgtcgtgcccaggcgccagagcgcgcactggcgctcgcccgcgcacaccctgagcacgtgttagagccacccctcgatagtgctcgcttgcgcctttaagaccaccccagacgcgccttacctcactccgcactcaccttcgctggccagacaccacccttagctccggcgagctctatgccacccgcccgagccacccgagcgccagccattgcggccagcaatttccagagaccctcagcctcaaccgagcccttggacagcttcctcgaggagccgtga

SEQ ID NO: 176462 - DNA, 631 bp, Zea Mays
attcagatatggggataaattcggtgaaccaaacggtgactggctaaaatgcatcgaagttacaagtgatgaactgcttggatcatattccaaggcagaagataatacattatccacagccttcggaagtcgagaaacgaagagattgaacagagtttttgacgctattggcttcgtctaccccgactaccgctacccgctgcggaggcaagggaagaagaggaaagctgctgctctggccgcctcggctgaacctgtgccgaaggctgcgggcaaaaagatgaaggtacttacccaccggccacgttatattgaaccggccgtggtgcctaagtttggcggggaggcctcttcagctgctgaatcaagagaaatcgctcctccgatgcagaggactgaagaactggctataatgccgaaggcaccttcggttgagctagttgaaacgaaggttgacaaagataaggctgaaaggtcaacaactgaagaggtaacaaagatgccagggactttaagtccttcaacagaagcaacagcgttgagggcacaaaagagttctgccataactcctaggagaaggaggatggtaaatgtattagatgtactggaaacaaccgactccataagtctc

SEQ ID NO: 176463 - DNA, 768 bp, Zea Mays
cacggagggagatatcaggaagcgggagatggtattgtagcgtagggagtaaaacatagacaagtgtgttttatagacgatcgagagtcagggtcagcagagagtgcagatctatgcttggttccaatgcactgttcaattgagatttttatggttggattttatcagttgaatgcacctcttttattcgaaatttcacacactccactcaagtctcggtttgtgccgtagcaccatagctatgcaatggcttaaagatatggcccattgaaaaatgcgatagactaggacagcgaagacgtgggctagatggcccagagggccaaaagttggtcggcccatatcaacttcaaaccgatgtgaacttttgatggttagatgggaccaaattttgaatacacctgtataaagaatttaaatagctcaaaacagaatcaactcgaattcatcagcatatgaaggtttgaaacaaagatgacactatatatactgctcccaatgtccattgcgtcatgcattcgtaagactaccaatgatgcattcttgaccaaggcaaatttcatcttgttcatgggttgtccgtccatatgccttcaattatgctttcttctattctgagtgttcttaaatctctcgagctagattgtttagcatattcttgtgatcatgatgataggctatagtatcagtgttgcgtttatgtcatcctcataatccaagaaagcatagcacgcatttgagtatatttgaccaatgtactactgcctc

SEQ ID NO: 176464 - DNA, 682 bp, Zea Mays
gcaggttagtgggttgtcacacgaaaattagagaaagaggccctgcaagttgctcggtcagatggactgaagaacatcgccatggtatagtagctagaaagatctccagtgccatgaacctgacgccggtgaccttccgccgcaattcgtgctcgccttggagattcgtgacgtgtgagaagtagataacgccgggaaggggtgaaaagatccggggagaggataacccagtcactggccggtctggccatcgtgtcctgccgcggttagtcgtgttggcatcaccggagctcaccgtttccccggccgtgacacgtagcgatctatcctccgcgtcataaagatcgtggcaagcaaccggttatcacccctgaaccatttccctctcgcgcgccatggtgagcaggccactgtaaaaatatcctggccgctgtgacctcgatcccaatccaaaattcgtgataagcttagccagagcctataaattggaggcaccccctattccacctacttgttacgcgcccagctcaccacttctcgcccaaatttgggttttcccccaaatcagttctccgcgccgccgcgaacaacccctccgtcgacccaccgctctgtccctccaaccaccttcctagctgttgttcttgagtcctagtaagttgctaaagcttatcatgctccc

SEQ ID NO: 176465 - DNA, 864 bp, Zea Mays
tccccatccactagaggttggtaaagttctgtttgctaaatattcctgcaccaagtccctagtgctaatgtgctcaaccaccaccctaaattccactttggctagttggcaaggagaccctagctgcatattgcacaaaggtcgagtcatgctgaagctcagctttaagggactaattaccatgctcatgagcttctccctcttcttctcatcggccttcatgtaaaaccattcattagtctacccggtcagccatttagtgcggtagccaatcacgggggccttggtatctttccggtacgcaaaattatagcatctaaagttcttgtgcagaccatctgctctagctttcgtctaataatgaagttcgtgcacgcgagagaacccttcggcattgtcactttttccttggcttcagagagcccatatgtaaacgctaagcctcacaatagtgttcggggtcagctgatggagatatatctcaaatctctttaaaacttcccctatcatatcataaaggggaaccgaagccccactctgaagaagctcttgaacacaacaacatcatcttccttcggctctagaattacttcttctccagcaaagcgaatcagtccatcttcattttctccaaaataacctagcttcttcatcacaaccaggtcctctgcttttactatggattttccaaattcaatatgactaggtttggttgggcacaaaatactatcatcctcttcacttttgttatcactcccgacttcagccacaacttgttcagcttcggcgttggaggtaccttcggcagtagctccctcttacacaaccagacctgatcgtctcatcacttctgatatgggtgtt

SEQ ID NO: 176466 - DNA, 567 bp, Zea Mays
cttacttcggcgagtttgattggtttttgagcttcgacattctagcaaccactgtccaaatggctgatgagaagaagatctttgatccagtgctggccgggttttacgaagccatggaaaaaaccaacatggagaaggtcgccaatgagatgttagctaggatttctaaaaactctagcgatagtgaaagcttcgatgtggaaagtggaaatgaagatgtcgaagatcggccatggagaccaagtcatgttgtcttcggaaaatcaactattaaacaagggcagatcgatgcaatgagggggaggtattttcgtgatatctcaatcgtgagggccggaagggagaataatgttcctcttcctgaagctaacgaagtggtggttttcaaaagcttcatgaaaggcgggcttcggttccctctggacaaaatgttggtcgaagttctgaaaaccttcgaaatttatattcaccaacttacccccaaatctattatcaaaataggggttctcatatgggccatgaggagccaaggattagagccagatgccaagtgcttctgcaatatgc

SEQ ID NO: 176467 - DNA, 283 bp, Zea Mays
aaccaccaaaattaattgtagaaaaatgttaaccctatttccctttcaaagaggaagcttagaaagtggcagtctggcagattggagggaggagcggtgagaaggttgaatcatagcagacgacgtaaagctccaattaatggtggcaatggcgagttgcagcaaatatggttaggagtagggatgtagggaccgatgaagcgttatatatgtgaggagaagcgagaacacgagcacgagcgtgaattcactgtgaccggtgtcatagtatccgcacgggtgg

SEQ ID NO: 176468 - DNA, 452 bp, Zea Mays
caaagccactgagactgttccgatttccgaagcaataaagcgatatgggctggtaacatcggaggatattcctgccgctggagcaaagcaagctgatgttgaggagaccgagtctaaagatgattatagcagcgcggtgccgagcaaacccagccatctggatttcggaaaatccaccatctccgaaggtgacttacctaagatgttgaagttgggctatttaagtgaagaaaagaaagagctggttcgttttggtggggaagaaactactccgaagccaggaaaagatgaaatagtgatctttaaaagtttctttaaagctggtttaagattccctttgaataagatgattgctgatgtgctgaagaaatttgggatctaccttcatcagctaactcctaacactatcgttaggcttagcgtttacatttgggctcttcgaagccaagggg

SEQ ID NO: 176469 - DNA, 293 bp, Zea Mays
tgaagcagaagtattggtggtatggactaaagaaggatgttgcttcacatgtagcactatgtgatgtttgccagagggtgaaagcggaacatcaaagacctgctagtttactgcacctgcttaagatacgtgagtggaaatgggaagagattggcatggacttcattgtggttctaccccacacatctgctgggtatggctctatatgggtgattgtggacaggctaactaaagtagcccactttattccaatgaagaccacgtattcaggagccaaactagcagagttgtac

SEQ ID NO: 176470 - DNA, 730 bp, Zea Mays
ggaagataaagcatacaacaaaggtaacataatataaatatggaagcttaagtgtgatagagatacaaactcacgatgacaactttggtatattttaccaaggtatcaagaagcatgcaagctttcctttaattttcgctggagccccacgtgagggccatgctcctagtcgtataactccatggatagccctagacttttctttgtgcaaagtggtgctccgattgtggcctctgttgggttctctttatcatcttcacaagtttttttgccataatgtcacaatccttgttccctctcgtatgcaatgatgaccacaccacaaacacaattgatgttatattgcaaaacttacaacctctccagatacaaccaatacaatgacgtacactagcgtcaaaggataagagatgtctatacctcacttctaatcactaggcctaaatctagaggaagcgctaatggaaacaatttaacactttgcaaagcatctacgctaatcattgagtgatctttgaacattttggtatcgagaactattaggaataagcatctactcacctgcaatgtttctcagctcccacactcttcaaatgtttggtttgagtcttattggtagcccaaatgagtaaactagtcattgcaaacacaataggcttcattgtgtatgatcagatcgtccgatgagtacattgttggaccaatttgttagggtacgatgcctctaaac

SEQ ID NO: 176471 - DNA, 1903 bp, Zea Mays
ctgggggcagttattcttgaagtgactagggtctccgtagtgccaacaggcattagctggtggttggttgcttgcgactgagggggcctagaaggagctctaactctgctgactgaaacgtgatggagtgggtccagctggcttgttgtagcttggtcccttgggtggaaacccaaaggatcgagttctctggtgccggtcttgctgctgagctcggaggacttggaatttcctcttgaggttacctttttcttcttcccttgccctctccacttgtatggctttgattgagaggtgcgagaagctgaggaaatcttggctggcgagaatggtcttgagttctggtcttagccctttcaaaaagtgggccatcttcttggcttctgtgctgacgtcgtcaggcgcatagcgagctaattatgtgaatttgtgcacatactcactgacagatcttccaccttgagttagttcctgaaattcatcttccttgagctgaacgatcccttggggcacatgatgttctcggaaagcagtttcaaattctgcccaggtagcatctctgatggtcatgctgaaggtatcccaccaggatagggccatcccgaaaagttgatgagcagccaattgaacacgctgattcttagggcatccaagggcttctaacttcctttttatcgtgcgcagccagtcatcaacatcgaggggattgctggatccagcgaatgtgggaggcttgagcctcagaaaatctcccatcctgtcctgtggtcttccaccattcgggcgctgattctccagacttctagtgaggatttcaatgagtctggtttggttggctagcacttgggctaaatctaatggcagctctggaggtgtgggaggtgggtctcactcccttctccaccggcttctccttcagctcctaggggaaaccctcctccaatcctggaggcggtaggcgtggttttatccgaagccatctgccagggggagagaattactactatgcatatgccaatttttttcaaccaagttattttattcatcacataagttcattacaagcatacagttaccataagccgcactacacgcgagcgctttctaaggtacttccaaagtccctttctaaagtgtccccaaattccttgagaaggtcgtcaaggctagctagggacatatcctcgacgtcggacaagttctctatcctggagggaggtagtgttggaggggcttccttcttccgctcagtctggcatccttggctcttggtcttctttcggattttcttcgtgggggcgagcttctttagcttcttatcataatccatcttcaggttcggttggcttcacgagtttggcctcttcaccttctgctatttcgagactctcttggagggacgccttctccttttaagttccttgacctgttgctctaagctttccacccgggagtttaggtgggtgtagtgggaggaaaggtcatcatagtggttatcgagagtgtggagatatccggccatgtagacgatggtggggtcatcctcagtaggatctcttcctgagagggcctaaagtcttttcctccaggcaggggtatttttgttgctaggtgggaagtaacgaaggggggtttcaaagaccactctgctgtagttttggcatagctgtcggagggcttttcgggcaacattttggcaagtgtctgggaagcggtgtccggtgaaggtgacttggaaaggagggtggttcgagtagcttcggctttctcccaggtagactgccatagagcacttctcagttccattctcgtggtattctttccagacgtactctgacttcttgtggatccccatacgaagcgcgcaactccgcaagagatgagggaatccttccactctgag

SEQ ID NO: 176472 - DNA, 273 bp, Zea Mays
gtgaggcctacaggatagaagacatgccctacgtgcttcaagtgcagtcaggttgggcattatgcaaatgcttgtccaacggggaaatccagtgcaccagctcagaacaagcaacagacttttggcaagggatactctattgccagggttaatcaagttagcgttgatgctactcctgaaggtgctgacatcgcacttggtatgttttatattaatgcaattcctgcaacaatattatttgattctggtgctacacattcatttatgtctgct

SEQ ID NO: 176473 - DNA, 410 bp, Zea Mays
attgaaggagaggtcgacgatctggagcgtggtgagctcgggcgagcaggccgagcaaggtcaacggacggaacatgagcgacaacagcgaggtcgagaggaggcaggaactacgtgggagggtatgggagacggacacgatgactgccgagaggcgcgttgaagaaaggtttttgggtccgaggcctcgagcacacgtcggcacatgtgcggccgagaacgagtgaaatgcggggaggcgcccaaacacgagcgtcttttaatactttaaattgggtgcagcagggtggtgttgggctttatggttatcaagaaatgatactgtttttgtccagactcgaccgaaatcctttttgcaggtcctttttaggggaacttactggcttcggttgtggggctaggttgcagcg

SEQ ID NO: 176474 - DNA, 457 bp, Zea Mays
tgctccgtataaaacaagaagagtttatccggttaaagcaaggaggagatattgtgatgcagtatctcaacaaattcaaccatctctcccagtatgccattgaccacgtgaatacatatctgaaaaagaggaattgttttatgaggggactcaatgataggtttcagcagaaaatggcaacatgcttggaccttacctatagtaaggttgtcagtacggcactggcagtggaagccaaaaatgcgggacatggaaaatcaaaggggtttggaggtgaaaggtcaaatcaacggcctgaaaagagaaccaggttggtgatccgaccttttaatcaaaatcgttcttcgcctcgcccaccttcatatctattcaagcagcctgtctttattcgtcccactactaccctcgctcctaccaatcagtcgaatgcccctagtacttgtttccctgctcttcc

SEQ ID NO: 176475 - DNA, 733 bp, Zea Mays
gttgcaccgtcttaagtcgtcgccgacttaagctgattgctccgttagtagggtatagtggtcaccctaagtcgagtaagcgtcagcatgtcgcaccgtcttaagtcgtcgccgacttaagccgattgctccattagtagggtatagtggtcaccctaagtcgagtaagcgtgagcatgtcgcaccgtcttaagtcgtcgccgacttaagccgattgctccgttagtagggtatagtggtcaccctaagtcgagtaagcgtgagcatgttgcgccgtcttaagtcgtcgccgacttaagccgattgctccgttagtagggtatagtggccaccctaagtcgagtaaacatgttgattccgagtccaatcaaatcaaagtaaattgatagtcaacagtttgaatgcctttgggaatgaaatcttttattgatgacgtattctccaattacagagtacaacattgctccgatagcttttgaggccttgctaagggtaaaactttctaagatgctctatgttccatgaattccccacttccgtaccatccatttgagtaagccaatatgatcctggccgagtgacctccgatataatgaatggctcttcccatagtggtgacaacttgtgctgtccttcctccgttagaattcggcaaaggaccaagtctcccactacaaaggatcgatgtcgtatagccttatcatgatagcgcctcaaggtctgctggtatctg

SEQ ID NO: 176476 - DNA, 1087 bp, Zea Mays
aataatggcacagcttcctggacgcgacaagcacagcatagaggagtttgtgcgtctcaggatacctagattttgcctcatgaaggacctcgctgacgtagtagaccagcctctgaacggtccggacccctgtagccggtcccgagtcctcaggctcctggccttctagtgccgtcctttcgacgaccagcaccatgctcaccgcttccgtggccgccgcgatgtataaatatagcggatccgctggttctggagctaccagtaatggtagggacactaggtgctgcttcaattcctagaaggcttgttccgccccttcggtccaagagaaaggcccggacttctgcaccagcttgaagaaaggtagcgctctctcagccagcctcgaaatgaagcgacaaagggcggctaatgaccccataagcttttggatgtccttgatatgggctggaggcctcatcgcctcgattgctttgattttctccgtgtttgcttcaatgccccggtacgaaaccaggaaccccagcaactttccagcggagacaccaaagacgcatttgtccgggttcagcttcgtgcgggttgcccgcagcttgtcgaagaccagggttaagtcttccactagggtcgaccctctcttagtcttgaccatgatgtcatcgatgtagacttccactttgtccctaatcaggtccccgaaagtcttactcatcgcccgcacaaatgttggcagggcgttttcagaccgtaaggcattacaacatagcagtaaagcccgtccactgttacaaaagcgatatgcttcctatctcccctagacatggagatttgatggaaaccagagtaagcatctaagaatgacaataggtcgcacccggaggtagaatccatgatttgatctatacgtcgaagtgggtacgggtccttgggacaagccttattcagactggtgtagtcgatgcacatccaaagcttcccatttgccttggggacgatgactgggttggccagccacaccgggtgataaacctcttcgatgaagccagcatctagtagcttccggacctcctttcggatgaagtcctgc

SEQ ID NO: 176477 - DNA, 429 bp, Zea Mays
aggcatgtcaggtcgatccataatcctagctcaagcgatgatagggggaatcatacccaagggcaacagcacaactctcaatcatcaggggacaacaaagttctttcaggccaccagctccaagaggcaaagaggggagaagcttcagaggaagatatggtaatcagcctaggagactgttctgcctattctgtggcgaagataagggacataccacaatgacgtgccaagtcacgatcaagaagcagaaggaaatcgttgaagccgaagcacggcagaacacgccgaagcatgtcttgcatactgctttgtgctactctccgtatatcccggagtatgtaggcaatcaacagcatatggcttccgttgcttcggcaagtcactcccaagcttcctaggctcagttgccaccaccgccaccgctggtgc

SEQ ID NO: 176478 - DNA, 350 bp, Zea Mays
tctgactatccagtgctcgaccgagatgtagcagcaagatatggttgggtatagctagagcgcagttggccggccagaacaatgctaggcgagagagggaagttgtggtgataggaatgtgagaggagagggattgttatctgttaggtcttatgaatatggaggactggccggcagcaaacaaaaaagtgaacactcatcatagctactgttgggcagggattcttttccatctcgcgtcctctggttgagagatatatatgtctgctgctctcgctatatagagggccggcctgccctgctagctagctagctagttcaagttctaggaacggatcggatcgaacaac

SEQ ID NO: 176479 - DNA, 1289 bp, Zea Mays
ccggttttgtgtggactatcgacatttgaatgctcttacagtcaaaaccaagtttcctgtaccagttattgatgagtttctggatgagctacatggagcaacctggttttcgacattggacttgcgagctggattccaccaaatccgcatgaaccctcgagatcaacataagacggcttttcaaactcaccatggccattttgaatttagagtcatggcgtttgggttgtctggagctccggcaacgtttcaaggggcaatgaattccacattggcaccactattgaggaaatgtgcactagtctttttcgatgatatattagtgtacagtcggacttggacagaccatctccttcatttgtcccaggtattacagctgctgcaaaaggaccagtggcatattaagctctctaagtgtgccttcgcccagcaacagatatcttaccttggtcatgttatcagtactcaaggtgttgctactgatccagcaaaggtgaaggcggttcaagcatggccagtacctactaattgcaaagagcttcgaggatttttaggtctcgcgggatattacagaaaattcgtaaggaattttggccttattgccaagccattgaccaatcttctgaaaaaaggggaattatttgtttggacccatattcatgagcaggcattctctgcgttgaaacagtccctaacgacggcaccagttttggcattacccaattttgataagccttttgccatcgaggcagatgcgtcgggaacaggcattggagctgtgttgttacagcaagaacatcccttggcctttgtcagcaaagcattgggtcctcgaaatcaaggtctgtccacctacgaaaaagagtatttagctatcattttagctgtggatcagtggcggcagtatcttcagcattctgaatttgttatatattcagaccaccgtagcctgtcacatctcacagagcagaagctgagtactccatggcaacagagaatgttttcaaagttgcttggtcttcaataccgcgtggtgtacaaaaagggggtggaaaatggggcagcagatgctttatcacgaagaccacctgcttcggacgatattctgttcagcctgtcgtcctgcaagcctcaatggctgctccaagtggtcgacagctacacaaatgatgaccaggcacagaaattacttgctcagcttgctcttcacaagtccagcacagggccatacaccttacattccggcctccttcgttataaagggagagtgtggattggtgctgattcac

SEQ ID NO: 176480 - DNA, 667 bp, Zea Mays
ctcatggccgacgacgacgatggcgttgctggtggttcggcgccagcgagatcccccaggggaatatttgccggcttcgttcgttcgtttcacggcacggcacggcacggcatgtcagcctgccaagggacgagccagctgaacaggctcgcatcgcatcgcatctcttccggggaattgatcgtcgactgaaagctagctaaacatctcgcgctggcttgtctccgttgccatatgcatgctgagccttcttgcaactcctgttcgatctgctgcctggaccatggggatatggagatggattagagtaatgcatgcgtggagtggttggtgtgacagagatgatcgtggacttgccccagcgtttaattagggttgatcacgacaattaagcagcagcagcagctagtagtctacatacgtgtttgtttgacctcgagaggccagcgactgaacaagagcgacgaatgatatgatatgagccctctaactacggacggcttgtctatctctctctctccctccatagaaataaagatatacatggcgcttccttttcgagacgccgtcgtcggggggcattaagatatgccgtgccgctgtgacggtctatgctcaccgatcgccagaccggccggccggacgggcatttggttatcccacctca

SEQ ID NO: 176481 - DNA, 432 bp, Zea Mays
gccggatcaggcagcccgaatgtacacctatacttgttgctaggtgccccaaagcacgagaaaccctaagggattagacccatatcatgcgaccaagcaggcttagtcaaaagcaccaagagaggtcctcccctagtataaggtctcaaggtggtgacatttccattacaacctaagagtcaatctcctaggtaagactctttccaacaaggagcgataaaatatcatgtactctaagtttagcgaatgagacgtccgctaatatctccagcagcagcctgtccaatgtacgataatgtagcggacgagttcggcgaacgctaaacctggaggatacatgttcatccgctatcctgcttcttgcatacagttgttgaggagtgtgcaatagctttacttggttgtagtctgtaatagaaattaattagtccc

SEQ ID NO: 176482 - DNA, 457 bp, Zea Mays
ccagaattccccaccggacaagcattagcataatgcccaacctgactgcacttgaagcatgtagggtcagtcttctgtcctgtaggcctcgccggggtgctagtgggggcagccagacgagtgagaggtgttcgtggagacccatgtggagtgtactgagctgggcgtggtcctcctcctggatgagctggggtaccctgaggcggaacgtagcaaggatgaacactgttgctaccctgcccctgggtaatggccttcctcttcaagtcacccagttaaacacgcttgtgttcaatagcaagagccttatccaacagtctctgaaatgatggaaatgtgtgagcaaccagtgcatactgtaggggcccattgagtcattctgtgaagtgctcttgcttcctttcatcatctgccacctcatcaggagcatatcttaacagctggatgaatttgtcac

SEQ ID NO: 176483 - DNA, 979 bp, Zea Mays
cgggtatgggcagtccttgatgaagtgtccagactttccacaattgaagcaaccagtggaagaactggggagagcagagaaacgagtaccagaggcattcagcttattggtaggagcgggggcagtagtgggacgaataaaaataggctgcttgaatgggtatgaaggtgggcgaggcaaagatcgattttgattaaaaggtcgaatcaccaacttggttctcttctcaggcccttgatttgaactttcacctccaaacccctttgattttccatgtcctgcagttttagcttccactgccagtgttgtactgatagccctactgtaggtaaggtccaagcacgttgccattttctgctgaagcatgtcattaagtcccctcataaaacaattcttttttagatctgtattcacttggtcgatggcatactaggacagatggttgaacttattgagatactacattacagtatctcccccttgctttaaccggatgaactcttcttgtttcatatggagcactccctctggaacataatgctctcggaacactaacttgaattcctccgaggtgatctgatgtccagccgattgaattgctacaaaatttgcccaccaagtactggcatgccctcttagctgttgtgcagcaaacagtggcttctgcgtttccgtgcagcgaatcaacccaaacttctgttccataactcttacccactcatcagcttctagaggttcttctactttaataaagagcgggggtcgagtctcagaaaattccaagtatgtagtttcatgcggtccttgaggaggagctctcccaccatgccattggaactgattgcccgccatttcgcgcaagaagcgcgtattaaccgcagtggcattgaccaggacagcgatagcctcggccaaagtctatggtactggtggtgggttaggagtatcttcccgaccgcgggaaggccccgcactgtca

SEQ ID NO: 176484 - DNA, 538 bp, Zea Mays
ttatttctgagatggaggacaataactactgtgaacccctaatgagtcaacaccgatgagccatctcctcaacgactggaccacattatgaggacacctttgttacctatgtatggatacaagaaggggctcactaatctccagcagcggctacttagtaccctagtgttccaatcttagtttaccatactagatctcaacattctagtgtcccaatcttagttcaacatattagatctgatcatttaagagatggagaacaccatttcaaagggcatcaagtctcgtcaccagctttcatatgcccacatgatctcttatcgatgagagagctggatagatagagtattcggtcgattcatgagctagatgagtcacctactccattcttgatgtacaaattgacctctattgtggatggtctgtaaagcccaaaatttagtagaagaaaaaatataataataaaataaagaaataagtatattggtgatagtgttccaaaatttttgaaacctttgtaatccattaggatccttcc

SEQ ID NO: 176485 - DNA, 649 bp, Zea Mays
gtcagcgccgaaccgtttcccctgcgcatgtgcccgtgcctctgcgtcgtgggcctgccctgtcagcaatatccaccttgcaaccaccgctgacctgcacgcacgcacgccgagaaagccggccacatcgcctacccacaccccaagctcccttttaagccccgcccgcacccgctctccttcccctgcctcatttcgcccactcttggtctctcttgcgctcaaccaccgccgcccgagctcaccggagaagtgcgcccgccacaccgtctgcccagagctccacgcgccgtgttaagcctccccgagcaccatctccaggtaaggtaccatccccgtgcccttcctgcctcggttactttcgctctacgacgaatttgcgctcgtcggagctctgccgcgctggttcgccgcgtccgcacggtgtccggtcaatttagccccgcccgtacccgcgttttggctctaggtgttcctcctcccttgccagagctcgaactggccccggcgcacccgattccccctccctgtggccgggattgctcgccggagtagccccaacccgtccggagcgtcccctccaccatcccctcgtccctagtcacattctcacagccggaaccctgccatcgatttcgtcggatccccc

SEQ ID NO: 176486 - DNA, 505 bp, Zea Mays
ccccagaatcgttttccttttctcctgagcaagaccctgtgttcaccgttggtgttgtggacgcctacactaaggccttagggaatttcgtgagcaagccaggaattgcccggagttgcaacattagttctaagcaagttaagtttcagggcccacgaaattccctctctagaaggtgaacgcaaggtcttgccctttaaagattttgccatttctttccttccaaatttccccagcagccactgagaagatctccatgaagaatggaagaccgaatagacctctagcctgttcaagcatcttgaaaaaatggcaaaatcttatcatctatataaagtaaagaaagattagttgtttgcttaccggagtgtgaattgtttgtttttctcaaaaggcccaacaacttaattttcatgcagttggacttgaccacgaaccttcttggacaactttgtcttttcttctgctcctatgtagcaggattaagaaccatgcactattgctt

SEQ ID NO: 176487 - DNA, 366 bp, Zea Mays
tggccggagtatatccacgacgatgatacttactcaaccccgagcgttatccagtcgatccgaacgcgaatcacggcggtgaaggcacgaatctgtgcgcggctcgtcggcggcgaggttctctgaacctgatcccccccgttcactgtaccatggtgattaccatgcagtcagtctgtcagagcaaaatcagagccacttttctcctcatttcatgtgacaaccccatcatcccactgcatcaaagttatagcccaattaaccaactacaatcttgctatggggatcatgcccaaacttgcgccggatcatgttcaaatctgggttcaaagattgcctcatcacactgtcagaccaggttcagtc

SEQ ID NO: 176488 - DNA, 544 bp, Zea Mays
atgccaccattactttattatcagattgagctcttaaggaaagagcttgtctcatatcatcatttttagtgttggctttaatattaaattctttacataatacctggagaactgagcgagggacccctgcaaaggaattaacatgtcccagataacagccactcgcttgagtatctgatacaaagggcagagtaacagactgatcagatacctgaacgggaatattaaacaaagaaggagaaacaggtaaaatattctggtgaattagtaagttaccagcagctttaaaatgatcattatccaatccgactccaacctttggctgagcatagaccgcctcaccatccataccggcgaccattccagcccgagatgcagtctcattcaggaacaaacggttggctgcatgtcctgacaaggtccacgcggcctcactctcctgtgacatgcccgcaaggaaagagcaatggggatccagcacgagccgggatttggacttcccatcatcgctaccacagcctggtgactgatcaagagcgccagg

SEQ ID NO: 176489 - DNA, 666 bp, Zea Mays
tggatcccgacggccctgattaactcatcttattcaatgaaacggtacgtgtcctgagccgtcgatcaagcgatccacggtcgggattctatatggacgaagaggtatgcatgatctaatctaaatcatcgcttcgcagatctacggccaatatacgaccaccatcgtattctaatcccagatgccccatccgatcgaacagctaggaggccgtcgccttcctcacggtccaaccatggcggcgccacacgacaatacggtggagatttcaccggtgatcggtgaactggtgcccccatgacccaaacctcgatacaaacacataatgcgaagggtaggatgtgaggaacagaatgaagggctccataccaaagaccgaagtacgaagatccatggccatagaagcagtggcgtggcgacggaggagacgttccggtgagaaatccttagggccacggtggattctcccgctcgaggcgaccattgccacaaccagtgtgcgcccacgaacccacatggctaccacacgggggaaaatcatcggtgtagatgtgggtaaacagtggcttcgttttccctcacggtgttgcgacgaggttagttcttaaggcgacgatgggaggaggtgacggctcgagctggaggacaaaggggtcgagttttata

SEQ ID NO: 176490 - DNA, 652 bp, Zea Mays
ctgctacgtgacagattaaacacaaggaatctatcaagaaggaaaaacatgttcttggagtgttactgttgtgtgccatgtgttgaggagatggaagaaagtcagcagcaacacatgttctttgactatccctttagtcaggcctgatgattattctggtaagaaagaacatgaaaatggatggtagctgtatcttgacaatattgtttgtacattgtactggatggtagaacgtgtgagcttcaaagatggcgttgacttactgctcaaaaaaatggcgtcgacttcacatgatctgagctattgggctgcaaagaaaggccgggtccatcaacgccgtcatagtgctctgtcctgcgggccacgcgggaaggtgttcagactgagtacactgaagcaagcacgagcaaacctggtgatggtgtttagtcccacaccgcttagcctagaggggattaaccaacaagcacacgtcttatacagcggcagctgaagctgatgaacccaagcagctgcgtggtgagcacaaagcgaactattctttcgccttttactaaagaatatcgtgtgcatgcacaataagcagcatactctaatttttggagggtgttttctccttaggggaaatgctcaacaagacaaattcataaca

SEQ ID NO: 176491 - DNA, 1058 bp, Zea Mays
gttaaagtcggcgaggcggagttcgccaatggcggtggtgaggaagtcgagggagccaaaggtaatgcggcttccaagcgcgaaggtctcactaccggtgaaacacagatgattgagccatcggagtgaaagtgtcgcttggccctacctggtgtgcctacaatcgtggtttcagaaaccgaggacacattagaatttgtgttcgatgggggaggctagcgtggactcactccgaatggtgaaccaagtgacctaagggggcaggcttatatcagtttaggctcgcgccctacggccattgtagtgcttattgtagcattgctctaaggaacatgttacaaagggtgcaagtgtgacaatgacatgaaggggagaactctggcataatgctcctaactctcctgcctatgcctgttcggtcatccccttctatatttcaagggggaggctcttacaaggggacttgttaactgaaggagggtgcaatctgtcgtctatgggagtccttctgacgtagtattcctgatgtcatcccctgatatgtgcataggaatacgtccagtacggcggatcgcttcatcctactcactatgcaggtcactgtagagactctaatgctgaggttctccgttgtaacatcccaattttgatcccaaggttagaaaccctaaactcctaaccctccctttaattatctcctatgaccccatctcatgaaacatttccttcatcatatgcatacaccatgattgctagtagcacttcacatataatattttgacacccaagaattctagataaatatttgtttaaaggaaaaagagattatagaaaaagagaaagagcaatagaattggaaatagaaaaagaaaaagaaaaaggaatttctcctccccccggttggaccgattccggcccaagctttcccccctctctcccgcgcgctcatctccctcacccgaggcctagctcggcccacctcccgcgcacacccgtgtcgcgcccactgtcatcccggccccacccgttagccgctcctgcactttcctcgcatccgc

SEQ ID NO: 176492 - DNA, 678 bp, Zea Mays
ggagatttggtcggctgctccgcctcgctggcttgctcgacgggggcttggtcggcagccccgccttgctggcttgcttggcggggacttgatcgtatgctccaccttactgagttggtcatcagagtgttggtcagccggtccgcctcgtaaaattgctcgacagagacttgtcggtcgtttttgaagaggccatgaccctattttgggtacccggttccggagtactcgacaatatgtttgccaagtgtccgagatttcgtactcggcaacctgtgagcactcaacaaagaacgcgttttcggtagtgtaaggatcacttgtctatgggatgcccatcactgtcgtgcagctgtttatacgtagccgacggttgtgaccttatgcatgcggtgcagatgagtaggatggctgtattattgcatgagtaaattgttcggtccatgagataccatgaggaacaaagggatcgtaaagaaaggttcagtttggtcgtactttttcccgagagtgaaaggtcaccatcgtcaaccgaaggcatgtgagagacgagctttgcagtggatggagagttcattcatggaggctaaaggctaaaggacccacagctagcaaatgaaatatggagtagttaaaggctaaaggaaccgcaggaaaagaaaaaggccaagaggccgc

SEQ ID NO: 176493 - DNA, 795 bp, Zea Mays
ctgaatgtttagtgacagtgacttgggatgaactttggagctcttttgagaatgatccagcgagtatctgagtgtggttactatagtaagattaaagctggattgtaggaccacaactttgttaaaggtggattagcaagttatcacatgaaaattggagatttgggcgctgcaaactgctctgttaggtgctctgaatatcgtcctgatggtacaatgccacaaaaagatcacagatgcaactcccctcgtcgccgatgaccctcgtgccgtaatccacaccgtcaccaagatttgtgctctctggtgaggagattatcacgacagggtaaaaatcttggcaccggataggctcgaatccggtcgacggtgagcttgttgtacccacttgggctgtggtcaggcaaagtggtccttgccggagttggacgcctaccgaccgtgtgccatgtgccttagggcgttaccacgtcgtagtaaaccactgaagcgtgtccggtcatcaccggtgaccttgccacagtgaaagccatgaatgctttgcgctagtgctctcccctctctccggccaccagcgcgccattccaaattcaagagccaccgccctcgggccctataaattgagcgtgccatcagctccgctaggtaatcacacacacaaagcaccggcccatgcctcagattatccaccagagcgctccaagtttgaatttcccctttcaagaacaccgcagtgtgtgagctcgccgtggccagctctccataggtccaatgatgccctcctcactctttgtc

SEQ ID NO: 176494 - DNA, 1054 bp, Zea Mays
gagggacgtcgtccgtgcagcctacctccccggtggcgtgcagggcgtggcggtggtcgcagacagcatgcgggcggagcaggtgcccgcggacgcggtcttggcggcgcgcgtgctccctctcaggcggcggcggccctccctcatgcacggcgacatgcagggagaaggagagatgcggggagggagagggagaaggaaaagctgctagcggctgctgagagagggagaattggctgctgagaagagagagggagaattggcggctgagactgagagatatttgggctgggtgaggtaaccctaaaattattgggctgggctgactgaatgtggatttttttttctgtttctcttttctattaggctaaaacgggcctgagccttacaattgtgcttacttattaccttgaattagtgatatataaataatatttggtataaattttttatatttatatatatataattaaggcgtcgcctcgccttacgccttttcgcttaaagggtaaaaaggggatggtcgccttaacttgccttaccgccttaataagtatggttcgtgtaattcatattgtaatgcgtgcatcaatgttatcttatgagctatacttatgtgaatttgttatttctaagtttcagtttagccctgccagttgtcttgtgttaccaacttctaatgttaagtactgagtgtactaatatcaagcactaacactatcggattgttcaacacagttatcttagcctagactagatcacatggatgccatgtggctttacctgtgcttacaataaaaaacgacagccatttagtctaaagcctagagcaagttggggtaggctaggcctactatgtaattgatgtaaacaaatgctagatgagctaaactagctgttaatcaatggatttcctgaaatttattttcaccagttacttacaattcctgaaaaagaagtaagataggatccccttccagtcactcttcggtgactctttttaacattttttcagcattgtcctcttttgaaacatgtgaaagtattcacaaat

SEQ ID NO: 176495 - DNA, 1150 bp, Zea Mays
agggtagccagtagctaacaagtggtatcagaggcagcgatccttggcggtggagtcctggagtcttcgattcaccacactcatctgactcgtttccgccgacgccaaatcctcatgaatccggatactcaggtgatttttggaagaaatggcgcggcgattcgcggagagtgacgcgaagtgggatcggcgtatggcagagcaagaagcccgctgggatgcgtcgttcgctgaatcttccaaaagtcgtgttcaagcaccggagaagaacgctggccagatcgaggactggcatgcttccatggaaggggtggtggatgatcttcgtttggaagtgggcaagatctccaaaaattgggaacgtgccgtggtggataattcgactaccatgacgggcgttctcgcaccttctccaccggctgtcgcacgcccatctgccggagtcacagccgatctgccccacgggcaccgcgtcgagcttatcaccggggaggatggatttgggtcggtcaccacccttctccatcccccggtcaagggtacgtactctactgcatcccagcatcagttgtgtgcgggttctaaattccatttgccgggtgctgctcatgtcaagggtgattttactcgggttgatggttctggaggagagattagaggtcgtttgcctaagttaaacttccctacgtttgatggagaaaaccccaagctgtggattaaacgcagtagagattattttgacatgtatgcagtagagccgcaagtgtgggtgcgcgtctcaaccatgaattttgtgggagcggctgcttggtggttgtcttccatagaagagtcatcccaattggctagttggtctattttttgtcaagctttactggagagatttggtagggatgagcatacggtgtttattcgccagttgttcagtattcggcaaacctcatcggttgctgagtatgtggagcgcttctcgcagctgcgtgataacttggtggcgtatggtcgaccgatggatcccctctactttgttcagcgttttgttgatggcttacgcgccgacattcgtgcggccgtgtttgtgcaatgttcgtcttccttcgatactgcttgtgttttggcatcgttgcaggaggaggtgtcggggccgctg

SEQ ID NO: 176496 - DNA, 290 bp, Zea Mays
gtgacaggtacgatctcagttgattcgtttgtggcccatgctctttttgactctggcgctagctattcgtttgttttggagaattttgtgtcgcgggctggtctttcggtgcagaggttgggtcacccaattttggttagttctgctaatggctccattagtagctattctgtttgttaggggtgttccgtcattcttgctgatgaggtcttttcggctaatcttgttgtgatttccttggggcattcgatgttatcttgggtatggattggttatcttagtatcacgca

SEQ ID NO: 176497 - DNA, 559 bp, Zea Mays
gatgacgccgccgaagcgtgtcagaaggcgtttggtactgtctgcttcttcattggtacaagagatttaattcaagagcatatagcattcagagtatggccgcttgccgagagctgggaaatgccaaaggagaccatcaccaagtctagcgagggtgaactggtccggttgaagtatacattcagatatggagataagttcgatgagccaaacgatgactggctaaaatgcattgaagttacaagtgatgagctgcttggagcttattccaaggcagaagataatgcgctatctacagccttcgaaggtcggggaaaaaagagaatcaacagagtttttgacgccatcggcttcgtctaccccgactaccgctacccattgcggggataggggaagaagagaaaagctgctgctttggccgccccagctgagcctgtgctgaaggctgcgggcaaaaagatgaaggtacttacccaccggccgcgttacattgaaccggttgtggtgcctgagtttggcggggaggcctcttcagctgctgaatcaagagaaagtgttc

SEQ ID NO: 176498 - DNA, 444 bp, Zea Mays
gcgccgtcgtgtttcagggcgactggatggctggaggagggtgatgagccctgtgccatcagatctagagtaaacggtttggattagattctgggtaacgctccgcccgtaatagatcctggccatcgattccttgatgaacgattcaaattagatcggatggtgtggatcgttggatggtgatcgggccgttctgattgggatagggcgtgggtataatcctggcggccgaattctaatcggacggcttgaagagatccataccccttcggtcgcatgttttgtaaaagaaaccctggaaaaccgaggaataaacctgccgtccacatgtggggcgccctgtgtcttaagaactttcacttagagacccctgacctttcttgtaaatgaggcccagtccagaacccatttaatttgaataaaagaaatagaaaatggattttt

SEQ ID NO: 176499 - DNA, 909 bp, Zea Mays
cttattcttgcttgtttcttcgattgctcgcaggagtagaacttcgtgttcaggttgatcttgtcaccagcaaggtctataaccaattggagttggttttgcgattgctaaggcgccacgacctgtttgttcgtagttggatcgcgatagtcttcgcctccaccaaatcgaaattatctacctcatcgaaagatcgagcactccagctctatcatcccttcaactaggattgactgatcctatccatcggtggtggttcgactgagacagtatgtggcgaggtgtggagttgcagccggatgtggaggataaccattttttagattagatagcaatggaaaatattcagccaaaatagcgtatgagtgcttgtttttttggctcaacacagtttggaccttttgaacgtatttggaaatcttgggcgccttcgaagtgcagatttttcatgtggctagcagcaaccaatgctggactgtggatcggttgtctagacgaggactgtctcacaatgagaaatgtattctatgtggtcaagaggaagaaacagtgaaccatcttcttttgtcttgtgttttctctaaggaattctggtttagattgttcaatcaagttggtctccaagggttggcgctgcaagctgacaactacaattttttcttatgatggaaacgggtctccgagaatgttgaaggatttgcctgaatgggtgtcaatacccttaccattctgggagcttggacgctttggaaaatcaggaatgaatgtgtctttgagggacattgtgctaatatacgtgctactttatttagagccaagaaggaaaaggagatgtgggtcttggctggttcgagaagtcttaccttcttggctacctcttctccccgagcaatttattggctttttagt

SEQ ID NO: 176500 - DNA, 770 bp, Zea Mays
ctctagcacatcaatatcctctagcttggtagcttctgcctcagctatgctttcaaaggtcaacctcggcgcctcgaatattaggtcggcgggtagcactgcttttgaaccataaaccatgaagaacagggtatttccatgcagggctcgactaggttgagttcttaagctccaaaccacatatggcagctctctgatccatttttctgcaagtttttcattcttgtcaaacactttcttcctgagcgcttccagtatcattccgttggccctttctacttggtcgttggctcttggatgcgctactgatgcatacttaatctggatgctgcgttactcgcagaagtcgaagaattcagagctggtgaggttggatcctaggtcgttaatgatgctatttggtatcccaaacctgaatattatatcttgtatgaattctactgccttggttgtggttaaagaggcaatgggcttatactctatccattttgtgaacttgtcaatggcaaccagcacgtgagtatagcctccctgagctttcttgaaaggtccgatcatatccagcccctagcatgcaaatggccatgttacaggaatagtctgcagctgttgtgtgggtaaatgttgttgctttgataagaactggcaagcttcacatctctagactaactcagtaacatcactcttcgctgttggccaatagaagccagatctgaaagcctcctgactagagttctggatgctgcatgtactccgcactgcccggcatg

SEQ ID NO: 176501 - DNA, 478 bp, Zea Mays
tacattgtaagggtataaaatcattgaagattaaaaaaccagtagtaattccgattccatctcacctctgacgttgtctcgccttgctgagacaaaacaggttctagcaccacctcatgcaccacattcctggtctctttagcatccttaaaaaattgatcgcattctgattggtctgtgaacctatagatgtatttatccccatatatactgctctgcaagatcagattggacttttgtttatctgtcggcattttaatatcaagagtatatatggatctcgacatcacaatgtcgtggtttagtggtgtcgcttcaaagggctgctcttctgtcgtactgctaagcataaaagcaatgtgtttatcagttttgtttgttaggtgcagtaagcaagggattaagttgtcgtcttgaaaggataagtgggccttcagcgggtggatgtgatgaatctcacttgactcttgggtaatca

SEQ ID NO: 176502 - DNA, 1145 bp, Zea Mays
gtgctgcagctggtgatggggtgtcaaactgtgatacattagaagttgaactgttctgcacatgcaatgcggttggtcttacatgaggataaccagatacttctgttatgttgttagcatgaagctgtttgatttgcttaggaataatatccccaaaacttgcagagacactggatgatagaactcgattttcattggcaaagttcgacttcaccaaagtggacgtggatgtgtgttcctgctggagacgtagagcagtcgattcactaaaacactcatcggtatcttcggcaatacctataagacaaagacacgtttttaatgtatgtttatggcttcaaactttaaattgagagtgactccttgcaagcaaaaaggcaaggattaatgaatcatagtgtaacttctacagtaaggcaaaaggaaatactgcccaccaggtatgagccagtaacaacgaatggcggaatggcaagctaattgatgatgattgaaatccatcggatagagaatttactgcagtaatgctcaaatgctctgaatttacaggaacaaacatatttctacaggttaacatagaagacaacaatatatgagaaatgtctatgaaggccatattcaaatccactagatgtagcatattcagtaacacgcattcaaatcaccatttcatttctatttctacaccttcaaaggttaagatatgaggcaatagtatacttcatgcaactagtcctaatatatcacaattgctatagacctaccacagaacttcatatatgggtgtaaaatgaaccaacctaatatacacaattcctcatatgccgcccataaaagaggatctagagtcaacgcttgtgtaaattgttcagctgcagctgaaattctgcctgtgcacctgcacacagttgagataaatatctgaactctgaagaaatatagaatgcagcaacatggattcagttaagccatgaataataaacctgtagatcactccaaggaggtagtgtcctgttgctccacttggaacctgcagaaggatgaaactaatactagaaacaagctgacccaatacaggaattaaaacaaacaaatgtgattgattttattttctaagtatctacttcacctctgtagaatcagtg

SEQ ID NO: 176503 - DNA, 813 bp, Zea Mays
ttgttaaatagaggaattcaatttcgttaagtaattgttatatgtaggtgttttcagtacttcaagtggttgcaagttaattagtagactctctatgtgacactaggtgtctatgtagaattctgaaaattatggtgccccaaattgtcgagttagaggtttaattcgatcaatgccgattaagtggttgaaaataactagtaaagaagttgtagatgtaaaactggaaactagtatgcatatgtcctcgtatgatgttgtggtaccttggtgacataaaaatgatcatgtgttgcgagaggtaaagagtttagaattaacttatcgtcacatgctaatttacattattaaagtgtctctttcatggtaaccaacttacataacataagcatgtgatagttgtgttcgataaccaaatcattgcaaattggaaatgagaatttgtagtaattgtccctgattgtgcttgatgattgagttaagtgttcttgtgcttgcaagctgaaaaattccttcatgtatagtttggttgtgcaattaagctagtaatacaaaatgacttggataaaaattagtgagtctacttgttaatcctcagttgattattttaactctaacaaatggtaaagtgtcagaatacttcaagtctctagagcaagacaattcttgaattatatagaagctgaaatttattgattgctgtttggactgcacgtactgttttcggtgtgctgtatgtttgaggaactaaatcatgttttctgtagaaaggttatatagaagagttgtagataacatgattatcttgcttgt

SEQ ID NO: 176504 - DNA, 364 bp, Zea Mays
tcccctggtgggcgtcccggccaccggtctggcggaccgcaacaccactctcatcaagggttggtagtcgggccagcaccgctgaccgcaaccctgggttgtcgcaaagcggtgaaatgccctgaggaggtatcaaggattcggggataaaagcctcaccagtgacccccctcaccaaaatttccaactactcccatgactggtcagtcctaggcccgcgttggatcctgccaatatcgctggggccagtaaaccagcaacacagacgcggcctcccctgcagtggcatgactcggcgcttcaggaaatcgccgagtacgtgcattgaggtcaggccaccaaccgccagttccttaatcctgtc

SEQ ID NO: 176505 - DNA, 658 bp, Zea Mays
aattaatctccttcttatgacacgctccgaggagtccaagatacgcaccgggtgacactctagagtcagatcctgctgcacatcaatcggttccaactcgatttgatggtccggatctcgcaaaaacttcctcaacatagagacatgaaataccaggtgtaactctgccatggattctggcaattgcaagcgataagccaagctgccaacccgggccaagatagagaacggtccaatgtatctcgggctaagcttctcggagacaccgaaccgaacaactcctctagtaggtgataccctgagaaggacttgatcacccactgcaaattccaagtcccgcctcctcacatcagcataactcttctgacagctctgagcggccaaaatattctgacaaatttcccgaaccttttcagatgtctgctgaacccaatcaggaccaaccagagatctctctcccaaagtctcccagcacaaaggggagatacatcgcctgccatataaggcttcatatggtgccatcttgatgctagcctgatagttgttgttataagcgaactcagccaaggcgagatgttcctcctagctacccttccaagatagaacacaagcacacaacatgtcttccaaggtttgggtagttcactccgactgaaca

SEQ ID NO: 176506 - DNA, 788 bp, Zea Mays
atgctccttgtgcgacgattcgccttcttcgcgctctgggccagctgtatgacatgtgaggcctggcccccatgtcataagatgggaaccctggtgcgcatcgggggatactttgcccatggtgcttcagggcgcgagcggggaaatctgcctttaaaaaggggttcatccctcgagtagcagccatgccttgtgtgacaccccagtgtcacctagggtttctctcaagtgctaacccaagaaccatcatcttatgtgaaccaaaattgagcatgaacatcaagttgatttaagaataaaaggcaaaatgtgcaaccccaacaaaaaccctaattgagccctatgaacaaaattcaagaaaatggggaaaatagtatgaagaatttagaatcatggcttgggccaattataaacattgaagaatatttaataagcaacaataaagattgaggaagcttgccaaaataaattaaataaaactctaaacaagcttctcaagtgggatttcattagggaattctgaaattcagaattctgaatttcagaccttgagccaaagatcaagcgtgttcaccttgatccctaactcaaatcctaatggcccattgacaaaaatgtgcataactaacctccctgtcttgtgccagaagatggcattgggacgcaagccctagacacgacaaaaccctggatttgcctcgggtttgagcagagagacagaccggatttccgggctccaaatctctgaaaccagtaggcaaaatcctatgacccccacacaagatcgg

SEQ ID NO: 176507 - DNA, 592 bp, Zea Mays
cgctattttacacctttcttgcctgtcgcaatgttttcagttttctgagacatcaaaacattgtttacttctatagatacttatttttatttggtaaactaaaaaataaaatgttgcaaaatagagtattccttctatagaaacaaaactctagctttaaaattagagagataacatcagaaaagggagaaaaacaaatgccatcacggtaacccctagttgtccagcactccgagatccaatagtatttgactgaatacttatatgatagatcaatggtagtggcacaattatatgaaggaaaaactacatagtattcaccaaaaaagggagaaaaacaaatgccatcacggtaaccccctagctttcattttctatcatcaggcaaataatcgagcacggggcgtgcaacctggggatcccgcaacccagagtcacagtcagcagtcaacaacaagacacattacagataatcaaccatgctaaccagcaatcaggagcaggcaattcaaataaattggttagtgattatcttgcagaggatagacttgatgacaccagcgctggccgctttagagatgttcatgcctgc

SEQ ID NO: 176508 - DNA, 314 bp, Zea Mays
aagacttatatattgtgtagttaaaacttatgagtgaacatgtatgctcaataaccactagtttttccattgtctcctgggtcggataagttttaaccaactcgtaccagaaacaactaggtaagtatcgaagtacacataacagccgtattaagtaaacgcagttagtgtttatgaacgggtaatgaccacgacattcgtatggataagactatgtattatgcatttatattgagacttgtttgtggatgtaaatgaacaattttgtgtggttaaaactcattcagtgtgagtttttctgatttaagttatca

SEQ ID NO: 176509 - DNA, 639 bp, Zea Mays
tctgccgatggtctcgtcgttgaggtagaggagttgatgactactttggctagtcaagataagttgcttaggcttgttgctcgtgagaggaaagatttcaagagcaagtatgagagcatgtttagggagcttgagtatgctagagtttctatcgtggtgtccgacgagactgaccgtaataagtgtgctctacacacgtcgaacatcaccacattgcagaccaagtacgccaccttgctagatgagcgtgacgagttgagatataagtctagcttgttgggtgtgcactgcttgtcctagcttgtagactgagctagcggataagaacattaggatagctttgcttgagaaggctagcttagtgagtgcatttgcacctatgcagtgtgcactctgtaagggtttgcagtctgctattgagtcctatagacacgacaagactaggatgcaggaggaaaacacatatcttctgctgaggacatcactccaatgcatacaacacatggaccaataagacgagcacgtgcatgacagctaaatctccagacacttccgaccaccaaaaatattacaataaacaatcactattcctcacattatctaatcaattccttgtgttgcattgcattacttcgtcat

SEQ ID NO: 176510 - DNA, 475 bp, Zea Mays
ctggggaaaggtccacgggttcaccagggtctacggacatactttgatttgggcagaacaagaactgaagagcgggtcgacggtgagggagtcacggcggcgttttacaaagcaagggtgcgttccggtgatgggcttcggccaaattccatttgctcaatacagagagcaataggagactatacacgagctagaacagagagtaattgagaaattaccaacccgaagagcgctgtccgcggtgaagttcttcacggcagaattaggaacatggagaaaggaaattcgtgctacgtgagtgctctggtggaattgagttgattgctcagccactaaggtgcggaatgcagtgaataagcaggatccgagcgccatttataggccgacgaccggatttagatgaaattcacggattgtggatgtgctggcaagcctaccgcgcggcggattccggtgagggcacggtggccgccga

SEQ ID NO: 176511 - DNA, 324 bp, Zea Mays
atcctatcgcgtgtggctgtgatggcgtaggagtattccagattggcgatctaatcgtggcagtccattactgatcggacggccgaaaagcaccaataccccttcggatacgtagttttgcataagagcccctcggttttgttataataaacccgccgtcccctaaagttataaaatcaataccaacaggccttgtctttcgcagtttagaccctgggttctttgttattgtgtgcgcagcccaggactcagagaaataggagaaatgaatttagaaaatgaatttccaatataaaaagaattccagaacttaattaattcata

SEQ ID NO: 176512 - DNA, 425 bp, Zea Mays
tcattccacaattggtatcatttacatgtcttctctagaatttgattatactatattacaaatcttatgcttcccgtattgctataaatgcatatgttgtcaaaatatatcttttacctatgcatagggggagttagtctaatcaatcatgtcttgtccctatcttttctcatgtgcttttcctaagtagaggatctccgacagggggagtatatcttcgtctatgacaaagggggagaatattctttcaaaaggggagaacactcgtttaggggagtaagattttagagctacaagtagtaaatcctttagagggcaagtctttttgcttcatgtatgcttttaatgtcttccttttcggtgtttgattctaaagggggagaaccaaagcaactcaaaatatatcaaacaccacacaatttcaa

SEQ ID NO: 176513 - DNA, 851 bp, Zea Mays
tagatctagcttttaatgaatcgttatgcgctgaggattgtcgattacgccttctacggtcaggattttatgagacgaaagggtacgccaaaacagatcgtggccacccaaatctaatccgacgctcagcatctaattcgtcaagatctaatcctggccgttcactgcgatccgacggtgcacacaccatcttccttatggcgctccccagaaccgcatcaaccatctgaacagcggtgctcccaggtgagcacaccgttgaaaaccgatcccggtctgtccttcgccgctttcctccctagaaaatactatacggtgggcaagccaaggcgaattgatcccaataatccctaccaagtcggcacaaagaatcgcacccacacgagtaagcggcatgacggcgaaggcgcctccccgatgagcaatcagggcggcatcagtgcgccaaacgaagcccgattctgcgctaaacgaagtagagaaggtacagaagataatgaggggattcttacatgcgattaatcgactccggacacagctcacggggaggcacagattcgctgcggtggctcgcagcggaactcttctgtccttcgctttcactgctcacggcgcaacattcacgacgatggcggctcctagattttccacttgggtagtcgagggggggggtggaaactcgcccagggcttgtatttatcccggttagaaatttctccaacgccccgcaccgcaatccttgcgacgtgcgcgatatgctcggcggaagctggtggaggggatcgagctggccacatgggcccatgcgtcattggtttagcgagtccgttgagctggcggccccacctggc

SEQ ID NO: 176514 - DNA, 766 bp, Zea Mays
gggaaaagggatactggcgctcaggatgagtggctttcatcgtggcagtcctccggcgatcaccggatatgcataccatgattcaccgtgacgtgggctagcgcttaagcatgtggcgcacaacggtgagcgatcaacggcggcgaagtctatcccggccgcacgacgagcaagtgggtacggtgaatctcattcgcgcccgagctcaagctgatccggtgccaagagttttactccgtcgtggttatcccctcaccagcgagcacatgtcgcggcgatggtgtaaatcacggcgtaaaaatcaccggtggcgaggggaatgcatctgcaatctatttcagtcactgtaccatcgcaatcttcttcagtcagcctgacagtcgatgtttagggcagattttctcccaattttccatggcaacacaaccaatgctctgcagcaaagtcgtagccctacaaaccattttcacttttgctatagcatccctagtcaaattcccactggatcataattgaattcgagccctaagttcaggcaattccactgtcagtctgaattcagactccaagcagtctgacagcctatccttgggtctaattatctccaaatttcttatgtaaccaaagcttaatctctatagcaaaattgttccccttttacagctctacaaacttgatgtggtgacctagggcaaaatcttcataacttggaagatatggggcttcaaagttgagccaaatgcactgaaaatcagacttaactcat

SEQ ID NO: 176515 - DNA, 561 bp, Zea Mays
taaaccctagaataaccttaattaggccatttaagtaaaaagagggaaattggtaaaaagaccatgaaaacatggaatcatggcttaggccaattataaaagttgaaatacactgattaagctacaataactattagaaaagattggccaaaataattgtttaaaatccctaaaaaggccatgcaagtgggagctctctagggaaatctggaaattcagatttctgaatttcagccctcacctagaactcgagcacgttcaccttgatccctagcacaaatccttaagcccctattgaaaaagttgtgctagattaacccctctgcaacgtgtgtgaagatggcatcgagattcgtgccctagacacgtcaagtcagagatttcatctcgtatttcagtagtgagacaaacccaatttgatcaccccatatctttggctccagtcaacaaaacccataagccgccacacataaacgacaaaggaaggtccggtgaagagatctctcaacaggatcatggccataatcgcgaagatttggagccaatccgcgcttgaacttg

SEQ ID NO: 176516 - DNA, 623 bp, Zea Mays
ccgtcgtgttcgcaccgtcgagagaaagagaaaggggagtagcgagagcgggttgccgccggtgtgggtgtcggcaggccgtccgctatgcgcccggatcttcccggtgtgtacggctttgggcgtgattggacttctcgtcgatgtggccgggtcatcgctagggcctcggtaagctttgttcttcctctctttggtattactgaagctagcaagttgccattaccagtcagtagaggcagggtagggcgtgagcgtgagatcttgacaccacgggtgggttccttgcggtggtctgcgccgctgtagatgcatctggcgaggaagataggggttgaagaaggcgccgtagtcggtgcgtgtggccgggggaagaagaaataaaggaaaccgttaattggtagatgaacgacccagatcagtagacgtattctctctgctagaaatgatcctggccgctaagtattgatcgggcggatgcgtgtggggcgctggtgtttaaaagatggaccgttgagattagatctaagggtagatggtggaatcggacttcataaaatataggctgtagatccttggtccgatggttcctatcacttactggtttgtcccgggggccatct

SEQ ID NO: 176517 - DNA, 837 bp, Zea Mays
tctccttgtttgtttgtgtgtgtgttgggccgtgtatatgtaggtggtgttttgtgagtgagtgtgtgtgtggggggtgtttctctccttttaatataatgatacacaactctcctgtgtattcgagaaaaaactacaattacaaggcctagtaggattgtatgtctaattctagcagtcacacatgccatagcaagaaacttagccttgttttcttggttcaagcattgagggagccaccaagaaaaaacgttgttgtcagaaagaggatagatgataagaggaatggctagccctatgaagagcaggagtgcaaagaaagatagtgagagtcccacaaatattatgatgatgcatgacatggtatataaaacatgccctgcagcacgctcaccgaatcatgtgtaacaactaacaaaagcatgacatacgaagtgggagtaggcttgtgctgacctaggagcaacttgttgccacatgaaattattggttgagtagcatctcccagaaacaaactttatgatattgttgtgcttcctatgtcaagtttctcctaaaagatgaaagtgtggaactttaataacaaactaccagtttaggcacatccttccaacttggctcatcatattcccaaagtctagtacttcacctcgggccactacaccaccaactttttgtagaacatcataactctttagcagcgggttgcttccttgtcttaccatcgggcaagccagactagctagacttttcctgtaagttaaatattacattagtatttcttgttttagagaattacatcccccctgtgtgctagcacaatagcattatttttgc

SEQ ID NO: 176518 - DNA, 433 bp, Zea Mays
gaagaagacagtcggtggtccgttgagtggtagctggacggtggagattatatggtgcctgggtcgttggattcacatggagtggcgatgatttggttggtgcgtaccacttccgtgcgcccatccgagccgttgattgagtgacgggtggtagagattagatcccgggggcgacaacaccacatccgtagatctaggatcggcctgtccgtaatgcataccggttcacagttgatgccgatctaatcaggaatgctcatccacgatccatcgaccgaaactaaaccataccgtttcgacccccccgctttgcagaaagacccccgaagaaatcactaaacaacccgcggtcctgggcaagcacgttcggagtctgctaaagttttatagttttacccctgcacttgctactaataatgcgccgagtccagaa

SEQ ID NO: 176519 - DNA, 818 bp, Zea Mays
tcatggtaaagcttgaagaattgcttcctcatttctggatctttatctctaagtccgagcatatacaatatctcagtcttatgaaaaaattcttactgaaaagccaacggatacctgcacgaaaagaaaccattaaagaatagtgacgaagcaggcagctccatctaatcagtttttggcagaaaacactgatgaggccattccgacctcatgccctcctggcctcatttcaattgctaatgcccccagactcaccagcctattagtccttacatccctccttctattcccttcactaaggacagggacacggaggatcgtcaccatgtcatctagtgacgaagcagcctgtatcatctactggggaaaatagtcttgtaattttaatgtttgtactaaacatctgcgcactttgtaagcaagtatatttagacattgcttatctctctcgttttcccccaaaaacataacaatggtggtaataaagtattgactcaagtttaagtgaaactggagaaagaataactgaaagcggactcaagttttttctctgaccaaaatctcttgcatgctttgactacaattccgcagctgcccgtctatctatatctacagcttgcatgctttgctgtgcatggtgttttttggctttttagacatattacctgactattcgttttattcaaaaaaatgcggaaaataaatagttaaacaaaaaaacatcgtctgttttaggagaccgagacaacaatacccctagacaagcatggagaggagtgaagatcctgacgtccatggctcgtcctcatctatgctga

SEQ ID NO: 176520 - DNA, 810 bp, Zea Mays
atcatttggctcatcaaactggctcctgaatttgaacgtgtacttcaggtatattaaaccaccttcgatagaaccagcagcagcctccttcggcatctcccacccacttgcgagtggccacactctataagcaatgtgctcctggattaagtccctggtgcctatgtaagtacatactgtattaaaagtagcctggcatgcttgtatatcattcccaagggcgatggatggcctcctaatgccgaagcgagaccatataggacgttgaataatccccttaatatcctctcttttaaccaggtcatttttcacgtagaaccactcctgcatccaggcccccgaccatctcttccgaaatgtcggaacttggtagctcacttcagagcgagccacgaagatgtagcaaccaaagttgttatgatattgctcctttctggtagcctttgtctcataagacaactcatggatgttacaaaagcattttgcatttggttctaaccccttgctcctcatggcccaaataaaaatccccatcttgatgatagcttcggggtaagctgatgaaggtaaatttcgaaagtccttagaactttgaccaacaacttatccagagggaaccgaagccctgctttcatgaagcttctataaagtaccaccttgtcagcttcgggcagagggacattattttcccctccagccctcacaattgaaatatcacggaagtaccttcccctcattgcatcaattttcccttgcttgatggttgatttcccgaagacaacatgccttggtctccaaggccggtcttca

SEQ ID NO: 176521 - DNA, 1079 bp, Zea Mays
ctcctgctcctccgaacgagcggcttcagtgcataggtgctccacctcccactacgccgccaatagtgtgtcgctccgtgtcaacaacccggttaggagacgctacaaccaggagcgatactctgacaagaaatcctagaagcaacaatggtcaaaataagatgagaattaccgtgccgaaggggagcatctcccatgtaattgacgcacgggcaatcgccaccgcctccccaatagcgacgagggagccctcgattatctccaagcttttggtagcccggacggaggcccccttgaccaacctctgctcctctgcctttgagccctcaatagtaaaagagggggatccctagatccttcccttggggcaagcagcgtggggagcaccaccatttgcgtggtaggaggtggaggaggtagaaccttggctgtctccattactgcagcgccactggatgagccagtcgggacgaccaccaccatcaccgatgctaccttgctcgagtagcctgccttcgtcgcactcaatagcgaggggctaggggcggcggggccattgagccaatggacggccccaccgctggagcgccaccagttgcggagacctccaatccaagaggaactacgaccgaggggacctcacctatgtccccctccataatcgaagaagtcggtgcggtcggcatgaccaagtaggcgttgtcacaactgcgactagagtggtcggcgcggccggcgtgaccagggagatcggcacagcctgggccggcaacgcgagagcctggtaggtcgagtcacccccctttgccatgtgggtcacatccttcacaaacttatgtggcacgtacgcgctggtaggacaaccaggtaaaaaaacagaagcaatggtagaaaatgagagccaaaagggacaggcttaccgggaggagcgcgcccatctgaatggctccttctgcaacaaaggaatcgccaccaaaacaacctgtgatggtcctccctcatgatgcctagccaatgccatgggcgtggggggcactgcctcctcctcctcttttgggccatggcaaggacatgacaag

SEQ ID NO: 176522 - DNA, 563 bp, Zea Mays
caccgtggtacggaagtccaccaacggaaaggcccctagagcatgcctgatagaaggcttcagaccctgacggaactggctcaccttctccatctcattataagccacatgagggacaaagcggaccatcttgttgaagcccacctcatactctgtgatagacttcttctcgtgcttgtaggactgcaagtcaatcttcattttctccaggaaggtgaccgggtagaatctcctttcaaactgcctgatgaaaacatcccaagacaggactcctggtgaggaggagtgcgctgcctgcacacctctccaccaaatttgagcctctcccttcagcagctgtgtgccaaagcgaacccgatctccatatgcaatctcaaagacattcatcttatcctccacataggtcaaccaatctgccgcctcgatcggagtaccactgccatcaaaagaatccaacttcatgcccattcactacatcagagaaagaccactgactggaagaggcacctcggccccgccacctggaacagcacccgcagggacagcgccccgggcacttctcc

SEQ ID NO: 176523 - DNA, 961 bp, Zea Mays
ggtttccctttcacatgggcatggtgattctttgacgagcactgagggaacgaaaagcgcgaggaagacatgctgggtaggctacgtagttctcttcgtgtgttggtgtagtgtaggggcacatacatatgctaccttttcggttcttgcggccgccattggattagaggagcaaaggtgatgaaaaagttcggaggacacacaattttcaaaggtcctgtctagtacactatcaaaataagctagtctgagtcacggctgccattggaggacgggcaaagaaaggtgacgaaaagccagtctgacccacacagttttcaaattaacaatggccttgtgcaactctttcgtgttccaaagccactcctaggtcccagctatttcaatgtaatcttgcatgcatacatagccacatcagtgtacttaaggtccttattggtatttttttttctttcacctccacaatctgagaagtttggttttcctttctaatctataatggcttgtttggaaactcaaatccccttaataattagagagcattgagggagaaactagttcattttcatctccatcattttcaaactagccctaagggttttatagtgtaatgcccgtgtgttgctgaggcatttgatgatatagtatagtagttatacaacgcccgagggtctagtagcaagccagtttgatagaccatctccataaaaataaatttaaaattaaaatagacccccaaaaaataaaattaaagtggacatgattaactcacataccagatattaaattgtagatattgcactttatcttaggtaaaaggtcgagaaaagtatgagttaaaaagagacatgttctttttttgtagctcgctcggtcgcttttcctccttcacctagtgagatggtactatccaagagcgttgtattgcgtgtggtttcgtatcatattaggcttaggtgtt

SEQ ID NO: 176524 - DNA, 932 bp, Zea Mays
ggaaagtgcaggggctagctcgcaagttttcctagactcagtgaacacctagagaggactgcgggttgaaaactggaaaccatggggtttcatttgtaaatctgctcggctgaaaagatctggacacgcatgggccatccgatctcgatccgatggacctgatatgacgacgaaggggtacgcgatctggatcgctagatcggcgatcaaggctacaacatttaaaggttagggaacggcttggatttcccccgccagagatcgacgtcagtgaggagcccaggctgaaacgatgcatggatctaatcctacgcgccgaattgagatcgaacgacacagaggtccctggcaaccccgacagcggagtacgacgatagtgccctatccatggtgatttctcaccggaggagcgccgtcagcgtgcacgatggcccatccgacaccaaaaagtgcgcaaaacggaattcatactttcgcgattacaatgggggaaaacttaccggtaatcgcacgcgcaggagctctgcccacgaaatcaggcggaatcacggcggctcagcggctccggtgagcattcaacatcgccctgatggtcgaaccctaccgtcgagtccacgaacgacctcaccaaccactcgcgatacatcctgacccaagaggagattcccaggcacaagatcaccgatgtcggatatgagtttctctacctatggcggcgcacagtggtcacgaggcgtggcccttcctttatacgcatcggggagggcgatttcaagctgaggagtccgtggcgggcggcgcgcgtcgttgcaacagattcccaaagaagcggaggcggatttggtgcgtggagatcgacccaggtgcgcgaatttgcccgaggagtcgcggtcacgccgcaaggttcgcggtttgtttgaaggggacgaaac

SEQ ID NO: 176525 - DNA, 712 bp, Zea Mays
gctgacgatcacccagtcgacgcgctagttttcccacctcgcgccaccgagggaggagatgtaggcgctagccaagtcctgcctcgtctcgaagtagtaggcgccgaggtggtccttggccttcccggacttcaccagcacgaagaaatggcggaagagggaggtacagggcgccacccccacgaacatctcacacaggtgggcgaagatggccgcctgaaggatggagtggggggtgaggtgcttaagctgagggccaagctcctctagtagcagcaggaagaacggtgagatcagcagtgccaacccgctggagaggtaggagacgaagagcacgaactccctagcggcgagatcgctaaggggagtggcgccggcgtggatccgtctggcaaacaccggcgtgctccatccgagcaggttgcgcaccaagttgagagccccctcattctggaaacgctcaggatgaaccagcgaggccatggcgaccgcagcagcggaaggcagaggagcgcgaatgcaaaggggtgcagtgggctcggaggcgaaagggcgcagcagtgggagagaatgcgaaagcgtaactgctgcacgcggggagaatcccttttcaaggaagactcccccgctcgcgccccggggaatcccgtccgacgcgcacctagcgcccaagcgacccagtctctgacatgggggcccgggcccacaagtc

SEQ ID NO: 176526 - DNA, 500 bp, Zea Mays
ttctttgctgcctagaatggtttaggccattatctctatgtgagagtgggagtgtgggacagatgggagacagaggaagatgaattgcggttgtggaacttgtatacctgataatgtcaatttaattgttttaactaataggcagatttgctgtgggacactcggaaaacatggaattggctatggcacaccaccaactccagtattggccaagtaccattatgaaaccgggtttgtttgctgtaagacaccacccccataaaatatgatttccattgggttttggagagagaggcaagggaaataacacttttgctctcatcctcttcctcttgctcatcggaggacaccggttgtaacaccccatgccccccctggcggggcgcctcagccaccttggacgccagcttctgttgttggcatggcgaggcggagcgcattggagactaccgccgaggtggagcgccttggaattctgcttgctgctactggcctcagca

SEQ ID NO: 176527 - DNA, 566 bp, Zea Mays
caagaaacgagtattaaattaggttgtacatgctctaaaacaaatatggtcatcgtacatgactttgaacaaagtaagaatgcaattaatcgttaaaatcaaccgcgagatcaatttaaccgatttaggctacctataacggttccctctatatcattctctatatctcactttttctctatccactatcctcgtaaatcccaacccccgcaacggttccctctaaggtgttgttttgttcgtttgttttgccatgtgattcatttatgtcataatctgattccgttacatagcgtttggttagggcggtcggcaatcgatcatgacgcgatccgatatggcgacatactatcttgctcccgctccccacccgatgttattggatcccaccgcgactgtcgccttatcacctcgttcctaagctctctcggacgctgctttctcccggcaccagcgtcggctgcaatcatctccctgcgccgccgatagcgggcctcctccgttcagtcgtcttccgctccttcccccatccccaaaacacaacaagctcgcttgtgatggccgag

SEQ ID NO: 176528 - DNA, 849 bp, Zea Mays
ccctgagtcatgtaagcgtgagcatgtcacaccgacttaaggcgtttccgacttaagccgattgctccgttagtagggtacagtgatcactctaagtcgtgtaagcgtgagcatctcgcaccaacttaaggcgtttccgacttaagccgattgctccgttagtagggtatagtgatcacactgagttgtgttgtgctgattttgagttgagcccgacctaagtcagttgatcaagaatttgaatgccttggaaaatggaagatttattgatgatgaaaccttgtgcttacagagtacaactcatcctcaagagttttgaggcattgttaggggtagaatttcctgaggtgctcaatattccatgaactccccacttcggtgccgtccatctgagtgagccggtaggatcccggtcgtgtgacctctacaatgatgaacggtccttcccacggtggtgacagtttgtgccgtccctccctcgttagtactcggtagaggaccaagtctcccactgcgaaggatcgatgacgcaccgctttgtcgtggtagcgcctcaaggtctgctggtatctggttgactgaattaccacatttagccgttcttactccagtatgtcgatgccctcaagcctggttgcttctacttcggttatgcttttgaaggttaatctaggcgccccaaagatcagatctgctggtagcactgcctccgacccatataccatgaagaatggggtgtttccgtgcaaggctcagcttggttgggttcgcaggctccagaccacatatggcagttcccttatccacttccctgcaagcttctcgcttttgtcaaataccttctttctg

SEQ ID NO: 176529 - DNA, 426 bp, Zea Mays
ttgactgttggaagtggctttcttgggtcatgtgattaattaacagggcattgcagttgatcccaagaatgtcgcggctgtggtggagtggaagagaccctccagtgtctttgaaatccgaagtttcttggggcttgccggatattattggcgtttcataccaaaattttccagcattgctaagcctttaaccagactcttggagaagggtgttcttttcgtctggtccagcgattgcgagatcagttattagacattgaagaacaagttggtgaacgcccctatcctagctttgcctgagagtggtaagcgtttcacagtttttatggatgcttctcgaattggtcttggctgtgtgttgatgcaggaaggcagagtgattgcttatggctcaaggcagttgaggaagcatgagcggaattatcc

SEQ ID NO: 176530 - DNA, 781 bp, Zea Mays
gaaccgttgacgaaggtacttctggtgccgaagctgagcaggctgatattgaagaagaagaaaatgctgatgatgaagaagaagattatagcatcttgatcccatcaaaacccacccacctagattttgagaaatctactgtgtctgaaaccgacgtgcccatgatgatgaagctgggttacttcggagaatctgaaaacaagcttattcgttttgccggagaagaaaccactccgatgccgaaggatgatgaagtggtagttttcaaaagctttttcagagcaggattacggtttcccctgaacgagataattggagaagttttggataattatgaaatctatcttcattagctgacccctaatgttatcgttaggcttagcatcttcatctgggcccttcaaagccaagggatgaatccaaatgccgaagcattctgccgagtgcatgaattgcactatcaaacgaaggctagagcagacgggctgcatgaaaaatttggctgctacaacttcgcgtatcgcaaagatacgaaggctccggtcctcagctatcgtaccaagtggtcaaccgactggaagagcgaatgattttatatcaaggccgatgaaaagaaaagggggaaactgatgacgatggtcatgtgcccgctggctttgagcttcggaatgaccagacctttgtcaacgtgacggcagggtcaccatgccaacgggctatagcagaattcagggtggtggccgaacaagtcagcactagagatctggtgcaagaatacctg

SEQ ID NO: 176531 - DNA, 326 bp, Zea Mays
ctcagcagcaggctcacctggtagccgagcaggcccggttatccgagaggatgctctcgatgttttagaacatgcaggacaggcaggatgcgcttcagcagcagctactccaggatcgggctgagagcaggacattcatggcccttatgctacagtagtctggtgtcttagttcctccagttcagtctgctccacctcctccgcttcacgctctagttgtgccatcgattctgtcaggaccccctgttccttctgttggtccttctccgctccggccggtcactttggctttcacctctccggttctcagctctgtctgcccgcag

SEQ ID NO: 176532 - DNA, 1857 bp, Zea Mays
cgactcaattttactccggaacgatcaccacggatcaccggccgccaacaaacttacagttcagacttgtgttctgtctattcctctcagttcgccgccaccttctcctagtgtaagccaatacttcttattacagtctgttacaaggccacttgggccaaataaacttagccactcacagctcgggccatatcgctctcttactccttctgagcccgtcgaggcctgcttctggcttcacatccttctcctttcccgcactggtattcttcgcttcttccgcgtcctggttgctgatcaccgggacactgacattttccctcccttgagttccagcttgtccccaagctggtgcaaaggaaaaatgtcgcttgatgtccgcctcctcttcccatgtagcgtagccatggatgtaggctagcccgtccactgagatgattgttgctaccagcatgcagttttcccatcgcagaggaggcaatcctgagataaaatacatagatactaccagccacgtatggtgttgaaccggcaatggaaaacgttcagagtatttcacccggtcttcccaattacgtatcgtaggatcaaagctaccttcactttgcccggcaggaaatgacaagttcgaaaattcgtgaagacctattttatctgtaaacaagttaaacccaaacggatgcctggtcgtcgcttgttgacagttaacacaagatcgaacaaagtcacgcactgagggcttcattcctggccagctcaacactgccttgatgcaccggtatgtaaccagaaagcctgactgcccacacagagtgctatcgtgcaaagttttcatggtccgttgctgcacttcatggctcgaaaccagccagattttgttcttgtgtctgatcactccatgcactaaggtgaagggttccaactgtccaccggttgagaagatagccattatcttttgagccgatgcatcactttcatacctttttgtcacttccaccaacctgggaattactgaggaactggagacaacattcaaacacacagagctgtcatcttgatgtagatcaggtcgtcgtggtagaatatgggcaactcggttgtccacccatgtcctgtatacgatccaaaagtggagacccttcaaccactgatcaacagcaaacataatggctgacatactttcatctgactcatgcactgtctgatatggtcgatctgtagaaattccagaagcactcactttatggcccaaaaactccaacaaacacttaggcaatttaagatgttgttgctgttgacagagtaattgaaagactgtctccaagtgctgcacaagatatttcagattaaaattatataccaacacctcaaggacagtagtaacagtcagtacagagatagactgaacagctaggagttgttccactgcatcaggacgaattgtagcttctaactgcaaaataaacaaacagagccccttggcttttctataagatttgagagcggccatccttccatcctcatccttggtactgaatgtccctagagtttggtgttcctcattcagtcccgtggccttgccaccagacaaaggagatggaggtaagggcataagtcctggcctaggtgaaacttgggcagatactccaggatcccacattctgtcctccatttgtcccgtgttcaacatcacctccgcttgtaacatggtcagtgagttgtgttggtcactactaacgcgggtattcagagccaaccacaacttaatccaactcatctccttagtcctggacttcatcaactgaagccagtagagggctgatccttccaagtgcatgacggcaaaccggatccaca

SEQ ID NO: 176533 - DNA, 288 bp, Zea Mays
catagctaatgctattatattgtacaagtttgatgatttgtaactatgtttccggaaattactttttgcgcttttcctcttctgccagataaaaaattatatctgtattttaccttgttactcatatgctaaagttatacaggaaagaaggaaatctcacgagggttttctttctctctcaaaattggcgagttcttatttgggaaattggtccccaaataatgctttaccttttcagtaacgtttttagatgtaatcacttcttgccctttccctgctgttttctcg

SEQ ID NO: 176534 - DNA, 304 bp, Zea Mays
gaaactgaaggtagtatagaagagctaactggagagggtgttttggccatatctttggatgcagtgagtgggggcgaaggtaacaaaacaatccgcttatgggcatcgatccattgccagtaggtacttgtgcttgtcgattcaggtagttctgtgagttttcttggtagtcatatgctgggagttataccaggaattcaattgttgacagcaccaatgcaagtaaggtagcggatggaaggacattgtggagtaagtatgaagttctaaagtgtaattggttatgtggaggcttgactttttc

SEQ ID NO: 176535 - DNA, 900 bp, Zea Mays
gaccctggcttcatattgcacaaaggtctggtcatcccgaagctcaaagccagcgggcacatgaccatcgtcatcagtttcccccttttcttttcatcggccttgatataaaaccattcgctcttccagccggttggccacttggtacgatagctgaggacctgagccttcgtatctttgcgatatgcgaaattatagtagccaaaattttcatgcagcccgtctgctctggccttcgtttgataatgcaactcatgcactcagcagaatgcttcggcatttggatccaccccttggcttcgaagggcccagatgaagatgttgagcctaacaatagcgttaggggtcagctgatgaagataaatttcaaaattttccaaaacttctcctatcatctcgttcaggggaaaccgtaatcccgctctgaaaaagcttttgaaaaccactacttcgtcatccttcggtgttggagtggtttcttctccggcaaaacgaacaaacttcttttcagcctccccaaagtagcccagtttcatcatcatgggcacgtcggcttcagacacagtagatttctcaaaatccaagtggctgggttttgatgggatcagaatgctataatcttcctcttcttcatcaacattttcttcttcaatatcagcctgctcagcttcgacagcagaagtaccttcatcaactattccctctgtcacaactaagcctgattgtctcatgacttcggaaatcagagctgtctcggtggcctcggtctcctctccttcacgagttacccttgcggttgagcgtactcgggccatctgatggatcttttgcggttttacgaagttgatgccttttacagttttgacgaagctctctttctgacgaagctaattcgatggt

SEQ ID NO: 176536 - DNA, 821 bp, Zea Mays
ggggccgaagggggcaaaagaaaaaggattgtcagtattctgggtaggcaagctacctggtctgtcaaggagcaccagaaaacttcgaagaaacataagactctttcggagccgaattcggctcccaagaagcgaaaactcgtcaggatatcttctgctgacacaaaggtacaagatgtgccagagaagactatgagtcctccttcaccctctgctactgaagttttggagattctgaaggaaatgactgaatccataccatttacactactaagtccactgaggttagatctgactagcctcttacaatcaaaggaaatcgctccatctatgaaggagaaggccgaggggtagaagaaatggcagatgatgaatgtgatgccagctattgaacaaacgccacccccagcttcggcggataaaacatctgtgcctattgttgccgaagataccgctggagccgaagctgatgaactcgcaaccacaatgtcaaaaatcgacagactcatatcggatgtggttgccgaggaaatcgtagccgcagcgcctgacaaaggaaaaagaattgaagatgcctcttcggaagatagattttgaccttcaacacttgggtggccaagaactttctgaagaggataaataaaaattgagagaatttgctatatcttgcggttaccagcccggatccatactcttcggtgaggtcaacaaagagaatttgggatgcattcgcgaccgcgccggggcgaaaatcataagcaccttatccaagagtgttggatttccaaagctggaaacagacatcaactgctatgggaagc

SEQ ID NO: 176537 - DNA, 618 bp, Zea Mays
ttatccttcggctttttcgattcccttgtcttggtatgcccatatccttggaatcttgcaaatgcttatcctttttatatgcctacctttatatcccaacgtctatttaaaacatttagctcacatgcccttgaccacctttatttcttgatgatccatgagccatcattttatttcgcacatccttggtgatcttgttattccttgtaacttcctttggtaatgaatttttacttcaactcttctgccggaaccacacttatcttatccttgattgttttctccacttcatcattttgcgtgtcttgccttaactctgtccatggacaatgcttttcatcattatcacctttattctcatcaactctatatcttaccttgatgtttatcttataccgacctttaaaatctcccccttttccatctcaatctgagcgtcgtactttacctacttttcccttggttgtatcctcttctttgttacatgcgagtttttaactctatcctttgttgtgtttttgtttattatttcctttacccttctcatcactctatcctaccttgtgattacattatgtccgttatctaaaaatctccaatctcctatcccaatttgag

SEQ ID NO: 176538 - DNA, 492 bp, Zea Mays
ctccatggtacagtgctatcgggaggatcagatcgccagcgcaacggtcctcaccgccggtgacctgccgccgcgattcgtgctgctgttgccgcgatttgggcttggctaagttggatagcactttgggtcacataaatatcctcgccgtggataactccggccataaacaagtccggccaccgtaccgtgtatgccgcggtggaaagttcgatgggctcgccggtaaaccgtcgtcgcacggccttatgccacgtatccgagcaccccgtcgtatcatcgtgactccttactgctgtctcatcaacgccggtgaggttgccacggcgggggacacgaagtcgcgacgacagtgctcttccttatctccggccacccgcacggcccggccaaattaagcgccaccgacgaagcttcctataaattgatggctcgggctacgacgctaagtcatcccgaagctatagcacccgctcccaccctcgatcatcc

SEQ ID NO: 176539 - DNA, 568 bp, Zea Mays
ggcggatgaacatggccacgtgttcgacgcgtcctggcgcgccagagcacgccctcggcgctccgcccacgcgcgcagccccgcgccgtgctaaccccgcgtccacgaccgcgcccgcgtctataaaagccactttggcctcgaccgtacaccctcgcgcgtcactgacccaaaccgagctcaagtttgccggagtttgcccgtgagcgaggtgccagcggccgctcaagccacgaccactgtagaccggccaaaccagccactccccgtcccgtccgaccctcgggttagcttctacgaacctcagtgaagctcccagagccggggatttgactctacctcaccggagacgccggatcaacgtcaccggacttcaaccggccaccgtcgcacgtagaccgagctccactgtaagccattcgtcgattccttgcacctatagcgtccttagcaccccgtgaagcttcctgtgctatttgattgaaccataccaccgtgagcaggccagagcacacgccgccgacgagcccgaccgcctgtgcatgctgtcagaccgattccggccatc

SEQ ID NO: 176540 - DNA, 277 bp, Zea Mays
gacagattgactaagactgctcatttcttaccagtgcacaccacccacaggacagagaagtatgcagagatctacattgatcagataattcgtctgcatgggataccaaggactatagtctcggacagaggagcaccattcgtggcacgattttgggaataattgcaagaatcacttgggacccatgtcatccgaagcttagcataccacccccaaacagatggccagacaaaaagggtgaatcagattttggaagacatgttgcgcgcatgtgcac

SEQ ID NO: 176541 - DNA, 656 bp, Zea Mays
cggcaatggggttaagaggccaaaaagttattctgttttggtgcttaatgccaaagggggagaaattacggccaaagcagctgtatttttgctttaggaggaattacggccaaagccattgtgagtattgtgagaggaatggccatttggctaatttttgctttaggaggaagagagatgagcggcgggtttctaagatgagtagaggaaacatgaaccacccttctcatggtgttcgttatccttctgtttagagacgtcctgcagggcctagaggtgctttgcctattgacgctaggcctcaggaagagagaccacgtggtggtcgtacctggtggggtgctggtcgtgtgccatatggccaaggatcccatgacagcggaccacaatttcttcttgtggtgatcgcttcccttctggattggggatggttggtgtttttcctaacacttttatgggtagatgccgcatcactagtatttttatcagtttcctaaccccaattttgttccatttgatcaccttgtgcctttctattgatacaggacggatgcctggagaacatatggctcatggattccggctgttcgcgccacatgactggaagcaaaaaatggttctccagtgttgaccccgtgattggtacggaatacatc

SEQ ID NO: 176542 - DNA, 275 bp, Zea Mays
cgatccgacactatggtcttcggaacaccatgcagactaagaatacgagcaatgtacaattgggcatagacagtaactgggtaatccgtcttgactggcagaaaatgagaaattttcataagctgatcaacaataacccagatagagtcatacccttttgtagtcctggttaatcccacaataaagtccatactaatgtcttcccctttccatgttgggattggtagagactgtaatggaccaacagtcttcatatatgtggccttgacacattt

SEQ ID NO: 176543 - DNA, 585 bp, Zea Mays
cgcgagggtagtctaggctgcctcttgcggtgactattttatgcatcgaatgtcgaagaccgttgccacattcttgttcgacacccatggccatgatgccagctggattgcttgtgtggggggtttgcggtattatattacatcgctccgcctcgttaaaaacctcacccacccgggaggaaaagagtgcgggcctgattgacattgtttgaagaattacaaaggcacttgggccttggatattagataaagaatatgcgcaggttatctatattccatgaatgctctaggtcttcgccggatgatgtggtgagcctgtaagcatttggcgatgtttttgtcttgacgatgtatgccccttcccactttggctcgagcttgctccgagactctgttctgatggttcttgtgagtactaggtctccttctttgaattctcttgggacgacattgttgtcatgccatgccttagtctgtgcttgatacttgttcagggcttgcaaggcgaggacacggtctgcgtcgataagatctttggaagttgattcgtcgacgttagggatggctaattggtttgttcatggg

SEQ ID NO: 176544 - DNA, 830 bp, Zea Mays
gagggggttaggttagggtttcaaacctgggttagaatttgggatgttacaaacctaccccacttaaaggaatctcgccctcgagatttagacggggctcgagaaaaggtaagggtattccttccttagagagtcctcactttcccaggtggcttcctcttctccatctctgctccactgaaccttacagagtctcacttctgagttgcgggtccttcggactactgagtcgagaatctttattggcttctctcagtactggagatccttttgaatctgaattgcctctgcctcgatgtggttctctggtacttgcaggcatttgcggagctgggacacatgaaacacattctgaatgtctgacatggattctggtagctctaagcgatatgctacgggtcccactcggttaatgacagggtaggggccgacaaaacgcggtgctagctttcctttcatttggaaccttttgacaccacgcatcagggagaccttgagatacacgaaatctccttcctcaaatctgagttctctccgtctgatgtctgcgtaacttttctgtcgactctgagcctcaagtaacctcttgcggatcagggcaactttctcttcggcttctttaacaaagtcgggtccttctagagtcctttcccctacattagaccacattaggggggtctggcattttcttccatacaatgcttcgaacggtgacattttgatgctggcctgatggctgttgttgtatgagaattcggcgtacggcaaactggactcccaatccctgacgaacgttaacacacaggctcttagtaaatcttcgaggatct

SEQ ID NO: 176545 - DNA, 290 bp, Zea Mays
tttggggaccgattggttgttcccaagaacccagagctcagaaagaaaatattggatgaagctcacctttcaaaattttccatgcaccccggcagtaacaagatgtatcatgacctcagatccttatactggtggaccagaatgaagagggaaattgctaagtatatatccgaatgtgacacctgccagagagtcaaggccagtcatttgaaggtagtcggcactttacaaccccttcccataccatcttggaaatgggaggatatttgcatggattttatcgtgggatt

SEQ ID NO: 176546 - DNA, 547 bp, Zea Mays
gcaggaagctcgaaagagggtcggcgatggtaaaccccgtgagttcaccattgatgagaatgatttggttcgtttcaagggctgtctttgtgtgcctcagaaatcagaggtgaagatggatatcttgagagaagctcataaaacgccttacaccgttcaccctggcgaaaccaaaatgtacagagatttgaagcaaaatttttggtggaagaggatgaaggttgacgtttctaagtatgtggccgcctgtgaagtatgtcagtgtgtgaaggccgagcataagaggcctgtaggtttattaaagccattggaaattctagagtggaagtgggagcatatcaccatggattttgtggttgcttacctcgttctcctcgaggcagggatgctatatgggtggtagtggatcgctttactaagtatgcgcactttattcccatgaagaccacaaatttagcttcagagttggttcccttgtatatgaaggaagtaatcaggcttcacggggtgcctaagtccattgtttctgaccgagactccaaatttg

SEQ ID NO: 176547 - DNA, 597 bp, Zea Mays
aaagaatgccctgatcacgcgaggtgtacgtctaaatccttacctggaagaccctgggaacgtccctagaaaggatttccatggtcgtccgaagcgacctcatcgccgcctcggtatattcacggaaattgtcccggaactgctcctccatctcatcgttaagggcaaggaggggctccgaggtggtcgcggctctagaacacgagcggctgcccacaccactcattgggattgagctgggtggggataaggccgctgctccacaagacgggccacggttctgcgcgccccgtgaccaaggcgtcaggtccccctgcagtcaatgcgtcgggtaccactgcagtcgacgtattgggcctctccatggccaaggtgacaagcctccgctcaccgacctcggcaacaacggctgccccctcctcacgtttgaaaatggggagatcggggatgaccaggggcggaggcacctcagccatctcaacatcggcggtgacgggtggctccgagggcgaatcagcgacggccccggcagaatcgatgtcggcgtcggtgacaagacaggcgggctcggggccgcggccgcgtcaacggcctccc

SEQ ID NO: 176548 - DNA, 862 bp, Zea Mays
ctatagtcaatttgtagctggttggttgagctacaactttgttaaagccgaattagtaagtatttacataaaaatttgacaactaggctctgcaaagtggtctgtcaggttgactgaatgtgaatccaatggtacagtgtactggaaatatcccaggtttacagaacctcgccgccggtgagccgtgcgcccagattcgcaccaaccacggtgattcgtgcctagcgtagatggataacggagaagggtaaaaatcttggcactcggattgctcgggctcgctcaccgttgtgcccaccgtacccacttggaccgcgactggtcgggatcatcctcgccggcgttagccgctcaacgatcatgcgccacatgccttggtgtcttaccatgtcacagtagcttgtattacacacgtccggtgatcgccggtgagctcgccacggtgaaagccaccaattgcttgcgccagtgcacccccttctctctggccaccaccacaccatctcaaattcatgggccaccgctcggggatccaataaactgagcatgccatcggttccgcaaggtagtcaagcacctaatccatcaactcgtgcctcaaatcatccaccagagctcgccaattcgagatttcccccaaatcgatccaaaacaccgcgcaaagtgacctcgccgtggccagcgtgctacaggtctgatcatgtcctctgctctcttgtttcagtacccttatgtgcccctgatacttctcgacccaaccgattaggctagaacccattagatcgccgggaacgcaccatgctgtccagtgatcgcgctgtcaccatgggcattatgatttagagctcaaatcttgcaatta

SEQ ID NO: 176549 - DNA, 1041 bp, Zea Mays
ctcgtgtgtagagtaaatggtttgcgtgctgccgaaatattgcgtgcagtgttcggcttagcttctgctggcttgaccgatagcaggagctcagttcttgataatagaattttctttcagagcgtactgaagtcagcgatgagctagtgacttccaagtttgaacttgaatgccgagtagtgatgtgccaaggaggttgacccttagctcgctaggctcttgctgcgttgaatttttaggacacagctgactagacatgacctttaaccttgctccacactttctaggaattcagttgcgctaagtagagttttctagggtgcagattagtcaacactagagagtgggcaactctatcacgttttttttttttttttgcataccgtgttatcactctcttgctgcagcactccaaaatagtgagcacgttatgagaactttgcaaagtggaatgccacaaagtaaataaaccactatacaaagcactgcaggttctttaagttagtgttggactgttagggatacgttttgattttgagagagccacgtggccattaattttgctctcgtgggaacataattttgttgtactgtttgttgttgttcaatcaaattgtacttgttatgtttaacacacacacacacactatagcgccatccccgtccatggaaaaacagaaaaaagaatccataattttatagctggaataaacattcagtgtggcaaggttaatccaaaatgcttcagagttcagacttcagactcatgttggatttggtgatgaacatgtaatggctgctccttctgggtaaaaaactggatccaaagaaatatcacaaatacatattattaattaaaagtctggtctaatgctgaatcacagaaaaaaacaaattggaagaaacaaattgtgctgtcatcatctatataaacctgattttttactacgtactgtatgttctaaggaaatgttagtggcacatagctagcagtggcaatggaccacgatccaaatgtttcttcactatttgtttgagccc

SEQ ID NO: 176550 - DNA, 1340 bp, Zea Mays
gcctaaagtctggctgtcaggctggttccactctgaaattcagactttcagtgtaacagagccatctttgggtttgatttcaacctttgatctagtgctcaaattgagttcaatccttatagtcgaagtatttctggtttgtagctctacaattttgctgcagagcatggagtatgttaccatatagatttgtgagaaaatcgagcctaaatgttgacttgtcaggcgctctgaataagtgctcgccatggtacagtgactgaaacggatcagaacgccagcgcggctgtcctcaccgccgacggctccctccgccgtgattcgtgtcaccggcgtcgggattagtgccagggtggatggatagcgctgcggggtaaaagaatcttcgccgccggtgagctggactccactccggctagccgcgatacctctcccctttctcaccgccctcggattggaatctcatcgctgtcgtgccatcttcgttgtccgtcgcgtgtctctggctatctaccgcatcacggtgactcacccttgctctccgttgatcgccggagcaattgccacggcactggacacctagctgttgcgccagtgctcttcttctttctctggccgccgcgcgtctcgctcgattcaccggccaccgcttgcgagcgctataaattgagcccgcggctagcttcgcaacatcatcacgcaccaccacacccagtattgctcccaatcgttcaccaaagagcactaatttcaaacttcccccaaaactgttttctgccaccgcgaagagtgcctcaccgcggccagcgcaattcgagtcagctcacgccttctgctccctcaattgagtattctcaggtacccgtgatgctcctcgacctatccaattgcattataccgccatgaatcgcttggaacatgttgttcctttaagtttctccgctgtcaccataggcagaggggtgtagagcttcaattcaaaaattgagtgaggggaaatacttctttggggtagaatcaggggtaaaccgaagactagcgccagtcttggccccctccggccggtctagctcgccggagattggatttcctgtgtggagcgccgtcgaggacgtgtcgtgtaaaggaatagaagaccgagggcttctctgcaatttgtcagcgacacaaagaaacagtaatagaacccagttatagttagccaaaaccccgaggccctttctgcaaaacctccctcgcgggcgcgcgcagcacgttttagcgtggacttgggctgcctgggctgaaaccggcccagaactgttgctggctttttccttttctttttcttccagagccaa

SEQ ID NO: 176551 - DNA, 522 bp, Zea Mays
cgagcaaagggtggtgtcttcgcctttgccccaacacttcctgcgttgcattctcaagcaagcgcttcgtcacctgagatcagcttcggcttaaggaacctgaacacacaaatggccagggtaagatccactgctagggtgtctcgtgaaggagaggagaccgaaatcaccgaaacaacaccaatttcagaagtgatgaagcggttgggtctggttgtgtcagaggaagttgctgccgaaggtgcctccaatgccgaagctgaacagattgtagctggaggcaaaagtgacaatgaaagtgaagaagataacagtattttgagcccaacaaagcctagccacattgagtttgggaaatctactgtaacagaggatgacatggttatgatgaggaaacttggctatttcggggaggacgagagcaagcttgtccggtttgctagggaggaaatagttccggaaccaaaagaggacaaagttgtcattttcaagagcttcttcagagcaggacttcggttctgc

SEQ ID NO: 176552 - DNA, 511 bp, Zea Mays
gtccccgcccgtgatcggctatcaacacgatcaccgccggccaccgctctgtcatgtctcctcgccattactcgcccaccagccaaattggcgccttgcgtccccgcgcctgtgccgagccatcccgtcaccaccgcctgcccgagccatcccgtcgccgccactgtgcgccatcatcgtcgtcacgagcgcgcctcgccaatgcgtgtcacctccccctccccggccgcttataaaaggactgccccgagcccttcatgtcctcgaaccagcctcagccactccctccccttccctgggcccaaccgagctcggtgtcgtcgtcttccccctcttcggtgagcctctccctcccctctctggtggtttcaagtcaaattattatagctcatgatctccgccacttcaccacaagcacggagcacccttctccacctatcacacccgtgggcctcgcaggcgacctcaccgccgcgggcgcccgtcctaagcctccaccggccaaattgac

SEQ ID NO: 176553 - DNA, 546 bp, Zea Mays
gttggattagagtatagctcgaactaggattgatcttggcgtaggtgcattttagagagcatcaggatatgtttcgtaaaatgttccagtggagggttcgtcgaactatggtgcttctcgacatgcttgcgaaggtattgagcagaagttccacactcttttggaccaggtagcacgcctaggatgtttctgccttatctgatcgctactttcaatgggataagacattggaacaaaatgccaagcttttcaagctctatacgtgtggactgggtatgtaagttagctattattaacacctgcccttagttctgtcaccttatccctgtggttactttgtcaattcatcaaatactgcttgaatgtgaaaaacatatttagcacttaccttacagatgtatggagatacggtaatgattagtgtgtgttgactaaccccagaacaggacacactacactgcaaaccactaggcatccattcatgttagtctatgtttgttttcagcagcagcaaatcgagcaggtaaagcaagaatagtgaaattt

SEQ ID NO: 176554 - DNA, 878 bp, Zea Mays
caatattgtagctggatcttaggactataactttgttaaagggtgtcgatcatgttactgcacaaaattggaagttattggctctgtaaattcccctgtcagaagcactgatggagcattccatggtacagtaacccgagtggatcagaacgccagcgtagcttgctcgccgccggtgaccccccctgcgcaaagatttgcgccgccgccgttaggatttacgctcgctggtaaccggataacgcttcggtagaaagatcttcgccgccgtcaagctggaagccaccccggtcagccgcggtactcctcccctggctcaccgcccgcgggtaaagtgctcaccgtcgtcgtgccatcgccgttggccaccgcgtgtcctaaccgcgccatcgcatcgccgtgactccctccaaactccccgtcgaccaccggagttactgccacggcggtgaacacgtgttcactgcactagcattcttcctcacctccgaccgccgtgtgtctcgtccaaaattcgcggccaccgctcgctccgcctataaattgagccctcccctagctgcgcaacatcattgcgcacccccacacctagtattgctcccagccgatcaccagcaagctccaattttaaacttcccccaaatcagttgaagaaaaccgtgaactccagctcttcgtggccagcccaaatcaggtccccacttgtcctctgcgtgcttgtttcaacgttcttacttgctatggatgatcactgacccgtttaattaagttagaacctcgtagatcgccgggaacaccttcatccgtccgccttgctctcagtcaccgtggccagagctcagtagttggttattcgtgcaattaagttaggggaaacg

SEQ ID NO: 176555 - DNA, 394 bp, Zea Mays
gagcactagatcggtccctcacgggtacaatcacagagcaagaaggcagtagagttagggttcggggttcgagcacagatcacaagaacaagcaccggattaagaagtctcaaactcgtcggagacgtcgactagaggaagaagaagacgaacactgaaagcttaccgtaaccaaatccgtgagcgaaccaccagccaagcagccaccaagtgaggggaagccagagctcagaggtggagggagcggtggaggaccctaccggagggcggaggcgaggcggcggtggagacgaatcacccccaaaatcgcccccaaatcgtagacggagggaaggagggcgagagacaacgggcgaggcgagcgagtgagactgacgaggcggggcccgatggg

SEQ ID NO: 176556 - DNA, 594 bp, Zea Mays
gctgttccgagcctagaattcggacatggtttcgtcgtgcagcggcgagtcaccacagagtcttgcgccgtccaccatcgcaaggaagaaccgcggatccgctccgctccggtgctgggggtctactcatcgtcctctggtgagaatgaattcgccgcgcctctttctccgtccccagtggtgtttcgtctggttaggcttgggaaacactcagtctgtagctggaattgatcaccggcattgcatttccgccatgcgccgtggactgagcccggtgcttgacgacggtagaaattggtaggggaaacgagttcttaacgtcatcaattgggcgaggagcgaagtaattaggagagggaggtctggatggccggaatcgccgcgcgccggaggaatgtcgccgcgggcctctgtttcaccctccctagtcgtccgaggtggaagagcgttcgcacgccgtgggtttggaagtggatggctaggattgaatctggtgagggagacaaccctggatcgttggatgaccttcgaacgatcgggattagggcatcgcgtaccgattggctcggtttggtaggagccgtcgatcgcgtg

SEQ ID NO: 176557 - DNA, 513 bp, Zea Mays
ctggtgggacccgcgtttcatcctctctacccatcgcactcatcggagctttggtcgacatgtgggaccatccaattagctccatctccttgcagtaacaactcccgtgggctgcgggtgctgctgtggccaaccccggaaatcctagagcctgatcaggccggcatccatgcctctcggctataaattaaccccgccacgtccaactcaagtcatcgtcgcgattccgctaggttgcaccgagagcgatggcatcaaacaaagagatgaggagggagaacagagaggctaccaccaccgtcgattcaagacttcaccgtcggtttgacctcagcattgggtcatggggaggccaccgggggtacctgtgcttggtcgaagagggtctagacaagaaggtcctctggtggaatgacaattgctcaccggagttgggcgggtgcggtggatttgcaccgcaccgtgaccgccaatttcaccgtcgtcttcatctggtgagaaccttcttccctg

SEQ ID NO: 176558 - DNA, 335 bp, Zea Mays
gtgagagggaggcatcggatctagagggaggcagtgtgggagagagagacatggcggtgcagatggaataggaggcattgttcttgcggtgtcagtggcgcgagatgcgggaggcgggcgagcagggtgcggtggtttgttgggacgaccacacacgtgcggagtggggaaggggtgggcacacacggctggttgccgcgatgtcagaggcacacacgattgtgatatcctagtggaggagatctggtgcgagcgtggagaagtccttgctttgcgacatcgacgctgaccagggcctgtttcttggagtgccgatggcgtgcgacggagacgtg

SEQ ID NO: 176559 - DNA, 429 bp, Zea Mays
tagtacaccggctcaccattgcctggccccttaacaagctcgcagacgtccccaacccgaaggtcgtttgctgtcaccaaatgtttccagccctcggtgaagcccacaaataacgggcagtggtggatgacaggccataatctcttcttggtgtccttcagcattataacatcacagccatgccttctctgtctaactgcattggaaagtgcacttttatctgctccgtgcttcccgacccgattcaggcattcagccgatgccattctccatataagtcccaaacagagaatagggatgaggtagtcaagattgtaggcactagtgctcaactactagcatctatagatatggacacaagtccaaatttggtgctactctacaccatcgatatcactagggaaaacaaatacatcaaagagatccact

SEQ ID NO: 176560 - DNA, 549 bp, Zea Mays
gctggaggggcttccttcttccgttcagtctggcatccttggctcttggtcctcttccagattttcttcgtgggggtgagcttctttagcttctcatcgtaatccatcttcagggttcggtaggcttcacgagtgttggcttcttcaccttctgctattttgagactttcttggagggacgccttctcctttttaagttccttgacctgttgctctaagctctccacccaggagtttaggtgggtgcagtgggagaaaaggtcgtcatagtggttatcgagggtgtggagatagccggccatgtagacgatggtggggtcatcctcagtaggatctcttcctgatagggcctgaagtattttcctccaggaaggggtatttttgttgctaggtggaaagtaacgaaggggggtttcaaagacctccctgctgtagttttggcatagctgtcggagggcttttcgggcaacattttggcaagtgtctaggaagcggtgtccggtgaaggtgacttggaaaggagggtggttcgggtagcttcgactttct

SEQ ID NO: 176561 - DNA, 674 bp, Zea Mays
cggctacgcattacagccccgccgagggatgcgactccgcgtcagcatccatatcagaagcgtccctttgctctgcagacggagaactcggctcatttgtggagcaagacgaggaacacgacctctgaatggcaacattggaggacctggagttgcttaaggagttgagacttagtttttgggggtccaccttgcagaagtcaacgcccaattccttgatagtcctatgggagagcgatggtggtgaaggagacccagcacaacacgagcaattatttttactgccaaaacaaggcttaaagcctttggccttctctctgagcctagcacttcttctcacttcagtgacgaccaaggctgcacgtttcttcctgttcacagctgcagaagtcacaggagattgagcctccacaagcgaatcctggctgggagggagcaagcattttgggggtatcttaaatggtatggtttccatgttgggctccatgaaagcagaaagagcccctaacaacagaaattttctggcccactcaaaagagtccggcctcataagcaggcccattaagaaagctgcccataactttggaacggagatgaggtccacgctgggggggcaaagctcagcccaggaggagaagcgctttctggccaagaaatcatcgtaggcagggtcc

SEQ ID NO: 176562 - DNA, 567 bp, Zea Mays
atcccccgggtcctcataacacatattggatccatgggctgttagaaggccttagtggaccggacgactggtttcgtgggctggccggctaacttagacccagagacggcgcaagacttgaagtccaaggcatcatggcaatccttttcgataaggacggcacgaagctctgcgtcgcacacaaatcagaacggatttccgagcatgcaagatgggtgatcaggaagaatgccaatctataatcctgaactcgtcgtctatatatggcggattggctacccctacaaaagatagagcacctctcgtagcctgagagagcattctcatctcttagatactttgtaaccttgaaccttgagaaagatcatctccaaagcacaccagaagtagggtattgtgtaatccagcagcccgaacctatataaaccctcgtgttccgtcgtgttaagcacaaaccattgagctgcagtcgatctcgtcgaccacaaaaggcactacacgacataccagtgtgttgctagtaccaaacaccgacagagttctaatctcccccttttgttaattagc

SEQ ID NO: 176563 - DNA, 743 bp, Zea Mays
gtttaacaatgaatttatgctgatttgttttttgatatatgaaacaattgagttactataaggtgacactgatttacgatacaatttgtgtaaatatgcaaatgaaggagttagcggtagaggacttaccagtgtgtggaggggaatgaggaccgaccgattttgggtccctctgcaatggagaagaccaaggcgacggtggctcggtcaatgcgtaggagacgctgaagttgacggcgggttagactctgcgttggagacagtgaaggcgacgacgggtagaatctctagggttcggccgccgcggtggagcgaatgcggctcggtctctgcggtggagaagaacaaaggggcggtggctcggtctccgtgattccgggtccctctccggtgaagaagaccaagacgacggcggctcggtctatgcagtggagaagctgaaggcgacgacggtcggtctctgcgttggagacgctgaaggcgatgacgggtagaatctctagggttcggccgccgcggtggagaagaacaagcagacggcggcgataatgctagggttcggctgccgcgtgcgttacgggtgaggtgagctgaataactgcgtgctcgtgggtggattcatgggcccgatacacgtactctgctgggcgaaatctacgcgaaggcccatggaccgacacgtggattactgtttcgtaaacggaaacataagacatcgtaataccaatatttgtgtggggact

SEQ ID NO: 176564 - DNA, 678 bp, Zea Mays
ggtcatcgatccaagggagagggtacttattcttgattgtaacttcgttcaaggaccgataatcaatacacattctcatacttccatcctttttggtaacaaaaaggacgggggctccccagggagacgaactgggacagatgtaccctttttgttgcagctctgcaatctggagttttaattctgctaactctgtggggaccatgcggtatggtctctttgcgatgggcgcagtgccaggaatgagatctatatagaactccactcctctttctggtggcattccaggcaactcttccagaaatacatccacaaactcttcgattacggacatgttttctgctgctagattaaacatcattggatcgttggcgggcggctgggcttgacaggaaactgattttccttggcgatcggtgagaaggacggtcttacttgcgcagctgatgatacccttgtgcttagttagccaatccattcctaggatcacatcaatcccttgggatggcaagacggttaagtctgctaggaacactaccccacttaagagaattctgacttgggagcacctgagttggtataggaggtctgatcccggggttcgggtgaccaaagggatagctaggggtgtagaggggatgctatgcttttccacaaacttagtggctataaatgaat

SEQ ID NO: 176565 - DNA, 494 bp, Zea Mays
atgattatgtggtagtcatgactcttcaacctagaaaacttgtccatcttcatattcacggatcttctaaagcctttcgcataaccatcagggaacttcaagtttttcaactagaccatcaatgctttcttccttttaagttttagactgtaaggagcatgtggcttctcattctctcccagttccagagttggtcaactacaaattaaggctaagtctttttctagccttagggttgtcttttgttttgttagtgatattcaacaagtgttgataaggctttcacctatatttcattcttggtgcatgacatcaatattgtgcatcaaaatcaaggccttcacataaggaaggtcccataatctatatctatgagaacaattatgctcggtttcgaaaccttcaaaccggtttccacattcatttagttccaaatcattaagcctcgcgagaatatctggaccgctaagacgtttaggtggtcccctcgtcac

SEQ ID NO: 176566 - DNA, 426 bp, Zea Mays
cttcaatcatgagtgccttcatcagccgtttcaagttgagaggtcccaatcctcgactcttgctgctcaggctcgctcttctgctaatgagcgtccaagggcatctttaggtggagagctagctaggcactctttcccagtgactggctagatccctctcatccttcatcatcttatgggaagaagccagggaagctcacacgttggttttgcaagatttttggtacattctcttatgcagctaacactgcatatgaggctcgtcttgagatccgtgagcttcgtcagcgtgcaagacttcctcgtatccctaatccatggcctcctctagcatacaatgatatttcagaggatgatgaggatgaagaagaagaagaagaagaggagattcaaccagctcgcaccaggtgtttgcgctacccatcg

SEQ ID NO: 176567 - DNA, 325 bp, Zea Mays
gtccggcgaaaagctcccgactttttctgggctcagtttgttgcggtgggtggttgcgtcctgcttgcgcacctaaatccattgcgtgtaaataggagattgcaagtaacaagttactaattttcttgcgctctggcttggaaatggcacacaccagttagtcgtgactgggatcgagcactgccactaaggaatgcagctcacctagttctgaatccaaacccgatacagtagtgattatgttcatttaattcttgccaatttgagcttaggtcatctgatttcccaccctaggtatttggatttcccacctgcttatttaagg

SEQ ID NO: 176568 - DNA, 589 bp, Zea Mays
aacgggctggggaacacacagaaaaagaagccagattaaagcgaacggatatacgatgcaaaataacatggttcattacttacactgcttgcaaataattattctccaatgcaaatgatgaaatgaaccaagaccagagctaaagagggattctgcttgcgtgcatcacatccaatccaacctcacctcccgattgctgccctaattatttgcaggttttatttccacgaggattggttctggtcaacctcacacgtacgtagtagcacttgcccttgtacatgtgctgccaacgggacatcgtcgtctacaaaaacagtagcagtattattatttgtctgaattcgtgtctgcactgataaggattaccgtactcctgtgtttaggagtaccgtagtacgtagctcatagtgccaagacgaagaagatattcctgtatcgtcgtggaaaaaaaattgtagatgtggaggcggtccagccgcagagaacacattcgcagtgacatgtcgcagtcacggtcacacgcccatctccgtcagcttcgtagatctttcagcaccctcgtcttccgtctacagtcagcacttct

SEQ ID NO: 176569 - DNA, 702 bp, Zea Mays
cgggtatgaccacttttgttgatgtcattggctaatccttgaggtgtagtgtcacgagggggaggaaattactcctcgatgggacgagaattgctcaccggtgccactccggctttggtctgctatggttcatcgttggcggggagctaggcatgacaattggtggcgtgtagtagattttcgagttcaggagggtcagggcattgtgcgctagcatttaaacttggaatccgagtctgggggcgtcgggcggagtgcgccaacgatctgctctgccaaagagggttctcggcggcgccacccggttgagtcggggggttagtggcgacctctggaccgtccgatcggctttgggtggtccaaattagaactgcgtaccccttcgcccataatcgaatcctgaccgttaactctagatcgtacgggagatgttagatcgcgcatatgtgaaacttgggtcgtagatcgctaatccaacgtcagtggtcgcgtaccgggtcggtatgaggatcatttaatctggtgcgtcggattcagatctgacggccagaacaccctacataccccttcagccaaacatttttgcgtatgagccctcgggattccggggaattaacccgctgtccacgcatatgtggagaccctcacaaccagacctaggaatcttgtaaaccagcccctggtcttcagcataattttgca

SEQ ID NO: 176570 - DNA, 690 bp, Zea Mays
ttcttagttgagttttggatgaagtatagtgacattgattaagcaagtattgtgttgttgttgtatagtcagtgctctttgtggagttttggcatttcttcgatgaactgtgccgcacagaatgttattggcttcttgtcggctttattgctccattagttctgtagactttctcccttttgtggggtgcaaagaatgtgagattacatgattatcttttcatgatggcaagaacaaggtttaggaagattaggagttttgtttcaatagaaccacttgttttgtggtgctttgaggtgaggtgtttgatcttcttatacattcatatggtgtggatgtttcaccattgaattgaaatgaattgttgaatctggtaagggttgtgcttagtgcatattatcccttcataaaagagtgttgtttgaagacattgatgttgatgtatagctgcatccaaattcgatggtgtgaaatcgtagtgttgattgcatctatgacttgctttgagcttcattgcatgttgattcatgctggatatcaggttgtgtagtttccttagacaattagtccgaggtagaagttcttgtgtcaattaagaccaataatagacccatgttttgaatggtggtgctatatggggtaccttggatgctttgtttggagtggtcgaattcgaggacgaattctttt

SEQ ID NO: 176571 - DNA, 578 bp, Zea Mays
caagctgcttctcacgcccctacacctgtcggcatgccagactacgccgcaccctatagtaacaggccttcgcccacacaccgacaagacagggcgaaggagaggctggtcgggagatccgcgcgacgaccaaggcaaagtccttatccaccgacagaagattagctattctgtatagtatattttcgtactcttgggcccacctgtcagggctcatttcccatgtaagcgcctcccttgaactataaaatggaaggcacacagcactacagggggacagactcttacacacgctcatacactcacacgcagctcaagcaatacaactcactcacagtggatgtagggttttacgctccggcgacctgaaccactataaacctttgtgtccttgttcatcggattagccaggcaaacgcttaagccccctcctcatctcaggattttgggcgggtgcacttcgccacccgaccggaggaatcgtttccctccgtcaatgctcaagacaagccgttcttcaagttcaaggcgaagaagtgctagactgccaagcaacaaacaaaaagtgtcacgacaag

SEQ ID NO: 176572 - DNA, 553 bp, Zea Mays
tcttgttgttgactgctgactgtgactctgggttgcgggatccccaggttgcacgccccgtgctcgattatttgcctgatgatagaaaatgaaagctagggggttaccgtgatagcatttgtttttctccctttttggtgaatactaggtagtttttccttcatataattgtgccactagcattgatctgtcatataagtactcagtcaaatactattggatctcggagtgctggacaactaggtgggtcttcattgagatacgggtgcattgtctactactaccatgcctacgttaataccgagaatcttgagaagaatatactaagaaacatcgatgtgcatctccaaaaggggaaaataaaacaaagggcttcatgttgagacagctcagtttttgcttcctcgtttcaacaaaatcttctctggcatatttgtttccaccattctactaatttagtttttgaagactgcttaatctaaaggattaaatgtgtttattaagtgattaaatatgatttggttgatactactactatgaaatatgtttaaat

SEQ ID NO: 176573 - DNA, 935 bp, Zea Mays
gtttatgagaatggtaagaattggtttctcaaccatagtaagtccatcaaaagttctcttaaccactcagcttctatagaagttgtgtctagatctgtgagctgtgcctccatggtagattttgtaagtattgttagcttacatgatctccaagagacaatgccaccacctaatgtgaatatatatccactagtggccttcatctcataagcatctttaatccaatttgaatcactatatccttcaagtacacttgggtaccctgaatattaaattccatgactcattgtatccttcatatagcgcattacacgatcaataccacaccaatgatcatttaatgtattagcggagaatatactcagctggtgttgggtacctaagaaccgggtgccctaagaaggtcgaaaaggcctcccaaagacggcccaccaactgaccggcccacttgccgagcaaaccggtggccaggcctaccgaccaaccccccccccccccccccgacgagcaacccggcatggcggggttgccgaccaatccgctcactgaataacactgccaagcaacccggtgaggcggcgctgccgatcaacctgcctgtcgagcaacccggcgaggcagggctaccgatcaacctgcctgccgagcaacccagtaagacgacaattggctctcagacgaacacctctataggggaagagccaacctcgtactatgaagccacatcaacacgatgagacacatcatcaccaagccgtgtaaagaccatagaagtagtactgaagggtctgtatcaagcacgatgccggatacgtatccccgctaactagtgggaccagtcaaccccaaccgcaaggacctcagcatcggggtcttcataatgacccatacaccagaaggaacggggcaatatgccataacaggcatatttctac

SEQ ID NO: 176574 - DNA, 458 bp, Zea Mays
atttctccagatttctatttctaatttggtcaaatgcagcagacaaaaaaatacggcacgagatgcaagattcattttaggcaacgtatcctgtgtaaaaggttctcgtgtgtaaacatgctaaaacgccttaacaacctttggatccagaatcaaaggctaattttaatcccacctaaccgccaccgcaccagattaccaggagggggttctttagaaaaaacacaagattatcaggtgggattaagattagcctttgattctggatctaaaggttgttaagacgttttagcatgtttacacacgagaaccttttacacaggatacgttgccttcattttatttacttatttatttattatctccttcaactaagcgaatgtttcaagtaggcaaagcgtacatgcaagattcattttatttacctatttatttattatctccatcatctaagcgaa

SEQ ID NO: 176575 - DNA, 404 bp, Zea Mays
ggctcgtctacgtcggggacgactgaagtgattgtccgtggtgacccatgttttatttcttgcggggtcatggcctccgatccatatagaaggcggaaaggggtgaacccagtcgccctgcactcagtcgtgttcaacgcccagatcgcttcaggtaacaggtcggcccacttgcctttcttgtcgtcgaggagcattttcttgacggttgtgaaaattttaccattggcgcgttccacgactccgttggattgcgggtggtacactgaggcgaaggcaagcttggtgccaatggagaagcagaaatccctgaagtcttggctgtcaaattgcttgccattgtcaactgtgagctcggtcaggactccgaagcggcaaacaatgttttgccagaagaatttctg

SEQ ID NO: 176576 - DNA, 606 bp, Zea Mays
gagatatagagagaggatacaaaaacattggtaaatatatagaggatcctttttcacttatgacttgcctagtggtggggcaggaaatatggaaggagatccaccactgaagactgaatggaaagttacctctatactcgctcatgcattcatatgcatgctgcagcatgcaccccacaagaggccaaattaaagggaaacatcaaaaatgatttagtcccaatggcctggcctggacctatagggtgccatgcctgcatgaacccagcggcccagccacacaaaatgcatgctagctcctcctcccacgctcccagcagaggggccaattaagacgcagctctcctagctattagctagcgcgggcgcacagcaaatataggcagggccagggcgcgaacgaggtgctccctccctcctcctgcagtggctgtgccatggaattcctcgacaaagagacagcgcggtcagaggcggtgcaggcaaaccaaccgggagtctcgtgtgtgtgccccagccgctgctagcaagcttttctgtggctctccactctccctcctctgctgtctgtctccctttgcatgccagacagtgccttgccgcccg

SEQ ID NO: 176577 - DNA, 505 bp, Zea Mays
gggcgatgtccgcgggcctggctagcagagcctggcagcctgctgatggggccttcaatctgtgatacgtcgatgtggaaatcctcgagcgaggggggggggtgttcgccttcgccccaacagttgtggctccccctccttgaagacaaatagggaggtactagacatggcaaagatgaagtagaggcatcaaacgtaggtgacagctgatgggttcgaagttctcaacgtcttctataccgtttttggatctttgaggtcctcggtagcatggccgcggtcttcgaccgagacccgtgtgctcgacgtggatagcggagtccgactgttaagaccttccctcacctcgttgtctgggcgaagccctcgccatggtctttagagtcctcaatggaccaggcgtccgtatcgacgggtttgtttcctgtagggctaagtctttattgtagccttcgtgatcttcgattaaccttgcattaatgggagcgaagttcgatagttgatc

SEQ ID NO: 176578 - DNA, 1223 bp, Zea Mays
atgcagccccatacaactccacctgcatttgatcttgccacttccgattaataatagcaagcaacttcctcttcattgcctctctaccttcaaaacccgaagtgatctttgcttttgccatatccatggcagcggcaacctctggtatggctggcttttcatcaccatcaacaattcgcaacacaatgagtggacagtggttgtgatgcaagaatacaatcttggactgagttccaaaagtttgtagaaagaagtatctctgtgaccttcttttctccttttgtgcttgataacttggacctagtccaatcatcactaacagagaggcatctcaaagcttgcttatgcttatatatggactggagagttaggaaagatgtagcaaatcttgtaactgcaggtctcactaaatcaccccatatcttctccctcatggcatcaagaagtttgccatgcccatatatgaaggttgtcacttggcgagcatgggaaatgcatttcttgaactctccaattttcccaatgtcctcaagcatgaggtccaaacagtgagcagcacatagagtccaaaccatgaccaccaacaaggtgctgcttcaaccttctaacacctgcatgaacaattttgccacaaaggatgcacttcaccacatatttttgttcaaatccggccaataacaatagttccatgctggatccttcgattttgcctttctcttaggatctttgatcgtatggctgctggcttcctaactccccttgtggtcgatctgcagatgcatcttccatctcttcaaggcctcctgcagatccgatgagagggcgggggagggtgagcagaggccgggcgagcttgttgcgagggcgggagagggggagaagcactcaccaagtcactaggttcctgcagattgatgagggtggcgtgcagactgcatattgcactggaggggcggtgtgagatgaagggcggcaagcgaggaggggtggccgacggcgtgagaggggcggccggcggcgtgagacgaggggcttccgacggcttgagaggaggggcggcctgctctgtgcagatgaagggcgggcggctgcagatgaggggcggcttttagttagggttttaagttgtgtaatgtgctgcttgggccgaaattggggacaagtcggccgactagctagaacaagtcgacgattactcgtctgagaaattccagtcgtctgag

SEQ ID NO: 176579 - DNA, 521 bp, Zea Mays
caccgtggtacggaagtccaccaacggaaaggcccccagtgcatgcctgatagaaggcttcagaccctgacggaactggctcgccttctccatctcattataagccacatgagggacaaagcggaccatcttgttgaagcccacctcatactctgtgacagacttcttctcctgcttgtaggactgcaagtcaatcttcattttctccagaaaggtgaccgggtagaatctcctttcaaactgcctgatgaaaacatcccaagataggactcctggtgacgaggagtgcgctgcctgcacgcctctccaccaaatctgagcctctcccttcagcagctgagtgccaaagcgaacccgatctccataagcaatctcgaagacattcatcttatcctccacataagtcaaccaatctgccgcctcgaccggagtatcaatgccatcaaaagaatccaacttcatgcccatccactacatcagagaaagaccactgactaaaagaggctcctcggccccgccac

SEQ ID NO: 176580 - DNA, 970 bp, Zea Mays
ctagagttctgttacagcataaaaaccctacgcgccgccgaacccttatttaataaccggctggattactctgtgctgtttaccgacgccggcccaaagaccggttgcactacctcagccttttgacccgacacggcctatctcctgctgctgcagccaaaccttctttgtcatttgccgcaccgatgactacttcctccgcctcgctgacattcccccctgctaaatccgctggtgtccccaaacagctgcatgcggaaactgctgttgcaagtcctgcgtaaactcctaagtagccaactccactgtcatgtgtgaccactggacaagaatttgttcactggactgcaccccacgagccaccgtccgacgctgcaagatctttacaggcacactgaactgaaattgctcattaggcagcactggagaagacaccaaacctgtacccaaggcacgcttgagctgggatacatgaaatacaggatgaatccgtgacgaagatggtaactgtaattcgtatgccacggctcccacacgtcgcagcacctgaaatggcccaaaaaacttaaatgccaatttctgatgagcacgaacagcaacagacgactaaacatatggttggagcttaagaaacacccaatcaccactagcaaattcccgttcagaacggcctttgtcagcctgtcgtttcatgcgcaatttagccctttccaagtgttgttttactaaatcagacatgacctgccggtcctgcagccatatcgataaatcagtggaagcaatgacagcagaatccgaaataccaaactgtctagggcgacacccatagagcacttcaaatggcgaccttcccgtagctgaatgtggagacgagttataccagaattgtgcaactgatagccacttactccattgatgagggcaggcatggacaaaacaacgaaggaacgtctccaaacattgatttaca

SEQ ID NO: 176581 - DNA, 615 bp, Zea Mays
tacagatggactgcgcgttggtttttaaattccaggagggctcttttgcaatagtgtcaggccgaaggggtatgcagccacctcagccacccgatcgaacccgaacggtccagattagattttaaactcatgtgaattggtacacattgatagccacaggatcgaagatcgacggtttgtatctaacgaaggccaatccattcttacccattcgatcccgatcggacggatcaccgatcgtctagacgaaacagtatccaacttctaatcatggctgcccactagctgatcaatggctacggcatgatcttctacccccgacacaagggcacgaccatgcaggggatccatcccatggcggcgccttcgctagtgtttggcaaagctggcgtcccgtgcccaatcccaaaaccgtctgtgcaataagtgccctacggaagatggtgagtgccagggatggattcatactagagtctagggcgtgaagcaacccgaccacaccaggcatagatttgtgatggtggaagaaccacggtgaggaatcccgatgggtttgaagcttctctcaaagaattcagggctcccgatgtctccccacataccctcagatcttcc

SEQ ID NO: 176582 - DNA, 859 bp, Zea Mays
gttcctgggagatgactcagctgctggtctgctttgctatcaacaacttgagccctcattcttttacccccctgtccagcatgcaaaggcatgcttcaacttgttcctgtgcttggggctggtgtgggttatggtgaaggtgtccacctgcatatgttcatgcactatctaggactcaagtccacccctcctggaggccaatagagtttaccctttttacttcttgccaccaccctcaactcccataaaggggtactttaaatatctctgttgtcctcaaccaccacctgatagagcatcagttgctatcacccttgtgcacaaggatggccaactgaaaccatccatccaccccagaaaaccccagtgcctctgaaaaacctgaaagtggtgaccacacacttgttcctctcagttcaccgtgaccagcaattcccgaggtgaatcctacacaattagttcatgtttcatgatctataggttatgatgattctcatagcgttgcccttttgaactctaccgtactgccctagccggaacgccgtgaggtttgtccaaaacgccgccacgggcagttcccatatcgaccggccgaaccaccgcctctccgatgaaacctatgtaagcatcgtgtccttattgggccactgaagcttttcgtgccattcgattgaacgctaccgtgtttaactcctcagtatacctcgccggagtcccggtgtccgccaccaccgcggctagtaggggttgaggtcatttcggtgcgattaaccaagggagaaccttgggttgagttcgggtgtcacgtcggtgtgcttggttacaccggagagggtcaccgatggcaagtccatgcggc

SEQ ID NO: 176583 - DNA, 748 bp, Zea Mays
actgttcggtgtgcccataactcgtttttaaaaaagttttcctcgcccgagctagagcccatgctctttcattctctcgtgcgccagccccagctcagctctctatcgccgtagcctgtcttcctcgtcggcgaccaccatcgtcagcccatctccggtgaactgcccctgcctgtgctcatctccttcccttctctggtgagctgcttccccctctctgttcttctcatctatctctgtttctttctcaagagaagttcacctcccacacccctctctaaattcaaatcttgtgaaatcgtgtgagatctgtgtgtgaaaatgtatccactatcctctagtgagtttcccctgtaggtgttgagctccatagggagggtttcgcacttaaaacaaccatttcaccgcctctcaaaaacctcgcacaccaagtgttcggtcaaatgcataaaccagccaaataagctcaaatcgaccccaactttttctagcacactctagctactatcagtaccttacatgccaaatttcacacctattcaatactccaagcacctattacacaacctattcatctttatggtgatccttttcgagctgagtgccaaaattatttttcctcagccaaacttcaaaccaagcactcacttcacttattctcatacctatttacctatcagtgctgtatcagctcatttttctagtcatttcatgccccgtttcgaattctctatgacacaattcatcg

SEQ ID NO: 176584 - DNA, 625 bp, Zea Mays
tcccggagcctgctgagcttcctgggcatcgacgtgatttacacgtgcccttccttggtacggagtcttgttctgctggctgacgacggagggcgccttgggggcggatgccgaggtattcttggggccattcaccgagttggagtaggcgggtcccggtggcttcagctgcggacagttgttctttaagtgacttggatcaccgcagtgccaacatgcatttgccgggggttggttgcttgccactgagggggaatggaaagagctctgactctgctggctgaatcgcgacggagtgggtccagctggtctactgaagttgggccctttgggtggaaacccaaatgatcgagtcttctggtgccggtcctgctgctgtgcccggagaacctggaacttccttttgagatgtcctttttcttcctccttagccctttcaacttgcatggccttgttggaaaggtgagagaagttgaggaagtcttggctagccagaattgtcttgagttctggcctgagtcccttcaggaaacgggccatcttcttgctctcggtactgacatcatctggcgcgtagcgggctaactccatgaacttgtgcacatattcgctgacagatcttccg

SEQ ID NO: 176585 - DNA, 890 bp, Zea Mays
attactaacacaaactcttttcacattccatgatcattttctactggttatacctaaactatgttgtcgcttgttgccaatttgcacgaggttaccgtttacataagttatccctttaggagcgcattgcactctataccctcaccgccaagcatgcactgggatgcatgctggggtatttgaaatactgaatattgtacgacagatactaacagttgtgctatttgaaatattaaagcacagtacggcctgacctggatgagtttgtcttacatgcattattttcaaagttccaatcactctgtacctacatgttggttttcttcagtgacgtggaaagcttaatgcagtgtctaaccctatggcatcagccatcataaattagttagtgccttggtttgcttcctcgttccaaatgccctcaaatgtatgcccaaaaatattaatcattgatctagcgtagaaaaaaaaagagttgtaaaattgatacttgtcagtgtcaggtaaagctgtgttgttattgctagagatttgaaatgagtttgttaatgctagccgtcaatatcttgaaggaaaaggcatcagctctcacctgctcataagaaagaatatcattttaaaagaaactaacttgtaaatggttcgaacctgaaagatgttcaacctctgacaaggacataaggacaagtgactaaggaaaaacactattagtgcttcagaaaagctccctgatcgatgcatgattattgagattaaaaattatctgtgacagcagcatatgttttagctgtttggatcctttctatcggcgctacttgctttctgtcgctctttggaaacaacaggtttcagtcaactccctgtaactgcctggtacgacaagtttcttc

SEQ ID NO: 176586 - DNA, 437 bp, Zea Mays
ctcggctgatttgtagaagtgggggcagtggtaggacgaacgaaaacaggttgttcgaatggataggagggtggacgaggcgaagaacgattctgattaaaaggtcggattaccagcctggttcgcttctcaggtccctgattggacatgtcacctccaaattcctttgattttccctggcctatgttcttggtttctactgctagcgccgtgctgatagctctgttgtaagtaagatccagacaggtggccattttccattggagtcggtcgttgagtcctctcatgaagccatttttcttctttaggtcagtgtttactttttcaatagcatattgggacaaatggttaaacttgttgagatactgcattacataatctcccccttgttttagtcgaatgaactcctcttgtttcatgtgaagcactccctttgg

SEQ ID NO: 176587 - DNA, 863 bp, Zea Mays
ggcccagatagatctaggtaacaagggaatcgatacgcgtcggccgccctcagattgaggatcaatggccacgatctaaaattcccccgatcaaccctactccgtccgattttatccaacgatgtagattccccgggtcgaaacgttatttcgattctaatcgtcaccgttgcttgcgatatcaacggccaaaagatctcctacccgcggatcctacgccggcaacggagcaaagctcccccacggcggcgccacgccccaacctcgccggagtcgtccggtctcgccaaccctggccccattttctaattaaacaggcgcgatagcactactaggccatggcgagattggagaaggcgttctcaccggcaatcgatgcaccgagatagtctgcccatggcgcagaacagatccggttgcgcggcggcgaaattccggtcacccagtggtcctctccttccgcccagacgaccagtagctctgtggggactcggcgaagcttcccgcccaggcacaatggagttggcgctgcactaacacgcaattgaccgcggcggcggaaactctcccttctgcccacggttcacttggtgactgggtactcgtcgagatggttaagggagctagagcggccgggttatatagggacagggtgaagtccgagcggagcagcagcgagatcaacggcggagttcgcggtttccgggggtaatagcctacggtgacttcgggttcctgtttcacgcgcggcccacggggaagacaatcctgacagcatgggtccaccaaccagagaggaaaaccagagggtccgagcgcgaccgtacaagcggtcccacacgccagagccaccgggatgacag

SEQ ID NO: 176588 - DNA, 545 bp, Zea Mays
tagatccgatggtaaggatttaatgagtcgagggtttaacgttcatcactggatcacaaatctacggctgaaatcgtcccggtcgaaacgttacaccatatctaatctctaccgatcatcctgagatcaacggctcacgctggttcaaatctagaccgtccgataagatcagacggcgcactctgcttctccctaacccgagaactcgtcacggcagatcgacattcccccccacggcggcgcgctcaccggagaaccacccaatccgtcgatccggtgaagctatcctacggtgatgtgcaaaaaatgaaattgcagctagcgtgagtgcgttaggggatggctcaccagggatttggccgcgacggtacccagtccacggcacggggcggagttacagcggtggcgaggtacgacgaggaattccggttgcgccgagtagtggttttctggtccgagcgcgcgtatggctcgcacgtggtccaacgatcaccctagacccgatccacaggcctcggatgaccccacggcgtgccgcaacggcg

SEQ ID NO: 176589 - DNA, 1061 bp, Zea Mays
tttggaaatgagcttaatgaaggaatggattaggcttgtcggactatagtcggccacttcaatagctccctttttggagtgagtattacattggcggtgttgacgagtgacaagatgccacatcgtagagcatgcaaaaattggtcacatttaggatatccccttttattatgttccagcacatgaattatgtagatgatatataaacaaatatgaccttgaaggaccagtgagacgaccagagggggtgaatggaagccacaaaaatttctctactcgatatcaccgtgacttgatcccacttcaatccacaccctacgggactcacaaaactgcgtagcatcatgcaaatcattccagtgtcgatggactgcacctaactactagaaaggaaccaactcaactgtttgtaaaaaactagaagcaaaaccacagaaaaaagcaagcggcagtgcctctctaaaggtcgatagagccggactgtgacaatgttgtgcagatgggtggcagtgtcatgcctctaaatctgttcagaatcctctcaaatttcatggataacaagcacaaaggaaaagaagatctttcatggattttgaactggaacaaatcaaaactatgtgaacagattcaaactctcgttttaattggggttttgttgggggttttctcaaacaaactcaaaacgaggtgaacttggatcacaatcacaaactgcttaaacttgatgtttgcaatggtctagagagtgatcttcaccccaaggcaatccccacacaaaccataactcaaggaatcgaaagttctcccaaaatccaaagagagaagaggggtcgagagcggagacaaaatcaaattgaaaatgtagctaaacaaaactaagcatgtgatttgagcaaatgctagatgacatgtcgttatggccacacttcctctcaaaatcacgagtacatagatgtgagaattacaaaacacctatggatctcagggcaagacaccagcagactagagaatggaaactagggttttctaagcaagtgccaaatgaaatatccgaaagtgat

SEQ ID NO: 176590 - DNA, 636 bp, Zea Mays
ctaggatcggtatgacatttggaaatgtcgatgaggcatacaatttttacagtcgttacgcatatgaggttggttttccacttaaaaagtatagggagagaaagaactgtaagtggttaaattgttcaatggagggtagaaatacagaaaggttagctagtaatccaagaatttgtaatacatcatcgaggagaacacaatgcaaggctggtttgaaactaaaaaaatctatgatgactcaaaagaaaatattgtagctgtaagaatcgatctggtccacttagaacgtaatcatgatttcattaagaaggatactgtaaagaaacacctacaatgcaacaagactcatgatcctgagtacatggagtttctcagttcaatgcagcaaagcagaatcccacaacactgtatcatggacttcgtgtctgagatgcatggtggtcctgaaaacgtaccaattacagcaaaggacattgctaatttgtaagaatcattttctttatgaatttattatataaattttaaaatccatgtcaacttaatgagtaataattacaatttttttgaactatacaggaaacaggcaaagcaacgagaaaagaatgccaatgatgtgtctaagcttttggctttttt

SEQ ID NO: 176591 - DNA, 337 bp, Zea Mays
gtcccctccccaatgggtgtaaccaaaggacggcttggtgcgctgagcgtttagcaaactgcccttgagtagtaacttgacgtgaccgcggggtgtaatcatatcgtccaagcagttgacctcagtcccaatggtgtcatgttacgtgaaacgacgtctgtcgcctgacttgtttccagacgatttgaatggcttattgaatacttgcgactgtttagtgaccgtggtaggagatgagcggttgcctcccgcctctataaatagactgcctgcttcgctggtgtcttcacacatctcctggccatttgttgcttattctcccacttttctcttctct

SEQ ID NO: 176592 - DNA, 540 bp, Zea Mays
tgagctaattgcattttgatgattttatgcataaataaactaataatacacaagtagcctaagaaatgaggcgcgacatatgtacacataatcctcaaaaaaattttggactcaaggagtgactaaatgattacaacaaccgtaatatttgtggaatgttgtcttacacggtatctgacacaaaaattcgttaccaacgatatctgtgtcagactagtttcatattcgacacactattcatatttgcatctgagaacatccgtatttgtatttgtatccgaagctatccgtatttgaattcgaatccgaataaaaatatgaaacaaatatggtttcaatgatatccattcgtatttgacttgattacacccctaacggtaaccttgatgagaggttggataaccgatgaagacacatggtattagatatgtatatacaatttaattcttgcctagcataggtgactgtttttacctagaataggtgattgtgattgccttgtataggtgattgtggctgcctagtataggtgattgtaat

SEQ ID NO: 176593 - DNA, 350 bp, Zea Mays
ggcgtcctgccaatttgcctcagagcgggccgagcttgagcaggagcgtgaggacttcaaggaggacatccggaaggtgtctgaccgagaggaggaggtgacccggaaggagagaagcttggtcaagaagaaggaacacttagaccaaaaggaggaggctgttacagcgctccatgataagctgaaagcttataacacagtactggagaaacagcgggtcaagcaggccgcggcagaggtgaagctgcagaagctgcagcaggaacttgccgacaaagccagcgacattgctcgcatcgaggagagcctcaaggcgagggaagcttccttggcgaaacgggaaactgacc

SEQ ID NO: 176594 - DNA, 570 bp, Zea Mays
cccccgttagaattcggcgaaggaccaagtctcccactacaaaggatcaatgtcgtatggccttgtcatgatagcgcctcagggtttgctggtatctagctgactgaattactatattcaatagctcttcctccaatacgtcaatgtcctctaatctggtagcctctgcttcagctatgctttcaaagaccaaccttggtgccccaaacctgagatcagcaggtagcagtgcttccaaaccatagaccatgaagagaggagtatttccatgcagagctcgactagattgagttcttaagctccaaaccacatacgacaactctctgatccattttcctgcaaacttttcattcttgtcaaagacttccttccttagtgcttccagtatcattccattagccctttctacctgaccgttagcccttggatgtgctattgatgcatatttaatctggatgcttcgttgttccgagaaatcaaagaattcagagctagtgaaattggatcccaggtcggttatgatgctattcggtatcccaaacttaaatattatatcttgtatgaactcca

SEQ ID NO: 176595 - DNA, 700 bp, Zea Mays
gcgccactagatcttcaccctctcgcgcatcctcctcaacaaacaaccgagacacaggatacaacacatgtgtggtgtgcagaagagtgattccctttcgcccatgcaatttattgtcgtcgtcatgctagtgttcagctagccgttctccacatcaaagcaggctatcattactcgtgaggccaaacccaccgcgatcaagcaccaatgcaacacctttgctgacgatatcatcttatgtgcacacctagacattcatgtgttagagctctagcaacttagctagtaaccctagcaactagaaacgatagaacatggagctaaacctttagtgttgggagaagatgccatggagtcggagttcgatgatttgggtgcaatgaatgtgatggtgacgacattcccttcaataaccatgtagagattagatcgaatctcgtgagagtgtgcggtaaaagatggtgcaatgaatgttggttcatgtgtcaaccccgtgtctatttttatacatattaagaaagggggtcaaagccaatggggtatactttatgcaagaaaatgtagagaagctcgattcatcctctctctctctctctctgacatatctgatccttttctggaggatgatcacggtgatggaggaggaagggaatagcaagcgcaaccaccttgacttcttcaaaaccactgtcatatgaag

SEQ ID NO: 176596 - DNA, 811 bp, Zea Mays
ccgatgtcgatggagtagaggagggcgtcgcagcatgtggaagtagggttttgtggtgtcgtctcctggcaggagtgcagcgccacactggtgaagtcaagcctgcaactcagcgaggagcaagcaggtgaagacggcagcagcaacaacaacatgatggtgacgaggagtgaaacggaggaggaggccatcgactgctctagtctgtactagtgggtagagtagtggcgattgtgacccgaccgtccctatcgattgagatggtggtgcattttatagcccatgcaaacagccgggcgctgcagcgtaggcatgggtcaaccctctctcgtttgatcggggacacagagcagagtagagcaacacagagcagagcagagcagctagctagcgtccctctcatcactagtagtactatcgtacaaccagcctagcagtagcagactctcatcattataataccactaccagcccagcagcaacactgcctgccggctacgccgctgctgcattcccacatgcttgagcaatttgtagatgtagggagggggaatcgcatcaaaagagagctgaggtggagcgccgagacgagaggatacacgacatgtccatctcacctgttctaatttaattagtatgcgcgcggttgtaataataattaattaattcagaaattgaggggtggacgaactggatgctacctcacgctttggccgctggactgcaaaaccaggagtagtagacacaccatccgaggaagcctgcaatggccacacatgctacgactgcgatggcagctatggcacctgat

SEQ ID NO: 176597 - DNA, 618 bp, Zea Mays
ctccaactttgctttaatgggtaccaactaagattcaacagatttcaggttagggagctccaaggttgggtcaacaccaccgaactgcacaactcagcgaactgaatttaactcagcacacctctgtctgatagagcgggtttgagaacctttttcgctcaattcgaagtaaggacaggaagattcttccttagaaaaagtgttcccctacaatagatctccagatttgccataatacccacagatcacaggcgcaaggattagaagctaaacagcgctaaagctgagaggaactcactgtctttctgaaattcagcaaactgaactgagtccgattgtaccatgcctctctgctaagccgcccctaaatctcatgattccaaataataacaggccgacctcaattaataaaacttgttcataaaacataactctacaaacttgctacagcgaccctaggtcaaaattttatggtgctccaaagtggggtgaaaactctaaaattcagctgcatctaactgaatcaaaaactgaacgcacatgcctgacagagaatcgttgggcacaatttactccattttgtgcagcaccaaccaaaactttattaaggaaattttc

SEQ ID NO: 176598 - DNA, 716 bp, Zea Mays
gcggtgactgttttggcgtcgaatgtcgaagaccggttccgcgatcttttttgacatccacagtcgtaatgtcgtcttgaatttttttttgggggggatttttgcggtaatttattacatggcttcgcctcgttaaaaacctcaccccctgcgaggaaaagaatgcgggcccgactgagatagtgtctgcgaaaattacaaagtcgtgaagaccttgggactagacgaagaattttcgtaagttatccacattccatgagtgctctaggtcttcgccggatggtgaagcgagcctgtaggcgttgggggatgtttttgtcttgacgatgaagggcccttcccatttgggtttgagcttgccccgggactctgttctggtggttctggtgaggactaggtctccttcctcgaattctttggggatgacagtgttgtagcgccatgccttcatatgcgcttggtatttatttagtgcctctagggcaagaacacgatctccatcgataaggtccttagaggttgactcattgacattaggagtgattgtggagctcgctcgtggagatccatgcttcagctcttgcggcgtcattgcttcgaatctgtacataaagaggaaaggtgtgaacctggtcgctctggattctgttgtgttcagtgcccatatgacttcgggaagctggtctgcccattttcctttcttgtcgttgagtagc

SEQ ID NO: 176599 - DNA, 843 bp, Zea Mays
caccatggcatcaaaatcacatattaaaaggtctagatctgccatcgttgatccgttaggcaggtcgatggcatcatggaagttaccactgaagtgtagctacgtaatggtaagagccactaccacgccccggtgaacctcgaactccacgacctcacaaacacagtctgagatgtcaaggaggcgcaaatcacaattcctcccatgagcgcaaacgaaccttgtggtcttatctgggcacaagtaaaggctcaaagcttcgagttccaactttgtaaggagtacgcagacaattaggaacctaagaagacgggaatctgggaactagaccacagatacttacctgcctatgattcactaagagctaccaggcacgcccaaaaacatcgaacctcggtggtagccgcctccaaggtcatgcaagccacgcccaagtcccttcagaggtcatccacagaacatcctatagatgccggcggagtagcggatagggcacaaaatcacgacactctcgcaccccaggaggtcaaaccaccaccctaggggaaaccgagaacatccagggaaggtaagaggggtgaaaaaagaccttgtgagaggcagaacaatcgtaccatctcctctagcgacctctcctagaaagtccaccttgatccacgaacggagggcagccaaaggaaggcacgggctaataaagaagcccatgaggtgtgaattgatagcatgatcgcttatccgaaagaatgcccccttcttaaagggggcaatgcttgattaggcctacaaagaaaaaacctcgggaccccacgacaccaccatgaaaagtcgaaaaacaaaaacaag

SEQ ID NO: 176600 - DNA, 796 bp, Zea Mays
gccacttcaacttgtgatcgagggcatagtttgaccatctcctgaaaacagactttgggactagttcacaaagttgaaccgatcccttggggcgctagtgttggagcaaaggccgaactcggcctcgatcagacttatacggtcactattaaccatgtccgatcgtagggaaaacagcaatggaggacttcgccttgtgctagcgacagagtcctcgaccacaaccattgcagaagactgagcgatgtgccacgcgagaagagggggctcatagtaaccctcgccacatgtctcgaaggctcgacttcaacctcatcagtggagtcaaagacccaacaaagtcaagggttagaaatacatgtgaaggcttcgagatccctccatggggcctaggcttcactcggatgtggctcaggcccacttgtaagacccttagaggggtagactttagggtatgtttaggtcattgtactttattacactataatgaccccattgcggggaatattttgggaatgtagcgggtaaactggggtataatggtacttgggaccacctaccgcccggttacctatagatattcacgttctacacggatgggacacacataataagacgctacagacacatgtctattgttttattgcgcacctgagccatgtctgtccccgagtgtttgggtccacatgtccacatattagatagtcccaacaaacatgttgaacaaatattagggcacatatgtttcttggcttggacctcctcaagtttcatcttgattccccaatgagatact

SEQ ID NO: 176601 - DNA, 1454 bp, Zea Mays
agctaaccaaacttttgaaacaatattgaacagctgtttgactttgacaaaacaaaattatcttgaaagatacgacaatgccaaacatatacagacaaaaatctctatatataattacctgtctaactgataccggaacctttttgttgctgccagctgccagctgcggcctcatatcaaccggaagttgtgcctaagaaaaccaagtacatgagtatttgtagggttgtaaatgaactttagaaacatatttaaaaaattggcacataccagtagagggaagtttcccttaagagcatcattgcctccagtttgatctttatttgtaatagaactggcattttttcttgccaggatctcaagagcccattttcttttgtcctgcttgatatcaccagaggattggtttctcttgtcctgggagggctggctatttctattttctcttctgctaggtgcctctttattcagaattgaatagcttgatgctttcccagtgctgctgggtgaactgattttcattgtctcgttgcctcctgcaggtatgctagacgatttgttacaactagctttaatttggctacttttttctaatggcgcacatcctgcaagggcagagagaggcctaatatcatccttcctgggaacaactgatgcatcagctaaatacaacctagacaaaatggaactgttgttgttctcttcccttttccccttagcactttccttgtccatttcagaggatttctttagtagctgaagtactgattgcaatgtctcaatcttttcaggatttattcctggggagcaacggtatttccagaattcaacttcccaatcacgatgccaatcgcttcttcttcttcctgtagatgttccatacaactttttggtcaaattctcacgtttcttgcccttctgaagcaatgacctccttgttcttattaattgattggtgttagtacttttggctggtccatccactgatttccctatagctgcccggaacgcagtcaacagtttttcatcaaaagattcatccttctcaagtatatttgtgcctgtatctctaactacttccttaatctctttctgtagcttttgaaccaaggcagatgattcttttccttcttcctttcggaagatctttttcactctaggaccaggcttatctcctgctcttcttcctacaggtttagccagctctctaccaggatcccttctgtaaacctcaccgtcaacaatgctcattatatcaggaatggatttctgttgtgcaacagactctgacataatgtcgtcggtaatagcttttgcaggactagtagtatgactatgtattgaagaaaaatcaaagtttccgattacattaatgtcctcttgcacttccagttttgctttcttcgcaggatggatcatttcatttccagattcaatgtgttcttctttcctgt

SEQ ID NO: 176602 - DNA, 488 bp, Zea Mays
gaagaggcagacttgttggacagcatatgctaggtccggtctggtcagagtgaggtactggagggcaccagcgagactcttgtactctgaggggttggcgactggagcgccctcggaggcagacaacttggtccgagcatccaccggagtagctgtcacgtggcattcagacatgccagcgcgttggaggagatcaacggtgtactgccgctgggagaggaacagtccactgctgtcccatgtcactgagatgccgaggaagtggtggagatcaccgaggtctgtcatggcaaactccgaggagaggtgggaggtgacgtgctggagaagagtcgatgacgacacggtgatgatgatgtcatcgacgtagaggaggaggtaggccatggcgtctccagccttgtagacaaacagggaggcatccgatttggatgtggtgaagtcgatactacagatgaagttggagaagcgttggttccaagctcgcg

SEQ ID NO: 176603 - DNA, 442 bp, Zea Mays
gctgacagcatgagccgcgctgtcgggcgcacactgcgtttgtgtggtgcctagcgtcgtggtcactgccacgcgggcccgatgcgctgggtagctgacggttggtccagttcgtcggatgtctcttctccagctgagatccgcgcagcccaaaaaattcgcaatctgtcgtcgcgtgatctccgattgctttgctggggccgttgcaccaagccgctgatggtgggtcccgtcatccaggggttcttctaccgcgcggatctcgcaacggactcggactcggttgctcaacggtgccagcaccatatccgcaggatttgcgtcaaccaacgccgcgtccagggcggatcgaacggagtcacgcgattgttggatccctggcatcggggtataaaacccgtgccggcctgggagtttctcctcaataccctgctggtgtccg

SEQ ID NO: 176604 - DNA, 676 bp, Zea Mays
ttttcgccttttgctctaatcattagctagtggtgttcactcttttttacctcttattgagggctagccatttttgcttggttgtgttgagtcattgcccatgtctttggaaatcaagctttgcaaatctctgatgactttgatttggcttttgtctggtcttttgtcatttgagtgagttcttcctttcttccttctgcattgttctttgtgtttttgtggtggtgttgataatgcattcatgagggggaagattgtgaatacaaggttgatatgtgcccttatgatttaggtttgtggtaaatgattgtcaacggagtagcttcttgggttgaatcatgtcaccaggttatgaaggtgagtgcaacatggtccttgacttgtgttgtacatgtgtgacgtccggagatggtggtcgatggcaaaggtggtggtcatgtaggtacatgtcgatggaccaagagtggtgaaggacaagcgatgagtcttgactaagggactagagaagctaggtggctagccatggtggctaacgccgagggacaccgatatatgcaaagatatggcaaagcaaatcatgttgccgatatggttgacgaccgacaagacacgtgtccaagatgaggaggacacatatggagtacgctacatgcggaggtttggtggttgagcctca

SEQ ID NO: 176605 - DNA, 871 bp, Zea Mays
ggctgagattgtgcccctaatcagggcttagctctccctcaacccctttgactgagatgagatcaatcccaatactctccccttcatatcgatatctctgcctcttttttctagttttcccacttctccatagattaatacaaagagaccaaagcattacataaggttttgctagtgtttgccatgctacccctagtgcccttatatattgtagcgcatgtggttggggctataggatcactagggcatccgaccaaagtgagggaggggtgaattaggtcgataatccccttttctaacctagggcttaaactctagtgcttagaataaaacctaacacgtccgacacatgctagttaaaactaagttgtatcgaagcactactctagacctaccacaaagatatatgcatcaaaaagtaatgcagtaagtaaagagtggggagtagaaaacaaactctcgagtagacacgtgatgcaacatggttctccacaaaagtctacgtcaatgtgacaccaaggctcttctgatcagtgtcttgctcaagccaccaaggctttgggcaagcaaaagctaattgccaccaagccaccaagtcttggtcactaccaccatctctctcggccagacggatgaatccactatgtagctcaaagggtctcctcgaccccacacaagattgacatgcactccacagcaagtcagagtgtcaacgacgagtgtgttgggggccttcctctttcgaaggtcctaaaaacacaactaactatttgcttccaacatattactaaatactactagagcttcataactataagagctttggcatagcaaaagagaactacaatgaagcacgcttcatcaagcagga

SEQ ID NO: 176606 - DNA, 334 bp, Zea Mays
gaatccgcacgcggctcatcggcggcgagggactgagctggcgatcgaatccagtcactgtacaattagaacctctattcagtcagcctgacagatcaagtttgggctggattttctcctgattttacatggcaacaaggccatcgttctatagcaaagttgtagcctaatgatccagctaaaatcttactacagcaaccattgccaactactgactggattataatcaaatccaagctcaaagatgtctcaaactcactgtcagtctgaattcagacttaagacagtctgacagttaaactttaggcacatttttctccaatttctgttcagt

SEQ ID NO: 176607 - DNA, 1035 bp, Zea Mays
aaaaaacgcacacgaaatgcctgtgtgtcggccaattctcctaattgtgctaaaaactggcctatgtgttcgcatgtactctttccttgatcacctgaaaattttgtgaattggggtatcctagttccttatgggtatgggttgtggtcaaatcggttgtcataaggtctccgatatgactgccccccagggaccatgcttactccgagcttatctcggaacgccccggctatttcttccctcactatatcaatggcagccggtgtgagaccaccggctctctagtcaaacataggtgaggttgattggatattggcatgttgtcttcctccccactagtttgggttttgcggtgcattactatttaccctttatggttcataggactgaccattcctttccagccttttaggtggagccagatagtattcgccaccacgggcttgggacgctgtattaatgggctggtgcattgtatattgcaacgggaactgttgctgagacgaatgaggatttaggtaacaattctcctcaaacatccctgcgccggaccgtccggtcgaatacgcggaccgtccggctgcgtgtgcagaatgtccggccatgtggctggaccgtccgtggtcgtatgtggaccatctaccattgtatgcggactatccaactatgtaatctagggtttgcgtagtacgtggcggttcgggcgcatatcttggtaattcattaaaaataggatcggccgccactggcccaggcggtcctcgctctcgtgcggacggtccggacatatgcagatcggcgaatttatcaccaatatgcgtaagatgctgtggctacccagggtacgtgtctattggcattccataaaggggttgtgactggtcgtgacaacctatagccgatgaatcacgcgtgttttcccctaactcaacctcgtgcgaaggacaatttgcaatgttagatttgtcaaaatcatgcactagccttttataatccttttgtataccctacgatatgttgcatttgctctcgctg

SEQ ID NO: 176608 - DNA, 1578 bp, Zea Mays
gtccaaactttcacggcgattcaaaaccacatcaccacgctctctttgccgagatcccctccactcgccatcatccaaacgcttccgtgaaagatcttcatctctatcattcctatcaatgggcctcatcttatttctatgccttgcaccaccttcaacattgtactccagcctcaaatcttcttctttagctcgtcggctgtgaacaccatcatctctccttggcaaaatttctgtctctcttaccttatcataactcctaccccgcatgtcaacacgatctctgtttacataagattggtggatatcttccctgcctctggagggtaaatgtgatctttccaaatctgattttacatctcgtgagtactcatctttccggcgaagattgtgttcttctgcgtcatgatgccttcttgcattatttactctccttgattgcctatcttgaagaacctcttcacccaattcaaggcgtttctgctgatctttgctgcttccagacatccctttactattttcattagttctcaattcaacaggttcactgccattgtgtccagtaggttgctcaaccccagctatatgtttctgctttttatcagagtgaaccaggtcatcatcctcatttgcatcactaggcatgttggggtctaaagtagcatcatcaccatccacttcaacactaccaaccaatgtggcatcatcatcatcaccaccaccaccatcaaaatgatcttctgtactcagtttatctgtcgtgttatcattagcagcaagtgatccttctgaatcgccctcaacaaggttctcattccgggaatcatggcgtctctctgaagatatttgatgaggtattatgtcgttagagctttcaatttcccgaatagaattctgactcagtgaacttcctttcaatgaccttaggaaaaatatttgggcaagtgttagaaatacaactccaacgaaaatgaaaggatgaaggcaccaatactaagagatactaaaacaaatggagcaatcaaaacataagaaaaaatacagaaggaaacagagacatctccctccctccctttgaaaataaacattagaaaacatatatacaacaataacaaaaccttttagttcaaagcaagttggggtacaacagagttaaaaccccacaaaagccataaatcaaggttcagacacattgatagttgttttctattcgttctaaatctttgggtatattctatccttttaagtctcctgttgcctcttcccatgtaaacttcgtccattccctgcctctttccattactattgcgccatgagatcccactactcgtagcctatcacgtacatcatcgtttcaaactcgatcccttcgtgtatgaccacagattcaagcaacatatgcacttctgtaacacttatcagctgaacatgacgtcatttctaggccaacattatgcaccattagtcgttgcccgtgcattgccacagcttctatatatatcatatgagtagactttgttttgataaaataataagacacaaaaaatgtgtgttcttcggacaaaactctaaagtcct

SEQ ID NO: 176609 - DNA, 708 bp, Zea Mays
ttttaacaatttgttttgctgaatttaaattatgttaatataaaattgctaaaattttacttagtatatacatacgattgatttgatacttataattattattatttcttacactactatatacacggtcttgttggcccctcttatatcttctttctggctccgcccctgactccatcgtctccgtcgagcagtgctgagttgcgcgcgctcttcttcgaagctcaagctcgctggagaagtgctcgccactgtctccgtcggtctgcagtcgcatgtacgcgcggacccgcgtctcccgtccacctcttgccggtccgagaccctcgtcgagctcgtcttccgccaccgctcctcctcgtcacctcgccgtgcttcttcaaccaccaggtgagccgccggcaggagcccaaatctctcttcccctctctctgtaacgatggaaggagaaaggggcaaggaggagaagaaatagaagtgtgggaggatttttacgaatgcagtgactcacataaatagtggccgaggatttaaatgtaggggtttagtttgagaatagttcaggggtctctgtgcatttgttcttttcttttttttcgtttttctttgtttaaccagctttaaagctttggaaaatcgtaacttgagttctaggacttcaaaaatagtgaaacaaaatttgtaaagtttcttttgaatggatctaca

SEQ ID NO: 176610 - DNA, 639 bp, Zea Mays
ggccatgtgatctctagagagggggtagccacagactctacaaagacagccgccatgttggcttggcctagaccccagaatgtgtctgagctaaggggttttctaggacttacaggatactataggaagtttgtgtgtgggtttggcattttggcatggcctcttacccagttgttgcaaaaacagcatggattcaaatgaaatgaagaagctcaagcagcatttgaggctctgaagaaagctatgtcatctactcctatattgtctttaccaagatttgatctccttttgtggtggagacagatgcatgtgagaatggtatgggtgcagtgctcattcaacacaggaagcccatagcttacatcagcaaggcattgggagaaaggaatagacacttgtctatatatgataaggaatttttagccttaattcttgttgtggagaaatggaggtcatatttgcaaagaagtccatttgttattaagactgatcataagtcgctcacattcttgggagagcaacagttatagtcagaactgcaaagaaaagctatggctaggctaatggggctgcagtttcagattgtttacaagaaaggggtagagaatagagtggctaatgttttatcaagagtggggg

SEQ ID NO: 176611 - DNA, 464 bp, Zea Mays
cattgaagtcttttacttaaaagacactccgcgcaaaagtcgcctaagggtgcagccagaatagcacaccaagtgcgttaatcgaagtctctcattaaaaagacacaccgcgcaaattcgcccacgggcgcagccggaccaacacaggcgtacgaatacggcaaacaggccacattaccatataaattacaattacaaacacacggtgagggcatcacatattacattggctcaaccttcaggatgatacccatctccctgtaattaaacaacattatcctcaattcatcaccctcaaaaagcttccgaagatccccctcgcctatgctcaccccaatcggcgaggacaacaattcttgtttaccaacccggtctactcggagacggccacgctccatccccatacgacgacgcctgccacttcgcgaaaactcacccacactatgttttcccaccacccttcg

SEQ ID NO: 176612 - DNA, 767 bp, Zea Mays
gctgacaggcgggccaggggcgtcagcgactgagggggagagcgcactgaccgatcgggcccagcgccagggaacaagggcgctgacaggcgggccaggggcgttaggcgtgcttgcgcgaagtggtatccgcgatctgggccatgcgatcaagatcggacgggggagatcagaccgggggggatgaacagctgcgggcggcgctactcctctctgcggcggtgagatcgccggagtcggccggggtcgccaggattgggcagagagggagagaatgtcacgacgaactcagtggcggggaagaggccacgaatccgaggacaaagaggggagaaccgcggggagaaggccttgggcggaccagaggaactccggtgagggtttccggccacggggaggggcttgagttgcgctaaggcctgggaaggcttcagcagaggcaggggtgacacagggacctacaccggggcactagaccgggctaaactggtcggccaccgtgctggtgcggcagaccgccacggccgagcaccggcgatgccaaaattggccgagcacagagcaaaattggggaaattaagcacaggcaaaaggtgtctcacctcgaggtggcttggcgcggtctctagtgagctagatggccggggaagcgggcgcgggtctccggcggcgtctggcggcgtgggcagagcacgagagagggcagagctgtgcgaaatgaggcggggaactgagtgcgtgcactagcggggctctaagagggagct

SEQ ID NO: 176613 - DNA, 427 bp, Zea Mays
acttaccctttaaaatcgcccctcttccgtctcattctgagagttgtactttacttatctttcccttggtcatatcctcttctttggcttgcgagtttgtaacttcatcctttgttgtgcttttgtttgttattgcctttaccgttctcatctctcgatcttaccttggtgattaccctatgcccgttatctaaaatcgttgatctcccatctcagttcaagagtggcgtcttacttatctcacccgtggttatctcatattccttaccacttgcaagacttatcttaactctattcttggttgtacttagatccttggttcttatgcacatttacctcttcccttacatccttgtctgttatcacctttaacccttgacatctctcggtttttaccatgacacttacccacatttcaaagcctcac

SEQ ID NO: 176614 - DNA, 508 bp, Zea Mays
gaaaacgaccaccagcacacacaggcgcacacactcccttccagactctaggccacgaaccaacactccagaaagaggccgcttcagatggtcccgatgtcagacacctctccaaccgccagctgggagttactaagccattgcttcagggaactgatccagcacctcgccttctcctggtctttcggctttgagtaagggagtcccaggtctgcagaaatgatatggagtatacaagatcacaggtggactgctaggaaacctcctctcgatcgccatcctattccgattacaccacatggcccaaaacagacctgcaaacatgaaaaggtaaagagtacggccccccttgagctgagggactacccagttcccaaagaagtcttccatcgatctggggggagggtccagaccagtggcggagcgcacaaagaaaataaggtatggccatggttccattcagcgacattgtagctggtagtcgcagtgcgagcgcaaacttgtgtct

SEQ ID NO: 176615 - DNA, 922 bp, Zea Mays
aagagaggggtctgtctgctgaagctgtggttactgactttgttttcaagaatattcagcctttgaaagacagggcctacccagcttatctgtatcgagggctagccgactcaactcgggtcactaacagaagaattccctctgcagacttggtgagtcgactggagatgatccttaggggtaaagtgtaaaatgttggtgctcctgtggcatactcggcctggaacctgcctcctcccaaagccttcaccctttttgtgtcgaatccacctattactgatggcagtttgggccttagagtgcgaccctctgctgaagaagttagtgctttggttgcctcgcttggggaggttcctgatgacgaacgacaggtctattttgaggtgcccctgaaccctagtgatgcagagataagcgctatgcttgatttgctggctgaggattcttccgacgctgctcctgctggggtgttggtagtggcgcccctcccggaagctgatacaactttggatactcagaagcccgtcagtactcgcccgaggcgcccttgccgagccaatcagcctgatccttctgctgatgagcagaagaagaaaaggagacgcctccggcgagtatccagttttgatcgggacgctggtacctcagttcctgctactgaagaagtgcctgcgactggatctaccgatgctgaccccaatgggtgtacccaatccgctgttgatcccaatgtgggtgccccatctgttgccgatcccaatgggtgtgctgcctgtgttgctaatgtggacgatgaggaggaagaaaatgagattcctttgactcggaaaaacagtcggcagttcattgccagtggtgaaagtagtggagttccctctcctgctttgtctgccctcattggtctgcaagaactgtccctggc

SEQ ID NO: 176616 - DNA, 622 bp, Zea Mays
tgcgctcgctcgatcctcatgactactggacccgtgggacgttttcgagtgcttctccctctttcccctaggttataactgtggccggacaccccccgttacctagtcgccctcccggagtctctcacggaagccggtgaagtgcagacgtggggaagaagttcactgcgtcgcgtcttggtcaaagaccgggtttgggaagccatagcacctcgagtgtgtgtcgcgcaagttggtgtcgtggctgggcgtggtcggaaccgagaaccggagctcggcgttacctcggctttgtcccgcgcgagggggattggctccagtaccgcaccaccgcaggtatggccacttctgtcgtcttcgttgaccagtccttgacgtatggtgagccgcgggagagggaattatacatctgcgggttttgaattgctcgtcagagccaattgactctgtggcaccgagccacgccgtgggcagggtagtgccatcactcaaacattaaatcgggggtctcgtctgtttcgccttgcgtcaggctgtgtttttagccaccggccgcgggtgcaggcgtcggtgggtatcgaatcgaggaacgctagtgtggtcatcgccatgaacacggtgg

SEQ ID NO: 176617 - DNA, 796 bp, Zea Mays
ccacgagatggtatataaatgttatatataggaggctaagaaatggataagaagttaaaagaaaacaaatagattttatgatgtggtgccatggttgcattgttttagaaaaatcgtgtgttgtgtttgaacttcacaagaaaagggaacatactataaacagagttagggttgggaggcaacatggagagattttgttatgccatgttttggaaaaggctagcctttaacatgtagttgctcttgatcttaagagcacgctccaggaaacgatagccactggtctgtcccatcaacttctgttgtagcattatctcgattgcattcatatgctagtttagtttggacataagttatcgcccactgaatatactggttagcatgtttcaatatcatgctcaatacattcaagtgaagggtacgggcagctaacatgcatgttctataccaagatcattgtacaatgaggttgctagagtatatccgttttgtcgtatcccgaattcactttctttgaaaccaggatttcatgtataattctatctattttctctgtttgttttatatgcattcaattcatattccagatagtgtagcaactcatctttatttcagacaacccctcttccccctcctctattcagaatcgaactgattatatcattggtatatatgcaaatcaattgaaaccaagtataacaaatcaaaaggttctattatgcggttaaaacatatccaatggacatccttcctccatatacagtgcttccatcgagttaaaacacatctcatgcat

SEQ ID NO: 176618 - DNA, 1037 bp, Zea Mays
gtgaggtcagggaggcttcggtgatcacgtcgatggtctggtcgtggacagtggtggtcgaagctgctcagccctcgcgcgcaggtggtggtgatcggcggtggctccgaattccgatcaacggcgatggtagagttaaattccactgcctggggagcttcacgggaggtcggtgatgctctggtgcaaggaattgggtggtgttgtattgggtggctatggccacgttcacaggcaggcaggtgaagtccggcgagtggtggcatgttgatggaggggagtagagggtgaatgggttggcctagaagcttcactgtgactcagggaagctaacggtggacctcacgtggttgaagggtggctacgtcggtcgaaccacagtggccggcgctcgggtaacaagggcgggtggtggcgcgctcagctgcagtgaactcccagcaaagtgggcttggcaacggtcggggaggaagagccgagggcagggcgacctttataggcgcgggtgtgcgcgcaacactgtgttgcccggccatggtgtagggcatgaactcaggcactggttggcgcacatggagcatccaatggcatgctctacggctcaggtctgtagccgaacagttggtttatggtgtttagtcattttcaaatgcccataggtcgtgaatccgggcgaatttgggtaaaatcctctcatacgatctcctctcctctcttcactcgatcacttggtgtagaaccccaagggttttgtgtcagagacaaagagttatctctggcctatgttgggtctgttagagggggtaaaactgagacaaactcttcattttgtcttgtccaaacatagagtccgagcgccatcttctggggatgttagggtggttaatttggcaagattttgtcaattggagtcactagattaaggtatagatattaataaacatggggatgtcctaattagaggctgaaaattcagaatagggtgttctgaattttttctttacttctctccttggcctagcttgtttggaaatttt

SEQ ID NO: 176619 - DNA, 490 bp, Zea Mays
ctaacggctaccaattttgtggaaagagggtgacttctagaaagactatgagaccttttcaagaagtaatataagcggaacgaaataaagacaaaacaactaaggagcaccgctactaccttgcacccccactgcccacgtacgacataaagtcatcggagcaactcaaattactgaaacatgacgattgagacattgactataggtaccaaccacaatccatttggtcgccgttagggtgatgcattcaaggccatgcgaattcatcttctgaccacttatcttctatttctgtcttagaatttgcttcctgcatgctcctccacatgccatagaaacatgtcaccttgcagatatagatagaggagcacaactcagaatagatgacatcaaagacttcttaatctgatcgccaaccgatttaacacctgagaattatagtgaaattactatttaattgtagttgtttattataacccttccatgttac

SEQ ID NO: 176620 - DNA, 334 bp, Zea Mays
cttgcccctggactccgtccgagctgtccggacgagtacgaggtccccttcgctgaactccctcgggatgactgtgtggtcgcgccatgctttggtctgggcttggtatttgtttagggcctatagggcgaagactcggtctccgtcaatgaggtcctttgaagttggctcgtccacgtcggggacggctgacggaactgttcgcggggacccatgctttatttcttgcggggtcatggcctccgatccgtatagaaggcggaagggagtgaacccagtcgccctgcactcagtcgtgttcagtgcccagactgcctcaggtaacaaatcagtc

SEQ ID NO: 176621 - DNA, 493 bp, Zea Mays
cgagctctacatggaaatactctgttcttcatggtctatgattcagaagcagtgctacccgccgacctcatgttcgaggcaccgaggttggtctttgaaagcatagcggaagcagaagctacctggctagaggatattgacatacaggaggaagaccagttgaacacagtaattcagtcggctagataccagtagaccttgaggcgctatcatgataaagccatacgacaccgatccttcgtagtgggagacttggttcttcgccgaatcctaacggggaaggacggcacaagttgtcaccactatgggaagggatcagaggtcactcggccaggaacataccggcttactcaaatggatggcacggaagtggggaactcatggaacatagagcatcttagaaagttttacccttagcaaggcctcaaaagttctcgaagcaacattgtactctataattggggacttcatcatcaataaagttttcgtattc

SEQ ID NO: 176622 - DNA, 681 bp, Zea Mays
ttcaaatggacagtgactttgacccaagtttgagagccagtttgaccttgatccagtgctcaaataagtgtaatccctataatcgatttgtagctggtaagtagcactacaactttgatgcagagacttgggtgagttgtcaagtaaaatttggagaaaatcgaccctcaactctggctgtcaggtgctctgatggggtgttcaccatggtacagtgtacagctgaaacagataagatcgccagcaaacccaccgccgacgaccaattccaccgtgattcgtgtcgttgccggcccgacttgtgctcgggatgggcagataaggacacacggtaaaagatcctcgccgacggtgagctggagatcactccggtgactccccgtggctctctctccctctttgcggctgagcggattaactcgccggtgaccaccgcctcccggccatgcgccgcgtggcttagcctttccaccgcaccgccgtgacaccttaagactgtcccatcgtcgccggggagattgccacgccgttagccacggatttacttgcgccagtgttcttctttccctctgaccgccgcgcgtcttgctcaaaatccgcggccaccgcccgctggcactataaattgacctcgcccgtagctgcgtcatgtcgtcgtgaagctgtagcacccgctcccac

SEQ ID NO: 176623 - DNA, 956 bp, Zea Mays
atttctctacaactttgccgcagagcttggcatgagtggtcattggaaatcgagagaaaacttggctccaagtttgtctgtcaggctatctgaaggagctctcccatggtacagtgcctgaaccggatcagaccgccagcgcggcagactcaccgccggtgaccgatttccgcagcaattcgtgccaccgccggtccaactcgtgctcggggtgagtggataacacctggtgtacatcgccggggataaactccggccgataaacaattccggccgccgtaccctatttaccgcggtggaatccgatagctcgccggtgaaccaccgcctcctggccttgcgccgcgtgtctaaccctttccaccgcatcaccataacctgctctcgctctccattgatcaccggatcgattgccacggcgttggacaccaagccagtgcgccagtgcccttcctttcctccgaccgccgcgcgtcataccccaaattcgcggccaccgctcgtgggctctataaattgaccgcgccctcagctccgtcatgtaatcaagcagcttctgcacctacctgtaccccaaaccctccaccagcgagctctaattccggatttcccccaattcgggtttccgccaccgtgaaacgaacttcaccatggctagccctttcccggtcagttcatactcctctctccctcgtttaagctttctcttacgactatgatacttgccgacccacgcaattgggttaggaaccctctggtcaccgagaacgcgctcatctgtccgccacccattcggttcacgcggatagagcttgatagatcaccattcgtgcaattaagttaggggaaacgttctccaggtagcaaatttggtttggtccgaagctgaacactggtcttggcctcctccggccagtctgcgtgctcgccggagctcggctgtgcgcgcaacgccg

SEQ ID NO: 176624 - DNA, 682 bp, Zea Mays
cacgtgtcccgtcggtccgcaaccacgtcagtgacacaatccactatgtcatgtccttgtgcctgtgagtgtccccaagtgtcagccatcacggctagtcacaccggcttctctagtcgctcagtcaagtctcaacgcttgtccttcattgctctcaaccatcaacacgaacctgcatgagcttcaccttcgccattgatgacctagactccacgcgcaccacaaaccaagagacatgtttgtgtgcacacactcatgcaccggttagtccacacgactcaacccaagacgctagtctttagcaaccactcatcacaacctaaacaacaagggaaaatatcaaccttgtgttcgcaatctctcctatgatgagtgcattgtcaacaccaccacataaacacaagaatcggcataaaataaggaaggaaaaagagagcactcacccaaatgacaaacagccaaacaaaggccaagtccaaatcatcaaaagtgagaaaagcatggtccccaaagatatggggaatggctcaacacaaccaagcaaaaaatggctagcccttaggaaaagacagaaatgggatcaacaccactagccgtagattagagccaaatcagagcaaaagatggcaatgacgcaatgatgctaaactaatccctctagaaagaggcaaatggatcaaca

SEQ ID NO: 176625 - DNA, 644 bp, Zea Mays
cttttaatgtgtaaacaattttattacgaagttaacgcaatttaaacggagtaaaactgagttaagatgcaaaagttatgtgttacataagtttgatggcatttttaatatttgttttgcacttaacatagattccagggctataatgtaaattccagggatcttgatgtaattactttgcccatccacgcacgccgagttattttcccttaaggacaggggcccccttgcaaaaccgatctcgaattcccacacaaggacacgtggcgtcctgcgactggctgagatcgtgccacaccccggtgcacatggtgaggcgcacgggatccgatccgcacaggatccccaccacacacacgtgcaaacaaaagagatcatcccagaccaccggatcgacgatcaacgccccggattcaaagtgccgaagggttatttgctcttctaatcttgatcgtcgcttgctaatccaacggcccgagggctttcttccccacaaggcaggacgcggcggcactaagacccgcacggcggaggccatggccagaccgtgctgcccatccatcctaagcccgaagctccgatccgatgaatgttatgcatagatgagacatagagggactggaagatggatgccctaccggtac

SEQ ID NO: 176626 - DNA, 521 bp, Zea Mays
gtgcaaccgtaggattccagttgctttctgtgagtggcacaattcattttgtatgctgattggctatcgaaagtgatttcttgcgttgtcgaaagtgcagtttaacgagtgttcctggaatttggtaaaattttgttggttagtgcctgttaattacccacggggaaatggaccacaaaagcttctttgcattgtacatgcccactccttgtacatctgcaattcctttattttcctgattttgtttatatacaagactgggactgccatgatcttcgttgctactttgactgctctgagtaaaaaaggttactgaaagcatgtgtctggcagggaacacagcaagaattactgtatagttcattttagttcctgtaaccatacaatgcagttgctttctcaacgtattttgttcaactatttgaagtgtacattcttgcttcaaagttcaaacaaggattaggctgtcagttacacggcaaaatttgggccactgaaaccttgtttactgtgtagacggt

SEQ ID NO: 176627 - DNA, 490 bp, Zea Mays
aatatactgggcattggtgagcttgtcgcgctgactacgctgggtgagggtgcaatgtatagtaggagggggagcgctgggcctggacttgttaatgttgccaggtcggatagatattgttttagagactcaaaggaagttgcttgttctgggccacatacgaagtctttcgcgtcgcgtaatgttttaagaaaagggaggcttcgctcggcggacctcgagataaatatgttcagtgctgccagtctgcctgttaaccgttggatgtccttggtggattgcggcggtgccatatccatgatggcttgaattttatttggactggctttgattcctctttgttacactaggtagccgaggatttttccttgacgtacctcggagatgcacttctctgggttcagtcggagtcttgcttcgcgcatgctggcgaatgtttctgcgaggtctgaaaggtgatcttctttgcttttgctcgcaacgacgatgt

SEQ ID NO: 176628 - DNA, 439 bp, Zea Mays
ctgttcatttccactgagtccctatcaagtggcccctttgcgtcagctacgtcttctcagatgaaacagactctcgtgcggcaacctcgccggggaatccgcgcgtggatcgctggcgaccgcgagatccgcgcaacaaccacaccatgtaccccgcctggattcctgcgcaagcctatttaatcgtgcccttcgttcccctctcctctggcacatccatggttgccatgaatggatgcacaatcgggtgtgctgcgccaccgctctgcgggcccgccatggcccttgtgtcgtgccgtgaagctccacctgttcatggcgatgtgttatgtggcttcgccgtggagaaccgacgcccgggagctcgggatttcttcaccagagaccgtgaacccactgtcctccgtggccagctccctccattgccctccaactgcgg

SEQ ID NO: 176629 - DNA, 650 bp, Zea Mays
caaggaacaatcttcatacaaagctccttcggttggatgactcagaatgatagaggaaaaatgcaatgagatacgtgggaattaccttaccatagagcacaaagatatgtattctatctttggaagtcgggggaagcttcagcttaataaagtcatgaatgctattgggtttgaatacccagattatgaagatcccgttgttaacattgaggttggggaaaaataaaaagagttgctaaaggtagcggggaaaccttgaagaagactacatatgctgatatagagaatgatgagttagagtgggacaaagagtcatctctaggtaccgaaaagaagaaagccatgacttcgaaaaaatcaaccaatgcgcaagggcaagggaaagggaaaggaagtgctatgaccacctcttctatgggttgcacacggattcttgagttaatgacacaaccattaccattctctccactaagtcccttaggaccgacactaactcagtttgtgcgaaccacaaaggggactaacgaaggaggccacccttcgaagggtaaagataattcatctggggaagaggtagagagcccacgtattttgggtcttggagatgttgccttcggacgttcatcgtcttccggtgaagatattgagaa

SEQ ID NO: 176630 - DNA, 853 bp, Zea Mays
cgaagacagaaagaatgagcttgttgtcaagaacatggaagggaaagtgaaggaccttgaaaatcttttggaagaaaaggattctaagatcaaaaccaccgaagcagaccatgccgaagcccaccttcgaattggaaatcaagttattcaaatctctgatcaggacaaacaattgaagaggttaagcacagagctcgaaaaagtgaactcaaactttaaagatgctgtagacggctatgagcatgaaattagagagctaaaagattaaaagtcaaagctaaagaagaaacaagttctaagttaactgaaaccctcagaatgcttcgagacacctgcttcggcttcgcaactcggtgctcccttcgtctacacgaaatcttcaattcggtcggagcagtgttaggagatgcgaatcattctaccaacgatatcccaaaggcgcttgagttcgtcgaaaaagaaatcaatgactttgaaaaagttatggtggggcatggagatttttgcgctctagtggccgcccaaggaactgctactatttttgcgaaagccgggtgtaaacatttgaaaaatgttaacaaacccaccttcactatctcctcggctgacctttagaacatcccaagtgaggctcgaagcgtgggtaacagatttattacccaaatttggatgaagggtggctgagagctagctggagacgaagctcgggctctccttgacgaattatgaaaatgtccctactcccccttttttcctgcttgatactaccaagtatttcatatgatgtattttttaggctgatgttggcgaagaatgaagaaccgaagctgaagacaatgttagtatagtctag

SEQ ID NO: 176631 - DNA, 855 bp, Zea Mays
cccaattgccttcaacgccggggaggagttctgctttggatccctcttctgcatcgcgaatcaagaaggcatcctgcaccgcatcacggatccatctgagaaaacatcttctccaatggcatcgattatggaggaaagcttccccacctaacctcagcgaaaactactccgacgaactctaaggcgcgaagacctcaaccaactttcgtcgcgcgaaggattgctcacgcgtcgggcgggcctaggaccataacaacacatgtggccaaaccgactgaggctgcacccttatcgcgacggactcctttgtcctcgtcacctacccgggtgtggacccagatcactcggcgaaaaggagtggacaaccccggcactggtgtgcccacgggaacaagaccgacgactgtcctagctgctccgctcatgtgagagatggccgaaacatgggacacagccccaagctctttctttccagatgtcctctttatccagggaagagtatagaacgctcccctctttgacgacaagcccactatactaggggagcggctcctgcagcacgaggcacgccaacgtcggaactggcgctgtaccgttcaacgtcatcacgaggctggagaatgggatcccgctcagcctgtatccctggatgaggcatctgaacccggagagacttctgacaataggacgctccgcgagtgccgcaactcccgacatcgtgattgtcgccatgcctaggagcatgagcgggagcacgacaccaggcgggaagagtatgatcgagatcacgccgcaccagcacgcagccgcgcaactaggatgaagttgacaacagcctctacgaataacccaaca

SEQ ID NO: 176632 - DNA, 836 bp, Zea Mays
ggccattgttttctgctgctaatttagtccataaccaccaagctaacataataagacacacacacacgaaacacagggacatgaatgatgcacgaccgagacacacatacatgcttttgatccattccttgcttacctaacacaaccaacaatagaaggcaaactatagatcatattcagacagggacaacacatacaatttcaattcaatagttaacaataggttcctatgtacattaactgaataaacagaaagcacagagatgaacaacagtggcgactctgaatttgttctagttgtacaagtcccataacatatacaattctaggcagcaaatcagtaaatgagtgaagaacttaactcacttaccaccaagatccgtgaacgccctcggcccagccatccttctaaggggggcatcttgatcacgacaaggcagtgaggaacaggccgtcgaggaagacggctggggcagtggcgccgatgcggatggttgttgcagaggagccgaggcagacgactggggcggtggcgacgaggcgaacggctggggcggtggcgacgaggcgaatggctggggcagcgacgaggaggacatctggtccggcggcgtcgatgtggatggcaggggtggtggtaacgaggagggcgatcgtggcaactgttgaagagaaagttaggtttagggttacgcaagtcatgtggaaaaatctagaaaaatggctggctatgcgaatttttttctaataaaaatggcaggctgtggctagtagtacctcatgacaacaagaagttcatcacaatactgtgattggctagtgttatgatatttttt

SEQ ID NO: 176633 - DNA, 635 bp, Zea Mays
gtatctcatgtagctgagcctgacttgattcttctgtttgggtatccatgtgtttcggggcttttgcttgtggttgaggtgaactaatcatgtatccaaacattttcctattccttttgttgttctttattccattcatcgaatatctctgtgactcatttttctcgttcatagttgttaaggtagtaatattgtcattggcattatttacttcctttccattggggttcatcatctagtcagagagtaaaagagatagtgagacggactgcataagaggcttgtatgacattaagataaagagcaacattttgatttccaatataagattagttaaggaacaaggatggtttcagatttccgcctagcttcatcatactacaagatcgtacaagtgttataatccttaacatagatccttttgaaccttatagattttagagcatgatatccaaataatctttctgatccaagagtatttctttgagcacaaattcagagaaagacttgagcgggattttagggtaactagagtatcacattgtttgcatatagcagatgacaccatactttattatctttataaagaggcaaaacacaataggtgcgagagattctccaaatttattcatata

SEQ ID NO: 176634 - DNA, 345 bp, Zea Mays
ttgcgatcgatgattgtgatgtgcaaaatgtgcgcttctcatcttctgaaagaaacaacatgcatgctcatttttaacaaatatccggccggccggccggccggcgtgtgatccacacaacggttgtggtgcgagcgatgcgaccctagcgcacttgcagacatggacgtctcactctcaccgcttgttgcactgctgctggtcgctctcctctcccggctcatcctcgtcctcgccacaaggacgacaaagggtggttctccgtccagtggggacgacgatggccggcgccgactgccaccgtcgccgccggggcttcccctcctcggccacctgcccctcctc

SEQ ID NO: 176635 - DNA, 726 bp, Zea Mays
gccctcccccgcgctaggagccgagcgacccgcgcctgcagccgctaaccacgccatgggccaggaagccgagccgccagacgccccgacaccccgcaggaaccgacgtcgcgttgttcgttcttcatcgcgagtaaagaaactttactgctgccgtttcctccccctctattactcctagctagtcgtttctctattctccataaatagctggcgcccgtttcctccccctcggcctataaaacccagccgtgtcctccgcagaagttgtcctgcttctcctcttccactcccataagcccctgcgttatgtgcgtagccatgtcgccattgtcgcgtcaccgccctcgccgatcccgtgtcgggctgtctgctcgctcgcttctctgttagtggagcctgaccctgccgagcccgcgcagcatctcctcgcctcccactgtctcgctgccttcttgccggcctcaagtcagccgttggagcccctgtccgaagctcctcttctctgttgccgagctgtaccgtcggccgcatctcgtcgacgacgtcctctgcctctgcgaccgaccactaaccccgtcgtgcctcgccggagcttgtaccccacagtcagaacgctcaccgacgaccacgcccggaatccctgcccgcgcgcgcgcagcagcacctccgtccgtcctggagtccgtgaagctcgcccatgcagcaccccggcaaccgtgccca

SEQ ID NO: 176636 - DNA, 495 bp, Zea Mays
tttccattaatttggagaaggcgtaaactagctaggccccgtcgtcaaacgacgatgccatggatcattcgtcttcacagctagaatttggagtatggcactcgtacgtgcttgtcgacgatgcttccacccccaagaaagaacaatagtcgtacaatacaacctgcacacatctctgtcaccaccgcaccgcctgtagatcgaggataatacaataatactaattaataaccaacaagaaaaaatcagtcatatcaacacttgaacagcagcaggttttctgtgacgaaagtccagacatgggcaatatagcacacgcccgaaacacccaaaatccctgtttccttgttcatcaccagtgtccaggatcgaccatgattgattgacggttttcgcaattgacggtaaacaggcctttttcctaataaatgagcgtactatgtatgacacgcgcgccacatgaaaatcctctgcgtccgagtcagccacccccac

SEQ ID NO: 176637 - DNA, 798 bp, Zea Mays
tgtgtccaaatattttatctgggtccgtattctcaagtggaatctctaaggtgtcagcttcgaaataaatattacccaacctgacctgctaatgcccgtagccgatctgaatctgaaaacgtaaagatccaaactcacacaaatggccaacctaaattcatgacaacggtatttttttgtgagccacgaataaaaatggggcgtaattttaagttttgacatgaacaaaagcgactataaattttcaatggagcagctcacatggtttaatttaaatccaaacaaccggtttctaattcaaaataaggccaaattgttttctaaatagggttcgagaaatttttgttgggcaattcgattcgaagttcggcctaacattttagattttcggagtggttcaaaacaaaattcgtgcgcgctagcctcgctggcggtctcgatcgctggcatgtcatcgcccgccatggcctatggctggccaccaatttctgcgccaatagcccgcgccgcccaatttgaccaatgcatggccgcccaatccctgcgccaatgggtgatgctgtttcctcctagccaatcaccctactgcagccaccctttaagtgtcgctcccctctgatccttagggctcctttggataatgaatacccgcaggaatcctagcccaatctgcgggggaatgaggcccatgtgcttttcttctgtggttatcccggactaccatttgcatgctacacaggccaaaattgccacgggcctttttcacctcatccctgttaatccacggggaaacaaaaa

SEQ ID NO: 176638 - DNA, 616 bp, Zea Mays
gtgaactggaatcccctcaaccctaaccttcactctgaattcaaagcaagttttcctggcataacactcttcagaccagtccccaaagtgaaaaacccgaccacgataggagaccgacctcctatccagagcccactgcttggttcttgaatcagcgaagatgataaagaactgttcaggaaaatgcttgacaagttgatactgactgtgatgaagaaaagaatccctcagcatatcccccgctgccagcacgtccacctcatgactgttcccatcaaaggagcaaaccactgccttactgattaactcatccctacgtcgatggatcaaaccagtcgcgatgatggcacagacagctcttgcaggccgagcccttgggtctccggggtagcgagcatccattgtctgaccaccctggacagcctggaggtaagacttccgttgcagcaaagaagaagtgggtggtgcttgcacaggatgcaactccagccccttttgaagagggcctgagaaaggtttcagttgttgatggctcgaggagaaagagctgcctctctgagttgaatgcttgagtgaaacaggtaggtcacgaaatgaatgagatctcccctgggaa

SEQ ID NO: 176639 - DNA, 394 bp, Zea Mays
ctagcagagagcatgccatggcttatttccctcgatctgttcactgctctgccatggcttatctccacatcctcatagtactactctcctccctgcatctaatccttggaaaccatgcaacgacgacgagggacaccatctcagctggccaaccgctacgcattcacgacaagctcgtctcccagaatggaaggtacgccctagggtttttcgaggcgggtagctcccaaaacacaagcaactggtaccttggcatatggttcaatagcatccccaaatttaccgtagggtgggtagcaaacagggatgccccaatgaagaaccacacctcactggagctcaaaatctcccacgacggcaaccttgttgtcgcaaaccgggccaccgactccat

SEQ ID NO: 176640 - DNA, 723 bp, Zea Mays
tcttcgggttcaggccatattgagaagaaggtgcaacaattgtcagagaatattcctggtacctcttcgtctacttctattggtgtaacataaattctaaaggtaatgactgaacctttcccctttgatttgcaaagtccattgggttcagatctgattagcttattacaatcaagggagaagggaactgaaaatgttgccgaagaagataccaacaaagatgcttcggcgatcgtgggggtgggaatggtcagaagatgtgacgtatgatggccgtaatgagggctatacacaagaccccccatagtcgcaatagaaaaaattcttcctcctgctgctactgaagctattgaaatagaaaatgaagccaaaagctgtggaggcccactcgggaccacactgtcggaaattgatagaattatagctaatgtggttcccgagcgaggaatgggtggtgacattgatgatgaagctgcagctttgaaaatgaaggaattagaagagacttcttcagagaggaaagattttgacctacaacacatgggtggccaacaactctctaaggaggatatttctgagttaagggaatttgctatagcgggtggctaccagcctgggtctatgctttttggcagcgtggacgaagagaccctaggatgcatccctgattgcgacgggacgaaaattgttaatactttatcaaaagcattggtttctcgaagc

SEQ ID NO: 176641 - DNA, 799 bp, Zea Mays
ccagcgagaagggcctgtgctcactcgatcggacagccgcctcgaccggggcgtcctgccgcctccccgcgtctcgtacaggcaccggcgtttggctgtggacctccgtctggtgggctggtggtgcgcgcaagccaaccgtcgctccaagggaagaaggatgtgagcagctggaactggaaggaggaggatgaagtaactgtggccgcggatggacggttggattttacggattaacaagatcattcctaaacgcctactcagtgataagtaagatctagatgcctctatcctagcgctcctagatagcaatgtgttggcatcttttgaggttaagcactaactatctttaaatcccgcatacggtacccggaccgttcgggcatccagtgccaaatcgggcgctcaacataatgcttgtactatctacacaaatgcttgctggagtagtacacaaatgcttgctggagtagcaactagcaacacataatgcttgtactatctacacaaatgctttctgagtagcaactagccataccttggtctgacccaagccattttggtattgccttgtgcctacgttctgcctgcaattttcttctttgctcaaccgtcgcacgcacaacacaacacctgcttctcagcctgccgccgctccgctctatggagttgcgtgctgctcatcctcatctttcacatactgctcgtgctcttccctgacatgtgcttgcttgtatgcgactgcttgcgctaggcagctaggcctgtgttcatagctgcgttatgcacgatatcctgg

SEQ ID NO: 176642 - DNA, 1629 bp, Zea Mays
ccgccgtgtggcgcccgaccatgacacaggtgcgcgcggaaacagacaacaactctccgcatctactttttaatgcgcttgctgttctcgctgagaaacaaaattttaacccgtccttactgtcactgcaacgagtaaatgcacattgcctctttgcctccaaaaaattcaaccactttactacttgttctagaggatccaagcaaaaaggcatttcttctaaaaaaagggtggtacaatgccataccttgggaatgtcagtgggggtgggtctgaccgacagagcgtagcatcccggtcgttgaaacgcctgggccaccaccaagaaaatcagcatccgtcggctctcttttctcgtcactgaaagatcaaaatctccaaccatcgtctccttttctttttctctgtccttttttctctaaataaattgacctgttgcttgatccggtaacgaagcgatggaattctctgggttcgagcaaaggacaataatgatgccattttaccctcctaaccatgggcaacaactcttggtttcttcaggtatatcgtagatcatacaccagaaaagaaaaagatgagtagttctccctttacttttttttatcgaaggttgtggccaaggttttccctcacacacacttgtagcaaaaccaagatgggtacggttaggtccaacagttccatcatagtactaccatatacacaatcggatggacaacggcaacacgagagaggtcaacagctcggtgcagaaaaatgaccccccaagtattttatattgtgcgaattggaagctatgcaatcagatgaggtaatggttcagttacatatactctggaaacattagtttgccatgtctggtgctaggtagctatcccacaccactcaggcatagttgtctgtctgagctttactaaagcagactatccgtatacgcttcttcgtctagccagacatccgagagcatcctcaatacaggcagcagcatcatataccagtactgtatctgtatcatccacttgttggcatctacccaccagttggcaatgcaagtaacactacgcccagcctgattgcataggggggcttgtcctaatctatcaatttttaatgcgggggagctgcttcaccaggatcccacagtgtatgctgtgttgcttgtgggcgctcacataactgataatgtgcttgtggatgggcaaaatcgcgcgttcaccaattgggttgaacctgtgggattgggaatcgggatggtggcttgggcacatcagtacatatcaatcagtattgaccttgtccgaataatgatattcccaaattgcacacaaaagtttcttagtacatattaatcagtattgaccttagacctattattattaagcatacagtaaaagaaaatgtctgtgtttttcgcgttctgtatgagaaaccaatttaggagtaggccattaattggaaccttgttgttttgccgaactttggaagcagacaatggtttggtcacatctggcggcatggccggtttgttagtttcttggtcgtaggagggggcataggatgctctgttgcctcctactaccttctcccctaccattttctttctctccgaatggtttggttcacggg

SEQ ID NO: 176643 - DNA, 722 bp, Zea Mays
ttcgacttgaaggagatgcagtctagcgccgccatttcaccgctgccgcaggctctggcttagatgcgggttgtggggaggctcgagaaaggcgcgatggaggggagcagaggagcaagatgtcgcgcttcttgccatccgtcgtagagtacgcagtggaccgagatcgcgtgggtggatggtccttgcggggtcgcacgcctccacaaccgccatgcgctgaggccaatcctcgtggggccgtgcgacaccgagactgaccatgctgcgctacgcgttcctaggctgcctgcgtcgagccgtcgaggccccagagctacgtccaccggatctggatcccgcgggagcgagtggcgcagcggtggcgacgacgttgggggaggggcggtggaggcaaagggaggaggggaggcggagagaggtcgcgtcagcggtggagggtgatcccgcatagggagagaacgcacggaggtggggcggttgcgcacggggaggccgacgcatggagtgaacgcgggggcagctcgcgtgggggatgtggggaggcagcggctgcagacggacaagcgagagctaggttcctcagaagatgatgtcatggagctgtctgtggatctgcggtgcgcgcgggggtggggacggttgaggtcgccgaccggtggggtggtggagtccgcctgtgggggaggaggaggctattgtgccgcgcgttgaagagaagg

SEQ ID NO: 176644 - DNA, 465 bp, Zea Mays
tagaccatttcgcattgatctcagtaccgtgtatcgcgttagaacttgcgagttggggcactggtacgccggttggccgactccggcggagcgccaccgtggggactcgtggcactgcgggggtccggtgtccagaggttgggatggacgcgcgccgtcgatctgtggatggagggcgtagattagataaggaataacgcttggataggttagatcctggcgcttgtttttggatcagacggtcttgatttaatgcatacctcgtcagatcgtgatcgttggtcttggatccgaaggccacgagagtgtaccggttcgctgggttgcgtatccaatctgagccatccgcgcaggatcgtgaggctaaaaacacaggataccccttcgccctggcctatttgctaaagagaccccgtaatctttataaattaacccgccatccaccgcggggtagatctgtgtctt

SEQ ID NO: 176645 - DNA, 1548 bp, Zea Mays
caatcctaagactcagaacgactggcgccaggactgcgggttgattccagtgtttgtcaaggtctctttagcaaataagccaacgaaggggtatctatggatccagaccgtccgatcacgttcctatggaccagatcaaccatatgaagagttatccctattctaatctgaaccgcacgctcacggatcaacgtcccacgatctttcttcccaaccgaagcgcccaggtagcgtttctcccttcggcgagctcgccggtgcagttacaaccaacgccgacgccccagaatccccaccgtcgagtcaacctaatacccccggagtcgggaaaacaaacaacgcggaagagagcgatctagtggatcacgacagggaaaagaaaaataccggcaacgacgtaatataatcctgcggtggcgctctgccgaagggccacgatggtttgttctggcggcggtgctgccccccaagtgttcgaattcaactgataatccccgaaattaacatggaggctactacggactcgagaagggacaaagcgtctttaaccaccccggctaatgcaatttcaccccctgcagcggcaaccatgccacaccaacaccggtgagaggtgtcccaacgcccgattgcatttttcccagacgagagccaaagcgtagggaatacgtcgtagtcatgcacagggttctttttctgaccttgacgaactcggcgaggagggagggtcaccgacgcacgccgatgaagcgaggtttccgccggtgcgttgctgcaggacggcacgcaggtgaaactctactttgcagttttctggaaccctacgaactgcggcgagactatcctatgctacgacgaccgtgttatagaagtttgcactccgaagggttcggcggtggttgaggttgttatcaggtcgtgcggagcgctaatctcgcgcagctcgcggaggatccacgggcgtccagacttggaagagctacagggtccgctcctgacgtgtgattgagaagcgggcccggtctgccagatacacagtgcgcagggaataaaataggctgccagcggagcagaggtatgatgggccgcgcgcgcatctgaggaaaaggaagagtgggccgaaatgaagttagggcccaggtaaggccacccttcctttttcttttatgttatattttctgcttttctttttctttgagtttaaaattcaaagttcaaaattcaattttgctctgtggtaaatcctcctcaatttaagagaatcatattgcacataattttcttacctttatttataattttgtatacaccttttcttttctttttccacttctagattataaaattttcttttatattttatattcccctttgtgaccttaatatatttattttctcattattatttttatatggtcacaatatgcacacaaaataaaatccagcatgatgcataattttagtggcatatagtttgtttttatttgttttcatgtgatgttctcatgaaacgataaacatggacaacaaacatatatacaaaggaat

SEQ ID NO: 176646 - DNA, 900 bp, Zea Mays
tggcccttcaccgaggtcagacagcccatggtgacgggattcgcaggcggcggaccggatttcactctgcctctccgctacggctatggaagggaggagggaaggcgcagggaaaagggaagggcgagtggaatgagtcagcgaccgaagcttttatgcaccagcgtggtccacgtggtccggtcctggcgggggaagttcgccggagatatcggaggtcgccgcgcggagtctgttagcgtgagcgcgatcgatctgacggcctggtcccaccggtcatggacggagtgacgaaggcgggcacaagaggtaccgacgggtaggcccggcccgtcagtgaggcaggaacccaggcgcgcgcgagataagagcggctgacaagcggggcccgtgtggcagagagggtgaggcaggcgcgtgcgggctgaagacttgggccgcggaaggggaggaaagaggagatgggccgaatacgaggttggggcccagttagggtagttttgttttattcttttcttttccatttctttttccccatttcaaattcaatttgaattcagatctaattcaaaccttttggcccttccttacaattttatattgtgccattaaagtactgactttaaagatactatttttatgtatatattttctataaattctatactctttccctttcttttctatattctcatggttttattttcaagttaaactttaaattctatggatccattgatatgctattaatggtatatttattttattaagcacaaatgcacatccaaataaaaactcggcatgatgcataaattttaatagtacatccttttattacttatttgtttttgaatatagtgtccacatgtgatgatgcataaaggtcaaacccatataaag

SEQ ID NO: 176647 - DNA, 612 bp, Zea Mays
gcacatttgtcgacacgatggatatatggctggcttgctaattagacgacaagggaaaaaccgatatccaacttgagtttgtattccagggtgtggtttaggactaaagctggacccgtcaatgtcctttctccgatgatgattggtcgacttacctgccgcggacaagcaaatgacacgcaggacggcaagtgtcagccagccaggtcacggttcgtgctgaaatttggcaccgattgaaataaaaggaaccaaggttgtggggatgtcacgagccactttagcccccatattacttatctctactactatgaagaaggtaagggtaggctgctattctgttctgccctcccctgtccgttattatcgcagcaaaaaaaatgctgccaggctcaggaatcgaaccctgttctgcccctccctcgttctgccctcccccgtccgttattatcgcaacaaaaaaaattgctgccaggctcaggaatcgaaccatggatgcactagccaactcgactcatgttagtttatatttagcctcaactacgatatctaagtgatgagataattcatgcttagtttttcatttggtgaccctggtatgtataatttttt

SEQ ID NO: 176648 - DNA, 364 bp, Zea Mays
ctggcgcggcggtgcaagcgcttagccacggcggcggtggattcgcacacggctacagacggcgaaatcggttctcggtggctagagtggtgcgtttttgtgccgggaggagataggaggacccgcagggtgcccagggacttttatccccagttcaacgcggaccccaacggagttccggagcctacggtcggcgagcggcatgcacggaggtcgtcattgcgcgaggaagacggagtcgcgtgccgttgagcgactgtcccgtgggcccgcaatcgcagagagcgcaagcgcgcggtggagaaaatttgggccgcgcgggtgcaatggttaaatgggccgaatttggtacagaggcccagtt

SEQ ID NO: 176649 - DNA, 617 bp, Zea Mays
ctccgccgccaaccgcaaccgcaaccgcctggaatggaaacctctcccctgtcgaggaactgcgggagtgtcgtgcggacgaactagtgttgtgtgatgacagagcgtttgctctagagaaatattatgcgcggagatttttctggaaacaatggtgaaagtagttagtggggtggctctgtggtttatcgattctggtgagcgcctgtgctttcctttttaaatcatcgctggtgcctggtgtggtgatggactgaagggatccgggacccgcggccgtagccggagccggattggtggcggggaccctgatatgctttggcaaagctgtgggctggttctgcgtgctcgcgcccaccacagtcgtttcgtgcctcccagcaaaatcggcgtctcgcggttttttttaaggttgagcttctagagtgagcgacacaggaaccagagggtgacgtggcagctgcagcggagcgttgtccattgtgctgactcggaaactccgatttcccctctgtgtttttgacttgtacgtagcctggagataggattataggaagatagctacattcccacgtaagtggctcgcatttcaactgctgataaccacgtgctcaacc

SEQ ID NO: 176650 - DNA, 469 bp, Zea Mays
accggatgcaccgactgcagggggacccgacgcctcggccgaggggcgcacagaaccgtggcccatcttggggagcaactgccttatccccatgcagctcaatcccaatgagtggtgtgggcagccgctcctgttctggagccgcgacacctcggagcccctcctctccctcaatgatgagttggaggagcagtttcgggataatttccgtgaatataccgaggcggcgatgaggtcgcttcggtcgaccatggaaatcctttccagggacgttcccagggtcttccaggtaaggttttagacgtacacctcacgtgatcagggcattctttgtgatatcctgttttcctctctcaggagcttacggacgtgagcaccgctaagtcgctattcatccatcgcgagagtgacgtttgggagtcactgtggtcccagtgggccgcgcttaccgaggctaatgagcgcctcg

SEQ ID NO: 176651 - DNA, 511 bp, Zea Mays
caatcatgattagtttgatttggcaatgaaaatattggtgctgtcagtttgttgcaacatatacagtgccatccaggtaaatatctattttttttcgaaacacgatactggctgaggctcacacataaatgccattcgccacacttcatacagattcatgcctatgaacagtgatggtgccaggattatacggggtattccgcgaacaaatacctccaaaatagtaagaactaagagcactggtttaggtagacatcttagtacacacaatacatattcattgcatttacagagaacatgagtattccatggaatatctaagaatacccctagtgccgcccctgcctatgaatacctatatatgttctatgtacaatgcagcagccactcaattagcaaacgaattattctcctgttatttcttggagctttccttgatgaaccaaaatggtgaaaccataattttttcataatgtgttcttgcagtagtcttcagtcttcattatcttcc

SEQ ID NO: 176652 - DNA, 634 bp, Zea Mays
tccgccgctgaccgtagacgcagctgcacgatccttattccccggtgagcactttactagggtgtatcttatcatccctgctgcctccactacattaggatagaacttttagcctgcgaatcgcgtgtgtgttggtcaccggcgatggcaccgtcgccggtactcgggcgccgccgggtcgtggcgaaagctgggtgggcgtgttgtgaccgtcggatgtgcggttcgcggttaggattagagatcgtgtaccccttcgcccgaattgatctgcaccgttggatctcgtgcgggcgaatctagaaccatataaagtactttaaatctgagtcctcgattcgaaatcctagggttctcggttgcagaggaattgatctaatacagggtgcacgtgtacgatctgacggtcaggaatattggtaccccttcggccgggtagttttgcgtctaggtccttaaagtcttttagaatcaacctgccgtccataacgggttagcctgagtcttagattcttttgcgccagagcccctgaattcattggtaattgacgcacagtccagagagtagtgaaaacagagaattaattatggaaattgttttttaatgcaaaaataatttccgaaacttgtataa

SEQ ID NO: 176653 - DNA, 779 bp, Zea Mays
gaggtccctagaacttcgtttcttctccaaataagtccctgaccacggtgcgctcgccgtcgatccccaacgcggcatgtacaggccatggccggcgacggctacctcgtctagctaccgggaggacataaccgaccaagggtgacctaggaacactcaccaatttggcatgaacacactgagaacgatctgcccgcgtgcacggcggaaaccgtgaccacgagctcgtgttcccgttcaaccctggccgaattgaccaaacggtggccacgatgagcatccagtgcataccaagttgcgaaaacggcacttgagaggcgtagaaccttaccattgtgggctggccacggacgagctatccacggcggcttagagactcgagttgggggaaaatggtgtcgcaacggctctgggcaaaattgggggtggacattggggctacacggccgttaggaactgtagtttcaccgtgtatactcaatttgagaggagggggcggaggcagtgcgaatttgggcttggatcatcacactgggtggaggtgtgcataccccgccgtggatcatggtgctatttatagccacggcggcccggccagctatctacggccacagataacttcattagcgcatgcataccacgtagggaagaggcacagtgagggagatcgaggcatgggtgagaccgcggcaaaagttactgagtcacggtggccgccggtgactaactccggccacgctcgactgggttcgcgggattgcgccacgttcgaagttatc

SEQ ID NO: 176654 - DNA, 503 bp, Zea Mays
tggaatgaagccttaacttctttgcaatgtttctgagctcccacacctgacaatggctggttggggtggtatttatcgccccaacactcaaaagagtcgttggaaaaagcatcctacttttctgcgtaccaccagacatgtctagtgccttccacgtggactagttattggaaactaaacgatgttggcctttctgtcctctgggtgttcgatgtgccatcggtcatacactggacatgtttgttgccttatgcctgactctgttgcattttgaaacctctatgtgtgtcatattcagtgtggtattcggtgtaccattggacatgtctggtgcgttgtagcaccccacgcccccgttgtagacctctctacaagatgtatatagtgccacctgtccggtgtacacaagggttctatgcactcaattctttagcccaaccagcacacatgtccggtgtgccaccggacacgtctagtgcactgtgtagcatgtttttctttgt

SEQ ID NO: 176655 - DNA, 805 bp, Zea Mays
gactcttggttgaacttcattggtggtaacagaaattttgtttgggtctggtctccccctaatggtaggtctggaggcttattggtagggtttgatgctgacatctttgatgttagagagaaagaattgggagaatttatgattcgtattctggtgattcaaaaggaatcaggatttatttggaattttattaatgtttatggggctgctcaaaatgatcaaaaacataaattcctgagtgagttatctactatttgctccaaatgctctcatccaatgttgattggtggcgactttaacattcttagaaaagaatcagataaaaacaaacctggtggcaccaataagtggagttccttatttaaatctattattgatgtacatgatctgattgaattggagcttagtggtaggctttttacctggtctaataatagaaatccccccacttatgaaaagttggacagatttcttgttagtctggagtgggatctacattttaataatgtgaatgtttctagtcttagtagatctttttttgatcatgtgcctttatgtctcaaaactgattttactccctctactgtgagagattttagatatgagttgtgttggaggcttagacctgattttaggaatatggttgaaagaaattgggctctacatgttagaggtaaaaagagtattgagatttggaaagaaaaaacaaagtgtctcaagaaattgttgaaaggttggaatattaatgttgaaggtagatatttgaaattaaaaaaagagctgatgaataaaattgacattttag

SEQ ID NO: 176656 - DNA, 327 bp, Zea Mays
cttatatccgataatgcacgacctgccaaggtttccgggtgaaaccgcctcgccggatttctggcctactatgcttctcgtgtcactttcccagggcttcagcagtgcagcgactcgctagctagccctttgcatctttcagtcagtgatggagaatagcctcaagtgccgtaggtttcgtgtttctgaaatctgattgcggatgcgtagttttcttctcgcctcattgaaattttagtatgcggtcaaatgtttagtagtaatctttaaatgcggcggcgcatcctccactgccctcaggcgtcagcggtggatactagcaacgta

SEQ ID NO: 176657 - DNA, 729 bp, Zea Mays
atctgtggataaacttgacacaagggtggaatttaaatttgaaatggaaatatgaatttggaaaggaagaaaagagattaggaaagaaaataaaaaaagaaaaggattaaaaccttacctgggccggcagccaacccattcagcccaccccagctttcctcactccgcgcagcccacattcactccttcacgcgcgcgctccgcccactctcgcttgccactgccacatgggcccacgttccgctgcgcagcgcctcacttacgtgtgggacccaattgtcagcattgcctcccacgcgagctctgaccggttcttccccaacggtgtgcgcggaccttgcgggggaatcacgggctttcggttgaagtggtggagctcggggataaagcttaccctgcgactacgtctatccctcgcctccctctatccatacgctggacccgagcatcgaagttagccaccatcgccgcgcgccatcggctaggtgagagaaggccaccgtccgtcgttgtcgaccagcggattcaccgacgtgcgtgcctcggtgcttgatctggggtgatcgcgacgtcgtcccggtggtgtccacgggttcctcggcccctggacttgttctaccccaccagaattgctcgtcgttgtctgcagaccaccgtggactgcaaagcttcgtggacgagcgtcgcctgacctcggccggccattggtaagtccccaccatattcgtc

SEQ ID NO: 176658 - DNA, 347 bp, Zea Mays
agacccttctgattatcagcggcaggtatgttgaggagtgggtccgagtcttttacgcctctgtttggatagacccggatcatcactggatgaggtttcgctttgagcgtgaggatgtcacaattactgccagtcagatccgccagctatttggattccccgagtcgacgactcgccttcacagactctgctacggcacttctgaccctcctcgtcgccctcacggcagtgtggctctgggtacagctcacgtcgcggctctgttccgcccgcctttcacagatgggtcgcgacgttcaccggcagattttactacaacaacaaagtacttatatgagctcatcaga

SEQ ID NO: 176659 - DNA, 803 bp, Zea Mays
aagtctacttctgggacttgtcagtttttgggtacttcgttggtttcatggtcttctcgaaaacagtctagtgttgccctgtctaccatagaggccgagtatattgctgctgctagctgttgttcacagttactttggatgatggctaccttacgggactttgacttggattttcatcatgtgcctctgctttgtgatagcatgagtgccataactgttgcctagaatcttgtgctacattcgaggaccaagcacattgatgtttgctttcactttcttcgtgatcattatgagaaaggcgacatcgaattgcgctatattgataccactcgccagcttgcagacattttaccaaaccccttgatcaaaaaacttttgttcatttgcgaggggaatttaggtgtttgtttccctttttgattagagggctccctttttggtcttttcttcttattttctgctttcactttcttttgttattatatctgcatgtcatattgagcttcacttgtataactgctagaatgtgattttgctcctagtagtatgttctttgtgtacatgataatgctatggcatgcttaggctctttttgctcatattgatacaatattgttgagctaagttgttttcataattgtgaacttgactattactttctcaatctcaaattgttcaccattaagattggcacctagcatgtgtaggatgtgttgaaatccttttttgctattactagtatgctaggtggctatgtctcatgctttgagtcattcacttgtcttgatttattcatatcacgc

SEQ ID NO: 176660 - DNA, 1335 bp, Zea Mays
aaaacttaacccaagggtcctattgtagaaaacaggacgacgggtttattctgcaataatttagggactcttttgaatgtttgctcggctgaaagggtattggtcaactagagtcgttcgatcagatgtgggcggcgcggatcgacacccaaatcccgtgaaccggtatgcaacatggctcaccggatctgagatcaagggccaaggtttaataagcacgagatctgatcccaactctacatccatgatccaacgactgatatgcgcgcaccccgaatccggtaagacaaacaaatctcaaccgctcatctccagaccgacgatcaggatctaaaatatccgagatagaattgtacatgttcgatccccatccagcgattcagatccactctaccccaaccggtacgttctcttataatcctaaccgttcttgcggaatcaacggctcgaaagccatcatccccacccgaccccaagccacggcgatgagggcatcaccgcggcgacgacattgccggtgtctgctagatccccacatcagggctcaagctttgagacaaaagtgctatacatcggccagataaatgacaaatcacaagggtagattctcaccggccctggaggcacagacacccctgtccacggagagttgcggccttgaaacggtgttgttcgtccgacgaggaattcctatggcttcagctagtttccctccaattaatccctcacacagcttctatgcagccagaccaacctccaggtagcctcgtaggagcccgaatcccgctgtcgacgagtatccgcggcggtggcccttgctacccctatttctctctcggtgagtcacgaagatggaaaagggaaatgaggccctaacacaccatcgtatagtgccagcaggtcggtttaggggccaatcgtaactcctcaccagaaaatcgtacggtctgttgaggtcccgcgttgtgcggtaatggagaggagaacgagctgatggcacgggcccacttggcggtgtaacgagcacgcacgggttaggaggtgagctgggagagcgcgcgcgaggagctgctgatgggcctggcccgcacatcattgacaccaccgccatgggtccatgtgacgtatacctaaggtgcaccggtgtgggggccagtgtcagcggaacgcgctcttgtgagcaccgtgacaccgccccatagggcccgcatgttggcaccgatttgtgcggactgggttgtatgggccacgcgaggaaagaataagtgggctagtgcgggaatccggcccaacacgggatggggctgcttttcttttcttttttctcttatcatt

SEQ ID NO: 176661 - DNA, 646 bp, Zea Mays
tgcagggtagaagtgacgacggtcgtccaaggatctgaggatgacatgctagacatccctgggcccaaaggaatcgagacacgtggacaagccataaaaaattttcatcctttggcctcgaagggatgttgaattgattgatccaccaacaccgtcgtcatctcatcccaaccatctctgcctcctcaagctttagtacctttacatcaatcatcacctccacaatcttcccatgctgctcctcatcctctttctaatccaccgtgtccaccacaagcatcaacatttaggacaccaccaccttctccacaaccatcaagggattcacgacaatcaaagaaatctaaattccctgtaccaaaattggtgtccacatttgagaaaacgaagagtaaagctactactgctggcacatctcgatttttgaaagggattgcacgggacctcatgtcacatattgtagatttggccgagcaagaggagtctatagaaaaggctaaggcaatggccacaaagataaaaatcccaactaaggcagattataaaaatgtgcctaaacaatatgtgccgcgcagacctctactaactcttgagaaactgaggaaggtcctgttgggggccttcctattccgaaggtcctcaaaaa

SEQ ID NO: 176662 - DNA, 376 bp, Zea Mays
ggagtgcattagcgggaggtctctcttttattttctaaaaaaatggacattactgaaattgtacttaaagtcgtttttttgtatttccaggtgagtaactacgaaaaggagctcgaggacatgaagcacatgacaaggcaggagtttgtagcgtctctgagaaggtcggtctaacagcattgattaatcagtaccaactctactgaataaaatctgctgctctttgttaaattttgagcgaggtcaactgcatatttgatcttattagaccactgtatatgaatgcaggaagagcagtggtttctccagaggtgcatccatttacaggggagtgactaggtatgaatccatatataatagctaggaacatcaacaa

SEQ ID NO: 176663 - DNA, 842 bp, Zea Mays
cctagggtgttacacattagcagaactaaccatgattggatgacccatcctctgcaccgaaggaccagcacgcgacacaaaatcctccgaaacaaacgaacaactagagctagagtcaaaaagagcatgggcaaccaatgaatcaactgaaattgtacctgtcaccatgtctccctgctctctgccatccgcagagggtagcacataagctccagaaacactcgcggaagaggaagctcccggagtgaaattaacagaagaaccccacggagtcgaaggatgaggcagccgcggagccccaaactgggatggtacaggagcggttggtgcaggagtaggcgcgaccaagtactgagggaaacctggcataggcacgaactgagaagccccgggcatatagaactgctgctgagggggtggtacagaaaattactgctaagcgattgacatcacgttgacagtgccctgcgaagaggaagaagtaactagctcccatatgagcttcccattgggattcctcctacacaccacatccttgtgatcctggctgcagatagagcacctgccactccactgacactcggcacggcgatgcgcttcaccacaacggaaacacaccaaccccagcccaggcttaggaacagcccgatacctctgagtactccctcctgaagtaccagaatcagaggattttccacgataggagtggtgacgctgctgttgcgactttcccctcttgtgggctggacccctagtgttggccctgctcgcgtcctggccacgagactgatcaacacccgaagacttctaagattccatggtatactgatgttgcatctcca

SEQ ID NO: 176664 - DNA, 640 bp, Zea Mays
gcaaggagaaagatgctaccaactaggcaaagacagaggcccagactacctgggcggaggcccaagccatccagaagcgagctgctgagctagagctggaggtgaagaacatgcacgcctaccatgagagggtggatgttgccacacgggttggcttggacaggacacatacactttttgttggtgcttatcatgatttgggcgtggagatggctccctttgacaagtcatggggaagtggggacccgcttcctcggctgggtgcaagaggagttggagtccctcctttctatcatgatgggtttcatatcttatgcctcccttgttacctgcgaaggggcagcaaatgccttgtcccgtgagggctgtaggcacttcgaagcctttgaccatagtaatgaggacttcgactagggagtgttctaggttgaagacgacgtgatgaaacgttcggccggggcgctatacgatcggatgtggggtccccacggtcgcggagtcgtctaagagagggttggttggatgtggggtccctaatgattgttctttttgttgggggaggatgctttttatctaatttctaatgctttgatgtgttgtattcataggcgatgagggacgaagagatcgaagacctcgc

SEQ ID NO: 176665 - DNA, 419 bp, Zea Mays
cccacttggcttgttatcattgttctttagaccctttaagacttgcttgaatctttagatggcaagtgccatctcctctttattgaggccagccgcctcgacttgcgccacattgcttagggtctcctacttcttctcatttgttcccttgaaggaaacaacttgtggtttgttaggggagatgttcccttgcgccaagtcttcaatgtacttggagtccctcaccgtcatctcatggctaaggaacattccaagcatttctttgggaaacattttattgtacatgggcttctcatgaaccaaagatacaagagtagcagtgcgtgaagtaaaagatcttaacatgagttttaccacttcatgttccgtctttttcttgctccaaaggttgtggacctaatttagtatgcttttaaggc

SEQ ID NO: 176666 - DNA, 371 bp, Zea Mays
ggagaaggcgtccctccaagaaagtctcgaaatagcagaaggtgaagaggccaacactcgtgaagcctaccgaaccctgaagatggattacgataagaaattaaagaagctcacccccactaagaagatccggaagcggaccaagagccaaggatgccagactgaacggaaaaaggaagccccaccaacactgcctccctccaggatagaaaacttgtcagacgttgaagatatgtcccagctagccttgacgaccttctcaaggaatttggggataccttagaaagggagttcggaagcaccttagaaagcgctcgcgcgtagtgtgatttacggtaaccgtatgcttgtaatgaacttgtgtgatgaat

SEQ ID NO: 176667 - DNA, 546 bp, Zea Mays
ggcaggagcatttgtcaagccgaaagacatgacgagatactcatataacatgtatctggtggaaaacacggtctttggaatatcctggggtctgattctgatttgatggtatcccaatctaagatcaatcttagaaaataacttagccttggctagttgatcaaacacctgtgcgcgtggaccgacctactccgaccaccaccgccaacgattcgcacctcgacgtgatcgccagagacccccggacctcactcgacccctcaccgaagcaacctcgccgccggtaagcccctccgcccttttcttccgccgcggtcactgttccattaggggaaggatcgtgggttcgatttagcaaaaccctagggggttttctgtagagtcatagactcagatgaatagtgaaccgaggacctgtctgcaatactcttaaaacctttcgctagggacccagatgcaaaaccacttttccttaaaccaattctgtttattctttttaaattaaagcagaaaatttaggaaatttgtatcttgagaaatgtttaa

SEQ ID NO: 176668 - DNA, 536 bp, Zea Mays
gaagaattttagacctatctgtcttctgaatgtgtgttacaagattatttccaaagttctgaataatagacttgcgggttgcatcacaaaagtgataagtgattctcaatatggtttcattaaaaacagatacattatggatggagtcatatcgctcaatgaaattcttcatgaggttaagagaaaaaatcaaagtggagtggttttaaaaattgattttgaaaaatcttatgacaaagtaaattggcatttcctctatagtatgatggagaaaaaaggttttggtaatacttggtgtgattgggtcatgaggattgtgagaggtggcaaagttgccatcaaaactaatgatattctgggtccttattttactactcacaaaggagttaggcaaggggatcctttttctcctcttctgttcaatttggttgctgatggtttagcttgtatgattaagaaagctcaagatgagggtctgattgaaggtctgatccctcatatcattcataatggttgctgctgtttacaatacgccg

SEQ ID NO: 176669 - DNA, 532 bp, Zea Mays
ccgaattctgataagttcaccggagttagccgcttgctgctcggatgacacgtgcctagacgcagtacttcgtcgtagtgactcgctctagcacatccggtcatcgccggtgagcccgccacggtaaatgccaccaatcgcttgcgccaatgctcttccccctctccggccgccgcgcgtctccttcaaattcactagccaccgctcaggagacctataaattgagtacgccatgagctccgtagggtaattacccatccaaagcaccagcacttgcctccaattgttcaccagagaccacgaattgctcatctcccccatatcaggtttctggcaccgtgaaaagctcctcgccatggctagctcgattcaggtccaatcttgtcctctgctctgttgtttcagcattattgcatgccactgatgctcctcgacccattcaattgagctagactaccctagatctccgggaacacttctgttcatctgctgtttgcactgcctccgtggatagagtgatttagagctcgaa

SEQ ID NO: 176670 - DNA, 698 bp, Zea Mays
gcggcgattaacggcgagagaatgtccagcaccggtgctggtgatgacatgcaacctgtagcgtctgtgcatagatcaacaggtacgtctacttcaatggacatacatcctgtagcgtgtgcgatcaccggttacaaagagggtgtatctgttactccctcggcgacgttgagggcacctggacatattgatgagaacacaagatcggcaaacgtggtaggagcagataaacacatccccatgagacatattggggcgcatgaataggacacaccacatattcttcaaagccatgtaagttctctcaaatatgataatattagattcgtacatactttttgtaatgttgtacctatattacgttagatttagtcgctattgaatcgtaaatgttaaatttctgtgcacaaccggacaataatgatataagattgatacctaaagttggtatgacatttagtaacgtggacgaggcgtataatttttatagtcaatatgcatacgaggttggatttccgttgaagaaatatagggagcggaagaattgtaaatggttgaattgttcaatggaaggaaagaatgctgaaagggtagttggaaatccaaggatacgtaacacatgttcaaaacgaacacagtgcaaggctgggatgaaacttaaaaaaatctacgatgatgctaaagagaatgttatttcc

SEQ ID NO: 176671 - DNA, 603 bp, Zea Mays
atcttgttatgtgggtagagttcaagcaaacgtttacggaacattatattctagatggtgttctgcagatgaaactggaagattttgttcccttaaagcaaggaggagactctgtgatgcaataccttgccaaattcaaccatctctcccagtatgctatagagcaagttgacacagacctgaaaaagaagaattgtttcatgagaggtctgaatgatcagatacaatagaagatggccacttgtctagatctcactttcagcagggccatgagcacaacactcttggtggaggtaaagaattaggggcagggaagacaacacggtttggacatgaagggtgtgagggatcctctcaaggatccgagaagcggtcaaggctagtgattcgtccctttaacccaaatcgttcttttcctcgcccatcctcctatcctttcaagcaaccaatctttatccatccaactactacccctactcaaaatatccagtcgagtgcccctagtactcgtttcccagtcgtacctagttcatctaacagttgcttcaactgtgggaagtttgggcatttcatcaaggattgtccctatccgaagaaaaataa

SEQ ID NO: 176672 - DNA, 284 bp, Zea Mays
cagagtagaggtatacgtcgatgacatcgtggtcaagactaagagagggtcgaccctagtggaagacttaaccctggtcttcgacaagctgcaggcaacatgcacgaagctgaacccggacaagtgtgtctttggtgtctccgcaggaaagttgctggggttcctggtttcgcaccggggcattgaagcaaacccggagaagatcaaagcaattgaggcaatgaggcctccggcccgtatcaaggacgtccagaagcttacggggtcattagccacccttagcc

SEQ ID NO: 176673 - DNA, 644 bp, Zea Mays
ggaaggtgtttttcgcttacggctcaaaagtattaattttgtccacaccaaagcatttcatacatggacggaaaagtaagattatattacaaagtgaaactcaaattacatcatgctttatacaagttattacaggagttttttgagctatttttacagattattcaagcttcgacagcatctctggagcttcgtccatttactctgtagcttcagcttcggcttggtcaatctgtatggaagtattataagctaaattcaaaattcaaaggaaaaggtaagcataaggtatgattttgttaccagcttgaggtggctccgagcttcgtcaccagctttgctccgaccaccctttgtccatactaactttataaatctatttgcaatactccgagccagattgggaacattatctaggtctgctggtgacaggctgaagttgggtctattaacaatcttgccgtgttcacagccagacttcaaaaaggcaacagttgtgccccgagaagctgcgagggcacagaagtcgctatgcccagctataacttcgtcaagatcattaatttcaccttgaatgtgctcaaaggcaccaggtaggtcttcagccgaaggagtaaactcttcactactagctccaacaaaat

SEQ ID NO: 176674 - DNA, 1164 bp, Zea Mays
tatggcatcaggagataacagaatgcatgatttaacatgatactctgaatcaatgcaaatacagcgataatagtgctggataagaaatgatgctatgggtcatgagtgcatagaaaaaggcaatctgcttattttgttccaaggtatgagaaaacaaaaggcaacatttttatttccagagaaagcaaagtgcaaagcgaagaaactcgcacatgtcctgaagcatatagcatcgaagccagattttctttagtgaacataacccagctagaaggtaaacagaacgtcatgttcaccaaaaaggcaaagaaaaagagccactagagatcctgccccaccgcaaaaaaaacacgcacatactctcagaatcaccaattgtgactgagtatagtcatggattaagtaacacaaattcagcaatgttgtgaaaagatgccaaacattacataaacatatataacaagttatactttttgacaaacaaaaaatgaacttggaggcatgtgaatgcatatattaaaatatctcaagagctatttttccatatcacctttcaggattaggtaatcgtaagctataccaaacaaaatgccactaaaaaggtgtgaatagcatgtatagctacatcagatactaagtgaaggaacagaacatatcttcattgacaatagcataatatgtttctaattcagaaggcatgtggaattgtggattacacaaatggcattgcgagatttgtcgttgccttaaactatagtgtgtatcacactatcacaaatgatagacagaactaatataaaagacaatctgtacgagaatccataaaacacattcgagtaaaccatatgctgttataaggaaaagtaagtcatatgttgtatgaaaacttgaattaccatgcataagctatctagataatcatgacccggtgaagaaagtaacaaacaagcaataaaacagcatggaaatgacttgaggaacaaactgattgcagaagcagacatcacaggaagagcattatcaaaacattattcagttactactttatctgcagcagcacagctcgatcgtcagcaaagtataacagccataaattagcaaataatctctatttttagaaagggaccgtggatcttttacactacctgatttcgggcaccagcg

SEQ ID NO: 176675 - DNA, 744 bp, Zea Mays
tatggattgttgttacaaccatggtatggggaaacaatgtcgcaccatagtcatcgttagattcaatgacattagcatgaccgcatgttagcaccatccaatgacatctccatgtccttattagctcaacatatatcttttggggttccattagttcttttgtgtagatgctcacttgctaaaagctcatcaagaggtcccatctaagtcacatgtgagaaagcgcttggggtagacatccacattgcatatcttgtattgccttgtcatgtgcaaggtatatacattattacgctcctgatgataaatgaaaagatgcgtaccacaccttttcattattgggatccaatgtccttggatattatgggtgatgatgtcaaccttaagggccacaactagtgccttgatcttggtgacagctatgggaggttgtcactattgttggccattgatgagtgtagattgattaagcaatcatagatttattggaaggaggttagagggtgacacaagagaggctaacaacctaagaaatagcaacataagagaggctaacaacctaagaaatagcagtgacacaagagaggatggcatgcaacacatggatagataggaagaaaagcatcatagagggatacaaggctaggagatctaaggccttcacttctttgtttcaatagtacaagatatctatttatttatattccctatgacttgactcctgttcaatcttgaggtaaggta

SEQ ID NO: 176676 - DNA, 1035 bp, Zea Mays
caatccgctcgacgctgatgactggttgcgcacaataaaaaggaagttagaagccatcggatgccctgagaaccagcgtgttcatctggctgctcatcaactttctatgatggccctatcctggtgggataccttcagcattgccgtcagagatgctacttgggcagaatttgaagccgccttctgagaacatcatgtgccccaagggatcgttcagctcaaggaagatgaatttcgggaattaactcaaggaggaagacctttcagtgagtacgtgcacaaattcatagaattggctcgctatgcgcctgacgatgtcagcacataagccaagaagatggcccatttcttgaaggggctaagaccagaactcaagactatccttgccagccaagatttcctcagcttctcgcacctctcaaacaaggccatacaagtggaaagggctagggaagaagaaaagggtcacctcaagaggaaattccaagtccttcgagctcagcagcaggacaggcaccagagagttcgatcttttgggtttccacccaagggaccaagcttcaacaagccagctagatccactctgtcacgtttcagttaggaggggcaaagttccctccaggccccctccgttgcaagcaaccaacctccagcaaatgcctgttggcactgcggagaccctagtcactacaagaataattgcccccagttgaaggcatctgtgcctacttactccaactcggtgaatggccccaagaatgccccagcaaccgcctccaaggcaccctcctccaacagccagcagagcaagagccagtatcatggcagggcacgagtaaaccaagtcaatgctcaagaggctcagcaagcctcgggagtcgtgctcggtgagttcctagttgaatttactcccgctactgtactttttgattcgggagcatctcattcattcatagccactagttttgtggaaaagcatggcattcccactacacacctagaaatccccttggtcacccgaaccccagggtcaga

SEQ ID NO: 176677 - DNA, 927 bp, Zea Mays
acctcagtcacttcaagaataattgtccgcagttgaagacatatgtatctgcctactccaactcggtgaatggccccaagaatgtttcagcacccgcctccaaggcaccctccaccaacagccagctaagcaagacccaggttcacggcagggctcgagtgaaccacgttgacgcccaagaagctcagcaaacccctggagtagtgctcggtgagttcctagtcgaatttacccccgccgatgtactttttgattctggagcatcccattctttcatcgccactagttttgtggaaaagcatggcatccccactgcatctttagaaatccccttggtcacccgaaccctagggtcagaccttctatgccacctcaaatgctcccaagtcagaattcttttaagtggggtagtattcttggcagacttagccatactaccatcccacggaattgatgtgatccttggaatggattggttgaccaagcacaatggcatcataagttgcacagataagactattcttctcactgaccaccaaggaaaatcagtttcgtgtaaagctcagccaccaacctaagatccaatggtgttcagcctagcagcagaaagtatatctgtggtagaagaattcatggatgtgtttccggaagagttgccaggaatgcctccagaaagagaggtagaattctacattgatctcctcccaggcattgcaccaatcgcaaagagaccataccgcatggctaccacagaattggcagaactgaagcttcagatcgcagaacttcaatagaaagggtatattcgtcctagctcatccccttggggagcaccagtgttgtttgtcaccaagaaggatgggagcatgagaatgtgcattgattaccgatccttaaatgaagttacaatcaagaacaagtatccac

SEQ ID NO: 176678 - DNA, 539 bp, Zea Mays
cgcggctgtgtgccggtacaccatgatctcggtcgtattcctcccggcgccttatctcattctcgtgccgatgatcgcatgaagcactaatgtttctccatgtgtctcgtaagttgttgatggcatgacacaggtcgttcggcgggtgggcgagaggtagaagatgattggccgcctgagtaagcagccgtcgataaccctccgcatttggggtccacgggaggccatcggctatctgcgccagtactcctccaacttcacttggcatgttcaaagctcgggcgaagtcagggtacaggtttcgggcgagaagcggattctcccgtcggagcctagcatcttgttcaactagttcccgctctcgttcttgagcctgacggcgatcacaattcacaatggtgggaattgcgtcgttctcgatgtgttctttcgtcagggtttcccccatctctgaggcttcgtcccgagagacaggttgtgctgggtcccgttctccggcttcgtgatgtcatcgcatgtttcggcgcctgtttctccat

SEQ ID NO: 176679 - DNA, 1095 bp, Zea Mays
cctgggtgaaggggtatgggacataagtcgtacgatccagaatcgagggctctgattagatatgatcttaagtgaaacggtatgaaattgtggccatccgatcccacacggacggacaagatttaattacaccacggggtcactccgatccactcctaaccgttcgatccacgatcgacgactatgatccgacccggccgaaacaatatgtttgtcccaatcctcgctgcacatcgtgcaaccaacggacttggcacgccacctaccaccgatggcctaggacgacgacgcagggcaagggcacggcggcgccatggctagtagcggtcaatcccggccactaggtgcccgaatacacaagcgaaaagtgcaaaaagttgtatgagatctagcgaataccaaggtagagtccataccacatattggggcggtagtggccctgcccacgcggcacggtgggaccatggcgaaacccgtcaccagcgatgaattctctgttccccgactgctaaattcgtatggtgaggtcacggacaccgcccacgtttcgaggtgaagcaccctagcatgaatccggacctcgaacgacgacgcggatgaggattccacggcggcggtagcagcccaggttttcacttcctcgctgtggcgatgggcacgagcactgggcgcggcggcttcggtcgcgacccccggagatgaggcagggaactaccgcttaaatacccaagcaaggggaggtcgacgctcaacatcctgagcgatcccggcggaggcggacccgcgaacgcgcggactttggagaagataaccccgaccagcagggcccacaagacagccactgggtgctacatgcgcggcaaaggaagaaacttagtgggcgggcccgcatgttagtcggtaggcggagtggtggcgctgtgtgggccgcatggagggaaagtggagatgggctggcaggggaaagagggaaagaaatagagttgggccacgaagtggggttttgggcccaacgcgcaggtagttcatttttttatttctttttctcctttctcccattttcagattccaaactgaatttaaattcatatttga

SEQ ID NO: 176680 - DNA, 1017 bp, Zea Mays
gtgctcgcagtttgctcgctcacaggtgtacgctgtcttgatggaagcggaggccgtgatgatcccgcgtggtctggacatctttagctttaggtatatgtagttaggtacgaccatgaacttagcgtagcacgactagcacgacctctcgagtatggccttgtaagaccctagaaagtccaccacctcgaactgcagccattcagtgcgaaagttggaacggtcaccgaacgtgacatgcaaagtgatctgcccgagtgggtagaccaggtgggaggggatgacgccgtggaacggcgttgtgctcggtcgtagcgtgaagcgtgcaatccccattccgtagaaggtctcgatgtacatgatgttgaggccactcccccatccatgagctccttggtgagacgcttagagcctacgactggctcggcgacgagggggtaggccccaggatgtgggaatctatcagggtggtcgccgcaatagaagacgatcgggaactctgaccactggagatgttgtgggatggtcggttctgctgcatgcacctcttgatgggcggcattgatgcgacacttgttgctatatgcctctgccctgccgaagatcatgaggcaccccgttcgctcgaggaaatcttcgatgcggacctcctgctccgtcggctcctccggtcttgcttttttggtaggcggcttggagatgaagcgcttcagaagctcgcactcccgaagcttgtgatggacagggaagccgtggttttggcacgacgagttcattatcatctggaaatggtcgccaccgctcttggtcggtggtcggtgtgtggtggcgatttcctcttcgtcgagcaagggatgatggttccaccgatgtttgtcggggtgttcacaacgttctcttttctcctcattaggcccgtcgatgtcacatgggcccttccctttgcggaaaatatccccactgcgtcctccccattagtgaacttggtcactatatcgagtaggtccgcaattgtcc

SEQ ID NO: 176681 - DNA, 1406 bp, Zea Mays
cttgtgaggccgacagccggagaggcacagcgcaccaaatgattctggtggccatcgtggcggagctgctggaggagtacacggcgctggtggcgcgcgtgctggagcagctgctccacggcgcgcccttcccgcgccgcatgcgattcctcatgctccggagcctccccttcgccacgccgccgctcccgccgccgccgccagcgcacgcgctccacgtcggcgcgccctccccgcccctctgagtcagagtactgttcctcgacgtgtttcagcgtttggtacgtaagttctcatctcggtcatgaaagaaaagggtagcgaatgtgaatctgcgctgcctccgatcctctcctcgttgtctcgttgagaagcctcagcaagagcagtttcagtgtccacggatctgctgtgtaaattctttgcttagtttgtccgagtaatataatagcagtgattaatgagcaggtgattcggagttgttcttcttctccgtattttgccagtttggatagcttcagcgcagctgcctacctggttctggatgtgactagagtttactcttctccagtggcgtcacggtcaggagtagctagcagcctagcaggcgtctggaaatttcggacagacacgtggcagcccatgctagcttccaggcgttggaccatgatctaacgctggccgcagaatcgctgtcgctggcgagaagggactgcgggtgggactgccgtctcattcttttggtgacgtgtgcgaggggatccaaatccaagggacgagacgacatgcaagtgttgcttcaatcttggcccttaattctccgaatactcttcgtcatcttcactaccaccgagttcccggttcaaatccaagggactgccgtctcattcttttggtgacgtgtgcgaggggatccaaatccaagggacgagacgacatacaagtgttgcttcaaccttgacctcgttcgttcgttcactttagtatacaatagtaatcacactataaacacggttattgtgatctcgtaagacttataagtgtctcatggttaactacaattatgtgtgtaagtgtcaaataatacatgcaagtatcaagggttggatgtgtctatttctcactcctaatcactaggtataatctagagcaagcaataatataacagactaactaatcaaaatactttatagagcatctacgctaatccatgagtgatttttaattttttggggtctagagttatagaaatggagtatcaactttatagagcacatacgctaaacactttatagagcacctacgttaatttaaacaaaactgttggatccttggctaaaactagagacctctatagatgagaaatatgagtgcttaagccctgagctaaaataaatggtagccaa

SEQ ID NO: 176682 - DNA, 569 bp, Zea Mays
atttcacccggagtatagtcagatcgggaaaagctaaattacctggagattggagaagaacgaaggaagccccaaatcatgagaagtcagttggtgacttgacggaggattatcaaccgaggcaatctgcagagcatcattggggaccaactcagcatcaccagcagaaatcaaaactctagcatcaggtgcgctggcctctaaggcgacttcctgacccaaggcacgtgctgctgccatacaatcagaatgtggaggagaagacccgacgtggacatccatggaagtatgagaaggggaacccgctcggacaccctcgggggctgggtcatagctcgcgcttcccacccgagccggatcattaccgacaacaccgtcgggggctgggtaaacgctggcgccatccttggggaccgggttctctgcagcagccacctctaaggctaaaggattttcagccacttccatgggaacggagcaatctagatcagcctcttgactcttaagatcgtgctccaaggtcgatgaggcacgagacgctgctcgggataattctaattcgacatcag

SEQ ID NO: 176683 - DNA, 693 bp, Zea Mays
ttgtttggttgtttttccagctcgacaagttcaagcctcttggctttccacttgtcttcatccttcaaaatgttccaacaatgtataagagtaaatgccttgttttcgttgtctaagctctggaacatcttggttgcttctgcaatctgtttagagaatttgtccatgtatacatcatttacaaataaataaatttaaggaaaagattcaacaaatattttataccttgtcatggatagttgacccactttgattcctgcgcaaaatcgcatcatagcaagaacaaaacttgttcacttgtgtctgaattgtcagccacctatgcataacagaactctgtgtcctcggaactttatctttaatgtgttcctgcatgtgttcctcaaagaatgcatgaactctactccaaaatgtgggacgagattgattggccccgtgaatgggatctttgttaatgttcaaccaacctgagcatacaacttcatcttctgtggaattaaaattttttgtcctcttcgatccctttgtaccacgacttggcatcacttccacatcagcttgttcaacttcataatgaatgtcttgtgtgctcggaatgttcaagtcttgcataccagcaactccaccatcatgtccattgagaagaatgtcagataagaatccatctcgttccatttgaatgagtctaaaaaa

SEQ ID NO: 176684 - DNA, 709 bp, Zea Mays
taaaagtcgtcttcggtatatctgaaggtcgtatcttgagttttcctgagttgatgataacctgacctcaaatctatcttcgagaacacactggctcttcttagttggtcgaacaaatcttctattctaggcaggggtagttgttgttgatggtgacctcgttcagagctttgtagtcgatgcacatcctcttggtgccatccttctttcccacgaataggatatgagtggcccaatgtgaggtacttggtttgatgtaacccttctctgactgctcatctatctgcttcttgagttccaccaactctagtttagataccttctaggctcttttgggaatgggggcggtgccagggataagctctatggggaactcaactttccgctcaggcgatatacctggtaaatccttagggaaacatctagaaattctaatataaccttgatggcctcgagtgggtcagcctccttgctatcaatagtcatctggtagcaacctccttttttgactcgggtgggactagctcagtcaccacttcttctcctagtggggacaccaacttctccgttctcttatcacaactgataactgcttggtacttatctagctaatttatccctaggataacatctattccctgagtacccatcactatcaggttagcggggaactctatccccttatttccacccttacattcaaacatat

SEQ ID NO: 176685 - DNA, 1044 bp, Zea Mays
caagtttgaagcccatggtagagatggcatttgacagcatcgcagatgtagaaaaattttacaaaggttatgcacatgatggtgggttctcagttcgtattggacaacataagaaggttaatgatgaaattaaaggcaaatatttttattgtgcaagagaagggtatagagtacataaggacaaaaaagatattgatcagtctggaaaaaagagaaagaagagacataacgtgatggaaacaaggtgtgggtgtgcggcaaacatctatgtgaaccttggtaccaacaagaagtacacgatttcttcaatggttgagcagcataatcatggtcttgtatcgccgctccaccgacattttcttcgatccaaccgtcatgttacagagagggcgaagagtactttgtacaattgccataaagctagtattggcacatcctttgcattcagattgatgcatgttagtgatgggggatttcaaaatgttgggtgtacactgagtgatctcaaaaactattaccgtgacctaaggacaaaaatcaaggatgcagatgcccagatatttgtgtctcagctcgagaggaagaaggaagtcaattctgcatttttttatgactttgaagtggatgatcatggaagactaatgcgagtgttttgggttgatgccataagtaggaaaaattatagtatttttggtgatgtggtttctcttgatgcaacatattctactaaccaatataacatgaagtttgtgccgttcactggagtgaaccaccacttgcaaagtattttccttggagcggcattcatggctgatgaaaagatcgagtcatatgtatggttgttcaagatctttcttaaagccatgggtggagcagcacctcatttaatcgtaactgatgaatgcgcaagcatgaaggctgctatcaatatgattttgccaaacaccacccataggctatgtatgtggcatatcatggagaaggtacctgagagggtcagtccatctctaagggaggatcaagagttttgggacgcactaaaat

SEQ ID NO: 176686 - DNA, 435 bp, Zea Mays
ctgacacggatgtacaccatcgtcggccgcgaaaagctcacctgttacagcacccgacgggaagtttctgtttgcgcggagaacacaggaagcggagctgagtgaacaatggatagcgagtggtagcggggtccaccacatttgccggatcacaaacgcactctataatttatcgaaggtcataccgggtgttgctgaaacgaatagattcatccgatatatttagcgtagagaatgcttcaccggcccttgttggagcccgtctaagcgatctatctcgcacgcggcgaagcaatccatcatctaccgaccatggccggaggaagcatccgcgcggccgccaaggccgcagtgatcggcggctaccgctccgcagcctaaatgcggcgtgctgtcaccccatcgtcccatatttcctccgccgacgatccgaag

SEQ ID NO: 176687 - DNA, 467 bp, Zea Mays
tgaagacgctcgcgagccgttggatcggtgcggacgactgagattaggttagagcatatcccttcgtgggattcggtctagtccatcggatcgtgatcgtgcggatctcgtacaatctggggcgtttaaaatccgaaccgtcgatctttgatctaacagctagcacgccgcatttgtttattataaggctgatctaatctgagccgttagtttggaatcgaacgaccgtaagttcacgatacccctcggccctggaaacttgcttaagagtccctgtgcttttctagaatcaacccgcagtactacaaatagtattctgagtcttgaaacaacttgcgcagaggcccctgtagttccctggtttattgcgcccagtccagagcctgttgtaaattgaataaattaattagaaaatagattttaatatgaaaataagtgctaggaattgtataatccatagaaaattc

SEQ ID NO: 176688 - DNA, 854 bp, Zea Mays
ttctataaagagtccttcccactattcctctgtctcactgacacttgcagaaacacccccacgctttcacctctttacatcccgcagtccacgacgacgaacgacgggaaccgagctccggcaagctcaaaccgaccggatcactcgatgaccggtgctctacttcggctgagacttaattcaagccctaacaagagttttccctcaaataatttcactaacggagctctaactcgctctgtccacggtggcagcgggcacaacggacaacacgacgtgttcccggcgatctaaggcagcttaactcaatcgaattggtcgaggagcatcaagagaacctaagggtgctgaaacaagagagcagggagcacgaacaaacctagaatacgctgaccacggtgagggctctaccacggtggcggaaaacagaattgggggaaatgggaaattggagagttgtggtggctaatcggaggcaggagcgggtgctcatgcttggtgatgacctaacgcagcagaccgtgccttcaatttatagtggcgctaagtggtggctagtgaatttggtttggcgtggtggcggccggagaagaaaggggctactggcgcacgagattagtggctttcaccatggcggctctccggcgatcaccgggcatgcatgacgcgattcactgcgacgtgttaaccctccaagacgcatggccaggccggataacggtgaactccggcgatgccagcatgatcgtccacggtgggacacgatggccggagtgaacaggagctcaagttcatccacacgacgatctttaccaccctgagccacatccggtactttgctgagcccgaatcgc

SEQ ID NO: 176689 - DNA, 362 bp, Zea Mays
gttttatggcatttttaatatttgttctgcacttaacatagattccagggctataatgtaaattccagggatcttgatgtaattactttgcccatccacgcacgccgagttattttcctttaaggacaggggcccccttgcaaaaccgatcttggattcctacacaaggacacgtggcgtcctgcgactggctgagatcgtgccacaccccggtgcacatggtgaggcgcacgggatccgatccgcacaggatccccaccaccacacacacgtgcagacaaaagagatcatcccagaccaccggatcgacgatcaacggcccggattcaaagtgccgaagggttatttgctcttctaatctt

SEQ ID NO: 176690 - DNA, 836 bp, Zea Mays
ccctagtatctagtcaactactacggctattagtggagtaaataactgctgagaaaaagggaaccttcatagctgttatgttgaactgttgcattcttgggcccaactggattttcaactttgcagaaagaagcagacactggatacggtacattatggaaggcacaaatgagaagctgaacaaagtatttgctgacaccggtgccatgactattttgcagagttcaggtggcaacttaacactcgtaggttctgaaggaaggaaaaagataagttaacatcataatagcctattaacagcagcaggatcacaggttacagctctaacttctaacctcattctctgtctttggagagtagaaaattacatgtgcctggaatttactttactaattactccctccatttcagtataaggtgcggtttgactaggtgtggtttccaaaactatactttgacctatattttttcttatactacaatgtttctggcaacaaaattataaccatatgtagtttttcaaatactaaaccaatgatgtcacttttgtataacaaagtttacatcttgtaagcctaattgttggttgtaattacaaagtttgaatcttaaaattagtgcccaccttataaaaataaatgggggcagtactaagcattggtttaggagggcatgcatttgagtttaaaagaacagaaaagctcggatcattaaactaacgagctagctcggctcatcttatttatcagcccaagttggtttgttcagctcctgggctcaaatagacattgacaaaaaaatccgaaagaaatatcggcggtagactatatagctcc

SEQ ID NO: 176691 - DNA, 278 bp, Zea Mays
ttacattctacacaggttacacatctttacccataaaatgtgttccctttgtcatctcgggttgatcagacccgtaaacactaccaatgtgagtagacgagggtacaatgctaagcctttacagagttccactagaggagagaacccgctacagtttccggaccgaaagcagtaggaatccatcgtccgaaaagctaaacagacagtccgacctgaggacctccctacacctacactcctccaccctgcttgcccctttcgagaaatggttaactcac

SEQ ID NO: 176692 - DNA, 491 bp, Zea Mays
aactatcctgattcgtcttcaaattaactgatgcaaccaagctcaacaatcacccatttgatacccaccaaaggcatgtagaatgatgtagttgggggcgacagaggaagaacttttattattgaggctttttttttatcacgcactatattgaacaaattaggacaaactcctttagggttctatcattcatccaagtgtcttcctataatctagtttctccagcacccccaccggaatcttaaagaacgacatcatgaaaattggtaggtaacttaaaaccgagtcaagtaacaccccacgtcatcctgaagacaaaacttccctttccaattgccgagtctcttttcgaacctatcatgcagttgtctgccaggcaaatgatcctgacgccagacataagaaatccaatgcttggtattgctacctggaccagtcaagttgataacaccactatggaaacaagccctaatgacatttggcaattggcc

SEQ ID NO: 176693 - DNA, 818 bp, Zea Mays
tgtgaagccacgacatggacaaggcaagcgggatccgcatctcgatgggtgacgcagaagaggactcgtcgctgtcggaggcgatggatctggggctcagggcgcgcgagtgagggagtatcgagtgaaatgggctctgaccatatgaccggaaaggctaacagtgcatcaccggaggcggtgctcatcggcaccgtggtggtgaatgaggggtctaggtgggcgtttgtgggagtagtgactgaaatggcatccgagcctataaccagaacagggtggcctgacagtagctcgtggcgcggggcatagacttgcatcggatagtgtcgcgctccgaaggaggacgacaccatcctcatcgatgttggggccagacgaaggttccagagcgcatgccaatatttcaaagcacccgctacgactttaccacccagcttcgcaggtaaggaagcaccggtagcagccagattgcgatcggacaacagaaaagatttgagtcgacgtggacaacttatctatacccgttttgaaccagcttggtggtgctcattagcaccgtggtggtggatcaggagctcaggccgagcgagtgagggagtatcgagtgaaatgggctctgagtatatgaccggaatagggtgcaccgaaggcggtgctcatcagctccacgggtggtggattagggatctaggtgggcgtttgtggggacagtgagtgaaatggcatctaagcctatgaccgaaacagggtggcccgactgtagctcgcggcgcgtggcacaaacttgcatcggatagtgccgcgctccaaaggaggag

SEQ ID NO: 176694 - DNA, 805 bp, Zea Mays
cttgagctgtaggcagtggtccaacgatgtctagcccccagcgttgaagtggccatgtatgggcgatgagcttggtgaattgcgaagggctgcctgagcgaggggagaacttttggcatgcttcacatgaccttgtgactcgattggcagtacaaattattgcgggccaataaaattcctgacgaatcaccttggtagcgagggccctaggtcctgagtgggagccgcaagttctgttgtggacttcgcggaggattttatgccttcggtttcagttatgcacttcagcatgggctgactgatcccctttttgtacagctaaccctcgactaatgcgaagtctcggcttctatgctttagttgtttgacctcattgcgatcgcttggatggtagtggccttgcaggtacagagttattggggcccgccggtcttcggccatgatgaggttgacgatgcggtggccttcggtgtccagatttatttgtagaccttcggggttgcggacagctggcgtgccgatgacgtggtagaacacgtcggagggcaaggcctcgcccttggccgctgctttggccaacgcgtcgacctcttcattcttggcgcggtcgacatgctgcagggtgaaacccttgaattgtctctcgaggctgcagacggctgtgagatactgcatgagcgcggggtcttttgttgagtattccttctcaacctggccggcgactactttggagtatgtcctgattatgcatgtggtgacatcgagtgcttgtaatttgcggagtcccaggatgacggcttcatac

SEQ ID NO: 176695 - DNA, 509 bp, Zea Mays
agattttgtagtatgtttgaattattgtactctgttccactgtaatgatcccattaaggggaatattacgggaatgtagcaggtaaccgggggtataacagtacttgggaccccactacccctcgcggttacctataaatacccctacactgtacacgaatggggcacacataacaagacgctgcagttatctacctattgtcttgttgtgcacataagctctcttgtctctcgagtgttgggcccacatgttcacgtgttagagggaaccaacatttggcgcccaccgcttgtgctatgaaagaacaaacctgcgatgcccccccaagaaagtgacaaacagagccagcacatcattggacgacgctacgaaggcgaccctcgtcgaaaagaaaggcaaagcggccctcgccgatgacgccctcagggcgcaccgacaatgattgagcaataaacaacaaacatccccgaacagaaaacacacccattctcgaaggcaccgttcgcac

SEQ ID NO: 176696 - DNA, 438 bp, Zea Mays
cctctgctccccctcggtgagcagcccactgtcctccctctctctctctcttttctctgtcgtttaggcagtgaactccacccttttgcaaatcttcaaattcctgtgaatccaattgttgaaatgtgttcatatacctccattgtgtatccctgcaaacctttagctccttcgggagggcattcccacctcaaatggctatattcctaaaaccctaaatccccgcccaccaagtgttcggtgaaatgcccaaaccagccaaacttgctccaattgaacccaaatttttcaggcactttcaccacacttccagtaacctacttgccaaatttcacgccaatccgagatcccaggcttaaatttcaccaaaattcccgatttgcgcgatcgtttccgagccgagtgccccaaaccctatttcttcgcctaaattcaaac

SEQ ID NO: 176697 - DNA, 956 bp, Zea Mays
tcctcggtagcagttctgctgctgctattgacgtcgatggcagtggctccggtgcaggggcagggacaccgggcacgacggagacgaccactggatccaccagcccaacggctgatggtagcacatctggttcaattcctggtaagcgctctaggaggagggctccaacctctaaagtctggttgcattttgaggaggttactgagaaccagtgaggtaaggaggtaaggatttttgcaatttgcctccactgcaagcacaccttgtctgctaaatcttcatctggaactagtcatttaattcgtcacctagaactatgccctgctaagaaagaaaaagaaagaactagttgaactcaagctttgcttaagtataatgctgatggatctgttgtgcattgggagtactctccatctcttgctagaacagagctttgtcgtttgattgctaggctagacctacctctatgttttggtgaatctagtgcatttcaagaatatattacacgtgctcataatcctcggtttattaagtcctctaggcaaactactgctagagatttgattaaattgtttaatgatcgtgctgaagaacttattggtgccctgaaatcagtttcatctgttgcacttacatctgatatttggtctggtaaagctaaagaggattacatcagtgttgttgctcgttttgtgaactctgattggtgtttagaaaagaggttacttgcaggtcttagacctatagaggtagttactaggtataacatagttgagcgtgttcaaatgattgcagatgattatggcattactgataagatatttgctattgtgcttgataatgcctcatctaacaaaactgtgatggatgttcttaaaccattgttttctggttatattggcaagttgattcctctgcctagtagaaatgaatatgatttgagtgctattttcttg

SEQ ID NO: 176698 - DNA, 379 bp, Zea Mays
gtcccaaagcaaccttctctcgtacgaagtggatgtcaatttcaatatgctttgtgcgacgatgatggacggggttggcagtcatatagacagcactgacgttgtcacagaagacgattgtcgccgaagagatgggtgcatgaagctcctagagtagctgacgaagccaacaagtctcagccacagcgtgcgcaacagcacgatactcagcctccgcgctcgaacgagaaactgtagtctgtcgtttggaggaccatgagactaagttgtcgccgaggaagacacagtaccctgaagtggagcgccgagagtctggacagcccgcccaatcagcgtcggagtaggcagacaaacccgtaatgctgctggtgccgatgtg

SEQ ID NO: 176699 - DNA, 823 bp, Zea Mays
gtcttggttgtcgaactgcttgtcgttatcgactgtccattcggatgggacttcgaaccgatatacgatattctgccagaaatttttttgtgttgtcttggatgttattgtggagactgctctgccctcgatccagttggtgaagtatttgacagcgacgaaggtgaatttgagattcccttaagctatgggtattggtccaacaatgttaagcccccaccgttgaagcggccaggtgtgggcaatgagcttggtgagttgcgaaggggtgcctgttcggggagagaatttctggcatgctttgcacgatcaggttactcggttggccgtacatatgactgcaagggccttgggtcctgagtgtgatccgcaagtttcgatgtggattttgtggagaagctctaagccttcagtttcagttatgcatttcaacataggctggctgattccttttttgtaaagctggccgctgacgattgtgaagtctttgcttctgtgtttgagccttttggccttattgcgatcggatggatggcagtggccttggaggtatagggttattggggcccgccagtctttggacattataaggttaacaatccggtgcccgtcggcatcttgtgttatttgcaggccttcaggatttcggacagctagcgtaccgataacgtgatagaatacattggaggacagggctttgcattttgctgctgctttagctaatgtatcggcctcctcattcttgtttcgctcaatgtgttgtggagtgaaacccctgaatttgtttctcgaggcctcgaacagcggcgaggtactgcattag

SEQ ID NO: 176700 - DNA, 1029 bp, Zea Mays
tttgatttggccggtgactaccttagaatcagttttgactatgcatgttgtcactctaagagctcgcagcttgcgaaagtctaagatgactgctttgtgttcagcgatgttatttgtttatctgagtctagtgcgaaacggagacgcatgacgtatctgcatttgagtcctgtgggtgatgtaatgattgttgcagcacgggcacctgtgtgacaccatgccccattttagtggatggtccggatagtccctgcacgaaactgatgtggttccgaaggccctgtctagtctaccatgaagtcctatgggatttgattgctgtcctaggttcgaaggtgatgttgtaactagagagttcaatagcccatttagctattctggcggacgcctccgaatttctgaataactctccaagaccacgatctgaagtgactcgtactttgcgtgcctcaaaataatatcttagcttacgtgaagccatgatgacggcatacactatcttttctaactctgtcatgttgcacttggaggtggtaagtaccggcatacactatattttctaactctgtcatgttgcacttggaggcggtaagtacttcagagacaaaatataccgggcattggtgggtcttgccctctctgctcctttcttggaccaaggctgcgctgggtgatgatgcaatgtagagtagtagggctaagactgagtctggactggttaatgttgctagatcagacatatattgtttcaaaggctcgaaggttgtggcttgttctgggccccaggtgaagtcctttgcaccgcgcaacattttgaggaaaggagagcttcgctcaatggatcacgagatgaatcttttcactgcagccaatctgcctgttagccattgtatgtcttttgttgattgtggcggtgccatgtccatgatagcctagattttgcaagggttggcttcgattcatctgtgcgatacgaggtagccaagaatcttgtagcacccctggtgtttacctactgttaaactgtga

SEQ ID NO: 176701 - DNA, 404 bp, Zea Mays
ctaaaacatcatgtagtatggttagatcaggatctggattaggcaacacagcttttgtgtccaaatcagaaaaattaagagaggctctatctggtcagagaggtaccatatcaaagatatttgaagaaggtaactttgcttcaaggaagattagcagatcaagtatttgtcttttttgagtccttaccttttttgtcttggtgatagataaggtcacaaggggcatataaggggatatcccttggtatatgtttttcgtggacgatgtactaactagttggtgaaagttggatatgagtaaatagaaaagaagagttagcgagagactctagaatccaaaggtttaagactcagtataactaaaacataatttatgagatgtgattttggcactaaagataaga

SEQ ID NO: 176702 - DNA, 765 bp, Zea Mays
accgccgtcaagctccgaccatcgggagacgtagactggtcaactccgaccatctccggccgacccaaaggtactggcatgttcgccgtaacctcctgcgttttccccaccctcttctagaaccgctatcaccgacgtcgagctgcatcgccgtgtcttctctctggccattgttttagctgagagaaggaccatgggttcgatactttaaaaaccaggggctaagcataaagtcactggctcagttgaatagtacgccgagggcttatgtgtgagagaaaagggaaaagataaccagggacccagatgcaaaccatttatccctttacgtttaaacaaaatcctttattaatcctgcagatagttttaaaaattcataacttgtgaaataggtattcaaatgtggtcaaataaattttgctaggctccatgcaagttaaacaggagagaaaaaaatagaaaacccctagtcctgtttaaggaagttgttacttaatttaagatataagttaaaatgtggaagtaaaagtaaaaataaaaatagtaggacttttgtactatggctagaaaatttttggtagatatctactcaacaatgaacccctacaaaaatactatacagcctagttcacccaattaagtagggattataaattgatttaaattcttgcctatttttttggaaaattgaaacaagacctaaaagtataaaacaacagacaaacttatttttcctagaatacttaacatagtgtatatattcta

SEQ ID NO: 176703 - DNA, 272 bp, Zea Mays
tggggatgcaaccaaaattggtgaggaacaagtcctttacaagttaatgataaaggaatagaatctttttcacaattgttgttgcaacaagcagaaggcaacctgacaaacacacatgacgtgtaagcatccttgtgcagcgatcaatggcgtgactggtagaaacggggtcgattgcagaacacacgaccattggttctcacatattgtgttatgccaatgcaaataccagcccacataaatgagagcaccaagtgccgagcatcatttcg

SEQ ID NO: 176704 - DNA, 632 bp, Zea Mays
ctcggtttgaatttagacgaagaaatagggatttgggcactcggctcggaaacgatcgctcaaaacgggaaatttggtgaaatttaagcctgggatttcggatgggcgtgaaatttggcaagtaggttactgaaagtgttgtgaaggtgcctgaaaaatttgggttcaattggagcatttttgactggtttgggcatttcaccgagcacgtggcgtgcggagttctagggtttcggtgaaaagcgtatttggtggaaaaaccctcccgaaggagctaggaacctgcaaggatgttcaaggcacacatagaaacacaaatggccacatggtttcactggatttcacagagattcaagattggcgcaagaggagagaaaaagagggctccactgcctttcagtcagagaacaagagaaagggagaggagagtggagtgcagctcaccgagagagggagaggatgagtgtaggcacaaggtcgccggagagtcgccgccgttgaggggagatcgccggtgaggggagggaaaacgcctgagaccgagagcagacgctgacagggagaaacagggagcctctggctcggctctgcgggctggaggcctttttaaaaacgcgatatgggcgcaccgg

SEQ ID NO: 176705 - DNA, 301 bp, Zea Mays
gttcaattagctgggccgataagaatccatagcacacaagggtgctgaaacaagggcaaggagggtatgaactaacctgtagacgtctagccacggcgatctctctcacggtggcgttctgaccgatttgggggaaatgagaaattgaggggctctggtggatgatctgaggcaagggctggtgcgttggatgcgtaaatacctagcggaactcacgggggcagcaatttatagagttctacagcggtggcgtccaatttgaagaaatcgcactggcggccgagagagaggggtgagtcat

SEQ ID NO: 176706 - DNA, 524 bp, Zea Mays
tagagtagatattcttacttgaagggtggattgcaggtgaagcaacacctttatttaataagacggtctattctcccctcgaaatatgactcaaacaacagtaccataatttcgatgatgaaacattgttaccatcatcatacatattcgtgattgtattcttgaagtggtcgatctaggctcagtgtaaatagagatactcagtgtagtatgtgcaatcgttgatgtagccgttcgctcggggaagaaggcaaccgccggattgaacgaagacaatgagtagttgcgtagatggacttcctgaaaacttgatcacttgtctaaccatgccacacccttgctactattgactcatgccacactcttcacaaaaggagtgttccatgtgagctctagcactttgatccaactatactactggcgctcttcacatcttgctctacctagtgttattattttcgcctcctctcatggtgagcacaataccactcacaagtctttatccggagccacggagccatgct

SEQ ID NO: 176707 - DNA, 600 bp, Zea Mays
atctaaactgctagaaagcttggtcataacatcgggtcctgggtggccgagacgtcgatgccaagtggtgaagttggtggtggagatcaggacgacaggtggacacatgccggcggaagagggtcggagcgtgtagaggggccccgacgctgtcacatcgggcgagtggggtcctggtggccagattcttcacagaaaaactagacgggtcaaactcaatggaacatgaattgtcgatggcgaaccgacgaacggaaagaagattatgagtgatgtgtggggctacgagaacgtcgttgagatagaacggtccagggagcaccgagacacctactgaggtgactggaagagtggatccgtttccaacgacgatcgaggtagggtgtgtggaaggaggtgggtgggagcgagataacatgcctgtggtgggagtggtgtgataggatgcaccggagtcgatgacccagtcagaggatggtggagccaacgccatggtgctgtagggcggcggcgagggcgttggggtcccagcctctagcgaatgggaaccatggtgccgtggtcgatgtccccgtaggctggagctgaggtggtgtcggg

SEQ ID NO: 176708 - DNA, 1110 bp, Zea Mays
ccgtcttaagtcactaccgacttaagccgattgctccgttagtagtgtatagtggtcaccctaagttaagtgggcatgcagattgatagtaagtagttcgagtgcccttgagaatgaagactttttattgatgatgcattttctggttacagaatacaatgctgccatgatagcttttgaaatttagctaggggtaaaacttcctgaggtgctctatattccctgaattccctatttccgtgccatccatttgagtaagccggtatgatcccggccgggtgacttctgctactacaaatggcccttcccataatggtgacaatttgtgccgtccttcccctgttagaattcggcgaaggaccaagtctcccactatgaaagatcgatgcagaatagccttatcatgatagcgcctcagggtttgctggtacctggctgactgaattactgtattcaattgttcgtcttccagtacatcagtatcctccaacctggtagcctctgccttggctatgttttcgaagaccaatcttggtgctccaaacctgaggttggcaggtagcactgcttccgaaccatagaccacgaagaaaggagtgtttccatgcaaggctcggctaggttgagttcttaggctccaaaccacatatggcaactctctgatccattttcctatgaacttttcattcttatcgaagactttcttcctaagtgcttccaatatcattccattagccctttctacctgaccgttggctcttgggtgtgctactgatgcatatttgatctggatgcttctttgttcgcagaaatcaaagaattccgagctagtgaaattggatcccaagtcagttataatgttattcggtatcccaaacctgaatattatatcttgtatgaattccactgttttagccgaagttagagaagcgatgggtttgtactctatccatttagtgaatttgtcaatggcaaccagcacgtgagtatatcctccttgagctttcttgaagggtccaatcatgtccagtccccaacacgcgaatggccatgttacgggtatggtttgtagttgttgtgctggtaaatgctgctgctttgataagtatt

SEQ ID NO: 176709 - DNA, 752 bp, Zea Mays
gagtgtgaattcaaccatgatctagtgatcaaatgagctcagtcactatagtcgaaatataggtggtatatagctctccaactttggtgcagtgagatgacgaagttgtaatgcaaaaattggagaggaattgctctgaagttgctctgtcaggcgtcttaaactgaatttcccatggtacagtgcctggaaggatcagatcaaccgtgcccctcgccgccgatgactttgcgccgggattgtcgccgccgttgagattcgcactcactggtaaccggatagcacttggagtcgcgtaaatatcctcgccgtggatagactccgaccattaaataactccggccaccgtaccatggttaccgcggcgtaattggataagaacgccggtgatcgccgtcgcacggccttgcgccgcgtgtccgagtctttccaccgtgtcgccctgtctccctattgctgtcccatcgtcgccggggaggttgccacgacggtagacacgaattcaccgcaccctcgttcttcttcatctccggccgccagcacggctcggccaaattgatcaccaccgctcgctccttctataaattgagcccgcggccagctccaccacattatcacgcaccaccccaaccagtattgctcccagtcaatcaccagcgagctcgaattttaaacttcccccaattcggtttccgcccccgcgaagaacagcttcaccgtcgccagccctgttccggtcagtccctgtcccc

SEQ ID NO: 176710 - DNA, 597 bp, Zea Mays
attgggttcagcagatttctgaaaaggttcgagaaattcgtcagaatattttggcagctcagagccgtcagaagagttatgctgatgtgaggaggcgggatctggaatttgctgtgggtgaccaagtccttctcagggtatcacctactaaaggagttgttcggttcggtgtctctagaaagctcagcctgagatacattggaccgttcactatcttggcccaagtgggcatcctggcttatcgcttgctactgccggattccatggcaggggtacacccggtttttcatgtctctatgttgaggaagttcttgcgggatctggaccatcagattgagatggaaccaattgctgtgcaacaggatctgactttggagtgtcgtccagtgcgtatattggaattctcggagcgtgtattgaggaagagatcaattaagtatgtcaaggtcttatggactaatcagtctgagtgcgaggctacatgggaacttgaggagctgatgcggcagaagtatccagaactttttgttgtgggtaagtgttgttgattcattaatctttccttttgttgtttcgatagaagcgtctgaattcgag

SEQ ID NO: 176711 - DNA, 989 bp, Zea Mays
gacaaaggcaaacactgccttggtgtcgatggagctgcagaattatcggaagtcctggttgccaaactgcttgccgttgtcgactgtcagctcggatgggactccgaaccgacatacgatattccaccagaagaatttttgtgaggtcttcgctgttattgtggagactactctaccctcgatccatttggtaaagtattcgacggtgacgaaggtgaattttaggttcccttgtgcagtaggtagtggtccgacgatgtctagcccccatcgctgaagcggccaggtgtgggcgatgagcttggtaagttgcgaaggggcggctgatcaatgagagaatttctggcaagcttcacatgatctggtgactcagttggctatacatattattgcgggccaatagaatccataacgaattaccttggttgcgagggcccgtggtcctgagtgtgatctgtaagttccgtcatggacttcgaggaggatctctaggccttcgatttcagttatgcatttcagcataggctggctgattccctttttgtaaagctggccctcgactattgcaaagtctctgctcctgtgttgaagccttttggccttgttgcgatcagatggatggtaatggccctagaggtatagtgttattagggctcgccagtcttcggccattataaggttgacgatccggtggccgtcggtgtcttgcgttatttgcaagcctttgggattgcggacggctggtgtgccgatgacatggtagaacacgtcggagggcagggcctcgcctttggctactactttggccaatgtatcggcctcatcgtttttgtttctctcaacgtgttgtagagtgaaacccttgaactgcttttcgaggctacagacagcggtgaggtactgcatcagtacgggctctttggctgagtattccttttcgatttggctgacgacgcccttggaatctgttttgatgatgcatgtggtga

SEQ ID NO: 176712 - DNA, 1457 bp, Zea Mays
aaagggatgtgactcagcctctggctccatcagagcagaaggaatatctgaagacaagaaagattttgaccaactaaatgaatctttatgcagcaagttggataagaaaaagggcgcccacttcttgggaacctgcaccgagggcaccgaattaccaaccggggcaaaatagttagcccagatcctatagaactggtcattccttttcctttccaagtgactcagcaaaacagggtccggctgccagtcttgcgaaaacataaagttcaacaccacattgctggggccattaacgttaggctccaccggttgagcatcagggataacaatatcccctggcacatggagatctccctgaattggtgggccgtcaaactcctggagcccaatcataggggcatcacccaaggtagggggcgggggcattaaagtggggcaccggcccaacaaccaccagatcaacaggaatctgcccattctgaatctgcccattctgcaacggagcaccatgaatgtgactagaagaactatccgaggacaggtccgaatgcggattgctgacctgctgttcgtcaggtggcaggtccagttggggctgctgcacaggtggatcattaacaatccattggtcccaatctccttgaatgttgtctgctagctgggcttggacattgtcttctggcgggaaattaagatcccagcccgcagccggcacaggttgacccagaccaaaaaactcaagaggaagctattgaccatcctccgggaccactggcaccgtgtcctcatcttgaggctgacccccagcaaagtttgctggatgatctcgcactgcactgtccacgagtcaccaataaagccgtcagcttctgaaaaacaatgaactgtgggacctcctccagagacgtgacccgaaccctgagcaaagtcctgtaaacattgcgtctgtcctcttcccacaagatcaatctaccgaaagaaccaatagccgcctgcaagtattctgatgaacggtaatccagggggaatcccaacaacataagccagcattcccgattaaataaaagggctatatgattccaagcatcgttatgccgctgagcagtgaaggaggcatcgaggtattgttgcggaccgagcaggacgagattgtctctttcaagcacgctactaaactgaaccagaacctgacccaggtgcgaccgctggatatcgcgcaccccaagccgcctgtgctccacaaggtattctctgaccacatccctcaccgccaggaaagtaatctcatgatcaggtaaaggttgaatgttgataatagcccagtcctcatgcaatggcgagaggcgcctagtcactgacctggccataatctcccggtgaaggaccaccgaagcgctgaagcccggcgggagaaagggttcaggatcaacacgcctatacgccatcagagcaggaat

SEQ ID NO: 176713 - DNA, 712 bp, Zea Mays
cccccagccactagaggtcgggaacactctatttgccaaaaattcttgcactagatctctagtgctgatttctgccgccacaactctaaattcaacttcagctacctggcatggagagccaagctgcatatggcacaaaggccttgtcattccgaagctcaaagtcagtggactcataaccatggtcatcagcttctccctctttttctcgtgcggtaactaagaactggtgcctttgtatcctttcgatacgcaaaattgtaacagccaaaattttcgtgaagaccatctgccctggccttcgtgtggtaatgcaactcgtgcacccgacagaaagcttcggcattagggctcatcccctggcttcggagggcccagatgtagacaccaagcctaacaatcgcgttgggtgtcaactgatgaaggtatatttcgaaatgcttcaaaacttatcctatcatatcatagagaggaaaccgaagcccagccctgaagaagcttttaaacacaacaacctcatcatccttcggctctagaaccacttcttcaccagcaaagcaaacaagcctgctctcagcttcaccaaagtaacccaatttcttcattatgaccatatcatctgacgtcacggtggatctaccaaagtcaagatgactaggtttttctaggatcaagatggtgtaaccttctttgtcttcatcaccacttctct

SEQ ID NO: 176714 - DNA, 736 bp, Zea Mays
aggcgtcggggccatcttcttgcaatgtcaagagagcagtgtggagagaatgggaggaagaaacttgtggtatttaatgtggcatggaggaggccaacagatgcctgttgaatttacttcttgctgcgtcaatcaagagtgactgctcgctccacgtgaaacgtcaatttatcgtgcactttggactcaaagctagaacgtcgattattgatgcaccggagggagtaatatttacataccctatcggttacaagttagctgtcacgctgctatagtaagtctacattttgttctactactagactagtatatagttcgtgctaactctacccaagaaaatgggtcgacaatggcggggaagggttgacggcgacgacaacgaaaatgtgagtctacaatgatgctaggaggagggtgatgctgacgatgacgaggtcacatgaaggcagagggatgagtagggataacaacgggtttgaaacctgtgtgtatagggtttacaaacccatactcgtacttgttatcagcgacgaatacaataagctacctatcggacacccaagaacaaggtgtaacacccaggtgtttgtcacgagctaaatcgcgatgctaaacctaaccaagtaggttagtagtgataatgaactctatatcacatccatctccgcctatatctgcgatatcaaggatcttgtgaagttcggaattatttcgtcacagtaaataacgagacggg

SEQ ID NO: 176715 - DNA, 380 bp, Zea Mays
gggggtgatgccatgaaaaggcgcggccccagcccagacctgggaccgacctatccccatgaggtccaaggtgtcagcatagatgatgttgaggttgcttcctccatccatgagtaccttggtgagatgagtgttgtcgatgatggggtcgacgacgagtgggtacttctccgggttcgggacgtaatccgggtggtcgtccctgtcgaaggcgatggcgcgattggatcagtctaggtagactggtgttgctgcttcgactgagaagacttcttagtgctcctgcttccgttgccttgaggagatgtttacggaaggtccccaaaatatcatatagcagttgtgaacgtcgaggaactcctcgcctttgtcgttgtccc

SEQ ID NO: 176716 - DNA, 434 bp, Zea Mays
aaccgaccctatccacaaaacaaatcctgtatctaaaccgaccatatccacaaaacaaaccctatctctaaaaccgaccctatccacaatatagatcccatctctacaaccgaccctatccacaaaatagatcctatctctaaaaccgaccctatccacaaaaccgaaccccccacccttccaacacctcgccagaaaccctgattcggagtccaaacttaaaacggccataactttcgcctcggaactcgaatcgggcccatttttttcaaatcgcacagaattaaattttgcatccgattttctggctttgtcagattcgctgtttttaaaattcccaaattcggcttggaaataggacttctcattttctaaacatttattccgattttagggcaaacttgaagaaattccagaggacgcgtcattgcaca

SEQ ID NO: 176717 - DNA, 695 bp, Zea Mays
tgaatttcaattgaaaaacttacttctggaagaagaaactaaaatgaagcaaattgcaagagaaaaaaatgtcattgctggggatgagaatactaaatattttcatctaaaagctaatggaaataaaagacgtctgagaattcattctctgcttgataatgggatacttgttgataatgaggatgggattaataagctagccaccgactattatagagacctttttggtccttcaaacgtcttgaccattcatatgaacgatatgaatatgcgaaaacttaatgaggacgacagaaaatttcttactgctccttttagtcttgatgagattcataaggttgtctctgatctcaaacataattgtgccccaggtcctgatggacttcctgcagaattttttcaggatttttgggatattattaaaagggatatttggaacatgtgtgatgattttagtaaaggaactttggacattaaaaggcttaattatggattgatcaccttaatccctaaggtggataatgctatggaaatgaaaaattttaggccaatctgtcttctaaatgtttgttataaaatcatcactaaaactctgaataacaggctatctacttgcattaacaaggtgattagtgagaatcaatttggttttgttaaaggaaagtatattttagactgtgttgttgctcttcatg

SEQ ID NO: 176718 - DNA, 528 bp, Zea Mays
aaacaaattgtgaagagagatctggatcgtgatccattaccacccctatgggcaggtcaatgcagctgcaaattctagtttcctctatatttacaaatttcaggtggcgcaaatgtgatgggacttggttcaagaaatggctgcctaatgagaccaaagttcacacgtttggggtggcacgtggcagtaatttgctgggttgtatatgcttatatgtaaatcgtgaactaaagttacttggatggaaaatccattaaaactgctgattatatgttatgcctgcactcttatgcaacattgggttgtttgcgaaagggcctctaactgagttcgttaggcgactacccatgggagcaaatttttaggctgagactaaaaaatccaatcacctgtcccacaccaaaacatagccaaagcataggtctaaggctcagtccctatgcggtcattctcacgtgggctatgatgcagttgtgtattgatggagcaggggtttagaggttttctcgaattgcatgaggtgttaat

SEQ ID NO: 176719 - DNA, 769 bp, Zea Mays
ggaaaagccccccctctcggttgggccgattccggctcacactctccgcccccgctctccttcggcccacctggcccaccagcacgcgcaccctccacgccaacgctctccccctctcactcgctgccactcgaccccacttgccagccgcaccccctctcactctctcgcgcctgctctccctctgatgggtgggtcccggatgtcagctccctcttctgcaccagcgcacggcttcgccgtgaaccccaccgaccgccgtcctttcctcgcctcgccattactcctgcgctagtgaagttaatcactgcttcatccctcacccactgtgctagcaccctcgcacgacaccccactccgtgccatcccgtcaacggcattgcgcgccatcatcaccatcgtgttgcgcctcaccggcgtcagcttgcctcagccgtttccctccctcgggcacctataaaagggcctcctcgtgctccttttctcttcgcatcggccacgaccactctccctccccctcccctaggctcaatctagccaagcgccgccgcctccctccgctccggtgagctctccctccgctctccagtagcttagggtcaaattgtgatagctcacgaacttcaccactttctccccctgtcatggccagtggcctcgccgacgacctcactgccgcggaagcccaccacctcgccgtggacaagctgtcctaagcttccactaaccaaattggcctcgccaccttaaccgccttcctctgctcgtg

SEQ ID NO: 176720 - DNA, 353 bp, Zea Mays
ataatctggacttcacaatggcaccttctagactagacaacaattctttttcttctgccactttgaaaaggctgctgaggacatccatcaccaggacaaagagcattggggagagggggtccccttgcctcaaacctctgtgatgtctaatctgttcacctggaaacccatttaataaaatttgagtcgatgaagtggccagcaaattggagataagattcctccacctattactaaatccaaggtgggttaacacctcaagaaggaatgcccaggaaacagaatcaaatgcctttgttaagtccaatttcagaaaaagctagccacttttttcctgtgtagggacttgattg

SEQ ID NO: 176721 - DNA, 417 bp, Zea Mays
gcgacgagaaggtgtgtgctaagcttgcgacagagaggcggagctcaagagctagagcaatttgatcatacaccactagagagaggagggcggagctcaccgaagaggggagggatgacggcgtcgagctcgattgggcccgagggagggaggtggagtggccgagacctggtgtggtggaacaaggggctcggggcggtccttttataggtggccagggagggggaagggaggaggagcggtgagcaccggcgagctcgccatgacggtggtgatggcgcaaaatggcgacgggacggctcgggcacagtgagtgggggcacatggtgccaaccgagctggtgagcgcgttaatggcgaggagatggggcggatggtggccggcagtgaacgcgccggtggcctggtcatgggcga

SEQ ID NO: 176722 - DNA, 446 bp, Zea Mays
aaatgtaccttttcatattggaatatttggtttgaatatttaatctaaagtacaaattcacaacagagatttgaattaaaatttggatttaaaaaaaagaaaaaataattgaaaataaaagaataagacgaacccagttaaatgggcctcgcgcctcacttccggcccatctacacattagacccgtgtggcccaccttgctccaccacgcgcaaccgcgctcttttccgcactgatctactggccactgacatccggggcccactcgtccgactcacgctcgctcttgactcacactggatcgtgggtcccatccgtcagctctactcctcccctttcttcgctgcttccgttcttctccccgctcgaatcgcgctcagacgtcgccgcatcctcgggagccgttgttcagctccaggtaatctcgcgcctatattaagtgccac

SEQ ID NO: 176723 - DNA, 633 bp, Zea Mays
accatctgatcaaaggatcaaaatgtatagaatgaaggtgccccagcctgaataggcaaatggactatgtatgtaccacgggttcatcgccgtaccattccacatttgaataggataatataccaacgatgagtaggcgggtggaaagtatcatggcatcaatggatgaataggcgatgcttgttgcatcgcctttcgggctgctttattcattcgttttgttttagcatgtgatggtggtttctttgttggtcgatcacgtagaacgaccttcttgctaatgtatttggagagcaatcgatcaaaagtagggtcggatttgaccagccgaccatgtacgttatatgtgctttgctcttacgtctcctttttcgctttgtgtggaggctgacgcctctggccatgggcagactgtccggctgagtaagctagaccgtctgcatgagcaccggaccatccacgcgcatgtgttggatagtccgtgatgctcaagtcagggagtcgtgctcagctgctcaattgagcctgcccccgacgcctccagacatgttagtcttcttttccgaagccttccgagcaatccctccttgcgatatttgacatgcgaggattaccaatgacgatgttttttcc

SEQ ID NO: 176724 - DNA, 306 bp, Zea Mays
gttgatatagagtggacatttagagtaaatatggatactgagatttgtggaatagaatagagagtcttgctgactggcatgtaatatttttttaaggtggaaaaataaagtaccaagagcgcgcatagcctcacaactcaccatcgttaactacttgtgtggacgtttcaggaaagaacaaatatgacatcattactaaatagtcataaccggatccgtggcgcaatggtagcgcgtctgactccagatcagaaggttgcgtgttcgattcacgtcgggttcaataccccgatcttacatccggat

SEQ ID NO: 176725 - DNA, 605 bp, Zea Mays
tagaggttatagaaacaagcatcataaccgagagtaaagagataagacctagagagaggtgataggagaacgattttggcatccgtataagatattttattatattccaagtttgaactacatagatggatatgggtgacgcgctaagtaattgttttcataactctggtgatgcggaatatcttcctggagcacgcctagctcctgtagatgggcttcagtataccgaatgtacattaaatttgttccgaatttgatttgtatatttgacgtaatttcacgagcgaagttacgatttcaatgtcaaacatgacacaacattaaaccaatattgttctaaatggaaaacgtacgggctaaatgatttgatgttccatttattcattgatatttcccagtagaacaaaatgttttacaaatcttgacacatgtaagttgcatcaataatagtacatgtattccatcataaaattcagatttgcgaaagttttagactctatcacgcctttggtcgtcaagatatctaacggcaaactgacgatcgttccgcgccaccaaagccttttgaattgctgcaatgagtgcaacatttaatcacatgtata

SEQ ID NO: 176726 - DNA, 373 bp, Zea Mays
gaaagaatgtcactccggtaggagagggtgatgatcgggatcacctcgccctttcagacaggacaaggaaaaggaagtctacctagagcagcagggaggcaagaaaaaattataggcttgacagagctaatcgagcagcagtagcagtagtagctgagagagcagaggagggaggtcagatgaggattagctcagatcagttacctttccatgtcagatgcctctcatctcgagtatgctccaccccaaccaaatttgacccctctgctccagtctcctctaccacttcaactaccgctacttcagtccctagtaccctcgctacaccaatagcctccaccatgcctgcttccactactcccactcccttggc

SEQ ID NO: 176727 - DNA, 568 bp, Zea Mays
gtttggtcggaccataccatgcgagtgcatattctcaaactttgctacgttatcaggttgccctatggataagaacagacgatgaaatacaaattttaaatgttgacttattgcagaaaccttattgtagaaacctattggagaataggaagatgtgcatggctcatatctcagtatatattcatacacctcgataaatgtggtggaacctccactcggttctacggaaatccctagcgacaagttcctgtgacggtcattgcgagcgtcaagcagaaccgctcctgcgagccacggccggatctgggcgaggagggcatgaattcaaccatggcgtccacaatggcaaggagatccgagggggagcgggctccccacatggtggttaaagagattagttgatctatctatacttgagagaggagaaaaccatgtcagctatttatgagccccgaagacctagaaaatcaagtaatagattggtcttatttccctctacttgtccacccataacctttctcttgggaaccatgctgaaaggggtcatggccagttggccacgtccgtg

SEQ ID NO: 176728 - DNA, 706 bp, Zea Mays
taatcagattttgtctgaccagaaagatagaattgtttggctactcggcaataaaggtttttctgtgaactctttgtataaaaagaagatgtgcgatcaagtggttgttccatacagattttttttggaaatcaaaattaccacacaaaatcaaagtttttatctggctggttgtgagaaataaaatcctcacaaaagataacttaaaaaaagaaattggcatggttttggtgattgttgtttctgtggtggctctgaatcgattgaccatttattctttaactgtgccattgcaagatttgtgtggagagtgattcaagttgccttaaagctggatttcattccaaaaaccaccggtgagctctgtgatagttggatgaacaatcctaagaataaagtcaccaatttgctactgtttggttgtggtgttgtgttttgggcaatatggagaaccagaaatgattggtgctttggagataaaattctgcttgatccttctaacgtagtttttctctgttgcttttggttggactcctgggctattcgtgagaaagagaaggaaaaaagaatggtggtccaaggaagcagactaatcaaaaggataacaaatgaagtgttgtgccgggcgtacggatggtgtccgagggatcgccgcatttctgggtgaatggagattttggttatctctgtgggtggtcggttctta

SEQ ID NO: 176729 - DNA, 579 bp, Zea Mays
tggaagcggtgggacagaagggaaagagaccgccgaccaaggaagccactcaccttttcgagaagctactcaaagccccatatctgaactactgctacctggtctgacatgcctacaaggactgcgagctgttgagaaggttcttgggtggaggaacaccgcacgaggcaggagcgaaacccaggaagggaggcgagcgaaaggacgagatcagatgtctgctgatctttgggggttagattactatgcgccaagaagacatcggaagttagaacagagcaaaaactccaggctcgataagcgtctccggttttcctcaactagtccaaccaaaccatcacctatgatcgtgccgacaacatagagcatatcccccaacctagacgatacccgctcattgttagtcccatcgtagggtcggtacgacttacgaaggtgttgatggatggaggaagcgggctcaacatcctttactctgctacgctcaacgccatgggcttagaccgagatcacctccgactgacagaaggacccttccacggggtcatcccgggaaagcgggcgaccctgcttgggcga

SEQ ID NO: 176730 - DNA, 593 bp, Zea Mays
acgagttgtagtagaccgccccctaaagactgatcgtgctatggatgatgtgccaaatgtgcctgacgctcaatctggccccaatttgatcccattaagtcaggcaggagatgattgtgggactcataacctgcagacagattctcatgcgggtatccctttggcatagactacttgcagtaagtttcatgggcatcacatgttcattttggaacatgggcactttgctcatttcattgtcgtgaatttattcttgtatatcggtgcatgttgcaggagagacccctgctcttgtggttgattctatgaccgtggcacgtgtctgcttcggagatggatttattgcctccaatagtcctaaatttaggaatgaagaggagccttatgtctttgctatggccctgactcagatgatgaccgtccggttggtgaactcacagagagtgatattgagatgttgcaccatgttattccagaccaccgggatccaagagtgcatgagttcagcgatcttagtctttctcatgaggcaaatgcagaaggaagggatgatgagctggtagattctcctgagaccgatcctagcatgatga

SEQ ID NO: 176731 - DNA, 447 bp, Zea Mays
gagaagtccaccgccgtgactgccctcaccaacaccgcgactggtcctctgcgctagaacctgggtacctgctttgcgcggcgaagcttcggccgccgtcaattttccccgccggtgtcctgcgcaaactcaattcgtcgccgtgatttcctcctccgccgtgcgccgcggacagatccctcggtgcgttgagagccggtgagtattcccctattcggttaaagtacatttccctgtacgtgtatgcggttatgattgaggatggtgctctggggtcggtggttgtcctcgccggagggtggtcgggcgccgcggctctgttcgccgttgttcgccgcgggggagggagatggtgtttgtgccgctgatctgttcacgaacgaccatgattagatcaggagtacccttacgcgtggaccgtagatctgcaatcctatggatacgatt

SEQ ID NO: 176732 - DNA, 671 bp, Zea Mays
caagcgggtcaccgagaatttctcgtcggggctgcttctccgccgcggcgctgcctgtgtcgtgggcagcatctacggtggcccgattcctcggtatgagaccctcatcgagctcgttatgttcccaatcatgcgtagcacctactctatttggggatcacattctagggcgccttggctttgttcgccggcgagctcagtggggcggtgcggcaccgccgtctctggttgttggcagggaagagggtgatggccttgtgaccgtcaattttaagatgagcggtggaaattagacacgggtatacccattcgatccttagatccgcgccgttgatcatattgtgtgcagccgggattagctggtggcgtaccgcttcggggatcggatcgggaccgttgatctagttggttgcggctcggattagatcacaagtttattaaatccagggcgtccattcgtaattgggcggtccagatcacgtaccgattcatctcagggttgatctaatcgtgttcgtctgtgcttgatcgtgtggtccacagtcaaagataccccttcggccatgccattatgcaaaagagaccccgtataactctataaacaacccgcggtccatcacagaggagtgatgagtcttagaactatttgcagattaaaccctgtacttatc

SEQ ID NO: 176733 - DNA, 274 bp, Zea Mays
aggtccttgaagaccctacccttttcaatcatcatgctaggaccggcctcaggagcatctagcagctcatcatcccttccttctgcatttgcctgatgagaaagactaagatcgctgaactcatgaactcttggatcccgaccgtctggaaaaacacgttgcaacatctcaatgtcactctctgtgagttcaccaaccgggcgatcatcatctgaatcggcaaccatagcaaacgcatatggctcctcttcattcctaaactcaggactgttgg

SEQ ID NO: 176734 - DNA, 481 bp, Zea Mays
ccatgctattgaagttattaaggtccttctgattgatgcataggtcaatgaatattttagttgtcatcggatcccaactggcacagtccgacgaactcatctgtgggcaagttgcacatgcacgtaactatttggaacagaggacatgtagtaaaagaaacaagaacttgccatggtcaaagaaacaagataagaacttgttgtaggtcaatgaatacaaaggcgcatttaacaatttctgaaacagaggacataagaaacaagataagttatgcacaaaagaacttaccgtggaagtggttttggcacgcttcttgcgtaggttgtactgaacaggtgcagttctcttgtcacgcgccggtttgtccggggaacaagaatcagtgaatgaatgtgccagattgggcaaacttatgcaggaactgcgccgaaaaagaagagtgatttaatgcattaaaatggaggcacgagggcagatagc

SEQ ID NO: 176735 - DNA, 393 bp, Zea Mays
cgctgagccgctaccgctgtggccggtgatctccatgcctcgacttccggtaagaaatactctgtcgcgttcgcattgtcgtacactacgcgattgtttgatcggtactggggattgagctatgtggtcggggcacattgctcgccggcgatgctccggttgccctctatttgttggatccgggaggtgggagacgggccatttgccgttgattccgtagcaagcggttaggattagacgatgggcggaccattgatccagggatgtgaggtggagaatcaatctggcgaaccctttcgcgcgtgtagatctgggccatggatccatgatccgagggtcacagtcgttcgtcatttcctttaagtggtggcatgatctgggctgttgctttgt

SEQ ID NO: 176736 - DNA, 442 bp, Zea Mays
gtcgtcgtgtcgaccggcggcgaggtctgcgtgctgtctggtgcctgctacgaggtcggtcggtgaccttggaccactgcagttggacgacgcactagacctagatagacatggacacttggtggcggcggacttggaccgctcggtgtcggctgtagcttgtagggtttgccccgtattgctgctcgcctgcctatacgtgggagcctgggcggtggccggtgggtgggctggttacttgggtttcggtagttgactagttggttacttggtttagtgactcggtgggtgggctgtgaacgcatgtaggctggcacttgggctaatgggctgtacgcatgtatgctgtttgttttgtaggcccctgtagcttgctaaatatttccgggttcgggttattcgggtaccggcaggtggtacccgaactgcctggaataatttc

SEQ ID NO: 176737 - DNA, 628 bp, Zea Mays
gcaagatatgcatgtttggtcgaccaacgggcgtttgaacaagagcagaaacaaacctccacgtgttcgatcgtgtgctaagtgctcggccgcacactggccgctctctgcgcgcgcaccacgcacggtcggctcctgtcccccacgcctgcacttaaccatgcccgagggcgcctataagtccccctagtgcgcagcagttcacccctcaccctgcctcactccccgagcagaaaccccaactccgatgagctctgcgccgcccgccattgccgcacaagcacgcccactgtggaccggccgctccatcccacctccacccgaaccagctccactgctagcttccctggagcctcgtagagcttctggagccctcaaatcaaacgctacatcgctggaggcaccggatcaccatcgtcggatttcaaccgaccgccgtcgcgcgtggaccggaccacacggtaagccattcccaaattcctcgcacccacatcatcactgacctcccatgaagctccccgagcactttgatttaactctaccgccgtgagcaggccggagcacgcaccgccgacgagcccgaccacctgtgcacgcggccagcccacctccggtcaccaccgccgac

SEQ ID NO: 176738 - DNA, 530 bp, Zea Mays
gcttgcccggtttgacgctagatcacgactgtttcgtctggaagtgggagtgtttgggggcagtccaccacgttgtccgcctaccggccgttctttgagggacgaacggatctcaacggggtgtcgatccattgggcctcacgggcaccaggacggtgtcacttttttgcttggttgtttttgcactataggtgttggacatctcaaaggctttggcactttggcttgtcccccacgattcttggcatgatgcacgcctgccgtcgcaataggcatactgtggcggaggccttaggcactccgggttggatcatggatgtgtcggggtcttggacgtcgcaaatgatcatcgagttcatcgtggtctgggacctattgagttgcttgcccggtttgacgctggatcacgaccgtttcgtctggaagtgggagtgttcggggacagttcaccacgttgtccgcctaccggccgttctttgagggacgaacagatctcaacggggtgtcgatccattgggcctcgcggacac

SEQ ID NO: 176739 - DNA, 675 bp, Zea Mays
ttcgctctgtcaggctgactgaaggagttagtgatggtacagtgccctgaacatgatcgctggtgcagcgcacctgaccgccagcgaccatgcgcctagatctgcgccgccgttgcgattcacgcccaccggtgaccggataatgctcctaggtaaaagatgttcgcttggggataactccggtggctggccgccgtacccccttgccttgcggccggcgcagataagctcaccggcgttggctgcctgccgatcttgcgccacgtgcccaggcaccttaccacgtcacggttagtcatgttaggcatatccgatgatcgccggagggactgccacggtgaaagccactaagcgcttgcgccagtgccccttttcttctccagccgccgcgcgtcgtcgtccaattcaccggccaccgctcatgggctctataaattgagtgcacagcgagctccgtaggataattacgcatccatagcacccatgcttgcctcgaatcatcccctagaactctccaatttcccattctccccaattcggtttctgctaccgtgaaagcatcctcgccgtggccagcttgctctaggttagttcaagcgttctggtcgtttgttctagcatccttaagtcctcctgaagctactcgaccaattcaattgggttaggctgccctcg

SEQ ID NO: 176740 - DNA, 684 bp, Zea Mays
gtaataagcaaaacatttcagccttggtctgttctactttggatttttctattaccattatatggtccaggataaaaagtcaggttttagctggaagttcgtagtggtttatggttctctttatgataagggtaaggggggattttattaaagagtttcattaggtgatgcactcttgtaccgttagtgttggcgctgtaacatccaaaatcctattgtgcatgccggcgatatcgccgccgtgggctaggcccggcgttgctcaggcgcagtcaggggtagaaggaggcctgctgaccgctcgattctatactaacggcgaggattagatccggggtaacggttcggtatatggatggttctgtccgtcgattcgtgatcgaacgaatgctaatagatctcaggtgattaaatctcatccgcctatctatccatcaacgaccagtgagtgcataccggttcggagagccgagatctaatcttaaccggtagatcgtcattcaacggatggcgcgcgaggatacccccttcggtgttatatttttgttaaagaacccccttggaacagcagaatcaacctgtcgccccctctgtgtaaagagcatagcagatgggttctgactttaacagtttacaccctgaactattagaaaatcttagccgttgtccattaaccaattaaaa

SEQ ID NO: 176741 - DNA, 892 bp, Zea Mays
cgggtgtgacaagccactcttggcaaggttctttaaattgtttctcaaatttgaagcggtaaggcagtcaaacaagttcattctttttctttgttcccttcagcttcgacattttccattcactcaacgtcggggacaccctgttggccaagtactcttgcaccaaatctctagtgctgatctgttcggccaccaccctgatttctgctacagcttgttggcatggtgaccccgacgacatgcggcacatgggcctagtcagcccgaagcttaaactcagtgggctcatcactagtgtcttcaacttctccctcttcttctcatcgaccttgatatagaaccactcacttttccaaccggttggccacttggtgcgatagctaagcaccagggccttcatatccttgcgatatgcaaagttataacaaccaaagttttcatacagcctgtcttctctggccttcgtctggtaatgcagctcatgcactcggcagaaagcttcagcatttgggtccattccttggcttcgaagggcctagatgaagacgctgagcctaacgatagcgttaggggttagctgatgaagatagatttcataatcattcaaaacttccccaatcattttgttcaagggaaattgcaatcctgttgtgaaaaagctcttgaaaaccactacttcgtcatttttgggctctagagtggtctcttctccggcaaaacgaataagtttcttctcagcttctccgaagtaacctagtttcatcatcatgggtacatcagcctcagacacagtagatttttcaaagtccaagtggctgggttttgatggggtcagagtgttgtattcttcctcttcctcatcaatgttttcttcttcgatgccagcttgttc

SEQ ID NO: 176742 - DNA, 385 bp, Zea Mays
gaaagaccactgactgaaaggggcacctcggccccgccacctggaatagcacccgcagggacagcgcccccgggcacttctccacctccagcaccctgagcagcacccgcaggggcgacaggaatggcttgcctcaaaagggccaactcctgctgcatggcctgcatcgcggctaacattgctgccggactcatcgagtccccactaggagcttgcggactactccgagccctacgaggcggcatagctacagccacagggatgagaataataagtaaataagattggcataacatctcttcagataatgccaaactagcacatacaataacataacatatcaatagcaagccagaaatcccatcctacatgtgcagtgtgtcaa

SEQ ID NO: 176743 - DNA, 699 bp, Zea Mays
tccgccgccgccgccgccgccgctaggaaacgacgtctcgtctcgtgccttcaatctctccttttgccgtcgtcctgtgtttatcgcttgatttcctctgttatcccgctttcttcctctgtaagggcaaatgatgatgcaaagtcatgcaccactctgaatgaggggattatcctctctttgggctgacaaacggacttctacccatttttcgtctgagccttgtgattacatccgatttctttattgtctccctggcttttcttttttcttgctgcttactgtgacactgatcttattgcgtttgattaatggagctgtggagtgatctcggagaactagatgatgtgggtctgccgatccaaccatgatgcggactgaattttatttgaggtcaaatgtaatggattctgatggttctcgagtttatctcccttctgacattggcatatttctttcttccctcgaatgggtcatggagcgaaaattagtgcggctttgtttttgatctcttgctttcaattggtttgttggttagaaagctcaaagaaacaggtgatgaagccaatttgcagagcaaaggggccagataagtggcaatctttgcattgaaggttggccacaacgaaactgcagttctccgtgccgctcagatttctctgttttgtgacggcctcgaacaagctgccacattatcat

SEQ ID NO: 176744 - DNA, 423 bp, Zea Mays
ccctgaatttgttagcttccatatgtgctgatctgaaacaacaggctgcaaggtaaaatcatcaactacttcccagagtttcaggtattcaacaagcacctgtacagtgagggcaccctggatattagcagtccaggacctgcagcccaacgcttgagaaacagtgtgttgtctccttgctcgtttaggaattacgtgaaagagattagggaccagcccagtgtgttgtctccttgctcgtttaggaattacgtgaaaaggattagggaccagctcacctacagtgcaatcgcgcagccaactatttgtccagaatttagcggcctgaccatcgaagagagggcactgaaaaggcagcccttcccaaggtcaagaatcggttttttagccacagccaacggatgcgcaaggcccatcccattg

SEQ ID NO: 176745 - DNA, 960 bp, Zea Mays
tttggagttaaaatgaattaactatgaatttcctaagtttgggatattattttgcattaaaaagaatttctgaattaaatccaatagttttctgagttacttggactgcgaccactatttaacagaaacccagggggttctgtgcaaaagacaccaagactcagaactcccatagtgtggactgcgggttgttttaacacaagtacaggggctcttatgcaattatccaaggccgaaggggtatgctaggatccgagccacaggattagaaaccgagggctaggattagttcagccaaacactgaaccagtaggttttctgggccacaggattgaggatcgacagtccagatttaatgatttgaagggatgcgccgggatttgatctaggccattcaacgcatgatcaacggttgaaggccaatacgagctagatctaatcctagccaaataccgctgatccaacggccagaccactttcttcttcccttggccgtacccagcgacggcgcaggggcaccgcgccggtgagcacgcgcccaacgccccagagcaagattcccagtgccgataggtaatacacgttctacggagcatattgaactgattacggtggggcttacttggatagggtggcggtagcgatgttgcccacacagcacagcgggtcaacggtggggcaccaaccccgtcaagaaatccgggcgagccaaggtagtttccccatccgagatgtccacgagcaaatcactggggttcgatgaagttctctgcccaagagcccgagcgatggtacgccacggttccgcccacggcggcgctacacttcccctggttcgacggtggaggttctccgttctccctctgtctatttctggcgaggcgcttcctactgggatggggtgaggagaataggtcgcggggccagatttatagcctggggcgaggacgagcatggcag

SEQ ID NO: 176746 - DNA, 551 bp, Zea Mays
gcaacctctcccagcgcgctaacctgtgagattataggagtcgcgagtgggttttggtgagttgatgggaaagggttgggcacaggttagggtccgaggtgcccggtcaaccgttgcggcaaagggggtgagggacatggctatggcgggtccactgtcgggcgcaccgtcaacggtaccctggtgtctcgccgaggaagacaataagtcaaccattgatccaatgattgatgactgagatcgagcgtacgcaccgtgtgggcgggagttaatcctagcctctcgtgcatgatcggacgacatcggttagagatgaggtcataaaaatatgggccgtcgtatcttatccaatggcccctttgcatactggtttgggttggagtccaatctaatcgatgccataaactttggatcggacagctgcgatcgctccaaaccccttcggccacgtccattttattaaagagaccctgaagaatttgggtattaacccgtcgtccactggaagcgcatagtaacttcagatgtgccctagaattgatggaatgcac

SEQ ID NO: 176747 - DNA, 382 bp, Zea Mays
cttgattccacacagaaaatggagaaaaacttgttcaaagttggactatttgtggctgaaactgaattgaattcagttactgaaaactgaatttcagtgaaagttgctatttttggagcccatttgtgcctaatccatgaggttttaggctgtagagtatatagaggaattcaagaccacctaatggtgaacaactttattgaaggatgatggacatgatcctacataaaaagtgaagtaacagctgctcaaaggttggactgtcaggtggctagtgacttagtctattcagaatttaaagtctgaaatcagtgcgtgatgcaaagtttagagcctttttgtgaccaatctagaggtttaaaggctgggagctgtatagata

SEQ ID NO: 176748 - DNA, 626 bp, Zea Mays
ggggcgcaataggtgtggtggaaggctcaagagtggcggaagctgtcgtagtggaggaaggtggagtggtagtggtgactggggctgatgggtcaaagcgagcaggagtggagcgagtccgagacgagaggcgacagaccctgaaggcaatctgatcagaagcaatccttagctcacctccctgctctacctaatttgttgttgttgctattgttgcatgagtggctctgtccaatttcctcttcttcttgcctcccttctgctcaaggtacacatccttgcccttgtcttgtctaaagggggtggagggtcctggtcgtcttctccccgtaacagtgtaatattcttcgtcctcaccatcctacactgactgctgatacgctgcacgagaatgagaaaagataagcaagataagaaagcagtacataagtatagaaattggaaagatttgctacttaggcacgtttctcgagagaagaaccaggcatgaggggagtctcgcaaacgggcaagtaggcacactgaaatgatgaaagaggtgagcacgtattagccacatagtcataagcatatgaaatgtgagtaaatacatacacagagagaatgcacgaaatctgagagagtgg

SEQ ID NO: 176749 - DNA, 875 bp, Zea Mays
ctagtatgtttaggagctatcggtgtgcttagaattacatttgcataatttgtatgtcgttgctaactagatttgtatgggagagctcttttcactatcttggcaccttagttgcttcaattagaatcttttgtcaggtgtttgttatagttagagaagtgtagtcttggctaaaccaaaatagttttaattccgtatttatttgtgttagccattgtaattagttttagaaaggactattcaccccccctctagtccgccatctcgaccctacaagtggtatcagagcctggttctctcatttggtggtctttactgacccgagagtaagctagatggcgactaaagggctagaggctacttgtgaaccacatgtttttgatggcacacattttgcacagtggaaaacttgcatgaaccattattttcattcaattgatgtaaaattgtggtggaccataagtgtaggcttttatgaaccttttgatgagaacacaaaagatctcacccaagccaaaaagaaatgcttacatcttgaacaccgagctactaacattttatatcaatggataagtgataaggtgtttaaggaaattatgtatatggagaccgctcatgatatttggacatatcttgatgacatatatgggaggatctctagcgaggatgttgagcacatccacaacacggtggttgggaaagattgctccacctcatggtcaagtgatgatgatgaaagacacaccacaagttcacttgataatgatgattgtgttggctctaactcaagtgatgcaaatgatgtttctatctcaagcatacttgatgattatggtgattgttcatgcttggacaatgatatcgctactacaaac

SEQ ID NO: 176750 - DNA, 547 bp, Zea Mays
tcccagaggcttttcagtcctttgtctcttactcctccttaactccaaatctggagtctggtcaaggacactcgagggcaaagaatatgtccaagatggaccatctggggctactacttccttatcccacatagggaaaatgctctcaaagaatgtcacattccgagattccattatgacatttacagcgacttcgctcgtctcggaatggaccactagaaatctataagctacactgttatgtgcataacctaggaagacaaagtctacagtcttagggcctagctttctcttcttcggcaacgtgacattcacctttacgaggcagccccaagtccgaagatgtgaaatatctggcttccttcctttaaatccttcatagggcgtggcctcatgattgcgaggcggtaccctgttcaagacatagcataccgtgagtactgcctcgccccaccagatgtcaggcatcccctaactttgcaacaaagcatttgctaagtcacacactgttcggttcttcctttcagctaccccatttgactgaggt

SEQ ID NO: 176751 - DNA, 534 bp, Zea Mays
gggagtatgggactgactgacctttcgtgaacctgaaccctgcagccctggagctgatggagaggcatgtggtggccgtgcactacagcacagggggccttctatgaccatattattacgtcacaaagaggaggttttatgtcatatgttagtttgttgtgacggtgttgtgacaaaaagtccattgtcacagaaggtgcgtggtaaaggaacaactatgacgatatgtcaacaaatgtcatagattttaatgacgaataatgtattcgtcactacatctatgacactcgtaaatgtcacaaatagggttgtaaacgtcagaaaatgtgccaccacatcttgccacgtggatgatgatgtggcacaaagctatgacgaatagattcgtcataaacttaatgatgtggcatgtgacatggcagttgacgtggcagagcttcatgacatattttttcatcataaatgtggcaacatagcaagaatttatatcataattgttgatgacatggcagatggtctggtagatcattcatg

SEQ ID NO: 176752 - DNA, 831 bp, Zea Mays
gaggacctcaaatcatacaacaacacactacatccaacttttaaagaagcatgccgagcacgtggtctactaaatgatgataacgaatggtatgaagcttttgatgaggctgctaaatgggctacttcagatcaactacgtcaactttttgttatcatgttgctctattgtgaagtgggtgatgaacacacattttttgaaaaagtctggaagcttctagctgatgatatacaatacaatatgcgtaggacattacatcttcccacttatcaaatgcccgaagatgaaataaaggaccaactgctagacaatcttaccattctatttaatagatgtggagcaaacatacatgactatactttgcccagaaaaactatcttcacatatccttgctgtggaaatcgactgcttgaagaagaattatcgtacaactttgatgaactatcacatctatcccatgttctatattccaaactcaacaaaaatcagctccatgcttttaactctattatagacactgccattgccaataaacctggattcttctttgtgtctggatacggaggcaccggaaaaactttcttatggaatgctatcatcacacatctacgagccaataaaaaaatagtactagcagttgcttcctcaggtgtagcatccttgcttcttccaggtggccgcacagcacattcacgattcaagataccatgcgatctagatgaatctactacttgcaacataaaaaggggaacaatgctagctgaattaattgaatcaacttctctaataatatgggatgaagctttcatgacacacagatgtgcatttgaa

SEQ ID NO: 176753 - DNA, 1017 bp, Zea Mays
atcacccacatgtgttagagaggttgtcgttggtccaggcaatgtgtcatgggacgatagtccaggctcagactcctgggcagatacacttgccgaagtccttggagacacaagtgaatcaccttgggggtcagcatgtgatgacgccaattcctgcacgatttcatgcgctgggaaagcatggttagcaggattaatggatgaatcagtcacatgatcacttatgctacgaaccccactagtaggatttaacaaataggtaggtaaaagattaatttcatcttgaaacctacgaccaacattagaacgaagaaattgaaagggaaatagagattcatcaaaagttacatctctagaaatatagactcttccagaatcaggatccagacacttaaaccctttatgaaatggactgtatcctaagaaggtgcattgcttggagcgaaattggagtttatgggtgttgtagggtcgtagattgggccaacaagcacatccgaaaacacgaagagaggaataatctggttgctggttgaacagacgaaagaggggtgtgtcatatgatagtaaccgactgggcgttctatttatcaaatgtgtggcggaaagaaaagcatcaggccaaaattttagcggcatgttggcatgagcaaggagagctagaccaacctcaacgatatggcgatgcttgcgttcggctgccccattctgctgatgtgtatgcgagcaagaggtatggtgggtgatgccaacttgggcgaaaaagggatgcaatttttgatattctccccccagtcagtctgcatagttataatcttacgattaaataagcgctcaacaagagattgaaattctcgaaatttggtaaatacctcaaatttgaatttaaggaggtaaatccaggtgaacttactataatcatcaatgaaactgacatagtacttgtgtccaccaactgatttgggtgcaggaccccacacatcagaataaataatttgtaaaggatgttgggaaaca

SEQ ID NO: 176754 - DNA, 495 bp, Zea Mays
tggcctagattaaatagtggctttaagtgaacgggtttgcgttgtagtttgtcatatcgtcatccaacgattcaaagccaaccacgccaccaggctaacctagacccttaaatcaccgatttgcgacgccatcttaatacacagaagcattacctaggcaccccattgtggttgtttattagctgatcaacggccagaggtttccccacttcccagtcgacgcacgacgacgaagtagagctcccatcgcagtggtgccatggccggggatccgcccacttcacgcaccaaggccctcatcctcgatccaaatgtcccaacacgggtgggagtagatcttaccagtgtttggggtttagggtttagggactaacaggatgcccccgcctgtcggtacgcccatctagccgagctgggccgccgcgcgcagagtgcaaactttctgagttaagttgcttttggcccaatgaggtttgttctcccttttttctattt

SEQ ID NO: 176755 - DNA, 525 bp, Zea Mays
gtcttcatcgcataaacgatgtgagccaaatgttgggcactgacacgcgctggcgcactatcaggtggacccaaacacttagagacagtgggagagagctcaggtgcacgataaggcaaacaacatacaacagtaacttctcgttatgcgtgcccatctcgctacatgatgggggtatttatagggccgtacagggtaggtggtccaaagtacgccactgcccctagttaacggtcgttttttacaacacggactatacaacggggtaattacagtcccgcagccccctctggttatgtgcacttgcaaatgtacccgctaattacattgacaaatgggccccacccgttgtcactacgggcccgcgacttggacaagcaagtctaccacgctcgtagccttcacccggaggagccttcacgtctttcgccagtttttgttacgactgcgccttggcgaaggcttcttgtttccaaacgtctcgttcctcaagatgggtcgaggactcccacgcccgctagccga

SEQ ID NO: 176756 - DNA, 936 bp, Zea Mays
cctgtgctacctacttctctctgatcctttcgcatccaccgcctccatctcggcgtcgtcgccagaaacgcttcgtcgtcgattcgcatggatccataaaaggcttggctctcccatccgccgtcgcccccatcgcgttgtccctagagaggaagcaaggcacatgaccaccgtctccgggtgggatgacgagtccgtcctcctcaatgtgatggtcattgaggccaccctcgtctatgagtcccatcgcaagaggcgagcctccacctgctccaacgatgacgacaccagatccaacaccaaatacggagatacagttgacaggtgcgtatgttagctgttgtggcatgctgggcttattttaggccaccgtctgcgcctggtttcaactttcaagtcatagatcggtgcttattctgacgcctctcctgcagcagggctcctctcttccacgctgcgaaggtgacttgtaggtcctcttctctcccttagattgcactcaaaactagactctaattcctatgtaccggaaatagtataatttcaaatttcataattactgaagtttttttataacgctttaatatttgtcaataggtgtacttagcaatggtgcaaatcatgcccatccacgagatcttggcctcaacgctgattgagaagatgacgttgcaaatatttcagacttgtagagccctcgagcacctccatctcttgttcagttgcttatattagtcatatgttccctatgtttaaatttgatagtagattgaggcaacatataaacttcaggtcaagataagaagagataaaggaagaagaatcaaatgagaaaccttttcagtcagtatagaatgacatcttttttctttcagttcaggttcagagacacatgcatgtaagaatacattgcagactaatctttgttgtggcctg

SEQ ID NO: 176757 - DNA, 317 bp, Zea Mays
ccagaagggacagggtaatacgtcataccagacgtacgcctacgcatggtggaaggcgactcagaagggatgacgggagatgaagttgtactgaagacgaccctaaacctcacagcgagccaacttagcgggagccaccaggcaccactacgtttgcatcagaatagatacaagaacgcatatggcaaatggacaagacacaacgccacaccaggggtatggcggtgcacgacctagcagatgacaccataggggctacaccgcccggaagcaataggccaaactccaccccgacagaatgctagttctcattgtaa

SEQ ID NO: 176758 - DNA, 623 bp, Zea Mays
ggagagctcgagaggctgcgagaaaggagtcgagtgtgtgactctgtgcttctgtaaaaatgagtacagaggaggctgcgaagaagacagaaattgatggtagtggttcaggagggattacaaagagtgagatgatgagtgaaatgagaagtatcatccaggagctcatggggttagggttgattggtgctagggcaaatataggtacatctgagttgaagttggaacttgtgcctaatgatgtgaagctagaaggtagtaagaattatctaagctggtctagaagagtgcgtgtactcctaggaggcaagggagtggagcattatttggaggagacatgtgttgagccgattgataagctcgacgcagaatggagaatctggcaggagacaaactctgtgatagttgcatggttactggcatccatgtctcccactgttagcaagagggtggaagccatgcgtactgcatcacaaatctggaacaccttgagtaatatatattctcgaaaggggaatgtgatggtgatgatggaaattcagaacaaggcagatgcagtaaagcagatggggagaccagtggaacaatatgctagtgagctccagcacttatggggagagctg

SEQ ID NO: 176759 - DNA, 594 bp, Zea Mays
ggataatagataaaacaacaaaaattcaagtaagtttgcagagaaacatatggaaggggaacaaagctccagtacctatgactgaatgaaaggtgcgtccaagaaagaggcaaattgatatttctccaaaaaatctgacggatctaatatacacaagcttatgctccatgacaatattgattagtgccgctgctcctcttgctcgcactaatcccatagcaggccgttaaaaccacaaaaattcaagtaagtttgcagaggaaacatatggaaggggaacaaagctccagtacctatgactgaatgaaaggtgcgtccaagaaagaggcaaattgatatttctccaaaaatctgacggatctaatatacacaagcttatgctccatggcaataataatcagtgtcgtgctgctcctcttgctcgcactaatcctagagtgtttgtcctccagcttggcgcccatgccgttgtagatgcacacgtcagaatgcggttcggagctccgccccgaagcaaaagatccggtgcgagtgcgaagcgggcattccatttccagcgatgctgagcgcgacccgcgagtggtgcccaaccac

SEQ ID NO: 176760 - DNA, 705 bp, Zea Mays
gggattacatgcggagaaagataatgaattcatatagtttgggatcttggaagtaacgaattcctcatatcgcgacgacgaatcggctgatatgtgtttatattgattttggacgatttttatcatcgtgattctcatataagcgggtttgacagcacacaacaacttctggtggctagaatcagcaaaaaagagccctatatctcttctttggccaccgcgagaactagatcttttaatattcagtatgttatgatcttgataacctgaagcttattgccctgcttacagagcataatttgtaggactggattaatcctgagttaggttcatggctgtagtatgaatttgttaagggtggcaccgagacttatgtaccctgtcagcccttatctaccccaaatgtttcggtgtatattctttattctcagcctaccccaaatgtttcggtgtatattctttattctcagcctgccagttcggcgtcagtggcttttttatagacttttagtcgatatgaaacacatcgatggacaatttattaaattgctcagataatttagtttgagtactcttactagccttttagagattatttaatataatattcctttctactgatacggtgactcgatactactttgctaggttattccccttcgttgagctcttgtcctatcgtataaaatgtggtgcgtccatact

SEQ ID NO: 176761 - DNA, 862 bp, Zea Mays
gggcggtctttatcgtctgaccgagggcttagctaacctactgcccagtcctcgcgcctatattaatcttcttgacctcgccctccccttgcgcgcttgaatcctccgtgcgatcgtccgctcgccattgccgctgagcgaggagagagaacctgcgctacaatcgccatatccaccataaacgcactcggttagagagctacgggtgcggcggcgggaacacctgggtacctcggcatcaaggatcctcggcgcccccatcacgtggcggaccctcgggccgtgcgttcctgttctctgcggccggcatcgtctatacctggatcaccagtcggccccgtcgcggatcagcatcaccgtggagcgcgctccgtcacagcagctggtgagcacccttcctggcttgcgaggagagagaatatgagcgcctgtgcggctcttcctcacgcgcggcacctggttgcgtccgccgtgggagcgctgggcggtcggctaaaccaggcgcgcaactcccagtattcgcgccgccgtgctctggcggggcagggaggtggaagacggccgtggagcgtccatccggtgatctacggctgagattaaaacatgcgtaatgtttcgcgttgggtcaatctagagcgttgatcagcgatcggatgactccgggtatggatgtgatctccaccgttggatcaacatctgatggtcctcgtagcgtaccggtttaataaatgtagatctaatctaggccgtaggtgtgagatcctgcggctgagatcagcagataccccttcggcttgcatattttgctaaagagtcctcgggaaactaagaaaccaacccgccgtccactgtagggtttggc

SEQ ID NO: 176762 - DNA, 507 bp, Zea Mays
caggagcacgattgttattaccttgctggcggtgtggcataccttctgtgttttgatgaagacggcgacgtaggcgcaaatctctggtggttgcctcatcataattaccttcttcatcaaacatcgcatcatcgggaagacgtggacgaggaggtggtggtagtggtgcttgttgttgcgtctctaacacagcaagtctatcgacgatctgggacaatcgtcgatccaacctctcgtaagtcttgccaaggttcatgccaatgaaggcatcatgcactgacttgtggaccgtctcctccatttgctccttcaggagcttgttgtttgcctcaagatcttggcggctaacacattcatcgaagtcagtagggatccttgcttcttcttcgtcgcctgccatcaaaacacaaaaacaggaaacaaacggtgatggttatccctaataatttcactacacgctcctctcaggtggaacacaggaacacgctctattgtatcttaccaagc

SEQ ID NO: 176763 - DNA, 804 bp, Zea Mays
ctcggtgatggttggctggggagctcggcctcgccgccggacgtgagtacgggagagagaagaggagcagtgggctgctgccgccatggacccttgtcgatggtgtccgcttgtgtgtgagggagctgtcgctcgtgccaccgtgggaaacactgccccattcctgatgaactattcgttggagtcctcggaccaccaccaaaccgcctcctgccatgattgttggtctccgcgacgtgatctccggtaataccctgaccagcgtgtccattcgattccccgctttgttttaagtcggattagattcccggtagtgcaccattcggggcggatcgacacacaccggtggcgccgccgccgtgaaggttcggttgacgccatcgcccgatgccaggtggaagacgcctgcccagccgttgaagcctaatcggacgtccaggattagaatccgctcgggtaaggcttacgccgtcgattcaggaaccaacggataggatcgcttatttgcgtaacgcttcgggatgtaaatttcgaccgtaggatccgatcggtcggatcagggggattctgggataattaaatctgcaccgtagatcctgatcggacggccgtgatcacaagataccccttccgccctggagttttattaaagagaccctgagattttagaatatcaacctgccatcctctggcgttgtgtcctgtgtctgcggattatttccccaaagcccctgcacttttcggtaaatgaggcccggtccagtgcagttgaaattgaataaataatttggaaaatggattttt

SEQ ID NO: 176764 - DNA, 463 bp, Zea Mays
tataaacttatatttttggttaaggaataaacttcacaacagcacttgaattcaaaatttgaaaaacataaacttaggaaagaaaagaaaacagaaaaataaaaaggagaaaagaataaaaccttacctgggccagcggctaccaattcggcccatctaccaatcacccacgcgcggcccgtgatctcctcccctcctgcgcgaattccacggctgacccgtgggtcccgcctccagtctcaccagttcacgcgtacgccactggcactcgcttacgcgccgggcccgcatgtcatccctaaccgtgtccgagatccggccgtagctgagctcaacggaatgcgtgatttccgggccgccattctcgcgccggtcgttggggaagccgcgacctctaccaatcctccccgatcttcggtgtatataggcgccgtcagcacgtttgtatcgccacggcgctgct

SEQ ID NO: 176765 - DNA, 573 bp, Zea Mays
gctggacggtaggacccaaagaggaggcgagaggcctcaagagtgccctaaaactgtggtggctgaattagctgagcgaagatgtgacaaagatagtgagcatacagtagctggcgccgggcacgtagaccatccagtatggtgtccttgatttcacaaatgaggaaatccacaacatcaaattcggagtgagagaccagggcaccaaggagctagagttggatatgagtgacagcctccctgtaacccaaccgttgcagaagcgtccgtctcatgagctgatatagaaacttggccgctgtggtgaagtctgccggagaacgtcgcgacccatctgagaagggtggtcggaacagagccacgacgtgagctgtactaggagcaactccgccgtgagggcgacgaggaggatcagaggtgccacagcacaagctatgaagacgagtcgatgactcattgaatccaaacaactggcgaatctggctggcatgaatggtaacatcctctcgctcaaagcggaatctcatccagtggtgatcagggtcgatccatacagtagcatagaaaactcgg

SEQ ID NO: 176766 - DNA, 1305 bp, Zea Mays
gggaaatatctcagtgccagtaattatcgattgaagaaaatgttgaaaatttagtccaaagtgaatgaaacagcacagaggcgaaacccccgaacctcatcacaaaaatgcacataaagaaacgcattacttagcattctttacaaacacttcaatttcgatcaacaagtaggataaggatcttctctgatgacaaacagaaggtaaacgagcattggttcagaaaaccgcaagaaggacatctcatactacttaccaagttctcggatgcaaaacgacggtgtctgagagattctacgagccgaccctaaagcttctgtatgtgtatctcccaagaaaccgatctacgaatgccagcttatcagttcgtctttgtcataagcagaagaaaagtccaggtagtgtcagcaacaagagacctgtaatttgtcatttgtaggacgtcagggaatgggaagaaaaagaaggcgtgaagggccataaatgcaagcgacaaaaaatattgaagacgagatcacaaaccacagcaaactacagagccagaaggattccaaataatgaagcgctaaaaatcagagctttctgaaaaatcgcaacatcacaagcacactgcaaggataatattatcaaaccaaaatcaagaaagttgtcagctttcccacactattatccaaccaaaaccacaacatcaaaaaggacacaaatttttcgcacaggcaaaatttaggcaggagtagaacatcatatggccaataagcagaggggagaacctccaagaacaagacttccgaccccgaactcatccgctgaaacaatggcggccaggccagaatagaacagagggaagcagccaagaacaggagataatccgtcccctcaactgctcaccatgtcacgggggggcgaagcccaccggccgcattggaactgccatgatccaacaaaagattccgcctctccccacttcctcaaacaaggagacaaggccaaccaaccaaacagcaacacctataaacaagtactaatttatcgccatccacatggacagagatacaatcctccgtcactaggccatggacgggagcagacccagatgcagacgacggagattagattggccagcagatgacggtgagagggatcttctcctcctcggctccctctctctcccctttctctatctagtggagaagaagagagaaaatgggcttctcgaagaacaggaaaagtttgtcaacttctggtcttcttattctctgccggctcctcttctcttgtaggacgccctggcggagtatattgttc

SEQ ID NO: 176767 - DNA, 603 bp, Zea Mays
tagacatctagcatcacatgcagagcctactacttcacgttgcgattcatacagatccacaaggtgacaataataacacacaagcaatcgatctttctctacgaccttcagttaagtcaccaaccgacgacatgatgactacgaaggcatgtcaccatttcatcacactcattcatcgcctatatgcgcactaattcttttcttgcgacccatgcactcacaatcaatccacactacacaaaatacacttatttgcgaatcacaatttaaggaacgcctaacgcgtatagactcgacttataattatagaggaagtgatgactacttacggcatgtcatcacctctctacataagcccaaacaatttctactaacgaccaagagttctaagtattaaacacactgttacttcccatgcgcaaataaatctcaacttaacactagtgacaccaatggatttttactaaactcatcatgtgcataaccttgtctcgcatacaaccatatggtggcgtgcactcgagacacttcaatcaatgtggtgtgaccactaatatatgaactccgatactcatgttttaataattcatcctctacggaact

SEQ ID NO: 176768 - DNA, 1047 bp, Zea Mays
tacccctaggccttatatacttgaccgtggggcattacatgcgtgtatgatgaccatgtgtacctaagtaatagtgaactgactgaacttatcttcctataatcttgccgacttatccttattttgttccgacgtccgagggtgctgcgcgggagaatcggaccagcgctatggataatgcttaaatccaacgagccgcctgggcctaagtctgcttcttcctcgcgttggcccattccactagcaattctcccctggcccacgaagggacggccttgcgagacaataggcccaaagcctttcgcaacgccttcttgccttctagtggacccgggtggtatccgtccccacaacgctagcagctaaggcgggctctgtggctgctttagcccccatgccctcggctctaggggagtagctcctccagcaatcacggttgtctcgccatccgtcattggggccgatttgcctacgctgccaacgccggttgcccctagagccgacggaggtgtcgacgcttgacacgaccccctcgaactgctcccccctttagccgttgatggggaggctttgatggctgatgtgctcgtccctagggcagctctatctacggaggtagttgctctgcttccaccaccgtcgtctgtggcccccttgctttcgggtgtcacaggggggagcaggtaatctggggcgacatcacccctggatgctgcttagcctccagagcggccacttctatccatcgctaccccttccatgcgggggctgtgtaacaccctaattttgggggtataaaatttctttctaattatcacccaaaatcttgtgttactcttccttttctcactctaggttttctctctctagattcattctccctttttcctttttattagggatagcttaaactagtggaggttaattatttatttttgtcaaaaccttatgagtcatgacatgttgcatcatgttgagcttaaaatactctttgaagtgttgcacatgttggaatttatttgaatttgaaacctaatttgattttgg

SEQ ID NO: 176769 - DNA, 587 bp, Zea Mays
gttcatgcggcctcaaggatgttggttgggaaggcatttagagtagggtcttatgggtcgatagccaagaaagacacaatcgacttagtctagaagtgtgaagcctataagtttaagccaaacaacaacgcttgttggcagaataattgtagactatgctagtcttctggccctttgcatgctgaggactggatatggtcaggccatttaagaagtcttaaggtgggtacatgcatgtattggtggccatcgacaagttcacaaagtggatattgcatcgttaacgacaaccatagcaatagagttcatccaggagattgtattcaggtttggaataccagtggcatcatcacaagcgtagggtccatctttacatgggaaagttctttgattcctgtgagcaaaagtgcatcctccccaagtatgctttagtagcccacttgagggctaatggacaagtggaacgagctaacgatatgatcctagaggcactgaggaaaaaggtcttcgacaagaatgataagctcgttgggaaatggatcaaggagctcccataagttgtctgcagtttccggactcaaccaagc

SEQ ID NO: 176770 - DNA, 1174 bp, Zea Mays
ctggagaggatcccggcgagaactccgaattgtgaagacggtgtgctggcgaggatctttggtgaagtgggcgatgttgtgagtcttcgcgagacagcaagcagaaaacgcgcggggactccggttatctcgacaaggagtagcaggagtcacgacggaggagcaaagcctcgacgttggacggagtcatggcacagagattcggccacagcaaacttcggcgtcggcatacaacagtcacacacaaacgggcgagcagcgcatcagctgcagatgggcggtgctgaaggcgagtggcgaggtgcgagtcacaagcatttcgcacgacaagaagcgaggcgactgactgagtagcgcaaactacattggcgagggacgcacgggaggccagaacaacgacaacgagcggcatggcgggacgcggggcgacgacgacggtgcgagctctagtgaggcgtcggcgagcaaccgggtcgacaccaaataacatagacaagcgcggcagcacgacgcgagcgtgggcgtacaggatggcgcagcagcaggggctgagttcgatgcagacagggaatcggccgcgagcactgaggtgcgcggcgaacagcactagcagagaactgtgggggtcttgagcagcatggcgagtggagtttcggcgtggggaaatgtttggcacggcgacagagcaggaggaggaggctccgtcatgggctctatttataggcgggagagtaaatcaaggccattacagcatgtaattgatagaaacggaagtttgattgcgttattaatggagacggcggggagaaggatcgacaggggagagtaagagctcggtagccattaatggcgctggaaagagaggaaactgccgactcactgaagaagaggaaggggagaggaaacggacaggtgcgggcataagcctgctctactcgcggccagagcggggaggtgtagaggtggccgcgcggaggcaaaagggcacggcagcagacgtcccagcggcggctgcgctgtccttgcgtgcgggtgaggagctggaagacgaccagggctgggaggggtgagtggggtccacatgccaggaaagagggagggaggcgcctgatgggcttgcatgtgctggacgtgcgtgagtgagcatgatttttttatttttcttttattttcc

SEQ ID NO: 176771 - DNA, 563 bp, Zea Mays
aagatctcggggggagtggatttggtcgcggggtgaagcttatcaactgcgcctatagccgtgcgacgtggtcggaccgccggtgtcgccatggtactccggcgacctcaattatgccacgctgtagctctttatcgcgtattagtaaccgtggcacgcctaggcttgccattttagaaccgttgcaccggtgggcgccacgactgagccacgagtgactcatctctctctcctgctgccagccttctccttcaaaattcggagccaccgccctcgggcactataaattgatggtgccgctagctccacaaggtcatcacgaagccagagcacccgcccttgcctctgattagccaccatagcctcccaatttctctcttcccccaaatcgggtttctgcgccactgtgaacgtcgcgtcatggccagctctctacaggtccattcacgccctcctcgctcttgtttcagcacccttgtgtgctatggatgcttatcggcccaaccaattggactaaaccacgttagatcatcaggaacaccttggattgttctcagtttgcg

SEQ ID NO: 176772 - DNA, 360 bp, Zea Mays
gtatcaggacttgaagcagaagtactggtggtacaggctaaagagagatgtggctgcacatgtggctatgtgtgatgtgtgtcaaagagtcaaggccgaacaccaaagaccagctggactattgcacccattaaagatacccgaatggaagtgggaagagattggtatgggtttcattactggattgcctcgcacctcgaaaggatatgattccatatggctgattgtggatagactgaccaaagtggcacatttcattctgatcaagactacttataaaggttcttagctggtagagttatatatggctcagattgtgtgtttacacggagtaccaaagaagatcatatatgatcgagg

SEQ ID NO: 176773 - DNA, 666 bp, Zea Mays
ctaacgacccctatctggcacgccaactgtcgtggttttggaaatcgggggacaataagatttgtgttcggtgggggatgttagcgcgatctcgcttcgaatggtgaatcatggggactcaaacaatgaacttgggacactgggtttatactggttcagggtgtgcaccctactccagggtagtgctgatcgtagtattgtttgaagcgtgttacaattgatgtgcttgcgtgagaggagaagaagggtgtttccttttatatcttaagggataggtcttacattggtgtctcttagagagagagggagagagcgagggtccttcggttgacgtggcgggttcccatccttcgggtggcgcaaggtagtgtttccggtatggtgccgcccatctctcttgttcctgtggcgagttcgtggttgacgttcccacgatgacacgcagctggtcccatggttcagcatctaggcctgattcatatgacacgactttctcctgtcatcgtgggccctacgtcgtcctcccgtgtgtgtggatttgttcatccggtacggtgtcgtcatgtcacttccgacataccggctactgtggagactttggtgttgaggtcggctctcaccggggctacctcgtcccatcagatagagcagcgtgctcaaattata

SEQ ID NO: 176774 - DNA, 333 bp, Zea Mays
ccggctccgacgatggtccgtcgcggggggcaatggcgtgtcgccgtggctcggtggtgggctgggaaaggtcttcggaccgttggatcttacaccaacggtcacgattatgttgtttgcctaccgcttcgagtagttgatctgggccgtcggtttgatcgggtggccaggagtgacccatggtgtaattaaatcatgtccgtccgtgtgggatcggatggctacagtttcataccgcttcacttaagatcggatctaatcagagccctcgattctggatcgtatggctgatgtcctctcgtaccccttcacccaagcctttttgcacatgag

SEQ ID NO: 176775 - DNA, 824 bp, Zea Mays
gttctttcccctgaacctagttccttgtgacccaatccttatccattataagggaaggttctgaaaccgagtgacaaggtggagacgtaatctaggtttcatgaaagcaatagaaattggatctcgcatggggttttagttgagtgggtgcccgggcctcacttcctattgtaaagacaagtttttcccctcaactggtcccctaggatattggcaacatcaaaagcttgaggctacgatcagaccaagggtcgatccttgttgtggccaaggatcggtgctcagcagcgcacccttgggatccttaccctgtcgtattcaattcttcgaatagcagtgcttattcttgctgatcctagtttgggatcatcccatgagctaccaggttcaaacccctaaatgcccagcccgagctactagttcatctgttctggggtggtggaaggttgtaggcttatgatacggaaccaggctaagcggctacccaactctagaccaccctcgcgaacatagatctttccctagaccaagcttttagtggtcagatcctcattcattctcaagtgatgttctaaaccaggtgcaagaatagacactaactcaagtttcatgattacaacagaagtttagatccatggaaggggtagagggaaacaacatgtgtaaacaggaaaagaaatcgatggatgagaactgattattccttcgcaatcggatacatgtgatccgtgtagatgacactcgagaccgggtttataagggcgtctctcaccgggctgggcacagatggcgccacagaccgcgcttacgagggtggattctta

SEQ ID NO: 176776 - DNA, 397 bp, Zea Mays
cacaaggctgactaatttatcggccgctgagcataaaagattagaagatgacatggagaaaatagacgaggaggcccatcgacaaaaggatcaggtgctcaaggtggcggataagtggtacctctcgcacttcagggtagactgccaccagaagaccgtccaagagagggagataaacgccgagtatatgttagccgtgctgcaacagctccccacaataggtgatgccaggtcagtcgatgatattccatctattaaaatttcttttgataatcggattaaaagtatcacagaggatatagaaaggatggcgcatgcattaggaaaaactcacatgcctagttttttatcacataaattaggcgccaaaacaattgcgccaaacacatcggcaaca

SEQ ID NO: 176777 - DNA, 782 bp, Zea Mays
gtggttcgacctagaccggggtctcgccgtcgacgtcgtcgccgaccgcgtctacttcccgctcttccaccggttctgccggcgcagctgctacgccgacgagcactacctgcccacgctcctcaacatccggcggccggcggcgggggccaaccggagcctgacgtgggtcgactggtcccacggtggtccgcaccccgcacggttcacgaggatggaggtcaccgtcgacttcctccggtggctcaggggcggcagcacgtgcacgtacaacggcaggaccaccaccgtctgcttccttttcgccaggaagttcctgcctaactcactcaccaggttcttgagattcgcgcccaaggtgatgggtttcggctaaaacacttgtccatatatacacggcggagggggcggccgacatcaacaattgaattgaggcctacagttttttttaaggacgggatgggatcggacgtgattattttgaggaaactcaactccattcattcaatcttgtacagtataatttaatcttactctttagttcagtagccgcgtgttcaaattatttttgaattcttcttttgtaaagaccgaaaatggagaaaccaacaaaagctcatcgttgctgtcaacgtcactctgtcagtaattgtctttctttctatcacggctgcagttcttatttatagctgcttggctgttgctcctgcttgaaaagggcagcgaaccagcttctcgatgattcttttggcaaccactacaagcttcatacaagatttgct

SEQ ID NO: 176778 - DNA, 702 bp, Zea Mays
gctggatctccctagattggtcctccatcgacgatggttgtgccgcattcatcgggtgggggctaccctgactacccgcccaagacggagccctagacgaccaacgtgacgtcgcctccagtccacaccccttcggccatctgctcgccttctccgggcctccagatgttcgtgcactactagatccgttgctcatgccatccgcactaagcctgctccctcctgctctggccatctgctaccctccaccgccccacacggtgcacgacgtgctgctgcgttactgccagcctgttatcgtctccccaccctagcagcccctagccagcagtacctccacgccccctctgaaggtagcagtatcccccgcttgccccctccattcccctccacaacaaccaccgctggccggaggcgctcgtcgagttcaggtggtgtggtggatgtacgattcaattcttattagtgtttggattttcaatagtaaattgtggtgacaatcttttggaagatgattttgatgataataatgtgatgcattgtagaacatattgcatcaggatcaatatgttgcagtcttattgtcacttgccaacaaccctgttattttctcttttgttttatttgaagcccttgttagcagacttaggattatttggtgttcccatgcttgacaagaccaagctatcaattaaaattgtg

SEQ ID NO: 176779 - DNA, 522 bp, Zea Mays
gtccttgccggctcggcctgacgcccgcgacagcacgcccgtcgtcgggaaacctcaagccggggctccgcgtgggttgcctgtcgtgccgccgcaggcagcgccagggattaaaggcggcaaaggcgatggcgacgaggggagcaagaacaatcgggacggcgagaaggaggtcgccgtcgtggccgccagcacgcccaaggacgcttcgtcgagcacccagcagcagacgggcgtgctggggcttgaggagttcgagaagttcatcggcaacacccccatcatgaagctcatgcggcgtggcacgagccagaaccagcccgcgccgctgcccgccggcgtgccgcccaaggccgacaagtcgggcggcaagaagaagggcggctggctcaagaacatcaagtcggtggccatagggttcatgcaggacaaggacgccaacgccaagtcgggcgtcgtgtccgcggcggcggccgtgcccaagtccgtcccaaccaatgcctccgccgggtctgctgcgcc

SEQ ID NO: 176780 - DNA, 589 bp, Zea Mays
aatcgggcaacccatttctcgcaccctttctaagaagactgtcatattcttatggagtggggtcccttgatcgacgctagaattcatgaagaaattgttccatgtatggcgtcacctcttcaaggttggtcaatacatatagcatgatatgccgccactcttcatatgttagggtcttggtggtcgagccacttgcgcttccgagttggcctcaaaatatgctaaggttcgattcattgtcgccatcattgtaacgagggggtggattatgcacgctcggcagtttgtcaccataataagttgttgtgaagtttgacacctcctctagaatgtatgcctctgcaatggaagcctcgattttgcatttatttctacatttctttcgaatagtatttagacatctctcgattggatagcaccaacgtccctgcatggcccccccattcgtgcctcataggggagatgaagaatcaaatgctgcattggattgaagccgggtggaaatatgttctcaagcttacacagtaacacaggtgccaatctttccaagtctgcaaccacggtccgagataactcttttgcacaaagc

SEQ ID NO: 176781 - DNA, 577 bp, Zea Mays
tcctggcacacatatgctatgcacccggcttctgcccctcggagacgggtgtgacaccattcctatttcaacaatgtcccgaataattattagttcaaaaactagaacaaatagaagtaaggagagaggaaagttcttgcacttgattgctctcttcaatgcggaattaatactagagcaatattacaagtgaatataaatcaagaacttggggatagataggaaaaacaaactgtagaaaaataaggaacacaagatgcaacaatgtgcttgaccgaggttcagctctgaagaacttacgtccctgttgcggtgtcctaaaggatggggttgcacccaaccctctcaagtgatccaaagatcaagcttgaggccatagttttcagtttttcacttatatccgtctcctcacaaggatctccacagaatggagactcttgctatccttgcacaagttgataagagctagaactccaatagaagcaagagagaggaagaaacacacaagagcgcaatcacaccaccaacagatcgaagaacgcaagcgcaaaaactgaaatagagctctcttgcgaat

SEQ ID NO: 176782 - DNA, 474 bp, Zea Mays
caggtttctagctccctttgggagggtttcaatcctcatatagcccaatatccgaaaacctaattcatcgcacgtcacctgctcggtgaaatgcccaaaccagccaaaaatgctccgattgaacccaaatttttcaggcaccttcacaacacctccagtaacatattcgccaaattccccgtttcgagcgatcgtttccgagccgagtgcctaaattccattttctttgcctaaattcaaaccaagtactcacttcactcttatttacccatataaacctattcgtgaagtatcggctcaatttcaaatcatttcatgcctcaattcgaattccaaacctcctatggcactatttctcgttcaaacgtcgttttcgcgtcgtttgacctctcgatcgccaagactcttgttttctgtgccataattctgtgtgtatgtatttattcacatttcatatacttatgactatgtgac

SEQ ID NO: 176783 - DNA, 619 bp, Zea Mays
aactggcactggatatttacttttcatcgtgatggcgttcaaataacggtaatctacatagaatcgtcatgtccggtctttttacttcactaatagaaccgatgatgcaaaaggattgtgacgcttttgaatgacaccttgggacagcaggtgatgcacctgagtttcgatttcatacttgagtgccggtgggtagcgatatggtctcacagtgaaagggttggcgcccagaatgagcggaatggcatgatcacatggccgacttggtggtaaacccactagctcggcaaacacttcagagaattgatctaacactgattgcaccctagggtccaagatgtggttgtcggaatttcctgctgtagcagatgtgtgctcttctaatagcatacgcaattccaccaatgcccctcacagaaatgaacaagccgctcccgacaaacatactgaatcaccattatatgggatacataaccacttattgcaccaatccatgtgcattggactatacttttgtaaccagtccatgcccagcaccaaatcaacggacggcaacggtaagaatatcatgtctgtttgaaacttgtatccagacaacaaccattcagcttgacgcagt

SEQ ID NO: 176784 - DNA, 407 bp, Zea Mays
catttgcagccgccaccccacctcccccatcaaaccctagccgccccctcctcaagcccttctctccaaggtgccattcctttcccgctcggatctacgtcgcgttggtgcatgtctccaattggattttggtggaggaaagaagaagggaggaaagggggaggattcaaggtgattttgagattgtatcttgtttaattgtgttgtaatcaaattgattatatgtttacctatccgaatcggtagaggtgcagtcctgaaattttgtgggtgggcgaacagcagtagttctagggatttctgggaattttttgtgggtaattagtggggatcagtgggtgaatcatgtagagctttgtcatacctttccaacgggtacttatgcgctcgattcggagttataattt

SEQ ID NO: 176785 - DNA, 543 bp, Zea Mays
gcggtgcagatcgagcagttgagctgctaaaactgaaagatccaaacgaggagcctggttcatgttcgatgaatctgtaagaacagtataacaccgtgagattgcttcgtcctgcagattacggtgctctattttatggcacaagatgctggtctacactctattaggagtaaaatattaggacataggctataggttcagatcacactgttgcggatcagcacatcatgtgaattataactgtgtgtactattgtatcatgtggaccaactattttgttcacagaccaacatgcagagtggggatgtggatttgaactgacttggatggtcctacctagacacgcacaccatggttacatgtgaagtagtgtctgtttctgacttagttttcgtgacagcctaagattggtttgttcctattttgtggtctgaaatacattaggcatcatacaccatggtccacaaggttttaatattcatatgccattttcatgtttttattgcagcatacgaagcctatatgtttggtatatcgatttgc

SEQ ID NO: 176786 - DNA, 716 bp, Zea Mays
ccctaggtcaccacatcaactttgtatctctatgaaaggggaacaactttgcttaagagtgtaagcatggttgttatgaagaaattggagaaaatgtactcaaagttgggctgtcaggctatctaggactgaattctggtatgacagtgtaatgaagccatctttgagcttaaatttgatcatgatccagtcattatctggttatgattactataacaagattaaagctgaataatagagctacaacttctttaaagacagattgtcaagtcattacatgggaaagggagatttctgctctgcaaatctggctgtcagtccaactgattggagtttaccatggtagagtgcctgaacaagatcagaccgccatcgcatctcactgccgatgatccccaccgcgattcgtgccgacgccgtcctgattcgtgcacggtatggagtggataacgccgggggtggataactcgtacgtggcgtcattccccgagtccaaccggagtcctcaccggcggccaccgtgaccagtaaattttgccgcggtggcactcatgccgtgatctccctcactgtgtctcctaccgacgtggtcggcatgcgctgtaatactcaaaagtgtaataaagagaatagagataacctcaatagtttgtggcctctactatttattgcatgtgatcaacactagttaaaagtggatgaatagaacaatgaac

SEQ ID NO: 176787 - DNA, 540 bp, Zea Mays
tccaatgtcttggttttcggatgatactacactagtggtgctatggttcggatgatactacactagtggtgttatggtgtcttctctacgcattcacatagtattttgatcataacacatgcatcaacttattatacacaagatgtcttaaatactgtaggatgatactatgcactgagaatggtgtttcatccaaagtgtttgatactatgtatcctatgtggcagtctcggatcttggtatatcaaaccctgcaccgggagtagccttagttctctctttttgcgatacagtcctaggagctggagcaacatattcaggatcaataagctattctgtcgatttggatgccttttcccctaactgtacaactataactgcttttattgtgatacccgagtatattgtgatacccaattgaggtggttttaacgtttagagcaactccaatagcctatttaaaacaacgtactcggtaaaaaaagaaaaaaatctcgtagaaactcgttccaatatactcgccttcttcctcgcctcttc

SEQ ID NO: 176788 - DNA, 595 bp, Zea Mays
aaaaattccagagagaggaaattgttggcattcgctctttctttttcttttttgaatacagactgtttctttggaatctggagcgtagaaattgttctcagttgtgcgaaaatgcatgtataaatcatcggccccttctactcacttaacctagccctgtggaaacgtactgttcttgtggcacacaggcgaacaatgcctgaatgaagaccgaataaactacgccggccgggatacggtttgtgtctacgtatttcagttgtatttgacgaacgaacatggaattcacttgctgtagttggtatgacgtctgcctgactagcgatgtttcagcgaatccagtacatgaaccttatgtgcatcaatgagcaatttctcttggacagttagtatcaggataaaatttgctatgtcccggcgctgatgatccacgacatcaaaatgcacaataatggtcacccaaaaataagatccggccctatagcacgcgaggaggccgagaacacctgacgcctgacgaggtcctacatcctatcgcacgatgggacgcatgcatcttccattgctcctcctccagcagcttcccctcttcctc

SEQ ID NO: 176789 - DNA, 873 bp, Zea Mays
tggggccagagtctcgatgagtgtaaaggggagatgttggttcacggatgtacgaaccatcaaagaggatgaatacttcgatctaaagcataatgtgcaggcaaacgaatatcagggccattagatggacacatgacagtggaaacagagatctgtggattaaaaagatgaatagagtaccttctgcaaacagagaataatcagaactgatgcaatctgtgatctacgagtgagtatgacgatgatccccttcttcaaatgacatataggtcatagagatcataccatcgttagcatgatgggatttgtgtggcttgtgaaggggtggagggcaataggaatggaagaacttactcgtaccagtttagtggtgtctgtgccctcctggacttcaacaaacaacattctagcaatgatggcgacacccgacagcctgtgacatgagggagagaacctaagtagtgaatatggaggagatgtgctcgagcgatggtggagaaggaagttgggccacaaagcttacctatacgaaaaaagtgagtgatggcaatgcattctggccacaactcgatctagggatgaatgtggccatcgacagatgggatctcgaggcaatggaggcaccacggtagccaccgagtgtggcagcgacacgggaggggaacgaaaggcgctgaaaccctagcagtgcaaagaaaatgaagatgtcgaaggggcccaggagtgaagtgcctgacaagctgccccacttcccaaggatgcaacctctcgcctgattctcgtgggtcattgaaaatgggattcatggagaagcgcttcaaaccgaatctgttcgaaaagctatgcatttcataggtatacattcgggtcggc

SEQ ID NO: 176790 - DNA, 507 bp, Zea Mays
ggggctacggtgtaaatgtttctaagactctgtggactgtttctgtgcaccgcgggttaattcctaagaaatccaggggctcttaagaaaacgtgccacggccgaagaggtattgagggttttcagccgcacgatcaaggttctagggccccgattagatctagctttttaatgagtcgttatgcgctgaggatcgtcgattacgctttctacggtcaggattttatgagacgaaagggtacgccaaatcagatcgtggccacccaaatctaatccgacgctcagtatttcattcgtcaagatctaatcctagccgtttgctagggaatcaacggccatgcagtcatcttccacctggcttcagcgcgcgcgcatgtcgccccgcagcggaggccagggcgcccagaaccgcgtgatcaggagaatttgtcgagacacagagtagagtgctcaccgctatggaaacgagtccgacgtcgatgtcgcaggtaggtgttacaatgcatc

SEQ ID NO: 176791 - DNA, 540 bp, Zea Mays
cgaaggttaaaccgagtaatggatgctctggactttgagtaccccgactacgagcgactagacaaggatgccgaagggcagaagagaaagagagtggccagtgttctgaataaagaagctactaaatcgatgaaagatgatgaagaaaaattggaaaagaaaaaggtgaagcctgagccgaagacagatgcttcgaagaagagaaaagctacagctccgaagcagaaggcaactgatatagaagaagaaactgctgcaacaccttctgccaccgacgtggaggaaatcttaaaggtaattactgaatatttgcctatcaatctaagtccactggggccgcatctgacgaagctttttcagaaggaaaaggagccctcgataacgaagaagacagctgggccgaaaaaacgaagaattgttactgtgatagaagttattgaagggacaccactgcaagcttcggctccgaaggcaccagttgttgagagtacaacagcgaccgaaactgcacctgccgaagctgcagctgccgaagctgcc

SEQ ID NO: 176792 - DNA, 677 bp, Zea Mays
ggctgatggagccaagagagaatccacacagcgagctttcctttataaaaagaaccacatccagacttccacagacatctcactcatccccgtcaaggcaaagtgctgagtgcctgaatccatccacctgcatatttatataataccaggagtaagttttgtactggtgcagtctcctgtctgactagacagagagataacgaggcccttttgtgccatgcaaagcagggagcagcagtacactgcatcaggcatttggcatcataacaggcatgaccacagctgcctctcatgctccagcctctagtcatgccccagcttcacattcacacacacacacacactgacacacaccacaccaagtcataacaagacaaacagaagcacatttaacgagaaaggccgtgtgctccagtttaattgaataccatgcttgtgcgctcctagcacaatgtcacagcaacttctctatccagcctctcgaccctagtaacatttcagtgaccggtatggcccactctatcctctcttgtcatatcggcttcttcacaagttcacatccacattaagtcaaggcccaaggtccagtacaagttactgccaaaaggttaacttccttgattcaccatgaaaatttaccactatgcccatgtccttgaagtaaagcatactgagta

SEQ ID NO: 176793 - DNA, 798 bp, Zea Mays
ccgagttggactgcgggttctatttctattttagtcagaggctcatatgaaaatgcgtacccgcgaaggggtatggcggtttacagaccgttggatctcgcgcgacggctaagattagaacccacctgcgacgaacaggtgtgttacgagaaccattggatcacccgccaaaggtgtggatttaattattccgaatctagcctgacctatccgatcagatcctacggtcaggatcaattccccaaaccggtaccctagcgtctaatcacagccctccgtcgtctgatctacggcccgagcgacgtcttccccaaccagctcaacacggcgggcgccgtggccaaccacggcggcgatcccaccggcgagcaacgatccattgatttagcgcaataatccgacccctagaacggcgctacgcgtggagcagatagcaatggaggcgatgcggtagtactcaccgacggtcaagcgacggaggagtccgaccacgaggaagtacggcgcggtggtgaagcactccctccggcgagcaattggcggacttccccggccccaatctcaaccctccgaagacccgagccgcttacccagcttctggtagacccacgcggacacccgcagagatccgagcgacaaaaaccgcgatgaatcgcacaggtggctgcgagaccgtcgtgactcgacctcccctcggttcaacagcaatgaggctaggctacgagggataggaggaaccggtcctaggtctactactttagagtcacggagaaacggtccaaggcgcccgcaacgaac

SEQ ID NO: 176794 - DNA, 439 bp, Zea Mays
tcggccttggagtcacctttactatccggatcccagatgtccaaggtctttgctacagaatcattttcctatgggataaaagtaaacaaactcatcacctagcaagggcacaagcaacaaaaaataaattaaagacaaggcgacacagagcaagcaaagtcgatgtcatcggtacagtcatggctgcaaggaccctggtggctaaggcgatagccttcgctgtggcccccatggtttcgctcgctggttcctagttctcctccgtagcgctgccaaggatacacaccatctgcatcgacttccacctccgtgagttcgttgccaccaaaggatttggtgaggaaggcgaggctagatgtgggacagcgccattggcttctctgtgtctcgctttcactttggtaaggccggcagcccaggagggagaggagacgacact

SEQ ID NO: 176795 - DNA, 940 bp, Zea Mays
agcgccttagagtttgctaatacctggctgactgaatcactgtattcaatcgttcttcttctagtatatcaacgtcctccagtctagtagcctcagcttcagctatgttttcaaagatcaatcttggtgccccaaacttgagatcagtaggtagcactgcctctgaaccataaaccataaagaagggagtgtttccatgcaaagctcggctgggttgagttcttaggctccagaccacatacggcaactctctgatccactttcctgcgaacttttcattcttgtcgaagactttctttctgagtgcttccaatatcattctgttggctctttctacctgcccttggctcttgggtgtgccactgatacatatttgatctggatgcttttttgttcgcagaaatcaaagaactccgagctagtgaaattggatcccaggtcggttatgatgctattcggtattccaaacctgaacattatgtcttgtatgaattccactgccttagctgaagttagagaagcaatgagcttgtactctatccacttagtgaatttgtcaatggcaaccagtacatgagtgtatcctccttgagctttcttgaagggtccaatcatattcagtccccagcacgcgaatggccatgttacaggtatggtttgcagttgctgcgctggtaaatgttgctgttttgataagtattgacaagcttcacacctctggactaactcggctgcatcactctttgccgttggccagtagaaaccagacctgaagaccttcccaaccagagtcctggatgttgcgtgtatcccgcattgcccagcgtggacctcatctagcagttgtttcccagtagccgaaagaatgcatttcatgaggactcctgtcgcgccccttctgtatagtgtttccccgatgagagtgtagtgagctgactgc

SEQ ID NO: 176796 - DNA, 750 bp, Zea Mays
gacgacgcacggacacatgcgacttagcgcgtagacaacatgcggcgatgcacataatccgcacgcgcgatccagcacgccctcgcgcgcggaacaacatgcacgacatacgagaaatacttaaacagatgtcgcgcatacactaagcgagtattaattcaaaatgtttgagttggcattaatcaatttaacacatatttgtaaagcacaagttagaactatacattagttttaattggaaagtcatttttttaaccactatcgaatgaacaaattattaattacttaagatccgcgacataccaaaataatgttactaatacgaaattgaagttattacgaagttagcgcgactggaacgagtcgtgacgggtttacgacacaatttatattgaatagataacatctctcgaatttaaattatgtggcgcgattgtattggtcaaagcgaagccacacaaagggccacatggatctcagcaacaactagtcaaaatgagtgggatcaaatgtggctagcatctccccaaatcccaactgcacggttggcttcttctcatctccttcttcccaatcgcacaaacacaacagagcttcttcttccacggacggagcagagaacagagggagaggagaccggctagcagggatctcgccggggccatgggccatgtctcgcgctggctgcaagggtgagctcggtcggccgcacgccgctggccgcgagccgctggtcgccggccgcgcgcc

SEQ ID NO: 176797 - DNA, 491 bp, Zea Mays
gcgacttggcaacttggcggcacagtgtctggaatccctgtgcttccatcgagttgcgggctcggtagtctgcgcatcgacctcaccttcacctggattgaaggtacgatctggttcctccttcgtagcgtggtaggtagcgtgaggggttttagttaggcgtgagctagttgcggtttgggttgttcgccgtcgacgacgagctcgctgttggctggcgggaccggtcacctgtgtgttgcggtggggaagaagaacatgcaccctcgatcgggtagcgcgcggctaggattgggtctgggtgcggggctattgcgggccgtagatggacgatctagtgggcgcgatcgcgtagcaacttgtttaagcgatgactgctcctggcgcttggatgtagatcagacggttgaaaacacacgttagtttataagtgcgatatctaatccacaccgcccgagcgtgatccaacggcttggatccgaagatacccc

SEQ ID NO: 176798 - DNA, 586 bp, Zea Mays
atcatatcgcatgtctcaaggatcatgcaagtcatgcgacgctttgaattccacacctgatagttgagagagggaattgagggctttatgtatgtgtgtgcaattttcactatttggttttctcacacgatccaatgctcttgcctagtattcccttcttcccctggtcttcttccgtcagctgttatcgttccctcttatctgtcggcacaatcgcagtggtcgtgacctccactcttgaactactaccacatggtagggtcctcaaccaaaaaagtttagacatggtgagcaagctcctcgagtgggtcatgctactggcgtccaacaatgtttgctcaatgatgaatctgatgtagactctaaaggatatgaaggagtacaccatctccttctcccatttgatggtggaaatgaacttcccattttcgagattctttctttacatcctcaacttctatggtctctaggttaggcatcttacagtgcactccatccttgccctcttgacctttgcatatctatgtgaaacattcgtgggggtgaggccctatattggccttttttgtcatttcttcgttctctg

SEQ ID NO: 176799 - DNA, 491 bp, Zea Mays
ctttttcagaaggaaaaggagccttcggcaacggaaagtcctgctaagctgaaaaacggagaattatccaagtggccgatgttattcatcagacaccgccgccggcatcagcgccaaaaataccaattactgaaagcgctggcgccgctgaaggcgccggcggtgccgaagctgcagccaccagagccgaaggtgccagagctgagaccgccgaagattctgatctagaaaccacacttggtgatattgataacatacttctaaaaatggctgaggaagaagctgctgtggccgcgatggacacaacaattgagaaaggaaaagagcaaattaaagatactttggaagaagaaaacttcaattttcaagatatactagggcaagagttatcagaaactgaaaaagaaggactgaagaaatatgttgtatcctgtgggtacaaaccaggggctttgctgtttggcggagtcaatgaagggaagttgaggtgc

SEQ ID NO: 176800 - DNA, 417 bp, Zea Mays
gtctaactctggttgactcaaggtgttgcactcttctgtccgatctgagagaatactcgggtgtgatacttcttggacgaagatcctggatgggacctgggcctgactggatcccagcttcaacaacgcgtccgctaccgcgttgcgatctctttccacgtgatggaattccaagccttcaaatttgtcctctaattttcggacggctgcacagtacttgcccatagaatcagtcgagcaatcccagtccttatttatctggcttatgaccactagtgaatctccatataccatcagcttcttaatgctcaatgacacagcaatgttcaacccatggatcagtgcttcatattctaccgcattatttgatgctggaaataataactggactgcatacttgagttgttcacctccaag

SEQ ID NO: 176801 - DNA, 717 bp, Zea Mays
cacggcatatatagcctctggttcaaccaatctctcctatgattaaggcatatgaaaagaaaactaatcttaacaaatctcttctatgattaaggcatatgaaaaggaaactaatcttaaccaatccctcctatgattaaggcatgcaaaagggaaactaatccttatctttctaaacttagccactgattgtggcgcctgccttggctgcgcgatctgcagctctcctggcgtcacgacggcgcctgtaagtgtggccgtacatggcagatcttcacttgtcattttcacaaacaataaactgtcaggttttgatggaatttgagctaaattgtggcccagcatactctgcgattcgcgagactggcattcttccttgagtaacaaagctaatgttttagaaacttgcttgtaaaccttgaatgttttgtcattctccttatacataaatgttttagttttaaagcattctcttagtttctagactgttcacgacctgtagtgataaaaaatgttgatagagcttgtttgaatctaattctgtgccaaacaaagcaccataggaatatatattgtaatataaccatgctcacgctaagcgaaggatcaatacaggcatgtcatatatataacttatatacgccaaaacacccttgtgacatggacatataactgcaactatgatttagtcttaaatatgagtgcatgaaaaacaac

SEQ ID NO: 176802 - DNA, 544 bp, Zea Mays
cctagtattccttgcttgcttcggtttaaaacccaccctaaccagatgcatctttcgatcagctgtggggggaatccagttaacaacgactgcatctgaaatctggggagctgtgcaaaaccactggcggagcaatgtgactgggaatccagttaacaatgactgaatctgatctggggagctgcgcaaaccactggcggagcaacgtgaccgaacatgagcgcggcagccttccagtgcatcaccggccggccacatgtggacagattagcgcatgcgtaagtgcgtaacccatgtccctaagcagtattcaagcggggcacacgggtacagcccgcctcggtttctgcgctaaggaatcgagagaggtcttattcatttcttctcaggccatatccccccaccccgatcaaggcatgtgtatctttttttttacgtaaaatatctagcaggacatattttcgcgtgatagcttatcgtgcgcacacgaatgaccatgccaccgtgctttgattgataggacctgagctatacactgttaaca

SEQ ID NO: 176803 - DNA, 521 bp, Zea Mays
cgtgaatgcgttctctcacccgaggatggctttgggcaaggcgtgactgcgtctcccgcccggggttggcatcgagagagccgtgactgtgaggttgtcttgggcgagtcgtgactgcgtctctcacccagggttggcctcggtcgagtggtgactgtgtctcccgccctcgagcgagtggtgactgtgtgtccggacctcgggcaagtcatgactgcgtctcccaccctaggccacccttgtcaagctgtaccctaggccaccacccttgtcaagctgtgaatgtgtctcctgcccagggatggcctcgggtgaggcttgactgtgcctcccacccgagggtgacctcaggtgagccgtgactgagtctcctactcgaaggtggccttgtgtacaccctaaatttagggtataattttttttctaatatccactaaattcaggtgttaccctcccttttctttgattttcttttccttttctctaaatagtggagaatgtctttattttatatctatatg

SEQ ID NO: 176804 - DNA, 282 bp, Zea Mays
cagtgtgggggataggtttataactcaggactggtcgaaggggggcagggagattgctggtgacgaagcttgagcgctgctgggcaaagtatgcttcaattttatccttttattttgatactttctcctgttgactgttgatatacttatgtatttttctcttactctataggatcatgatgacgaagaggatagagctgaagcttgaattaagtcgaagcataggaccctgtagacttgatgtaattgttaatgtaatatggtgtagcaggaagactttga

SEQ ID NO: 176805 - DNA, 443 bp, Zea Mays
ttgggacctatatgcgactcaatggtttcgccgctccagacgtcctagtatatcccagccgctccagccgccgacgtccctctccttcgttgtcgttgccggatccgccctccctccgtcgtcctagccgaagtgaagtaggcggtgggctcggccatcgactctgcacaccacgcgccagacaccaaagacgtggatctaggtcaactacttagttcctccattttactgttgttatctgccctcatgcctccattttaatgtattaaatcactcttctttttcgacacagttcctgcataagtttgcctaatctggcacattcattcactgattcttgttccacggacaaacctatgtgtgacaagagaactgcacctgttcagtacaacctacgcaagaagcgtgccaaaaccacttccacggtaagttcttttgtgcat

SEQ ID NO: 176806 - DNA, 776 bp, Zea Mays
gcttctacctccgctatgctttcgaatgtcaacctgactgctccaaagatcaggtctgctagcaacactgcctctgatccagacaccatgaagaatggagtgttctcatgcagagcccagctaggatgggttcgcggactccgaactacataaggcagttccttgatccatttacctgcgagcttttcattcttgtcaaatattttcttcctgagtgcctcaagtatcatttcgttggctctttctacttgccctttagctctcgggtgtgccattcatgcatacttgatttggatgctcctttgctcacagaaatcaaagaactctgagctggtgaagttagatccaatatctgtgatgatgttgttgggtatcccgaacctaaacatgattttcttgaacgaactccactgctttggttgaggtcagagaggcaattggcttgtactctatccactttgtaaatttgtcaatgtcaacgagcatatgagtgtatcctccttgagctttcttgaatgacctaatcatgtccatcccccagcatgcaaaatgttaggttatggggatagtttgcagctgctaggcgggtaggtgctattgcttagataggaactggcatgcttcacaactctggactaagtctgccgcatctttctttgtcgtaagccagtagaaacccgccctgaaagcctttcctaccaaggtccttgatgctgcgtgtattccacattaccctgcgtggatttcttccagtagatgtctccccatagctgaat

SEQ ID NO: 176807 - DNA, 862 bp, Zea Mays
taggggatataagcaagttgagagagggagtgagttccaagtctctaagtatgattgaggcgagtgccattatcagaagtgaggtgagtcgtgagccctgagtcgtgaagtccccatttgtctccccacaaaaggctttgggctcctccttttgtagtcgtgaggaggaggctagggatacaaggatcgtctgtgttgctgttgtggtcagaggagatgtgtctgagccctatagcggcatggtcgatggggtggctctcgtccttgtgtcgcttttcgttaggagaaggacacctagtccatgtagcatgttctctttgtcgagatagagagtcgaggttgggcttgggggcatgagcatgtgtccgagccccagcctgtacaagggggtaatgagatgttttttaagtgtgtcgagtcggagtggttgaaacaatgcttggcatggtcttctacgagattcacgggagagtagatggcacttaatacactgcccctgcaggggtagttggccaagactgagctcgagcgaggcggagatttctcccgagactgagtctgggattagacgttacatgtaatcgcgcttggggtggttgaaacagtggtcgaagtggaggaacagtgccacgtatttgcgccctgaccatcgttgtgggcaataaatgtagattagactgtagttgtgtcgtcctttattgactttggcaccctcggcggggcaagtgaacatacagacgcacgttctgggatcggaatggttagccaaggcggacaacttccggagcctcgcccaagacaccctcgagcgagtcagaaatgtgctgctcgtctagggttggcctcgggcgagtcagaaatg

SEQ ID NO: 176808 - DNA, 468 bp, Zea Mays
catgaatattttagataagagagcagtttttgtgcccgggtggctggcgccctggatatcaggaccatccatttccatcagcctgatcaaccttaggcagagaggaaccagaaccaatgctccagttgttccgtaaaaactccatagcacaattcaatattttttatgatgcggaataaaatgactactcaagtgtctacaccattgcagaattttgttttttcactttcagatacatcatggattacatttttttcgtggtcaatgttccatcttctataaatagcactgaaatgttccatctgaggtagcattccaataaatcagtcatcatagaaattttggagagcttcagaaaccataatgaaacacattccagtgcgtggtgagaaattttaaccactgcacggtagaaaattttcacagcgtgaaaacttcagttaaaacgaatcatagaaaacacaagca

SEQ ID NO: 176809 - DNA, 789 bp, Zea Mays
acaagttgtattgatgtggcatttcatgggtgaaaccctagaatagggtacttcaccctaaaactaggcttaaaggagtaaacaaagcctaactaggagaaaacttcaaaacttagttgatatgatcataaaatatcatcattgatggacttaagtagcatcaaaaccctagaagcaccaaaaaccctaaatagacccctggaaaaccctggactaaaaccctaaggggctatgtgcaagaaatgcacatttttggacctaagtgcaaaaaccatgaaattagggtaccttaggtcatatggttcacatatttggagatttgcaaagaacaccctaagttttgggcttatttgcaaaagccacatttatgctccaatggctaagtctgaatttcagagaattagctcaactttgtagccctatatattccaaattataaagattttgtcctagatcaacacatcaaaattgtagagctatgtaaggagaatgactttgctatagagatcatgccttggtaccatgaagtattttgagataaatgtgcccaaagttgggatgtcagtctgtctaaaacctgaattatggtatccagtggcataggatgaactttgggggccattttgaagatgatcccgtggatgtttgagcatggttaccacagtcggtttatatctggatcatagggctacaagtttgttacaaacagattagtaagttcttatgcgaaaattcaagattttggcgtcagaaatctgtttgtcaaactgactgaaggagatcgtgatg

SEQ ID NO: 176810 - DNA, 737 bp, Zea Mays
cgagtgccaaaaaaacactcggaaaagactcgtttttaggtagcgcctaatgcaaaagaggaatcaataaatacaacacgtaaagaagaagaattagagagggcaagctcttgtcgaaaaggtgatttatcccataatatcatatgtcaaaatgcaacctctaatttatgtcaaagttccaccgtggtacttcccgatcaccaaaccttccctatccatggtgtttggttcaccatagagactcctgccaatcatggcacattccataagccaacaaagcaaactactgctgctccacacttaccatcaccttagtgccatcatcaccactaagtttctctgtcatggaagtgctatagtccactcatctctacacacatgaagttattgcttctccacaccatgatttactataggcattaacactgtaactggtcatccacaatggcccccataatctcgatagcctaaacatataagagatcacctcaactctaaacctagagaattgattactaaggtcacagtgaggttgtagtgtatttatttttcacatgaagcaattccatctagcttctataatctccaccaacctacaaatgggcacccaaaggcatattcatagaccataaaagttccttggcattgggaacaaaagctagtaaatctgtcatcatcggatgttctgatgtagtccatgtatatgtgaatcatgtaaggaaaatagaccatggccc

SEQ ID NO: 176811 - DNA, 480 bp, Zea Mays
aaaaaagaataaagtgtattggcgcatgtgcatcgactatacagatctcaacaaacactgtccgaaggatcccttcggacttcctagaatagatcaggtggtagattcgaccgccggatgttatatgttgtccttttggactgctactctggataccatcagatcagcctggcaaaagaggatgaggaaaaaacagcattcattaccccgtttggagctttctgctatacctccaggccgttcggcctcaagaatgctggagcgacttaccagagagctattcaaacatgcttcgatcacttgggcaagcgggtagaagcctatgttgatgaggtggtgattaaaacagaaaacttcattgaggatttgcagctggtcttcaatagcctgaggcggtactggtggaagctcaatcccgaaaaatgtgtctttggagtaccagcagggaagttgctcggattcattgtcagccaccgagga

SEQ ID NO: 176812 - DNA, 337 bp, Zea Mays
actccattaaactggtctgaaccaggagaaaggtggttctttaggcctgatttggtgaaagagatggaagaaaaagttcaatgaattatacatgatttgaaagaagcacaagctcgacaaaagagttatgcaaacaaacgacgccaacccttgtactttcaagtcggagatcatgtgtatctgaaagtatcaccaatgaagggtgtaactcgtttcggtgtaaaaggaaagcttggaccttgatacattggtccattcctcattcttgaacaatgtggaccagtggcgtaccgactccaactacccgaaacattgtctgcagtgcacaatgtgttcc

SEQ ID NO: 176813 - DNA, 594 bp, Zea Mays
ttcttacattgctcccttctcccttatcgttttctcgaccgcttgctgcctgctttaagcctttcagagaatttcattctattataacagtcgtctgaatcctcaatcattggaggattctcctcatctacacctttagtacaagcatctcgtagaataatcctgatctctctgaaaactgctattgatgttcttacgttaacaccttcaagatcttctatccatggagtagctaacccagcaagtatgtttttatatttttcatgctctttttttcaataatacccatattctcggacccagaatgagttttttctatttagaactgacccggatgagttttcgactatgacatccaatgtaggctggtcagaagtcaaaaatgatctgcaaactgcattgtagacacattggatacgtgctgtctcagaaatatgaactacgaagattccaatagcacgtttgatatccctggacttttttcttggcaattgtatagactctcaaacgaatctcttagagcatcagggcccatcctagtttgcccaacgtccgtatctggattgagaaacctatagttctctgcaatatata

SEQ ID NO: 176814 - DNA, 886 bp, Zea Mays
gggagggcagccaccgattaatcaagattacaccagcaattatagtagaggatatcctggcaatatactgtctacccccccggtagtaggaatgtcggtggaacagacgtttatgccgaaccgaaactctaggaagacgctcgaaggcaggcctttggtgaagatatcggcgaactgcgaggtggctggcacatggaggacgcgcacaacactggcggctacgcgttcacgaacaaagtgaaggtcaatctcaacatgtttggtgtgttgatgttgcaccaggtttgtcgagaggtagacaacgctcatattgtcgcattaaacagccatggcacgctgagaggctggtgaagctcgagtagaagctgacgtcgccaagtcgccttagtgacgccgttggcgacgacgcggtactcaacctctgcactagactgagagaccgtcagctgtcgcttgctagaccaggagatgagacagtcatcgaggaacacgacgtaaactaacgtggagcgatgagtgtccgggctctcggcccagttggcatcgatgtagacagtcagcgtgtgcggcgaggaagcacgagctacgaacagctcgaggtcgacggtgccatgcagatagcgaaggatgcgcttgccggcggtgagatgtggctcctgaggatcatgcatgtagaggcagacttgtattgcacaagtgatgttcgagtgggtgatggtgagatactgcaaggcaccgaccaagttgtggtacaacgtcgactctggaaccggtgagccatcggaggagagcttggcctgagtgttcaccggggtactgcaaggcttgcacacagtcatgccaacgcgctccagaatctcgagggtgtactgtcgttgagagagaa

SEQ ID NO: 176815 - DNA, 460 bp, Zea Mays
caacaatttgcttcttgagttacaccaactctagtccggatactcgataggctctcttggaaataggggtggtgcatgggataagctctatggcaaattcaactttcctttcaggtggcatgcctggtaactctcctgggaatacttcggggaattccgacacatctctaattgcctcaatcggattggactctttgtcatctattgataaatggtgacaggctccttcttctagttcaggcaagtacaactgggttactacttccttttcggatggggacaccaacttgactgttctcttctcacaactgacactggcttggtttctgtgtagccaattcatccctaggatgacatctaacccttgagttcccattactactaggctagcggggaagtctatcccccttatttcaatccttagattcggacaaatcctatcggactgaactttcccccc

SEQ ID NO: 176816 - DNA, 570 bp, Zea Mays
gttctatttgtagggaacccggggttcaggcattcaaaagaagggaaatgaggaaggcaagggcagatgaaatcgtgcggaggaagggaagtggaatgagcttttaaatcgagtgggtgatgaaaacaacacagagtaccgccttgctaagccaaaatttcatttttactagcacttttagggtgaattgaccactttggtaagcgtgcactgcctcccatctaacattgcaggtacctcgaggcacccccatgactcacccaatcgttcctcaaagaacaggctgataaaatgcacccttccaagggttgttccggtaagaagggatacaagactatatacgcccctatgacccattaacaacccaagagtttgaaggcttcaatagatgccctagggcaccacttgagtgagggatggaacagatgggccccaccagccagtacctggatgcccaaagtgacttaagggcatcccaactcgtgttcaagtcctgacttccgacccatcgtcatttcctcgaaaaaggcaccaatccctcgtagtcgatcaaactaccctgataaatat

SEQ ID NO: 176817 - DNA, 751 bp, Zea Mays
gaaaatgttatttgagccaagtctagattctctaacatggactacttgttgaggcgttgggaatgagaaggtacggtaggtgatgtggaaacacacaccactatcttcacttcacatgcactggcactgcactccccatgcatgtttttggccgtccgaaatttgtggtacttacactgaagttcagaaaaacagtgtgtcatgcttttagcagccagacagcttgttggaggggaggggagtagaaaccgtatccgaattaaagccgcaaagaacaagtaatcagaattcatccaccggtaaaacaaaagttttactgcatgctttgaattgtctaaagcaggggtgcatcaaccttcagcatttagcggccggataaacttctttaattagtcacgtgattagcatcttcttctagaccaaaaactaaccagctggttgttgtgtgtgccggtgctagctgaaagcattgctggaattcggtcgtagcaggagcgagtacactagctacaccgctaaatgcttggttaacatcctttttcgctcgtctcttccaagtggtccttcactcatttcacgccatgaatgaatgaatctctctctctctctctatccaaaaggtaaaggcgacagtctccctttttgacagtacatcaacaacccaaaaggtaataaaggcgactatttactttattatttcgatcaaatccatttactactacttgtgcgcatgattatagcgcccccccgg

SEQ ID NO: 176818 - DNA, 386 bp, Zea Mays
cgtgcgagcagcgccgccgcggagtacctgtcgccgtggccgagcttcgtcgccattcaaacgcgggtaatttctgcctcaacctgttcacagtaccatgcacttcacgtaggattactcggggtggattttgggaccaggggcgtctagagggcactcaccagtgagcgccgccgtggaactctgctcctggccgctcagaagaccgggaggaagaaagggttatccaccatcggtttgggaatgaatgggtgcgattgagtctggcacattacttgggcaatttgatctcgaccgtaggcagtagatccatcggttccctgggagatctgctttcagtcgtcaatccggggatcgacggtctcagtttaagcacgacagtcatc

SEQ ID NO: 176819 - DNA, 511 bp, Zea Mays
ttctcacacctcttccaaatctgtgaattcctgtgaaatctggagatttcttgttgtggaatgtgttcctttgtatgccttaaactccattgcaggtttctagctccttcgggagggcattcccacctcaaataagcttttcaccgaaaccctaaatccccgcccttcacgtgttcggtgaaatgcctaaaccacccaaacttgctccaattgaacccaaatttttcaggcaccttcaccacactcccagtaacctacttgccaaatttcacaccaatccgaggtcccaagcttaaatttcaccaaaattcccgttttgcgcgatcgtttccgagccgtgtgccccaaaccctatttcttcgcctaaattcaaaccaagcacacacttcactcatattgacctatataaacctattcgtgaagtatcggctcaatcccatatcgtttcgtgcctcaattcgaattccaatcatcctatgtcactatttgacttcttgatcgtcccgtcccg

SEQ ID NO: 176820 - DNA, 492 bp, Zea Mays
tatgttccaaacattgcagggtgatgagttttcaaagcattgaatggtcgtttcctgaagcaatattatcctcgtgtatgtcaaaatacttcgaaaaccgacaatctcacatcgagttgtttacggcttgtaccacgtcctgttggttcactgaggttcccgaatcgtaggggtatgtgttgagcaccatatttggtacctagacacggtcggatggtccgcgcttcagaggtccacgggtttagctcgtacggtccgtgattagattaactcggataaaagtcatcttcccgcatgtactttatccaactaattacgtagtaatctattgggaagcgtctagtaataggtccagaccccctataaatataggtcaaatttaacagaaatgaatcggtgagatagtaagacgtgatcagtacattaggtgagagagaggaacgcgtgcagggtgcaattataactggacggtagatagaggcggccgtaatc

SEQ ID NO: 176821 - DNA, 1099 bp, Zea Mays
gctgttgtaccatattgcccaccaactgaacgtccacccctttgtccacaaaggtaatcaccttagcatcccaatcacaattcatcggactgtgtcgacgcaaccaatcatagcccaaaatagcatcataggcacctagccccaacaccctcatatcactctgatatgtatgcccattagcccaccattccaatgatcgtaccatcgtatcactatacataatctccccattagccacccgcaccttagctgatgaacaaggatacactggcagccccatgcgatcaaccaactgcttgctaatgaaacttgtagagctccccgaatcaaccaacaccaacatcacctgattttgcaataaggctcgcacagccatacattcctcatttgtggtcccagtcaaagcattaagtgacaacataaaattctcctcttcccctttctcctcctgcgcaatctgtgtcaacgtttgctccgagagggtcatactcaaatcctcggcagtgagggcatgcaattgcatctggacttttttgggacagcgagcttgatggccaggttcaaacttgtcaccacaagtatagcacagaccattctgcctcctatactccttcaccaatctctccttagacaactcaggtaaggaagtagacccactagtgtcagacctggacacagcactccccaggcgacctggattgaccagcttgaaggatttctgtcgttgtttgtcgaaaatgccttgttggatcctggctaacaacgctgctcgttccaccgaagctggcaaatgagacttaacgggtccttgcagctcttgcttcaaccccttaatgaaatgggccacatacaaagtctcatctaaatcatgattatggacagaagttgcataccgcgcctcatcaaacacctttttgtactcctccacagatccggtctgcctaatttccaacaaggactgcatagcctgtgaatactcctccgacccaaacttcagcatcaccgcttcacaaaattcctcccaggaacacggaccatactgaattttgaaaatctgaaaccaccgcttagcatttccttccatgttcaacgatgccga

SEQ ID NO: 176822 - DNA, 536 bp, Zea Mays
tagcacggactcactccgaatggtgaatcattagactcaaaggagtttatacgggtccaagcggatgccttaagtccagtgtagtgttgatcttagtattgctattgaggacgtgttacaaagggtgcaagtgagagtaaaatggcaaggaagaggagaactgctactgaatgctcctactctcttgcctgccttgttcatgttcatccgccccttttatagttcaaggggaggcatttataatgagatgggtcatttgaagcaaagtgggacctgttatctacaggagtatctctgacggaattcctccgacatcgtcttctaatacgcaagtaagcacacgaccggtatggtgaatcgctccaccatgtcttgttcatggggtactttagagacctatggtgttgaggctccccatagtggactttggctggtcccacgtcgtagggtcgggggcattaagggtcgtacgtgatgatgcctcgtcttgttgacggggactctctgacactccccgactttccatggtgtcaatc

SEQ ID NO: 176823 - DNA, 477 bp, Zea Mays
tcacgggttcaccaggggttatgtacacactttggtttgggcagaataagaaccgaagagcgggtcgacagagtgggtgtcacggaggcgttctacagagcaggtgcgtgtttcggtgaaaggcttcggccgaacttcaattggtcggtattgagagcaataggaggctacaaatgagctagaatagggagcaattgggaagttactaacccgaagagcgctgaccacggtggagttcttcacggcggaggtaagaatagggagaaaggggatttgtggactgtgtgagttctccggtgaaattgaatcgagtgcttagtcgctgaggtgcgggatgtggtgaagaagcgaagtccgggctcaatttataggctgacggtcggaatcggatgaagatcacggattttagatcgcgctggcgagcttaccgcgcggtagaatccggtgatggcacggtggccaccgtttaaccggggc

SEQ ID NO: 176824 - DNA, 566 bp, Zea Mays
attccttgttgccatctaattcgtgttttacaatgtccatcacttaaaaatattccagatcagtttgttttgaagagatggactaaactagtgactaaggatgatgtcttcgatggagagggaaacatgttgaaagaagttccaaaggatgctgtagaaacaactaatgcaaagttggcatctcaaattagaagcaagattgaagaattaatttaccgtgatgaaggatcaaacaatgggttacaaacacttcgggatagtattgttgcatttggtgaagatctttccatattgctaccggagagaatgacaagtcaagttcaagagatcgagtcctttgttggttgttcaatccctagccatgttattatacagccacctaatgaagtcaaatctgtgggtaggtgcaaatgaataaaacctggtcagaaagtaaagaagctcggtgacaatgtggagaagaaacagaaagttcctcgtatgtgcaggtgttgcaagcaagtagactatcatgatgctcgaaattgtcctttaaagaataatccaacccagtgatgaatatcatg

SEQ ID NO: 176825 - DNA, 557 bp, Zea Mays
tggccttcccgaggtggtaatggatttcgaggtcataatccttgatcaattcaagccatcttctttgacggaggttgaggtctggctgagtgaagatgtacctcagactcttgtgatcggtgaagatgtgacatttgttcccaatcagatagtgtctccatattttcagggcgtgcactatggctgccaactccaagtcgtgggtagggtagttctgctcgtgtggcttgagtaagcgggatgcatagacaataactttctcattttgcatcaagacacaccctaagccttgtcttgaagcgccacagaaaatgacgaaatcctggtgtatgtccgatagtgtcaaaacgggcgcggttgtaagctttttcttgatgatctggaaactttcctcacattttggagtccacacaaatttattgtcctttttgagaagttcggtcataggtttcgctatgctggagaatcctttgataaagcggtggtaataccctgccattcctagaaagcttcgtacttcactgacattggatggctgtttccattttgaaacggct

SEQ ID NO: 176826 - DNA, 473 bp, Zea Mays
agctgcatcacagatggagagttctggctaagctcaaatccatatatcctccataaggcttccggaggagtcacccaccttgcatctctatactgctggatctcatctacatcaccattttccttactcgcatctctcataacaacagacgcacgatcatgacctttgtatatgtacttgaacaggtacttaacagccttgatgctcccacacgcctcaacattgatgtgacagttgaagagccgaaggaggtaagggttgtaagggacaacccatctattgtccaattcacatcctcgaaccttttccttgcacccatcgtcacgacgtctgtaattaggatatgaatccttcccttgcatggttgcctcacggaaatgccgggggtattgattcttgcacgatgcacgacccttagtgcacgggcaattagggtttagcgacccgcacgggccatgcatcatatgcttgat

SEQ ID NO: 176827 - DNA, 670 bp, Zea Mays
aattttttgcgggggattttttgcgtgtatattacatggctccgcctcattaaaaacctcaccccccgggaggaaaagagtgcgggccggaataaagctgttttgcgaattacaagggtgagctggccctgaggagttaaacaaaaactttgtggagattgtcaatgttccaagaatgctctaagtcttcgccggatggccttgcgagcctgtacgcgctgggggacgccttcgtcttgacgatgaaagggccctcccacttgggctctagcttgccccgggcctctattcgagctgtccggacgagtacgaggtctccttcgctgaattccctcgggatgactgtgtggtcgtgccatgcttttgtttgagcttggtatttgtttagagcctgtagggcgaagacgcggtctccatcgatgaggtccttcgaagtaggctcgtctacgtcggggatggctgacgtgactgtctgtggtgacccatgttttatttcttgcggggtcatggcctccgatccatatagaaggcgaaaaggggtgaacccagtcgccctgcactcagtcgtgttcagcgcccagaccgcttcaggtaacaggtcggcccatttgccttttttgtcgtcgaggagcattttcttgacggctgtgaaaattttaccattggcgcg

SEQ ID NO: 176828 - DNA, 574 bp, Zea Mays
cctacccccttaacaaaaatctcgtcctcgagatttgtaagaaatgggatcctaaaggattggtttgcaattcaacttttagtcttataattgtaccaaaagtccagagtctcatttttttagtcaatagtgggtgattaggagagcataggtatacgtaggtacaataatatattatgtaggataaaatgtgggtaggtcagggcaagaatagcctggggcaagacagtttatggtgagaaaggactccttgttgggtggtcatgcctctgatgatcgagtttgacttctcttctttcttgacgaggttgatccttttccttttccaatcttgctctttggtgtctctatccgggattgggacaagaggctaagatagatctgttatgtaggtcaagttgttgggtatggccgagttgatctaggtcacgagtttaagtttaagtggatttggagtatggcttaacccgttgtaccagcattaagtaacttacactagattagaacatattagattagatatgatcaaggttagactagtttaggttagatagatctaccagggtaggatata

SEQ ID NO: 176829 - DNA, 455 bp, Zea Mays
cttgctcgtctcgcccatccatgggacccgcatgtcatcactttccctcttctttaccgcaacagaaccgcacgtatctctgtctacctcagtaccggcggcgcggaatccgcgcggatcgaacgaactcggccaggaagggcgcggttcgcgcgccagcccttgcggaacccgcgacactataaatccgtcgcgcccctgcttccaccctctgcccgaccgtgcaccgtggtgaactgagctttcgctgcgccccgccgaggacaaagaaatgagagaggtgctgccgtggtggatttgaagcctacgacgttgtcgtgtggtcagaatcgggccggtgaagctcgccatgccacagggaatactattgtagcttcgcctatccggaattgcgctctgcgctgccggaatcatgcgccggtaatcatccctccgcctaggtccgtcgaccggcc

SEQ ID NO: 176830 - DNA, 394 bp, Zea Mays
gctacatccattttttagaaggttggttgtgatcatgccaaggctgtagctcagccaaattttgccttcttagctaatgatgttagaaacccttcaaccgaagctactaccttgggtgagaaattttattccgaagaatggctgaagggtggacgagaaattgctgatgatgccattaaaaggaatgagaaagaatctcatgacaccttagaagaggctaaaagagttgaagaagccgtcgagcgggccagacttataggtatgccctttataactcagcttcgacactgataaatatttgtgttttaatgcagctgagctttctccccctcccgagccatataatcctgaagttgacccatctgtcaaggaggcgctcgatataatcaagatt

SEQ ID NO: 176831 - DNA, 430 bp, Zea Mays
cggtagtaggcctcgcgatgctggtcgggccggagttggaggctgtcgatcgagttccattatctcaacctgccgcgccaaactcatggcggccgccagtgtctccgggttgtggatccgcaccgcgtggctgagcggcggcaggagccccccggtgaagagttggacacgctgggacttgtccagccttcccgctcgtgagagcagctcctggaaccggttggagtagtcctcaacggatccggtgcggcggcactcggcgagttcgaacaacggcgccgaccgaagagcagggccgaaccgtagttggagcaactccttgaagcgaccccatggaggcatcccttcgtcgtcctggagttggatgaaccaatgttgtgcgatgccctcgagattatacgaggccatccaaaccctttcttcccccatg

SEQ ID NO: 176832 - DNA, 674 bp, Zea Mays
cacggggttacccatgtgatgcttttgggtaggacgacgtcattgatcgcgactcgatggttcatgctgtaacacaacggagtgacgtgcagacttattcaggttcgggctgtgtggagttgcgtaataccctacttcttgtggtggttctggtattgatgtgaggattacaagctgagagttgggggtgttgtaggataagatgagatgaaatggtaggggattcctcccggccttatatatgcgaccagggagagttatcccgtacaagtgataactactatctacttgcttatctcatggtttgtagcaggctatatccctacatattcggagtccttctcgcccattcacccgagctatcactgagggcttatcatgtaaggtgatcccaacagtaccacctgatacatccgtgctcctgtagcacttaactcgggtatcgatttctgtcggcttagatcgggcctgcccagcctggctatgtttagctagcccatcccgctggacgacctaggagaggacctgccaggcggtccatgacacattttagtgtacatgaggagctgggggacatccatcccccacgctcataacctacgaacccttcgaacggtggcgcatttatggctcacgcaccccctggcctgtggtgcactcatgacctatcggac

SEQ ID NO: 176833 - DNA, 452 bp, Zea Mays
tggaattcgaactgaggcacgaaacgatatgggattgagccgatacttcacgaataggtttagataggtcaatatgagtgaagtgtgtgcttggtttgaatttaggcgaagaaaaaggaattagggcactcggctcggaaacgatcgtgcaaaacgggaattttggtgaaatttgagcctgggatctcggattggtgtgaaatttggcaagtaggttactgggagtgtggtgaaggtgcctgaaaaatttgggttcaattggagcaagtttggctggtttgggcatttcatcgaacacgtggtgtgcggggatttagggtttcggtgaaaagcttatttggggtggaaaaaccctcccgaaggagccaaggacctgcagggatatgtaatagggaccaagaaacacatttcaccaattggatgcatgggatttcacagaaatttgaaatttg

SEQ ID NO: 176834 - DNA, 599 bp, Zea Mays
gggaggagtagataacgtcggggcgggaatccagtcactggccagaccggccgtcgtgtcccaccgtggtcagtcgcgctggcatcaccggagctcgtcatttttctggccgtgacacgtaataaccactccttcgcatcgtatgggtcgtggcaagctaccggttatcgatcgcaggccagtttcctcttgtgcaccacggtgatcaagccactgtgaaatatcctagccagataatcgtgatctcaatcccaaaattcttgtccagttcgatcggggcctataaattgaggatgccctctgctacgcttcttagttacgcgtccaacccatccccagctagctcctatcatgcaccaccacgccccaatttcgcatttcccccaattcacttctccacgctgtcgtgaaccatcgcaccatggaccaccaattctaggtccgttcttgttctctttgttcatgtttcaacacctctattcactggtgatgcttgtcggttcacccattaagctagaccctactcaattatctagaacacctcgatttgtccatgaagtttgccgtcgtcgcgggtgggagaacctagggctggattg

SEQ ID NO: 176835 - DNA, 401 bp, Zea Mays
cggagacggctgtcgtggaccagggacggaggtggagaggccagggccacaggccagtagggcgggtcacctagtagctgctagtagtacagtaccaaacaggagcaccagtacttgcaagttctgaaggatggttcggtgcaagccgctgctgcgtcgtcctgttcctcgtcgcctacctgctgaggtgcagtagtgtagtgcagtgtccacgtgacctcaattcggcgttctgctgaagtgaagtgagtcacccgcccctaatgtttgaagtaccgacgagcacatggagacgagagaaacgaggaaatgtccaaggaggagggagaacttcacctgtcctgcttggtatggtatctatcttcaactggctctgtagagtactcaggcaaattgcacgg

SEQ ID NO: 176836 - DNA, 418 bp, Zea Mays
gccgacttaagccgattgctccgttcagcagggcatagtggtcaccccgagttaggtaagcgcgagcctgttgcaccggtttaagtcgttgccgacttaagccgattgctccgttcagcagggcatagtggtcaccccgagttaggtaagcgcgagcatgttgcaccggtttaagtcgttgccgacttaagtcgattgctccgttagcagggcatagtggtcaccccgagttaagtaagcgcgagcatgttgcaccggtttaagtcgttgccgacttaagccgattgctccgttcagcagggcatagtggtcaccccgagttaagtaagtgcgagcatgttgcaccggtttaagtcattgccgacttaagctgattgctccgttagcagggcatagtggtcaccccaagctaagtaag

SEQ ID NO: 176837 - DNA, 655 bp, Zea Mays
ggggtgcaggtgggtgtagtagctgcttgaatacatggcggagccgagggggtgctcaatttatagttaccatcgtcggtggtgtccaattttacgaggttgtgctggtggccggagggaaacagggatactggtgcatgggatgggtggctttcaccgtggcgcttccttcggcgatcaccggatcccataacacaactaattgcgacgtggtacagagtctggacacgcggcgcacgacagtgatcaaccaatggcagcgagctcttatccgatcgaccgatgatcaagggggtacgacgggcttagccgcaaccgagctcgagtcgatcctatgccaagatttttacttgcccgtgcctatctgctgaccacggtgcatgaatcgcgacgagcaatcaaccatcccagcgacggatcactggcgacgaggaggggggggggtgaaccgcgatctgtttcaatttggggtgcactgtaccatggaatgcttcgtcagtgcgcctgacagccaggttttagggtcaatttttctctaaattttctatagcaactcacctaaagctctgcagcaaagttgtagaccaatgattcagctacaatcttgccataacaactatagccaaattcccaatcgatcatgcttgatttccta

SEQ ID NO: 176838 - DNA, 587 bp, Zea Mays
ggtccttctgctccggttccagatgagatactggcggaggcccttcctaaagttgacgccaagggttgtgatcatgcaccagccgctgctttcatatttgatgaagaagaggaggaagaagaggaagaggtcccgctgatccgaaagaacagcaggcgttatagaggtagcgaggggggaagtgatattccttctccagctctgtcagctcttgtcagtctttagggactgtcaatattggattttgatcaagcgtttgaggatgtcgtccccgaggatatgctatcagagccaaccgttgatgatgtgatggctgcttgttcagaggttccagacgatggattgggggtatcccaagcagtgtctcacgcatcatcgactttggaaggcagtcttcgatgccaagatgctggtccgagtcacctgactcccatggaggttacagaggagctctcggccttagaggtggcccctgcagaagacccggcccccgaggatggtgctggcagttacctagcccccaagggtgttgccggtagtgatccagctctggtgggtagcgcaagctgcaacccaaccctcgaggg

SEQ ID NO: 176839 - DNA, 572 bp, Zea Mays
tttggatgtttggttacaggagcgtcatctaatgtcagaattggtgcgtcaacatttggaacgtgccaaattacgaatgaaaaggcaggcagataaacgacgttctgaaagggagtttgctgtgggagattgggttttcctgaaactgcagccgtatgtgcagtcttcggtggctccacgtgcgcatcagaagctagctttcaagttttttgggccgtttcgtgtggtgcagcgtgtgggagcagtggcctacaagttgttgttgccagatacgtccaaggtccatccggtatttcatgtttcgcaactgaagaaggcgttgggtgtcggtctgaaagcttcacctactcttcccactggtgattttgctttcaatgttcctgaaatgattttgcagcatcgtacagtagcgaggggtactactgcttgtgctcaaattttggtgaaatggactcacatgccggcagaattagctacttgggaggatgtggctgaattgcgtcaacagtttcctcgagctgctgtttggggacaaccagctttcaaagaagggggaaatgttgggctgcatc

SEQ ID NO: 176840 - DNA, 687 bp, Zea Mays
gttggcagcaaaacaaaaattaaagattgggggcagccgcgatgccatctccaaagctcaggaaattctcattgcaaagttaaataattctgcagccatacaataccaatgttcaagtacttccacctccaataatcatgtaaatttgactgaacagattgaaagccttttctcaaaacccctcaacaaggagcagatggaggcaattatggagctggcaaatcaaggcaaggggaagaaaggaagcaggtccaggggcagcaaggtgtcgccactcaaagcccccatcatcgaggttgttcccgaaatatgagctgagcgtcatgttcagctactagtggttctagtcttttattttatgtatcccaagttagttctcccttgttcgtgtcagggggcagagcaagatgtcctgaaggttcttttgcttcactgttggtcgtcgcatggtatttggtggtcctagaggtggttttcgaatcattggatcattgtacctctgtatcttactattttcagtttggaatttttgtgtgtctcatgtgacatgtgtatcttactgttggtgaacaagcttgccagtctgcatcaaatgttagctatgctatattctttatgtggcaatgtctgttcaagtagaggagggttcatcttttaatgaatacaaactgctgtattttatcttgg

SEQ ID NO: 176841 - DNA, 462 bp, Zea Mays
ggtgccaccaggtttgtttttatctgattcttttctaagaatgttaaagtcgccaccaatcaacattggatgagagcatttggagcaaaaagaggataactcattcaggaatttctgtttttgatcattttgagcagcctcgtaaacattaataaaatttcaaataaatcctgattctttttgaatcaccagagtacgaatcataaattcacccaattctttctctctaacataaaaaatgtcagcattaaacccaaccagcaatcctccagacctaccattagggggagaccagacccaagcaaaatttctgataccactaatgaagttcaaccaagagtcatcaaagtttttcttgttggtttcttgtaaaccaataaaatcaattctctctctactgataatatcccgaaggaactcacttttcacttctttacccagaccctgacaattccaaattaa

SEQ ID NO: 176842 - DNA, 458 bp, Zea Mays
cagaagtccagctcggcctgttagtatataacaaggtatgatttagtttgttcctatactagcagattgcttaagaataaatgaggagagtgtttccctcaattaagagatatgatctagtttatttccctgttagtatatttccttaagtaaggtttccttaagagaaagaggtgctagctatataaagcaccatagtttgtaataggggacatcgaagaagaatagatctcctagagagggtgatctccttcggtcacctcgactggagatcgacctcctctggttccaccttccccatagtccattgagtccatttcactcgggttcagctctgtgtggtgtcgattttctggtttcctcccccaatccacatcaaattggtatcagattccaccaggagcatcgcctgcccatggtcggctccgtttccaatcctgtagccatgaccgcctccg

SEQ ID NO: 176843 - DNA, 677 bp, Zea Mays
gtacaagctagttgagagagggaaaggatccaagtctttgcggatgtttgaggcaagtgccaatatcggatgtggagggcaaacaatgaagtattgacctctctcccttggaggcactggactcctttaatagccttaagaaggaaacccaggaatactagggttgtcgtattgtgcagaggaggcgagcctgagcccctatagcagtatggccaccgatatggctcttgtcctggctgctgtctttgctcataaggaggacgcgtacccgagcccatcttatggatgagtcgtttgagtcgtagttgttgaaatagtgataagtatgatgaaaagtgcatggtaattggtcctatatggcgtaaagcagacttgacattagccatgtggtttctgtagccaccctgttgtcagcaaattttgtggaagaattggtggcgttgggcatccttatgttgctgtggtttggtcgaggccatgctcaggcgaggtgtagatttctcctgaggccatgatcgggcctgcgcctgacgcagtcgtgcaacagagtggtcagaacagtagttagagtggtctcctgcgggattcgtggggagttggtggcttctgccagggaagttggccgaaactgagctcaggcgaggcggagttccctcccgaggttgaggctgtgccta

SEQ ID NO: 176844 - DNA, 878 bp, Zea Mays
agtggttttatgtgaagaacgacctagatcagagggaagatataaggggcatcattcaacgtcctatatgatcacgcttcggcatcagaagatcttcagccgcactgaggaatgacgtgcaagtgtgctagacaactttcaatactatatgcacctatatcgacacgagggatttgatccaggagcatattgcttacagagtatggccccttgcaagtggatgggaaatgccgaaggaggctgccgctagctccagccaaagtggcctgatttaactgaaatacacatttcggtttagagatcggtttgacgagccgaatgatgattggttgcgctctatagaggcaacaactgatgagctgcttggagcgtacttgagggttgaaaacgaagctatgacagtcgccttcagcgctcgagggaaaaagcgactgaatagggttttcgatgttatcgggtttatctaccctgattactgttgtcctattcggaaacaaaaggggaaaggaaaactactgcttcggcgtcttctagtgcgccgaaggcaaagaaagtgaaggtcttgacacgtagaccacgacgcattgagacgacagatgtgccatagcttattgaacatgcaggggttgctcctgtcatagaaccaagtcatgctgtgccagtcgaggctagcacaaatctggccaaagagccaaaattagagaagacaacagatcagttgcaggtgttgagcccactaggtacaataggattactgaagccatcaagcgttcctgcagcgactctaaggaaaaggagaatgcgctagtgtgctcgacgttgttctagagtctgtaaaggcaccagctcctgcctctaccgaagctctcagcgcacag

SEQ ID NO: 176845 - DNA, 413 bp, Zea Mays
gttgtttattaccgaatgttggatggatttatatgttgcttatagccatgctcatgtttgatacaatagatacatagccatgttcttctagaactctagacatacatttgagtgtttgtgtttatgaaattttcttagttctttgtttctatgcataaaggtagacacaatggagcacaaacgggtgacaacgaaaggttgtggtgcactgtagtcattgatcataaggagacaagcctaaggtcgaccataataaaatgaggaaaatcaacaaatccttctctcctaccgtcctacggataggaaaggagacatagagtcccacatgcttgtatgtgcatcgcgcatgaagtggttaataattttcataatcctttacaaaactactaaaagaaatgagttgaaactttatt

SEQ ID NO: 176846 - DNA, 274 bp, Zea Mays
atcgatacacatccttctggtgccatctttcttctccacgaacaggacaggggcggcccaaggcgaggtgcttggccggatgtaacctttctctgatagctcatcaatctgcttcttgagttcaaccaactctggtccagatactctgtaggctcttttagaaatgggggcggtgccaggaagaagctctatagcaaactcaactttccgctcaggtggcatgcctggtaaatcttccggaaacacatctggaaattctgacacaaccttgata

SEQ ID NO: 176847 - DNA, 439 bp, Zea Mays
tgaacttagagccacacactcatgccctgagactaagattgaaattagaagcctaagctttttagtggagttgataatcttggaatcgagtggaatcgatgtgatacttggaatagactacttaaccaagtatgatggggtaatatcttgtgctaagaggatggttacattaaccagtccacaaggagaaagaattgaagtcaatgtcagtatgccagcaccagcagaagcaatggtaaatcaattggaggagacatctttggaacacatcataatagtgtgtgaatacccagacgtatttctaaaagaattaccaggtacgccacctgatcgtgatatagagttttctattgaattattacccggaactgcaccaatttcaaaaagagcttaccgaatggatgtcaaagatttaattgaacttaagaaacaaatagaa

SEQ ID NO: 176848 - DNA, 546 bp, Zea Mays
agcattcagatcaaatatgcttcggtggcacacccaagagccaacgggcaggttgaaagagctaacgggattggaggcactcaggaaaaaagtcttcgataaaaatgaaaagttcgcaggaaaatggataagggagttgccctacattgtttggagcctaagaactcaacctagttgagctctgcatggaaatactcctttcttcatggtctacggttcagaggcagtactacctgctgatctcaagtttggggcgccaaggttgatctttgaaaacatagcagaagccgaggctactaggctggaggatgtcgatgtactcgaagaagaacagctgaacacggtaattcaatcaacacggtaccaacaaactctgaggcgctatcacgataagaccatgcgacatcgatccttcgcagtaggagatctcgtcctccgccgaattctaacgggggaaggacggcacaagttgtcacctctatggaaggaccattcatagtagtagaagtcactcggtcgggatcatatcgcctcactcagatggac

SEQ ID NO: 176849 - DNA, 627 bp, Zea Mays
attgcctgtgaggcaaaatgcatcccttttgtctgccaaaatattgatttgaattcttgggccgactgcttcggagcctggcctaatccacctgaagcctaggtgatttggtttagaagagtgtcctaaacttactagtcctaatggcaagctactggcatagctgatgcactacctttgtcactatcccctattgtaaaggatgataacctcctcaaaaccatcggttattttggtctgatgctctaaactacttccttttcggccacgggcccttgacctctacgcttatggatgtcgtgatgatcactagtctagatatttagtctgttgtcccctctgctgtcagtatgcctgaagttcctttcaaactttcatctaaaaacagatagcactagttgggggcttacagttcccagcatgccagaatgaaaggtccagtatctgaaaaagagcacatgacttttcttaacctatggcttgagcacttcatgttttgtggcccttcccttgctctgaccaagaattatatctctctggctcatcgcttagccggaggcaaccccgttagttttggaaagcttttcctaggagaagtttactgattcctccacctgaccacctcca

SEQ ID NO: 176850 - DNA, 547 bp, Zea Mays
gcaaatggcatgaattaaaatatgcagttaataagattctgaagatccatcatgagatcctatgaggattcatatctttgatttataaatatgcaacatataaatctcatatcgaataatatattcctgatgaatgatcactctcctgtgtagggagaatatctcctagttgagattatagtttccagatggaatctttccagaagaaacaaagtctgtgttgaacactaaagtttgataacccctataaagggataaagacccatacatacccgaaaaggaataagatgaggtaccaaaggacttgaagttcaccgaataagcacatgtgcattccatgagttttactcatggtaatttccactagatgtggaattgcggtatcctctaaagccacgatggcagaaacctataaggtttaggtgttactggcaaaatatccccattgcgccagaatgacagactataacgatgtatctgatcgatgaaaaatctctgatggattacgatctttgatggacttttgttacaccatcatagatgttgc

SEQ ID NO: 176851 - DNA, 557 bp, Zea Mays
tacttttgttgtgaaataaactatgtttgtaggttttcttgctatcgttatgttctcacatatatttttgttattagggcttaattctaagtaaagatttaagggctcaaaaggaagcagacgatgagagctgtcagatagctcttggaaatattcggtcagaggtcatcgcactaaggaatgaagctcttgagaaagataaaatattgttttccttagtggacaggctgaaagctagcgaagtcaagcttagtgctcaaaccgaagcccacaaagctgaagttgaaggtttgaagaagaagcttgcagaaatgaatgaatgtttcaaagttgcaaaggcgaagcaagaaataagtgaaatggaaagatcaagagtgcaaaagaatgttgaagagtttcgagattccaaggagagatgctacgaaacatccttggaatgcgcgaagaagctggaaaatagctttgcaaaggtgggagcatactcttcggaatagaaatttattcgtggtgatcccgaagggggttatccagtggatcggcgaagaggccgaagcttt

SEQ ID NO: 176852 - DNA, 571 bp, Zea Mays
gtgtgtgcttggtttgaatttagacgaagaaatagggatttgggcactcggctcgggaacgattgctcaaaacgggaattttggtgaaatttaagtctgggatctcggattggcgtgaaatttggcaaggatgttgctggaagtgttgtgaaggtgcctgaaaaatttgggttcaattggagcaagtttggctggtttgggcatttcatcgaacacgtgaagggcgaggaattagggttttagggaaatgaccttttgaggtatgaaaaccctcccgaaggagctagaaacctgcaagaatgtttgaggcacacataggaacacaaatggccacaagatttcactggatttcacagagatttgaattttgcacaaaggagggaaaatagagcttcactgcattctagtcagagaacaagagagaaagggagaggagaggggagagcagctgaccgagagagggggggagaatgagcgcaggcacagggtcgccggagagtcgccgccggtgaggggagatcgccgggaggaaagaaatcgccaagaacagagagcagttggcggctggctg

SEQ ID NO: 176853 - DNA, 441 bp, Zea Mays
tgctagcattcgatagaagttgggaatccagtttgccctatgcagagttctcgtataataacagctatcaggccaacatcaagatgtcaccgtttgaagcattgtatggacgaaaatgccagacccctctcatgtggtccaacgtagaggaaaaggcactggaaggacttgcctttgtcaaaggggctgaggagaaagtttccctgatccgcaggagattacttgaagctcagagtcggcagaagagttatgtggacaacaggcggagagaacttagatttgaggaaggagacttcgtctacctcaaggtctccccgatgtgtggtgtcagaaggttccaagtaaaaggaaagctagcaccgcgatccgtcggtccctatcccatcattggcagagtgggacccacagcataccgtcttgaactacaagaatccatgtctg

SEQ ID NO: 176854 - DNA, 516 bp, Zea Mays
cgcgcggagatgatccgccagtgcggcgcagcccacgccggccaatgggacacccgcctggatccgggcgcccgttggagtttgtggtgcaaccacagtgaagtcatggtcgaggttgcgaccctcaaagtttagtcggcgctcacgcgccctctccagagagactcgtgcgtcctcgcctgcacgcctgcggttgagttctgcccgcaggtcatcagacctctccagagagactggagcgtcctctcccgcacgcctgcggttgagctccacccgcaggtcctcagtcggtgcggccctcaccgagggtgagcgcactgacgtcgacgcctcgtgttgacgccgggatgaccgaggcctaggcctagctgagccagaatgcgccatgccaagcagacgatcgacatcgtcacgccactgcttcatggcccccggtgaggccgtggagctaggagggtggcgtagcaactccctggctgcagacaaggccccaggcgcaacccttgacgctctgga

SEQ ID NO: 176855 - DNA, 1059 bp, Zea Mays
ggatactcctaatccgccacccgtaccacctaccttggccaaggctatcgttgccttggtcaacgccaccgccgacaatacgcgctttctgcgtgagatggcgggcaaccaatttcaacagcagggaggaagagctcctcctcaaggaccacgagatactacttatctagaattctctgaaactcgacccctgctcttcgtcaaggcggaggaacccttagaagccgatgaatgggtgcgagcaatgcaatagaagtttgggctaatccgatgcatggagacgcaaaagcccctgtttgctgcacaacagttgcgagtacctaccagtacctggtgggcgaatttttcaacaatccagcctgttggacatcagattacttgagaggagttcaagctagcattccgggagcattatgttccgaaaggagtgctccagatgaaactagaagagtttatccggttgaagcaaggagatacggtgatacagtatctcaacaaattcaaccacctctctcagtacgatattgaccaggtggataccgacttgaagaataagaattgttttatgaggggattgaacgacaggctccagcaaaaaatggcaacatgtctggaccttaattatagcagggatgtcagtacagcactagcatttgaagctaaaaacacaggacacggaaaatcaaagtgatatgcgggtgagcgatcaaatcaaggacctgaaaagagaacaaggttggtaatccgacctttcaatcaaaatcgttcttcgcctcgcccaccttcatatccattcaagcagcttgtctttattcgtcccactactgcccccgctcctaccaatcagccgagtgcccctggtactcatttccctgctcttcccagtccttccagtggatgcttcaattgtggaaagtccagacatttcatcaaggactgaccatatccgaagcaaaataaatccaactttcagcagacttctgggaactcaagtcaaggaaaggggaatacgaccaattcttcaacgggcaagaatttcaagaagactggacgggtcta

SEQ ID NO: 176856 - DNA, 599 bp, Zea Mays
tagaaaagtcttagaattgttgatagagatattatttaaaataaaagttgtatgtagacagtctctgatcgtgagcgtccgtttctgtccagacggtcaagccgcgaacatttcccgcccaatcaaacccaaaccaccgctcacctccgctgacggccgccagcccgccacgatggagctctccgccgccttcgaggaacgcgtccggcagatggaggacgcccgcaaccaacgcctcgccctcctcaacgtctcctacgacgctcccctcctcatctcgaattccttcatctgcctcctccccgaaaccctccaaaccctgactccgtggcctcaccgcggcgcccctttcctccccttgccttgatgcgcaggcggagaaggagacccaggccgccaagtcccgtattctctcggccaagctcgccgccacgcgccgactcgagtgccgccgtctcctcctcgagcgccgcgccgccgacctcgccttccgcgccctcgccgcccgcgccgacatcgacgccgcccgcgcgcgccgcctccttgtcgcccgcgacctcaggtagccaaaaggcagcccatctcactttctctccctc

SEQ ID NO: 176857 - DNA, 626 bp, Zea Mays
gatgcctgcggagctacccttaaccgcgcagagaacaaccccaagggtatctcgtgagcagttatggtggcgttctcggaggcaacgtcgtcggacccagaaggcacgggacccctgtacgcacaacccggacccccgaagtaaagtagcccggagccattggatagggttcagaccccatcaagtgagctccagaccacccgtaacaaggacctgagagaggaagtgccgtgacctaggcatgggtccggtattgacgcgtgtccaggctctatccggagcgcctccgctccccactcggccaagggtctaatactgccacatggcttattgtccatgacgtaggccagcgggtggtgcatgacgtaagggctctgagccacatgatctccacatttattgcggagaggacacgccgcctgtccgcccttctgacaggcgatgtgcccccatggtatttattgcgtcctgtccattccactggcagacggcgccagggccaccctgcagacggcgcgcctgtctagtccattgccgaaacagtgcgcccgtgcagtgcagtgcactgtactcatcccttgtgcgagaagctacccctgcatgccgagactatacaagatctcggg

SEQ ID NO: 176858 - DNA, 314 bp, Zea Mays
atctaacctagatggccaataccaggaagggaggtgccgatgtacctacacgcattcaccgaaggagggcagtagctaaaccagaaccggagatgaattgcccaaatcctctgtctgctgggtcagaggcctttttcaccacccaaatccagttgttgcaacaaatgtccaacaccatggcccacatgcaagcttagctccaccataatcagcagcatccatcaccaccaccaccacctagggataagtatcgtgacttcatgagtcataagccacccactttctccagctcaccagaaccacttcaagatgat

SEQ ID NO: 176859 - DNA, 567 bp, Zea Mays
ccaatgatcggttagtgtttcacttgtctcgtcgataaatgttgtcataaataattgtgctaaaattagtcatgagaatgcagtgggcacgtggtgtggttggatgtgataagtagattggaagtgtgggtttgtcgaagcactgtgatgtcggacgtgtatatcgaagtgcattatagtggtaattgcgttaagttaaacggtaatgtctcgggtgcatgccacaatatggttgtatacgagacagggtaaaataaagtgtgctcgacataaatgtttggtcgttgtaggtagaaattgtctcggcttaagtagagaggtgatgacatgccgtaagtagtcatcacttcctctataaatataaatcgagtctatacgcgttaggcgttccttaaattgtgcttcacaaataagtgtatgattgtgtttatgacttgaatagatgtcttcgagtgaactaataggttcctaaggcaattatgtgtaaggtgtttatagtgacgctttatcccgaaaggtgttaagtctgcgcataaataagagataagtgtattttgtgtagtgtgg

SEQ ID NO: 176860 - DNA, 420 bp, Zea Mays
agctgttgcacaagtttcaacatctatttcaaacaccacaaggtctacctccgaagaggatggtcgatcattcaattcctttactgccaggagctccagcatttcggctcaggccctatcgttacaccccgcagcaaaaggatgaaattgagagtcaaatccaagaaatgctaaccagcggcatcatccaacagagttcaagtccgtttgcttcgcctgttctgcttgttaagaagaaagacgacgaatggagattgtgcatggactatcaatggttgaatgcatatactgtgaagaatcgctttcccatgcctatcttcgatgaaatcaccgatgaactaaatggtgcccaggtattttctaagctggaccatagatcggggtatcaccagattcggatcaaagagggtgacgagtata

SEQ ID NO: 176861 - DNA, 697 bp, Zea Mays
cgcgtaggttgaccgaagcgactacgacatataactcttcatagtagtcttccctcctatttgaccttattctgagcagcaaattcagcaagaatgggtatttttatagccggtacccggcaagtgtgtaatgaaaagtgtagtgtaaggcttactgaggataaaattgagctataacttttcgcactttttattttgttgatcaaagacacaacttgccttctaaagcaaactcctattgcttagagtctttacagggttggtctttagatccctctgtcgaggattctcgatagtggatttatgggggtaggtcgcgagaccgagaattgaaggtaaaacacaccggtttcgggctcccgtcgtgagataataccctacgcccccaatgtttttggcggctaatgatctgttatgtgtttggtttgcggatctacgctcttagggttccccgactctccttatatagttcaagaagagggggcgtggttacaaaggcgaatgcgagtacgtacatgatagatctaatccggtaacctagttatatgaaaatctaactctttccataattataaatgtgtcttacttatctattagaatcgtgttctatttgcctagaactctgcctttatggttggattttgtcctatctatttagaattttagacttgtctcttctgttctggtaatatctctg

SEQ ID NO: 176862 - DNA, 370 bp, Zea Mays
ccccttcttcttcacctccatggctcctcggatggggtcatcaacctccacgcctccccgtgcttctcaggtgtgttccacacttcccattctagacttctcatgcaatctgcatgaaatcaaatgtttgtgtgctcccttgtatgcttttcattgcgcagaaaataattttactctgccagccacagcctgccttatgctcctgattggcacttcctcatcttgctcccagcagaaagatgaataaaaaataaaatagcagccgctaactcatgtgtttaatctaagtttaatcttcctaggtgctaggcagtggtatagggcctacctagcgcgtacacagtgcaagataacaaggttggagcatcag

SEQ ID NO: 176863 - DNA, 466 bp, Zea Mays
cttatacgaaagaatgttgtctcttccctttcctataggagggtgaaataagttttactagcagcgtcgtaccggaggtgccagtagcctcagtgtgccagtcgctcctcaagatggcctcactggcagcaaaatattctatgacgagttgactcgcgtgcttgactgggattgtattttatctcttctgtcagctaagctctggtgaattcctccgacatcaacgttagcacgatggttcgcccaaccgagcatgtccccggtccacaaaactatatagttggggaacctcacatgtagattcatagtagttaacagtttgcttaaacaaactgacgtggttgtttgatctatgcaaaagatggcactggttgttggttttaatagtgaaatgtcatcctaaccatttaactagctatgtccaacacattatgtatttatttctctaaatattgccaactgctct

SEQ ID NO: 176864 - DNA, 557 bp, Zea Mays
gtgtactcttgccttgacacgaatactcagagagctcactctctccagcccatcccaaacctagccgccacgccaagcaccttccctcgcctccgatcctttcctttcccccaccggcgaggtcgccgcccgcccgccgcccaggtaagcatcgcatccgtcccaccctcctgactgctaaatattacttgtgttctcttttccgcgccctcccgccgtcgtcggattcggcgttgtgttcgcgatgaggtgcttacggtttctgcgcaggggtttcctcgccatgcttccgtccaagaggtctgcaagcgccgacggcggcgagcccaagcgggctaagctgggggaatcgccatccgccgcccgcgtgggtaccagcaacggcacccggaatggggcggcgccggagattgacgaggacctgcacagcaggcagctcgccgtgtacggcagggagacaatgcgccgcctctttgccgccgatgttctcgtctctggcctcgatggcctcggtgctgagattggttcgtctcgtctgcaccccctttcccttgccg

SEQ ID NO: 176865 - DNA, 1650 bp, Zea Mays
gtgacacacctctatctatttatcatcagacattgtcgccttcatgaattgagtgctactaaccgagcggtggaggccatgcgtaggaaaaagaaaaatggtgggcgacgacatgctcctccctccgcagtccttcgtcccccagcggcccgttcggttgaaggcgtggcttctgggccgtcccctccgcgtcttgagcgcgtggttgtgtgcggtccacagctacatgagatcggcgaggcgtgctctggacggcttctttcaggtacgcggttagggtttccagtagacttcttaggctcgcattcttttccccatcttgcttcgcgtctttctcgcctctggtggcttccgagttcgtcgcgcgaaagtttctgtggggggtggatctcctctccgtttcgcccgccttcgcttggtgaggagtggcctcttccgggccgctctggtgtgtcggctccgatggattcgaaaaatcgaaaccctaactgggatcgatggggtccgaaggaggcgccgcagggttctcagtcgtggggaaagaatcggaacctcagctggcgattgaagactggatccggaaaatctgatgtcaaagaagatattcctgtctccactcccggtgatgccggtctgccaggtatcctcaaaacccccccgccccccattctaaaatctgagaatgatttggtgcgtagggttttttgccagaaatgtggtttagatggtcatcatgctagggagtgctttaagtctttgtggtgcgaaatctgtcgcaaagaaacccacaacactgctcggtgtgttcttcccaaacagaataagcccagtatgccgattgttggtatggtggcagatgggctagggttttactcctctcatttcgccaaacccttatccaacaaacctaaacgcagttttattggcttggttaaaatcgttgagggtttgatcaccgccgaggatctggagaaggatttcggttttcactttccttggggccgcacttggaaagctactaagtgccattctggttttctcatgcaattcccctctcaagagagattggatgaaatgattaatttccccgaattgaaaatgaaattgtctggagccaaaatctctgtctcttcttggagttctcaggctaagcctaaatctaaactgcattctgtgtggattgtggctgagaatgtgccagaagagttgcaaaattatcaggccatttgtgaattgggatccactattggggcagtggaagaagtggatattaactctttaaactctaaagaaattgtgaggtttaaagttcatgtgaagagtgttgctatgatccctcctatcattgaagttggtgtcaaaccttttttgtatgacattttcttcaaaattgacaacattactgatgaaggttggaatgatgactctgttaatctgggcaagagggcttcggttgatagacaagggtttggtgagatctctcttggcaaatatgctaaaaaggccaagagtggtgatgaggactctggcaaggatatcaagggaaaatctcccttaaaaatatcctcaagtcaggccaatgttgctggttccctgtctgaacaatccgaaagcatgaaaatggggaagggttctgaagaccctaaaggt

SEQ ID NO: 176866 - DNA, 851 bp, Zea Mays
tctccactatttttcttaaccctggtctaacaacatttctatttttccctttaatattaagttttgggcagttttcttatttaaatcaaaactctagaaaatattacaggaactatggggtttatcatttttgcctgatagtttatatttcacaaagtctagcaaaattggtttgactaattttggatgatttttctccaagttattatgttctctgcaatatttaaaagaaaagtaaattcgaaatggaaaagaaatacagatttgcgctgaagttcctgggttttcttccccttttctctcacaaaacagccctcggtctattatttgcatgagtcactgaccttgcacaaaaccctggacttaacctaaatctaacccgtgatccctggctagctgaaacagtaaccgtggcaaagatcacggcggcgaggcttaccggcggcagtagagctccggtgggttggttagtgacgtcggggaggtcacggcagtcacgtcggtgtgcgggtcggcgttggaggtggtcggagctgccctggccacaagtgcaggcagcggaggtcgtcggcggctcttgcttcggccaaaccacggtggtggggttcaattaaagtgcacgaggagctccacggggtgatgtagaggccatgtgtgcaaggaattgagaaatggtgcagagggttacccggtccacgtgctccggcggattcacaaactccggcgagcgcgattacactattccggtggggctggtcctcagctcaagctcgggaaagcttcacggcctcctagggaagctatccgagggctcggatcgagcggaggtgggcgggaaagggtttggccac

SEQ ID NO: 176867 - DNA, 699 bp, Zea Mays
ctttgaccatgttccttatgctttaaatttactttatctcttattatcatgctcaagttgtagaatgtcttcctcggacctcataagtccttgtgcattgatgcatatgttgagggggaggatttgctacaacttgaccctttgagactaatgtttttgtttgagtgagttcatgtagtctcaaggaggattgaaagggaaaagatgaatttgtacaagggaaggcgtttccactgcttaatgggtatcattgtatttgtttcaaattcacttggttcttcattgcctttgattttaatttgatttttggcgaggcaatagggttatttttttctcgaacgcaggagagctgcttatgattatattaagaagaagaaaagaaggggaagaaccccattacagcaacataccccactcacaccatacaacacctatacgccagttagctaggggggcagagatttggaggaaggataggtcttagccctggctaaagaccacaccaaaacctcatctaaaatagctacaagcacaacaacaaaattaggagatttgccttaaaaacacattgatttctatgcttccaaattaaccactccaagaataataagggcattggacccttttctaatctgtccatgcactttgaggttgttgttcctccaccaatcatcaaaattctactccttaaactacgac

SEQ ID NO: 176868 - DNA, 455 bp, Zea Mays
agaagagccaagatttgcaggagttcttggagattcaaagaaggcgcttagtccgggttctagccattcaaaattttcttttatggtgaggatgttgtatatgaagtctcgttattgaatcagcaatacaacattttcagcaatgatgaagctgatgtcagatggataccctaacagtgagttgccaaaatcatatgatgaggccatgaaatatcttaaagaattgggccttggatatgaaaacatccatgtgtgcaagaacaattgtgtgttgtttcagaatgttaatgctaaaatgaatgagtgcccagtatgcaaggagtctagatggaaagatgaaactggttcgaagcaggttccacataaggttttgaggcattttccactcttgccaaggttgaaaagaatttttgcttcaaaacaaacttctgaggaaacacaatggcacaagaaag

SEQ ID NO: 176869 - DNA, 566 bp, Zea Mays
gaaagggttgagcaaagatagattatagagagcagagaaaacccatctatctaaggttttacctagctaactgatgccattatggacaaaagtcacacaatacaccaacaatcatttcaaagaagcaaatcaatcatgaacacaagggacaatgaattcaaacataccagcacaacacaatccaattccactcattcaaccaaaacaaaaggtgagacaaggtttggaataagaaagatattataaagtcaaggagtcaggtaagaaatagcgaggagttagacaagacatatttgttggtggccaatagtgaaataagataaccatgaactattaaagtgaggataaatgatacaaccaaggatatgaagtgagttaggaagaaagcattatcaaggagaaaagtagagaggcaaaggtttaatatatcaaggtagatattgcgcaagggtggcaatacaatggcaagaaagcaaaagtataataagtcatgggttatatagcaatattatggattagagaaccactataatataatatcgcccttaccgatctagtcgaaaatc

SEQ ID NO: 176870 - DNA, 317 bp, Zea Mays
gtcgccggggagcttgccacagtaattgccaccaatcgcgcgcgctagtaactttcttcttctctggtcgtcgcgcgtctctctcaaattcatcggccactactgtgggagcctataaattgccgaccccacctgctccgctaagtagttgtgcaaccagtgaagcaacccgtgcctcgaatcatccactagaactccccaatttgggatttcccccaaatcactcaagaacaccgagcggtgttggctcaccgtggtcagcgtactccaggtccgttcgtgctccctgcccttttgtttcagcacccatacctgcc

SEQ ID NO: 176871 - DNA, 560 bp, Zea Mays
ttccttctctgttatgtgcgcaacttgcccctaccggctggaatcaccatcagggctaattgcgtacacaaccagcagattgacataacagatcgacgtcatgagtgtaatcttcttcgggtcgaaagtcttggatttgggttgatttgatcaaccgcatgagattttcagtggaatttccatacatacgatgcatggaatttccatacatacgatgcatgggaccgccgtggctatctgctgtagtggcgaacatatagaaacgtgtttgtctaacctgtttttgcaggacatcttgtgattggtatggctattgtgtgtatatgatgcatattaatgaattattcatgacctgcgtgtcgtgaccagggcaatacgactggagccacatgtattgtccaaatttaatgtaatgacctgcgtgtcaacatgtgatgatccaaagcgtatatgtaatttgtttaccagcatacgttagataggtcttgaaggactcatcacctaaaggatggcatacctatatcatggagatggagatcatcgtgatggacagattattg

SEQ ID NO: 176872 - DNA, 733 bp, Zea Mays
ttgcatttgtagccatggaggtattcattttctggatccgcccctacttccatctatgtgttgacgacattggtggctccggtgtttgcaacatctgtagtagaagaaagaatacaacattagaagagtcgccgccctctgactctagatcatcaagagaaaagaacggaggtgcaggacgctgcgagaaacaggcaactaaaacgtcggtggaaaaagcacagcagcaaaaagaggactctgacaagaacaagcgtgaatacttgatgctgctaggtgtccttgcagcgagcgtcacctaccagactggcctcaagccaccaggtggcctgtggcaggacaacagcggtggtcactcagctggcagctccatcctccaccacatcgacaaacgccggtaccatgctttcttctactgcaactccacttccttcatggcctccgtcgtcgtcgtcatcttgctcctgccatggactctccacggatacccattgccactatggacaatgcagacggctatttggtttgacatgctcggcctcctgggggcctatgcagccggcagtaccagggactgggagacatctaggaatgtcatctacttggtcatccctgtcctggcctatattgcagtctatgcaggagtgtcaatcttccgcaaggtaagatgcggccaccggcccacagcccacaacagcaagtctcaagggcataaatcatctggcaatgacga

SEQ ID NO: 176873 - DNA, 346 bp, Zea Mays
ttaaaactaaactagtgccttaaaccaactcagccacatgcatgagatctgatccaaccaatagagtcatgaagaattgcatagtctgtctatccccacctaacatcaaacaaaccttcgacctacatcatgtagtccatctcacccaaaactattctaaccatatttccccaaatatacactaacctcgaatcaatgagctcaagaccggagaagaaaagatcaacctcgtcaaggaaggagaaaagccaaactcaaccttcagatgcattatcacccagcacggagttcttcctcaccataatcattcttaccctagctattcttgccctaacctaacctaccc

SEQ ID NO: 176874 - DNA, 687 bp, Zea Mays
aggccgctactaccaatccgcgctctgccaccgctcgggccccgtcctgaggtccttggaagctcacgcaagcgtgtacattccgctcctcgattagcctagtttggtgttggcagttgtgagcgcaattgctcgccgtggttgaaggagtcatcgggtgccgctagttgtgtggaggcaaggcaacatcgcctcaattcgaggtaaaatcacttctctattcttcgccctaccctcctctgcgtagggaacctttcgagatggagtttagggcattgatcacagaaatcgctcgcgacgggagctgcgccgctgtgattgttaggccgccgtcgagtttgtgcactagggatagaagacgacttctgggccgcaggatcataatcggctgatcgacggacgaaacgggtctcgggtgtgttgggtcgtcgatatgatgatgcacgactaggattggggttacgaaccgacggggtctgtttgggtcggcaccgtcggatggtaattggaggcgttagattatatctcggttattttaaatcctgaacgttggtgggagatctaagggctagcaatgcacatcgagttataaccttcactggtgtaatccgagccctcagctggtgatcggacggtcgtgaattgtgcgtaccccttcggccaggccattttgcataacagtcccag

SEQ ID NO: 176875 - DNA, 525 bp, Zea Mays
gcctagcttggcccatatctgcgcgcccgcactctccctctgacaggcgaacccttcctgtcggtgccagcccgtgcttgcgcgtccccgctccctctctctgatgaggacatcctccactattacctgttggcaaagatgcaattggcccagttggcccaattgtagtcggacggtgaccgtgtgagcctcagaattatcccacctcgcttaacttgggaggaggaagccactttaaaagggagagccacccttcccccattgggctagtcttttggggcgattgggcctttccctgagttgggtgtgcttaatgaactgttgggctccgggcaaccctaatttgttgggcctcagccaaccccacctaggctgggtgcatcatctggtatcaaaggtagggcccattttaagaaggtgggaatgatgaggacatcctccactattacccgttggcaaagacgcaattggcccagttggcctaattgtagtcggacggtgaccgtgtgagcctcagaattatcc

SEQ ID NO: 176876 - DNA, 464 bp, Zea Mays
gctgtaaggcgagacgtggtgattgattaccaccttatgcttaagcgactaaggcgtgaggcgaggtgacgccttaacagcataaggaaaactaaaaagcagcttagagtatcatgaagaaaaccgaaaaggaaaaaggaaaagaatggagaaggagcaagtagtctggcccagcttatatgctcctcaccttcatgcttcatctctcgaactcctgatcctctccccagccctgcagcacctctctctcgttctccattaccgctccgtctctgctcctcactttctcttgcttccctacctctagatgcgctgctctgcttgcttgagacagaggaacagaacagttttggacgctgcagcccaatggaggaacagaggaggcaggatgttgcaggccaacactgattgggggaagatgaccgcaggcctcggcggtgggcgggcgacaactttactcgtcg

SEQ ID NO: 176877 - DNA, 504 bp, Zea Mays
gccatgtccgactagcttgtgccaagtttgggcctgtaaaaaaagtgtcctcctctgttatatcattatatgggttggcggcccactgtctccactctccagtccacagtagaaacaagctctactgtctgccactgtgccgccgcacagtagaaagttagaaaccctaaaacagtaaaaccctaagccgccgcctctgccccctctcacactctgctccattgctggcctgcggccctgccctctactccggtggtcctcagctccggtggccctgccctctgccctctgttgcactcgcctctgctcagctccggtggccctgccctctgttgcgctcgcctctgctcagctccggtggccctgccgtctgccctctgttgcgctcgcctctgctcagattcggcgctcgcctctgctcactgctcaactccagcgctcgcctctgctccgctccggcaaccgtctgcaccaatctgttctaaacttaaccgaaatgagcac

SEQ ID NO: 176878 - DNA, 565 bp, Zea Mays
aatatgtgtcttgtatattgtgcttattcaagaaatgtggttattgtttgtgtgcttgcagatgtgtgaacctgatgcacacacatctgatgatgagagggaaggacaattgcttgttgccctatatgatgtagacatttgggggagctcgtccagtggggtttctagaagaacaatggttgaaacaggtattcaatgggttgagcgaactttggagaatagtaacgactgctttgacatgtttcgcatgcggcgtactgtttttagacgtttgcatgatacgttggtggaaagttatggtctgcttccaagccgtggtgtcagtacaacggaagctctaggtattttcttgtgggcatgtgggggtccacaatcatttaggcagataaggaataagtttggtcactccttggaaactattagtcgcaagtatagtgaagtccttaatgcactatataagatgtcttcagacgtaatcaagccaaaggacccaaatttcatagagattcaccctcgattgcgagagactagattttggccccatttcaaggattgcataggagca

SEQ ID NO: 176879 - DNA, 643 bp, Zea Mays
ctgacagattacagaaaggcccttcggttttcatttcttcacaggggaaagtccacgacggcggtgggcgcagggaggctccggtgagcacctgcaccggccgatttacctaaggactgatgctctacttcggtcgaaaccgaattcacgccccaaccattgattcccctaagttaattgcacaaatggtgaactaatgtggtctggccacggtgagcgcgcggatgaaccaaagatccatgcgttcccgacggttagtggacccctagtccaattggatgggtcagcaagcatcgtagacatgtgagaatgcttaaacgagggagagggagggttggactgaccggagtacggctggccgcggtgaggttgggcttcgggtggcggagaacagatttggggcgaacgtgaaattggagagctgtggggagtaatcggagctacgcgtgggttctctggacgtacaattacctagcggcactggccgaggctccaatttataggcagctttgacagtggccgggaattttaacggtgatgtatggcggtcggagataaggaagaggtctagtgtcgtggttacgtgtccccagccgtggcgagctcatcgacgatgatgggacgacagtagggaatcacggcg

SEQ ID NO: 176880 - DNA, 413 bp, Zea Mays
tacataggttagacatactaccaatttaatttccattgttcaatattgtttactcctgccaggagactatgtatccctccaaaaaaagttgtcaccgttaagagggacgaagctagagaaacttagaagggggatgaggggtgctcttgccttgtgggtgcatatacattaacaagggtaacgagatctattaaatatgttattttttcttttaggatgtgccgttgcatctaagacaagttaagaggtgatgtaattaactacatgtgttttgaagatgggcagtgcaaacaagattaatgagaggtgcttggaactacagaagaacaagaagagcaccaaaactaaggtttattgatcttgattatttatttgtactattacctttttgatgtgttttcctaatagttgtt

SEQ ID NO: 176881 - DNA, 458 bp, Zea Mays
cttcctctttttctcttgccctcgcagtgggtagcggtaatcagggtatacgaagccaatagcatcaaataccctgtttaatcttttcttaccccgacctccaaaaggctgcggacagagcattatctttagccttggagtatgctccaagtagctcatcactagtagcttcgatgcacttcagccagtcgtcgtttggctcatcaaacttctccctgaatctaaaggtgtacttcagccggaccagaccaccctcactagaatcggctatggtctccttcggcatatcctagctttccacaagtggccataccctgaaggatatatgctcttgaatcaaatcccttgtgccaatgaaggaacaaacagtgttaaaagccctttgacatgcttcaacagcgtcatcaatttccaccttcggccttcaaaggccgaagcgagaccaaatgggttgctgt

SEQ ID NO: 176882 - DNA, 497 bp, Zea Mays
tatcggtgtttaaggagatcgtggcagatctgacgtctatggtggtaaagtttgatgatgaagacctagctcttcttctcctgtgttccctccctgcatcgtttagcaatttttgagataccatcctatacatttatgatactctaaccgtggctgaagtgtatgaagctttgactgcgaaagaaaagatgagacagatggttaacttggaagatgctgctggctcgagtggagaagctttgtatgtctgtggccgcactgagcagaaaaagtccaacttaggtggcaaaggaaagggaaagaaccagaggggtcgctccaagtcaaggggcccatccgatgaattattttgcaaatactgcaagaagacgaaccatgtaattgagaactgttacaaactgcagaacaaggagaagaggaacaaggagaagggtaagaccggaggtactgtctctgttgcatccgaaaataattctgataatggtgatgttcttatt

SEQ ID NO: 176883 - DNA, 774 bp, Zea Mays
ctggatttcctagggctctggactgggcacgatatttctcaaaagatcaggggcctaaatcacaatttcccagtactcatattcatcccgcgtggatggcgggttgaatcgggaaaaagacatgcgctctttagctaaaactcacggcgaaggggtatcagtggatatcgcccgccagatcagaaccaacggccaagatcatatcgccatgactccgaacgggtacgcgataacaatcgtccgatcagatcaaatggtcagaagcgccccacgccttgatctaatcggcgatcgcatatcacgccatcgacagtccagatctgacccggccgaaacgttacgccagctataatcactatcgtccaattcgagatcaacgatcgcgccaacttcttctccaccagactccgagcacttttttgtttccccggtggaacagccgtagccgagccatagtcgcggcagcgagcttggcagagctcgctaaccaagcccgagaccacgacccaaacgctactccctgaaacctacatgacgacgaacagtagaagaactcaccccagttgacgaagcaaaaccgaccagatcccgaccaagtcgcgatggcggcacctcccgatgaataatcccgtgctcgcaggttgctccctcgtcggattggggtccatgatgccggagccgatgcctgcgatgctgacgacccctctccgacggcagaccggccgcgcggatggaaatccccggcggcggtcaccatgtcccagcccagccgtg

SEQ ID NO: 176884 - DNA, 360 bp, Zea Mays
gattaaccctggaaatagtgaatcccttgccagatctcggagtctgctgcttgttctaaacgggtgtagtagcaatcctctgtggacaaacattagcataatgcccagtcttaccacacttgtagcatgtggtaccaacactctgtcctgagaatttcgtcggggtgctagtgggggcagcttgacgagtcggtggagtcccctgtggtgtgtactgagctggacgctggcctcctctagtgcgaactggtgtaccctagggtggaacatagcgagggtgaacactgctgcttccctgaccctgggatatcgccttcctcttcaaatctcccagctgaacacgcttgtgttcaatagcta

SEQ ID NO: 176885 - DNA, 279 bp, Zea Mays
cagcaattctaagttctgttttcaagtcgtccaacaaatcgcgattagtcggccaggtcggttattatggggcgattagaagtattgacctgattaggtgtgctaatcttctagtcgtccgttttggactacaaaccgaccatgcgtgttaggtatttttgggcctcctatttttggcacggccacggctacagttccatatgaacagccaccgtcaacacctccgatttcgcataacccttcagttgcagccaggaggcctctaccacgccattggcc

SEQ ID NO: 176886 - DNA, 892 bp, Zea Mays
ttatgaccttgatgcccttgatgcgcctgtctcggaggaggaagtctaggatacagttaaggcccttccttcggacaaatccccgggtcccgatgggttcactggtagattttacaaaagctgttggtcggtaatcatggctgatttcatggcggtcgttcactgcatttgggctagaattttcagaaacttgggtccgctaaattcagatttcattactcttctgcccaaggtggaggggggccactagtgtgagagacttccgcccaataagtctggttcacagtttcgcgaagttggtaactaaattgttggctaacaggttagaaggccggctgcaaaatatggtttcccccaatcaaaccgcttttattaagaaacggtttattcttgacaactttatgctagtcaagcagacgaccagattcttacattgtcagaagcaggctcgtatccttctcaagcttgacatttcaaaggcttttgactcggtatcgtgggccttccttctcgaggtcttgaaaaaacttggttttggacaaatctggtgtgatataataagcgggctgttagctacctcttctaccaagattttactaaatggtctgccaggggaatgtattgggcatcaacgcgggctgaggcagggtgatcctctatcgcctatgttgtttattcttgtaatggatgtcttgaatctgctcgtgcagcgagcttctgaggaagggtttattcaacctctctcttcaaggaatacgcagcaccgtatctcgctgtacgcggatgacgcagtgttatttctaagtcctactgccccggacatcagtatggttatggatattcttcatttatttggttcaacttcaggtctaagaactaatatccagaagag

SEQ ID NO: 176887 - DNA, 1034 bp, Zea Mays
tgtggttgtattgatgacagcgttgttctcgtcacgtagtcatgggtgacgccacgttgggctagcctaatgcacatgcacatgggtagatgtaaattttattagtaaattgattaatatttactttatatgatataaaatattgacatattgctttagtggtgtaccaccttaatttggctgctagcttcgcaacaacacgcagtagataaaatatctcagtgtagttattagcatgttttacatgaaccttgtcggggagcggatcctcggatccacatggcactagtaacagagaatatagggaggaattcaaccagatgaattcgtccataggtgactaccatgcaccgtgttcggggtcaggtgaggcgaaacctggcaaacggtcagacgagccgctagggagcagttcgaatggattccatgtctgtcgaaggactgctctcgtcatcaataccacatacaccgcattaattgtgcctagcactgagccaaggcatggagagagtcgatcctccttccactcattacctactagtcctaggactgaaccccactcttgacctacggtccctaggtctaagctcactcagcctacggaccctaggcttgagtcctccaacaccctacagagcacgcaaaacgatgaagggaagacaagaggttaggctatgaaggttgagggtcggcgcaagcagaggtagatagacggagtaacgagtacattcggactcccgtcgtcagcacacttcaccagcagtcttgaagaggcacgacaggagaattatatgggacagataatggcacacggaggaggcatttaccgagggagaactatttcgttataccaacgcaacaatcccttctgggagaagccatttgtaatcggtcctttttagtctataaaaggggagagtcggcccgacggaagatacggaaccgagaaccaacactcgatacatagatcctctagtagagcaagtcttagagacttaggatcattccccgcccgcttgtaacccctaacgagc

SEQ ID NO: 176888 - DNA, 1591 bp, Zea Mays
ctagcaccgcccagttctcagatcgaaacgacacaggtccactttgaatcttggcgggctagtttatgccactattaaattggtcgtgcctcggaccggcccgccagacacgactcgtttcgtcatctatagtccagtacatccatcctcatagtttctgatctcgtgagcctggaaaaaaagcaagagaaaaaactttatcacgtctcacccccacaccatatacctcgccacacgtctctgcctctctcctcaccatatcgtcgtccgtcgtctcaagggcaaaatcgtaggtgtaccatgaggtgtagcccactccgtgtgatccaaaccgtggagcacgcatttagatccgcgtgaggcgaactactgcatcctgccgcacgcgatagggatcaagacaataattcagaaaatccttgtcggctaggtaccgaagggaataagtatgtcaccgaagggaattaataattctcgtcagtattaggctaattctttccgatacatggctaatgaggagtggtattagtgattaattaattcccgtcaaccaccaaagagaattaattaatactcgtcggtcatgtgtagtcgacatttaacactagactgcgcaaactcctgtcggtcccgcccttggatgacctggattataagtacgtagatattgcttgtggccaacggcaattaagacattatccccgtcggcttagatagctgacgggaattaccccacgatcaataactctcgttggctatggtcaagccgacgggagttatcctatgttgttgcaaaccagtagcctattttactaatttctcatctaaccacacaaacaacaagcttatattgtatatcaattcccatacatcacaaacaccattcacaattcacatacatcacatcatcaaatacttcacattacaaattcttcaaacaaacacatagaagcacatattcatttcaaatcacaacaacgagacaagttaaatattttgttcaccaaagcacataaaatttagtttaacacacaccattcatcatccataaccaaagacaaaccacaagtccaaatataaaaaaatagcatacaatggtttagggacaaccacttggatggttcgagctttggtcactgccaccaccaggaggagggtacacaaagagggactcaacaaaagtcgatccagctggttcagttacactcccacccattcctagtgtagcctatgtaagaatgcaaatatcaacaagttaagtatacaaatgtatcaaatcataagaatatttcgagagttacaaaacgtatctggtcttcagttgcaggtatatatgtgggggtgatgattgttgcatccccgatccctatttaatcgacatttgattaagtttagatacaattcatgtgttgctataataactagatgaaattatacattagacaatgttataatagaatttgctaaagattaccatattttaccaatttctcatacaattcacacaaacaacaagaatataatgtatatccatccacatgcatcacaaacaccattcacaactcacttacatcacatcatcaaatacttc

SEQ ID NO: 176889 - DNA, 449 bp, Zea Mays
cgaggattaaagcggacgcggccctcaacatttgtaccccaaagttcgagtccaccccgaggaacacgacgaccgttggggagggctgttgatccaatctcagcaagagcggagaagtcagccggagtttgaagatgacggagtggatgctaagcagtggccccgacgtgcagtgagggaaaaacggggagaagagaaacaacggacaacactgcaggggaggttgacccccagggtccataggtcagggacacaaaaggagacgagggtgagtgcatccagacgtgcgggcccacatggcggtgactgaaagggaactaacgcgcacagggagaccgacctgcgagccccaccggtcggcgcgtgggtgtcgcgcacagtcccgaagtgggccaatggatggggttttggcccacgatctgtgctgctcttcttttctctgttttctt

SEQ ID NO: 176890 - DNA, 385 bp, Zea Mays
gaaaaataatgtgaaaacagttacaaattatagcagatttgcttaacaaagactctaaaagctatacatttctagtgcacgggtcctacaaaaaatagactatgatatttactttcatttcagaaatttgatggcagacaaatggaggtaataatttgatggccaaagccaaggacaactttatctagcagacaaatggaggtaataatttgatggcagatcgattcactactggatgcaattgcattttcacaaattgtagcctccctaagctcttggcacgaacgaatcatacaaagtcaaaaaatctgaactcccctgggatgggacaggcgatctcactcatcgatctcactccccttcgttccatcgacccacagccagc

SEQ ID NO: 176891 - DNA, 302 bp, Zea Mays
gtccgcgtccttcacttcccgatgacgacacaattcacttatattttcacgaagggcctcccctccatagtgttttcggagttccgatccactcaacatctcttgtggctggagacatacaaactgtgggtgtgttagaattagctgtacaaccctattgagtcttataactgtagttgggctgtgctcacctagtactgaatatatatagatatgagttgtaccgcattgcctattaacacagggtgttagtcctatgtaccgtatataatcagcccatagggctcaatgtaatacaattg

SEQ ID NO: 176892 - DNA, 1530 bp, Zea Mays
cgaagacccaaagaacttggaccaccttttataatgcagggaaaaagcgcctgcacgaatagtgttccatctcactgtcaactgttcagcaaactgcagggagggaagcatgagcaggaaatgtccatgagccaatttccttagaattagcgaatcagaactgacttcaagcttttgagcaaccgcatctgcgatatcagcatctgacacaggcacatcactgaccacaaagatagacactgcatacttcaagtcctcctctgctttttccatcaaactgttccaaccaatcacacaaggttgttgatgatgcgttgtcccagtttcagacagaggggcctcgtcatttccaggttgatcagattgcccccaacccggatcagaaccaccctagaagatgacttgcgtttccgatggcgcctgcgtcgcgagcgaggcgggagggtgcccagcgaagccggcctagccgcagctccaacctccctgggtggagaatcagaaacatgtgcatccactccccctgctatcatcttgtgatgtgctggacccttctcaatgcctagaggggagattctacgccagatataggccttcttcttgcatggaaggggcacagaaggctgaagtctcttccagaccgggacctgaggcaactgatgctgcgaaacacgatcaacgatcgttggctcaactgtcgaaagtctgttccaaaccgttcctctcaacaaccgtcgatgtacatgaaccttcctgtcacctttcacaggcatggggcaggagtaggagcgatgaccaactgtcttgcaacgaaaacaccttggctctaggtggcagaaagcaacgaggtgatcatccgtgaagcaattgaaacaacgacctttcaagtcttttggcaccaggcgacgtgcccgcagtgcactaaggcgatgcttcttcgccttcctagattcaactctggtccacccaccaactgttgtcttcggcgcactctccaacccacgaaaccggctatgttgatgctcgtgatgagggttaaacgtcctggtctcaagtggggagggctccctcggagacgaaatagtctgtgctggaacaagcggaacccgcgggtgaagcagaatatcacggaacagaggccggccagcccaagaacgtggttgtagaccgtcgtcaggggaacccgccgcactctcaactccatctctagaacttggaccgtccctgggtggcagaggatgacgatttcggggaaggggaggaaggggcagatggtgaggcgacctagcggagggaagtagcggtggcaccggatatggtgtggacggtggtcggagtgggatggcaggcagccgaccgtccctgggtggcggaggttgacaattccggggaaggggagaaaggggcagatggtgaggcgacctggcgaagggaagcagcggtggcgccgtttatggagtgtatggcggccggagttgggtggtaggcaaccggaccgttgggaggcgcggtgctgtgggcagtggaggggtc

SEQ ID NO: 176893 - DNA, 493 bp, Zea Mays
ggggaatcatccgactctgcccgcactgattcgatggctgttgcaattgggtagaaccttggtgaagacgaagaaattcagaaacctaaaggtgctcgttgcaagcgatcacgctgtgcaaactatccagctgcgcctgacgaggagaaaaagaggaagaaacgactctggcggttatcatgcttggagcaagatgctggcccctcaacattactcctcggtgatggcccggtgagcaccaccctcgagaacgatgtcagaggttgtgacgatgctcgagttggcggttgtgtgcttgatgaggatgaggaggaggaagaagaagaaattcccttgattcacaagaacagccgtcgcagcaagagtagtgacatcccaatgcaggccttatcaggacttgtcagccttcaggggttgtcgatatctgattttgaccatgcattagaagagatcatccctgagaaccttttatcggagccccctgaggttgaca

SEQ ID NO: 176894 - DNA, 568 bp, Zea Mays
atgaaaataagattcatttagaaaaatgaggttctcaaactagtactaaaaatgttttctatgttctctggatactgatgcagcttagcttatgcagaagctggacggctcctaaattaagcttgtctcttgactcttgagccctagctagtttcttgggtgctgtcgaatttgagcatccgtcgcggagggtgcgtgatagcgaaggagtctacctatgttctgaaacttcagccagattcaaccattccaagaattgtttacgaacggacgacggcttggttgttgctgttcttcgaagtaacaattatttttaactgtagggtccaaaattccggggaaaaaattctatgcaggagtcatgtacagtgaagcgtttacaggattagcaagataggacgttctgatgccgaaattattccgtctaatcagcttcctgcgttcgtcggagttgttcggcctggctgctgtttaagccagctccatctgctcgcctgctggaataaacacgactaaaatacatgatcgtcgtgtaataaggtttgagtaataaactagtctatcatct

SEQ ID NO: 176895 - DNA, 1343 bp, Zea Mays
caccgacttaagacgtttccgactaaagtcgattgctccgttagtagggcatagtgatcaccctaagtcaagtaagcgtgagcatgtcacaccgacttaagacgtttccggcttaagccgattgctccgttagtagggcatagtgatcaccctaagtcaagcaagaattaagaaggaaaatccttccctctttctcggttgtgggcaaggttgtcgccttgtcccttctcgaccctcaaccctagacactgccataggatcggtgatgcagttccaattccaaatcatttgcggactcacttctcttttatgggatgaactgggtggcgggtgactgagaattgaggccacgcagcagattgacgatgatctatgagtcaggacgagtaggccgatgttgcgcagcacattgatagtggccttcatcttctggtagtactcatcaatggagagatccccttaagtcatgaagtagaactcatgactatgaagatggcgcgagaagccttgttcttctgaaagaggcttttgatggtgacctagagttggcaagtagtctagttgtgtgcaatgtcaaggacaaggaggtagttgtcaatgtaggagccaacgatcatccactatggattagttgggcacgcctctgctcccatggatgtgcaagcgaagatgaacttgccacacagggagaggaagaagggagaacttggttgatagttatggtgcttcaacccgaggatcatgggaacatgggacttgatgaagatcatcatgtagggggcgacatagatcagtggcaccgcctctgatctagatgggagggagcttgagctgttggagccgagcatggcgttggaagtagaggaatccattgacatggtaagggattgagagcggcggtgtaccgttcgttggctaggtgtttgagaggtggatggggaggggtggaataggaggaaggggtgtctctggcaggaggctgcgatagggagtagttgccgccgattatatggcaacgaggaaaggaagcgcacgagcggttggggtagggtcaacacggctagggtttggaggttggtgggcgagtgaacttaggcctggactcgtggtaccttgtagaataggcttagattggaggaatcaccacacacctattgttcggctgcctttcatatataccatgtacatgtgactaggataacatgtggtacaagtagcgtgaaccaacgatatggttatacaataatcctaatactaggtatgtcatggtcattataaatggtgagctcttagtaaccaggttcccggattgatgcaattgaggaacaggcacatggtacgct

SEQ ID NO: 176896 - DNA, 770 bp, Zea Mays
aagaagcaagagcggcagccgggaatttggatgacgacgcgcggcagttggagaaggagaggagcactggcgcaagcgcttagtggttttcaccgtggcgctccctccggcgatcaccggatcccctaacgtgactaatcgtgacgtggtaaagtgtctggacacacggcacacggcagtgatcgatcaacggcggcgaggtcttatcccgatccaccgatgagcaagggggtacggcgggcttagccgcgaccgagctcgggctgatcccacgcccagatctttactttaccgtagttatccccccgccagtaaacacaaatcgtggcgacggcgtgaatcacggcgtagagatcgtcagcggtgaggggggatgaatcgatatcttcttcagttactgtaccatggcatacatctccggttgacctgacagagcaacttgaagctggattttctcctaaattcgcttggcaaccaatccaaggctctgcagcaaagttgtagtctaacataccatcttcatctttgttatagtattccaaaacaaattcttactagatcatgctgagaattgagctcaaagtctgctcaaacatactggcagtccaaattcagacttcaaacagcctgaaagcctaactttgggtgtatttatctccaaattcttcataacaacaatgtttaaccccttaaacaaagttgttcacccttgatagatctacaatattgatgtggtgacctagggcaaaatcccttttgtttggaagtta

SEQ ID NO: 176897 - DNA, 567 bp, Zea Mays
gtgaatgtggttcctaaggtgagaagatggtcgcgacctagaagggaagggatggggatggccgctcctgctcccttttgacctaggaattacagaggggaggaggaagacgtggtggctggttaggaattaccgaggggaggaggaagacattgtggccgcccctgctccgtagattgatctattgacagggaacagaaggaaatcttgaaggagatctagtgagcttcgattcaggcggggttgttgtagatcgtgtcaattccttttctgtttacgcgcgggttgaggtaggtattcacgccaatcactgtggtcgtcgtgaaggaaaagttggattctatgtttaacgatcacagaggtcagctcgctaaccatgacatgtttttggtcgtcggctgggttggacagagcttgcactgtgccgccgagactcctcacaaccacatattacaggtggtcttcattttctggtcgttgataagcttttctcttgtatatatataagtgttagcttagtaaataaaaccctagagaagctttgattgttgcatagtgtttttaaat

SEQ ID NO: 176898 - DNA, 1387 bp, Zea Mays
gaacgatccaatgtacctcagactaagtttccgtgagacaccgaaccgaacgactcctctagtaggtgataccctaagaaggacttgatcacccactacaaattccaagtcctgcctcctcacatcagcataacttttctaacggctctgagcggctagaatattctgatgaatttcccgaaccttctcagatgtctgttgaacccaatcaggaccgaccaaggatctctctcacaaagtctcccagcacaaaggggagatataccacctgccatataaggcctcatacgttgccatcttgatgctagcctgatagatgttgttataagagaactcagccaaggcgagatgatcctcccagctacccctccatgaaagaacccaagcacgcatcatgtcctccaaagtttgaatagtccgctatgactgaccatcagtctgagggtgaaaagcaacactaagagaaagcttggtacccaaagcactgtgaagactcccaaaatttggatacaaatttggagtcccggacttaggtacaccatgaagccttattacttctttcatatacaagggaaccaattctgaagcagaatttgtggtcttcatgggaataaagtgcgcagacttagttaggagatccacaacaacccatataacatccttgcctcgaggggaacggggtaagccaaccaaaaaatccatggtgatatgctccgacttccattctggaattcccaacggcttcaataaacctacatgcctcttatgttcagccttcacacgctgacactccccataggctgccacatacttagaaacatcaaccttcatcctcttccaccagaagttttgcttcaaatctctatacatcttggtttcgccggggtgaacggtgtaaggcgttttatgagcttctcccaatatatccatcttcacatctgatttctgtggcacacaaaggcggcctctgaaacgaaccaaatcattctcatcaatggtgaactctcgaggtttaccatccccgtccctctttcaagcctcctgcaacaaacgatcctgctgctgtgccacacgcactctatccagaagggaggattgaatgtgcatctgagtctcctttctagcggtgccaacatagcacaaagtaatacccatacggtccagatctacaatcaaaggcatgaccactttcgagacaccagtcctgctaagtgcatcagccaccacatttgcctttcctggatgatattgaattgtcagatcataatcctttatcaactcaagccaccgacgctgcctcaaattcagctctttctgagtgaaaatgtacttgagactcttatgatcgatgtaaatgtcacaagactcaccataaagataatgcctc

SEQ ID NO: 176899 - DNA, 396 bp, Zea Mays
gggagggatgaagtgggcgcgaccgtgggatgctcgttcaacgatcgggattgggtcctggagttgtgaggattgatgcatccgggaccgtccgatcgaggttaagcggataagattaaatctccatctagtgttccaacgttgtgatctgggtcgttcgtcgggtatccaacggtggatatgtgatcaaatgtatttgaaatctgcaccgttgatcctcaatccggtggaccagaaaacctaccggttcagtgcttagccaatttaatccttgccctcggtttctaatcctgtggctcggatcttagcataccccttcggtggccgttttcctaaggagaccccgcatttttctcaaaataacccgcggttcaccctggggtttctctgagtctg

SEQ ID NO: 176900 - DNA, 928 bp, Zea Mays
ggagcatcagggacatgtatgggtgctaaaacaagagagcagagaacaagatcggacctggagcacactgaccatggtgagacccttttcacggcggcggaaaaccaatttgggggaagtgagcaattcgggggctctggtgagtaattggaggcacgagcaggtgtgttgggtgcacaattacatagcggagccgagggtgtgctcaatttatagtgcccttgagcggtggcccgcgaatttgagatggcgcggtggtggccggagagaaaagggtgcactggcgcaagcaattggtggctttcaccgtggcgagctcaccgacgatgatcgggtgggctaaggtgactcactgcagtgtggttaaagcaccaaggcacgtggcgcaaggtcgcgaggtggctaactccggtgagtctatccgaagcggccgtgactcaggcgggtacggtggccggagtagaatagtggccggagttcatccacggtgcgatatttcttacccttagccattatccatctgcactgggcacgaatcacaacggcgggcgcgaatccggccgcatggtcgccggcggtgagtcatctaaaactggcgttctgattcggacactgtaccattgaaaacctgattcagggcgcctgacagacagatttgtagtgtccagatcttggattttcgtataagagcttgctaattcatctgtagcaaacttgtagccctatgatccagctacaaatcgactatagcaactaccctcaatcgagcaatagatcttactctaatttgacccaaaagtttggccaatgtcttgggtgacctaaattcagtcatcagagtgactgacagcacaactttgagcttatttttctccaaactttgtatgtgatcaaatcttagttgttctcctattatagctctagactt

SEQ ID NO: 176901 - DNA, 592 bp, Zea Mays
attgccagaacaagaaaagctgaattacctgaagattagagaagaatgacggaaatcccaagtcacgagaagctaggtggtggctcgatgaaggaatatcaactggggcaatttgaagaacatcaccagggatcaattcaacaccactaacaggcatcagaactccagcatccggtgcgccgacctctaaggcgactccctcacttgaagcaggcgctgctagtacaccactagagtgtggtggagaagacccaacgtggacatccatggaggtatgagaaggggagcccgctcggacacccttgggggctgggttgcagcccgtactgcccatcagagccggatcaccaccggcaacaccctcgggggctgggttgcagcttgtgctacccactcgagccggatcattaccggcaacacccttgggggttgggtaaccgctggaaccacccttgagaactgagttctctacaacagccacctctaaggctgaagaattctcagtcacctccatggaaattgaacaaccttgaccagcctcttggctttgaagattgccttccaaggtcgacgatgcacgagacgctgcccg

SEQ ID NO: 176902 - DNA, 557 bp, Zea Mays
ccatgtacgcttctagagaaacacttggctcttcaaaacccatttcagatcccgaagatttaccacattcggtaccttttctttcaccttcctcctcctctagtgacgaagccccaaaaatgacatcaacaagggattcaattcgtgggttcttctctcccaccagggatccctctgccattgtgggggcgaagcatgaccaccttcgctcgtaccctttgcagtcaataacaagctggtcagcactggtccgagagggcttagagtggaaaagcaaaggttaagtcattacctcaagaattcgggtgcatcctagggacgaagtagaagcgcttcctttcccttgatcttgcacagttgttttcttagcttctgccttggtaattttagctttttcctccttaaaggagtggccctgttcgaaggtgactcttcgtcgctgtcaatttcagcatcctttgtttcttcatcaccaaactcactttgcttttctttcttagaggccttcacacttctcttcccattttctctagcttcggtgttgtgcatcagtttgg

SEQ ID NO: 176903 - DNA, 512 bp, Zea Mays
cgaagagacgagggaaattccgaccaggattgctccattgcggacaagcgagactccagatcgcccaatcgggagttccactggtcgtcccttgcgaggaaacgtttgtccagttcagacagaagggctcgggtctggttttcgagggccagcgtgaggcttccctcgatgggagtggcagacgacatagcaaggaacgttcctctgataccaattgttagctacagctagagaatacagaaggtagcagaattagggaaggagacaacaggaagaagaagaaggtggaggcggcaggaatacgagagtttctttcagtagggttcacaatgttcaggtttgatgtcttacacgacagccacccaaagaacttaactccgcccacacacagagagcagcatgcaggttacacccattctaggccttggactcgagggttggcgtggagctggcgacgtcgacgctcgtctgccacttgggccacttgctcctgtgcgtcgggctggatttcg

SEQ ID NO: 176904 - DNA, 930 bp, Zea Mays
ctgaccacgggtggtggaaagtgggccaaggcgctccctgctgaggtcctggcatcggtgcgtgggcacgggcaccactgtcggaaccaccaccaccaccgcggccaccacgacggcgacgcccaccatcgcccccgctgccgccacgtcaacccccgccacccttgctcggcccggacggtgccggagtaggtggacggatcagggtgagagctaccagggctgtcgaggaggatgaggaccccgggccggagatcaatgcagcctgagtacccattgtgatctcctccagggcaaggttgtcgcggacctggaggaaggtagggaaggggcgctggcgcatgatcaacgaccggaggtgggtgtagcgatcgctgaggccgcgaagaacattgaggacgagcatgcggtcctccatggggcagcccagattgccaagtgagtctgtcatggccttcatcttgcggcagtactcactgacgctgaggtccccctagacaaaagtccggaaggccgcgtcgaggcggagagcccgggcctcggcattgccaaggaactgacccttgatggccagccaagcagcccgagcgtgaggaatgttccggaggaggctgtgtaggtcgacggagatcgtccccacgatccaggtgagcatgatgctgtcgaggcgcacccacgcggtagtcggtgccacaccgatgggatcgcagaggacgtggtcatcgagggcgtagcggcgaagggtgagtaggaggatgtcccgccagcgtgcgtaggatggcgactctgactccaggacgatgtggaccatgaggcgaatgttttggacactcccagcctgaaggttgagttgagccacgagcgggttagccgggtcatgccagagcatcgtggggatggtgcggggcacggttccgacggtcgtgccgc

SEQ ID NO: 176905 - DNA, 852 bp, Zea Mays
ggaggctcccaaacccctttctggttcagtatatgaagtatttttactcctataagttcagatgtgaagtattactaagcaaatcattcacactttatggtgatctgttagactgttactctataccatgacatggtaatatggttgatactttttgtttcttatatgtcacttctgagtatatgttgttgaaaccttactgttcatgctcttgttagtttccttactttaaccctccttttttatacgtatgtttggctattacactgttcaggtgaatttcaatggatagctttttttcttctagaatatgcacgacagcgtattcagtatctttttcggctacatatatgtgttacatgctcgtacctttgccttcttatagggcaaagaaagatgtctcactgaactgagaaatgagcttaaaatattggagactgaacatgcagaatgtcttgtgaaggcgagatcaaataagcaaatcaagtctttcaggtgaaatatttagtgattagtattggttctcacagtaaaacatatatgatcaaagacttctctgttccacaactccagatttctatgatttttttttcaattttgatgctatttgttggcatgtcgtacttttcatgtttctgtgtggcctagatatctattttcatgttcttgtttctttgtattacctaaacaaactctcctaaatattgaacatcgtcgtactagatatattacaaaataatttacgtgaactgatgtatttcttgtcacagtgtcggcttgcactccaaaggaaacacttgcaatactgaagttataaaaggatttttcagatcttgcctgcatactaccaga

SEQ ID NO: 176906 - DNA, 519 bp, Zea Mays
ttcaaaaattgcatccatgtgttttataaacacttcttccctataagctcttgctgcaggatacatccttccaaacctatggaaccttttcacaaaattcttcataagatggaaaaagcactccctttgttcagcattgggaaacacattcttcactgcattctctaagcctttacaagcatttgtgcacagtgcaagaagtggaaggtctccaattgcgatcttaagctgattcataaaccaagtccaattatcttctgtttcagatgcaatgaacccataagcaagtggatacatccaattatgaccatcaactgctgtagctgaggctaaatggcatcaatgcatggttttagttcacagaaaaatcgatgaaagtacactttgccttctatttctagtacgccaatctccacaacactttcaggtgacctctttagtacctcagccttccatctgtataacatctcaaaactttcttcctatttaccataaacctctgcaagagcttttttcttt

SEQ ID NO: 176907 - DNA, 914 bp, Zea Mays
acacaacttgccattctatagaattcacctttagcttctccggaaccttcttatcactaagaatgccatatactttgtgccatttcatccactcggccactccatgttaactaatataacatcattgatttccccatctctttgtaacactgatcctagatattgaaaggtattcttattgttgggcactagctgaccttccaaagtaacatatttcctcatgtgtatgtatatacggtagcatccaaatcacacatcatatattcaattttagattgccatcacaaatcgcaaccatttttcatcgatgactagtcctacgtttgcaaacaaaaaatataacaagggatatctctttatatgtattgtgacctcattctcatcgtggcaagtagacaagttttcaaaggtgggccctgatgtagtcatattttaatcaaaactaacatatggcatcaattgtttgaataatagtcatagcattaatatacatgtacttaacgagggaaacataatttgttgagaatttatgtttgtacaaaacccatagtatggcactccttagtgtttttcataggccttcgctaagccgatgaaaaagcaatagtacataactctatctcgtagcttcatagtatggctcatcacttaattcctttataattagcacaaatttgactctgaaactagatgaatataattagggtcaatttcattacatggcatagattttcttaagttccaataatatttactaaaggattacaaatttgtcatggtcgatagaacatatcgtacacccctaaatttacccctatcttttaggcatgtttgtacctcaattgggaccattagtatttgtcaccttgacccgtttgcctatttgaatcttatgcaccaaggtccttttagtg

SEQ ID NO: 176908 - DNA, 746 bp, Zea Mays
tctgacacaccgaggttatactggttcgggtgcgcaccctactctagtgtagtgctgattgtagtaatgtaatcagtgtgttacaacaagtgtgctcgtgtgcccatcgaagaaagaaggcccgtccttttatagttcaaaggtaggaccttacaggggtgacttgctctctaccttgcatgaggttggtctgttgccccggcttgacattgtgcacctggtgtcgtgctgcccgtagggccgtgtgtagtcgtacccctggtttggtgctccgtgttgctcattcatcatacaggtccctgtagcgagtcagacgttgatatctttgtagtagtgagtggtgggtcctgtgggtcagtcccacgacacagtagcatgtagcatagcttcgcctgtcgtcatgggcatgtgtcacttgccagcgtgcgtaggcatatacccggtatggtgtatctgttacatctttccagatacttttgtctctatagacactctgattctgagatcccttcgactgggattgactggtcctatccaccggtggtggttcgcctaagaaagtatgtggtgaggtgtcgtctgacatctgtgagagacctttcaacatcgtacccaaggcccaaacagagtgtggtgatgatctgtcttgtcctgctgacgtgagctcatgtcattgggtcggccttctcttatgccagtctctggtaaggttgctcgatagatacttggtcgtctgctctgcctcg

SEQ ID NO: 176909 - DNA, 307 bp, Zea Mays
aagaagatgttcactcgtttgttgggattgcaatatcgcatcgtctataaacgaggagttgataacagtgcagcagatgcattgtcccgtcatccacagatgcagtttacctgttcagctgtatcgtcttgtactccacagtggataactgacattgctgagtcttatcgtacggatgaaatagcgtcagcaatgattgccaagttggccattgatggttctgctgtaccacatttttcatggcacaatggcattctgcgttacaagaacagaatttgggttggccagtctccggctttacaacagc

SEQ ID NO: 176910 - DNA, 402 bp, Zea Mays
agcaaactcaacttttcgctctggtggcatacctggtaagtcctttgggaacacaactgggaactcggacacaaccttgatagtctcaagtggacctgcttcactgctattaatagccatctgataacaactttctttctttggctcaggcgagactaactcggtcaccacttcctttcctaatggggacaccaacttgattgtcctcttatcacaactgataactgcctgataattgtctagccagttcatccctaggtagacatctattccctgagtacccattactatgaggttagtgggaaacactatcccccttatttccacacttacattcaagcaaatgctatcggctcgaattctaccaccggctgagtcaatttgaatgggggttgacatggt

SEQ ID NO: 176911 - DNA, 654 bp, Zea Mays
cactgttactcagagtcgctgacagtttgcgctaaggtccttcggtttctatttccttccacgtcgaagtccccgacgacggtgagcgcggggaagctccggcgagcttgcagactggccgaacggggcaatgaccggcgctcccgagcggcggacacgaaattggacctcccctgatcaattcccccaacttaatttcacgattggtaagctatcaacctctgtccacgtgaaccgcgaacgatgaggacaatggcacgcgttcccggtgatgggggtggtccagttcaattgagcgggttagtgagcatcaccagtatacaaggatgctaaaacgagaacagagagggcatgatcagacctgtggagggctggccacggcgagggtgctttcacagcggcggagaactgttttggggaaaacaagagattctcgagctctagggaacgattcaaggcacgaatggctccattggttgcgcaattatctaacagagcgagtggtggtggcaatttataggaggcttaggcggtggcgctcaatttagctgagcaaagctggcggccggaggggaaaagggctctggcgcatgacacaggtggcctttaaccatggcaggtgctccggtgatcaccggacatgcaccgcatgat

SEQ ID NO: 176912 - DNA, 544 bp, Zea Mays
aacaaaatcgagggtcacggagagagctgagggtgtgaaagaggaatgcttatgaactgaacgaagcctggtatggggcgcatcaaaggacactcaaggacgggaaacatggacaatcgtgtcaccccatccacgtcctttcaaactctaaggcatgcgcaagcccccgagcaacatctatgtcgctcaggaatccccaagtactcgaagtactcgggggaaaaggtcggcctctatccaatttaggggcgtaactcgagccttaagaggagcaatttgcaccggaggtaggcactaataacgccaacacccaacactcctttctcttagaggataagcacacctgctagatgattgcggattcgaaccctctcgtcgggcgtgatgtcatgactccaactgatgggggccttgaggggaatgcctagattgaagcaagggagtcatggccccgataaggtctcctgacccgcaacctataaataaaaccattattgatactagcccttgtggggcaaggaaagtggaaccgagatgtactcac

SEQ ID NO: 176913 - DNA, 1179 bp, Zea Mays
ctactcctgcagctgaggcttcctgtaaaaatactcctgcacagtgatttgctcggatggaaaacacttttcattgagttattactttttagtgaaatagtgtatcataaatttcacttgtatgtaattgcgctacacttgaactgattgttctgttagcagagcgttgaagccaccatcaggtatgtgagcgggttgcttttctttaaggcattcctgatttgagttgattattttgctagtagggtatagcaatctcccctaagtcgcgtcggcttaaaggcatttccaacttaagccgaatgttttgttagtaggtatagtgatcaccctgagtcgcgtaggcgtgatcatgtcgcaccgacttaaggcatttccgacttaagccaatttccctattagtatggtatagtgatcaccctgagttgtgtaagcgtgagcatgtcgcaccgacttaaggcgtttctgacttaaatcgattgctccggtagtagggtatagtgatcaccctgagttgtgtaagcgtgagcatgtcacaccagcttaaggcgtttccgacttaagttgattgctccgttagtagggtatagtgatcaccctaagttgtgtaagcgtgagcatgtcacaccagcttaaggcgtttccaacttaagccgattgttccgttagtagggtataatgatcaccctaagttgtgtaagcgtgagcatgtcgcaccggcttaaggcatttctgacttaagccaaatgctccgttagtagggtataatgatcacactaagttgtgtacgagtgccgtgccgatttcgagttgagtctaacctaggtcagtagtttgatcaagaacttgtatgccttggaacatggaagctttattgataatgaaaccttctgcttataaagtacaactcatcctcaagagttttgaggcatttcttacgggtaaaatttcctgaggttctcaatattccatgaattttccacttcggtgtcgtccatttcagtgagccggtaggatcacggccgtgttacctctgcgacgatgaatggtccttcccatggtggtgacaatttgtgtcgtccctccccctttagcactcggtggaggaccaaatctcccattgtgaaggatcgatgtcgtaccgctttgtcgtgataacgcctcagggtctgctggtat

SEQ ID NO: 176914 - DNA, 285 bp, Zea Mays
tgtggcatggttggctatgctgtgctggtgtgattatagtcggtcttagcgcggatggtttgatgctgtcgcttctgcttttgttgtactagcttgaccgcgccctgaggcggcttctgcgcggagtctttgtgagagacatcggaatttctcgcacttgttgtgctaagtccggctgcacccttaggcgacttctgcgcggatggtcttcgcgatagacatcggaatttttcgcacttgttgtgctaagtccggctgcacccttaggcgacttctgcgcggatt

SEQ ID NO: 176915 - DNA, 665 bp, Zea Mays
aaatgcttccgtcaggacagcaaaggaattctatggtttggagaccgattggttgttcccaagaaccctgagatcagaaagaagatattggatgaagctcacctttcaaaattctctatgcaccccggcagtaataagatgtatcatgacctcagatctctatattggtggaccagaatgaagagggaaattgctaagtatatatctgaatgtgacacctgccagagagtcaaggccagtcatttgaaggtagcaggcaccttacagccccttcccataccatcttggaaatgggaggagatctgcatggattttatcgtgggattgcccaatacttcccggcaccacgattctatctgggtcattgtggataggttgaccaaaatagctcatttcttgccagtgcataccacccacaagacagaaaagtatgcagaaatctatgttgatcaaataatgcgtttgcatggaattccgaagactattgtatctgacagaggagcattgtttgtggcacgcttttgggagcagctccaagaatcacttgggacccatgtaataagaagctcagcataccatcctcaaacagatggtcagacagaaagagtgaaccaaatcctcgaagacatgttgcgagcctgtgtgctacactatggtaaaaattg

SEQ ID NO: 176916 - DNA, 358 bp, Zea Mays
cgaaaatcgaagtcttttccaaaagactctccgagcaaaagtcgcccaagggtgcagccggactagcacaacaagtgtgaaaaatcgaagtcttttccaaaagactctccgtgcaaaagtcgcctaagggtgcacccggactagcacaataagtgcacaaaaccactctccgtgcaaaagtcgcccaagggtgtagccagaataataagcacgaaaaattgaagtcttttccacaagactccgcgcaaaagtcgcctacgggtgcagccggaatactagtatgaaaaatcaaagtctttttctaaagaactccgcacagaagcctacaggaacagcttgatcaacgaaagcgcgcagc

SEQ ID NO: 176917 - DNA, 855 bp, Zea Mays
tgaagtactaccctcgtcattcgaccggtagtgttgtatgtgtgattgtctcgcctattggtgcaggaaatcctaggctaaatagcatggtcaacctggccatcatgctcaacaccgagctgaaccacgcccttgacgagttgggcaaggttcgggcggagattgcggaattgcgtgctaagtgtgtagcacgccactatctggatggtggttctctctcccctgtcgagattcagcacccttaccgttcaccgccccatggtcgcttcgagtatggtacccctgactacaggacctagatagatttggatccatatattgatagagtcggagtctgtaataatgcttaattcaaagtcttagtcttagttaatcgtagttagagttcgtttgcttgtcatatgtcttgatgtctatcgtgatgaacttgtaatgaagttggatctttgtaatgattgtcaccaaggtgtgggtatcccctacaacttggtgtagttattaataaagtcagttatttagttgggtaatccctttatttccactttcctctttatctgagaagctgtcagtgaagatgatcaattgttcagtgctatgaagattttctatacatcttttcttatgctgaaagaatgcagagtcagatctgatatgtgtgtgatttctacatatgtctgagaataggcgcagaggtgtaaggcgtgcttagccagaacaggcaccctaggaagatgcagctcagcagcagttgccaccgccacccccgatgaccattgagcagatgttcctgatacagacccaagcagtccaagcaattggtcagaccttagcagcgatgcagcaggtgcagcagca

SEQ ID NO: 176918 - DNA, 585 bp, Zea Mays
gagagaccgactgtaataaatatatgatgctgagttatgaaggtaaaaacaaacaataaggcaaaatgtttcaaataaaagtacctataatcatggcgcgttcgacagcttcttcagcttgtttagcttcctcacgggtgtcgtgagattctttctcattctttttaatggctttgtcagccatatcacgttcgcccttcatctacacatcggagtagaatttgtcacccagggtagaagcttcaactgaagggtccttagtgttgtcagcagagagaatggattctggctgggccgcggccttgacatgttcacacccaaccttttctaagattgtcgtaatccctcgggcaccgaaaaaagcacaaaagtctccatgatcgctaaggatctcatcaaaagcttcgacttcttcacctatccattggataaccccttcgtgatcgccgcgaataaatttttgttctgaggaatacgcccccaccttcgcaaagctatattttagcttctttgcgcagtccaaggatttttcataacacctttccctagaatcacgaagctcttcaacattcttttctagccttg

SEQ ID NO: 176919 - DNA, 477 bp, Zea Mays
ctggggttctgcgccttgccgtgacccgcgctccgtcgtcggacagccctgcctccatcaacggtgagaactcccctctcccaggccgccggtgccagtctgctacacctactgttgtcggtgtcatatacgtataggagaagtgggcagcagcgtaaggaagaagacgcacaggagcggtagattctgaaatcaagggtggagattagatcctggtgtctagcaaaactcgaccgtagatctccaatccggtggatcagggcatgtatcggttcaattgattgcgtgatctaatctccatcacctatttcaggtccaaaggtccacaagtgaagttacccgttcggccgactctgtttcgcaaataagtcctcgggctttcttaaaaccaacccacagttccctcaggttcaaagaacctcgcaaacaagtcctaaaatttgtactctgacccctgtatttatagggaatcatgcc

SEQ ID NO: 176920 - DNA, 1192 bp, Zea Mays
caacgacacaggaaaagggtcgcgcgcccgcgcgcgcccgcgtgctctagctaatttgcacagaagccctggtcttttcagctaaaccgaagcaggttcgtttactattgtactaagtcgctgacacattgcagaaatacccccatatttctaattcttctccaactacacccctgtccacggcgcgctcaccgttcatcctggacggggtctgtaccggccatggccggcgacgactgcccggactaaccatcggggaggcttcactgacctaggatgacctcggaacactcattgatttgacaagagcgccctgcgaacggcctgtccacgctcacggcgagaaccgcggtgtcgatcccgtgttctcaattatccacgctcggatttattgaacggccactatgaggagcttcatgaacacacagagctgctaaaacaaggcttgaattggacagggacttaccagagagggttggtcacggacgagctggtcttcacgggacggcggaccgatttaggggaaaatggcaatactccggccagggtaactaatcgaggacaggaatggttgctacagcttcgcaatttggagacgaaggccggagctcggttgatttgagagaagggggcgagggcggggtgaatttatagccgcgtgtgagccactgccgcggttacgatgataaccagtgctggcccaagctggcgatcagcgagggcaccgagcacgtcgctccccgagagcttgccacgttcaaccacggccgtaaggcagtcaaattcgtgatggcgtggccgaacagaggagggcggcgccggtgactggacatggccggaaggaaagatggccgcgtggcagccggagttagtgccctccaccgcggcggtcttatccggagcaaagaggtcttcacggggagatgctcgccgcccgatcatctcgaccccggcgcaaatcgcggcgcggataggtcgtcggcggtgagattttctgccgcggcgatcagacccatatctgctttcccaatgcactgtaccatggcgtttgttcttcagtcacctgacagccaggatttagggccaaattgctcctaaatttcaatggcaacacacctaagtttctgtaacaaagttgttcctgtatagaagctctacaactttgttatagcaatcctaggtagattcccac

SEQ ID NO: 176921 - DNA, 468 bp, Zea Mays
cctcactctcatttcgctctgggtccgcccctgcccaaggggatcccttgtcacctatgcttttcatcctagttatggaagttttgaactctatggtaaattttgcaactcaggagcatctcgtacagccaattgcatatcgacaggcccatacatctcatttccatatatgctgatgatgttgtgttgttcctccggctcctaagatcagacctctccttggtcacacgtctccttgatatcttcgggcaatctacttgtctcaggacaaacatcgctaagagttcagtcactccgattcagtatggggaggaagaattggctgctatcttggagctcctgccttgtgaattaaaggaattccctgcaattatttggggctgcccctgacaatcaaaaaaccatcaaaagccgagttgcagcccgtcattgacaaggtaccaaacaagttaccaggttggaaagcct

SEQ ID NO: 176922 - DNA, 522 bp, Zea Mays
gtgctgtaccacgggttgcatgcatccttatccatggatctctgaatgaggggtcatttcttcagaggataagacgtacgggttgcatgcattctattagatgtcgctgctcaatccatcgattataactactgtttttcctctttttttttccccatacaatacaagtgacaaaacgagtggtcccacgtcctctcagactcgtgccagatttaccttttacctttcccgttccaagatataagctgcgccagctcctctgaagaaactagtgtttctaattgtagctctgaagcaaataataaatactagcatcaacgaacgccaacaacttcccctacgtctctgctcgtgcttccaaggaaaccgcgatccacagggtgcgatgcagtgttccagtccacgcgggattgtcttgtccgtgagaccgtgaccatggacaagctcgagacaggacgccgcctccatctcactgacagctcaactcagatccctccctcgccattattgtacatagaactc

SEQ ID NO: 176923 - DNA, 398 bp, Zea Mays
aaaccaactcaaccgtgagcagaagagctaacccaacccatatactcatgatggattgtataatctatctgtccccacctaacatcaaacaagattttgatctacatcatgtagtctatctcaccatatctatcttaaacatattcatatacactaaccccgaagcaatgagaccaagatcggagaaggaaaagatcaacatcgacaaggaaggagatgagtcaaatccaacttcaagaggaatcaagatccacagttcaggatgaagtctttccttattatactcttcctggccacgaactatacttgctataaccatacttcatctgacctaataagatggctaggcatactatgtccatattttcctaatcatcttctaactagtatttaagagc

SEQ ID NO: 176924 - DNA, 583 bp, Zea Mays
gtcggtggcttatggctcataaactcccggtgcttatcacgaggtggaactggcggtggtggtggaggcaatggtacttgttgttgttgctgctgttgctgaaattgctgctgcagctgctgttgcgccctcctctcctggcgtatctcttctctctcctggcgcaactcctggcgtatctcttctctttcctgacgcatctcctggcgttcttgctgcatctgggcacgcatatcagccatagtgtccaccatttgctgcatcaccgtcatctgagctgcaatcagtggatcaactccgcctagtggaggattaggaggattcatctctgttggttgtggctgaggttgtctatatatccaccgagtgtgtcgattaggaggcaaatcaattccaccacccctcctggtattgaccatctgagttagatacatatggtaagagagagtagcagacaaggcagtaattacgaatcgtgttactttgggggatttattagctaagcatattaatgttctacctaccatagctaatttattaccttatggtggtacatgctaagatgtccatatataatatctca

SEQ ID NO: 176925 - DNA, 707 bp, Zea Mays
attaaggaatcaagaaaagccatgattaaaaatataaggccaaatacattaatggcaagaaaaattcaggaagcctctaactactagtataccactacaaaaatgataaacacctcaaaccatcacagtaagtgagttgaacaattaaaacttaaaattggcccatacttcaaataaatcaaaagaaagcctaaaatgtgcaacagtgagcaaaccaatttttacccaattacttatgatgtaaaccaccagagaaaaataagaaactaaggtaagaacatgatgtaatacacctcacttcttattccatgagaaagaccatatattccaagaaatgctaccaccccttccctttgagaaaacttagccaaattctcgaacgattgctcttgcgcaaagaagaagatagaaaaaataggaaatctgttgtttgacattttttagatacagtaacagtagaaagcacaattaggccctaaaactttagcaaatcacaataaaatgaccagtaggtatcattggctaaaacttggtacaaagtcatattattacacctaaatgccagcaaaataagccttaaggaataatccactgttaaaagagagttgtagttcaaagcaccccctctgtcctaaaacttaatatttttgtacagagtgaacccttaacattttaagccccaacttttgagactgagaattatacac

SEQ ID NO: 176926 - DNA, 787 bp, Zea Mays
aattcctgaaaggaggtcacgaacgaagtggtctagttggtggtcttccgccgttttgcttcgagatgtttggcgaatcgcccgggtccagattgaagttttcatgcgtactgtaggacccgtgcccttcaggctatcgtacctgttcatccaggctttctacataccactcgagatccacagatcgcgtcgagacgcttctctaggcgcatcgcatcgcatcacttcactatttggtgacgtttccgtgtgcctgtgtctctatcccccctccgtggtcttgtggaaagtccagtaggtcacgcactgtaggagccgtggtgccgaggctaccagcagcgcctgtagccttgcaagttgcaatggacggtatccagtttgtttggaaacgtttttttttcttggttcttctcaagaaccctcgtgtttctggaatgtcttgtgtcgagggtatcgtgctcgcgactgccgtgtccatcgccccatcgtatcctaaccacaggagccagatttgattcgggccttgaagacgcagacaaaagcccttttaagccaagctaacccctcacagccactggctgatattgtggttaggtgcctctcgtcgccccggtgagtgtcagtcgtattccgtcgcacaggatcggtgattgcggattgaaaagcgcctttcgggtgggggtgggggtggggggtctgtactgtgtactactactaccccctcccgcgccgagggtccgacacgtcaatattccccgcccgattccggcggtccgttctgtggctg

SEQ ID NO: 176927 - DNA, 429 bp, Zea Mays
ggagattctcgcctgcgcggttggagaaaggaagctccacggcgagcttgagggaggagttcggctgaaggggacaccgcgagctggagaccgacgcagccatggcgaataggaggaggggcgcagtccgcgcgccggcgttgagggctggggctgggagttgcagagaccgatctcgatggagggagtaaccatggggagaagaggagggagcggctgggcggcaccggcagggaagcaggggagctcggttgccgcggctagcaggaagaagaagaccatgtgactggagaagaagacgcgcgcaaataaaaaggagcaggggcggcggcttgaagaaatatctggggaagagcggcgtggggataagcccctgggatattttcttcttttttatttctttaaagaatttatttaaccaaaaaatca

SEQ ID NO: 176928 - DNA, 682 bp, Zea Mays
aagggaagggtgctcaattcgccgaccgccgcgacttgaaactgcaacgctgagttatctccggctattggatgagggagtgaagttgtgccgctcggattggtgactggtatcggcggaattcctcgccgtagtgaaccgccaccccggatccgcccttcaccgtggaaagccgcgccttcaactctaaccccggtgagcacactacccattgtctcatactgccatactcaacgtgtagcatagtttggaccggagaatagccgtaggaatcgtgggcgcgcgaagtccggccatggcgccgccgtatcgtgctgctccgccgccgcgtccggatactattcgcgcgcggagagccgtggaccgtagatcgtggggtgaacagttaagatttgacgactgcgggccgtcggatggtccctgggtggtccagatcaactcataaagtgagcagtcgcgcgagcaaatagggaccgtagatccgtagatgatcgtctgggatcttgtgtggacgtggtcgcttctgggggcctcggatcatgatccgacgatcgcagacagtataccgattcataaaagctaggatctaatcgcagccgtccgatttagatcggaccactgcgatcaccgcataccccttcgcgctgatagttttacacttgagcccctcgggaagtaggaa

SEQ ID NO: 176929 - DNA, 789 bp, Zea Mays
ctctacccttttctattaccttgttaatgcgatggatgcaaatatttatgacctgaaactgaaaactgcattcgaccttttatttgaacccaacaaaccaatcttgaaaactgcattgcagtgttcatggcgcagcacattaatgttttcatattatgcatatataaaatgtaaccaggataccagagagatgatgatcagcccaaggtacttggatcatttttagcagctagcaagttattttagtcaatccaaacaggcttagcatgacaaacaccccatatgcatatgattcggctagatcattttttggcgcctcgtggatttgtgtgcatgataggtattcgaagataaatgtttttagttattggaaatgtgtgtctctcagggccttagcaaagctatatagcaagtggcttcagtcaaacataataagtaggaaacccataacaacacgcatgttgccaagtgggtattagtaagggatagcatgttttcttactggcgtcttagcaggcatgttaagatctactcacgctaaattggtgatctacttacgctatattggttttttgtttactgcataaatgtatatttttgtttgtcgggatatgaatgtttattctagtactgtataaatgtttattttgttgcttagtcactactactactgcataactgtttattttgctggttaaatactgttttagatgaacattctattggtatgcatagatgtatatggcaatttctacaatgcaatgatacgactttttttatgttttgttc

SEQ ID NO: 176930 - DNA, 522 bp, Zea Mays
caacaggaggagagaactcagtttcgaggaaggtgattttgtctatatcaaagtctccccaatgtgtggagtcaaaagatttcaagcaaaagggaagctagcttcacgattcatcggtccctatcccatcatcggcagaatagggccagcagcttaccgccttcagttaccagaatccatgtgagacatccacaatgtatttcatgtatctcagctctagaaattcttgaaagtaccagaaagccacataacagaagagtcagtccagattcagaaagatctgtagtaccgagaaaagccagtgaagattcttgattcagccgttcgaaagacccgaaactcggaggtaaggctctgtaaagtccagtggagcagtgaaggagaagaggaggctacctgggagagtgaggactcattgaagagggagtacccttaccttttctcaagcccagcctaaatctcgagggcgagattctcttaagtgtggtaggtctgtagcaacccagttttttgttctgagat

SEQ ID NO: 176931 - DNA, 412 bp, Zea Mays
tcacggacggcagcgctgaaggtatcccaccaggatagggccatcctggagagttgatgagcagcgagatgaacacgctggttttcagggcatccgatggcctctaacttcctttttattgtgcgcatccagtcatcaacgtcgagcggattgctggatccagtgaatgtgggaggcttgagccttagaaaatctcccattctgtcctgaggtcttccaccatttgggcgctggttctcaaggcttctggtgaggacctcaatgagtcgggtttggttggccagaacttgggctaaatctaatggcagctctggaggtgcggggaggtgggtttcactcccttctccaccgacttctccttcagcacctaggggagaccttgctccaatccctgaggcggtaggcgtggttt

SEQ ID NO: 176932 - DNA, 273 bp, Zea Mays
gcttcatatgattaaacactggtaaatgtgattacaaaactaggtacaaagaaatgtttagggagctgccctatatgctttaactagctgatttcgtttcattcacttttcatttatggcagctgtttaaattccagtaaagcaaatgttcatgtcacatttggttactgttgtaccatgcttatactactgctatggccagttttgacatgagaagattacttatgtcaatgttcttttgttacagggtaaacgaaggttcctttatagctt

SEQ ID NO: 176933 - DNA, 294 bp, Zea Mays
catgaactgagggtttagggtcagaacaacacaacaccaaacaggctgagacagccatatgccctcagtttttgaaaaaaacatcatatgtagtatacagttctaaaatttcaaagaaatcatcatagggcaactgacaactgaacaaacaggcacattccctcagctgaacaaacaggcagctgtaaacatgaatgagggtttagggtcacaacagcacaacaacaaataggctgagacaaatagccatactgccaaagtgaactgataactgaacaagacaaccatatgccc

SEQ ID NO: 176934 - DNA, 588 bp, Zea Mays
gccctgttcaatttcgtaatatgtacccagtggagaggtaaaatttaatatattttagcaataaattaaacttagttttactcaaatgaaggtttaacatatattccatttctcctttataggtttttaatgagatgtaagggccatgttcgcactaggagtcacccagaggggtcaattgcagaaagttatctatttgatgagagtctcacattctgttctcgctatttacatggtgaaactagcattaaccggaaaaaaaagaaatgatgatggcttggatgttgatttaatcaataccacccctttcttccataacataggtcgaggattggttggtaagcatagtgtcacattagaccacaaaacatggcttcaagcacatagatatgtcttgttcaactatgaccatatagagccttacttgaagtaagttaaccattatatgttataatcagtatcatccgtttatttcatgattactaaattgtaatgtttgtttagtaaacatatagaatacctttactctgctcgtcatcaaaatcaaagagcaatcagtcgtttacactatgagacttttcacgagtg

SEQ ID NO: 176935 - DNA, 377 bp, Zea Mays
aagggatcaggatgccggctcgcgctagtgaagtcactggtcaccgcttcctccggccgaccgcccggctgaacagcagacagcaacttgcggtgcatgaggcgctttttgaggcacttttggttcgcatccatccatccatccatccgtctgcaggattggctctgagaaaaccgtacgtaagaacgcatgcatgcacgcactgcagcgttcaggtgtagtatgggccatgcacgcatgtgtggagagagacgcaggcgagtgcagacagacgaccaaggcacaggatagtttacgctcgaaaaggttgacgactttttcatgcagatgaatgaatgatcagaggtttctgctgcgtctcctggctagctttctgc

SEQ ID NO: 176936 - DNA, 974 bp, Zea Mays
cgattctcggccctcggaccaggatcaaatggatcacattaaactagggacccacccgaagcgatatgctttcccagtcgtagattcatggatgctcatcattcaacgcctgactcctaccctcttcttttaatctgaaatgcacatgccagattggatggccctgcatcatcgttacttgtccgtgctacacaggtagtggcgccgagctcgctgaggcggcgaccacgccggtgacacccagatcaagcactcaggcacccatacaatgcaccgattgacccaacccgacacactcatctccctgatttggaccaacccacacatgacttcgattatcgagccctgacacccggccacaataataaatagccatgcagaaccacccatctctggtgagcaatacacggctacccacaccccaagcccaaaccaaaaccggtggatatgactgcggggacgacgcgaacatggtaggggaggccatacctgatttctacacggttgtcgcccagtccacgatggtccacacctcaacagctttctagaactttgacgtgtgattcccgactgtctggtcgatgatcccatcgattggggaaacacccactccctcacggcaccatgaagccctgaggcttaatcctagaccccgagcgtcttcataggtgatcgtcaacggcggtgggtttctctctcgcacgattcatggtggcggtcagaacacaagcggcgtacgaagggtttggtagcgccagcgagactcgggaatttatatagcgtgcactaatagaggccgaggtgatagggaggttgttgcttcatctggctccagggaattgcagcggtggtttgttgtgcggttggatcccatggcaaagaagatgcacaacggccttgtggtgagatcgacatgcaggccccatctggcagcggcaccgggtgaggtcatgcatgatgccattggtgaccaa

SEQ ID NO: 176937 - DNA, 391 bp, Zea Mays
ccaaccacacccatctcctcacttctcacatgttgtttccaccatagctatttccccacacgtcatcatttacccctgtgccgccatcccagcatcgccgtctccgcaccccgccaacgcctccgccacaccacacccgcgccaccgccaagcttggtaccatccctgcattggtgtcctgtccccccatgcgctgttggcaccatctcagcctccgcacaccaccacgtcattgcccccggtgtgcttcttggcccgctgcaacgccgccccgactgccacacaccgccttggcttcgtcccccatgcaccaaccaccacgcccaatccattgttagtcccgcgctcacacaagcttgtccttggccgtcagcaccattgttgctactag

SEQ ID NO: 176938 - DNA, 659 bp, Zea Mays
gattgggaccttgtcgccctcgtttccgcttatgtgaaacggatgattcaggcatcggagcatcctccgtgtttcgtgtagaacatgcatcctctttcttctcttcatttgaaatctatatattgaaacaattaatggcctttcatatatgaacattattttagaatatagtcggcgtatttctatttacctcttcatcgttgggaatatagtcggcatcaagctcatctgatgtttttttcttccttggaggaataggagtacaaggattgtcgtcactagaactatcctccccgctcccttcaccggagctgctcgttgtctaccattcaagtttggtcgcgtcttcatcaactttgttagacgcaccggtgcagaccacatccatcctagtaggtacctagtgcacaactggttccatcgataaagggatatactgttagtctgatatactggttccatcaataagggaacttggagaaaaggtgattcaaaagaaatcgagcccaaacccgccttcgtgtccctcctttactccccaaacagaaagcccaaacccgcctccggggaaggatcgggccgggaagcacggagcagatagaagtgcactttccaatgcagttagacagagaaggcatggctgtgatgttataatgctg

SEQ ID NO: 176939 - DNA, 649 bp, Zea Mays
tgcccgagggcgctgtccctgcgggtgctgctccaggtggcggggctgaggtgcctcttcttgccagtggtctttctctgatgcagtggatgggcatgaagttggacacttttgatggcagtggtactccggtcaaggcgatggattggctaacttacgtggaggataagatgaatgtcttcgagattgtgtatggagatcgtgttcgctttggcacacagctactgaagggagaggctcaaatttggtggagaggcatgcaggcagctcactcctcttcaccaagagtcctgtcctgggatgttttcatcaggcagtttgagaggatgttctacccgaccaccttcctggagaaaatgaagattgacttgcagttctacaagcaagagaagaagtctgtcacagagtatgaagtgggctttaacaagatggtccgctttgttcctcatgtggcttacaatgagatggagaaggcgagccagttccatgagggcctgaaaccttctatcaggcatgccctgggagccttttcattggtggatttccgtactacagtggagcaggcattgggtgtggagatgcaacaccagtacaccatggtgtcacagaagtctttgggtgttgatcagcctcgtggccaggacgcgag

SEQ ID NO: 176940 - DNA, 551 bp, Zea Mays
ctactaactattaagaagctaatgtagaccaaaaagtgcccccacctccccttatgcaggcatgcatgcagctgccctcccactcacgttacatgcaagccgaactgtcatcctgcataacgcacgggcacggctgtagactgcgtacgtagatgttggtattgacgtagccgacggctgtgagaacgtgcaggacgtcaacttgtctgatacgggagcatcggcagcagccagccccagcccctaggtcctcctactcctggcttcccgggcgagaaatttatttgtccatttgtccatagctagctggagctttgattagtcttggtatgactatctaagggagtgtgctacaccaatacacgccatcctctctccgacgacacatcagtaggagatgaaggcgggtatatataattagacatcgtaatccgcatgcagagcaggcaacctcagcccacggctcttatatataaaaccataccacgtatacgttgttttcaagtgttttgttcacactcgacaaagtcagatgatgtcgagatgaaaca

SEQ ID NO: 176941 - DNA, 563 bp, Zea Mays
ccgccactaaaaccctaatctgtaggagcctagaggtgcttttatagacacctgagcctggtgcagctaaaccagatggcaccgttgggccaaggcatatatatatatataatgttctttgagccggcgcgacgagctgctgagttggagactagatagggcgactctggtgcctggggacatggacccttcggtaactgctggcactacgactttgaagaagtctgaagcgagtggtgtattctgagtggttagatttaggttgtttagtcattgtccgattattttgatagacacttattagtgattttgtagccgtttgctgactttggaactagatgctagcacaggttcggctaatgggacctacacagtgcgaaaacttgactcattttgatgtacaagaaaataatgctgcttttgtttctcctttagattgttagagtcctttagtgcgtgccaaatgttggggtcctgacacgcggactcaagcactcgggagcaagtgagacaaacgttgcacaacaaaatgggaggttggataactggatgttttctcaagt

SEQ ID NO: 176942 - DNA, 1208 bp, Zea Mays
gaacagtatcaggaagaaggatctgatgcttagatcatcgtcagaccctttcctcagacgatcttgaagagctacaaccccaaaatcttctttcgataaaccaagttcagcccttaaattgttggcagcaacagcttcatcaatgcccaatgtcgttcctccaccagcatttggtaaccccaaaataaggtgcaccgtatcctttgtaattttgagctccttccttgcgccggctcgaattgtcatgtcattatggtcaagcttttccatcagccaagctaaatgaaatctactaccgagtgcgtcaactctcatatcaagaatactggagaaccccctccgtgcaatagcttggcgctgtctgtcatttaatatctggatgcttactaatacgtcttggggattgcatctcacattaagcctctgctgaaaaaatgtatacaatgaatagcgtaaacatttacatctgcataatcgcaacttaatgtttaaataaaacctcaacacaacataatttcacgcagaaaatgatatattgccattgaccataaattctaacctgtcgggggggggggggtccactacttttctctgctttgtaactatcttcttcaagacttttggaggactgtcatcaaagttacgcttcttcgataatggcataaagtcatcgtcctcatcagcagcctgccttgttttgtgtctaacagtttccgccggaacatggggtatgtcgacactaaagcactcttgagtagactgaattataatccgttttggattagatggaggtcggtctacgttcttcatgtataatgttcctgccaaatcaaaaaacacatatacataaaaaacgtaaaggagcaataaaaagataagcgcaaatcaattcagttcagttcctgaccatgcattccattactacacaaaaaaacatgcatcagcactactaacatctatgcatgttgtgcaaaatacgaataaagggggccagggagcactgctagggcccactaggaagggtttggaggtagggatagggagacgtgttgctgcgttcttcatatatgatgttcgagccaaatcaaacaacacatatacataaaaaacgtaatggatcaataaaaattctgctcatatgcgacgtccaattaatgtataatctggctatttcgtgcgtgctggccctaattgaaagcgagatgttt

SEQ ID NO: 176943 - DNA, 394 bp, Zea Mays
ggatcatggaatattattcaatcacaatggttggcttggtcagaatcatatcactggatatgggaattttgttagatcaaccgttgcgacaatacaatggtgtgtttacatatcacctttttgtgtatagttaaaaaacctggagtaaaatacacaaaagtttgtgtacaggtaatttgtgtaatacctcccatttgtgttttttataatccacattttttgctgttataacaccctcaatgcttgacatgttctcggtgaattgccaaattcattatagtccaaaaacagaacaagtttcctcagattatattattcaaatgcatggaactttggtaaatcaaattaccttctcaactcctagatactctgtatcttaggataactaagttat

SEQ ID NO: 176944 - DNA, 537 bp, Zea Mays
catctagtgctggatagtaacgtcgaagagatcttcgtttccgatgtcttgtgtgactgaaatagttccttctcggctgcagctcattaccatgtaaaaacctattgggctattacaagcagcgtaccacgttactttacctcattttctacgtcgttctcgttgatctgcgaactttgtgactacgttcataatccctgagaatttggttggtggactcgcatagtgtgtgcgcagcctgaacactgacagccttattgattacgcactaatatcgttgataagttcattgaaacataatgtggctgtagtttagtggtgagaattccacgttgtggccgtggagacctgggctcgaatcccagcagccacaaaatttttttatttttttttattttgtcttagaaacgcaacgcccttggcccatttatctctttttttttaatgtatgtcttgcagagttactgttttcttagattgctagctagactattttagccactaccttcttacgtaagtatttctgttccagttaac

SEQ ID NO: 176945 - DNA, 627 bp, Zea Mays
gctatggcggttccgaggccgccggggttggctagaattgtcgaggagggctcgacggatgcgtagagagggttttggccatgagacaggggtcagagatgggagaatgccggagggagagctctaggcaggtcgaggcaactccggcgaggaatctcggctggggagaggggatctggggtgcgctaaggcctggtttagctacagcaaggtgaggggaacatcacggaccaatgccagggcacagggccagactaattcagccagtcaccgcgtgggcgcagcggaccgctgtggccgaactgcggcgagtccatggctatgggtaggcgtgaataaggaaaactaaacacgaaaatgaacgtctcacctcgggacggagctcagggcggcttggcgcggcttctagcgggctgggtgaccggcacggcgggcgcgggtcttcggcgacgtcgagcagcaagggcagagcgtgagagattgtgagcttacgcgaaatggggcaagggagcgagtgcgggtgcgggcggggctcaaaagggagctaggatgcatgggcaggcaacatggtcggggatctcggtgtgcgtgctcgctggtccacgacagtttgcagggaaggcggag

SEQ ID NO: 176946 - DNA, 517 bp, Zea Mays
acgatacgagttcggtgcaaaaggtgcatttgtcaaagttagcaaataagcgcgcggcgcgcaaagcatcaaaaacaacacatagatggtcaagatgttcagataaacaagtgcggtagatcaagatatcatcaaaataaaccaccacaaattttccaataaataggcacaaaaccttgttcatcaaacgcataaaagtactagggttattagttaatccaaaaggcatcactaaccactcatacaagccgaacttggttttaaaagcagttttccattcatcgcctaatttcattctaatttggtggtacgcactacgcaaatcaatcttagaaaatatttgagaaccacttaactcatcaagcatatcatctaatcgaggaataggatgacggtaccggatagtgatgttgttaatggctctacaatctacacacatacgccaactgccatctttctttggaaccaaaatgacaggaatagaacaaggactaaggctcttacgtacatacccgcg

SEQ ID NO: 176947 - DNA, 455 bp, Zea Mays
gaaaagaaaaccctagacgctggctcacgcataggcaaacgaaaacccttacggcttacgggctacggcgattctagaaaccgtctggcggctggcggtctggcgctcacggcgattccagaaaaccctagattccatcgtcgccgcctggtctctgctccatcgccgcgtctccctcccgactcccctcgtctttcggtctctgctccatcgccgcgtctctgctccacgggcctcaggtatttcacccacgacccacctcgtctccctcccggctcccctcgtcttcaggtctctgctccatctccatcgctgtgtcgctggctcgctgctccatgggcctcagccctcaggtatttcacccacctcgtctccctcccggctcccctcgtcttccggtctctgctccatctccatcgccgcgtctctgcttccggtaccggcgtcccctccca

SEQ ID NO: 176948 - DNA, 1156 bp, Zea Mays
aataaacccttggcgttttgaataacccgaacggggtgccctgcactatttttgtgagtcgctgacagtttacaaggaccccccatgttctaattcttcgcaggccgaggtccacgacggtgaacagcacaggctgaactccggcgagcatatgtcggtcggataccgcaacggctggggctcccgtgcggcagacaccagattggaccccctcccgcacatttcccctcaatcaattttaccaacggggctttgaatcaaccggttcacggcgacagtgcggatgatcggatggataaacgcgtttcgaacaaccgatgacatggatgaccaaattgaagcttggggaagcttcacgggttcaccagaggttatgtacacactagaatttggactgggcaagagtagaaaagtgggtcgacagagagggtgtcgcagcggtgttctacggagcagaggagtgttccggtgatgggactctggcaaacttcaattggtcggctccgagagcagtaggaagctataaacaagctagaacaggaagcaattggggagttactgacccgaggagtgctggccacggaggagttcttcacggcagcgcgaaaaacagggcggaatggttttgtggactgtgtgagttcttctggtgaaattgagtcgattgctcaagtgcttgtgtgcgctatgtggtgaagaagcaggatccgagctcaatttataggccgatggctggagttggatgagaatcgcggagctgtaaccgccctggcgagctcacccgcgcgggcagagccacgacgattatccggtgaccgccgattaaccgggcagtgccaccgcaacattttaacgccacatcatggatgatctttaccgtggccgcagacctatccccaaccgtggtggcgttcttatcgtcggtgagtctttctgaagttcgatgaacagtgcgccagtttcagttaaaaatcgcctgacagcccatctttggatcatattatctccaaattcctcatggtaccaagacttaatacctgtagcaaagttgttcttctacaatggctctacaactttgttgcattgacccggggcaaattctttgaatttctcgacttacagagctccaaagttagccctgatcaactgttttcag

SEQ ID NO: 176949 - DNA, 372 bp, Zea Mays
aggtcttgtgtcaatctaatcggcataagggaagggtcgacccaatgctctagacccacgtcagcgtgataacacacgtcatcaccaaaccatgtccgggcctcagcgttggagtctctacagtgacccgcatatcgaaaaggacacggcatatataccatatcgggtgcatgtatacgccaataggtgacgcatgcctatgacgacaggcgaaactgtgctacgcacgaccgtaccatgagcctgatccgtaggacccgccgcgtaccgctacaaaggcgtcagcgatggactcactataggagccagagtaatggacgaccgacgatgccatactgggagtacgactgccctcgaccctacggaggaccc

SEQ ID NO: 176950 - DNA, 1135 bp, Zea Mays
gccgacttaagccgattactccattagcagggtatagtggtcaccctaagtcaggtaagcgtgagcatgtcgcaccgacttaagtcatcgccgattaagttgattgctctgttagcagggtatagtggttaccctaagtcaagtaagcgtgagcatgtcgcgccgacttaagtcgattgctctgttagcagggtatagtggtcaccctaagtcaagtaagcgtgagcatgtcgcaccgacttaagtcatcgccgacttaagtcgattgctccgttagcagggtataatggtcacactaagtcaagtaagtgtgagcatgtcgtaccgacttaagtcgattgcttcgttagcagggtatagtggtcaccctaagtcaagtaagcgtgagcatgtcataccgacttaagtcgtccccgacttaagccgattgctccattagcagggtatagtggtcaccctaagtcaaggtggacatgttgatttcgagtacagcccaatcgaagtcagttgtaagtcaagagtctaaatgcctttggagaatgaaaactttattgatgatgaaatcctcagatttacagggtacaatgttccttaaagaattttgaggcctcgctaaggatagaattttctgaggtgttctatgttccacgagttccccacttctgtgccgtccatctgagtgagccggtatgatcccgaccgtgtgacctctgatacaatgaacggtccttcctatagtggtgataacttgtgccgcccttcccccgttagaattcggtgaaggaccaagtctcccactgcaaatgatcggtgtcgcacagctttatcatgatagtgcctcaaggtctgctggtacctggccgactgaattactatgttcaatcgttcttcctccagcacgtcgatatcttctagcctggttgcttctgcttcggctatgctttcgaaagttaacctaggcaccccgaagattaggtcggcgggcagcactgcctctgatccataaaccatgaaaatggggtatttccatgcagagcccgactaggttgagttcttaggctccaaaccatgtatggcagctccctgatccattttcctgcaagcttttcattcttgtcaaatactttctttctga

SEQ ID NO: 176951 - DNA, 803 bp, Zea Mays
tgagagggcgagcacgctcatcatggtagaccttcagagaagcgtcagaagtaacttgtatccaaagtcataaaatatcataccccatcaaaatctccatgtaacgatggccacatgttccctcggccatataaaaggcaagcgaacttagcatgtattcttctcacacaagcacaagagccaggcacttcgccttgtaacacacaaaattagtaaaaaagacttcaacaccatattggatgtaggagttctctctgaaccagtttaaagctcctctcatgctcacgaagagcaaggccatcgagacaatgacgctgcaagccccataccaacctacaaattcacttgtcatgggtccataaccacaatagttagcacgccatgtagaagcctatggtgtgctgcatttttgcttttgatggctccgatcactccctaagaccctttccctctaggtatcaagatcaccttagataccctagacatctttatcatgggggatggcactctaagacttatcgtccccaacacccctcaggcactagcaaaaccgagaaccacacaacacgccttccaaacacgctccaagtgattccgttgaaagagggctagaccatggctcgaggatgtacaagctgcaagcccactaaaggcctgccaaggcaacaagggctacgatagtggctcgactcctgatccgcatgggctctaggaaccccacacttcctaagctctctatgtgtccctcgtgatcaacacaaccacgaaaaccgagggcatggtcgcaggttgacacatagccg

SEQ ID NO: 176952 - DNA, 981 bp, Zea Mays
gctggcactatccatttgagccggatcatctctggcagcaccctcgggggctgggtaaaggctagcaccgtcattgtgggccgagttctctgcagcagccacttctaaggttgagggtccctcggtcacttccatgggagcaggggaatccaaaccaacctcctgaccctcaagactgtgctccaaggtcgatgaggcgcgggacgctacccaggaggaccccaacctggtgtcgggcacatcaacacaaacatccatggcgccaccatctgccggttctgatagcagatcttctggaatcatgtcctcaagagcctgatcaaagttagccagagataattcttgtagtccaatgagggcagacaaggcaggggagggaacaccgctactttccccattagcagtgtaacgacaggtgtttttccgaatcaggggaatttcatcttcttcttccccatcggcaagacggacagtacacccattggggtcagcgtcagacgggctacacacattgggttcagcttcagtaaattcaggcactggcacttccttagcaacaggagcagaaggattggcaccttgatccaagctaaacacctgacgaaggcgtctcttcttctttttctctccctcagcaggaaaagaggcttggtcaactcggcgagaacgttttggacgaacattgacaggcttctgaacgtccaaggctttatcagcttcagggatgggaaccaccaccaatgtttcagtaggagcagcatcagaagaatccccagccaacatatccagcatggcgcttatctctgcatcactaggatccaaaggcacttcaaagtggacctgccgttcatcatcaggaatttctccaagcgaagcaaccaaagcactaacttcttcgacagagggtcacactctaaggcccaaaccgccatcagcagaaggaggatttgacacgaaatgagtaaaggctttggaaggagg

SEQ ID NO: 176953 - DNA, 580 bp, Zea Mays
gccttcgcgcgtcgactgcgctacttccaactcgtacgacgccgccagctacggccgggctcgacacactcgaccctatgaggagatcgcctgtgaaaacatgattgatgagggagggatgatccaaataagctagatcgttagatttgagcaggtaagagaaataagagatttagattgatctcgttccttggtttcaaaggtgggatggttataggagcatttgtttgtttggatgctgtaaagttttgaagtggtgctttatatagtaaaacagatttgtgattattgtatcagctcgatacaacatttatggattagcaaagttcttccttttataagaaaaaaacacttcaccgacatggtcagaccactgtttgcggtcaatggctccctccccctttctcttggaacgggtgtctgtgtaggggtttgcagtctatatatgtgtaaggctgtccgcagcggtgtcccctaaattcccccctaaatgttactatgcagccacgtcagcaagattctctgccctatattcactcatcccacaaccgtcctccctataaattcccctatgtatccc

SEQ ID NO: 176954 - DNA, 390 bp, Zea Mays
agtactaaccaacaacgacgattaaggcgaggcggccacggcaaccagcggaagaactcgacggtgaacgctccggtgatgaattcgtcgcacgccaaccaccgattccgctcacggaggcttctattactcttgatgcacccagacgaagctcctcagccgcactatcacgagccgaagcgtgaatggtggaaacagcgacctcaccacggcaatatccctcatggtacccctcgacgctgttgattatgtccctcaactgcgcaggcggcggcgaatttgggggcagtagatctgggaagacccgcaatggttgttttatacgcggattcggatggattcaacggaatccgagatcaccgcgctgcccgagcccccactccctacgtg

SEQ ID NO: 176955 - DNA, 530 bp, Zea Mays
agcaagtataagactagagaggaaaggtgaagaataaattgcaagagaaaaacaaagaaacctacgtctccactgaggagtccactaaggaccagtttctttcaacccttccctcactcaagtgatcacaaatatcaacttgagttcccttctcttatctcaatcgagagaccgaagtctctacaaggtgtttcacacgttgaaggctcttgctagatttacaatcgatgggtgccctgcaccaagactcaagaacacaacacatattatttcctttagcgctcttagaaggctctatcacaattcacacaagaatggctagctctatgctcaactctcacttttgtgcacttgtgaggctttgatctcattgagagtgttgctctagtttattctatattgaatgagctgtttggtgtgtatttatatccctaatcccctatatagccattagaaccatctctcaaaaatctgcactatttacaggtacaccgaccctctcactgtagcaggtccaatgcacaccggac

SEQ ID NO: 176956 - DNA, 366 bp, Zea Mays
gtcgatatcaccaccctagcatacatctatgggacctcaccggaagttggggatctatgttggttatgaatctgtgtccatcatcaaatatttagagcctagaactggggatctattcacggctcggtacgctgatagcatcttcgatgaaggacatttcccagcattagggggaggattataccttacaataaataatgccgagaaatagaatggagtgctagtagcatccaatcgcttgacccacgcactagagaaaccgaacttgaagttcaacgaataatacacctgcaaaacttagcaaataatctaccaaattcctttactgatataagaggagtgtcgaagtcacatattcctgcggca

SEQ ID NO: 176957 - DNA, 309 bp, Zea Mays
cttacggggtcgcgggtattttagatcatagccacatatctccgatctgacggttaggtttactcgcatgattggtatgcgcctgatccaatcggcgccgttcgtttctaatcggatagccgtgctcggccgataccccttcgtgggtcaatattgctaaagagcccctctgttttcctagattcaacccgcagtccactcgggtgttcccctgagtctggggaattcttacccgagaccccctgcacttcccagaaatctgcgcccagtccagataattaataaaaccaggaaaatcatttagaaaat

SEQ ID NO: 176958 - DNA, 632 bp, Zea Mays
agcctctatgctggtagtcactttcagtttagtaaccttatcttcgctaatcgtcagtgttgcaggcgaggccatctttgcaggcctcagaacagccttcaacacgttagccatcctttttcccttttgaggggtccctgttgtggtagacattagcttcggcttctcatgcgcaccacttgacatcttcgcctccatgtcaacaacggatacctcgtcccgaattggagtttcagttactcccttcttttcgatttcttccattctctgtattcaaaattcaaaataaaataagcatattgataaatagttaaaagtcaatcagagtaaaaaatcaaagttcgttactttcggggacataaccttcatttcacccgactcgacaacctttgtcttgcccgactcggtagccttcgtctcatttgacttggtagccgagaatacaggtagtattgtgccctttcggtgtaatatgattttggtcgactggccagaattttcactcttttctgcttcatgacattggaagaggtttttagagcactcttcctctttcgacctttccttcgggcaggaaagcagtaatcaggataaataaaaccaataacatcaaatacactattcaaccttct

SEQ ID NO: 176959 - DNA, 433 bp, Zea Mays
tggttagagggaggactgggactttctggcgtctagtaaagtggagtcgagctgagaagcttcaggttgtgaagaggttcaaagtatctgcggtggagtccgtagctaccttatcactagttgcgttgcctgcccaagctcgatgccttgttgtgcctgtgaacctgcgtggtgcctgggatggaagccacatgctcaaacccaagcagcttgtggcacctttggggtcattccttatcgtggaaaaatcgagcttggccagcgcctgtttcttatcttgttgcttgcgggcatagtgtagtgaagctctccactaccccactcgctagtcctgttcaccgtgtgcctctggggttcacatcttcacgttggagttaatcccagccacgccgtctattttgcttagtcccctcacatcgtcgtccctatgtcc

SEQ ID NO: 176960 - DNA, 490 bp, Zea Mays
ccctcatcatcgaagacggatgtagagcagtctgagtcccattccttgccaatgtgtgcctcgccctttgtcctcctgtagaatttcttgttctccttcttccctttcttatcttgtacctgatgattctcattattgggacattgagcaataaaatgaccagtcttaccatagaagcatgaatgctttccccttaatttgttcttgttgggctagtccttatgtcccttcaatgtagtcttgaagcgctttattacaagcgacatttctttcggcagcctctacttgtgccaccttgtttgggagcgtatccgtgttggttgttgccttgagtgcaacgggctatggctcataaagaggaagaagttcgttggtgatgtcttcaatgtaccttgcttctttcaccatcatgtgtccgcttacaaacttaccaaggatttcctcgggcgacattttggtgtgtctagggttttcacgaataaggttaaca

SEQ ID NO: 176961 - DNA, 675 bp, Zea Mays
ccttagaacaggcatatacctaaaacgcaaaaataaatgtttgacgataacaataacacatttcagcaggacaaaataaatgtttgaccttaccaataccgtaaagttttatgttaggggatcctagcgtgtcagtatgtcacgttagcatggatcaactagacacattttatcatttcatggttcacactttgcgcgccctgcaatataaacctgctctgcgaccatggccaaacattccatagatggattatgtgataattgttagagatctaattgcttttctgtaacccaaattcctgcacttcttgtgatgtcaggattttgttggagcaagccattggtaaaaggaaaagcatctagcacgtgatttgcttctgtacagaaatctatagaaggaatgacgaagagaattaacctgtaagatctggggaaaattaaaaagacatctttagacacaactatttagacagcaatagcaataacccttcctaggaacaccttcaaactgttgacaaaaaggtcagttcgataagggacacatgagacattcactctattcgacatatatcaaatatacctagtgtataaaaaacaggaacatatgcttaaggcatttcaaattttaacaggattcatccaacaagaccctcgataatccaatctcaatatata

SEQ ID NO: 176962 - DNA, 346 bp, Zea Mays
ctcgagcgagtcttgactgcatctctcacccggggttggcttcgtgcgagttgtgattgcgtatcctgcctaggttagcctcggggtgagttgtgactgtgtctcccgcccgcggttggcctcgagtgggccattactgtgtctcccgctcgaggttggcattgggcaagtcgtgactgcgtctcttgctcgaggttggtctcaggcaagtcgtgacagtgtctcttgctcgaggttggccttgggtcgtctgggttggcctcgtgtgattcgtgactgcgtctctcgccctaggttgctctcggacgagtggcgactgggtctcccgcccgaggttggcctcgag

SEQ ID NO: 176963 - DNA, 485 bp, Zea Mays
gcttaatatcggccgcccgatcgctgatcgaccgtccggatctgaaacgaggcgcccagattaaatcgcccaaagtggcgaagcggtacactgcgcaggccactggatcaggaatgcacggtcacggtttaatggagtcagatctaatccgagtcgtgggatcacagatctatggttatgattcaatcatgcgaatgggtacataaacatctaatctcagcccttcatcaacggatcgacgacggtcgacccttcttcctcccaggcagccgagtctggcggcgcgcgctagccacggcggagtcgtcgccggtggaaaccaatccagggcaccaacgcccaaaactctaattcgttaggttctacactacggcaaggtccgggtgagtaccactcagggttttattaccaaagatggacgacagtggaggtcaatcgtggcgcacagcggtgcccaaatccgtcgagcaattcacacgattaga

SEQ ID NO: 176964 - DNA, 1720 bp, Zea Mays
gaaaagtttcttctgaactgcgcatctatcctcgtgggatagtagcctctatttatatcagagttacaggaatggattgggatcaattgatccggtttacatggatcaagcgtggactgagctgctagacgcacggagccagtcaacagctaccagtaaactagcgaacctctaacagaatacatacacatactcttaacagtccccctcaatcacaacagagggtgcctatgttgaggttgtcacagttcttgatgaatggtgctcttgacagtggcttcgtcagaacatctgcaagttgatctttggatgatattattcggacttccatggctttgcgtgccacttgctctcggacaaagtggaaatccacttccatgtgcttggttcttccgtgaaacactggattactggttaagtaagttgccccaatgttatcgcaccataaccttggagccttgtgcagaaacactcccaattctttcatcaatgactgtatccagattagttcagcagtaacattggcaatggctttgtactccgcttcagtgcttgagcgtgagacagtcacctgcttccttgagctccaggacactagattgcctccgaggaatactgcaaagccactagttgatcgtcgatcatcggggcagccgacccaatcagcatccgagaagcctgaaatcattgttgatgttgatctctgaatctgaaggccatggtccagtgtccccttgatataccgtagaattcggttcactgctgaccaatgtgcatcagttggattctgaatgaactgacatactttgttcactgcaaatgacagatcaggtcttgtcaaggttaggtattgcaatcccccaaccacacttctatatctgaattgttcttcttcattgagtattgttccctgatgcttggacaatttttcagtggctgacattggagttgagataggcttgcaattgtccatctttgcccttttcagtaaatcaagagcatacctcctttgagacaataagattccagtcttcatgttcttgacttcaatacctagaaaatactcaagattgcctaaatctttaactgcaaactcatttgtcaacttttggatcagtttctcagtagcagagtccgatgagctgacaattatgatgtcatccacatatattagcatgtacattgtaatatcagcttgcctgaacacaaatagggaggtgtctgcaatagatggactgaacccaagctcaattagtttccctgtcagcctagagtgccaggctcttggggcctgctttagaccatagagggctttctgcagcttgcaaatataattatctggcttagttgagtcagtgtacccaggtggttgcctcatgtagacttcctcctggagtactccatgtaagaaggcattttgaatgtcaatttgcctcatattccaaccttgactcactgctagagataggacaattcgaatggtggctggtttgattactgggcaaaatgtatcaaggtaatcaatgccatacctttgtttaaaccctttagccaccaacctggccttaagcctttcaactgcaccatcaggcttcttcttcactttaaatacccatttgctatcaatgatattgattcccttcctgggtggaacaagtgtccaggtttgattctttaacaatgctgaatattcagtgtccattgcctccttccatcctgg

SEQ ID NO: 176965 - DNA, 1176 bp, Zea Mays
ccgcgttcgagagacttgaattacactaacgctttactatttgttcgagttaagacaatcaatttagaaccaacaatttgacttgcaaattttattcaagtcattagtgcactaaaattactacaatcaattaacaacgcattcaccacaatcatcaatttcggcatacatgtatatcaaagcgcttttcacccactagttcgcattttagtttagacaccacatgagcactacagatttttacccgcgatcataaccatgcgcatttagactacaagaagtaaatcactgtgactacgatcttacccaaacacatctattcattcggctaactagcacaacaacataggccgctatacatcctacacgtcggcttgcctcttattatcgtaatccgagacaacacatatataaggaacactaacaaaatcgactcctatttaacatgagctggctaatcacagtagaagacttagcgaaccattttagacatcgcaactcaaaacatgggtgggagcaggttacttaatgtttcttaaccttttctcaacttaaactggacaacacacaagtcacttaaaacaccatatttaaggggtctaacatagaggcatcaacacctggcctaaaactccgtaagacttacactggctactaaaggacctacaacacccatgtgcatatgttatcggactgttcttcaattttagcaaggattgactcatgaacgctactcgcctccaataattattaggctgcgataacgctcatataagacctctaatcgatcaacaagacatttatttatcccaagggaatggaatgcaataatttataaagctaagcattgatctgtcatacaacaaaaatcatgacaacaccgacagatactatccactaaccgttgaaaaattaaacttacttctcgcttgccactacatcactcctcaatcacacaaccatcacgagcatccttcacacgattatataatagcaacctaaacgtcgtgttacacaatacatacatctttcctcaccgcgagtataaccatattacggcatatacccgcgcacctcaaataaatatctcatgccaccactactatatcacaccacggcacacacacacctacgtgcactaattaaatcctcgcatcccctgtatttccaatttac

SEQ ID NO: 176966 - DNA, 683 bp, Zea Mays
gtaacatagacctttagctttccgataagccatcagagaggccaacttgtcatcagtggagacaaccttgatagcaccaacagtagttgagtcatctggcttagacatttgaggagccttaggaggtagaggcaatggcaatggcgacttggacaaatttttggaggagtaggagacatcaaatttcctgtagtcgcgcttcttgtcggcaacttcctcctgcaattgggccaaaaccacagcagtatccacatcccttggtctttgaacaagaactactgatttaatatcatctctaaggccatcaacaaatctcattgtataatataatggatcagcatggggactataagcatgtaactaatctatgagctgtgaaaaacgttccacataatcagtaacagtggtagtttgcttgatatgaaacaattgtataatgaaaactgcatgctggtctttgccaaaacggtcaactaccatatgaccaaactctatccaagagactcgggcaagttggtattccactgactgaagccaacgagctgcagctcctgtgaagtgcatcgtagcaattttgatccatacacgaggatcaactgaatacatggtgaaatagtcgtgacaacgcagttgccaaagtttgggattatcaccatcaaaccccggaaatggaaccttaggaa

SEQ ID NO: 176967 - DNA, 1847 bp, Zea Mays
gtcagggtcaaggatcggacattggtggcgctggtggacacaggctctacccacacattcatccgggaagctgtggccacccagctgggcctccaagtcacaccaagtccgggtctctctgtcaaggtagcaaacggggacaacatcaccggcagcggaatatattccaagctccaaattgctattgccgaggagaccttccacgtcacctgctacggtcttcctctggccggcttcaacattgtcctgggggtccagtggcttcggtcattgggacccatcttgtggaacttcaatgccttatccatggagttctggcgcctaggacgcaaggtgcgttgggtgggactgggtgcgccacatactcagtgcgcagccctgtacaaaccccgcgaactactacatgcattactgtagtcctacaccgacatcttcactgaaccaagtggccttccgccacctcgttgtcacgaccatcacatcaggttgctgccagggacgccactagttgcagttcgaccctacagatacccccaattgttgaaaggcgagatcgagcgccagtgtgaagacatgttgcagcaaggcatcattcgggagtgcacatcggcctactcttccgcagcgttacttgtgaagaaagttgatgaatcctggcatttctgcattgactatcgggccctcaataccaaaatagtcaaggacaagtttcccatcctggtggtcaacgaactcttggatgagttacacggtgcctgtttcttcacaaagttggacctccacagtggatatcaccaagtatgcatgcaccagatgatattgaaaagacagtgttctgcactcatcgaggccacttcgagtttctagtcatgcccttcggcctcaccaacgcatcgtccacattttaggccctcatgaatgatgtcctgaaacccttcatccggaagtttgtcctggtcttcttcgatgatattttggtattcagctcttcctgggtagcccacttacataatgccagggaagtatttacagcactccgagcaaacaagttatcagtcaaacagtccaagtgttcgtttggaaaaacattagtcgcttacttgggccatgttatctcatcttagggcatttccatggattcagataaggtgacagcagtagaagtttggccgcgcccctcggtctatttgggtgcttcgaggtttcttaggtctcactggctattaccgcaagtttatagcggattatgggaccatagctgcacccctcatggctcttctcaagcgtgaggcattccgttggtctgaaagggcagaggaggcatttcttcaactcaagcaagccattatatcaacaccactgttacagatgtcggatttttctaaacagtttatagtggactgtgatgcattagggactaattttggagtagtccttcatcaaggagatggggccattgcatatttcagccctattgtagcaccacatcatcagaaattaccagtgtatgagcgggaattgattggtttagtcaaagcagtgaggaattggagaccatatttatggggaagaacttttctggtacggccagatcactatagccttaaattcctcctagatcaacgaatgtctacaataccacaacatacatgggtcagcatattgtttggatatgatctgttagtggagtataggccaggcaaattgaatagtgtagcagatgccttgtctcgacgcgacgaagacaccgcagaaattaacagtatctcggcaccacattttcagttgtttgacacccttcgcaatgaagctgccaccaacccacaggtcttaagcttgcgggctgc

SEQ ID NO: 176968 - DNA, 756 bp, Zea Mays
gcaaataacagagagacacaggggttattacgcaaaaattcatgagactcaggattcccacagacaggactgcgggttgatttcgacataaggcagggtctctttagctaaaagtcacggcgaaggggtatcgatagacttcggtcgtccgatcaaatatcgaaggccaggattagatcttggcacactgaaccggtacacaaccctgaccaccggatccgatttgaacgacacagattttattatgattccacccatcccagtcgctcgttcaacgatctgtggtcacgatccgatcacatgaaaaggtacatacagattagatcaggactgatgcccaaggatccaacggccagggagcatcgtctacccatttcttcctccctacggctattctatggtggcgcagacccccagcggcggcggcgccatggccatgaccgagcgaggaggtcctcccagtggacaccttcaaatcgaaacaaatctacgcgttgttgagactacggcgagcaggtctagggcacacttacccgtagttaggacgtcgaggtaccccgaccatgatgagatgcggatctagggcgaggtaaaacttcgatgagaaattccaatccacccacggcgtcacgagcttcgattcgacttcgattatcatcccctcatgctggcgacgctacttgactggaatcccgaccccgaacgccattccccattggattcgccctaggcggctattacctcactgcatatggc

SEQ ID NO: 176969 - DNA, 509 bp, Zea Mays
cccttggctggacaccactcagcctcgtactttaatgcttctgctgattggacttatgctttggtaaccgcatttggacttcctcccagtttagtcgatcttccctttttgtcacagtatattcatcacgtatattttgcaggtatcgccccttcagaaaatcttgaagaatccgagcggtacacccaatgggtgtgcccaaagggtgtctgccccgcgaaaggtgtttattgcgttgtcctaaagtagtaacttgacatgacagagaggtgtaatcatttgcctgagcagttgacttgaatacaactagtgtcgtgttacgcaaaacggcgccagacgcctgactaattttcaggcggtttgaattgcttattgaattcttgtgactgttcggtgagcggagtaggaagtggacggtcgcccttcggcctctttaaatagcccgcctgccccaaacgctttcttcactcactcttgatcacttgccctctttttcctcctcacttctc

SEQ ID NO: 176970 - DNA, 603 bp, Zea Mays
tgacgcatcaggcagtggtctcggctgcgtattaatgcaagagggccgagtaattgcgtatgcttcaaggcagttgcgccggcatgaggagcattatcccactcatgatctggagctagctgcagtggttcatgccctgaagatttggcgtcattatctgctgggtaatatctgtcacatttatacagatcataatagtttgaagtatatttttacccaatcagagctcaatatgagacaaaggagatggctcgagctaatcaaggattatgaactggaaatccattatcacccgggcaaagcaaatgtagtggcagatgcactcagtcgcaaagcctcttgccattgtttaactaggaggacttctaacattaaattgtgccaggagatggaaaacctgaacctaggaatgattcagcatgggacttcaaatcacatgaagctggagtcagtcatcttacaaaggataattgacgcacagaaaaatgatgagggtatgaaacatatacgtgagaagataagggctggaaaagccaattgcttccgagaagacgatcaaggtgttgtatggttcaataaccgcatagtggtgccgaagaatga

SEQ ID NO: 176971 - DNA, 1524 bp, Zea Mays
tgaaaatggtaaattcctggacgtagcttttttcagcctgatcggctatcattttttgcatcgaataaaaataccaaagccatatagctgtagcacacgcacaaaaatagccgtatagctgtactgctgtagcacacgcacaaaaattccaaagtccatagataagctaatactattttttgcatcgaataaaaatcaccatttacaagtgcattgacggtgtatattcaattattcaagtatatggaccattctctactagttttagaagggaacgaacaacgaagtaggcaagcaagcaagcaggaagcagaagtttgagaaggactcacacgtcgtcttggtcgtcggttgttgctggccgtgccttatccgtgtcgccgcttggtcgcctaggatgcgtgggggtggtgctgtggcagccgcttgccagccatagcttgcagttggcggcggtgcgtcgccagacttcgctatcgctcccgtgttagctagggttgaccggttgagacttgaggagagatgatcttggggctgccgggctgggctgtaccgctgtagcctgtgggcaagcaagactcattaaggccagacgcccagacccgagggagtcagagttgggctgggatcgggaccgggaccgggtccgtgagaattgatagctaaggctgtcaggcacccagtgaccccgtaagtatttcgggtattcgggagaatcgggtaccgcgatctggtacccaaaaatatccgaaatttgatcgggatttcacattacatacccaaaaattgtatttgggcttcgggtttcgggattttcggtttcggtctcggtttttctcggtttcggtcttcggtttcagtttttatgcccggggctagatagagcccgcacgctgaggcctgtcgcctgaggggaatggaagaatgaagttaggcttgcctgtccggtaagaggagaaaggtaggtggtgggcacgtcaagattcgcgtgtgccgtcggatctttgttgcgtggcccatgaggataatttggcactcaaaattttcatttgttctgatacatcttgaaatcgaagtcgacatatagacacagtgttactctaatttattgacgaggtatagctaaaaaaatcgacgtaaccttctcgtcttttcttttcccttgtcatgtgcttcttttgatggagcggagcggcagtaaccgttcctgcgaggtatgtccagcatcgttttggagtcggactttggtttcgccgtcgtcagaacatcttttgcttcatttgcaaatttctggtactagctttgaggaacaaataagctaagctaccaactttgaggaacggaggttggttcagctttctacgttgtagttgcactttacaattgtaagtaatcccgacgctttccttactgtttttttagtactcaatgtcgccattcgtcaaggatgaatccattcagtgtactcaacagctcccacagcatttggctggtcatcctcaccgtctacagcctgcctccgtg

SEQ ID NO: 176972 - DNA, 466 bp, Zea Mays
cgtgaagttgtcaggcctcgctagggagaatcatcgaccgaacctcggggaattccttgctgtggccgaagaacctttcggtatgaagcacctcggccgactcgcaattactatggcctcatgtaggatcgtttaatttgggtttggcgcagtggcgcgccatattggccgtcgccggcggcgctggtttggtagtaacactgggctccatcgggggagagcggtcgcgggaggaagacgtcgtccgtgccgttagatccaattcggacgacgtagggttgaacagcgggatcggtcaatgtgggccgtggatcactgatctaactgcctaggatgcgtactggttcggggtgatgttagtttgatctgcgtcgtccgtttctaatccgacagcagggagacatccatacccctttgcggcgcatttttcttaaagagcccctctggaattagaaaatgaaccccg

SEQ ID NO: 176973 - DNA, 699 bp, Zea Mays
tgtgtggattctggtcccagcctcgtcctttttatctccgtgtataaaaccggacaccaccgccatggccatcaatggtgagaagtcgcctccgcggttgggatcaagctgggcggaaccacacccctagtgtgggagattgggagcatcgcggaccacgggtggtaggcgcacgcttacatcgggcggggataaatcgaagccctatgaattgctcgctggagttgagttattgctctcggaccgccatatgtcgtggtcgggtcttcagtcgcctccaccaccggtacgaccgggtccctactattcgcctctttctccacttcgcgtagagtctatccatggtaggaccgtgcccctgtgtgcttgagaaaggtcaagatggtcgtttggctggggcaccagtggtgctctgctgctaggtgtccgcgctgccgtgtttagggttggtggggaagaaatccaaggaccgttggatccctgatgtgggattgtggtgtgaagaggtgatcaaccgttagattggctatggacgctcctgatctgacggaggatacccctttcggctatttgaatcatgaccgtagattgcttgatcgacgaccattagcacgtaccggttcggttaggtttgaatctaatctgagctgtcaaatggagatccaatgacgcagatcttctcataccccttcgccgaag

SEQ ID NO: 176974 - DNA, 840 bp, Zea Mays
aactttttcaaactgtgtggggatggcgggtttattagtaagaagtgcaggggcttaaatgcaatagagtcggccgaagaggtattctcgtgccctgaccgttagatcgccatcctacgatctggattagatctgatccccacccgaaccggtatggattataacccaccagatcgagatctgatggctacaacttgatggatcacgatccgtttcgagccgtaggatgccgatccgacggcacagatccaaacaccccaagcggtatgccagaactaatctgggtcacccattaatggatccacgacccgcgctcatctacggtcacggtgtcatctcttcattccttccccagtgacggcgttaggcatcccacagttgcgagcacgccggcgaacggcggcttaggccttcgacacgccacccgaacgctatgttgtgcaaaagttagcagagattgcggcgaacacaatggggggcagtcttaccagtggttgtgccgcgcaatcccgaggccgcgaccgcgcgcggcaacgcgatggtgatttaactccgacgaggaagttcgttgggtttgtactagctaccgtgtgaggccacgactaagcgttcgccaagggtctggcttttatacccgaaagaagcctgcatggacgcacggttgggatagaatcgaaggatttcttccccgacatcatcgtgatctgttggtaacaaaccccacataagtttgagatggttctggtgcgcgggcccatgcacgcaccggtgtaccgaaacagggtcacaagaggcggctagggtcaaggcggtcaagatcgagcctagatggcatccggt

SEQ ID NO: 176975 - DNA, 570 bp, Zea Mays
cccccaaattcaggcactacggccggttcaatatatcgcggtcggtgggtcagaaccttaacctttttgccctttggcacagctgtggtggccgaagcggcagtcttcctcttttttccttgccttcatagagggttgtgataatcaaggtatacaaagccaattgcataaaataccatgttcaatcttttcttgccccgacccccgaaggctgcgaacaaggcatcatcttcagccttggaatatgccccaagcagctcgtcactggtagcttcaatacatttcaaccagtcatcatttggttcatcaaacttctctttaaacctaaaggtatatttcaatcgaaccaggccaccttcaatggattgggcagtagtttcctttggcatatcccagctctccacaagtggccacaccctgaaggatatgtgctcttgaattaaatccctcgtgccaatgaaggcgcaaacagtactaaaggccttctggcatgcttcaacatcgctatcaatattcacctttggccttcggagcccaaagcgagaccagatggggcgctggataatttct

SEQ ID NO: 176976 - DNA, 894 bp, Zea Mays
gtagactaattttccatgctcatcaacaacaaaatcatagaagaaggcagaatttgcctctttcttcctctccatttgtgccacaaataattgagcatctacatcctttattttctccctaagtcctcgataatagttctggagatctcgcttcatgcatccaatattatcaaagtcgtcgcttacttgcaaaagtctatatgcttgtgacgtaccaatacttgctttgtgacacgtgaataaggtagtcttggtcctttcacttatagttcgattcgatcgcagaaaaaaaattatcaggcgagactagaccatggttatgctcctcaacaaatgaagcgatatagtacctattgtcctgacccaacttcacatatacacgtgcattgcatccacatcttgtttcaaagtgcttcttttgtttgtttgattccacacgtctccttgtgaagccttcccttgaacacacaaacctcttatggtcaaccacatcgtttttcttgccttgacctcctatccggaccgaaaacccacatttatgtgcatatgtcttataaaatccttccacctcatcaagattaccgaatgacattccaatggcaggcttcaatttatcctcgcaatcaggtacaaacgacgactacaatgagaaaatcagtgagtgcacaatcatgactttactattttctcacaatcatatacaaaattctcaccgatgtataatgaaattgatcctttttgggtgtatggaatacatctccatgatgtgtggcatcattgataggagcattgttgaccataacagtctggcgtaagggggaacgtcttgatgagcatcaacttgaggggcatcatcttcaacgggaacaagaacatgaatagacgaggggcctt

SEQ ID NO: 176977 - DNA, 549 bp, Zea Mays
tggcaactacacgaagaaagaggactagctaatgactactgccttcagtacccaaccaaaatgaaggctggaccgggtaatggatgcattgaacttcgaatacctagattatgaaaagcttgacgaaggggccagggggtgaaaagaaaaagggttgtcagcatcctaagtaggcaagctgcatggtccataaaaaaagatgaaaatgccctgaagaaagcaaaaacagtgccagagccgaaggcaacaatttctaagaagcaaaagcttgaccggataccttctactgaactcaaggtagacaaagcaacacagaaaccccctccgtcgccgtctgctgccaaagtggtcaaatatttgaaggtaatgactgaatttccgccattcaagctgctaagtcctctaggattgaactgacaaaacttttacagaggaaggaaacaccttcgacaacagaggagaagattgaagggcaaaagaaacggcgaattgtgaatgtaatgcaagcaattgagcaaacgccgccttcagcttcggcgatgaaagcag

SEQ ID NO: 176978 - DNA, 550 bp, Zea Mays
cgccccccacgtccagtacactaccagctgaagctcgaccagcaggacctacattctgggcgacaccaatcaacacatttctctcgcctgcatcaatccatcctctaatcggcactcttgttgtttgcttattactgcaacctggttgtttggcccacgtgtgatcctctcccctatagtggccatccatcacaacactgggaccgactatgcgctgattcgcaatcattttagtcctacgttccttctcccagctagcagaattactcagttgtcgtgtatccactacatcaagcctcatacgcttgcttctcatctcttgaccaccaccactttgtggcctgctcacctgtaatttgtttgtcccaacagcagctacgtgcccatgtcctatgtttggcttggctgtcacttcttcaccgttctttatgtaattttttgtgacagccacctgaccattctgctttgccacctctgcctgggaaccttctgcagcatttaatatgtcgcactccactgttcccactatgatttttgagcagcttttgcc

SEQ ID NO: 176979 - DNA, 812 bp, Zea Mays
cgggaactgtgggtgtctaaagtcacctcgcgcgtggcaaattgctcaccggagcacatctacaccgcggatccgcccgcttcatgaaccggccacgctacgacatagaccccggtgagaaaccattacactgccgcctgtgtctccttgaatgcataggatcgagaatcatgactcgcatgttcttttagccaagatattgggtcgccgaagttaccgtgctaccattgggccactgatcgcgtggtcagggcgcttcggtgccctaactccagttaatacggttccggttgaattcgctaggatctcagcatcatgtatggtagtttagtgtgcggagtcgtcaaacccctaactccggcaatgtcctccgctgcgggtctgcgcgtgccgccacgtttctccatcagaggtaggggagggacctcggtcgttgatctgatgggcgacgaccaagatttgattttcgaggaatgtgtttcggtcgttagatgggttctgagcggtgaggatcgaatagatggtaacagtccgcgggggactgttttgggccgtccgatctgatcggagggtgggtgttgaagcacgcctttattaaaataaccgtagatcgtggatcgggtggataacattgcgtaccatttcgttttaaaaggaatctaatcctggccacggaatgttgattggacggctgttgtcgcccgataccccttcggcccgaccttttgctaaagagcccctctattcccaattaatcaacccgcggtccagcacgtgttgaggagagtttaatctgagtcctgggaattttc

SEQ ID NO: 176980 - DNA, 701 bp, Zea Mays
ggacgaccaagtccccactgagcaaatctgcgaggcggagcgactgaccaagtccccactgagcaagcctacgaggcggagcgatcgaccaagtcctcaccgagcaactcggcggggtggaggtcctagtctagtgctactaacccacgtcagctatgacatgacacatcatcaccaagttacgttcgaacatacgtgcagcatacctaaagagtgtcgggaggtcaccgtcaacatgactgcatgaccctatgaaaggtctcaggtgtatccccactaccccgtgggttcagtcaacctcagccgttggaggacctcaacacctgagtctctatagtgacccatatatccggaaagacgagacagtatgccataccgagtgtatgccaatgcacgatggcaggtaacacaaggctagtgacgactggcgaagccgcccatgcacgaccacaccataagactgacctgtgggacccgccatgcactactacgaatagatcaacaacagattcactacagggacctgtatgatggacgagcaaggcggtacaccataccgggagtacaacaacgcacaaccctacagacaacctcagggataccacgtcaaccctggggcaacagacctctcactctagtagaaaacatgtcatctctctaaggttctttccttgagctatataagggaaaaccctccttca

SEQ ID NO: 176981 - DNA, 681 bp, Zea Mays
gggcagtgggacgcaaaggaagggagaggctaggagtgcggggtcactagggagagggagggatgagaggtgatctaaataacattgctcattaaatttgagtaggagagataggattatctagcgatctgaatcgttggttttgatggcatgttaagtctgggtgaaatttgtttgttggatttagtgaagggtatgagtataggggtgatttggttaggtgagttttgtaaagttaaaactgataaattatagtgatgaattatagtgttatagataattatctttaaatattaggtacacaaaaatcatataggtccaatcaatcatcattaatgttacctaacttaaattgacgacaaaacatatgttaatcataataatttagtgttatcattgattaataatctagtgttatcattaatcattaaaactatatactttttgccattaagtgtttgactacatttgcgaaagacgttagactaattttggttcagaatatctaagactcctggtggaatattttttgcatgcattgaatgcattggtagaatagtttggtcgcttggaaagtccaatatattttctcaatccctcaaaatcaccgctcaatcgactactgagggctaatttgacaacttttttaagggattttcatttccgggaaattagtttatt

SEQ ID NO: 176982 - DNA, 590 bp, Zea Mays
caggggctctttagtgaattggccatcgcgaaggggtatgctcaaatcctagccgtccgatcagaaacaactggccccgattagatctggcgcatgccaaacctgtgagtaatccaaaccgtctgatcaaagatttgtggcccggaataaatcttaccatggtcccttcgcgtccatccgatcgggatcgagtggcgtagggacatctgacagaaacgctactggtgttacgatcctaaccgtcggtcgctcatcccacagccaaaagcccttcttcctctacctactgagctgaccacggcggcgctgctcccccgcggcagagggcacgccggtgaaccccccattggcgattccacacacccaactccgattatccaggtgttaagtgaaggaaatgaccatgcgaatacgaaggaagggttccttaccggggtcattcagtgtcaagagccagccacggcaagaagcggacccacgacgacggcgtgatcccgacgacaaattcccgtggccaccctgggcttctcggtccgatacaccgtagcacagttcaccagcaccaggcgaaactccacggctaacagaag

SEQ ID NO: 176983 - DNA, 1252 bp, Zea Mays
ccctgccactacacaccaagtcaaattattttgctgcattgaactaaaaactagtgtgttgttcttggccgaagtgttcatgcacaatctcgatagtgcgttcttctcagccaaagtgccaaatcgagtttggcgtcactcgaggcaaaggaacataccctgccactacacaccaagtcaaattattttgctacgttgaactgaagactagtgtgttcttcttggccgaagtgttcacgcacaatctcgatagtgcgttcttcttggccgaagtgttcatgcaaaatctcgatagtgcgttcttctcggccaaagtgccaaaccgagtttggcgtcactcgaggcaaaggacctaccctgctactacacaccaagttaaattattttgctgcgttgaactaaagactagtgcgttcttcttggccgaagtgttcatgcacaatctcgatagttcgttcttctcggccaaagtgccaaaccgagtttggcatcactcgaggcaaaggaacctaccctgccactacacaccaagtcaaattattttgctgcgttaaactgaagactagtgcgttcttcttagccgaagtgttcacgcacaatctcgatagtgtgttcttcttggccgaagtgttcatgcaaaatcccgatagtgcgttcttctcggccaaagtgtcaaaccgagtttggcgtcactcgaggcaaaggacctaccctaccactacacaccaagttaaattattttgctgcgttgaactgaagactagtgcgttcttcttggccgaagtgttcatgcacaatctcgatagtgcgttcttctcggccaaagtgccaaaccgaatttggcgtcactcgaggcaaaggaacctaccctgccactacacaccaagtcaaattattttgctgtgttgaactgaagactagtgcattcttcttggtcgaaatgttcatgcacaacctcaatagtgcgttcttcttggccgaagtgttcatgcacaatctcgatagtgcgttcttcttggccaaagtgccaaaccgagtttggcgtcactcgaggcaaaggacctaccctgccactacacaccaagttaaattattttgctgcgttgaactgaagactagtgcgttcttcttggccgaagtgttcatgcacaatctcgatagtgcgttcttctcggccaaagtgccaaactgagttcggcgtcactcgaggcaaaggaacctaccctgccactacacaccaagtcaaattatt

SEQ ID NO: 176984 - DNA, 477 bp, Zea Mays
ctagagatcgagctgaaccagctgagccatcaagcagaaatcatccgccgtcgcaaatcgagaggaagaattgccgccaccatcgatccgtacctgcgggctcgcagtgcacctgggttgcggcccccgggagtatccttcgcatggggactcttgccataactttagcatgcgagaaacacccgcggcgccacctcaattcctcaccgaagttatgatgccgccgcggagccatctgtaccgtgggcggggtacgtaggcatcctatatcaaggtaaaagtcccctggcgctttcgcttcgtactccatgtgatgttgtagcattcggatttgagcttggggccctggcgcacgatgtggacaacgccggcgatggcctccgccgtggccctgtataacgccgccgcttggggatagtgcggtgtgggtgaggtgagggtagagcgacagccgctgatcgcgaatccagtggccag

SEQ ID NO: 176985 - DNA, 579 bp, Zea Mays
tccacgataacccaaatagaatcatggtgtctggaggtattgggtaatcccactataaagtccatgcaaatgtcctcccatttccaagatggtatgggaaggggttgcagagggcctgctgccttcaggtgactagcctttatcctctgacaagtatcacactcggagatgtatttggcaatttcccttttcattctagtccaccaatataaagatctgagatcatgatacatcttgttgctaccagggtgcatggagaatttggaaaggtgagcttcgtccagtatcttctttctgagctcagggtccttaggaacaaccaatcgatctccaaaccatagaattcccttactgtcctgtcggaaacatttgtatttttctgccttttgcttgatcatatccttgataacctgaacacccttatcctcaacttgagcccttatgatctgctcctgcaacgtgggttctaccgagatataacttaggtcacctgaagaaacaacttccaggtttaatctgcacaactcatcacacagggtggtcattcccacatccatgctcatacaattacactgggcc

SEQ ID NO: 176986 - DNA, 664 bp, Zea Mays
atctttttggtggaaaaaggtgccttacaaccttaacctatgtttggaaagttctctcgtgcaatttggctaaatttcccatggtctttattttattttgagaaatgatgtggcataatgatgtgtgatgttttacttgagtggacataaacaccatctcggtataccttgaataaagggattataggaaacctggtatcacaaaaggtcattagctagcccaataacgtcttcatcaactagttgtactcgaataccctctcgtgtgattacaatgccctcaatatcatagaaacgtcatttgaggtttaaaaggcaatctattgttttgaattctttatattccaactttttagcaaatgtatggtggaaaaaaattgccttacaaccttaacctatgtatggacagttcactcacgcaatttggctaaattttccatggtctttattttattttattttgagaaatgatgtggcataatgatgtgcggtgttttacttgagtggacataaacaccatctaggtatgccttgaatagagaggattataggaaacctggtatcacaaaaggtcattatctagcccaacaatgtcttcatccactagttgtactctaataccctctcgtccgaatacaatgcccttgatatcagggaaacatca

SEQ ID NO: 176987 - DNA, 1056 bp, Zea Mays
aaatactgaaaagggtattcacccactttgcagccaaacaagttagagtaaagagactcacattattttgcttgaccatagcagaaaatctcacttttgtggaagttaattcttagactagataattcctcaaacttttacttctctctccctccctctctcgcgtatgctcttaaagaggagaggtactcgaccgatcccatacagaacaacagagggaaggggtttgaaagacacaccacgctagaaaccagaaagcaagtttttttcatatattattgttattgccactgggacagtgtcgaggcatagcacgccgcagttagcatgcaatgcggacaaagtcatgagtagacaccctaagaatgatgtgtctagctacatcgtcgtagccttccagcaggtgctccaaccttcctccgagagggatgaagggggaccaatgagatcctgaaggttgaagcccaagcagacctccgtcgtaagcaacgccaccgtagccccacgatgaacgctgaagtcaacaatgtctcgaacgtgacaaagtgtgttatccaggtgctcgatcaaagagggaccacgtgcccccaatgtaatcaagaagttggcccaagcgatggcacaacatctcgagctctgcttccaaggctgccatgagaaataggcaagataagaaaagggaacaaaggaagaagaaaccacaagaatcaaatgacttatcggtgacacaactatcgtcctcggcaagatgcacccatagcagctcggcttcaacctcgtcgatctcccacgccacgtgaaggcattgcagcccccccccccccccccccgtgagcacccgaggtggcgaaggaagagatgtgcagctcgatcgagatgcagtctccaggtcgactgtgactacactgctacgaggagaggatagagcaaaatcaaaggaagagaggaggttggcaagcctaaggagggaagcctgcctcggcttgtgaccgacggagcgcgacatctagaaaagctcaaagttcgaccactggctcggttggagacgagttcgaa

SEQ ID NO: 176988 - DNA, 1026 bp, Zea Mays
aggtaagacggcgggttgatttatagaaacccgtgggtctcttttgtaaaactagtccgccgaagctgtaatggccgactttagccgttcgatcctccatctatggaccagattagatccaggcttttatgaattagtacgcgatgaccgccgtcggatcccgaattcgcggccctgatttaatatgatccctgggaatgcctacatccaatcctagccctccatctcttatctgacggctggagtgcctctttcctctgctttccgccgagccacggcggcgccatggctagagcccacccaaccctgtggcctgagcactattccttgatccagacaatgctacacgaactatggagcaaggtgattcgaataaggtgattcttactggtgataaggcgatgagggtgtttgcccatggcgttgggcagatccggggtggtggagagctccaacgacgaattccggcctatgtgggccaagttcttggctaatgatgcaactcctgaaccctccgatcgatggcgaagctctaggtccaacccacaagcctaggatgtcaacatggtcgagttgcttcggtggcagccatggcggtccctagttttatagtggctagggtggagtctttatgggagcgttcggtcgggacgaacccgaaatcaccgcgcagtcgttgcgattcttctgtgctagcaacgatggggctcatggcggaggcgaggaaatcccatccagattccacgcacgtctccgccaggttttttgcgaaggtgggggaaggaccttacagtttgggtccacctatcagggaggtgtgtggctcaacgctggcgcgggtgggaagctggccgaagggccccacttggcaaggacagaacgagggacgaagagcacctgagaaaatgggccgcatgggtagagttttggcgcacatggccagggtagaggggcgaggctggaacgaacgacatggaaaacggcccaagcgcaggtatggattctgcttttctttttcttttttat

SEQ ID NO: 176989 - DNA, 745 bp, Zea Mays
tgggttaccttgtcgtcatcagttaagccactttgtttctctcttagaactcttgcgtagtagccagagaacttactaacatctgctctaatcttgtctcatctgctgctaagggctctgttaactctacaaggaaacttccccctctgtttgttgtatcttttttcaattcgagcccaaagcccctccctacgttggccagtgtgcacaacagggtcactgcttatttgcaaccaggttgtgcaaaggagaagatctttaggtccagtaaagttttgttccttagacttcttatgtttctgcacaggaggtgcattcttttctggactattgatgtcatgaacactgtgttcagcatctgagtccaagttcacaggtaatgaaggtatagtattggaaccctgcaatggtgtactagtattggaaggtggaatggactcaggaaaaggattgacttcagctgacccaagaggattcctcacaaagttcaagtaatgattccaatacattgctgattgtgaggccggaatcatggtagattgggaagtactatttcctgtctgcatgggcgcccacattgttgtcggaccttgagcagggtttggaaaattgaggtttcccataaagttacaatccataccactctgctgcatgtaacccgtaggccataaagggtgtggaggaggaaactgctggccacttgaggcatttgacatgggctgcgaagaagtggcattgtttgctg

SEQ ID NO: 176990 - DNA, 2006 bp, Zea Mays
agcagttctgggacagattcaatcaagtacgcatagtatctagacaaatgaaccgcaacgcctcggtgatcctctcgacgcagtcctagcgcatttgcgaacaagtgcgcacagcatgtagtagacagattactaggactaggagtaggaccagcagaaatatcacagtactcagttgcgacgtgccaaattagcatgacttccagctgagagaggcccttgagtgcccaagaatacctgcggaacggcatctggtcctgccattgccatgtttctacggcggcggcgtcgtcgttggttgggttgttgccgccatacgttgatatgagcgatctagcaacagctctcttcactgcatcagaaacctccactggatcttcctgtctctgttcaatcaccgaatactgcttcatcctgtttctcctcagctgtccagaaaacgtaacccttctaaggaaagagatgactgctccgaatgtgttggtttcataccagtgtttcttcacacgcatgatggccagggttacctgggcccaatccgatgcaagataaaacgccacatgcaccagctccactacgagggctacaaccaggagcagtaggctgatgatgtaatcggctcttgagatctgtacttctatgatcggattaggcgtctcaagtaccagtgaattcctgacggcaaacactccaacgataaagattagaacggtctttgctaaaaccaaaaagtggaggaacggcaccggtggcagattcgtcgctatgaaggtgtagtagtactttgtgaagaagaagtcgtagcagaagcccagctctgcctcgataatcctgaacgctcttctgaaatccccttcagagggcagcagtttcttgaatacaaagtcatggtcttttgttgttgcagagctggtcttgggacggactcgaccaaagaagcacctgttcttgagctccacgaacaatgcataggacaggcacaggtctttcagagaagctgagttgccatccagacgatcccatatctggtcgacggtaatttgtccacctgcaaacacacggtagcagactgcatactcgtagcccttcatgctctgagggtcagagtcgtcgtcactcgtaccattatctgctgcagttccctccgtcgtctctgcggcctgtgtgcgacgacggaacttgtttgagatgaaaagacccgacttctgcttggtgtatcccagaaatgctagaccacaggattccaaggcctttgtggataaagcgagagaaaagagggcggcgacacatcttgaacttgctctgggattcttgacatgccgccgctgcaggtccaaggctgccttgaaggtataagtatttggatcgatgagcagattgaacatagtcatgtagaagccgtacttagccatgtcgactataccctccatgtacttgctgttgaagctgtcacagaactcataatgctgtacggcggtggtgcccgctgaggccatgacgagaaaaacagcccagacgggatacgacaagttcttgatcggggaggactgcatcgtaccaagggtgtagatgatgagagcctccataatcttggaagacgcccgcagggcagtactgaggaaggagctacgccaccaccgtcgcctgtagaagccgaagaagacctggaggagcagcagcacagcggccgctagcatcagaccttccaccctggcgatcgtcctccttgggtgcttcagccaaggggacagagcctccattgcccttgtcatgtttactactccatcttggttggagcccggcggaatcggatccatggaggaggctactagcaggatcggtagggcagagatgaacggaggtgtatgtgttgctgttgctgttgcccttgagcaattgggtgtttgtctcggaagctgtgtgtatagtgctggcggcttcctaacggtagtactactcctttattatttgaagggttggtccgatcaatgaatgctcctagctac

SEQ ID NO: 176991 - DNA, 471 bp, Zea Mays
tgttagacgctctcatggtgatcaccatggtacagtgactgaataagatcacggattcagctccccttgccgccggtaaccctcgcgccatgatccgcgtcatcgccacgattcgtgctctctagcgaggagattatcacgatagggtaaaaatcttggcaccggataggctcggacccggtcgacggtgagctcgtcgtacccacttgggctgcggtcgggcaaaatggtcctcgccggagttggccgcctaccgaccgtgtgccacatgccttagggcattaccacatcgtagtaaaccactaaagcatgtctggtcatcgctggtgaccttgccacgatgaaatccaagaatcctttgcgccagtgctctcccctctctacggtcgcgagcgcgccattccaaattcaagagccacctccctcgggccctataaattaagggtgccatcagctccgctaggtaatcac

SEQ ID NO: 176992 - DNA, 705 bp, Zea Mays
cggactgccggtcgtcgacggatccgtcgatctggtgaccggtgctctaatcctcctctcctatccctactccgtaaccctaatcctcgatctggtgactggtcttcgtgtctcctctcctctcgttgcctcatcggtggatctggtgctccggcgagcaggtatgctcctctcgttgcctcatcaatttcgtgtctcctcctctcctaagatcttgttcctctcctctctgcatgtgaaggacgccggccatctggttggtgccgctcgtcgtgaggagccggagacgccgtgagctcgtgacgggttgggctggccgctggcgatggcatccattggagacgtccaggagctagacccaatcgccgaggatgaggaaaggaggctagaagacgagaacgcagccgatgatgcactccagttcctcttcggtggtgctggtgtcgttgaggcgggaaccgcgactggatccacgccgattggatccacgccgacgagccccacggtcgaggcgaccagtggctctagatcccgcatccgttcgaggaggagggaacctacgtccaaagtatggcaagactttgaagaagtgactgccatggagggaggtaaggaggtaagaatcgctgccgtttgccattactgcaagcaaactttatctgctaagtcttcttctggtactgggcacttgatcagacactcgat

SEQ ID NO: 176993 - DNA, 757 bp, Zea Mays
aaaatatatgcggagttcttcttctctttcccaagttacttcatcctctccatggtgactccattgcactttgcacatctttgtcaccttatttcttgtaactcaagttaatgtatccagaatcttgataggttactccgtgtaagtcaaatcctcctgaacactgagctcgtccattggtagctgttcctcagggacacggagacacttcttaagttgagacacatgaaatacattatgcacatcagatagattatcaggtagctcgagttgataggccatctctccaacttgcctaaaaactcagaacggtccaatatagcgaggggacaattttccctgattatacagacctgttcttctgcctattgaataagtttgggtccaaagaactgtcttcctctagtctggtccaatatagaggaatcctgcatttcctgccatatagagcctcgaacggtgacatcttcagactggcctggtaactattatgagaacacagcataaggtagactcttgtcccaactactaccatgctgaaggacataagctctcaacatgtcctccaatacttgattagtccttttagtctgtccatcagtctgaggatggtaggccaaaccaaaattcaacttcaaatccatattctcacgacaacttttccaaaatctggaggtaaattgtgatcctctatccaaaatgatcttcttcggtacaccatgtagagacacaatccgagccatatataactcagcca

SEQ ID NO: 176994 - DNA, 532 bp, Zea Mays
tgcacttctatctgctccgtgcttcccggcccgatcctgctccggaattttgtccttcgtaggcagtaaagactctgggacctcacagttactagacattctgccttcttgtttggggaggaaagaagggacacagaggcgggccttgaggcaccgcccatcgccttcactgcccgccggcagatggggaggccggcggcggcggccgtgtatagctagggtttgggctcgatttcttttgaatcaccttttctccaagttcccttattgatggaaccagtatatcagactaacagtatatcctcggtcgacccccttattgatggaaccaactgtgcactaggtaccaactaggatggatgtggtctgcaccggtgcgtctaacagagttgatgaagacgcgaccaaacttgaacggcagacaacgagcaactctggtgaagggagcggggaggatagttctagtgacgacaatccttgtcctcctatacctccaaggaagaaaaaaacatcagatgagcttgatgccgac

SEQ ID NO: 176995 - DNA, 508 bp, Zea Mays
agcctgcccagctccaaatataatttgcatctgcacatagttttcaattggcacattgaggaattcagcatcctttgggttgtcttttgtatggcctagtaggtgttcatcatcaaggatgattgtgaatgtattctcatcccaatgagcaccgcttaggtccttgagcctacaaaccctgatccattttgacgccacttcctcaaatgattgtagacctgggtgcctatgacctcttggccactgaattcagtcaatgccttagcaacagagttgacatggatctccttgaaccctttatctgtttttactccttgcccaaccaagtctgcaaacttcctcaggataaaggctgacatcacaggggtccagcacatggcagtccttgaggtactactgctcaacttccatagtctatatacatttgataagacatttataaaactgaagtcataagaagaggtaataaaatggcatcatagcataggaccagttttctcagcatata

SEQ ID NO: 176996 - DNA, 862 bp, Zea Mays
gcatagtggtcaccccgagttaagtaagcgcgagcatgttgcaccgtcttaagttgttgccgacttaagccgattgctccgttagcggggcatagtggtcaccccgagttaagtaagcgcgagcatgttgcaccgtcttaagtcgttgccgacttaagctggttgctccgttagcggggcatagtggtcaccccgagttaagtaagaatgccggtcaatcatgagcaaactgagtattcttgaagccttttttattgatgacatatttcccatttaacagagtacattatcgtcccgatagctttttgaaatacagctaggggtaaaacttcctgaggtgttctatattccaggagttcccaatttctgttctgtccatttgagtaaggcgatatgatcccggccgagtgacttctgctactataaatggtccttcccataagggcgataacttgtgtcgtccctcccccgttagaattcggcggaggacgagatctcccactgaaaaggatcgtcgctgcacgaccttgtcgtgatagcgtctcagagtctgctggtactgtgccgattgaattactgcgttcagccgctcttcttcgagtacatcaacatcctctagcctagtagcttcggcttctgctatgctttcaaagaccaaccttggcgccccaaacttgagatcagcgggtagtactgcctctgacccatagaccatgaagaaaggagtgttcccatgcagagctcggctaggttgggttcttaggctccaaacgacgtagggcaattcccttatccactttcctgcgaacttttcatttttatcgaagacctttttcctgagagcctccaatatcatcacgtt

SEQ ID NO: 176997 - DNA, 403 bp, Zea Mays
cagcgatcgtagcggcgggagttgcgcctttctcggtgtgctctttcatcaggagtttctcccatttctgaggcttcgtcccgagatatgggttgcgttgggtcccattctccgacttcatgatgtcaccacacgtcccggtgtctgtttctccgtcgccgagcatcgcgctggggaggctcctccccctgcatggtgggttcatcgtcggatatgagcgatgactccaatcttccctgaatcaagggaacgttcgggtagaaagaagcaggtatggcagtgcgcttcttcccatcctcctttgagggggaggtgccgagaggattgctcgtagtgttttcgtccctcgatatgggatattcacttcctttctccgagtgatccgtgcccactccttagtggg

SEQ ID NO: 176998 - DNA, 503 bp, Zea Mays
tccctcaactaattgcatgatttgagcttgaaatctttctgttcacggtgatggcgccaaccgaggacaattcaaggtgttcccggtgatcctacgtgttctagctcaattggttgggtcgagaagcatcaagagcacacaagagtgctgaaacaagagcgaggagggtgtgaacggacctgcagaaagctggccacgacgagctcactcacggcggtgcagagaacaaaattgggggaaatcccaaactggggagctgtgggggacgattggaggtgagggctggttcactgggtgcacaattacttagcggagcaggctagggcaccaatttatagtgtccaagggcggtggcacccaattttggaatggcgcgctggcggccggagagaagggaggtcactggcgcaagtgattcgtggctttcaccgtggcatgaccaccggcgatgaacggacatgctaaggcgattcactgcgacgtggtagagcacctaggcacgt

SEQ ID NO: 176999 - DNA, 1118 bp, Zea Mays
caaaaacacaaagcaggataagcggcagtgctacgcagcaggccagcagtgctgctcaaaggggtagaagtgccatagaggcaaaaacttgtagaattgcctcaaacctcataggaagtatgtgcaaggggaaataaaatgattcctaaagttttagccaaagcaaatcaaaactccgagcttagattagatttcctaggaaggatggggttttattggggatttctagaatgaactcaaaatgaaatcaacacggatcacaaccaaaatttgcaccaactagacagatgcaatgatccaaagggtgtatttctccccacaacaattcccagtagcaacctcaaatcaaaaactcgatgtttcttccacaacttgagagaacagaggaagggaagagtcgaagacaaactcaaataaaaaactacaacatattaaaactgagcacaagatttgaaccaactctttgaatggatctagccacccttcctttgaataaagagttgaagattactgtcggtgtttgttgtccgaccgcacaccccggggttaccctcgtggtgcttttgagtaggacgatgtcgttgattgtgacttgacggttcgtgcggtagcacgatgagagaaacacataagcttgagcaggttcatgccactttgagaggcgtaataccctacttcatgtggtggtttcctgtattgtggtgagtttacaaggtgtgactatgagaatggtgggctgaggatgagatgaaaaaggtaggggtgtctcctggccttatatacacaaccagagagagcccccgcaaaggtgtcgattacaatctccatacttctctcctgatttgtagcgaacaatcttcctttatcccggggaaatcttgtgctcctgtgcccgagttatcgttggtggttcagtctgttgggtgggcaccataaacccggcccgacatacctgcactcatgcaacagctaactcagatgtgggcctctttcgtatcagaaccagctagcatttgctggtttctttatcccacctaccaacagtcgccccaggaaggcgcctgctgtgtggccccggatgcattttcgtgctcatgtggacccgagggatatccatc

SEQ ID NO: 177000 - DNA, 919 bp, Zea Mays
tagctccggtgcattcaaacatggccaaaatcccttccatgcctctttaggcaaagatgtggatgctcaacaccacaaggaatttaactatcagcatcaagcggcctcacaatcggatttaatctttgtagcaccaaagtccagacggaccagacctcctaggcaaacacacaggaagaaagcacatggttggttgttttcactgcttggtcacagaagaggcaggccggctgatggggcagcgtttggccaaagccaaaaggtttgaaactgctcggaacatgcttttatgctcataacaaatttatattctgccgactgagggtagaaatctcatactatcatcaaactaaatgcgtggcttttttttctcagcaggggtctctttagttcccgtacttcgagatatcttttttaagatattcttccattgtattctatcgtagcctcgtacagaatgtgatgcaactggaattaatcatcaagagctaataaccggcaatcaaaaaagggatgaatcaattgacacttcaatgtgcagtgcttttataatttatagtacagctacccgagccgctgtgctacgcaaagcactaacgcagtgtagaggggcgaaccggcgacgggcactgccgtgcaccgtgcttgcgtgctggataggcccggggcctggttgctgcggatgccgccgtaatcctgcggacgcctccgcaccagccgccaaccgccgaagccgggcagcgggaactctggaagaagagcaggcgggaactgcaaccacaggagtcaagggcgcctgctggctcgcatttgcggaggaggtctccgagtctggtggtccgccggctcggcggttggccagctgcctgccgagtcgaactgcggtctgcagggcgccgtcgccgaacgaggaggcgat

SEQ ID NO: 177001 - DNA, 752 bp, Zea Mays
gactggagcaggacgtagagtcgagcgtcgggcagcggaggcaagggacgtggataactatagaatcaaaagttgtagaccatatgtaacgtgggttcctcacctcactttgctagtccctagcggacgtcgagtttcttttccccctccactagcgcgtccggtcggctcacataatgcagccaggcccagtcactgtgttttgatgggaaaatatatctatttttgttttcccccttttcctgaaatatgcttatcttggacgatgggaggaggatagggtatgccattatctaaccatcattgatatacttctgtcctattttttcctgacatatggtaccttatatatacatatatatgtttctattaatagttatagtattagaagccctaggcttccatcaatgcagagagcccctgccaggctaggtgtgccgggcgcgggtcgacgtggcaggtggtcggagtaccgcgcgcatgcaccgagtcaaggtgggtcgtacgtgcgcacccactattaccatttatgcatccgtttcattcgaattccgtatgcatacacgcgtaactgccacggtgagtccgctcgttccgcgcgggttatccggagtcgtggtgtcgtcccgcgtgggaattgaccgcgtttatacttgcatattatgactccaacggttacataaattgacacagcgatgcgacctggtcggtgtggtgtagtatttgggatttatgtttgtataattcgatgt

SEQ ID NO: 177002 - DNA, 300 bp, Zea Mays
acattacgcattagagatttagagctataaaatacattcagaaggaacataatgtaagagaaaaggagtggacggtttagttcatcagatgaattggattgttatggagcaaggaagaagattttgtgaaatatgcatggaatattttgatataatcgcgtagtagcttaaattgcatgggagtggaactgtttccttcaggattatttgggtatggcctcgtcaagaatattaaatatcaattagtcttgctgccaactcctgtaacttcaaattcattgaagttggtcatgattcttg

SEQ ID NO: 177003 - DNA, 400 bp, Zea Mays
agatataccttcatcagcttactcccgaagctttaattaaggtgggagtttttatttgggctatgaggagccaaaggctagagccagatgccaagtgcttctgcaacattcatgaactatcctactagataaaagcaactcggaaggaacagtaccataacaacttcgagtgctacagcttcgtgccccggtctgatgcaagatatctcgtgccaacatttcgaaagaaatggccaggctcttggatgaaacaatgattctatgtgaagaatgatctgagtgagagggaagatgtgaggggcattattcagcgtcccatatggtcacgcttcggcattagaaggtcatcaattgcaattgggaacaaagtgcaagcgtgcttaatggctttcaatatcgt

SEQ ID NO: 177004 - DNA, 569 bp, Zea Mays
ctgacgtggatgcgagtgatgtaatagcaagcccggggaggctcgctcactcgccttgtttcgtacagggggcggacgtaggtgcctagcgcgtgcagcacttattgcagcaggttggggaagtgccccgtctcgaacatcgatgtgtaatgtttgacaactggaccaaaccccatgaagtagtcctgctgggcgtagtcagcttcctagttgacgtgttcgtctccaccttcttcgtcgttgtcatcctcgtcatcgtcgtctccggagtcgtcgggggtcgtcgcctccgggtgcaggtgcttggaaggctggtgcaggcggtgctgacgtcgatgacctagctacgaaggccagggactctgccaacggggtgggcgtcgacagctgttcctccgagctgtcctccaggttgactatattctccactcggatgggagggagatccgccggaacttcctcgactaccactgggtagaccgggatttgccggggctgaggggcgtagctggtgttgatgcgggtagtttggagagtacgaaccatctacaagagaagagtcaactcag

SEQ ID NO: 177005 - DNA, 519 bp, Zea Mays
tacaatagtagctaccaggccagtttgaagatgtccctgtttgaggctttatatggtagaaaatgcaggactccactatattgggatcaaactggtgaaaggtagttctttggaccagagattatacaagaggtagaagaacaagtccgtcaaataagggaaaatttgagaactgcgcagttaaggcagaaaagctatgctaatacccggagaagactgctagagtttgaggagggtgatcatgtatatttgaaggtgtcaccaatccggggtatgcgaagatttaaagttaaagggaagttgtcccctcactttattggacccttcttaatcctaaagcgagtgggagaggttgcctatcaactggaactacccgatcatcttgcggatgtacatgatgtctttcatgtgtcacaattgaagaagtgtctcagggtacctaaagagcagctaccaatggaagaccttagtgttcaagatgatctgacttatactgagtatcctatcaaaatttttgat

SEQ ID NO: 177006 - DNA, 319 bp, Zea Mays
ctttggcatattatattttccaaatgttctttgcctcagatgtcgtccaggactcgtggacaggatggtgcgggaacgtcccgtgggagggaagctactcctaacccgccaccagtacccccaaccttggctgaggctatcgctgccttagtcaatgcaacagccgacaacacccgctttctgcgggaaatggcgggacaacaaatgcaacagcaaggcaggcgagcgtatccacaaggaccccgcgaaacttcatatttggacttctcggagacacgtcccccattatttgtcaaggctgaagatcctcttgaagcgg

SEQ ID NO: 177007 - DNA, 756 bp, Zea Mays
tccatcctatcatcaccaatcgtatcatattcttttgtttgtgttgcagcttgtgtttttgttgacggtgtaactctttgtggcgcaaccacacctggtagcttgatatgaaaccatagatacaaaggtggagtatcattgttattttgttcttgcatttataggtatgacaacttgtatatgggcataacacattggtatccgctactgttgttgataaactaaatgggtggtcaacaaattcatgtgcctttaggttgtccacaacatatcatgtgaaatcggggatatgcactgtagtttacactatttatagagtgaagtttgaaatagaggatgatataggggatgggataggatagctgctagagatagccttatcatgctctcattagactaaccccactcttattcctaccattatacatccaccgacgatcctcacccataaccatccatcttgcataaattgctttggatgattgacgagaattaaacatctacatgcatgtaatgcaaatagttcagagaatgtgttaccttatcaacaataggagtggggaaaaaggcagggacgtagtgacataggggtagggacgcgtggaaatcacctagagggggtgaataggtgaaacctgaaatttaacacttacaataaacactttgatcctttgttagaacgagaagtaatagaatgggagtaagggagagtaattcttgttgctctaatgacagcagaataaacttgggtgcaac

SEQ ID NO: 177008 - DNA, 504 bp, Zea Mays
gcacaaccttatcatacaaattacggttacatacacacatcgagggcatcatatattacattggctcaaccttcgggatgatacccatctccctatagttgaacatcattatcctcaattcctcaccctcaaaaagatttcgcagctccccttcacctacactcgccccaatcggcgaggacaacaattctcgtttaccagtcccgtccacgcgaagacgaccactctccatctcactacgatgatgcctaccactttgcgacaattcactcactctccgttttgccaccgcccttcgtcgcctatacccagtactcgcacccgggagcccctcggaaccctccacgcgcagcgaaggctctgctgcagccacatctaacgctgcaaaataatccaagtcctcatctgaagactcctccatccacgcaatcaaactcccagaatcatcagactcaaaacacttagacacagagccaaacgaatcatcaccagcagccacgatcg

SEQ ID NO: 177009 - DNA, 529 bp, Zea Mays
taacgatcaagtcttgaggatttccccttgctcttgttggcaccttcgtcatgtatttatgccactgaactcaagcttgtagcttcaactttgcaattgtgatgaccgcacaccgtctccaaatgaaggtgtccttcggcaattaccctgttatacctgaaacagactcaggaataattgataagttaatgttttaaggagcttcggtcaaagagggcccccaacaacatcaatatcaaaacacatatttgcatgtatgcacaacatccaatatcatgacctttcctctccctagtgtggggcctttcctctcttttatatgccaagggatgggtcaattacaatcaagaagaagaaagaaagatgaaatctatgggatgggtggtcgtgctccattctactgatgtccttcctcctcctcgtctgttcccctgtagccatgaccttccagacttgtcttgaccgaaggggttgcatgcaactcgttggggcacagtgatccgtagcagcgtctgtcactagatcaggc

SEQ ID NO: 177010 - DNA, 359 bp, Zea Mays
ggcaagggtatgttccactgctagggttacacgtgacggagaagaagccaaagctgctgaaaccgctccgatttccgaagtgatgaaacagtcggggctggtagtgccgggggatatttctgatgaaggtgcacctgtcgccgaagctgagcagattgttgctgaggaaagtgattctgcagatgattatagcgttgtgccatctaaacccagccacctggagtttgggaggtccactgttaccgaagacgatatgcctaagttgatgaagttaggctatttcagcgaaaccaaaaaggaactaattcgctttggcggagaggaaattactccgaagccagaaaaggatgaggtagtag

SEQ ID NO: 177011 - DNA, 804 bp, Zea Mays
gtaattttgggtacttgtactttcgggtacgggttcgggtaataacaaaatacccgatatattcgagcatgtagcgtctagcaacaatatttaaaaattgaaacagtgaaacaatattccagttgagatgtcacacatagtcatatagcatagagcacacagtcacagattcactaatagtattagtctcgcaatcacacataatagagagcaagagaattagagaacacactaacacaagtacacaacaacaagtcaacaacagtagtacagtacacattattcgctctcctctccacttctccagactccagcactcgacgtctcgaccactctcctctccaataaacaaccacacagggccacaggcatcaggcacaggcacacgcgcacaaggcagtaaggcacaacagtcaacagacacaaccgcacaggcacactagcacaggactacatgttgtacaacacaagtgcacaactccatgtctccataccatagtccatagtccatacatgtattgtacggtgtacctgttcaacagcaaaaggcagacaacactaattcagtctagagatttcagcagaggaggtttgatgtaagcgctactaatgaaagtttagatggtaaaaatattagcagatggtcactagtcagaaattcagaatggtgagcaaattggcgcagaacaaagaccaggtgatttcaatcaggaatatctaaatgaaatccctaacgaaagagaaacacacatctcaaaccatggtcgacacataacaagtgattctgtttcataccaggcttca

SEQ ID NO: 177012 - DNA, 503 bp, Zea Mays
gaaccagaaagggagagagtaaatcgaggcgcgtctcaagttgcgggcatcaaggcagaactcaccgaggtgaaaggcacggcgaagccccaacggtgacgacagaacgggcgcgtgggcatggcgagcggcggtggtcttctgagactctgagaaagaacgacgcacgagcgaaggcgagctagggtgtctgcgagtgggggaatagcagagtgaacgagagggggcttgagtaggggttgggcgcgtgggtggtggccgggattcgcgcggacgtgggcgcggccatggcaggtgcgcggaccggaagttagaggagagggagagggctaacaagtggggtccgccaaacagtggctcaggcacacaaatgcgcaaaggaacgcgccgacaagagggacctaggcggcaaagagagggagggagaggacgtgtgggagagagaactaccgctgacaggtgggctccaccggtcagacgcgcgcgggcgcgcgcgcgaagct

SEQ ID NO: 177013 - DNA, 547 bp, Zea Mays
ggtaatctgtcctggcagagactcggtccagaacagcggagcttggtgaagcccatagatccaaaaccgaggcattgaggagtcgccacagccacacacatatcgagctcggcaaccgagcaacaatggcggcagcgaagtctcacctggttcgtgacgagggatgagaggagggatgcggcacggttttataacctaggcgaaagggagccgagcccgggtaggtagtattccacgaatttcggcttcgatttcggtaggcgcatgcgcgagctcggaatccccggacagcactgccgttctattgaggaagaagtcctcccttggagagtgggacccagccgtaagcgaaatccgagagaaggggaaaaaaagaaaagggagggaagtgggctgccagggagaggaaagagtgaagatgggccaccgttgaggactttggacccgagagccagggagttcttctttttttctgttttcttttccatccttttcttttctattcccatctattttcgaattctaattttttttagactcaaacttg

SEQ ID NO: 177014 - DNA, 460 bp, Zea Mays
cagacttaacacctttcgggataaagcgtcactataaacaccttacacataattgccttaggaacctattagttcactcgaagacatctattcaagtcataaacacaatcatacacttatttgtgaagcacaatttaaggaacgcctaacgcgtatagactcaccttataattatagaggaagtgatgactacttacgacatgtcatcacctctctacttaagccgagacaaatttctacccacaaggaccaaacatttatgtcgagcacactttattttaccctgtctcgcatacaaccatattgtggcgtgcacccgagacattaccgttcaatttaacgcaatcactactacaacgcattttgatacacacattctacagcacagtgctcagacaacccacacttccaatttacttatcacatccaaccaacaccacgtttgataacacacctttct

SEQ ID NO: 177015 - DNA, 421 bp, Zea Mays
ggcatgtgggctgtgggaggcagtcgacaccagcaacgtcgagcgcagcgaggatcggtgggtgatggaggcgagcctacgagtggttcctccggagatgcaccagtccttgggggtgaaggtgacgacaaaggaggcctaggacaacctgaacacgatgcggaccggctcaaggctggtgaagtgggccaagatacaacaactgaggcaggagtatgagctcctagagttcaaggaaggggaaggattgatgaaggcgcaagctggagctgggagacgccagatgcaggggaagatgggcgcgactagagctccttcaccatcaattacactctgtattgaggtgcaggggaaaagttgtgggtgacgaagctgcggacgcaggggaagtagaggagagtggtggcgggtagctagagca

SEQ ID NO: 177016 - DNA, 518 bp, Zea Mays
gatttcggtaactgtaggttgaacggcggcggtttcgtagccgagctggagcggagagggaagcggcggcggtcgacgtctccgggtagtgcttgctcctcgtcggcgattggcccttcgagccctcggtacgccgtccagatccgaactccgttgtggtttctattaggttttagttgcttcatttgttcgatctgtgtggttctagggtttgtggtgtgcgaatattgggcatagaacctgaacgacggtttcgatctgtgtggttctagggttatgttgcgcgaatattggttctagggtatgtagatgctagcggttctaatttgtggcaggtctggtcatgttgtgctttttgttgttcaattgattcatctggaaactaaaaaaagaacacttcattacatatcatattggcacgaaaatgaaacaatggtaaccagggtagtaccgtcgtctgaaaatgtcgtcattgtacacagggatgtctgcaaagtagcattgcacaagcctagcat

SEQ ID NO: 177017 - DNA, 552 bp, Zea Mays
aaaaaaataattgtgctgggttagaccaacactatgggtcgataaggaggtctagatagtagatacaacatggttcttgggctggacccacaatatgctcactttgaattatgttgagtgtggcactattaaatatgtcgtgactcaaggtgctcgctagacacgattcatttagtcatttatagtgcagttcctccgtcatcagcatcccttatctcgcgagcataaaaaaacaagagaaaaaacttcatctcgtctcacccaaaacaacacacattgtcgtttgtggtctctgcctctctcctcagccctcgtcacatcaccgcttgtcgtctctaggaagatatcctagatgcaccacgataggtgtaccgtcatcacacgtttaaatccacgtgaggtgtatccgtcgggtccactgtactaataggaaggacaccgctacacatctaacttgacattggtttggtttgatccagaggtgtgcagactacctgtgcattggtccatgtttgtctccctttggtatgatataaagatctatgattttgg

SEQ ID NO: 177018 - DNA, 329 bp, Zea Mays
caaaaagagcatgggccacaaatgaatcaactgaaattgtacctgtcaccacatctcctttctctctgccatccgcagcgggtagcacataagccccagaaatacccgcagaagaggaagctcccggagtgaaattaatagaagaaccccactgagccgggtgaggcagacgcggagctccaaactgagacggcataggagtagtcggtgcaggagtaggcgcagccagatactgaggaaaaccctgcatcggcacgaactgagaaatctcaggcacataaaactgctgcggaggaagtggaactaaaaactgctgctcaacacttgac

SEQ ID NO: 177019 - DNA, 670 bp, Zea Mays
gataaactccgaccactgttctcactgtcatcgtgtctcgccgtagttagtcgcgatggcatcaccggcgttcgccgttatccggccgggctacgtgcctcgacgctttaccccatcgcggtgagtcgctagaaaccgcccagtagcactggttcgtcgccggtgaggtcgccacggtagatgccactgagctctcgcgacagtacttttttcactctccggtcgccaccgcgctaactcaaattcacgcgccactgctgatggagtctataaattgcttccccagcctactacgctatgtaattgtgtaaccagtaaagcaacccgtgcctcgaatcatcacctagaactctccaatttcccattctccccaattcggtttccgccgccgtgagagcatcctcgccctggccaacttgtttcaggttggttcaagctctctggtcgtttgttctagtctccttaagacctcctaatgctgttcgacccctctgattgaactagaccgccctggatcaccgagaacgcccatgttcatccattgtccgcgttgtctccgtggacatgatgatttagagtctcattagtgaaattgagtaaggggaaatggttacgaggaatccaatttggtgtctgccgcacgggagcaccggtctttgcgtgatccggc

SEQ ID NO: 177020 - DNA, 631 bp, Zea Mays
gtcgacgcgtggccgtgcactgctcgcacggaagatgcacggaagatgcggacccaaaattaatatgcaatcgagctcagccgacgtcctccaacccgcgagactgcaccctcacctgccgcctcccttcgcaacatcgcatccagattgaggccgacgcgctaccgctacctcctcccagccgagccaccaccgtcactcctgatcatcctcctccccgccaccgtgccctctccactggccgtcgcgtacgccacctccagcgaacacgcctccgcgcatcctccacgggcagctcgctgtcgcggcacatcttttttctctctctctctatgtgcgccctcgccggcccgagtcctctctctccgcttgcgccgccaccggcaccgtgcctgcgctgccttgcatctcccgaccaccagttgtccttcccttcatcctcctctcacccaaacagtcgtatgggcccttcgccgccgaccacgtgctcgggtgcagctacctccaaatttcccagaccgaggcggcgcgacaggcgtccagcggcaccattcggcttttgaagatggagcgggtgctgctcgaggaggatgaagaggaccggttgttgaggtttgccccctgacccact

SEQ ID NO: 177021 - DNA, 721 bp, Zea Mays
caaggacattgacattgaagaggacaacaacactatccgtcccacgaagccaagccatgtggacttgggaaaatccacaatcaaaggaggacctatcgaggtattcaataagttccattatattgacgacattagctggatttggctaggggtgaagacttgctgccgaagcctaggaagcatgtagttgttatctttcgaagctttctaagagccgggctttgatttcctttacacaagatgatagtggcgggtctgaagagatttagcatatacattcatcaactcacccaaaacactataatgaggttagggtttttatttgggatatacgaagacatggtgttgaacccaaagcagaggcgttttgctaaattcacaagttgcattaccagacgaaggaagctgaaggccttcacaataactccgggtgttacaacttcgcttactgaaaaaagctcagttttaggcccttgcgtattgtagcaaatggctgaatgcgtgggcaaaggaatggttctatatgaagaatgatttgaataagggcgacatgattatttgcgatagtttctacatggtcttacccgtccatcccaactttgggtttaagagacccacttgctatataaacttcgaagctcatgtttccattatagcttttaatgttgtgtgcacccacattggaacgagggaccttgttcaagagcatctagcgttcaac

SEQ ID NO: 177022 - DNA, 440 bp, Zea Mays
ttgttcattcgactcataattggatcatgcacagtagtttgaatatgaaagcgaagatcagtaaactgtgaatgaactccatctagctgagagtcaacaacagaaaatcgatcatgcagatcagagaattggccatcgaagttagattgcatgggatcaaagcggtcatcgacatgtgacatcatgccctgaaattgaccattcgtatgtgtctggagcccgtgctacatttgttgaaaataaagatcaaaatatccaggtgtaggatgccagtactgtccttgctgctgaggaggtggaggaggaggcatttgctgagctagatgcgcctcaggctgagcagcaaaatcatctacttgaactccctcgtcatcaggaaaaggagtgagggacttggtaagaaaatcaatctcattcttaaatgacctaaatggagtgtg

SEQ ID NO: 177023 - DNA, 327 bp, Zea Mays
atggaacaagccgatgcatcaatttatagaggacggccgtgaggagggcgaatttggacggggaagcgcgcgcagtgagaaggggaagagtcactggaggttgctaacttggcgctcactggctaattgtctacgacggtcactgtcgagtccttacagcttgcgacaacatggtgaatcaactatggcgtggcacaatcgcggtgaacggagatctccatgttgatgaccgttcggccacgttgctgcgcaagtgggtacgatgacttggcagtaacagtgccccgacttcatcccctgcgcaagatctttcaccctacatagtta

SEQ ID NO: 177024 - DNA, 609 bp, Zea Mays
gtcgtaagattctttctcattctttttaatggcttcgtcagccatctcacgaccacccttcatccacacatcggagtagaatttgccgcccagggtagaagcctcaacctaagggtccttagtgtcatcagcagagggaataaattctgactgggctacgaccttgacatgatcacacccaaccttttctaaaattgccgcaatcccttaggcactggaaaaagcacaaaaatctccgcgatcgctaaggatctcatcgaaagcttcaacttcttcgcctatccattggataacaccctcggggtcgccgcgaataaatttctgttctgaggaatatgcccccaccttcgtaaagctatcttttagcttcttcgcgcactctaaggatttttcataacacctttccctggaatcacgaagctcttcaacattcttttccagccttgaacttgtccactcacctatttcttgcttggccttagcaacttcaaaattttcattcatgtccgcaagttttttctttagatcttcaacttcggctttgtgagttttggcttcggcaataagcttggtttcactgattttcagtctatccactaaggagagcag

SEQ ID NO: 177025 - DNA, 317 bp, Zea Mays
agcctgggaggagttcacttcaacattctgacaaaatgtgatcttgatattgcatctcatcatacaagtgcagtgatcatttagcattgatacctcaaagagttagcatcagtagttgagggaggatacacgcaaaatatataataggaccatccgatcgatgattaaaaaatagtggcttcctttcggcaaatacaatcagagggtctctattccaagtatgcctgataatcactacaaacgggaaacagcaaccaacatatgcacacccatatttcagccctcaaccggttcttgaagatcgggtttaggacatg

SEQ ID NO: 177026 - DNA, 512 bp, Zea Mays
gttacgaattataaaattttcaaacgtctaattcccataccttcaggctattgtacgcaagactatccgcgagatcttctttcgtcatagcgcttaagccagcttcgagcttcggaaaccccatgcttctagacatctcctggcagaccgataattctttactgtctgggaggcagtataggaaatcctcttcgtccgtcccattgaatactagtgcccccctcggatatttcaattctttggcatagtgattagcttcaaaaacttcttcttccgataactttttccccgaagcatgacacataatataatcgtatgttttggaagatgcttcggggatggcggtatcaatttcttcaaccgaagctggctccgacattttcagatcttcggttgcctttgcaatttttacttcttctgcttccgaaggtattaccttggttggttctgaaggcccagattcaactccagtttgttgctttggagcttcaacaacagacacttcagcaagt

SEQ ID NO: 177027 - DNA, 629 bp, Zea Mays
tgaacctatagaagccgccatctttgatgtaccattggatggagaagacctagctgtatttccttgggatcgtcctccaccaaaagaagcacttgattgctatttgcgccatgggacagcattacaatgacttgcataagattttccacgtgactcttgttgaatttttctctatgtacgcatttcttgttcaactagatcttgcaaggtacgatatgggaacatctcgacaaatccagaaatctcttcattgagtccgcctaaaaatcttgccatggttgactcgggatcctctctgattccagtcagcactaacaacgactccatctccttaaaatattcatccacggatttctttcgttgcttcaataattgcaatcgattttgaagatcacgttgatagctggaaggaacaaatcgcctcttcatcactcgcttcatctcttcccatgtattaatatgtcttagtcccaatctaagttgatgttcttgcagttgattccaccaagtaagagcataaccagaaaactcgactgaggccaagttcactaggtgttgatctaaaaaattgtgaactctgaaaatttgatcaaattgctcagcccaattaagatattcatctgcacttt

SEQ ID NO: 177028 - DNA, 552 bp, Zea Mays
gggtaagaccataagatgaaggttacaaggccatatgtgggaggaaaaatgttgaatactagagttagaggtgaagggaggtctctaacaggaggtgctgatttatccaaggaaagacaaataagggagtttagaaaactgaatgggttgtgctatgcttgtggagataagttcgaacctggtcatcttgatgaatgtaccaagaggggacaagcacaactaaatatggtagtaactgaagaagattccatagtattaactgatgaggttctgcaacaattggggcaagaggatgagaaggaagaaatatgttgcaaagtgtccttgcaagctatggtgggtaaggataatgagaacaacatggtgataagtgcaactgtgagcaaacagactttagtgatgctgattgactcaggaagttcatcaaatttcatcagtgctcacatggtgcatcagttggggttagtagaggtggtctgttctctagttaaggtgaaggtggctaatggagaaactatggtgtgtgatagaatggtaagaggagtggaatgg

SEQ ID NO: 177029 - DNA, 658 bp, Zea Mays
gctcgctttctctcaatcccgctttgtcttagccaatttggtctcaccggggttcggccacgcccacacggtgactggccgatttagcccttccctgtgcccccgctttgatctgtagtgttccccttaccctagcggagctagtataggccttagcgtgccctaaaccccatctccccggccgaaattcctcgccggagttgcccgacccgcccggagcacctccccttcgtcagacccgttcttatggccggaagcctgccagtgagttcgccagacccaattcacccattctagccctcaccggtgaccctagacccccggcgaccgtgtctgccttgcctccggcgatctcgccgccgcggagggagcaacgtcggtcaccgagctgtaaaacccccacgtgccccatcgcaaccatccgtccccgatccaacggttcaaatctacgaacatcagttcacgtctgcacactctgcccctaggtcccacccgtcagtgcatgcgccccctggcgctaggcccggccggtcagcccgcctccctccccagtctatgacacccttggcctgcttgtcagtgctcgcgcccacgccccgcttgcgctggcgctcagatgtaatcctggccgttggtctacgatcatgcgatcgagatc

SEQ ID NO: 177030 - DNA, 515 bp, Zea Mays
tgtctcttcccctctcgtccttgcctataaatggagtcacaatgcagttgctcctcctcccccagctgctctcttcctgctctgctctgacgcccatcttcgtgctactcgcccggagcagcgccaccgctcaccactgagccttcctctccagcagctccctcctctatttggcttcctgctcacgacgtcaagactccgttgctatcatcacatgctccttggcgccatcgctcatcgagccgcgccatgctgcatcatcgctgggacttcctactacgtcgacttgtttgctggtgccatcctcattgccgctataaatccatccccatcgccgaaacaaggtataggaagacgaacattttactagctacccccttcatatgtatgtttaattgcgtgtagacgcatgcgataggttccatattttaaatacgtatttaaaacccacataaagtaaatgttgatttattagcttcataaatttgtaatacacatttaaaattagtgtttgc

SEQ ID NO: 177031 - DNA, 579 bp, Zea Mays
cagtcaccggggaatcgaggccaacccggagaaggttgaagccattctaaggatggaaccaccatgatcacaaaagaaggtccaaaagcttactggctacatggaagcacttagtcgcttcatctcacgactcagagagagtggcatgccattttacaagctactcaagaaggtggatagattctagtggactccagaggctcaagaggcattggaagcactcaaaacattcttgaccactctgctggttctcaaaccacccaactgagctgccgccgaccgatcagctgaagatttgatgctataaatctcatgcataatccacgtggtaagcaccgcgttagtggttgaacgggcggaagaagggcatgcacatccagtccagcatcatgtgtacttcatcagcgaagtcctcgggccctccaagattagataccctcaagtccagaagttgctatacacagtactcctcaccgcgcgaaagctgcgccactatttcgaggatcacaaagtcgtagtggttataggcttcccaataggagacaaactccgtaacagagaagcagtgggaaggacgac

SEQ ID NO: 177032 - DNA, 372 bp, Zea Mays
cacaggggcacaaacctccctggtataagcaataggtaagcgccagatgatgaaacaaggaggggctgcaatgcaatgcggcttgcaacctaatttagggctagcgtggcgagaattcacacaaggcggctagcgagggcaaatcgagtaatgtggtgtctcgacttgtaatatgggtaaggtggatgggatagtggcggaaacaaataacaacgatggagcgattgaactacgattatgacacgacctaaaccagcaacaagactcgaacacggacacaaattcaacaaagcaatctgaaacgaaattgcaaggctaaacagggttataggacaacggaattttttttgtatggcaattatctggagttat

SEQ ID NO: 177033 - DNA, 542 bp, Zea Mays
ggctgccgtaaggtaccttctacatgatcgcctcgtcctcaatttcgttttgcgcatgaagtcaaccgcatccagtagccggaacggtggaattcgggtggccggcgaaggactccgccgagcggtggtgtctctgcgcacgccgccgggggggggggggggaagctggctgctggcgtaggattgatgacggaccgatggccgttggatgggaaaggagcgcccgagattagatcgtgtgaaccgttgattcctaacccttggatcataatcggacgataggcacgtagctctgtattcagtagatccgggccgtagatcctcaatccgagggcggtcatcgtgtactggttgatgatacctagatctaatcgtggcccttgattcgcgatcgggcggccagaaaccgtgcataccccttcgcggtcacgcatttgcatatgagcccccgaccaaaacagaaatagaacccgcagtcctgggctactgttgactgagtctcaggattgttatgtaatcgcccctgcagttttcagtatttg

SEQ ID NO: 177034 - DNA, 770 bp, Zea Mays
gagttctctggtgccggtcttgctgctgagctcggaggacttggaatttcctcttgaggtgacctttttcttcttcccttgccctttccacttgtatggctttgtttgagaggtgcgagaagctgaggaaatcttggctagctaggatggtcttgagttctagtctgagccccttcaaaaagcgggccatcttcttgacttcgatgctgacgtcatccggcgcgtagcgggccaattcggtgaatttgtgcacgtattcgctgaccgatcttccatcttgagttagttcccggaattcatcttccttaagctgaacgatcccttggggcacatggtgctctcggaaagcagtttcaaactctgtccaggtagcttctctgatggcagcgttgaaggtatcccaccaagctaaggccattctggaaagttgatgagcagccaattgaacatgctgattctccgggcatccgatggcttctaacttccttttaatcatgcacagccaatcatcagcatcgaggggattgctagatccagcgaatgtgggaggcttgagcctcagaaagtctcccatcatgtcttgtggtcctccaccattcgggcgttgattctccagacttctagtgaggacctcaatgagtcgggtttggttggctagaacttgggctaaatctaagggtagctctggaggtgcggggaggtgggtctcactcccttctccaccggcttctctttcagctcttaggggaaaccctgctccaatcccagag

SEQ ID NO: 177035 - DNA, 543 bp, Zea Mays
cgtgacatcgcgtctaaggatttttaattggattgtttcttcatcacgttatcgtaagtgtacattagcagataagatttcggctgttattgaagtcgatatcattttgatttagtccatttacatccacacagaaccttaatccccaaagcattatatacattcgtatgtttttctaaaaaaataaggaaaattctctcctttatctcatcgttcctttctcttatccaaagtacgagatcacacaaatttttgtggagactcccttcctcatgccacctccatacgcatgtgtctcgctcataggggctgcacaactgggatttgatcttatttcacgcacactcgtctctccctcgccattgcgcctagttgttggtcgccgcaggcttggtcgcgctcttgctcggcttccccctagcacgccagtgtctcctcccagctcggcacgcaggccagcgtcgccattcactacaccctcttcctccagctcgagctctctcctcgttgcgactccttcgtgttgtgtgggttgctcaccac

SEQ ID NO: 177036 - DNA, 393 bp, Zea Mays
tggttgtgttttgctttaggagtaagagagacgagtgacagggttctgagccaagcaggaggaacatgaattgtcgttctcatggtgttcatgagcctcctatttagagacgtcctgctagtcctagaggagctttgcttcatgctgctagatctcaagtagtgagaccacagggtgttcatgcccagcaggatgttggtcgtgtgccatatggccaaggaccccatggcagtggctttggttctcacttcccttgtggaatacagtttccttctcgtgttgaatgttatccccccatgggaccgaggatgtttagtgttttccctaacactttaggggcaaatgttgcagcactggtatccttcacagtttactaaccctagtgttgtgtta

SEQ ID NO: 177037 - DNA, 447 bp, Zea Mays
tgaagagagatgtggttgcacatgtggctatgtgcgatgtgtgtcaaagagttaaggctgaacacgagaggccagctggactattacactcacttaagataccgagtggaagtgggaagagattggtatggacttcattactggattgcctcgcatctcgaaaggatgtgattcgatatgggttattgtggatagactgaccaaagtggctcatttccttctggtcaagactattataagggatctcaattggtagagttatatatggctcggattgtgtctctacatggtgtaccgaagaagatcattttggatagaggatcacaatttacctccggattttggaaaagttttcatgagaatatggatacgaagttgaattttaattcggcctaccatcctcagactgatagacagactgaaaggactaatcaagtattggaagac

SEQ ID NO: 177038 - DNA, 918 bp, Zea Mays
gttactcctataacaggacttattcagaagttctcaaagaaactcactccgtcattagtctcaaaatatcatgtgcgcaaggctcattagaacgcttctgaattccatattgttggcatgagacaacatatgtaaacttcatgtcagctatagccttgcattgagtcattaattgcgagtcctcgggcattacttctgttgctctgtaaccttccataagatctaatgagacaagaacagaagttatcacatatgccactaagcccgcattcagaacaacatttcagaaccacagcagactgctattagaaataccatcatcttccgccatatcaagaaaagcctgaagctccaaagcttttcgatagtacatcatccctcttactgcatacacaagaacaacaatgacagcaaaaaggcatcatgcatagtttaagatgttccttgagagaagatgtaggtgcaaccatgcaggaggtacgctataccagttcttgttaatgtctgccccctatacgacgcccaaagacgaagcttctcttctagttcttcatcttcacggagtccctcttcattcttgcagccaaccctttcgaggaaatttttccattcatcttcaatgaggttagtacacaaaaagtcagtttcagtgagcagaggccaaacccaaaaaaatgcatgaatatcatttcaagtaattgttaagcaagtgagaaaataacctgggtaaattttttgtaagtagaaaagaatggaaactccatcctcatttggctcttctagattttgtaatgagaacagaacatcttccttgtaataaggagtcaagatactgcaatacagaaatagttaaaacaatgaaataagaaaatcaagcaaaagatcagatcaaacacacatcttgcaaaagtgccttgc

SEQ ID NO: 177039 - DNA, 326 bp, Zea Mays
gacctctgcaagagagcaccggacccctgtacgcagaacccagacccctgattacggtccggaactcccaagtaagcatgtcgggtcccttgaatgggatctggatccctccacgacaaggtccgggacaggggataccctggcgaaagcaagggtccggtgctgacacgtgtctaggccttatcctgtgcgcttgcgctccccgctcaggcggagacccgatgctaccacgtggcttgttgctcgtgacgtaagccagcgagcggagcctgacttaaggcctctaggccgcgcggtctctgcatttattgcggagaggacgcgcc

SEQ ID NO: 177040 - DNA, 873 bp, Zea Mays
ccccgatggtattggttagtccagtcagctctgaatgaagcatatccttgaaaacaatatcatgctcttggatgatgttaagtgaattcagagtttcagcaaaaccataaagttgattcacctctagctgaacttctgccacttttgctgctgctgcctcaagaaggtgcttgatgtcaagctgaacagattcaacagtttgttgaatatcagaaatagcaatttctttctctgcaattagtgtataccaatcagattcctcttgatcaaacatattcatgatctcctgcccctgcatgaaaatttctgctcaacgaatctaagcctttcttccagcttcaaaaggattttgtcagtgatctcaactatttgaagcaccatattgtgtgtagtcaaccaaccctttgatgccacagtttttgtgcatccatgcttttgtactaaaacaacaattatgcttaccatgcacgatatgttctgcataatgacaaccaatttggtgctcattatatttataaagttaggaatttcaacagctacggacacttcaatagaagtgccactgtgagatcaccttaatgcattgttgatgtaaggagaagaatcttaattcactcttgctaaatctgaactacacaaaaccaccacattgaggattgtcctgattaatcaatttaaatacattaattaaacagccaataacataaataatcgcatgttcctctagttctcatgcaagacataatgttttcttcttttaagcttgcttttttcatcaagtttacaactcttccccacccatgacagtatctcagaagccccatcattaccatccagtatccctccttcctttatgtccttccatatgccctc

SEQ ID NO: 177041 - DNA, 726 bp, Zea Mays
taccatttcatctcatcaccaaccactccagctcattttcatccaccaccctcaacttgtaatcctcacattctagagatcaatatcaaaccacaacaggaagtagggtatttcgcaattctaagtggcccgaacctgtataattctgcgagtgattccagcgtgcctctgcacaaatcattgagtcgcgataaactacgtcgtcctacccaaaagcatcacgtgggtaagcccgtggtgcgcagttgggtcacaaacaccgacaattgccgtgccaggtagggggtgcgacgttgatagacgacgaagtcaggttcaacaccatgatcaccttcaatgccagagaagacttccactttagatccaactcctgcatcgcagatcggggaggtatcttgcaccgcatagtggacccgtccgggaataaatcttccctagtggtgccaaaaacggctgcagggttgccacgaacagcgccaatgagaattttgcgagtaggccctgaagcgcggaaacctcgactggtttttactccatgaagatggagccaaaatcgggcaggcccaggggtgttgtgacgcctatggctcggccgaccaagtcctcacctctggcatgatgaactctattgtccacattgcccacccgggcatggacccgaatcactcggcgaagagaagcatgtgcttctaggactggcgcgaccccgaaggcaccgccgacgac

SEQ ID NO: 177042 - DNA, 915 bp, Zea Mays
gcggcggcagcggtttgggatctaatgtccagcacaattatcaactaatcaccctgtaaatcgtcagtgttagtataataatctctactacgtgccagagtttaaacaacgggagtatgcgactttctgtagcatcacgagaccggccgaacccaacaacatacgtcaaacgaaatcggtacacctccaaaatcctgcggggcccgcacgcatttttcagttccattcccaacagccccaccacgcccaacccaacgcacacaccccgtctctgccaccggccgcagggcccagtggacaatggcccacctgtcattcagacattcgaccagcgtaatcttcagctctatttattactgctatatcagggagtaggcaccagcccaccgactggtgttagtgtgttacgggcttacggccgtgttcatcttgctgctcgcctgctctccccgttccgtcctgcgaggaggagatccgcattccggagggaaacggcgaagggtctcactcgatttatactcgtgccgtactgctgctgctatcttctctatccccattactcgtgcaatggcgaggaggccgtagtgctaagtggagcagcggcaggcagcgcagcgcaggccaacgcggaattgctcgctgctgcggtccagtggcgtggcggcacgcgtgtcgcgttccatgcggcactagcgcggcccctgagatccatccgcagcagcaggcatgtcgcgcgcgttgtacaggggcgtgtcggggatcggcggcaagctggcggcggcggacgaggcgtacgcgtactacgaccccaaggagcccagcgagaacagcattggcggcggcttcggccggggcggcgcgcggaagcggcacctcgcggacgcggcggtgaaggtcggggtcctgctgctggtg

SEQ ID NO: 177043 - DNA, 369 bp, Zea Mays
gtgccccctaagtgggatactgtggcatcccaaatgggtatggtggcatgccccacatttgatttgggacatatggtggaggtatgtatgtgtatggatatggcataggtggatatggtggtggaggtgtccatgcaggtacgttaggtcttaattgaacattatgacctcccgtcctttccgattggtgttgtaacacccctggtgttactgtaactaaaacttgagcatggcatcataagcattgacattgcatatgtttgatacacctagagtgcattcactaggtaaaaatttcaaacaagttgtattgtttaaagtgtttttgcaaataggaccctggataggggacctaacccttaatcaggc

SEQ ID NO: 177044 - DNA, 962 bp, Zea Mays
tgtggctatgtgcgatgggtgtcaaagagttaaggctgaacaccaaagaccaactggactactatacccattaaagataccccgagtggaagtgggaagagattgatatggatttcattactggattgccttgcacccagaaaggatatgactatatatgggtcatggtggatagattgactaaagtggctcacttcattccggtaaagactatttataaaggttctcagctagtagagttatatatggctcgggattgtgtctctacacggtgtaccaaagaggatcattttgggatagaggatcacagtttacctcaagattttggaaacgttttcatgagaatatggatgcgaagttgaattttagtccggcctaccatcctcagactgatggacagaatgaagggactaattaggtgttggaagacatgttgagagcttgtgccctttagcatggtagtagtgggacaagagtctaccttatgctgagttctcatataataatagttaccaggccagtctgaagatgtcactgttcgagactctatatggcaggaaatgtaggattcctctacattggatcagactggaggaagacatttttttggatctgaacttattcaagaggtagaataacaagtctgtataattagggagaacttgagggtagctcagaccaggcaaaagagctacgctgataatagaagaagaccactggagtttgaggagggtgatcatgtgcacctcaaggtgacaccacttcgtggaatgaggagattcaaagttaagggcaaattgttccctcactttattggaccatccagagtttttaggcgagttggagagatggcctatcaactcgagctacctgataatctatttgatgtgtataacgtattccatgtgtcttaacttaagaagtgtctccgtgtccctgaggaacagttaccaatggaagag

SEQ ID NO: 177045 - DNA, 366 bp, Zea Mays
cacgtggtcggggacttcctgaagcgtcggattgcaccgctgtagcagagggcgcgcttgtgctgctggttcaccggctcaaacgacatcggccgggtgcagcgcgggccagggactgacctgtcctaggaggagctggaggttctggtgaaggggattactggtgagtccttcatccccaagtctcttatcctccccgagggcatctctacgctctgcgacgacacagggttgaggacggcgattttggccacgctgccgaccctcaacgagagcggcgtggcggttcgccagaccggtggccgaaacccctaccgtgggatccggatcttcgatgcgctggctggaggcccccagactgccagc

SEQ ID NO: 177046 - DNA, 338 bp, Zea Mays
gtggcacgcctaggcttaccatcttagaaccgctgcaccggtgaacgccacgactgagccaccagtgaccttcttcctctccggccgcaagcacgccatgccaaaattaggagccaccgcccttggaaactataaattgatgccccagcctgctccgctgagtaattgtgcacctaatgaactaaccctcacctccaatcgtccctcacaactccccaatttgggatttcccccaaatcagtcaagaaccctaccgtgtgtgagctcgccgtggccagctctccacaggtccgatcacgccctcctcgctcttgtttcagtactcttgtgtgctcttg

SEQ ID NO: 177047 - DNA, 578 bp, Zea Mays
gaaaaggacaactgctgggtggttggcaacgaggaacgtacccatcatcaccgattcaccttttggtgtagtagccacctgggtataatacactcgtccagttttcttcaaatttttgcccgttgaagtgttggccgtgttcccctttccttgatttgagttcccaaaagtctgctgaaagttggatttgttttgcttcggatatgggtagtccttgatgaaatgtccggactttccacaattgaagaaaccaccggaggaactgggaagggtagggaaacgagcaccaggggcacttggctgattggtcatggcggggctaggagtgggacgaataaatacaggctgtctgaatggatatgtaggtgggcgaggagaagaacagtttgaattgaaaggtcggattaccaaccttgttctctttttaggtccctgagttgatctttcacctgcatattcttttgactttccttgccccgcatttttggcttcaactgacagtgttgtactgacagccctgctgtatgtgaggtccagacacgttgccatcttacgctggagtctgtcatttagtcccc

SEQ ID NO: 177048 - DNA, 374 bp, Zea Mays
gtgtgtttccgctgtggtgatgcgcatcgccgtgtagagtgccagtggagtggcaggtgttctatctgcagtcaggaccacaaggatgtggtgtgtaggaggaatcctaatgggaagctcagatgggagccggtgacttcctcctcttctcagggcactatcaacatgatgtcaagtgttgagcagcagttttcagttcctcttcctccacagcagctttatgtgcctgggacttctcagttcgtgccgatgcagggttttccttagtatcaggttgtgcctactcctgcaccgtctactcctatgccgactcagtttggagctccgcgccagcctcatccggtggctcagtggggttcttctgttaatttcac

SEQ ID NO: 177049 - DNA, 642 bp, Zea Mays
cgcctaacagacacacgtgagaccacaatccacatggaagcggtaaacaacgaagtccagctcaacttacttgactcagccgttgggacgcttccctcagccggcgggacatagtgcccgcttcgtccttgacggcagcgaccgccgaaatctcaccaccagcgttgagcgcaccacccttcgccccaggcaccgcggcagacactgtggtcgccaccacaggcggaacaacagcaagttgcccttcgcccgatcctgcagcgtatcaccagttaaaaaaacttacttaccaacgagataatcgtccacactaatattggtgccgaagtcgggaacacgcttccccggcgaaggcaattcccggaccttcgcagctccggccgtggcagacttggtgtcgccggctccggccgccttcgcgccctccagcaccttgctggacccaggggtggctggcttcgccgccagcgtcggctagctactgccgggggcggtagccttcgcagtcccccgagccctcttcggcctagcctcgggaagcctgatgatcgcccgacgcttctgcgcagcttcctggcgatccttgttcatcactgccgacacaacagcagcaatattccgtccgtaaggaaatactctcag

SEQ ID NO: 177050 - DNA, 334 bp, Zea Mays
tagtccccaatcttcacgaataggaaaggcagcatagaaaagtaaagacaggtagcatgaacagggtggatggaacacatattaaaatggttacacagggggtttaatttaaagttgtatgtcatgatgcataattgtcctattcgtccttacgattcttaccaacatatagtggctatcatgttctatggcggtggcatacctactcactccggagttaactagtcatactttcctagtgtttagttagtgtacctgtagaaaattccattacaacccatttccccatgatgcaattcacacacttggtcacaatttatactccatatatttc

SEQ ID NO: 177051 - DNA, 752 bp, Zea Mays
ttgggggaactgagcgattcaggggctctggtgagtaattggaggcacgagtgggtgtgttgagtgcacaagtacatagctgagtcgagggtgtgctcattttatagggcccttgagcggtggcccgtgaatttgtgattgcgcgttggcgatcggagggaaggggatgcactagcgcaagcgattagtggctttcaccgtggcgagctcaccggcgatcaccggatatgcataacgcgagctactgcgacgtggtaagatgccagggcacgtggcgcaagttcgcgaggtggctaactccggcgaacctatccacagcggctgtgactcaggcgggtacggcggccggagtagaaaagtggccggagttcatccatggcgcaatatttccttacccctctgcgttatccaactgcaccgagcatgaatcactgtggcgggcgcgaatccagggcgcacggtcgccgacggtgagttctctgagttagcgttctgatctggtcactgtaccattgaaacccgatttagagcgcctgacagaccgaattgcaatgtctagatctcgaatttttgtgcaacaacttgccaatacatttgtagcccttcttaccagctacaattctgctatagcaactaccctcaatcgagcaatagatcttactctaattagtcccaaaagtctggccaatgtcactggtgaccaaaattcagtcagtagagtgactgacagcacaactttgagcttatttttc

SEQ ID NO: 177052 - DNA, 646 bp, Zea Mays
aaaagggcttaaagtcgggctgacagtcagtcattgaactgaatattggttaacagtgaagttaggtgaactttgagattggattcgaccatgatcagtgattgtttgactatggttgctataacaagattgtagctggattatagggcaacaactgcgtaaggattcgcgctgatcgtgatgattcgtgctggactcgggcaggatagtgccgggagggtgaaaagatcagaaggggagcggatttggtcgcggggtgaagcttatcaaccgtgcctgtagccgtgtgacgtggtcgaaccgccggtgtcattgtggaaactccagcgacctcaattatgccacaccgtggctctttactgcgcggtagtaaccgtggcacgcctaggctcaccatctctgaaccgctgcaccggtgaatgccacgactgagccaccagtgaccttcttcctctccggctaccagcacgccatgccaaaattaggagccactgcccttggaaactataaattggtgccccagcctgctccgctaagtaattgtgcacccagtgaaccagccctcacctccaatcgtccctcacaaccccccaatttgggatttcccccaaatcagtcaagaaccccactgtatgtgagctcgccg

SEQ ID NO: 177053 - DNA, 641 bp, Zea Mays
ccccgctatttgtcaaggctaaaaatccccttgaagcagacgagtggatccgggttatcgagcaaaagtttgggcttctccgatgcatggagactcagaagcccttgtttgcggcacaacagttaagaggccctgccagcacctggtggggaaattatgtggctatctagccttctggtcatcaagttacctgggatgaatataaactggcatttcgagagcactacattccagaaggggtgctccatatgaaacaagaagaatttatgaagcttaaacaaggtggagatactgtcaacaagttcaaccatttgtcccagtatgccattgatcaggtcaacactgatctgaagaagagaatttgttttatgaggggccttaatgactggctacagtggaaaatggccacctgcctcgacctctcctacagcagggctgtcagcacagcactggcagttgaagccaaatatgcaggcccaagaaagtcaaagggctatggaggtggcaggtccaaccaggggcctgagaagagacaaaggttggtgatccgaccttttaatcaaaaccgttcttcaccacgtccaccctcctacccctttaaacaacctgtctttatttgccccgtcactgcccccacctca

SEQ ID NO: 177054 - DNA, 464 bp, Zea Mays
atttcgccccacttctgtgtgcattattttgccttctggtcagtcgtcgatcgttttaatataccgccaatgatgttttctgtctgcaatgcttgagtagcaacttggagtcatcgggtcatgcttcagactgctttatttgcgacgtcagtgctttggtggcagcgggcgagttattattggcgatgttggcgctttttgaagtaatggctgagtgatagcgggccacgtcggtgttttagaagtaacgactgagcggttactggtgatgttggtgttttagaggtaacaaccgaatcctttggagccacgtcaccgctttaggaataacaaccgagtgactgatggcgacgtcagtgttttagaggtaacagccgagtgatcgatggcgacgtcggcgttttagaggtaacagccgagtgataacgggccacgccggccgctttggaaacaatggccgggtg

SEQ ID NO: 177055 - DNA, 459 bp, Zea Mays
ctggaagccttgaaaaatggtgaggagcatctccttcaaattttgccattaagttacaattcttggacgaagtgacgagtactaggtctgatccacattcctaactgccatgacgaaggacttcgccatgactgctgagttaccaccatacgaagatatggtagcttcgcaactcataaggaattgatttggatcagttaggccatcatatattggtaatatggggtcctgtacaaaggtgccaaggtgtggcctgcagctctggtgtcagtggggaggcttcgtcgtagaggaaatcttggaagttgactggttcatgacgaagattgtcttggttaaaaccctcataattctggtccctgtagttgttttggtctgcgcttcaatggtgcacatttattcagttgctttgtcagtctttttctaaagcttagaaagacgaaacaccttctccttgtg

SEQ ID NO: 177056 - DNA, 463 bp, Zea Mays
cgcggttacacgcattctgggccttggagtcgagggttggcgcgacgctggcgacgtggatgctcatctgccacttgggccacttgctcctgtgcatcgggctggattttgacctcctgttgctgggcttctgactgaagactgtctggtaggatcatattcctggtcccttgaaggcctgcttgaacccaagcaggcgtgcctggaaagcactgctgaagtgcatccttgtcctcccaatgcaagtggtgagttctcgaggaaggccaaaccattccacaagtacctgctgcacaagatggttacctttggttaagcccctagtctgtagaatcctgtatggaacgctgtgttctggcagggaggttgacaatgttgatgatgcggcgcccttgaagccagttgccattttcagctgagaaacatgaaccacaggatgaatgcgactcgaattaggaagttc

SEQ ID NO: 177057 - DNA, 386 bp, Zea Mays
cagcctatcaggaacaattcccccaaccattggaaaacttagtggcttatatagattatcactacaaaacaataatcttacaggtaccattgaggaatggatcggaaagatgacaaatctacaatttttaacactacagtcaaacaacttcatagggaaaattccaccttcaattggcaatcttacacagttgatagatatcttctctgtagccaaaaacaatttatctggttttgtaccatctaacttctggaatcttaaaatatcgaagttggaccttagccataacaatttccaagggagcatacctgttcaatttagtaacttagaactcatctggctaaatctttcatcaaacaaatttagtggtgaaattcctggaactt

SEQ ID NO: 177058 - DNA, 528 bp, Zea Mays
ctttttctctctggttgaagtcagacacatttaccaccctcactcacttcttcacctaggaatccacccagttttgacgtccggttcatgtcttgcagtgtgataatagccgcgagttcgacaaccacgcctcttgctccttttcctcacccatggcattgagttacgtctctcgtgcccctacaccccctccctaaaacggtcggtctgaatgcatcattcgcaccaccaccaacataaaccaccgccttctcttccaaacatctctcccttccctgacagctactgggcatagaacttgcatactgccacacatctccctcacccacttcttcgcctaggaatccacccagttttgacgtccggttcatgccttgcagtgtgataatggccgcgagttcaacaaccacgcatgttgctcctttttcctcacctatggcgtccggttacgtctcttgtgcctctttaccctccctaaacggcctagccgaacgcatcatttgcaccaccaccaacatgaaccgttgc

SEQ ID NO: 177059 - DNA, 591 bp, Zea Mays
tggcaagaaattatccatgctgcctgctttcctctcaagggatgtcttcacgcccccttcatcatgaagatgattgaagtggtgactcagtttcgctatgagaaaggcacaagacatctatcttacaccccttctggattgatccaaacaatccagcagggcgtctgaggaaagccccctctagctctcgtggacctgctacttctgaaccctcgcgtctatctccaggtcgtggatctcccacaccacgtggtcgtggtcgagatcgtggtcgcgggatgggtgctcctctggcccatggtattgcagcattcttttccatgtgcagaaatatatcttcagatgtgcatgagctggctcggcgacagcgggagactgacgacaatcttcgtcgtcaagcttcctctatgggtatgccatttgctccccattcgcctgatgtgcctcttcatcctcctccaccaaaaatcaatgagtggcaccagcaggcatatggggtgcctttcatgactctagaagatgaagaattctttgatgatcgtgagcagtttgccccgcctccccaccaaggggatccgggtcaatcctctt

SEQ ID NO: 177060 - DNA, 300 bp, Zea Mays
gatgtggtgctcttcgtgcagccggtggcgagtgagttaaccttgacaaaagagttgctgcgggttttcggagaagcttcggggcttgtcaccaacattagcaaatgctccataacaccaattcggtgttcggatcaggtggtggaggaagtacaaggagccttgaactgcaatgtggtgaattttccatgcaaataccttggcttgcttctatctcacaaaaggttgacagcggctaacttgctacctttgattgataagatcgctgacaaactcccaggatgtaaagctgccttgatg

SEQ ID NO: 177061 - DNA, 384 bp, Zea Mays
cgaaacattgagggatcagccacctgagcaccttgggagccagataacttgctagcggtgtcaatgggcgtgagggggatggcttgcagttgagcgtccccacacggtccaagatgtcatcagcatatttatcctgagagaagaaaattttggtggcagaccgtcaaatctccatcctgaggaagaagtggagctcgcccacatccatgacaacgaattcggacttgagctggtcgacggtgtggcagagtatagtaatagaggaggcagtaagaatcatgtcgtcgacgtagagtaataagtatgccagatgaggtcctcgcttgtagacaaacaacgaggagtcagagcgcatcggccgaaatccaatggagacgccgaaat

SEQ ID NO: 177062 - DNA, 1620 bp, Zea Mays
aattagtaagttaccagcagctttaaaatgatcattatccaatccgactccaacctttggttgagcacagaccgcctcaccatccataccgtcaaccattccagcccgagatgcagtctcattcaggaacaaacggctggctgtaggtccagacaaggtccacgcggccttactctcctgtgacacgcccgcaaggaaagagcaatggggatcctgcacgagccaggatttggacttcccatcaccgctaccatagcctggtgactgatcaagagcgccaggtgtgtgagtggagacatactgatcagcaaaaggggaagtaagtgccaacaagtctgtcggcatgcccaacggcagcccttctggacccaaacccgttcctagcattgtcccattaacaatctgattctcaagctgagacaccaaccccatgtcacaggccccatcttgaggcttcttagaatcaccatgcaaagagttatcttccatgacagtatcttctgctagctcctccagctgaaaagaatcatttccatgtttctcagagtaatcttcatcctctccttgctccttatcatctccgtctcgattacccatgttatctgtatctgtccacttccccgctatgagaaccttgtcaactttgaaaaaaatctcatataacccttcaccaactactatttcagcagactccggaatatgatttacattagtcactgccaccaaaatacgaaccacccccattttcctagtgtagcgcatatcaactttctgagtagcacccaaaatagtgcctattgcccataaaggaagaaaggagcggatttcaaaaggaaccccataaacattcacccaagccttctgcagataagaaataggctctattttttgattaacctcctgaatcactaagataccttctcctcccaacgtatgaacatatttcatagcaatcatacgttgaagctcaacactgcatgggaacggtactataaagccgtcagcatgcctttggaccgaccaattccacttcactggtataagtcttgagagctctgacttaacgagatcagcagagacattaccttccttcactgtaatgaaagtcgtaacaccatccgacctcggaattgcacccttagatccccaagttgggatttggaagaaaccagactcaccgcccgcaaaaccgcatagagctgcctgcggctttggaccattaaacaccggacactcctcagggacatgattatcttcacaaatttcgcaacaaagatcttcccgtcttttcttccccatgtctgaaacaccgggtgttaacacggcaacccgttttctagccatctcagactgagcgcctctgctattattcataacctccctgtccactgcaccaagtgacgtagcgggcgcaagaaaacgtccaccacatccccgccaagcaccgcgaccacgtacctcccaactacctcgaccgcggaaagacccactgccaggaccggagggacgtccatgtacctgctgacgccgatgatccaccacacgccagccagcagcatcagaaccagcattagccataacgccaggccgacttgaggacgaaggaaaatccccaggaag

SEQ ID NO: 177063 - DNA, 559 bp, Zea Mays
ctcacctagaacttgagcacgttcaccttgatccctagctcaaatccttaagtccccattgacaaaattgttctaaactaacccctctgcaacatgtgtgaagatggcatcgagattcgtgccctagacacatcaaatctgggatttcctctcggagttcaacagtgagacaaaccaaacttcatcactccatatctttggctccagtcagcaaaacccataagcctccacacataaacgacaaaggaatgtcaggggaagagatctctcaacgggatcatggccaaaatcgcaaagttttggagccaatctgcgattgaacttgatctctctctgcgctgcctcgtgctcgacgccgtgcctaggcaccagagcgcgcactggcgctcgcccgcgcacaccctgagtgcgtgtcagagccacccctcggtcgtgcttgcccgcgcctttaagaccacccccagacgcgcctcacctcactccgcactcacctttgctgaccagacatcgtccttagctctggcgagctctgcgccacccgcccgagcctccattttct

SEQ ID NO: 177064 - DNA, 449 bp, Zea Mays
tcttccaatccaaagcaaggagagaggtcggccacattaaaactagaactcacaccataagtatctgacagattaatttcataagcattttcgttgatcttgcaaagcactttgaatggaccatcaactcgttgttgtaatttgcttttgcgttgttcaggaaatctttctttgcatagatgtacccaaaccatgtctcctggttcgaacaacatctttcttcaacccttgttggcacactattcatatttcttggtcattttctcaatatttgctcgagctttttcatgaaggttcttgattaactcgactcgcttgctagcgtcaaagtttactcgttcctgcacaggcaatgacaaaatatctatgggagttgtgggtttgaagccatatacaatttcaaatggacaaaatttagtagtcgagtctacagctctgttgtatgcaaa

SEQ ID NO: 177065 - DNA, 644 bp, Zea Mays
cagacaatgatttccgtcgaaggaaggaagaggccttcagatattccgagatgaccaggggcttcagtggatggttcaacccaagacatatcaggaccatacacaatccaaatcagaacaaagacaagaacaatcacaatcagtgatagcaaagtcatcctcagtcctcaggaacctagcaaaataccttcagaccactggccccaatagggggaagaggaagaagttttggaggaagattcaactctcaaccaaggaaattgttctgcctttcctatggagaggacaatgggcatacaacaagaacatgtcaagtcacaatcaagaaatagaaagaaatagttgaagctgaagcacagcagaatcaatcaaagcaggtcctccacactacctcatactactccccatacatcctagaatatgtttgcaaccaacagcgaagtccacaaccattgggctcggttgcttcggcaagtcactcttcggctcgatggatcctgccctagccatttacacaagcaccttcgtcatatgaccaacaacatcgaggataacttcagatctagtcgcagttcttcgcataggacattccacagcgagacaagggaacaatccgaagccagaacagtaaatagtactatacc

SEQ ID NO: 177066 - DNA, 1288 bp, Zea Mays
gcatgatcaagcaagtatttgcctcggattgctataacaatattgtagctggatcttaggtctagaactttgctaaagggagtcgatcatgttactacacaaaattggaagttattggctctgtaaattcccctgtcagaaaccctgatggagcatgccatggtacagtgcctgattaactgaagaagatctcccccgtgctcgtcgccggtacccgtcgccgttgattgccggtcgttgtgattcgtgcgccgtggccatcggataagtcccgcccggtaaaaattctcgccgccggtgagctggactccactccgaggactcccgtcgtactttcccccttgcccggcaaccgaagcggattagctcgccggaggaccaccgcttcccggcatcgcgccgtgtggcctagctttctaccgtgccgccgtgactcccttgggccatcccatcagcgccggggagcttgccacgccgttggccacgtaactgcgcgcgccaggcttcttccccgtctccggccgccaacacatcgcggtcaaattgtgagccgccgcccttgaagcctataaattgagggcggggacagttgcgccatataattgtgaagctgtagcaaccactcctaccctcgatcgtccaccagcacgcccgaattgcgcattctccccaattcggttcaagaacaccgcgaagagcaacctcaccgcggccagccctttctaggtccgtccatccctcactctctcttgtttgagcactctggtcaccctgcgatgcttaccgaacctctaattcgaactaagagactaccactcgccgggaacacgatgatcttgccacgctgctcacggtcaccgtggccagtgagttttagtgcgcaattggtggaattaagttaggggaaacatcaattaaggtatgaattcggtgttagtcgacggagagcgctagtcatagcccctattggccggtctacgcgctcgccggagcttctccgtgcgctgccatcgtcagggacgtgtcgggtgaaggaatagatgttggagggcttttctgcatttggtcagtgacacagaagaacagtaaacaaatctgttttgatttatttaataaaccgaggtcctctgtgcaaatctaccgcgggcgcgcgcgcgtgggcgcatttctgctggtagtgggccgacctgggctggtttcggcccaagtgctgttcaccgtttgtctttttcttttatccccagagccaaaacaattatagaaaagtgtagaaaaatgctaaaattgt

SEQ ID NO: 177067 - DNA, 616 bp, Zea Mays
cgactgcagcgtgtagggggctctttattgtcagccgctgcgggcttagagcctcctatccaagaggagggggcacggtatacttcaattgaaactcacgcgttaccaaagcaaaaggccacgcctaagcacttctacgagcggtaacgcatcagcctatacctcaacagcctacacctcaacctacaaatgcgccctgctccgattatacggtgaacgaaccggcaccgcatgacaggagatctacacggcgactttcctccgagttgtcaaataaagcaagagccttcccggaacgaaaggaatcccaagcaatagcggcggcatcccaagccccaacggcaagaataacagagggcagagcaaagcagaagttgagcagagcagccccagaccagcacgctcaagcaaaacactctccctctcaaattccaaaccctgccaccacgaaccattgctctttccccattgcacatttaccccaccaagagtaacccgccgatctagagcgcgcccaaggctagaacagagcaatgcgcaaggcgctcgtcaacgccgtcctcttcccggctctcgccgtggtcgtcgctctggccatctgctacttcgtccgccg

SEQ ID NO: 177068 - DNA, 870 bp, Zea Mays
gaaaagaagaagagaaaacaaaatagggaaacaaaaataaaaaggtattcctgcgcttgggccgtattcgctctcggcccactagcactatctcgcttctagcctagcttcattttccgcaccgcgccatagtatgacacgtgggacccatttccgcggaaccaataatcttgcgcgcgcctaaagttgccgtttcaccaccacgtgaggccatatcgttagtgggccggttctctctcgcgctcgcgctttgcctggcgtcgtccgcgctgactgcagtacgagacccaccggtcagcccatctcctcacctgggcgcgactggtaactcacgtgtggggccctgttgtcggggttatcctctctgtggcgcgtgcgctccgggagatgaagtccgcgcaccagccgtcgggatctccgcgggcgatggctgatcgcggctcctgcggtaactacccaaccgggtgctgctcgggataagatggaggggggaaatcgccacatctgcacctcccctcttccttctctactgcctggcgacgagagagcgaccgggagagtgcggtggagtgcattgctgccatgaactctggtgaggccgtgtcatggggtctcggtgctcgggtgaggatgtttgctggtgaatatcggatgcgggggtcatcattcgctggcgcattaggccaagacagcgtgggaattgctcatcggagcagtccttcgccatgggtccgccgctcaccgtggtctgtgtcacatgcgcgtcaatctatggtgagactcctcccctcagtttcgttatcgtctccgttgcatgctgcactgtctgttcgagtgctcgatcgggaatcagagcttttggctctgccg

SEQ ID NO: 177069 - DNA, 368 bp, Zea Mays
cggtggtaagtatatatttaacatcagcatattatggcccttattgtccgatggtgttggactgttggtgttctgcatttgagcacgtcctcggtgacaacaggcgcttaactttgggggtcgtttggaattccttatttttggataaattagaatgaactagactattcgacttgaaatttgatatttttttaactgtcaacgaagggggagaggctccccacctaggttatatattgccttggagccacacaagatggagccacacaaacaaggaggcatgactgtttccgcgccgttcgcatgcatgattcagtacagacacccagtgaggagcttcccatttctgtcgttaatcgggcaagacc

SEQ ID NO: 177070 - DNA, 593 bp, Zea Mays
ccaagggttgcagcccggtgcagttccccgccttcgtccacgccttggccgagctgcgtgggcccatcctcgcgtgggttaaagcgcagcccgatcccgtcgtcgccgtggtcgccgacttcttctgcggatgggctcagccgctggcccgcgagataggcgccgctgggatcgtgttctcgccgtccggcgtcctcggcaccgccgtcccgcactcgaccttccgccgcctggtgaggcgccccgcggagtgcgatggcgacgacgagttcagcgtctcgttcccggcgattcccggcgagccgtcttaccagtggagagagctcttgatgatgtacaggaactacatggcaggcgctctggacgagcaggtcggcgcgtcggtgaggcagaacttcatgtggaacctgcacgacagctgggggttcgtgttcaactcgttcagagcgctggaggggaggtacctggagcagcctctcgaggacctgggcttcaagcgcgcctgggcagtgggccccgtggctccggaggcggacgccgcggttgcccgcggcgggcaggcaaccgtcgagctcgccgatctcagcgcgtgg

SEQ ID NO: 177071 - DNA, 627 bp, Zea Mays
cattctgggttaaagcgtcgtggcttttttgctatgattgtttgaggatacttgaaaccaggttgtggtctatgaggacctctaaccaaataccttcttcttatctcttcttgtagctttaggccaggatattctgttattctctttctatcagccggatcataagcaagttcatctaaattgacatctcttggtgacagtatcaaagaaggacgagtttgagcattgatggttgatgcaccttgatctctatgtgaagtcccttcatcgctcgctggctgtggtaattttctcttcaagaaccgctccatcatatggattaatggatactacctgtatattatacgatacacaagttaaattgtaaataaattagaacgtacttatataattggtataaactgggcaaggaaccctaccaataaaactactagaaactgggcaaggacgcaaggtgccagcgccatcacccatcaccatcaatccatcatactaatactttaataaattaatagaaaaacaaagaacactcttgcggtcttgcctgcacgtcttgggtctcttgggactccggacttgggcgattgggcaaagctcgtaacctgctctcggctaatcgacttggca

SEQ ID NO: 177072 - DNA, 554 bp, Zea Mays
tgcctctgcctctgctgaagctagtccaggccttagcgtgccttaagccccccatggccgaaatgcctcgctggagctcctccggtccacctgaggccttccctccgccgttctcccctctctgcccacggattcacgacctcttccccgccactgagtttgccatggcgtccttttcctctctgcccaacttcggcgaccccggagccaccctagctcgcgcctgcctcaactccggcgacctcaccgccgtggagaggagcagcgccaccctcagccgtttacccctccccgatctgatcccctcagtccgatcctgatcgcacggcccagatcgcggatactgcttcgcgaacacgcgccctacgcccctagcttgcctgtcagtgcccgtgttcctagcgctaggcccgctcggtcagtgcgccctccccctctgtcactgacgcccctggcccgcctgtcagcgctcgcccgcccgcgcacgccctcggccgcaaatctaatctcaggcgttggttttagatctgacggttagattcacctgatacccc

SEQ ID NO: 177073 - DNA, 329 bp, Zea Mays
gcaatttatgttacggtcggttcactgttaccatttggaattgtgagatccaagggcttaaacagtgatgagtggaatggggcagcagtgttgtttcagtaaacttcagagtttggttttacaaactgaacaagatcctctctctgctgtactccacccatgtgctcgagttgggatacatccttaaagatctcggatctctccatactgtaaatatccagggtttggactgttgtgggggctgtgagcagtagagtccttatctattttgttcactgtctctagtatgggacacggggatatttgtgtgttgggcttgtgtgtgtgac

SEQ ID NO: 177074 - DNA, 606 bp, Zea Mays
ggctgttagactgccttaagtctgaattcagactgacagtgtgattgagcaatctttgagatgggattcgagcatgatctagtgagtgtttggctatgattgctataacaagattgtagctggtttattaggctataattttgatacagagagttgattcagtcattacataaaatctggagtaaatcgatgccaaacctgctctgataagacgactgaatgagcttcgcgatggtacagtgaccagattggatcgccagctcagagacctcgccaccggcgaccacgtgcgtggattcatgctatcgccgtgattcacgctgaattaaacatggataacgatcacggggtgaaagatctcgccgtggatgggctggaatgtactgtgtgcgtgatggttcataagtgcacaccgacgacgtggccgagcggcaatcaccggcgtgttcgccattcactgggtggacgccacgccttaggaggtttatcgtgtcagtatgagtcgaggtgactatccaatgaccgtcgtagttcagtcgctctgcggttgccacggtagatcgccgccgtgactcattcccctatcggctgccagcgcaattcgcc

SEQ ID NO: 177075 - DNA, 897 bp, Zea Mays
tcgacgctggttacccaggaaacacccctttaggagcgataagaaaactttataaagaacaccgtggtcaccaaaggaccgcctaaacgtcttaacacaacagaaatatatgctcagctgaacaaccttgtcctaaatgaaaagggggacaagtacgaaggatttggagtggaccacaattggacacatatatgtggtctctaggagctcccttatatgtcatcattgaatcttgtgcaacattaatgtcatgcaccaagaaagtaatgttgctgaagccctcatacacaactacatgcattttgaaaaaacaaaggacgatctgaaagctcgaagagatttagcaatgctttgtgaccgaccaacccaagtgctcaatgacaacggcaagccgccacgtgccttgttctgtcttacctctaaagacaagatcgaggtaatgagatggatggaaaaaaaattaaatttcccgatggttatgttgcgggcttgaaaagagctgtgaatttgaaactgggttaaagagccatgacttccatatattaatggagaggattatccctgtcatgtttcgtggttacatgctcgacgccatgtggcaagcaatagctaatctaagttatttacttatttctacaggcagagttgtgccaaataaataagtaaaaatatgatggagaagttggagaaagaaataccagtgttgttatgcaagctagaaaaaatattcccacctggattcttcaatccgatggagcatctacttattcacattccatacgaggcaaaggttggtcgacctgtacaatataggtggatgtatcacattgaacgtgcactcaaaaacccacgaggcatggttcgaaataaggctagagtagaaagatgcatcgctga

SEQ ID NO: 177076 - DNA, 527 bp, Zea Mays
ggaactctacttatatcatgctcagtgttgctacttgttacaaagaggcttttgatcgtttggctgaatgtgaaagagcttatgatttttctccaagtgaggatgaatggaagtttgctagtgaagtttgcgataggttgaaattgttctatgaaattaccgaattgttttttggaacacaatatgtaacagctaatgacttctttccaaagatatgtgcaattagaggacacacgagcaagtggctagagtgagatgatgagttaatcaagtccatgtcaagtcgtatgattacaaaatttgataaatattggactgacattcatggtctaatggctattgttgttgttcttgatccaagattcaaatttggaatgttgaaagcatgttatacacgtctatttggtgcacaaagtagagcaatgctagagatagaaaatgtgaggaaattatttgatgaactgattagagagtacaacaacaaatgcattaaacctattactagtggtggacaaaatgcatcatca

SEQ ID NO: 177077 - DNA, 430 bp, Zea Mays
ggttgagttcacccttttggctaaaaatgctagttagcacttaacggacatagatttgtaatggctaagcttgagatagcatgtatgccctgttttgcatgtttcttccctagttgattgtgatatgggagttccatagacattgatgtattgaacttgtgtggtcggtgatgcttttgtgtgataaataagaagaactaatgaaaagccgtagtaaattaaataaatgctcgtacttatggggtcgtatttgtgttgcgcaaatatacaaaatgtttgtcgtcttttagtggtgttaaatgttgtgcgctcgatgatatgtagttagctaacgctagtgtgtgtggttgcttatgatgtctcgctacttagtgtttaattcgctagcgtatacttaaagtatcttgtgctatttcattgtattcatcca

SEQ ID NO: 177078 - DNA, 358 bp, Zea Mays
taataaagagagagctttacgaattactcaagaaagaaatacaatctgcagcaactagatgctcgacacacactggacaattattgcaatctgcagtatgaaacatccattttgctagctgggtgagctcgtgagtaactgaattctgctccttttgtgtgcttgaggagagataggcatgtgcgtctagagaggacctatccctgactgcgaattggacaccccaaccctcaagaaggcacacttgggtcagattgcaccaacatcatcaagcacctgatcaaactaactgctcagagacccagctatagctttgttatccaggaagcactagaagtagcagatatactcccagtag

SEQ ID NO: 177079 - DNA, 791 bp, Zea Mays
ggtggaaccgctatgtgatgcagagtcccgtccatgtctgcaacacaggagatggttctgaagcagaagaccgctccttggctgaaggtgctcatgctcttgaaggtgactgccatggagtcagtgttgatcaacgtcgcaccccctacctggcgcactagctgtcggtgtttgttaaccgacctcacaccatggggttatcctcgtgatgctttttggcaggttggcgtcgtcgatcgcgactcgatggttcatgtagtggactgacgggagaaacacacaagcttgtacaggtccgggccgcgcgagaggcataacaccctacgtcccgcggtgatcttagtattgggatgagattacaacctgtgaactatgagaacggtgggctgaggtgagatgaaaatggtatgggtgtctcttggccttatatatgcgaccaagtgtagctatccctgtacagatgacaaacgtaatccattttcctgtctcctagtttgtagcgaactgtcctcctacatcttgggaaatccctgcgctcatccgcctgagttaccgtcggaggcttagcctgttgggtaggtgcaaccatcatgcccgacataaccgtgctctcgtggcgcctaacttagacgtgggcctttgctggatcagaatgggcttgcttcgcctggttactctcagtcgacccactataggacgctccaaggggatgcttcctaggtggccggaatgtgtttttcatgcacatgtggacacaggggatatccatcccccacagctctttagtgaaa

SEQ ID NO: 177080 - DNA, 931 bp, Zea Mays
gcttgagttataaatgcagtacgaagaatgggaaggtaatagactgcttgatgaccatggataagcttgtttagtgttcgtgttacctattggtgtcgaagcagacaacactagggtcacactaagcatgggtaggaaccggacaagaagcgattagcacaagaccatggctggcagcaagccgttggcgcagggtcagggtgaaatcaataggaagagataaacgtagggtcttgttagtgttgggctgttggctttgtgcttgttgtgggcatcagttttgggcttcctcagctcattccggttcgcgaggagctcgttaaatacaagagctaaatttacggctccttaaaaacttaaaacacgtcgagtagttgcgacttcactagagtttctgactcaggattcatgacttaggattcaagatatcatgtttctttggaagcggatgtagttcgtgactcgtgagatgggagcggcggagctgatcgccggaattccccacaaatcaagcgtgggagctccgaacacaagccagcagcaacctgggcacggccggcatcggtcacgagcgcaggcgtaggcgtaggctcactagtgccggatccggatccatcctggaccggatatcttctctttggggcgacgggccctgctgccctgtcttggtccataatcccctggcactgtctcttgtcgagctgtagcatgttgctgttgtctcctgcccgactcctggaagaacacgtcaatcgcatgcagtagtctctgctgctccgcttgcgccgtgccagagtctgtgcactggttcaccatcaggccaaagagagatgcgagcacgtcattggtgcttctcgcgactttttcaaccctttgctctggcaacggtgctttggagcttccctcgtagacctggcttctgcacacctgc

SEQ ID NO: 177081 - DNA, 553 bp, Zea Mays
cgcggcggcgcccagctcgacagtgagcaattgtggcagcgctagcagccaatttcgagtgacacaactacgatcaccttccaaggagctcgatgaagcgcccaagctaatctctaagatgcgcagccatggcccatgcgaaaattgacgacgacccctctcgttccctccgccgatgtgggtgaaatccggtccccccaagttccgtgatgtagcgacggttgcggtgagggttacggtgatgccgatttgggttatatagcccataatgggtgagtccaagcgaagaaaaggcacaggactgttgaagaccgatattccgcgtttctgttgcggtctgacactctgacgcggaacgaccatagggaggaggatgatcctacccgacgggccccgcatggttgtgccacaggcaatccaaatccacccacctgtgaaggacaggagcgtgcggagcggatccgagagcacgccagcgagctcggagtttgcggtacacggtgctcttggtgaaagaagactggcaaggcggtcccacacgtctgagaccgat

SEQ ID NO: 177082 - DNA, 804 bp, Zea Mays
gctcggccatccttaaaccttcgctgttattgtccattccgtcgtggtggattcgagatccaattcgccaactggggcggccgccattggtggcgctcggggccctaggttcggtcattggtgatcatcgtgttgtgcctggcgtacttattgcggtgtcttgagttgtgggcaaccgggagcatgacaattgctcatcgtaactccaccaccactgtagtccacacctccctatggccgagcctccacttcatcttctgacgatggtaagcacctccgttaagttcccctcggtcccctatatgaatagcttcatttggactagaggattagtcaccacatcacgatttcgcgcaacgccggtgatggcgccgccgcatgggctcgagcaccgccgtgtatgaccgtcgtcaccgatagggaggggacgatagccctggaccgttggatctggggccagcggacctgattaaaccatcccataccccttcgcacattagatcacgaccatagatcgagcaaagggtagtcaagattagatcaggaaaccattaagccccgatcgtccgacgctagttgaacgcttgggatcgcgtcgtgcatacccctgcgcgcttctaattccgaccgtggatctcagttccaacggctatgggcatgtaccggttcacggggctcaggctataatctaagccattgaaaccagatcgggcgactcacgatgaccgatacccttttggactatgcattttgcagaagagaccctatgcttctaggtattcaacccgtcgtcctatgcggctg

SEQ ID NO: 177083 - DNA, 416 bp, Zea Mays
cattttctttactgcagtaggaaactaaagttgataggaagtgaataaatgatttaggtttgccagtgcttctcatataaggtaaatattgactattttccctgattccatttttctaatattcctactccctccatccaaaacagtaatccgttttgcctttctaggtatgtatcttttgttgtgcgcctaaagatatttctaggtatgtagcttttatctgtcttaactatattagtatgtttatttcctggtttgaggtactaaaaacaattttgggttattattgatctaatactttttccggtgaaacaaacctgcatttgaacagacaaacactgatgagactgaatgtcctgcgtgatgtgtacatatttcttttgttggagtctgatgaacagacaatccagttgacc

SEQ ID NO: 177084 - DNA, 462 bp, Zea Mays
ccgggatctatgctcttcggcagggttgacgaagaaattttgggatgtatccgtgaccgcgtcgtggcaaaaataatcggcactctgtctaagagtgttggtttcccgaagctagaatctgacattagtggttaccgacgacaacacattgtcgacagcctattttactccaatttcaacgtgaaatctgtgtctagattcttgttatcctcgtgatggattaaaatattctaaccttaacttgttttcgcagagcatgctgttaagcaaggcactaagaatgcagcaagattttgaagataagaaaaatgaaataataattgaaggcttcgagaacaaaattaaagattttgaagcctcgcttgagaagaaagattttttgcttcaagcaaccgaaggttctctcgcggaagctcaagctgagaatgctaaattgagcgaagaactttccaatgcccgagc

SEQ ID NO: 177085 - DNA, 353 bp, Zea Mays
ctcataactgcactagacttcatttagggagaatgcaccaagctgctatacccgacgggtacccgatatctacctgatacctgatgggtacgagcacgggtacaaaattttacccgtgggtatagtcacgggcagccatggataatccccgcggtatggttgcgtgcgggaatttactctaccggagaacgatagttacattgtaggcatcgagttagttaccaagctagtgacataagtgagttggtacaagtcatgtatgactccaactctatggtaaccagtgtatctttcttatctgttggaatctttgccatatctcttattctgatgatatctttgtcatatatgtg

SEQ ID NO: 177086 - DNA, 962 bp, Zea Mays
ggtggaggcgaccttcttaggcgcgccaccgccatccgagccgagccgcagcgatccagatccaggtaccccttttggaccacccttgcccctctatccctcgccccatcggcgtccgcgtgtcctcgtcccctgagacgccaccggcgtggagatggagtgacgatccgatcagatctgattgctcgttttctccgagaatctctcccccttttgtcggttgtgagctctgaaagtcgaatatgccatgtttccctccaatccatccagttggcagcttgtttgccgcgtggtggagttcgtactgatgtaggtgatttggtccaacttttcgattttatatgggtgttcaactgagcctcttatagccctcgttttatctgcccgccgctctggaatgtaatacactccgatttgatgtgaacacaaactctgtgaattctgacatgtatttatgatccgtttaatagcagtgttggggctgccttgtgcaccgaatcagtgattgggcagcgtaatacaaagagggagcgcttgatcatatgagctggttttgtacagaatgtcaggtatagccaggtgctcgttgtcgttgcttcagttttaacgagtcggtcaggcaatgcagctaacgttatggcgtcggtcatgctctgttgcagagagtaatgtggatagcatccagatatctgttagtaacgatgagaggaggaatagggcagatgccgagatctcggaggacgagccgaggcacaccaggatgcggaggctgaagaagaaaaccttgcatgcatcgacaagactcacacactccctgaagaagagggggaagagaaaagtggactgcagagtgccaaggatagttatagaagatgtcagggatgctgaagaagagcaggcagtgaactcatttcgggaggttttgtttgctagggacttgctaccagtcaagcatgataatt

SEQ ID NO: 177087 - DNA, 617 bp, Zea Mays
ctgttatcagttcggctgatctggcttcctggttgcatgagtggcagttgatgtccgatgtgattcgtttgcatttagagcgagccaagttacgcatgaagtgtcaatctgataaaggtcgttcggaacgccagtttgaagttggagattgggtgtttctcaagttgcagccttatgtgcaatgcactgttgctactcgggcaaatcaaaagctggcattcaattttttggtcccttttaggttatacaacggatcggtgctgtggcctataaattgcagctgccatcttatttaaaggttcacccggtttttcatgtttcgcaattgaagaaggcgttgggagatggaatggttgtttctccatctttacctactgacaagtatatgcttagtgtgcctgaaaccattttgcagcgacgcacggtcttgcgaggaaccaaatcatgtgagcaggttttggtgcgatggtcattcatgcctgacgtgctggccacctgggaggatgccatcgacttgaagcaacaattttcggaagctgctgtttggggacaaccagctcctttagcagggggaatgtcaggagcaccgatgtcaacatgaagcattctgttgtcag

SEQ ID NO: 177088 - DNA, 414 bp, Zea Mays
gtattttttgtgttttgtgatagttgactatttgaagatgtcaaaatccctttccgcaccactttgaggtccacagcatatctttcgttaaatgaatttatgatgtcattaatggacttactgctgtgtgctgtgacttaaaatatagcattccatagctgtttcctggacaaaattattagttggctttggcactgtcacttaacctatacatcagggccaagtacgcaaaagacaatgtttctatgtaccctatgcttactattttcttcatttataagttaatgaagttatccgtaagatttgaagggatgacattgtcaagtacaaatcgtcaagcttgcaacattgttgtagcgctatggacaagcttgttatttgtccccagcaattatggcttttattctagggatg

SEQ ID NO: 177089 - DNA, 414 bp, Zea Mays
ggaagacgcgggcgtgagcgcgaaggaactcggttgtgtcccaagcatgcgacatacgaaaaagtgggcaggcgagtcgttgaccgtggttagacacaacatggcacgggtgagttgggacgtggagatcgtgcacccgaacagttctctatagctcctattcagtcggtgataaggctggatagtagacccctacgaaaaaacgatagacagactagacagaaccatcttcaacctcaagacaccgttatgtaactaagagacatcgaaaacgatcataaccagaaaccacaggacgtagggtattacactcacgagcgaccagatctcaaatggccatggccccagctgcatcagtccgcaccactactgaaagtcgcctagaggggggtgaataggcaaatctgaaattta

SEQ ID NO: 177090 - DNA, 372 bp, Zea Mays
aaggacaatggagctcaaaggctatacgggaatatcattgccttaggcctcgctttcctttgtggaaggcaccaaccaccaagcgctgtccagacgagaattcaggcaaaaatctggtgaaaagaatggagaggggaacagaaaggaagggactacaaacgcgacaaagccaaaaagccggggctccgctccattgaagcgtaaccagcggtgccactgagtgtagacacacgtgctagctatggtcaaaccgtcaaggtagctagtgcaaaagaggttttccatagtcaccatgtgaagaaactaggatggaatgcatgctacccatgttcttcatcttcatcatcaaagtcgctaatgtttcgataaatg

SEQ ID NO: 177091 - DNA, 543 bp, Zea Mays
tcatggtcaggtgactttggatgtaaaatttcatttgtgtggcttatatgcattagaattcagagaacataacatttcatttggagctaactttgcttgctaggaaaacgggaggcagacaatgttacatcttagtagggttaacccaagcacataatggagttcaggtaatgagaaaaacctaacaacaattattccagtgctcgtgatccaatttcatctccagagtatgtgttctacacatagcgctgactggctaccaagcgttctgcatttgtctggcaccgattgacgcaaagctatgttgtaccctgcaaaatgggatgcaaagggttttcatagctgatgtaatctattcgattatgtaattccagtttcagatcttgcaatatgctactatcattttgtaacttcaacgttggttaatcggtcaagcaaatatttttatcataaaaatagcaaatagtctagctacacaactgttgcatttatctaacattctgttagaactacaaaggcagcgtgtatacacttggcaatgat

SEQ ID NO: 177092 - DNA, 719 bp, Zea Mays
tggcacattgtaaatactgatggtgacataaccccactacaatggccggtgtgtccattgtgtttttccacggttgaccacatgcagacgcactcctgatggtgatgactccaatttctcattgtgcctgatgtggtagtaccaaccacctatgccattatctgccttccctccacatggataccctacaagcgtgtacaacaaaagataaggtacaagaagcttggcgaatatttggaaacaaaaaaaaacctaaccttttgttggttgctttttgtgaaactggaagcgaatgtccatgacaaaaatgaatggatagatagaaaggtgtctgagctcgatcattacccaagcgtgtgcgtggttagctttggagtgggcagaacagttgcaaaaactgtagaacatctgcagtgctaatctttctttgtggattgatgtttatggttgtctaccaaattatagtcttaaatctcgtgtcttcttctttcagagcaaagactagcgattcctcgtcgcgtgtaaaaagtaacaagaattagtgggaaaagcgcaagtgaaaacaaaagccatgttgattgacaatcagtatatcatgaaaatgtttaagcatggatttatccattctctatgctcgtcgatcatgtaaacagtttcagaatccgtctcgtgtccccagcctcccccctccattcgtgcaatgccatatctactctagc

SEQ ID NO: 177093 - DNA, 612 bp, Zea Mays
gaggtaatgaggtagcagccagcgggtgtagcagggagaaggagccgcaccaacagcagactggcgacctggcggccgaggctccgcccgtgtgggaggccaagaagctccgagtggtggacgcgttttcgagcccacaggtcggatcaggcggagggagggccgaggcatcacggcgtggaggcagggggcaagtgcgatccctggcgacggacgtttgcgcgaggagatgatggtatttggtcctgcggcggcacgtttgaggagagcagggatggggctcctggtgggggcgcaagatggccattgagggggcagaatgatgtctagaagcatcgcgccggttcgtgtcagggcagagttcgcatgccaatggaatgcaatcggacggttgaagtggatacattatggtgatactcctgggtatgccttccagatcgtatcgaacgctcctgatccttttcgctgacgtggtcgaatgggaggcaagaattgctcccacggttaatatatagaaaatagcctaggccgatgctatggacgaagccagatccaaaattagagagaccaaattagattaggacagctattagaaacattttttcattattt

SEQ ID NO: 177094 - DNA, 336 bp, Zea Mays
ggcatcacctattgtggggagctgttgcagcacggatggcatgtaatcgacgtctatttccctttcttggacgatcttctggtggcaatccaccctgaagtgtgagaggaaccatttatccgccaccttgagcacctgatctttttgtcgttggacctcctcgtctattttcttcatgtcatcttttaatcttttatgctcagcgaccgataaattagtcagccttgtgctgctgtttggagaagccgtgttgagatctttagaatcggccatataagcctgattttgtagatcttcaacctcgtccccagcggagtcgccaaaagtatgttggtg

SEQ ID NO: 177095 - DNA, 705 bp, Zea Mays
gctgtaaaaatttgagcgaaaagttatgcccgttttatggaaggtacctcaagttatggttttccagggcacaaattggtaggaaccgttgcggcggctagcggcggctatagaacacaggggcacaaacctccatggtataagaaataggaaagcgccagatgatgaaacaaggagggctgcaatgcaatgcggtttgcaacctaatctaggggtagcgtggcgagaattcacacaaggcggctagcgagggaaaatcgagtaatgtggtgtctcaacttgtaatctgggaaaggtggatgggatagcggcaaaactaaataacggcaacggagcggttgaactacgattacgacacgacctaaacaagcaacaagactcgaacacgaacacgaattcaacaaagcaatctgaaacgaaattgcaaggctaaacagggttataggacaacggatttttttgtatggcaattatctggatttataggatgaaaaaacctaaactaaaatagggtaagcctgacggtaatacctgagtctttgaataccacttgataggaacgggggtgcccgatcttccctcaggtgaagataactatcgatttggtggagatgtcacacagacaatcctgcttccaatcaacacgactggaaccccgcaaccgcagcaccacttctcctctggttatcaaccgtgcgctacgcg

SEQ ID NO: 177096 - DNA, 409 bp, Zea Mays
ggaaattaacaggattgacatgaatgatgatttatcagtaagcatgccttcatgtgattcacttgaaggggcgggcaaggatggagatgaagtatcaaaaagttagaaggatgccatagctcctgcaactaagagaggaaggagagcttattgctggaagtattttaaggagattgaggttgcttcatcaaaggagagaggggttatggtgacaaaggccaagtgtagattttgccatactacttatgcttatactctaggaggcccaacttcacagctgaaccaccacataggaaagtgcacaccattgctaaacaaattggcaaagcttaaagctcaaggtacactcaactttgctcccaacaaggttggttctcttgttgtcaaccccaatgaatacaatcatgac

SEQ ID NO: 177097 - DNA, 1019 bp, Zea Mays
tttgaaagtcgggtataaaatattattgtatgtccgtaaagattcatagccttgagctcctttgacaatcattagaagcattctaagataatatctttcacccgccgatggatgtacaaaatgcatgcggcctatgctaccgtgtctatgtctttgttcccatgatctcttttttcatcccatctccattcagacggaaaatcggtgtaagttagagatcgcgcactctcatgtacttggttagcaacaaaccactcagttagcattgttcgacgtaggtattcctgtgataagatatgtgacatgttggtgttggcatgatatgtgatgtaattttcattaggcaaatgcaccggcagtctagcaacaggagggaagtgtctgtgaatttcaaagccgaaaatcctccaacatgaatcgtatggacaaataaatctagcatctagatattccttgacctcattccttgtgttcgtttcttcatcaataggagtgtcttggccatctaaaactcgttgtagatataatttgctgcaatcaggacctttcgtaacatacttgaaaagatattttataaatatactcttgttacaccactctacattgatgtgcgcctgatatttcttcagtaatgtcatgttatgaggaacgatccatctgttgtctaatctggtgtttgatttgatgacaaatctagcattgctcgctcttttataaactgcaaatccatttgtatcaactacagtttcagtttgaaatagtttaggatagtgcttggaacaatggtttcttttcatacagggtgagttatgattataggatccacatggtccatgaaccatatgctcgacaagcaatgcgtatcctaatggatcattagcaggatctggtatttcagcagtgataaaagagtttataaattcagctattggttgcgtagtgtcggttgaaacccagaaaataatgtgtgcatgaggcaagccacgtttctgaaattctattgtgtgcagaactgcatg

SEQ ID NO: 177098 - DNA, 287 bp, Zea Mays
gcttgtacttttcagggatgcaacggaagagcttctcgacgatgactctcatcgtaggtgtcgtcgccgaactacaccatcttctgcagaaatgttgatgcagagagcaaatcgtcaacattctcacctagcttgaaggccaggttttcccactccttgcgaagtgcatgtaatgtggtcttgcgagcacgatcgctgccagtgcgagccacagtgatggcgtcctaggcctccttggcagtccacttctgagaaagtgaaaactgcatctcgagcgggactgtagt

SEQ ID NO: 177099 - DNA, 911 bp, Zea Mays
tttgcgcgaggctgtctaccgatgctctgaatgtgaagcgactagtcggggacaatctagcactgaatgtccagaccgcatcgaccatcatgtcaggcttcaccatagcaatggtggcgaactggaagctggcgctggtcatcacagtcgtgatcccttttgtggctttccaagcctacgctcaaatgctgttcctgaaaggtcttaacagaaacgcaaaggtactacagccacactcaaatgctgtttcatatctcgtcttattaactgtttttttgatcggggcgcacagctgaggtacgaggaagcaagtcaggtagcaacggacgcggtcggtggcatcaggaccgtggcgtcgttctgcgccgagagtaaggtgatggacgcctacgagaacaagtgcgagtcgccgaggaggcaagggatgaaggaaggcgtcgttggtggcttggggttcggcttctcgttcgtcgtcttctacctgacgtacgctctgtgcttctacgttggcgcaaggttcgtccaccaagggacagcaacgttcccagaagtgtttagggtgagaagacgaatcgtccttatcatcatatagtacagttcgtcagtcagtcagtacgtgcatgcagcatatttatccagaacagtggcttctcaggttttcttcgtgctggctttggccacaagtggggtctcgcagacgagtgcggctggggcagacagtgccaaggccaacgactcggccgtctccatctttgcaatccttgaccgtgaatccaagatcgactacagcagcgaggagggcgtgaccatcgcgagcgtgaggggcgacgtcgacttccagaaagtctgcttcaagtacccgttgagaccgaacgtccagatcttcaaggatttttcactgaggattcctt

SEQ ID NO: 177100 - DNA, 640 bp, Zea Mays
ttgaaatttaacttctccgtcttctgcggtggccccgaggaggcgtggtactggcgtgagtggtggtgcgacttctctgtacgcagaaaccggcgcgccaggtgcatgacatgtgggcctgggccctcatgccagaggttggaccgctggttgcggcgaagccgagggggcgcacaaccgcggggcgattgcacgctccttgtgcggcggttcgtcctcttgaccgttggttgcggcgaagatgaaggggcacacaaccgcggggcggttgcacgctccttgtgcggcggttcgccttcttgaccgttggttgcggcgaagatgaaagggcgcacaaccgcggggatgttgcacgctccttgtgtggtggtttgccttctttgcgcttcgggccagtttgtatgacatgtgaggcctggcccccgtgtcataggatgggaaccctggtgcgcatcgggggagaccttgcctgtgacgcttcggagcgcgagcggggaatctgcctttaaaaaggggttcatccctcgagtagcagccatgtcttgcttctctccaactcgtggtgccctttcgccttcaagctctctgtgcccctttgccttcaaggtttctgctttgtgccgccatagtttcccatggc

SEQ ID NO: 177101 - DNA, 495 bp, Zea Mays
atggtccgcgaaatgctcgaagcgggagatcaggtgtgggggatagatatcctaaaagtcgcctagaggggggaatatgtaaaacctaaaatttacaaactttaaacacaaacttcaccccaggttagcactagaaccagttcatgaacatggtccgcgaaatgctcgaagcgggagatcaggtgtgggggatagatatcctaaaagtcgcctagaggggggaatatgtaaaacctaaaatttacaaactttaaacacaaacttcaccccaggttagcactagaacgagtataatgaaaattagagagcgggaggagagttcttcttgcttagagttgctcaatcagttgcagattacattgggagccaactcaaaacgatcacaagcaagagaacaagatagaggagagaggaagaacaaaatcgcaaagtaatgatcaacgcaaagaacaaggcgatttgtttcccgaagttctgctctgaataatgtacgcc

SEQ ID NO: 177102 - DNA, 530 bp, Zea Mays
gcttactaaaggcttactagacattgtgtttagagaacacacattcgacatatgtttatggtatagcctatgtttttgagacaataaaagggcccaaagttcaaagatctatttcaaaacagagacatgtattgtggttgtcaattctatcggcaattaatcgtgatgacgaagcatgctctatgcactaatctgtgatgcaatacaaaaagaattaaaagatataaagttaaaagtacaagatgaaatcaaggggggaatgttggaattgatctccaactgttagaccaatggttaactggacccttggcctcgcaccctgatcgagggcgtccagcccaagacgaggttggtgagcccctattgggcaacttataaatagacaggtaggagctgacggctaagacactatgtacgcatacgtcgtctttggttccccacctcaaaccctaaactggtctccagggggactgtcaacaacgggaaatctaccgctgtcatcgtcaagctcgcttccccgaccgtcgttg

SEQ ID NO: 177103 - DNA, 653 bp, Zea Mays
cttgtacctatatagcctatctaaacagttcagtctatgtgtccatgaccttcttgtcttctgagatcatttcttattctgttgttaagtcgctatctctcggcaatttctgtgcccttggtcttagtatgctcgtatctttggaatcttgcatactcttatattcttatgtatgcttattttcataccccaataactgttcaagacatttcagttgacatgtccttgaccacccctgtttcttaacggtccatgagcgatcatttcatgtcgcccatccttggtgatctcgttgttactttataacttctctcgatagtgagttcttacttcaaccattctattgcaccctcacctatcttacccttgattgttttctccacttcgccactacgcgagtcttcccttaactctatcatttgtcatgacttttgttattatcaccttcaccttagacatctctatatcttatttgaggtttatcttataccggcatttaaaatcttctccctttccatctcaatttgagcatcatactttacctacttttcccttggtcgtatcctcttctttgtcacctgcgcgttgttaactctatcctttgttgtgtttttgtttgttatttcctttacccttctcatcactctatcatg

SEQ ID NO: 177104 - DNA, 495 bp, Zea Mays
gagctctgctactcgagcttgagttgtttcctccttggcccaggcaagcgaacgagattaaactactcagtcgagtgccaaatcttggtccgcgagctgatctcgcaggtggcgaacgtctcttctcaattcatttattcggtcgccatctgcgacccatatatctgtcctgcggcggagttccgcttggagccgactcacttctgcttcgagatcccctatcgtatcgttgcttccactactactattaccatgtcttggggccagctagtgacatggcacaccaatcggtccagtatgtttgcgcgcagttctcctcgtgcgtggcggcatttttctaagggggaaatttgattagtatagttcttagcatgatgcatgtataattacagaatcaaccttagttgattcacaccttctatatgttgcactcttactacctggtctttaagataaactcttcagaatacttaggtaagaagggaagagattttc

SEQ ID NO: 177105 - DNA, 418 bp, Zea Mays
cgagcatcaatcgacttcggcacgacccgaagactagccgagacgttccacaagccttccacgacgcatagcgcgtggtccgaccacggcgacggagtttcccaggcccggagcttccaccgcgcgtctaccctacgcgcgacgcattccagcgaggccaccagcgactatcgacgccattcccaggacggaacgaagctccctggatggtcatggagaccctgccatcggtacttgcacagaatcgctggcggcaatgatccgccatggatcccgcacgacagcgaggtgtccccatccccgatcttggctaaagtgcctaacgaagtcgcgaggaggatgggaggtcatgggtgctcggcttataacccagaggcgtgggcacaaagccaagccggaattcacggacagcgttgag

SEQ ID NO: 177106 - DNA, 957 bp, Zea Mays
ctgttgcaattgataggtggaacctgatcgggaaggaattacgggctctcaaccagattcgagaccagttggaggttgtcatccaagagtcctaggtagccatagctatagatgccctccgaaggacaagaatggaggaggatgcactaaaggccaaagaggatgtgttgtctgtctgcactgcaacctcccaagcttataagcagacagaagcactataggacatgctacgacaatctagtagaaggtggtggcatagctcaacgatgccatgaagatggaggcaagctccatgaaggcataagacatcctagcaaaactaatcaaggcccaggaggctagaaaagctgagtaggaggccacaagggccaaggaggaagatgatctttaactttagtgttagttgatggatatcgatgttgttgacgtggaaacacgggagcaaatccttgcggcaaacaaagctcaacttctaaagtggctcaccaagctgcaaatggtagagcatgccttcaatagaaagatggtcaggtcatccatgagcagaccataatctttgaagcccatcaactttgcaatgagaaaaagaagctaaaggagaaagagggtcaccggaggaggtggagtgcttgcttctcgaaaaaggaaagcctaagtactctatcccaagaccctagggccttagagaagtccaagaacatagaggaagatcttaccctaatccagatgtcgcaaaaggaagagtgcaccttggtgtgggatgccctcgagtaggccgcctaggccttgcacgttgtaggccttacgtctatcaagagggtgatctcatagctaggagagcattagggtgccgcgcctgcttcaggttcattcaaattacaaccaagctagctaaactttgaggtaaggtaaatgctcaaccggcgattgagagatcctttaaaaagtgtccgctaa

SEQ ID NO: 177107 - DNA, 468 bp, Zea Mays
cgatgttcgagtcgtcgatcccagggaagggagtcagtatgaggtcgtctctaccgtccctagaatgggctgttggttgaagctaccaccgactcgatccatgttgcacggcttcgcgctggtacaccatgatctcggacgtactcctcccagcgccttatttcatttttgtgtcgttggtcgtgtgaagcattgatggtgctccatgcatctcgtcggctgttgatggcgtgacacaagtcgttcgcaggatgagcaagaggtagaagatgattggccgcctgagcaagcagccgctgataaccctccgcgtctagggttcgcggaagatcgtcggctatctgcgccagcactcctttgacttcactcggcgtgttcaatgctcgggcgaagtcgaggtataggtttcgagcgaggagagggttctcccgccggagtctagcatcttgctcagctagttcccattcc

SEQ ID NO: 177108 - DNA, 593 bp, Zea Mays
gctttgatgatttggatatggctgaagtttaaacggtagagaggatatgtctgtatcagatattttccctattttttccaaaccattaacaaaataaacatgtagatattttggggttctgaaatctgggtctaaaagaggtatgaataggtcgaatcaaacaaaaccggtgacaaaatttgcaccagatttgattcgatttaatttgaaacctgataattcaaccgcagtctgaacagggaaatagattaaatatcaatactaagttcagttctaattacctttatctgcgttgaacgacttactacttaatactcatgattatcaaccccgcgcaagatttctctcagacaatgcgcgatcttaattattttgcactgagtattttaatcgttaaattataataaatttatttgggacacggatcacaacgatggatcgagcttccaaattcgtattctcatagtccataaatttttaaacggatagaaaactcgacatatcgcgaaataaatacgcgagatcgatgtgacatcgaaagtgtaattctttcggaagacacgccacacatcgcttacatgggcgagaggatg

SEQ ID NO: 177109 - DNA, 1190 bp, Zea Mays
gcaattgcatgcgacctttgcgtcgactaaacctgttgtcagtgaggcttagcctaaacctagccaccaatccacctactcctggctttgcaaagctgcagatccaccttctctgctgctttcggcacaagcaacgacacagatttgcaagtgacaccagctgcagctgatcctataagtttctttgctcatgacctggcaacacaacacttgagcaattgtacgtgtagaatctctactgattttgggcattccatacagtttcttattttctttttgagaaaagtcagttttacatctgccagcgatgggcttattctaggattgttgcactccattcatttttttataggaaagatagttgcacgtgtgattgtttagaacctaaatcagtttgatatggaatgcagttttgttggtttgacgttgtggaaaagggttagcttactctttagatagtatttgttttgttgtactgttacactttcttttacttataaaaaacttacttagatggtttcaaaatcttaaagccatgcataagttttttaagattcaaatactatttagctgcaaagtgaacttttctctttcattcttcgctttgaatagtaggcgccatgacttatgttttttcatatctataactattaattacagattatattgatagtgtccggctttcctgcgcgcagtacagtcccttgtgtggctgagctattatgtatattgactatgtatgagggaaaaattgcagattgttttggatttttatttggtttgtgacttcgttggtgtgattctgtgcctcgagctagtttgtgacttcgttggtgtgatttttattatatggacactgctgtgtgtgtttagatcgtactgttactatcaaattattatagttgcacaaagctatgttgtctcgacattagtctctgtctttagccagagcaaggcgcccgaattaggcccactgcaacaagtgggagcccaaaataactgaagataagcagcccgcccaaccaagctggcgaaagggaatcagatccgtcacgtactcagataacagtaagcccactgcgaaatattatactccatctattgcggcccatcactgtcaagtccagtgttgactccacgcgctcgctgttcggccgccacacgtcttttgtgcattctgtgcctctcag

SEQ ID NO: 177110 - DNA, 327 bp, Zea Mays
gtcaaaaccctaactgggatcgatggggtcagaaggatgcgcctcaaggatctcaatcgtggaacaagaatcggaacctcagctagagattgaaaccaaatctcggcaaatcggatgtcaaggaggacatcgtggcttcgtcttctagcgatgggggtcaatcaggtatcctcaaaacccctcctacagtcctgctgctttgaaaaaagaggttgagaatgtgcgccgtcctttctgccaaaagtgtggggtggatggtcatcatgctagagattgttttagatctctgtggtgcgacatctgtcgcaaagaaacccacatgactgc

SEQ ID NO: 177111 - DNA, 498 bp, Zea Mays
cgccatcgtcgccctccactgacttctatgttgaggcgggaaagcgagagctgattcaatgtgctttgtgccccaaacaaataaaaggaggtatcaagaaggtgaaacaacatctagctagtggcgaaggagacattgtcaagtgtcataacactactagagagattgctaaagagatgaacgaagctttcaataatgggaagcaggctaggtcgttgtacctagatgatgatgtactggaagatgaagcaggaccagatgatgatgtccatgttatagggtcaatgtcagcatcatccaaggcatcctcatgtattgtgccaagttctggaacagctgccaaaagaaataaagcaattttccaattgaatccccacctaattgcagctccaaataagtctattgcatctatgattcgacgaacacctcaagaggttgtagtagagagacatgcaaagggacctgctcaaactaccataagtgctaccatgaagccta

SEQ ID NO: 177112 - DNA, 790 bp, Zea Mays
gcccttctgcaccggttcctaatgatgtatcggcagagaccattcctaaggttgatgccaagggttgtgatcgtgcacaggctgttgtctgcctgtttgacgaggatgaagaggaagaagaagaggaagtcccactgatccgcaagaacagccggcactataaaggtagcgagggggtagtgatattccctctccagctctgtcggtccttattagtcttcaggggctttcaatatcagattttgatcaagtactggaggaggtcgtccccgaagacatgctatcagagcctcctaaagatgatatcccggccgtctgttcagaggtcctagacggtgggctttccttgctcgattccgctgggcaagaggtaacccgagcgatgtctcgtgcatcgtcgactttggatggcagccttccatgccaagacgcttatctgagtcatctgactcccaggaggtggctgaggggccttcagccttagaggtggctactgcagaaggtgttgctggtagtgatccagctcttgtgggtagtgcaagctacaacccagcccccgagggtgttcaggtgtgctctctttcccatgcctccatggatgtccacgtcgggtcgtccccacctcgattcgatggagtgacggcagtacatgcttccactgttttaactggacaagttgccttagaggtcggcgagctagatgcaaggaacctattgtctgctggtggggctgaggtcaccccggatagtgctcttttcagatcgttcctgctgaccttccctcgtcgag

SEQ ID NO: 177113 - DNA, 467 bp, Zea Mays
gcatggcatgatgatggcaacagcagcccttgaatgccaacgaatcgtgcatcagcgaggagggggcgcagtacagtagctagtaccactagtgatggtgtagtgtaccggtacgttacgtacaatactacttgggttttgcttgcacaccattcccttccgctggcaagttcacctttttgcccccactccgttgcccggcgtcggagacagtactacaacaggcaccgattctgcggccggcttgacacggaatgcgagtactagtgcattccaactggcaggtggacaagagagcactgcagcctacgacgataggcacgggtggcgcccgtcagtcagttccaccacgtgacagtacacgcgacagatgtcaccaggccaggactgcttgctagcagggcatgcacgaggccacgagagagagccagagagggttgcaacttgcaagtaatactccagcggac

SEQ ID NO: 177114 - DNA, 388 bp, Zea Mays
tcaggacagcaagggaattctatggtttggagatcgattggttgttcccaaggaccctaagctcagaaagaagatattggatgaagctcacctttcaaaattctccatgcaccccggcagcaacaagatgtatcatgatctcagatccttatactggtggaccagaatgaagagggaaattgccaagtacatatccgagtgtgacacctgccagagaatcaaggctagtcatttgagggcagcaggtcctttgcaaccccttcccataccatcttggaaatgggaggacatctgcatggactttatcgtgggattgcccaatacctcccggcaccatgattccatttgggtcgttgtggacagactgaccaagtcagctcatttcttg

SEQ ID NO: 177115 - DNA, 486 bp, Zea Mays
gcgcgcggggtccggtgatggcgccgccgcggaaccagtgcgccaccgccgccgtgctcactgtagattggtgcgcgaaatctcggccgtcgatcctctgttggatggtcgggattagaaaaccaaataacgcttcggcaagggcatatagcgatcgttggatgagtatccagtggcggggagtggctccagcgttcattagatctaagccgtaggatcttgatccgatggccagtagcgcgtaccagttcgcaagtgtggtgatctaatctggaccctaggttgtagatcgggcggtcagaaacgcttggtaccccttcggcctgcaccttttgctaaagagaccctagggttaaaggatatcaacccgccgtccagtgagtggagcgctgtgcctgggaaattttatgcgagcagcccctgagttttctggttattgaggcccagtccagtcaactcgaaattcagattaaaataaaatagaaa

SEQ ID NO: 177116 - DNA, 908 bp, Zea Mays
aagttatgccatcctcaagaggccatgttatgccaagttcatggccatcacaaactacaccaacctcacgatgaagatgcctggcccacgtagggttatcaccacaagcacttccttcaaggtggcctaaagctgagagcgtgacaactgcgagctcacagcatcactggcaacgaccagggagtttgccgaactctagaagaacatgccataggacgctccagatgctcgaaaagtcagcatcggtaccttcaagtccgctgaggacacgaaggaggtcctagtcgacgcccaccaacccagccaagcaagtccacatgggggtagcgctctctagcaaataggaaggcacgttcgtcgacttcctcagtctaaccatgatgtctttactgggaagcctgtggacatgcccgggatcccacaagaagtcatcgagcactctctaaacatccaaccgacggccaagccaattgcccaatgtttctgccatttcaatgaggagaagcgcaaggccataggcgaggaagtcatgaaactcttagcggcaggatttgtaagagagatacaccacctagtgtcgatcgttaatcatgtacttgttaagaataaaaatggaaaatagaggatgtgtgtcgactatacgtgccttaacaaggcatgtctaaaagaccccttctctctccctcacatcgaccaggttgttgactccactacaggatgtgaactcctttcctttctagatgcgtactcgggctaccaccagatcaccatgaaggagagcgaccagcacacaacctccttcatcaccccattcggttctttctgctacgtctccatgccttttggtttgaaaaattccatagcaaaatactagcgatgtatgctctagtgcttcactgaccaaggcg

SEQ ID NO: 177117 - DNA, 1762 bp, Zea Mays
ttcttttatcgctatggttgtaacgttttcatcctcttcacttgagctatctttggatgaatcccattgttgaccaatatgtgcctctcctatatacttcctatttttgtcaaacccttttcttccttatttcttgtattgcttgttttctttcttttcatgtggacatagagaaataaagtgtttcatgcttccacaattgtagcaacttctctttcttcttgttaggaaatcttctcttcactaccttgtatccctctttctttagtcccttgtgatacttgacaaacaaggcaatgtcacctatttcttcatgtgactcgtcttcactctcactctaactagaggaggatgaaatcaccaccttttcttttgtatttttgcttgttttcactttgatgggaggttcattcttgctgaaatttgtattgcttgaatgagaatttttggttgtcttgttagcctttagtgcaatatccttaatcttcattccatccaacttggcttgtaattctccaatttcccttctttccgaagcctcttccctttgcatgtcaaaggtcaatattctaccaagaacatcactaggtgtaaacatgtcaaacctcttcttatctataatcaaggtgaccacggtctcatttcttggagagtaagcctctagcataattttgacaactttatgatcattgatatcttgtctaccaagtcctctaattttccaacaataaccatcaatctatcaaacatctcttgtggcccctcattttccaatatgacaaaccgattgagcttggccattaagagatcaatcttggattgtctaactttgtcaactccttcatgaggatcgtgtagagtatcccaaatatcttttgctatttccatcccaatcactttgttgtactcatctacactaagtgcactcaacatgatactagtggcttgagcatttagatggatccttcagtactcaagagttggattactaggatcttgtggttcttccttcccacttctcacaattcccaaagctcaagatgtagctcaatgagataagtcttcatcacatgtttccactttgcaaaattagttccatcaaattgaggtaacttccctgtagacacattcacaagagatctatggtcaagattaggaatggaattactataggacgttagaggaacctttccaatcattcttgttgtccttgctatctttattgttgccactcttgttagtttgataagatatgtcatcatctccatcatcactaccactagactcatctgacattgaaacttctttcctttcttctttttcagctctcttttgcttctcttcttcttccaatcttagttcctcttgtcttttgagtctcattgctgctcccctaagaagtttttcttcttcttctcccaacttttgtgcttgttttttgcttcttttctcaaacgacgctcttctttccttcttgctctttctccttcggatatctcgacatagagtgttgcatagcttgttgctgatatgatttcattcgctgattcttcaccaaagagattcgtgccatcatttgtcccttcatttccttgcctagacatagccatacctcacgcggttaaacgctgctaaggaacaaggttctgataccacttgtaaggatttggtacacctagaggaggatgaatagggtacgtgtaaattttcagctcaagaaactcttaaaatcttgagtggcagtgcctctctcaggcccgac

SEQ ID NO: 177118 - DNA, 497 bp, Zea Mays
cgggcatgaggttgttggtgtaacatgtctcttagcttgtggtgcgtaggtgaaggtcatgtaggtttataccgatggaccatgagaggtgaaggatgagcattgagtcttgactaagggacatgagaagcttgacgattagccatggtggctgacaacaggggacgctaataggcgcaaggacatggcggagcggatcgtgatgccaacatggttgcggactggtgtgacacatgtctaggacatgagggcatgtatggagtacgctacccgtggaggttttggtggttgagcctaaaaatcacccagtgcgctagttcgcaagtttcgtcgggtttgggcctcaaaacctagtggcgtgattttagagggaattgaaggtggcaatgtggcatcatcacgaagggtgcgtcaaagcgaagcaacttcgtgaagcctatgtgactgttagatcaaaattttagaagtggatccattttgtccctggctaagtggat

SEQ ID NO: 177119 - DNA, 563 bp, Zea Mays
ttgcatcaaccacatacttcaattgatcccaccatgacaggcttgtaagggtttcataagtgtaactcccttctggcatattactaaacttgctttgtaggaatccctgagaacccatccatgccatgaacttgtccttccagcgaagaaagctctctaagaaatcataatttgttccaaacctagtggcattccaatgaagcaaatcaccaccaattgcctccttcatcatggaatgtagcttgttatggttgtaaagaaaccatgatacccgcctagcactttcaatcacaacatcatgctcaggaaaatttccaatctccttcaacatcaaatttatggtatgagcgacacatggctaccacacaatagtaggatgcttcgcgactaccatacggcatgcctttttgtagttcgcaccattatcaatgataatctggaccacatgctatggaccaattttggtgaccacgtccatgattcgtacatgtatcatccaaattagaacaataagaggcacacaaaatattattcaaccaaccaaaaaatgataatgaaattac

SEQ ID NO: 177120 - DNA, 563 bp, Zea Mays
gattcatccatacggtgccaacatcggatagcagtgtgaccttcttttccacagatctggcagaatggacgctgggagggtccatgacgatcaccagaggaacgaggagcatcactgcgagagggataagaacgaccccgtacatggccgcgaccacgagagcggccacgaaaattacccccacgaccagcaaaatgagcagatgacccgatgttaagttgctgatcagactgatgtttgaggatgcgagcttcaaacgtcattagatgggcgtatacatcatcaagagtgagggcatccttggttgtcatagatgtgacaaaggaatcataatcgggaccaagaccagcaaggagatacacaattacctcatcatctcgaagaggtgcattggctgctgccagttcagtagaaaatcccttgatccgacgaaaataatcaccagcagagagatcacctttcttagctgtcgcaagatcaactcgaagttgcacaacacgagcccgagtagcagatccaaacatacgctgcaatttatcccaggcttccttggacgtactagc

SEQ ID NO: 177121 - DNA, 904 bp, Zea Mays
ctccggtgtcctcgccttctgctcgctgctcctctcctctcttgctccatcctcgctcctctctccctcgaccctcactaaccctaaccctagaactcgatcttcgccaagctcgctcctctgcctctgtcgtcagccatccagttcgtggatccggtgctccggtgttgcaggtaaggttttcttgctcttgctctcgtctctctcttaatccgattcatcttcttgtgcttgatcttgttgcttcgattcgtctaggtgtgcaccgtgtgtgtgcgccatgcgccgtgaggagccggagaagccgaccgaggcggtggccatgtccacggcctcggctgacgatgagctcagtctcgaagcagtgatcgaggagcagaggcttgaagcgccgaacgaggccgacgatgcccggtgcctcctccttggtaccacctccgctggtgccatcgatctggacgacgccggtgcacaaacggggacgagctccacaaccccgacggccgatgcgagcacctctgtccctgtggctggtaaacgttctagaaggagaggtctgacctctaaggtatggctgcactttgaggaggtaactgcggttcaaaatggtaaggaggtaagagtatctgccatttgtcttcactgcaagaatagcatgtctgctaaatcttcatctggaattggccatttgatccgacacctggatgtttgccttgctaagaaagaaaaagacagaactggaaaaacacagtctttgcttaaatataatgctgatggatctgttaatcactgggagtattccccttctgttgctagaactgagctttgtcgtttaatagctaggctagacctgccactttgttttggtgaatctagtgcttttcaggagtatataacccatgcc

SEQ ID NO: 177122 - DNA, 724 bp, Zea Mays
ggatattttatattttttgaaaattttgatgcaattttcttataaatacaatggattattttaagacttttcattgaaaccaaatttcaaaatacgcagtcgaattcaaactaaaaatcaaagaagttttgaaaaaataaaaaaaagaaaaaccagcttggtgggacggtcgtttatatggcccaaaagacccatttaaaatactaacacgccgagctcgaatgcagcatactcctcctcctccctcgagcttcgttcggtcgctcccactgcttgtccgtcgtcgcagcgccctatatcgctccaaatcgtcggctagccggccaacgccaccgagaagctgacccgagtgtccgctcgtccggtgaactagtaagccaactcattttaccgattaatcacactagttgaccaataaatcaggataggtcgcgactaaccgtactgtagacgcactgcccttcgcctaggtgcaccaccggttatcaccggttaatcactttagtgatgtggctacctgatggagaatgctgattaattggcctgatatgttgataagccagtagtcaagtaggagctagggttagaggattttccccttttcaacatgaaatctttttaaatcgccactactaattgcaatatagacttatgatacttgtaatagtagttcatgttattgctatttttggggatgtcggatcagatcaatccggattgggaa

SEQ ID NO: 177123 - DNA, 2955 bp, Zea Mays
gttggcggccaagcgccgcaagcgctccgtcgccgagctcttcgccgcggtcccgcgggtgccccgaggcggccaggggcgtggcaaggggaaggctgccaagaggaaggcggagaaagacaagggaaagctagtgctcgctgccagtgttaagaccaacaagaagaaaaaggtcccgactgggatcgatgccagaccaaaggtatagcgcattgcatcgaccatcgacttgctttccatttctgatatcacgattttgtcggcgcagtagaatgtttgtattctcaggcaggtacaggtctgccggagcttgtatgctacaaacaagtggatcttattgttcagctgaccaatgaccatacgcacagattgctaactccttgagagttcctaaatttgtgctcatccattattcgtattcctgcttttgggtaattgctaaccagccaaaaagctttaggtgtgctttgccttcatcattagatacaaggtgtatcagatggcataaatattgccagcgtataattcggatgcatagcaatcagttgtaactaaaacttacttattgactgcttccatattatttgttgtgaatgactaaggtgtgagaaaaaattcccaccaccttctagctgttgttaatgttttggttacttgtcacgttttcccttgagttttcatctgtggtgtctactggcctcatgtgtctaatgccccttattgttcttgatcttcatgttgtttgagttagatacttagattgttttattcaatgtcactttcttagtagtttctattactatgtgatattcatgcctgctcaattgttatagggacacttgcttttgcaaagtgctgaactgctggctaaaatatcatttttgttgtttgttttgttatggaggtatgccatagtttggttgactgagtgtgaatacttaccatgtacaaaatacttgcaacgttcccaagtaatgcggtatatagtatatactgtatagaatggtgaaagtaatagaagtctctcacctcccactttgttgataggttcaaataataccttcaaatacaacttgtagcagaaatacctcaagagatgtgatacatttgtgttttttttctcatttcaggagaaaaacagtggggtaaaggtgaactcagttagcatttctaagtcatttcagcatcctataaaaaatagggaacccaagagttcttgcaagaaaaagggaaaacaagaggtctcagtcttactggataagaaaagtaagaagggaaacagaaagtcagttttggaaatacacaaaaaggatatggcaaacagtgttcaaactcaaagcatttgtaaggatcagtcaaaagcaggttctagcacagcaccgaatacaacagatatgaggtgtaaattaaattcttgttgcaaatcaaagcatgttaccttttctgatggcgctgacatatttggaaggaccgcacatctacctgcagataatacaaagcaaccacaatctgtacagacattccagcaagccactcaggaaggtcgtgaccaccgtgatagagatgatcaacagttggtttatcaacaagctgaagctatatcccggactgttgagattaccaattctttgtctgaaaatgtagtactagctggtgtttgccgtacaatcccacttaccaaaccaaaagatatcactatactgggaaactcagtggatctgaatcactgcatagaaacttgtcatggcagtaactgtttgaactccacgagtttggcaagcttatctagtaagatgccatgtcaaaaattccaaggtgtgaactctcatctgaatggcaacaatgtttcaagtcttgatgttcagtatcttggagaacaaaaccatatgatatcacaagcatcatttaatcctgttagtttggcacccaagggagtatcaggtgatatgagcccattgtcagagccttccagttgttgtttatatgataggagcagtatcacgttccacgagaaggctgatgctaattaccacttgggaaaagttagttctgagattcttagatctggtaacgtggtgagaagcataagctcttcaacaggatcaaataaaccagcacaagccatcgattgtgtatctgctgcattcaggaacatgcacagccgccgtgacgattatgtcggccttcctatcaattcacgaggtgaattcgtcaaggttcatcctggtggcacccctaattctgttgacatttttacgaggcagtgtttgggggagaattcctcatgcccctcagattatccaaccatcttcagttctattacccgcatggatcatgtacccaactatcatgctcgacaattctatacaatagaccagtctgcttttcatgcagatcctcgttttcctccagcgggcccaatggcatatgggatggatgtgaggcagtggccaagttctgaaagagcaaaagttcattactacacaattccaaacaaaaagtatccatgcgccaaacagcaagagctttcaatggatcacaattcacagcagaagctacttgggctgcgaagccgctgtcccagccagaactctgggcagggtatgcagcacaacgccgaaacgacactgcgcctcatgggaaaaacggtcacacttgggaccagcagcagcatgcactgtagaggcctgaacaacggaaccccagcttgttccagtaaacaaagccaagctgaagaccggggaacgcgtacgaaagttttcccacagctgtttcacggaggactggctctggctgatcccgctgctgcgtgtaggatatcagatggagagaggcaaccgtctggacacccgtcacgtttctctttggctccagcagctgttcgggcttttctgcctggtaccagcagtttcagaacaggtggccacaaccagcaacctgaactagcaacagcca

SEQ ID NO: 177124 - DNA, 421 bp, Zea Mays
tttgctccttcattggcacaagggatttgattcaagaacatatatccttcagggtatggccgcttgtggaaagttgggaaatgccaaaagagacaaccactgactctagtgagggtggtctagtctgactgaagtatacctttagatttagggagaagtttgatgagccaaacgacgactggctgaagtgtattgaagctacgagtgatgagctacttggagcatactccaaggccgaagataatgctctgtccgcagcctttggaggtcggggcaagtaaagattaaacaaggtattcgatgctattggcttcgataccctgactatcattacccgctacgagggcaagggaagaaaagaaaagtcgctgcttcggccatcattgttgtaccggctgagccgaaaagtaagaaaataaag

SEQ ID NO: 177125 - DNA, 815 bp, Zea Mays
cgcaagcatgtggcaattgaccgaatcgttgagaggagtaagcgttgaatgtcctctttcataaacccccaacagtcacctatcaaggaagcgaacaggcattacagcaagtagctggcaggacatcacggacagtgaacaggataaacatggtgactaacaggattataggacctcacgaagctacatagtccagaatcaatttatgggaataacatagaaccggaccaatcacacaaactaaaaaatcacgagatataagcatgtcaactaactgaatcgtcgaaaggagcaaggaatgagtgtcctcttgtcgaatcctccaacagtcacctgtcaaggaaggagacgggcattaaaataggtcgccagcaggccagcacatagtgagcaggagaaacacagtgaataacagcacctcatggatgtacataggccataatcagattatgggcatagcgtagaactgaaccaatcacacaaactaaaaattcacgaggtacaagcgtgcaagcatgtcaactaacaaaattgtcgaaaggagcaagggatgagtgtcctcttgtagaatcctccaatagtcacctgccaaggaaggaggcaggcattagaataagtagctggcaggcgagcaaacacagagaacatgttgagcatgttaaataatatttagaccatgtctacgaccattcttccaccagtaccttagcacaggaattgaactggtaaagaaaactgtaatttctctactacctattaaggggcagggggcatccacaggcgaggccatgcccctgccgccccatcctccccgc

SEQ ID NO: 177126 - DNA, 1276 bp, Zea Mays
ccctttgaggcttgtggctttaaccttgcacttactctcttataagtaggctcaagagaaatgttaatagcaacacaagcactagtttccctttttgtaattatttttgataaggaatgaaaagtgaattactaaagcatggaaactttataatatgaactagactattccttgaagtatgcttagttttaacttatggaacaagcatagtaagttcttaagaattacgggaataaatctaattcataacatggagagcgataaatgtagaagaatcatatccaatataagcaagaagcataacaacataagtcattggattgacttttctttttatgttaaattacgcatctccaaagagaaacatattctctactagtgagactacatgggttatttagataaaagcattagactcactattctagttatagagggaatcttccttttgtaggtgtcgtagggatttgaattcctatcgtgacaccttattcttttaagaacttgaaatatctctctacatctagaatcatggcaataataagataataagtgtaaaacatgccatgggtttcttaataatttataacacgtagattgccatagtatagaaatgatgaatgtacaatctaccatatgggaggaatttcttcaaggaagggtgacataattttaagagcattttaagtgcttcctttttctatgtgactacacaagacacataagaaatgataatttgagatacttgcacttgaaaacataattgttaccacccttgggctttcctccatgttgtaggtcttgacttttcgacatgggattagttctttgtttcctacaacatcaatatcttcccgagatgatatgagttttagacataataatttgaaataaccttgggtcaatcttggatatgtagatcattgtagattgatagcttgagttaatgtgaattgacttgactctctcaagcacccaaagtttcatatcatgtcattctcctgcaaagcttgtcaagcatgttttggtacccatcgcttgatggatccattatggttagtcaacaaagatctaggaacccaaatgtcctttgcgctagcgcttggtaaattcattgcctttctagcacaagttgcaattttgggttgcctagttatatatgaatcaaatgacaaactatgagtggaggagttaccaatgggacaatccttgcattgatgtcccttttcccggcatgtgtagcataggcgttttccaagttttgaagatttcttct

SEQ ID NO: 177127 - DNA, 540 bp, Zea Mays
tccagcatgtcgctgccgccatggccaaccattgtcatgtccctgtagcaggtaagaataccctaatcgcttggccttaattctctctgcgtttagaaccttctagcgcgttgaatagggcgtctaggggcgggatggcatgtcgccggtgagggcgccaccacgacctgggcagcgccgccgtggtccggtatttaggtaggggatagaacgtggcccgttgatctatcaagcaacggctcggattagaagccatacacctgttcacgtcgtgaaacgggaatcgttggattccaattggagggtccggatccattgtgggccgtgaccgtcggattatcgccgaacggatggatggtgatcaccacttcattaaacccgaagcgtaggatcgtaaaccaaccgctgtgatcgtataccggttgggtgtctcggcgttctaatctagaccacccactcttgatcggatggcttaaaacatccgataccccttcacagtgccaaacttacttaagagccccttagttatcaagaaaccaa

SEQ ID NO: 177128 - DNA, 363 bp, Zea Mays
gccacggcgaccacgtaccttcaaaccacgacgaccagaaataggtacgtggaaaactaacacgttcaaggccgctggtcagttggtaaaatccagcctgaactttgatcaattattgtctaaatatgtgaaaaagaaggctgaccccagtgatcggccgccaaagcggtctcgcttacccacccaggagcgacagcaggttaggccgattggaccacctcaccaattggaaaggacaggaggtcataatgtccaactaagacctaacgtacatgcatggacacctccactcccatacacacctatgtcatatcattatacatacataccaccatcaccctatatcccgaatcagatgtgggg

SEQ ID NO: 177129 - DNA, 984 bp, Zea Mays
gggaccacaagcgggaccctagtgcataagatggggcgaaagagctcacggacaatgaaggagcttctcgacatcacaacccaccaagcatcaggggaagatgtgctggggcaatcttcgaccacggtaagcagaaggccaaacacgacaaggagcctgatgggggcttcgatggccaacccgacaatagaaagaagaaggaccagcggcggcacgacgaagtgttggtggctgcagcggtcctgaagggaaggaggactctgatcgaggaggacagtgacaattttgaaaatctgcttgaggccccattcccaaaccattgacactcggtccaacatgcctacaaggattgcagatttcttaggaaattcctaagcaaggaggcactgcccgagaaagggcccgagccctgaaggacaaagagaaggagagaagaggcctcgtgttccccgacgcaactagctacctactgatctttggggggtgtccgactactatgcttcgaagagacaccagaagctcaaacgacgtgaggtattgaacgttcgacaagtggtctcggccttcctcgactagtccaaccataccattacctttgatcggtctgaccaccccgagcacattcctcggcccggttgataccttcttatcattaatcccttcatcgaaacagtacgattatccaaagtgctcatggttggaggcatcaggctcaacattctctactccgctgcgtatgatgccatgggtctcgctgagaccgctcctgtcgacaaggagaccatttcatggtgtcgtgcctggaaggcaagcgacctcgctcggacggatcgacctacctataaccttcgggacaccgtccaactttaggatcgaaattctgacctttgaggtagttgggttacaagggacctatcacgccatccttggaaggtcgtgctatgcgaagttcatggccatccccaactatacctacctaaagct

SEQ ID NO: 177130 - DNA, 1166 bp, Zea Mays
aactgctgggtggttggcaatgagaaacgtacccatcatcaccgattctccatccggtgtagtcgccacctgggtataataaactcgcccaattttcttcatattcttgcccgctggaggattgaccacgtttccctttccttgattcgcgttccccgaagtctgttggaaatttgatttgttctgctttggataggggcagtctttgatgaaatgtccagacttcccacaattaaagcagccacttgaggaactgggaagggcagggaaacgagcaccaagggcactcagctgattgttctgggcgggggcaggagagggaccaatgaacactggttgcttgaagggatatgtgggtggacaaggagaagaacgatttgggttgaagggacgaattatcaaccttgtccgcttttcatacccctaagatgatccttcacccgcatatctcttcatttttccttggcccgagttcttggcttcaactgacagtgttgtgcttatagccctgctataggtaagatccagacacatagccattttgcgctggagtcagtcattcaatcccctcgtgaaagcaatttttcttttttaaatcagtgtccacttgatcgatggcatattgggagaggtgattaaacttgttgagatactgcattacagaatctcccccttgcttcagtcgtatgaactcttccagctccatctatagcaccccttccagaacataatgttccctaaacgcttgtttaaattctgcccacgtgaccagatgtccggcagggtgaatagcggaaacattttcccaccaagtactggaacaccaagtactggcaggacatatcaactattgatcggtgaatgggggcttctgtgtttcagtacatcgaatcagtccgaatttttgttccatcacccgtactcattcatctgcttctagaggttctttagctttaacgaaaagcggtggacatgtttcagagaactccaagtatgtggtgtctcgtggcccttgaggttgacctctgcctccatgttgctgaaattgatttcctgccaattcacacaggaaacgtgtgttgtcagtggtagcgttgactaaggcagcgatagcctcaaccatggtaggaggtacaggtggcgggtttggagtttccaccctgccg

SEQ ID NO: 177131 - DNA, 442 bp, Zea Mays
aaaaagttaaatctcctattcccaaagcatcttctgaagaccttgactttattattcgacatgctttggggaaaaggttatctgaagaagaaatcacggaagccaaacactacgctcgggaactgaaatacccaaagggggccttggtgtacaatggcaccgatgaagatgattttctatactgtctcccgtacaacaaggaaatatctgtttgctgggagatggcaaaaattattggatttctgaagcttgaagctggcttctctgccatgtcgaaggatgacctcatagacatccttgcgtacaatagcctgaaggtacggaagctatggacttatagacaaattatttcttgtgtcctttattcttgtgctgatcctttgtctcccttctttttacagggtctaattctgagcaacacattgagagcacagaaaaatgc

SEQ ID NO: 177132 - DNA, 1219 bp, Zea Mays
ggatgcatatggttgtcgagggtggcactgttagtgtgaaaataaataatcagattggtaaatatattaagagttacaaaggagtgcgtcagggtgatcctctctcgcctatcctctttaattttgtggcggatagcctcgctagaatgatggacaaagcttgtgctaatggggtcttgaatggtttgggtaggcatttgatccccaatggtgtgattttgttacaatatgccgatgatactatcatttgtatggaaaatgatttgtccaaagctagaaatttgaaaatgctcttgtacatttatgaaatgatggcaggattaaaaatcaattttatgaaaagtgaaatttttgtgatcaatggggatgatgatactaagatgcattatgtgaatctctttgattgccaattgggctctttccccatgatgtatcttggggtccctgttagtccttcccgtctgcgaattgcagattggataaggttggaaaaaaagtttgacaaaaagttggatagctggaagggaagctctctttccattgctgggaggattactttgattaatgcttgtttatccaattcccccatctatcatatgttgatgtatctccttcctagcaccactatcaaaaaactggatattaaacggaaaaaatttctgtggcaaggtggaggagatagaaagaaataccaccttgttaaatgggatagagtttgtgctaacaggaaaaatggtggacttggcattaaagatttgagagtcatgaatatttgcctaatgtgcaagtggtggtggaaacttgaatatgaaaatggaatctggcaagaaattgtgaaaaagaagtatattcacggtgacagtatcatgaatgttagtcacaaatcgtttgattctcaggtctggcatgatctgttgaatatcagagatcactatgtaattggaaggaaaattatcactcgatcaggtgataaaaccagattctgggaggatccttggctcaatgagactcctctagctatgactgaaccagatttatatgagatgtgcaatgataaatttattctggtccagcatgttagggaaaggaatgcccaacttgactttcgtagatggctgaatgatgatatcaggggtaattgggacaaaattatggaaaaattccaggattttgagtttcaggagacagaagactatgtctcctggaaatggggtaaaaa

SEQ ID NO: 177133 - DNA, 436 bp, Zea Mays
caatgatgcacaccaaaatcaaataatgcatgcttgatccgtgatccgtccaagcatgcgtgtggccaaatcctactagttttgtccaagacagatcgatcgaccaggccttaattagcttaggcataatgcagtcttaacctttgcgaaatgccctttgcttgcacgtacgtacggccgccggccgattttattgcagtagtgcgtgcacacgtaatgcagcatcagatgaactgtctgaatcttttctgatctctgcccgtgtctgctttaggtatggtcccctactccctacgtaccatcattcagttcaagttcacctttattaatctgtaagaggagggctttacactctgtttgtgggtcttagcagtgaccatgtgatgccaactcgcaaagtggttcatctaccatttttacttggatctatttttta

SEQ ID NO: 177134 - DNA, 289 bp, Zea Mays
ttaggggtgttccgtcattcttgctgatgaggtcttttcggccaatcttgttgtgatttccttgggggcattcgatgttatcttgggtatggattggttatctcagtattgcgcagttatatcctgtttttggaagacagtgttattgcaggcgccatcgggtagggaggtggtattcttgggaagttcatcaaagttcacattacccttgttggcgcaattgcttctggatcgccggtcaaggaagtcgggaatctttttctccatggtggtggagggtgaggctgcc

SEQ ID NO: 177135 - DNA, 754 bp, Zea Mays
cagtgggcggaagagttgaaatttgatccagtactctgcaaatgtggtattgaagctaagtatggattagttccttccgagcttggtgttggatatttttgtggacatatggtcgattacgatgaggttggtatttatttattttttgcaccagctgtaatgttatagcggtacttactatttttttgtaggagacgaggaaatgcagttgggagagttacgacgacaaaggagaggtgatgcgcacaatagagtccaagagactaatgggacagaagatgcgttgtggatctcagctcgttgattcgtacattaacgatcgcatacgcgacatgcatagggaagcaaaatctgccttttatgatagctcgaagcgtgcagagtataaggaggttgaaggcggcagatgagaagagagcacatgatgcaagggaatgggaagcggctcaagccgagaaacagatgttggataatcttgctgatcgcctcaagggaagtgagtgagaaaaatgatactataattattttagtacaatttatttatcttgactttgctaacttattttgctcattatatttgcagagattggatgtggcgtaaactatttggccgatgaagcgcatgcaagatatgttcaggataaaatggcgacagttgagttgatggaggaggaggaggacgacacttctagattgagtgagcttatcgctctcgcagaggcaggattacatgaagaagaggaggacgacacat

SEQ ID NO: 177136 - DNA, 391 bp, Zea Mays
gtggtattgttctttaccagtggccttcgtctcgtacaacagttcgtcaatattgcaaaaacatcttgcatttggttctaacccctggctcctcatggcctagataaaaatccccattctgatagcctcgggggtgagttgatgaaggaatatttcaaaagtcttcaaaacttcaactaacaatttatctaaagggaaccgaagtcccgctttcatgaagcttctgtaaacgactacttcgtcagcttcgggcaacggggcattgctatctcccccagccctcacaatagaaatatcgcggaagtaccttcctttcattgcatcaatttgactttgtttgatggttgatctcccgaagatagtatgactcggtcgccagggccgatcttcg

SEQ ID NO: 177137 - DNA, 494 bp, Zea Mays
tgcacggatatggctgcttcaaacatacaagtgcataagaattctcaaagctactagacacctttaccaacattatccatatcattttgctatgatgtatggcactacagctctgcatggtttgaaggataagacataagtgcaaagcactacggtgatatggcttccacttcacaaaaggagcaccatagaatttccacaaatatggtttcatcctgcaaagctagctaagaacaccagagtccaaagcatttcatctcatctagctccaccactaaaactcaatgacatcaaaataaatacacctcctcaccacctcaccagtaacaccaaaatgagcacatatgaatttggtcacctgaagtcctgaacaacccgtgtatgacattttaaggatgtaaaccaatactgccaacaacagactgtcaactatatattatttttttaagaaaaaaggcaggagctctgtcattcagaggtgttccaggttttgc

SEQ ID NO: 177138 - DNA, 1114 bp, Zea Mays
ccataagccagccgccagcccctaatccctatcgcccgaaacggaaaaccctagcgtccattcactttcactcgcgcggcggctttccagctctcctctcctcctcccctctccagtctcctctcgcgaactggcggcgcaccggccctccgtcttcggtcgctccaaggtccaagcctccaccgcaccggcgcggcggcgctccaccgaccaccgctcgtctacgctccaccgaccaccgctcgtctggcgctccaccgctcgtctggtgctccgtgctccacctctcgtcttcggtcttctggagttctggtgctcgttctccggctaatcctatcctccctgtctctacatcgacctggatctgagtatctgaccggcccaggtaacatgtcgtaaaccctaagtccctaaccctaactaactgaggtgagatgtctcgatctagctcttcatggaccatatgctcctgatctgggtatttatttcttggaacatgcttgttgttatttgattattgcgtccggtacctcctgtcattgcttaatgtggctgtgcctgatctgctctgctcttctctgtgatgaactcatggtcatgaccttgctgtattttggtaggtcgtgagggatcggtgcgcgccaccttggcggcgacggaaccggtgcttcgaccctactgcttacgccattaacgagccgcgtcaagcacagaggtgagatgtctggactctggatgatggttgttgtcattactgcttacgccattaactcatgatctgttcttctctttgatgaactcatgaccttgcttggtattttattattgtatctagtaccttctgtcattacaaaatttgagtgtgcctgatctgttcttctctgtgatggactcatgacctagctgtcgttaattaatttgttggaacatgcttgttgctatttgagtattgtatctagtacctcctgtcattacataatgtgagtgtgtctgatctgttcttctctgtcatggaccttgctgctatttggtaggtcgtgagggaacggtgcgcgccaccatcttgacgggcgacggaaccggtgctccgaccctactgcttacgccattaacg

SEQ ID NO: 177139 - DNA, 510 bp, Zea Mays
ggactcttccccgtcaagaagagggatgaccccatgtggtgcaaccgagtgagccacgtgaaggacgtgtgggccatgcatcccgaccaggttgggaggattactgttcagtgtatgagcgcactgtaccaccttcaagccttgtagagcgacgccatgacacacctcacaaatctcgctcagactactaagatcaccctcgatagtcgagaggacttcatggtcaacttgtcttcggaattgatggaaaaagacctacaggtggaacttttgagccagcgcatcgcgactctagagcagcaagtggaaatccgggataacaccatcaatatcctagaaatccagctccatgatgtgtaggaggaactcgaggaagccaacaaccacatggagatgcaccaccaggatatggaggcaaatgaggcaggaagcgagggaggggaggatcccgaggaattagagccagctatcggtccgaatgcgactccctctggagtgccccttcacctg

SEQ ID NO: 177140 - DNA, 661 bp, Zea Mays
aatgtgaaggacaagcgaatttgtgctgatggactaagagtggtgatagacggacaccatgagtcttggattgagggactgatgaggctagtagagtgatagtgtatagttgacacttggggacatcgacaagtgcaagtgtacaaagaggagtagattgtgttgaccaagtcaagcggatgcgttggaggacttggtgatcggatggtcgaggactagtgacatgtgtcgagatcgcgaaggaaacatagatgatacactactccaaagtggtttggtgctttgggcctcaaaaccatcggtatagggtttttaaggtttgggcataagaacaagttcgagttctggcaggaacatgaggcggcacatcacatcgtcgcggacctttagtcaaggtgaagcaaagtcatgaagagctcatgggtgtttgatgctcagttattgagttagatcatttcaccccctaggcttaagtggtttagcataaatatctagtggcatgtcagaaatcatgtaataacactttaaataagaggatggctgctcctaactagcccatctctttagctttagtttttcgagtctctagtttttagtttccaatctatagttttgaaagagatttccacgtgatatcctaggtcccttagtatgtgtaatc

SEQ ID NO: 177141 - DNA, 666 bp, Zea Mays
caaagccccgtcaggcctgccatttaccaaagtgaaattcaataaaacagaaaaaatgatgatatgttgggaatattggaacattatagagtatataccatttgttgtctgtgcaaccactacttgttgatggacctataattggctgaaccatgctttagctaaagtctatttaacaaagggagcatacataatacaaaccaccaatttcctgcaaccatatccagaaaaaaacactttaaagttcaaggttaactgtcttaagcaaggatttcatctgatacatgtgttgcattattcacccttttagtgctctttaacatgtgtgcacatgacttaggagttttagctaatttatgttcagctgcatttattgtcacacattttttgtggaaaacttgaacctagacaaaatctgcatcgctgcttaattagttgatttattccctcaggtttctgttcatttcctctgaaatatgttttgggatggacctcggccagaagtgctagcaacaaaagagacaaacaagcaacccttttttgactttggaatttcatgaattaggttcatgaatgaacacgccatgaaatgcatattttccattatccacactgtcatgttcattcgcttgtttagatagaaaggtctacatgttcattcaactg

SEQ ID NO: 177142 - DNA, 704 bp, Zea Mays
gagaagccaagcgggagattccccgtcgtgtggcacggctgatgaagggagagggtgagcgcagggagccgagaagggagttcaggttcttcaacgacgaagcacgcaggggcgggccacggtgcttccccataccgcgcgggagtcgtccgcgtccgcgacttcaccgagccggagactggagcatcgctgtcggatcgaagggcaccgtcacgccgagaccttccgtaggcaaccgtatttatgccggtaagaccacgttcctgtaattcgccatcctctccgctatgcgtaggttcgatccgcgctccgatccatactctagggccgcttatccgcctgtccgctggatttgcaccctcccggtgcatggcgccgcaatccggaatgtcgtggggaggaagaagatcctagggccgttgatcgggtaatatgcggtggagattagaccggcgtgtacccgttcgcaggatttgatcggtgccgtaggaggggtgatggagggtgtatatgtagtggtagtcgtggctgctgctcggccgtcgaacacaggatcgacgattccagtcacaccacaattcgtaaaactcctgatctaatctggtccgttggtgggagatcggacggctcgggttgaaagatacccattcgccgtgtaattttgtttgagtccctgagcttctacatattcaacccgccgtcct

SEQ ID NO: 177143 - DNA, 391 bp, Zea Mays
ctctcattcagggtttgatgtggttgattttcttatatgtgagatcgaggacacggtattggatggtcttcgtgcccggcgacaactgctgtatgctcattatctctgctacatcttcgcacagctgatccggccaccacagttccagggcactcttgaggcctcatgcctccactttggctcctatcgtccagcccctgaggaccttgtgccagtacctgatccaatgatagacactcaggcagaggatacgacattccataagttcgagactcagggcacaaccgttcctgatgatgatgatgatgattttgggattctgcctccacctcctatgcctccccgctcacatgatcatgaggccaggagttccagtgctgcccctgctgcc

SEQ ID NO: 177144 - DNA, 550 bp, Zea Mays
cgagttcagaatctattataagcagtacttctaactgcacgcaagctacgtcactacttcgacgaccacaaagtcataatagtcactggtttttcgataggggatattattcacaacaaagaagccattggtagaatagccaagtgggcctgcgagctgggatctcatgacattgaatttcgaccttgcactgccatcaaaactcaagcactggttgatttcgtatcagagtggactgaacaacaagtgtcagataatccagaaattgcagaagtatggcgaatgtattttaatggctcgttaaagctgcagggattaacaccccgaatttcgagttgaatttttttcttttctctagcgctcgctaaattcgggcgttacccctcttctccatttcttttcgctaaaacctcacctgtcttcaaaactttaggtcatgtgacaatagtaaatcctagagttattttctttggattgctgcaccatgccgaaccatgcatttctttgattgtttgaaagtgtgaaagcattcatatagaaaatagatatc

SEQ ID NO: 177145 - DNA, 365 bp, Zea Mays
agctgatttatttctcatcggggagagagacatggtagatgctgtggattatttgattaattccatcatcaatattggaattttgctgacaagagcacatgccacacgtccatacaaacacaaccaaaaccacaaatgcaatactactgtaggatgagctcgatatgcaaacatgttaagatcgagcaacccaaccacaattgcaattaacgccattcatatatatgattctagcttcgattttttccccgtaacttataaacgcggatgagaatgataatatgtgctaccacaatacaacacgacctcaaattactactagcatatctataagcgtacaagccatggcacaggacagtgtgtat

SEQ ID NO: 177146 - DNA, 809 bp, Zea Mays
cgctggggcctagacattgtcgggtcactacccacgacccaagggaacctcaagttcaccttcgtcgccgtcgagtatttcaccaagtggatcgaggcaagagcagtatccacgataacgtcgaagactgcccagaaattcttctggcaaaacattgtttgccggttcggagtcccgtccgagctcacagttgacaatggcaaacaatttgacagccaagacttcagggacttctgcttctccattggcaccaagcttgccttcgcctcaatataccacccacaatccaatggcgtcgtggagcgtgccaacggcaagattttcacggcgatcaagaaaatgctcctcgacgacaagaagggtaaatgggccgacctgctacctgaagcagtctgggcactgaacacgaccgagtgccgggcgatcggattcacacctttttgcctgctatacggatcggagtccatgaccccgcaggaaatcaaacatgggtccccacggacaagtgcttcagccgtccccgacgtagacgaaccaacttccaaggatctcatcgacggagaccgtgtcttcgccctgcaggcccccaacaaataccaagctcaaacaaaagcatggcgcgaccacacagtcatcccgagagaattcaacgaaggggacctcgtactcgtccggacaactcggacagagtcatggggcaagctggagccaaagtgggagggtcccttcatcgtcaagacaaaggcgtcccccagcgcgtacaggctaacaacgccatccggcgaagacttagagcattcctggaatat

SEQ ID NO: 177147 - DNA, 571 bp, Zea Mays
cgcactggctattggatctccctgccttcatgctggcagccggtgtcgactctgaggttcacctctcctatctgcctggacttctcactctgttgactaccagcggcagatatgttgaggaatgggtccgagttttccatgcttcagtatggatagaccctgatcaccactggatgagattccattttgagcgagaggatgttaccattcatgcaagtcagattcgccagttgtttggatttcccgagtcatcgactcatcttcacagcttgtgttatggctcctctgatcctccttgtcgccctcatggcggagttgctcctggtacagctcacgtcgcggctctgtttcgaccacccttctcagatgggtcgcgacattctccgacagacttcaccacaggagccaagtttttatatcagcttatgagacggacgcttctgccacggataggttacagggaggctgccactcatattcagctttggctccttggtgccctagtttctcactcagagtttgatgttgtggattttctcatttgtgagatcgaggacaccgtactggatgg

SEQ ID NO: 177148 - DNA, 401 bp, Zea Mays
caggcgagcacggtaagcgaccgagggcaggcagcgatcagcggtttcagaggcttttcctgcggctgacaaagatgctgcatcaacccggtggttctgtgatcgtcaaggaagaacgagatatagcatcgatcgcgtgcgtagtgacgtgatgtgtgtctgcagaagcgttcatctgctggccgcatgcctcgagagagttgttggcgatgtgaaagatcagacagagataaacaacaattccgtcaccactcgtggagctctagccttgcttgtactgaaagatctcgaggaagcgacagttctataggaaagtaacagcttaagaatggtaatgatcctgtcaactcatccactttcttttgtgacaaatagcacgattctactgggttttgtaacaa

SEQ ID NO: 177149 - DNA, 439 bp, Zea Mays
gcaagatctcctagactaagtgaatagggtcagtggaccgcaggttagtttttctaaaacagaggggctctttaataattttgccagggtcgaaagggtatcgcgcattctgtgccgtccgatccaagatcaaagggtcgaattaaaacctggatcccacgaaccggtatccaactaccacccatggatcagaatccaacagtttcaaatcattcacaccccgaccacacccgaccgcccgatcacgatccgactgccgaggtagattcagcgaagaggttcgcacactttctaatctcaaccgcccactccatgatcgacggtgccgaaccgctgaccgccccagtgtctgccccaaggcggcgccgccccgcacccgcggtggaccatcgccggtgcacagcagacacaccccagtggtggcctgatccgatcccgg

SEQ ID NO: 177150 - DNA, 386 bp, Zea Mays
gtttgggtaaaaagcagtggggcaagaaaagactccatccaagattgtggctcttgattcttttgaagatctggcttgactcttattactcctcaacgagtttgatctccttctcgagttttgatgtcttcatcccatgcacctactctcccactcacactgcatgcaagcatgcaactatgcaagttatgagtgctccatcatccactcatgctgcatgcaagcatgcaactagcctccgaagctagaccctgtggctcccttcgctcacgctgcatgtgttcttgtcgaggcaaatttttgcatgtgttcttaattaaaatgaaaatttgaagaagttaagtgtagctcagttggtcgacagtatgcatgtacgctcacacccg

SEQ ID NO: 177151 - DNA, 724 bp, Zea Mays
aaagaataagacgaacccagttagatgggcctcgcgcttcacttccggcccatctacacattggacccgcgcggcccaccttgctcccccatgcgcaactgtgctctttttccgcactgatctgctggccactgacatctggggcccactcgtccgactcacgctcgctcttgactcacactggatcgtcggtcccgcacgtcagctctatcccttcccctttcttcgctgcgtccgcgtgactcgggcaagctccagactctgcgcgcggcgacaacagaaacacccgagatcctcgccagtggcagtccacctccctccgcgcggaaccccctctctgtgccatatgaccggtgggacccacgggccacgggtcttcttccccagccgcgctacggactcgcacggaagcgcgcagaaatcgcgcttgactcggtcgaacgacgcccacaatcctcgctcccgctcgtgacctgacctccaacctccccggctgaaatcctggcgcccacgcggacttacctcggggctataaaatcgaggaccgtcaccaccctgccctcgtaccatgccccatcaccgtcgcagtcgagggagagattccgccgccacttccgaattcgcgtcaacgccgcgcccggattgctgcgactgggagggaggggcttcaccgagtctccgtggtctttcggctaccttcacagtgggaaagaaccactgggtg

SEQ ID NO: 177152 - DNA, 675 bp, Zea Mays
ctatagacacgcacacacaagctgtgagagcagtctccaaccataaggctaggaatgagtatgtcccccatctgcagtaatgaagcagaggtcagtcatttccagctaaaaaagcaaccaccataaaacaataaacgttacacctaatgttgataaggacaacaagtttaccaaaaaaactatctaggagaggagaaacatgccaggtaaagttagcgcaacattattgagtaggcatccagcacagatgttatatgccacaatttattggagtatgcagacatagctgtttccctctgtaaaactgccacacatagtgttttcatgccaaccggttgctaggtgagtggtactggaggtgtttttttctttcgataaggaaatagtcatatagtggagtaggtatggaaactaaacacgttgctggtataatttttttttattttacacatagcttatgtacaagtctgagtcgatcatgaactaagaagtcggatgggggtcggcatctacggcccgcaacacttcccggtaaacaacattccgagtctgcgatccgcaggaaccatcaggatttcaatcaaaattctaagaccacttctagatgtaacccttgaaacagcgacgtaaagctggccatgcgtaaacacaggtttgtcaaggtacaagccaacc

SEQ ID NO: 177153 - DNA, 1163 bp, Zea Mays
cgataatttatatgattggagatagtagcactatcagcacataacttcgaattgaggtcaacgggagtgtagcatgacctacaatcgaccattctagcacgacctagaatatccaaaatatactatcgttgagagtcaagcaaactagaagcagtgtgttaagtatgcatacccagaaaatgatgaagtctgcccaatccttcatagaaaactcatgttgaagagttccaatgatgcgacaaaggagaggttggaggaggcgatcaacacgatctcattcacatagagcaggaggtacgtaacatcatgaccatgatgaaacagaaacaatgaagtatatgtcttagcctccacaaactcaagctgaagaagagccgtcgaagcgattgtaccaagcacgaagggcttgtttgattgttttaggctttcagctcatagagtgacctatttaggcgacagacggagtctggataagaaaaaacttcaaatgtatctagaggctgggcacgatagactttgaaagggtgccatgaaaaaaagtgttattcacatcgagctgatggactggccaattgtgggactgccagtgagaactgtttggacgataacaagcttgatgacgacactaaaagtcttgccgtaattaatgccaagatgttgagtgaaaccatgaaggacccaacatgctttatagcgctcaggtgaaccatcacccttgaacttgtgcttgaacacccacttgccaatcaccacattggagtgaggtggttgctgaacgagatcccaagtgtggttggcaagaagtgttgagaactcttgcatagctagacgatagttagggtcaacgataacaacacagtaagatcgcaggatgggcgacagaggagccgcctagaagagcaccaggagccgaaggctagactttgcatgcgtcttcgtggtgtgctgatttaccataggaactaccaacctgattggttgcccgcatggtctcgttctgagccactatatgcggttactttgtctgtgctcctgtttggttgcctgcacgcgggagacacaatctacatggacggatgcaacacaagccattttaagatcatttggatgcatttgtacatatgcccgaaacggccgtatgtggccagccaagcttgggcgag

SEQ ID NO: 177154 - DNA, 538 bp, Zea Mays
cggacggaggaagtatgcactatacatgacatacacattgccttttgcacttgtgtttctcttccaactattgaagttagagcagagaggattgcgtcagagcagagtggattgcatgcgcttgactagagttcagcatgcaacgtggacagtggcggaggacgaaataataaacaggtatgcctaaagaatgataaaaaaataaaaaaaataatacaacatgtagggaactcgaatttggaacctattgattgcaagtagtatgtacttactactacaccaaacatgatttttaggtatggctctagctatagtaaaccataattggtgctccgccactgaacatggatgacgtggtagtttggtcggatcggcaactggtttctggttgtgccgctcactgtttctagtgttctattcaaaactgccaacagctaatactagattagctacatagcctaattacctagcgtaatgtagcagcaaaagttgttgtcaattcatgcagggcttgtttggttccaatgggctaactttt

SEQ ID NO: 177155 - DNA, 509 bp, Zea Mays
gggcgatgaacgggtgggctaaggcgactcactgcaacgtggttaaagggtcagggcgtgtcgcgatcacggcatgcgacgtatatctcgacgatggtcgcttggccatgtcgccgacgcaagtggatggacgatagagcggccacagtgtcctgagctcatctgtgacaaagatattttcacggccgagtgtaatccacttacccgaggcatgaatcacggcgaccggcgcgaatccgagcgcacggttcaccggcggcgaggggagctgcacctaggatctatgtcagttactgtaccattagaatgttatccagaacacctgagagagcagattgcagtgcccaatcctcaaaattccatgtaataacttgctaatccacctttaacaaagttgtagtcctatagtccagctacaattcgactatagagacctaactcatttacccaatcctttgagcttgaattgaatccaaagttgagcaaatctcactctcagtcccgattca

SEQ ID NO: 177156 - DNA, 380 bp, Zea Mays
gaacgatcgatttgtttatgtgcacaagtgctgaaagttcatcaagttgttcaactagtttgctattgtcttttggtgcaaaattttggttgggtctgatcgcaacacttgcattccaatcatactccttgatttgcatcaaatctgaaatttctttgcgcgtgtgtttgatctacttctatcactcgaatcttgtggtcagcactaggcagtaaacttctagttggattgttatttaactttacaacaacttggattcagattgcattccttgtttactattcccccaccaagctccacatataagccatcgtaatcggtactctggtcttatattcgcttaaccatcactttcttgttaccaccacacatttttcttg

SEQ ID NO: 177157 - DNA, 1123 bp, Zea Mays
ctcgccggagcgcaggcgacacgaggcccaggcgcactgaatcaagtctggctgggtgctacgcgtagagggtgtgaggtcgagttcgctggtgccacaaatcccacgaatcagccatggccagagcttgcccacgacagcgcaccatccgcggcgaagcgccatgaccggtgagcgcgaaagctcaaatccccggcccacgtttccaggtaaacagagctacacgcataggagagtagcgagagagtagggaggatgtctcaccggagttggcgcgacgaagaccacaggccacggcgtggcggaattacggcggagtttttgactccggcgaggaattaacgggcttcggtcgaactacgcgtgagcacaccacccagacaataacctcggcctcagggaaatccctcgcgagcaccaattgaggcccgccagtggaggtcatggcgaaatacgatggcggcagtggagttcttccgccaaggtggtactcggtgatggatttggggacagcgcgagcgattacgggagagagggggtcgtggaaggatgggacttcgtatttaggatctaaccgcgcggagtcggtaggtgttctagctagcgcgaggaagagggaggctcaccgcgcgatccgcgcgggcagttgcaacggcaggcgacaggatgacgagctcggtcatggggctgcgaaagaacgtggctgacggcgtgccccacactccagtctcacgggagcacacccctgcgtgcgactaacggctccaatgtgcgcgcgattgacccggccccattgcgcgcgacgtgcgggctgttgcgaggaggaaggaggaggcgaacctgactagtgggtttggtgtcgcagtcaaagggcatgcgtgcaagcgctggcgagcgccacagagaggttgcaggtgaggcccacctgccagtgcgcaccggtggcgcaggaatccggcggctagggtttggtacggcaatgggccagcgcagaagaagttctgatgggccaaatgtgtagaccgaggcccatttaggttttcttctctttttatctttttcctttaatttctagaattccaacttgaatccaatttgaaatgtgaatttatattcatttgaa

SEQ ID NO: 177158 - DNA, 761 bp, Zea Mays
actaaaatggtccaagatgtagtcaaactagttccacccacaccaccgacaccatgggcaataccacatgtttatccacgccatctatatacactgctagcatattcaccatacacatatacatcactagaatatccacccatatacccatctgcatatccacccatatacccatctacatatccacccgcctacccgcctacttatctagctatgtggggaggagtgacaccacacccacattatccatatagaataccacaccacctagcttggggcatcgcatgctttagtgtttgataggctagctccaccagtgcaacactaattggaaattcaacattccggtcctcatgcatagggccagcaggcatgccagagcatttggctacaaaggccaacagttcctataggggcatggggggaacccccaaattggtggcactttagtcaccggctacaacaagttctacaaaaatatagagaactatagtcggtgacaccatcaaaataggcaccacaaatgtcgtagttgataaggaaatagatgaaggaccaatgatttttggagcatcgaccaaaacgcaattagatgaggatgtcgctatggccgataaccataaagccgccagccaaagaaagacatctgatccgaagtattccatacctagatggttccctttgggtttgacacgattccaaaatcataaactttagcgtttgagagcaaagcagaagaggaagaaggaagtcgagcaagt

SEQ ID NO: 177159 - DNA, 295 bp, Zea Mays
ttagtgacgcctctctaaaaatcacgctttgcggggatcaagcatcaggtttctctattgacaatgtctgcaatcaaggcaataataaacctattgtcataatgtttgttggatgcttagctaagcaattcaaaggtatgttttcaaatagttcaaagcaatgtctacattatttacatagacaaacaatctaacaagtgtgttatttgttacataggccaatcatatctaagcggcactgcagcaactacatggtacttcaatccagacattcctgaggcacaggaatactaca

SEQ ID NO: 177160 - DNA, 363 bp, Zea Mays
gcaaggggtacttgttcttgatggtgacctcattcagagctcgataatcgatacacatccttctggtgccatctttcttctccacagataggacaggggcggcccaaggcgaggtgcttggctggatgtaacctttctctgacaactcatcaatctgcttcttaagctcaaccaactctggtccggatattttgtaagctctcttaaagatgggggcggttccaggaagaagctctatggcaaactcaactttttgctctgatggcatacctggtaggtccttggggaacacatctgggaactcagacacaaccttgatgatttctagtgggtctgcttcactggtatcgacagccatctgat

SEQ ID NO: 177161 - DNA, 305 bp, Zea Mays
aaactatgcggataaacgacgtcgaccattgatttttcaagtcggggatcatgtgtacttgaaagtatcaccgatgaagggtgttagtcgattcggggtcaaaggaaagttagcacccctacattggtccgttccctatacttgaacgatgtggacaggttgcatacagactctggttgccagaatcaatgtctgatgtgcataatgtgttccacgtatcccaattaaagaagtgtcttcggattcctgatcaaactatggatgtggctgatgttaatttggaaccggacttaacctattcagaa

SEQ ID NO: 177162 - DNA, 317 bp, Zea Mays
ccaaccctaagccatttgacacgacttggcatggcttttgtctcggtgtggacagctctgatagagccgacttctcacccctatatctctctaccccgaccgtatctttgcttggaactcacatcaaaaaggtaggatttggtgcagggaagagaccgtacacgggggttttgccaagatctgcacgctaaggcgctcaaatcggtcgttgaaccctggcagaagtaaacccccacgtgttcgacgtgggctgacactcggggcgcgctcagagcacgcccgcacgcgaacccccacgcgcccgcgtccgccccgtg

SEQ ID NO: 177163 - DNA, 748 bp, Zea Mays
gagaaatgatttcttattaaaaaaatatgtctacacgaaccaatacattaagatgtgattggtagatgagcggaaagccggaaataatatatgtaattggaaaaaagattattttgtccatcgagaattcgggaacatagttcctctgtgtgggttctagcattgtgactgccctaacatcatttgtgtgatgtcagttgtggaggattcagttcaattttatcgtagtttagcactttagccataaatgtaggagttctcctggctattagtagttcacagaattgtgggtgttttgcgcccaactgaacagaatggtaacctaggctgctagctttgactggaggtgttttcttcatagcttgctgtcaggtggttgatagggtgcatggattgattcggccttgcttcatgaaggaagggggatttgcattagctaacattcctgtatactgtcgcattgactgcgtttgtctgtttgcaattagatgaagaacccactgaatctgttatgtcactgtagttgcattcctaaattgtttggtgtttcatgcatgctaccaattccacttgttggttcatggcatctcttcatgaatagttacatatcaagtaaaagattccaggtctcgatatacaaatccccttaaaatcctctatgcatctgcacatgtctcatagtatgcagttgcagggttggcttgattctgtgaactgcggctattttgttacattttaactttgaaaa

SEQ ID NO: 177164 - DNA, 781 bp, Zea Mays
taattacgggattgatgatccggaccactcaatcccaatctgacactccagatacatcaaacgagatggcgcacctatgatctaatccgagccgtacaacacggatccaacgatctacaagttatcttcttctcccagctatacagggtggcgcttccaccgcgacggacacgaccgcgtcagtgctgcgcccaagtgcgccgacctacaccacttggccctaagacctagcacaaaagaatgtggaaccgatgaacaacacgataggggaagctttaccagagattagagcgtcgagggggttgtccaccgtgcaccgacggattgccaaatccttccggctccgtcgagcaattcaccgcgcttgggtcgactccccaccttgatactcggtgcgccagcaactacagtccttctagagcacccctaaacccacaagagcggcaatgcggcgacgtggagtggtttagcgtgcagcggatttctctctggtgttaccaatggcggcgcaagcggttgtgggtgagaggggggttgcgtaaggggatgaggctcgcattttatcgcccaggcgtgcggagtcggcgacgtgggccagattttctcgggaagaaggggtggcgagcaccgccggaagacccaccgcgcggttcgcacggttcgttgaagctggtgaccagcttgatgacaggtgggcccgaccagagagtgcgtgtgagatactggctgacggtgtggggacggggtatcggcgcgtgccacgacggaggggtcacgcgag

SEQ ID NO: 177165 - DNA, 549 bp, Zea Mays
gtgcaacatcctgtttatttcatcagtgaggttctgagtccctcgaagaaaaaatatcctcaagttcagaagctattatatgcagtacttctaactgcacgcaaactacgtcactactttgacgaccacaaagtcatagtagtcactggttttccgataggggatattcttcataacaaggaagccattggcagaatagccaagtgggcctgcgagctgggatctcatgacattgaatttcgacctcgcactgccatcaaaactcaagcattggttgatttcgtatcagaatggactgaacaacaagtaccagataacccagaaactgcagaggtatggcgaatgtattttgacggctcattaaagctgcagggagcaggcgcggggatcctctttaccgcacctggggcgagcacctcagatatgctctccaattgttatttccggcctctaataatgtagccgaatatgaagctctgattcatggactgaacatttctatatcactgggcatcaagagactgatagtatacggagattctctggtag

SEQ ID NO: 177166 - DNA, 485 bp, Zea Mays
aaattttgtttagtctcctctttccacgagcaccgaaggcagtattcatggcttcgtcctctaccttcgtataagcccccaacagctcatcactagccacctcaatggcttcaatccattcatcattcgcctcgccaaactgacttttgtagtgatagctgtactttaggtaaaccaggccaccttcactggaaccagcagcggtctcctttggcatcttccaatcatgagcaagaagccataccttaaaagcaatgtgctcctgaaccaaatcactagtgccaatgtaggtgcacactatgttgaaggccatcaaacatgcttgtgcttcgtttccatgcccgatcgaaggtctcctaatgctgaagcgcgatcgaatggggcactagattacgcccttcaaatcctccatctcacctagatcatttgtaacataaatccattgcttcattcatgagcccaaccatttttctaaagcgtaagca

SEQ ID NO: 177167 - DNA, 2529 bp, Zea Mays
ctcccgagtcccgaacggccgatcccgacgccggctgcgtggctcgcctcagagccccagccgtatcctgccacccttgtccatgagcgcccgctatcagcgcagctagtccctccctccgcccgctatcttgagcggtggtgatggagtttactttcgaggatgcagcggaactgtgcgcgctcgtttcgaatcagcaatcccacgtcgacgagaagcggaggtcggtgtggtttcttctaccggcgcacctccgatcagaatgcatttctgtttttgcaccctgcatcacaaaagattcggggccctcttaatttgcaggtggctggagtcaatgatcctcagaccggatggctgcatcaggcgcgcgaagcgacccaagtttttgcatgaagtgtaagcgtgcgccaagttctgggatgcgagtagtgttctaattcaggctttttcttggtctctttaataagttgtccgaagtttagtgttttattgagtcaaccgggctgaattttttttccatatgacattggaattgatttttacagattcagtgctaaacccattttgggtggtaattttctcatgtgtgttattgtatctgatgaatcgttgtgtttcttaagcactcctcgcattctagatgccataacattcatatcaatgcttattcattctgaaaagctgataattgttttgataaggggtaccattatggcattatgtgtaatgacacccctcttcctctgaaatgtttccacatcgaactctgttttcctaatttatattctctctccctccctccctacccctctctctctctctccccaatccacctatccacaaaaaagaacaatcaggatgtatgtagtgagtagtgactatactaagtctaattgttagttctctgcttatgcaggtacttgcctgagtcatatatcaggagtgatgacgtaagtgttagtactttggaaagaactacatatagcttagtgtttattttgcattcttactaacatcagttcatggcttatgtactatgtgcacatatggtttctcccacttattcaaatccctccacctatgtgtttaggtctttaaggtattagcgaaatatgtgaagtaataaatactctattttcactgtataagttttattcaagaataagttaggtgtgtactcaaaggactttatttcaataatcagttaaatacataatgcttaaaacttatggaagacatgttctagcgccaagttaggaactattgcacatggtactctagtgctatgtctgatgttgttttgaacatggttcaatttaattgtatttcttcaaaaatggttttgtcatggctatataaattttccttaccctgcaatgatcttatgatcgttttggaaccatttatcagtttcctggcttatactagttaatataacagcaatttcggttgcattatgtcacttcaaaatataaaatgtgaatttagtggggaccattttttcagagatcttgtgataaagtgagaggtaacattaaaaggatttggagttcagagtgcaatggctatacccatcacttagttctggagggcctccagctttttgacttccagaagaaggaaaatgaaccacttggaccagaatatcttggtgtcatgcaggacacaatcagcaaattgacctatgaaacacttcagtcagtggcttgtgttgtcagtcatgacaaggttacttttgataagactaggtctgtaatggaaaaaattgtaaattctcaccttccaagttacttggccagcttggatcagaatgatattgcatgccagctattcaatatttttagaaatccatgcagctatcgatctggttctgtgaggcttgtcacacctgtgtcaccacaacttttgtcttctattaagcatgcgttggatgagcttgatggaatgccaatgcagggtcttgttgcaatgaataggaagattaaaggaaaatcatgtgccccaaaatttggattaactgctagcttttccaaaagaatgcatataatcaaaatgataagaaaaaggtgcaacaagattttaacagaacttgaggaaggtaattacctgccaaaggaattagcaaaggcaatgtcagtggtgaacttatatcagaagcagaagctgaaaaatgtgagtatttcacaatcagagtttttcccctttgcaaaagaaactatttctttgcagaatgatatcctgaatgccctttggtcacttccaaatctcaagcatgcgaagctgaaattgctgcacaccatactggatcatgattctaaatttgaaaggaagcacttagcaactttgaggaactacttgacagaatgtttgtttggatgtgatgatggtctaccagatgtggccctccaagccatagcctctataaatcagatttctagatgtcagcatgttgtgttaacggaagagagggaggatgctgaggtagatgctgtactgaacttgagcagtcatctcaaagctttagctcat

SEQ ID NO: 177168 - DNA, 641 bp, Zea Mays
gttcaatttacctgatcgagcatcaatccttgttggcgtctgttccgtggatggccacctggtcatatggttatcgagccttgtgcaagtggtgggtttcctttgagttttgcactgtttctaaaaggaactaggaaactatggagccgagttgttccacaactacaacgatgatggacacttgtgctgcacaaagagaatattaagttatattatgtcctaacttcaaaataaataaacacatgtcattcttacttatatgtacaggaagctcgcaccaattctaggccgacgaatgtggaggtgtatgtggtagggaataggggttctaatccccaaaatgttgatgtgttatgcactcaaacaacctcgaccatcttgtgagctttgtatactctagtgtatgttttaacatcacatttatgttgtcttgttatttactatgcttttgttcaggcgttatgggcgggactatgactggaggagccaaccaattgaccccgaggcgacatatgctagcgtaggaggacaagcccatggacagtgagaatatttcgttttgattttgatgttatgctcatatgattgtgattgtaccgagtttatgattcattcatataggttgggtacatttgattcat

SEQ ID NO: 177169 - DNA, 796 bp, Zea Mays
acatagaagaagagcaaaaatctagggagctggagcaacaaatcgctgaaatacagggcaaagacctctgccgccagccagtggcggaggagccattatggcttagtgtagctttagccataccatacattttaaaaaaaaacttatatcttccattatgttcacaagagaagatttggcctcgtggataggtggttgtttatcaagtagtaggtcttgggttcaagtcatgttgcttgcatttttaccttttccttagccatacctcattttttatctgtcctccgctactaccgccagcagccagccgtcccactcaatcaaaaccttcgccaccctcacgtaccagccttcgcactaactgtcttccaagggctgaattaccttgacgagcgaagccctctcgcccacagctccaggtatccccttggccacaaaactatagagcaagcacttaccccaagtacaacaacagtgcggacccatctcagtacatcatgagctttcagatcgcaatcgcatcatctagggggacgacgccaccatggtcaaatcattcatcatagccctcgagggcccagctctcacatggtattcaaggttgtcgttgttatcaactgattcatggaagactcttcgtgacaaattcctgctgaatttccaaggttacaatctaaaacagacgcactggcagaactctcgctttgttggcagcaagataaggaaagtcttcgcgaatattacaaaaagtttctcttgttgaaatcacagttgcccttggtcgatgaccatatag

SEQ ID NO: 177170 - DNA, 446 bp, Zea Mays
gggcgatgagtaagactttcggggacctgatcagggacaaggtggaagtatatgtcgatgacatcgtagtcaagaccaagagagggtcgaccctagtggaagacttggccctggtcttcgacaggctgcgggcaacccgcacaaagctgaacccggacaagtgtgtctttggtgtctccgcagggaagttgctggggttcctggttttgtaccggggcattgaagcaaacccggagaaaatcaaggcgattgagggaatgaggcctccgacccgtatcaaggacgtctagaagcttacagggtcattagccgcccttagccgcttcattttaaggctgactgagagggcgctacccttcttcaagctattgcgaaagtccggcccattttcttggaccgaagaggaagaacaagccttcgaagaattgaagcagcacctggtgtcc

SEQ ID NO: 177171 - DNA, 639 bp, Zea Mays
gggatctagggcttcctaccgggtcttgatgcagcggtggatgtggccacggtgcaaagcggaaccatgacgctccttaactctgatgagtaattctgattgcccccgatcgtgatctcccccgaagacgtgacacgcgactcccatagttgtcgatgaagcccccaatccgaacccgaggaacgaaacgatgctgaagatggagcatgccatcggcggcaatcccatcccccacggcgccctccccacatgcttggcgcggcgcaggacgacccagggctgcggctagcttttggattgctgggcgagaggcggcacggggtacgcatacatgcttaacaccccgggattctcagtcaggattgccacgcggttgttacaatcgatggcgatttctgacgttgtagctcgagttgttacggtagagatgcttctgactaggtggccccacttgcaatgacagtgaggtataccggtgtgcgcctatggaggctgactcgtgggccccccgtcttagtgtgcacggttgggcgcggagtggccatccattggggcccactcgtcggcaccatgcaacaacaatgttgggctggcacaaggtcatgggctgagggaggtagtttcggcccgaaaggctga

SEQ ID NO: 177172 - DNA, 477 bp, Zea Mays
aggtatatagtgctcctggaaagccaatttgaactcgtcccatgtaatttgatggtcggtcggctgaacggctacataatttccccaccatatgctggcagggcctcgcagttgttatgccgcaaacaagggcttttgagtctccatacatcggagaagcccaaacttctgttcgataacgtggatccactcatccgcttccagaggatcttccgccttgacaaacaatgggggacgtgtctctgagaaatccagatatgatgtttcatggggtccttgcggataagctcgcccgccttgttgctgcatctgttgtcccgccatttcccgcagaaagcgggtgttgtcggtcgtggcattaactaaggcagcgatggcctcatctaatgttggaggtactgggggtggattaagggttgcttccctcccacgggaggttcttgccccatcctgtgcgcgagtcttggacggcatctg

SEQ ID NO: 177173 - DNA, 686 bp, Zea Mays
ctaaattgagttcatagacagatctctttgacaaactaagcacgtaccatacgtttgaaccaggaaatgaaatcgggcaatccatttctcgcaccctttctaagaagagtgtcatattcctttggagtggggtcccttgatcgacgccagaattcatgaagaaattgttccatgtatgacgtcacctcttcaaggttggtcaatacatataacatgatatgacaccactcttcatgagtcagagtcttggtggtcgagccacttgcgcttccgagttggcctcgaaatatgctaaggttcgattcattgccgccatcattgtaacgaggggatggattatgcacgctcggcagtttgtcaccataataagttgttgtgaagtttgacacctcctctagaatgtatgtctctgcaatggaagcctcgattttgcatttatttctacatttctttcgaatagtctttagacatctctcgattggatagcaccaacgtccctgcatgggccccccattcgttcctcataggggagatgaagaatcaaatggtgtattggattgaagaagctgggtggaaatatcttctcaaacttacacagtaacacgggtgccaatctttccaagtctgcaaccacggtccgagataactcttttgcacaaagctgacagaagaaatagctcaactct

SEQ ID NO: 177174 - DNA, 393 bp, Zea Mays
ggagtatttggcttgtagcatatctgtttttttaatgaaagagaaggtatggtggtgtgtttgggacaattacctgcctttcatgggtgaggattagtttgatttgggaaatcgggtctcttacaaccctatgcaagtgattaaattggacaaaggtgagctgcaaaagtgaaattaaggttaagtaggtggattaatgcaggttaaattccgatgtcataaccttgtaaagcacacatcatggcaaccagacggcatcttgtgttcttagttcatcctgcattcctgcatcacacacagctgaccaaacagaacactgacttgtatcttctcttcttcaaaccagtttgggttgaggctgtattattggagtcactgctacaagtagaaatt

SEQ ID NO: 177175 - DNA, 525 bp, Zea Mays
cggttgcattcatcaaacatgtttaaggactcatgcacaataaccaatgactggtttgttagccactgaaagttgactgttgtgtcggaccgtcgggtccctaggggccatgagtcagaggacggatagcattgagtttacccgtcatgagtcaattaagaatccaccctgccatgggatgacccccctcgcatcatgcgaggcagaggcaggcgaaaggggttagacgaatcggttgaaacccactgagtagatttcatgtatccgccagactgatcgtaccatcatctttgcttacgcctcattaactacgccagtcggcagggtatgacacgggcagaattgatcttccttccacttataacctatggatcctaggtctgagtcctctgaagtcctacgaccctgcatgaaggcaagggagaaaccagtcgacagaatacgaaggcaaaaggtcggtgtaggggagaaacagacaagaactagtaatgatggcggccgaactttcgccgccaacacggactt

SEQ ID NO: 177176 - DNA, 484 bp, Zea Mays
cagagagcgatgaacaaggcaagccgactcagaaaccatacgcacctggacgagagggatcaattcccatatcacctatgagcgggagattgtgaccgcctcctcaaagttgccgagcatacacacaatggcatctagactcctgttggctcagtcaacggcctcctcaacaaggtgtcactcgttcgcttccatctcctccccctttgcaccttcaaggatgaaggggaaggtcctcgggccatcccgaagcgcatgcatcatgccccagaggaggaagcagcgatggcaagcgacagcagctctcgaagttcagcggtcgccaccagcagtgacacctctgcagacgagcccaccaccgccgtggggcccaatgataaaagaactagcagtggcggcggaagaatgaccaccatcaaatccgtcgatgggagatcgccagtagtggcctcaacagcagcaggagcccatggcgagggcggag

SEQ ID NO: 177177 - DNA, 1171 bp, Zea Mays
gaggactgcgcgggcttcctgcgcgcccacaggatactgacgcggagcggggaccagttcggagcggacccgaggtacgtccgggtcagcatgctcgacagggacgacgcctacgacatatttgtgaagcgtctctcgtctctgcgatgaagacggcaggctactcacggtcacggagatgggcctagttggagaggagggtcgatgccacccggccggccggcgtcggcatgccggcccgtcgcccgtcggactgtgggagcatgcatgagtagggcagcagcgttcagtaggaagaagcgcaggaggagcgacgatttgttttgcctttcctgctgtatgttttgcggtgttccggatgtcgcatcgtctcaaaggtttcttttggtttcttgctaattgctacgtgagactgaactgttgtaacaaaaagtcaacataaattggactgacgacgagaaccgcacagctccaaaaaaaaaaaaaaatggtactctgctcgcaacgcaacgcttggcgttctggcttagcgcttttagccttcgcttagtgtacaccttcagtcgactacgtcatttgttttacaagcgagaacgtcatgtgaatatgtcgtggtctctattgctatgctactcctgggtcaattggcttggcctatataaatttctactgctgatattacgattgcagagccagacatgcacggtgaaccactcaatactaccccaccaaacaatattagcaatatactcaaagaggttgcaaagtaatttgatcgaacatgtccgatgtaacatcgccacatcggtcgtcgcaccggatggccatgttcaaatggtcggtaatggctagtttcagtgaatagttggtgtggacacacaccagacttgttcgacaggtttaccagagtatgtggtaagcatgcatattttttgttttgctttcaacgactagttttagacttgtgcgttgtatataccatcccaacaaccaagctgggccacctaaacaaggtcactgttctcacccttcagtccaaccagctcagcggcgcgatcccggcatccctcggggacttgccgcgctggcacggctagacttgagctccaaccaactcttcggctcaatcccctccaagctcgctgagatccctcgtcttgcaacgctagac

SEQ ID NO: 177178 - DNA, 776 bp, Zea Mays
gtggccccgcgaacgtctgcattagagctcagtagacgttatcctcgtgctacaaagtgtgcctatcatgttcccgtatattatatatacgcagtagctagccatgtatgatggatggagagttgttcagacgccgcgcccaatcacatcatcgtatcctgcgtagcacttgcgtacgtgcgcatcggccggccgaggtcgacgtgaggtgaactgtaccggccctaggcagctctctagctcgctcgatcgatcgctccatcgatggatccaggaattggatgtgtgtttctctttctctttctcggactactgtgaactgctcaccgcgcgtcgtcctgtcacgataacaaccagctgactcgagggacgcagaacgggcggcgtgcaggtgcatgcagcagccagatgcagtgccgtgtgaggtcctgtctgtctatctggggggatttcttcggtgcagcgcgcgcgcgttgtactcctctgcgcggctgctttctgcctgctcatcggatcgccccagatttcagaatatcatatcatgcgccacgaatccgaatccgggtgacggaaggcgcatgttgtaacaattaatttgctgacgggtgacggcctgcatgccttcatgcgaacactcacgaagaagaggaccatgatctcctcgtcataaacaaaggaccatgatctcagctaccacaaaattaagctagttggatgcacgtgcttgctacggaattttaaacatatcagttccattgtcataaacaaagtgatgg

SEQ ID NO: 177179 - DNA, 545 bp, Zea Mays
aatatggaaaatagtgtgtcaagtggcttcctaagtgcctatttggatcgacttctggctggtttctggatgtgagaatcgggttctagccgccaaacgcttcgtttcccaatctacttgtttgagaatcatttttgtgaaaatcgcccaaatcaacttgaatgtagaatcaatagtcgttgcatgggaggaatccaccgcttcctaaaccctaaccctacggaccccttcatcttcctctacacgcaagcccctatgatatctagattctcgtgatagctaggttatccataaatcctgaatttcagaaaagctcttcaaaaaatgttgtaccatacagacccagatggttaggtaatggaattaacacttgtttcttagatggtgttttgaggaaactcaatagagggtagcgaccaccacaaaagcgaaaacatggttcactagagtcatcagactaaaagccactataacaggatccattgtcttattggccaacactagaaccccatcagccgcacccaccatgtggtgctgcatcttga

SEQ ID NO: 177180 - DNA, 363 bp, Zea Mays
gctcgtcatacatggggagctatggcggtttgtacgaaggtggccatgggatagcatgcaattctactgctaggggggaagcatcatcaaaagcaaagttaccatgattgaaatcatcacaccatacatcatcataacttggatttcctgatgaatctctctcagttgtggccttcgtccttgcttgttgtcttatgtgatatggcacatctctttggcagcttcatcaatcttcttctggagttcagacagccgaagcattttctcccttcttctctccacttgttggtggatggcctctagatctctgatctattgatccagctcctcttcctatggtgttgggctaatgaccttcctttt

SEQ ID NO: 177181 - DNA, 287 bp, Zea Mays
agtgggaaccggaactagtaacaatcaagcccaagaaatttcaactgaggaggctactgttgaggcagtactaaatccaacttcacatgaacaagagcaagaaattccaccttctgagcaggtattcgatatagttgttgatcctaggcttagaaaaccaattgatgaatacgatgttaacattagggatgctgttagaagagagtatttgttacagggtccatgtcaaccaattggccatatatatcctaaaaagaagatgggagaccgacaaagaagttttcatg

SEQ ID NO: 177182 - DNA, 997 bp, Zea Mays
gtcgtcctgggacttcgcaagttacgagcccttggtgtcaccacgtgcataatcaggacagactccaaggtcgtcgctggccagatcgaaaatgagtactcagtaaaggagcctgtgctcatgcaatatctcaccgccgtccgcagcctcgcgaaacaattcaagggtttcaccctgcagcatgtcgactacaacaagaacgaagaggccgacgcgttggccaaagcagcggccaagggcgaggccctgcctttcgacgtgttctaccacgtcatcggcacgccagtcgtccgcaaccccgaaggtttgcaaataactcaggacgccgagggccaccgaattgtcaacctcatcatggccgaagactgacgagctccaataacactatacctgcaaggccactaccatccaaccgaccgcaatgaggccaagcgactaaagcacaagagcaaggactttgcaatagtcgagggtaagctgtacaaaaagggaatcagccagcctatgctgaaatgcataactgagaccgaaggcatagaaatcctccgcgaagtccacaatggaaccagcggctcacactcaggaccaagggccctcgcagccaaagtgatccgtcaaggattttactggcccgcgataatctgcacagccaaccgagtcactaggtcatgcgaagcatgccagaagttctctcctcgctcaggcaacccttcgcaattcaccaagctcatcacacacacatggccacttcaacactgggtgctggacatcgttggaccactgcctacagcccaagggaacctcaagttcaccttcgtcgccattgaatatttcacaaagtggattgaggccagggcagtctccacgataacatcaaagaccgcccaaaaattcttctggcaaaacattgtctaccgctttggagtcccgtccgaactcactgtcgacaacagcaaacagttcgacatccaagacttcagggaattatgtagttcca

SEQ ID NO: 177183 - DNA, 869 bp, Zea Mays
ccattgctctaaagaaagggttgttagggttttggcatttcctttcttccttaagcttaatatggtgagggtatgattcttaaggtgaaaaagacttgattaagttttagctcctcaagtttggtgccttttgcttccactgaagcacatgtgataataggtaaaaatgtgggtactgagaaaaaaccctaagtaacacctggggtgttacacaactcccctaattctctcggttcacactcaccgggccctcaccatgcagtcggagctccgcggtcgtcgacccaaggcctctctgcgtcctcgctgttgctcaggcgctccagagtcccctctcgtggtgagcaaactccccacgcccttaatttcccgtttagtgccatgttgtctgcgcaatcgctcgcccaagttgagttgcgccgccgtcgggcccctcggcctcaaaccgtgcaatctagtgcctttgtgtcggtgtcgtgcccacggctgagtccgccgtgtcaccccgtgctcgcctgagccctttcccagtgccctagaccctcacagtggtcgtgtcctcgcctctggcgaaacttcaccgcggagtcgggcggcgccgccccgggcattccggcaaccccagcctgagctcgccatgagatctcaggcatccatctgggatctgacggtctggcttctatttaacctgacccgatctcaaccgtccgattcagatctggtcgctcggatccgcaccctcgctcgcaatctgcaactggacccagccggccagcccgcctcgtacctaggtcgctgacatccttggcccgcttgtcagccctcgctcgtgtccgcacgcacgctcgctcgctcagatctaatcgggg

SEQ ID NO: 177184 - DNA, 779 bp, Zea Mays
cagatttagttcgctttgccttttccttcgaagaatctcgaccaagtggcctcttggatgtgaagctagttggtacagactcctctgcatcaacattgatagtgttagattgggtgggattagcgttggcatggtgattttgttgacccatgtggttgtccatccaacaatgtaaaaagtggaaaaaggcttcttctcaatagctgcaaacctagaggctgcaagtgaagtctgcaagagacaggctggttagagcaggaacatatttacaaatacctaaaatagttatgtaatgtttgatagtaaagatgtaccttgtctgcgtcagttagcccactagggttctgtcggaggactgtcatcatgtaaccagcaaaagtggaacactgtgttttgatagtatcccatctactcatcaaagattttgttgacctttcgggcaatgttcctcgtcttgcgttgtaggcttcagtaattcaactccaaaattcttgacgcttctgccctgtgttaataatgggatcacaactgacagcaagccaagcatgataaaccctagtgtcgtcataatcagtgaagtttgctagctttgttcgttgattaggcttcttaggtacagctggtgttcttgatccctcgacgttggcatccactggaagttcataatgttgagtacccacaggctgctcgtcaatctggctaaggaagctaccatattgtgacatgacctggttccaatcacttcccattctatgcaacagaagcagaacaaacatgtc

SEQ ID NO: 177185 - DNA, 863 bp, Zea Mays
gacgcctctagtacgtcggctatgtaaggtcgttcatttcaccctaatcccctctgaatctggtgtctgctcactggtgctcctctctacgttcgattctcgggctgcttatgtgttgtccactcgctggtgctcctttccggtgtctcttggtttgttttctctttatgttgtgtgttttttgtccgggcttcagttgtcgcctgtcgtccatcttcacattctggtcctactctccaacctctaggctccagcggctggcctgcttggacatctatactcatcctcaattcctccctcgccctccttcctatcctatctagttgtccatgtctaccagaatcctagtccctaatcctcaactccttgcgaacgtctctagtgccctggctgcgaaaggttcgtctaatcgatccatattcctctaattttctctagatttatgtttaattgcattattggtggcttgcaattattgaggaaccgaaggcgacggttggagctgatcgagcttttggactcgtggttgaagttgaggtcatggaccttgatgtggctatagggaaggaggagcatcggcttgaggagcacattaaggtggaggatgctaggtacttcatgggttttggtgacacccatggagatccaaccgaggttgatattatcgtcgactctagaacaggcactagcactggctccatgagcccatcagaaccaatccctgatcctgatgtcggcgtcagtgccggtggtagcaactcgaagaaaaggtccaagtgctggaaagacttcgagtaattgactaacactgtgaatgataagaatgtcagctatgttgatcatttcaagcactgttagcaaac

SEQ ID NO: 177186 - DNA, 496 bp, Zea Mays
aaaagggctactaagatgacgttaaaaaatcttcaagaaacacgtagaccaaataagtaggtatgaaatttagagcctaggcacgggcgttggtgcatgtcggtcgtggctaggagacggaggacatctgccagatagacaatgatggccgacatggaacgtaggcgctagacattgggtggctagagataggacacagacagagacagagacacgactggtgtcctagtgcatgtgtgttagatgcagacatggctgatgcgtggtggattagggaggagaatatttgggcaggcttgaagacctactcctacaaacttatcccacggctagggttgtagcccgacagccaatcccatgttgctgccaatgtaaaacacgacaccgttagtaatgtgttgtgtcgtgcctataaatgtgtctagccatcaacccacgcacacagttatagtgtgtaatcatgtcgtgtcagcactatagggcactagcacctaat

SEQ ID NO: 177187 - DNA, 467 bp, Zea Mays
agcgagcttgcccaaccgtgctgcatatcgagcaaatcctgaggagactaaggagattcagcgccaagtccaagaccttttggaccgcgggtatgtacgtgagagccttagtccttgttctgttcctgttattttggttccaaagaaagatggtagttggcgcatgtgtgtagattgtagagccattaataacatcactatccggtatcgtcatcctattcctcgattagatgatatgcttgatgagttaagtggttctaaaatattttctaagattgatttgcgcagtggataccaccaaattagaatgaaattaggcgatgaatggaaaactgcttttaaaactaagttcggcttgtatgagtggttagtgatgccttttggattaactaatgtccctagtacttttatgtgtttgattaacgaggttttgcgcccatttattagaaaatttgtggtggtttatt

SEQ ID NO: 177188 - DNA, 410 bp, Zea Mays
gcagggcacgctaccatgtcgctaccgctaggcacggcgcgcggcaagcctggtctgggcagatgacagagcagcggacaagatgatccctcccgtctgtcgctgctagctgctactgctggtgccgaacaattgttgtagcctggacaacgtgagcggaggcttccaagagaaggcaaagaggattgcagctcaagcgtccacgagaagccaagtacgtaatcgagtttaaacaggcatgcatattgtacgttgatgggctttggccttttatcaatctttgtgttgtaatctacataaacattttctatatatatacacatacacgtatatacggggaggggccctctggttctcgaaggcccggtgcggccgcaccgccggcacctgtccagggccggccctggtac

SEQ ID NO: 177189 - DNA, 537 bp, Zea Mays
gaagaaaccgcgcgcgttccgcgactgatttgtggacccgggtcgtctggtggcgggtgcgcgcgcggacctcactgcaccatagaccccacatgtcagcggcatcggcattgcgcgccgtttgaaccatttctccactgccatacgggcccagtggccagtcaatttctctcgctctcggttcctttccttctctggtgtgtggacctagcgagtcagtcgtctcccaccttcccccacggattttaccgaactcacgcgcaacgaccgccgcgacgtcgtcggaggtttgaccagctcgcgcgcacttcccgacccccgcccggtcagctggtcgctttagcgcctcggctactgcgggtctccgccatgtgggtcctctttcaccgggtcgtctccctcgcgagaaattcgcgccgtgggcggagccaacggcccgagcgcagagcgcggaactccttccccttctcccggaactgcaaagccacgactccgactccgccggttcgggggggataaaggcacactgcgcccgca

SEQ ID NO: 177190 - DNA, 589 bp, Zea Mays
agacagtattacagatgatccggcccccgagaccggagagtacgccatcacacaaagatcatctgattcctctatgggggacatgatagaggaattcagagatctcgataaactaggataggggtttacatcggctgatcctttggaggagatcgacataagagatggtaaaactccaaggccgacttttgtaaacaggaccctggagatcgatcctagaaatgaaatgatcagtctattgaaggaatatttggattgctttgcttggaattacactgagatgccgggattaagccgagagatcgtagagcatcgactgcccattaagtctggtttcagacctttcaagcagagagctagaacatttcgtctagatcttctcccacgaatcaaggatgaaatccaccgactgctagaagctaattttattagaccttgcagatacgcagagtgggtctccaatattatgccggtggagaaggagtcaggtaagcttagagtatgcattgatttttgcaatttaaatagagcaactcctaaagatgagtatcccatgcccatagccgacacattaatcaataatgcatca

SEQ ID NO: 177191 - DNA, 620 bp, Zea Mays
aaaaatttgagaaaagggctcctgaacttgctctgtcagaatgactgaatgggatcatgatggtacagtggactgaacaagaatccaggttcagtgaactcgccgccggtgaactcgcgcaacgattcgtgcacgacgcggcgtggatattactggactagtgaaaagatcttgaccgtggatgagattgtgagctggctgccgtacccacttgccccgcaatcggtcgagatgaccatcgccggatttcgccgcttgctgcaaggatgccacgtatttggaggcgttaccacgtcgcagtatatcgcagtagatagcccatctgtcgcatgagactttgccccggtgagcgccacagtagttttgctccggtcactcacctcctctccggccgccagcttatcttccccgaattcgaagccaccacttgcagacgctataaattgagtgtgtggcctgctccgttagcttgttatgaagccagaacaccaactctcgcccccaattagccaccgtagcccgcaaattcggtacttcccccaaatcggtctaattcgtcgtcgttggcatcttgccgtggccagccatccaaaggttgatttgctcttctctgattcgtg

SEQ ID NO: 177192 - DNA, 446 bp, Zea Mays
tctgaagacgtcactattcgagactctatatgacaggaaatgcaggactcctctaaattggatcagactagaggaagacaaatctttggacctgaactcattcaagaggcagaagaacaagttcgtataattcgagagaatttgagggtagctcagaccagataaaggagctatgctgataatagaaggagaccactagaatttgaggaaggtgatcatgtgtacctcaaggggtcaccacttcgtggaatgaggagattcaaagtcacgggcaaattgtcccctcgctttattggaccattcggagtttttaggcaagttggaaagatggcctattaactcgagctacctgatagtctatctgatatgcataatgtattccatgtgtctcaatttaagaagtgtctccgtgtccctgagaaacagataccaatggaagagctcag

SEQ ID NO: 177193 - DNA, 339 bp, Zea Mays
aaaggagggacatagaggcgagcttgggctcgatttcttttgaatcaccttttctccaagttcccttattgatggaaccagtatatcagactaacagtatatccctttattgatggaaccagctgtgcactaggtacctactaggatggatgtggtctgcaccggtgcgtctaacaaagttgatgaagacgcgaccaaacttgaatggcagacaacgagcagctccggtgaagggagcggggaggataattctagtgacgacaatccttgtcctcctatacctccaaggaagaaaaaacatcagatgagcttgatgccgactatattcccaacgatgaa

SEQ ID NO: 177194 - DNA, 502 bp, Zea Mays
ggggaaatgacgaatcttcgtccatgaaacccaccgatgacagtgtggtgacgtctttgacataggcctcgatctccgacatggaaaggagctccgaggagtggcaattaggatcctttaggctgtcttactcccacatcgggttctggtggaccctgagcagttgaatccgatgttgcataaacgtgtggatcggtcgtgcaccggtgagtccctaccccttcagcatggcgatcacctctagcatataatccaccttcagtttctatttggctccacaccatagttccatttggcgctagacaccagaaccaggctagtaaatgttggcatgctaccctcaaggttcctaacgtagaaccagacgccctcgtaaccgcgaacggaggacgagagagggaccttgaggtaggccgactgccacgtgctgcgcagctggatggagaagcagccgacaaatgactggccaccacggccagtggtcagccgcgggctaaaaata

SEQ ID NO: 177195 - DNA, 628 bp, Zea Mays
cttgtctctaggcacctgaggcatctgaacttgcacttgaggctgaggtgggggtggctgctgctgcacctgctgcattgctgctagggtctgaccaatcgcttagactacttgcgtctgcatcaggaacatatgctcaatggtcatcgggggtggcggtggcaaccgttgctgctaagatgcctcctcctggggtgcctgctgttccggctgagcacaccttgtacctctgcgcctgttctcagacatctgtagaaagcacacacacatcagatctgactctacagtctttcagcacaagaaaagatatacggaaatctttatactactgaacaattgatcagcttcactgacagcttctcagataaagaggaaagtggaaataaatggattacccaactaaataactgaccttattaataactacttcaagttgcaagggatacccacaccttgatgaaaatcattacaaagatccaacttcattacatgttcatcaccacaggcatccaacttatgataagcaaactaactctaactaagactgactagactaagacactgaattaagcattattacagactccaactctgtcgatctatggatccaaatctatctgggtcctgc

SEQ ID NO: 177196 - DNA, 461 bp, Zea Mays
gagttcacacgcttccacctattgtatggatctgaggccatgacgccgcaagagttaaagcatgggtccccctgaacaaacaaatcagccgtccccgatgtcgacgaaccaacttccaaagatctcatcgacggagactgcgtcctcgccctgcaggccctcgacaaatatcaggttcaaaccaaggcctggcccgacaacacaatcatcccaagagaattcagcaaaggggacctcgtactcgtaagaaccactcggacagagccacggggcaaactagagccaaagtgggaaggtccattcatagtcaagatgaaggcatcccccagtgcttacaggttggcaacatcatccagcgaggacttagaacattcctggaacatcgataatatccagaaattttttgtttaagtcccagggcctacgcacctttgtaattctacaaacaatgttgttcaggc

SEQ ID NO: 177197 - DNA, 1057 bp, Zea Mays
ggcgaagggactggaacttggttgtatcataccactctggagtagttctaaaatctgtcgttcgatttcattcttttgcgcaggattgtaacggtagggtctcagcctaaaaggtgaagcccccggaagtaggggtatagagtggcagtgagaacggggaggaggcagacctgatggtttgtcaaaaatggaattatattgttgaattaggcgttgaatctcgtctgggacagcaattgggacatcggagttgacttttttatgtagttcaactgtacaccaaagttcatccaatctttctaaatgatagagatgggaagctgaaatgtgatccattgtgaataaatcagggattagaccttgcaacaccaccctttgttgtccaactgtgaaagctagccatttctcttcccagtgaacttccatcgaactacgtgaagttaaccaatccatacccaatataacatcgtagcactggaggggtaacaccttgaggttcaagtagaatgtgtggccttgcagtgttatcttgcactgagggaggtaatgggtgcagctaatgatctgaccatttgctacttgaacttggaccggttgggaaagaggaattaagttaggacccaatcttgccagaggttggctgatgaaagacgaggagctgccagaatcaaccagcatgataatcttttttgcaaataagtgagccatcagtttcactgtttgtggagcttctgttccttgcacggcatgcacagacaaaaccataaggtcgtcaccagagtcttcaggtgttgtcttgttttccacaggagcttccttagtttccaaaagttgccaaagttcttccactatgtggagagggacagttgcactgcactggtgagttggattccaacgtaatccacatttataacataatcctttcgccttacggtaagccataagagatgccactttacggtcatcttgacccggtttgcgaagatcaggtgatgtttgtttcaacattccttgtcctactgcagccggtggagacgaggttgtgttaaattgccga

SEQ ID NO: 177198 - DNA, 638 bp, Zea Mays
gtgtttctcttgtcttgctagctaggtggtattgtaaatgttcaaccctttttgcaaaaaaaatttgcttgttttgttcgtaaaagacccccccttctccaaacaaccttgagttagcaagtgaaaccaaaaaaaatcaatcaaatcccatgatgtgttggtgttttatagcctttgtgtgttgcactattggtgatgcacctgcacaacttgtaaacccccattacttgactgctagaccaacccaagtctccttgtgcacttgttgtgtcaaaaaaaaatttgttggtgtctagttgcgcaaaccctatcaaggccatgtttctttccataaatccttgcccctaaaacttcatagcatttctgttgatcatcctaggtgatcctgtttgcctacctctccttttgtctagatttggtaatccttttttcttgtgaatcatgttggctctatcatccgaatctcgggattccctattgatcctgccctattatctagatatctgctataacccattctcaagtatcagatgttgatcttgcctaaatctctcatttctggtcattctcatacccccttctctaaggatcatgacgatgttttatcgattttatctctaagcagtgtatccatttgg

SEQ ID NO: 177199 - DNA, 601 bp, Zea Mays
gcatccaagcgccacccccaatcctaccgccgaggcacggcggagcagaagcccgcgacggcactcctcgccgacgaatgtcctttcgacgccccggagcccgactaagcaagcgacgaggtgcaaaaccctcctgagaaccagacgaaacagatgggggagaaaaatacctcaattagagccgagtatggacccgcccacaacacgatgcaacattgtcaatcaccggcaagcaatccccacgatttggatcgaccctgtgccagaggccgctgtatttagtttccacgcgcctggagatgttccccaaagctcaccacggagcccaaacggtgacggcgcagaggtggtggtgtagcagcttctgacttcctcacggcgatggtgtggtatggagtggcgtctcacgggaggatggaggggggttcccaggtgctcgggtagttttataagcgaaggggaatcacgacagaggcggggatttggccaccgcgcggatttcacggcgttcggtgcgcaacagccctagatccggtggagaagaggaacagtggaagggcccacatggcaatgaaacgagaggaggcgcgtgagaatgacg

SEQ ID NO: 177200 - DNA, 450 bp, Zea Mays
cttctcccgtataaagcttcaaaaggtgccatctttagactggactaatagctgttattataggaaaattctgccaaggaaagacacttgtcccaatcttttccgtagtgcagtacacatgcccttaacatatcttccaaaatctggtttaccctttctgtctagccatctgtttggggatggtatgctgagcttcgtatgacatgggtcccaactgattcctgcaattgttcccaaaatcgtgccacaaatggtgctcctctgtctgagactatagtccttggtatcccatgcaaacgaactacctggtcgatgtagatttctgcatacttctctgtcctgtgggtggtgtgtactggcaagaagtgagcggtcttggtcaacctgtccacaataacccaaatggaatcatggtgcctggaggtattgggcaatcctatgataaagtcc

SEQ ID NO: 177201 - DNA, 294 bp, Zea Mays
agccggaataataggtgcgcacaatcgaagtcgttcccaaaagactctccgtgcagaagtcgcctatgggcgcggctgtatcaacgaaggcacgcagccttatcatacaaattatggttacatacacacagcgagggcatcacatattacattggctcaacctttgggatgatacccatctccctgtagttgaacaacattatcctcaattcctcaccctcaaaaagatttcacagctccccttcacccacactcgccccagccggtgaggacaacaattcccgtttaccagtc

SEQ ID NO: 177202 - DNA, 535 bp, Zea Mays
taacaaggcacatatcacagttaatcattccttttccttattgagaacaacttttgtggcctaattccaggtcctccttcgatgttctgacagactccattgccttcatcattgttcatgtagttttggccttcaaatggagccaaattgtattggcttgaaccttcaaatgttgacgggtttggttgagatgaagtaggaacaccaattgaggcctaaaatgtagaaatatagctatgtgagttgataccttttccatggaaaatgcaaaataaatagtgagtcacataccctcgtgtacttagctcccttcctaggctcccaatcagccctaacaggctcagctcccaccagctcgactggctcccagttaacatctccgaattggcgttcagctaactgaactggctcccagtgaatccagcaagctggacaatgaacagccagcctacacatgttaactgaactagagctgtgttaacagccagcctacagattgatagattgtccagaataacagattgacacatgtgtt

SEQ ID NO: 177203 - DNA, 857 bp, Zea Mays
gcgttattctcaatcttgctacgatttacactcttttggtgtgcgcacgtctcgcggcatccaggcccacgaaaagatcatgtccccgcaatctgggcagcttacgtctatcggacccacgaatcaaggaaccgacctctcattttttcagctcatctctcccgtaactctcgcggcggccgaaccctagccaaatctgtcgtcgtatgctgcttctcctccgcgcccgtccaaccctagactaatcgccgccgtgagcttcttgtccaccgcgcccgccgtgagcattaagattctccccccgtcgttccaccgccgtcgcattctccttcaccaccgcagagacccggactcgccttctccaccgcatacacgtcgtggccttgttcttcgtctccgggaaggtacccggaatcgcggaggcggttgtgcgccccttcgttcttctactccgcagagaccgaaacctcgatcttctccaccgtggcggccgaacgccgagtcccctacgccgtcgcgagctccgtccccaacgtcgagtcccctacgcatttgacacagccgcgcgtcgccttgggttgtcctctgcagaggtgtctcgaattcagccgccctccaggcccatccacactctggtaagtcatcaacctttaactcttacaatctgaatcgtaaatagatttcaccttattattttgccaattgcttgatttatcaaaaaccagttcattataaatttatagttaaacggagacacaaatgtatactatgcaatctctcacacgtttatgcagtttacaatactctgtttatgctgctttgttgacagaagtatgatacatacatcaatatattat

SEQ ID NO: 177204 - DNA, 501 bp, Zea Mays
tacagaaccagagatgaatcctcttcctgttggatctaatgttgttgttaccgcccaaatgcaactgctgcaacagatgtccaacaccatgatagagatgaaagctcaactccgccaaatccagcagcatccaccaccaccaccacccagggataagcatcgcgagttcatgagccacaagccacccactttttgtagctcccaagacccactacaagcagatgactggctgaagtccaaaaaagaggctcaacatagcccaatgcactgacagggagaaagtactttatgcatcgggtcgcctcaccggccccactgcagattggtgggatgcatattgcaaagcgcatgctgctgctgacaccatttcctagacaaaattctccaccatcttcagaaactaccacattcttgctggtcttatgaacattaagaaggagttcctatccctccaatagagaggcatgtcagtaagtgaataaagagccaaactcatctagc

SEQ ID NO: 177205 - DNA, 546 bp, Zea Mays
ggccaattctcctaactgtgctaagaactggtctatgtgctcacgcgtgctctttccttggtcacccgaaaactttgcgaattcgggtattatggtcccctgtgggtatgggagacggtcaaactggctatcataaggtctccgatatgactgtcccccggggactatactaactccgagcttatctcggaacgccccagctatttcctctcttactatatcgatggcagccggtgggagaccaccgactctttggtccaatatgggtgagtttgtttggatgttgttatgttgttttcctccccattggtttgggttttgtggcatgttaatatatgccctatgaggctcataggactggctattcctttctggccttctaggggccagaaagtactcactctcacgggtttggtagattatattatggtgctggtgtgtcgtattgtgagatggggagtctagctgggacggatacggaattggatatccatccaactcaaaaaactctgtgccggaccgtccggttaaatacgtggaccgtcc

SEQ ID NO: 177206 - DNA, 373 bp, Zea Mays
ggacggtggggatggacgcaatcggacggtcgggatagaggcgggggcacggttgtgcctggtctacactatcgtcttaaggattagtagagataaaatttagagaccattgtcacccatatagctcggtacttagaaccccgtggaaggaatttcgactctcggcaacactcgcaaaatcatgtgaagagttttaaaatccgtacatgctagggtaatattaaatttgtgcccgcattcgtcatctacgacgtgcatagtcgcacagtatgacgtctacatccacattaatgacgcacttgtcataaactcatggacacacccatgtccgaaaaatatactcagccaaaacactaaatcatatttaacaaag

SEQ ID NO: 177207 - DNA, 378 bp, Zea Mays
tgatggtagtcatggggatgggggatgtgatggtggaacatatggtgctgggggtagtggtgatggatggagtgatgacagatgcagtggtatggtggattggagattcactaaagagagtgagttcatccatgccgcacaagattgacatcaaggagcacctcagtccgaatgagagataagaagcggtcaatgtcgatcgatttcgtttcctgctgatgatggaagccacagttcagctagctccagttataactatctaactccacgcttcaaccatgtcaacaacacttacacatggctagatcctccacgtgaagtaccaatatcattcgtgtatgtgtttggacaaccaccccttccaccctcatatgcata

SEQ ID NO: 177208 - DNA, 692 bp, Zea Mays
agggcggtgaatggtacccaaactttatgtaggaaaccatgactttctcataatttcaaatccaagccataaaaaccaaaactcacaaaagtgataccctcaagccaactagttgctagatatttttggcggtgtctgaagaacacaacgggaaactcactacacaaaaaatcaagcattatcggaaaacctccaaattttaaaaagaggggtcttaacttgaatcatagtgaagcaagagcctaatacaaaatgctccaagccaactagtgacttgagaactaagagaacttctttatcataattgaaaacccatgaaaaagaagatttcttattattggagtgatagaacataaaaacactctaaaacacaaactacagcggcaaaggaaacctgaccgaggtaaaaaaaagccttcctagccaagttaatgtggagcccctcaaagtgggcatggctcggatgtggagccatcagagctatgttgctggtccggctaggtgcaggtcgattggcctatgctactcaagacgacctagataaggtgaagggttggcctggttggcgatggatattggcctagctgggttctgcggctgcacctcaagcacttccccaaaaatcacaaatcctccaattcaaagccaaaagtaacaagttcgcactggaatttctcatcatacatgaacac

SEQ ID NO: 177209 - DNA, 1242 bp, Zea Mays
agcaaattcatcatttgacaagaccaaaagaccttcttctagtttcggaaatcccatactcctagctatctcctggcacacggatatttctttgttatccgggagacagtacaagaaatcatcttcattggtaccatagaacactaaggcccattttgaatatttcagtctttgggcatagtgtttggcctctaggatttcttcctgggataatttcttccccgaagcatgtcgaatattgtagtcaacatcttcgttcagagcttcgggagcaggagcttcggtcttttctagaacaatctgccctgctattttgtcttcaagcgcgacaggcttcatctcggggggcactgaaggctcagcttcggcttcggtctaaactttcgtagctttgacaattttcttaggagcggggcttaaggccttcgtagtctctataacagcgtctagtacgctggccatcctcctcctcttgggagttacggcaggaattttttgcatctttggcaaatctgcctctgtgggtgggctcaggatctctggcgttttcatcaccttctctacctatggctcttcagccttatcatctctagctttggctggcccaactgtaggcaccttcggcactacaatgggctcttcagtactctacacaaccggaacagcctgctttgcttcggcagctgaagaggtccccgcgctaaatataggcaccacggtcggttcaatataacgcgggccggtgggtcagaaccttcatctttgcccttcggctcagctgcaatggccgaagcgacagtctttctctttttctcttgccctcgtaacgggtaatggtaatcagggtatacgaagccaatagcatcaaataccctgttcaatctattcttaccccgacccccgaaagctgcggacaaagcattatcttcgaccttggagtatgccccaagtagctcatcactggtagcttcgatacatttcaaccagtcatcgtctggctcatcaaacttctccctaaatctgaaagtatacttcaatcggactagaccaccctcactagattcggcagtgctctccttcggcatatcccagctctccacaagtggccattccctaaaggatatatgttcttgaatcaaatccctcgtgccaatgaaagcacacacagtgctaaaggccttctgacatgcttcaacattgccatcaatttccaccttcggccttcggaggccgaagcgagac

SEQ ID NO: 177210 - DNA, 1343 bp, Zea Mays
gttatttttagatctgtagctctagtgctccaaatggattcaaatttttacagtagactcttggtgtgatgcttggtgactggtaaatatttcatgaattgttgtgcatgtatgattaagttagtgatttaacttttttaatgcatcttaagtagttttaaatgatttaaaaataatgtatagatgcaaaaatggaaaatggtgttctactgtccttgcatggtattatagtagcctaagaaaactcaatatggtaatgcatctacagaaaataattagttttagatttaacttgctctcacatgctttattgcattgacaatttattatttttgtattaaataaaatataaaacctgggcatgtgaaatttatacattggtcataaattgttattacccttgcctcataaaaatttcagccccaaattaggtactttcgtatggtgctaaaataacacccattttataattataagaagagttagtgaaaattagaagtaaacaaaagcttgcatgtctcttgggatgttgaattataccttagtactaattagagattaaatggttatgcgcatgatgaatttagtaaaaaaaattcatcagtgtcactggtgttaagttgatgtttatttgcgcgtgtaaagtaataatgtgattaatacttagaactcttagttgatagtagaaattgttttggcttatatagagaggtggtgacataccaaagtagtcatcgcttcctctatatcttgagtagggtcaatacacgttatgtgttaatgaattgggaagtaagcacataatggtttcgagttagagaatagtggtttacgggtcgtatgatttggtggatgtgtgaaaatacatgtgaatatgtttatataaatgttgtggtatatgttgtgtctcgaattttgataataataggctagccgacgagtatgttgtatagcggcctaggttgttgctcaggttaatcaacttgttagatgactttagttaagttcgtggtcacgatgaattgtgtgttgtagtccaattgcgcatggttatgatcactggtaaaaagtagtagtgctcgtgtgatgtctaatttaaaacacaaattgttgggtgattatcgtggagaatgcgttgttaattggttgtagtaattttagtgcactaaatgacttgaataaaattttcaagttgacttggtgttcctcattgattattttaactctaacaaatggtaaagtgttagattaattgcagtctctagaacgcggcaatttttgaagtaaatagaagctgaattttattaattgctgttttgggctgtacgcagcgatttccccgt

SEQ ID NO: 177211 - DNA, 664 bp, Zea Mays
agtagcagtagcactagctttcctcttcttagcagcaggttcaacgtcggctgcttcttcctccatgactggtgaatgtttgccatgctgcagagagcccaggtcctcggtaaggtagggggtagcgcaatgtgattgtggatcgaagtcgctcgtggggaacgacaggtccatgacggggaactcaaagctctcggctggaccgagcaaagtggtaacgctagaactatggcctggctgaggccagcattgtggggggacgtcgtcgttgaagcagctagaggaggagttggagtcagtgtcaagggtgggcaagagcagagctgctatcgcttccatggactcatccacgtcatgctcgtaatcgtaggtgaagcagtggtcatcatctgctccaagaaactgagccatcatgtcgatttccatcggtagcgcagatgaaggcatgaagcgtgggatctctctgctctagtaatgcgggagggctcaagggaaggagaggagagactacagctcaaagacaaagaaatgctgcaatgcctgagtgctcctgccgtgtgctcccccgagagggtatttgtagggtgcgggcggcccagccgtgcaggtggcccccattgctgaccaaggatggtatggtagcttcacaatcagcatcaaattg

SEQ ID NO: 177212 - DNA, 713 bp, Zea Mays
cgtgagcatgtcacaccgccttaagtcatcgccgacttaagccgattgctccgttagtagggtatagtggtcaccctgggttaagtaagcgtgccgattgacaataaacagttcgagtgcctttgagaatgaagtctttttattgatggtgtattttctaattacagaatacaacgttgttccgatagcttttgaaatctagctaggggtaaaacttcctgagatgctctatattccatgaattccctatttctgtgccatccacttgagtaagacgatatgatccaggccgagtgacatggtccttcccatagtggcgacaatttgtgtcgtccttcccccattagaatttggcggaggacaagatctcccactgcgaaggatcgatgccgtatggccttatcatgatagcgcctcagagtttgctggtacctggctgactgaatcactgtattcaaccgttcttcttctagtatatcaacatcctccagtctagtggcctcagcttcagctatgttttcgaagatcagtcttggtgccccaaatttgagatcagcaggtagcactgcctccgaaccatagaccatgaagaagggagtgtttccatgcaaagctcggctaggttgagttcttaggctccagaccacacacggcaactctctgatccattttcctgcgaacttttcattcttgtcgaagactttctttctgag

SEQ ID NO: 177213 - DNA, 1376 bp, Zea Mays
ctcaatcggttcctctatggcctcaggtaggcgcctcgagcatggtacggttgcttcatcaccttcttgctctcctagggcttcattgaggctaaggcggacaccctttgtgttcgtcttccgtcgcagcctggacactcatacctcctctacgtcgacgacatcgtcctcatggcctcctcccatgacctccgatgacacataatctcctccctccagtaggagttcgcaatgaaggatctgggtgagttacaccattttcctagggatcaccgtggagcgtcgatcccagggcctatttctccactagcgctggtacaccatcgacatcctcgagcgtgatggcattgctgactgtaagccctacatgactccggtgggcactgagggcaaggtctcctccgacgtagccccatggtggctgatcccactagcgaccgaagtcttgtcggggcgctgttgtacctcgtcttcacccagcccgacatcgcctacgtcgtctagcaggtgtgtctcaatatgcatgccccgcgggagccacatctcaccagtatgaagcggatcctgcaatacctctagggcactaccgactttggcctcctccttcgacgatcagcgaccaccgacctcgtcgtctacaccgatgtcgactgggtcggctgtccggacacgcgtcggtccacctccgattttgatgtgttccttagcgacagtcttgtctcctggtcctcgcacatgggtggattggctttcatgggcagagtattgctataatacttccttccacaccgctcttcggacgacaccttttgaggtggtgtatggcaggccgcccccgcccttgtagtcgtactcgcctggcacatcacgcacggaggctatggatactctcctacagaaccgcgacgacatattgactgaggttcgccagcgccttcttcaagctcaggagctgtccaagaaacactatgacaccgaccatcatcccttggagttcgctgttggggactgggtgtggctacgtcttctccaccacaccactcagtctatagaggccggcgcacggaagaagctcacgcctaagtacgcgggatcatttcgggtactaaagcgcatcagctccatggcttataaactgcagctatcggccgactcacgccttcacgacgtcttccatgtgggctcgctgaagccccaccgtggtgatcccccggaggcggcaggtgctttgccactagtgcaggacgggcgtatactgtcgacgctcgaacgagctctcagcgcatgcaaacaacgcgatgtctggaaggtccttatcaagtggcacggacttggggacggagatgcaacgtgggagctcttggaggatttccgag

SEQ ID NO: 177214 - DNA, 438 bp, Zea Mays
ctttgcagcgagactccggatgggacagccgcaatcagcagtaggtgcacaacatagccaaccagcaccccgctggcgaggccgctcgccgtcaggaatatccccatagggccgcggcaatggcacgcgaggctggggccggggacgggcgtaacaaccgcgcagatattactgcctgtttcatggcgaggattgcacacacccaacaagagattgcccggaaacaaaggccaccagggacaggatgtctcgggcgcaaccagccgacaaccagagagttgtcgcgcacacatatcatcaccaccacccacaaccatacaacaacggccaagtccagcacccacccaaccacgcatatccacaccatcaggaagtacaaatcgtcccacccccgcctccgcctctgcatcaccagaacccacaccaccaaaatcaccc

SEQ ID NO: 177215 - DNA, 707 bp, Zea Mays
ggtttttagaattattttcacattaaaatcaatttcaggttttattttataatttccccgagacctggactgcgggttaagtatttcaaaaatctagggactaatctatgaattcgaggacctttctataacatttttatgcatgtgtggactacaggtttattttataaaaaacatagggtttctttagctaaattagaatatcgacggggtatccttcaacacaagccgttggattcactatctatggtcaagattagatcttcataatgttgaacaggtacttaacagaggccataggatctgagatccatgacccagattttatgatggccaatctaatgttgcccacccgatctgatatcgacgaccctgaacaaccacccaaaacggtgcagtagattctaatactagcactcgatgaagatccaatggtctagagcccatattcagcccccagccaaccatcacggtggcccacgatccctccgaggtggtgcacttcgcagaagaacgctagtttgtcgtccccacgattgaatcctgctcctgacccgatgaaaacggaggcccgaccaccgtgaacccggtaaccacccagataggtacgtctacgcccctacccaagacgcaccgggtccccatggcgatgccctcgtcgtatggccacgacaccacacacctagataagagtaaaccaatgttat

SEQ ID NO: 177216 - DNA, 1050 bp, Zea Mays
tgaacagtgggttgattataacaaggccgtggggctcttatggaaaaagtaacgtccgaaggggtattggctcatcctagccactagatcatcgatagacggttcagattagatcttaggttatcctgaaacggtatgctatcctagctgtaggttttatgatctacgatcagcgtttaatagaactcgatcacatcacgcttgttgaatccgatctcgacgtctcagatcccatgaaacgaaccggtacgcggatgagatctcgaccgttaatcccaatatcaatggtcgcactcctcctaaccttccccacttcgacgcacacacgacggcggcggtctttttcactgcgaagcgccgtcggcgaggcatcccgatggtccctagtgctccgaatcaagcgctattaggtgtaaaaaggatggggagcagcctcgagcctaaggaggcgattcttaccgagtgtcgtgcaacggggtacccggcccacgacgtgcggtgatactgttgctccgtcgagcaattgagcgagccccggtggtccatccattgcggtggagcctcggcaaccatcaccgccctacggtgaagctcacggacccaactccaagacctcaacggtgataaatttgtaaagccacgatcgctaccatcctctctttctatcccctcagtttcgctcacgcgcgctcgacacgggggctgttgctccaatttgttttagggacacgggcggggaaggctcgattttatatcgcacccgctgtgaatcatctaggcccctaagtggtgtttcggtaattaatgacaactgattgtggactaacagttccttgagtaataagattgcaggactgaaccacaagatacaacaaagttcttgaggactcataaccgttgattgtggatcaagtgaaggcaaaggtaaaacataagtttttgcttttgccggtcagcaggtgtttagagaagaaactgactggattaataggatagacagtcgtactattaagaggagtcaatgaacttgaatggtgtataacttagtgc

SEQ ID NO: 177217 - DNA, 536 bp, Zea Mays
gccagacagtgtttttctggatggggagggagtagagaaagagcacgcctaggtatgcaaaaccgatcgagaatcacaccccctaggttcctcgttttcgaaccggaccagggtcaagtctttcaaaattcaaaaacaaacatgagaaaaaatacatgttttgctgagcaatttgatatcgctcatatttaaatttagccttgtttagatcgttacaaaaaataaaacagatgtaatgcttacaattctgttaacatgttagcccttttctataaaactgaaacaatatccactcatccaatcccccctcccctctgtcttccctagttgtgccgcatagcccgtatctcataatccaccattgactccattcctagtgatattcaaaagggggtaaccactcgctctcgaattgctcatttctacaaacattactcctttgtgtcttccattgagacttgtaggattgaagacgcacttagagatatggactgagtaatggcaatgcaagagaagctcaacaacttcaataggaa

SEQ ID NO: 177218 - DNA, 933 bp, Zea Mays
ccccaatccttcgcgctaccgatgacacgtgggccccgctggtcggaatcatccccaaccccgtaaccgatgaaccgaatccaccgccggtttcgccggtgccataactacccctgcgctgctccagctagtgcatcggccgggcgagaacctgtgcgccgctttcccttttttctcggtctctagccatttggctccgcggtcagcgcagatcgtgcgcaactgttgcgcgcaaccgctggcgccgctagctcgacagctcgccccctgcgtccctatataaacctagggcgctgccgttcctctcccccgtgtttgtctacgtggagtcaccgtctaaatctgcgcaggcggcgggtcatcgctcaacgacggcggtcggcactgcacaccatcgccggtgagccatctgccctccgtgatagctttgttgacctctagtattcgggagcgggccgtgatagtaggatgggggcggtcctggggctggcgaacgaccggagttcgcctgccagaccttgggcatgcacaagatagtcggtcatggcgatgggggggtgatgcgcgctagtgccaggcgccggccggaggtagaaggcgcactggcgtaatgttccatcggggaagaagaagctttagccattgatccggcagtgtgtggttgggattaaatcctagtgtaccgtttcggccgagggagtagtggtcgttgatttcgcatcatacggttgttactagatctagaggtaattgaatccggatcctcgatcctggatccaacgaccctcgcagcataccggttcgagtaagcactggtctaatcgtggccatccactttagatcggacggctgtaaaaacgagataccccttcgtgggtccattttacttaagagcccctctgaaatcctgaaaataaacccaccatcctctgg

SEQ ID NO: 177219 - DNA, 775 bp, Zea Mays
gacgcgctgacccaacatcgccgatttctggggtcgcgaccttactataaggcttccgcaccgcaaacctgctatcccctcggccttatccccaactgcccgttaccaccattgcgccaccgtgcgccgcacggagagatatagccgccaccgcaaattattctccctgaagtcgtccagagcctaggatcgggtcaagaatccgcgtcgagctagagggaagccactcgtggagttttcgggcggatttggtgaccgcttaagccgtaatcacacgtcggtgtagagggaacatcgtagggtcgccattcgtggtagagagctccttaccgtcgaccgattcactggtacggcctctagatagtttttatttgttgccaaatcggtgtagcacctgtccgtggtcaggatcggattgcctctctccggcgagaggccgccgtgatttcaggcggcgtcgccgtcgctggcggaggaattgggggaaacgccatagacattagatgggatatgtgcgggggagattgattagatcgtagtgattcgcggacggcgatttcgggccgtccatttctgatctggcgagggcgattcgatctggttgttctacatccagtatgttcgctgaagatcggacgactgagtttgggtaccggttcgcgggggctacgatttaatccgggcgctcgactattaatccaacggccgagaatcacccataccctttcaccagtccattttgcacaagaagccctcgctttacctaaaaacaacc

SEQ ID NO: 177220 - DNA, 488 bp, Zea Mays
gaggtgggggtgggggtgggggaggtacgatttgtacctcctggtggtgttggtatgcgtggtgcggtggatgcggagcggggccatggatgtatggctgagggggttgttgatatgtgtgcgcgacaactctagggttgtcggctggttgcgcccgtgccatcttgtctctggtggccttcgtctctgggcagtctcttgtagggtgcacgcagtcttcgccgtggaacaagcagtaaaatctgcgcggctgctgagcacgtccccggccccgaccacgagttccgtttccgcggccttgggggggatactcctagcggcgaggggcctcgccagcgggatgctggttggcgatgttgtgtacctgctgctgattgcggccgtcccgaccggagtctgcctgcgaaggcctggtccacgtacggctggactgcggagggtctttaggtttcctctgggactcgactttgcgctggtggagctcttcg

SEQ ID NO: 177221 - DNA, 459 bp, Zea Mays
gcaataagaaacaaaagcataacaaaggatgaggttacaaactcgcgagccaaagaagaggatacgaccaagagaaagaaggtatgagatgaaagaggggcgatcttaaagggcaggtatgagacaaacattaatgtatgatatagaggtgtcaagggtgcatatgataataattaaaagcataacaaagtatatagttaaggcaagactcgcgaaacgacaaagtggataaaacaatcaagggtaagataggtaaggttccaacagaagggttgaagtaaagattcattaccgagtggagttacaaggagacaacgagatcaccaaggatatgcaaagtagaatgaccgctcatggatcattaagaaacaagggtggtcaagggcacgttaactgaaatgtcttaaacatatattgagatataaaggtaagcacatataaaaataagagtatgcaaga

SEQ ID NO: 177222 - DNA, 409 bp, Zea Mays
cctcaataacagaaaacagcaggggctcactggtaaattatcctagactcagtgaataatgcccccaggacggcgggttggtttaggaaaagccgaggggctcatttacaattgttctgaagcgaaacggtatttcccaacctcagccgttggattccccacctacggccgagattagatcacaataacaattaaatcaacaggctatgtgggccgccagattggtcatccacggcacgcacacgcgaatgacatcgaccgctagattcgccctgagcggccagattttccccaatcgaacaggtatactctagattgatctggaccaaccgatccaaggcgaacgacctggattcatttgcgatgaagcgtttagcaactctaatcctagccgttcgcgcccgaatcc

SEQ ID NO: 177223 - DNA, 869 bp, Zea Mays
atttttaccatttttcaagaattttctataaattccttaattctggcagaaaaagaaaaaagagaaggaatgaatagtaacgggcttaaaccaacccgagccggcccatgaacagggaaacgcgcccgcgcgcgcgcccgcgttggacaatttgcgcagagaccctcggggattttaataacaggtaaagaacccttagcactatttatctgtgtctctgacgtttgcaccgaggcccctcccttttcttttcttcgcaagattaggtccccgaccacggacggcggagctgtcgctccggcgagcttgtaccagccacaatacccaataatccgcactcaactttggtctacacctaattctacccttgacgctccactgggaatccccaatttggtcggaacgccattctagagcttggttcccgcacaccgcggaacttgagacaactccgacgtgttccaggcgacacagtacaacaacacacaaattgggagcacggtgagcttctccaacataccaggacccaaaaacggccgctaggaaggtggatggaaggccaggacagcaggtcgacggaggaggtgttcacggtggcgcggagagtggatttgggggaattccaaattagagcgctacgatggacgatcggaggcaagggcgggtgctctggcttcgtgacaacctaacggagctagcgacatacttaatttatagtgtccgaaagaggtggcttcgaattttgaaagggaaggctggcggccgaagaaagggggtgagtcaccggcacaggttacgtggctttcaccgtggcaaagcctccggcgatggacggacttgctgctatggttcactgcgacgtgttaaag

SEQ ID NO: 177224 - DNA, 483 bp, Zea Mays
cggggaacgaagtcaccacgcgcgcccagaactccgcggttcagttaaagcaacggagccaaagggttgagaaaacgtccaggaagtaatttaagtgcagaagaacggtatgatacggtgaggagactatggggacagccgaaacttgagtgagttcaggtgttgaactttaatacactatgagagggcataggagttatcggcttggttgaggcttcctttaggctttcagggggaataaccggtgctaacatgatcataatactatgcatggcgaccacgtagaggtagatgtacagggaaactgcagaggtggtaaattctcccatggacagcaaaccagcacagtacaagcaggtgagtcactgctgtcaggctgcaggttagtctaatccaaaaccttccccctttgggctgtaaaaatcgtccatgtgaccccctctttttaccagaacgaaattcttgttgttttgcacttatcca

SEQ ID NO: 177225 - DNA, 395 bp, Zea Mays
gcggtgtgctctcgcttcgggtcttgtctcgccttgctgcatgctgcccatcatcctcggacggacgacgcactccttggccagttgttgcggagaaattggcttttacagtagatttcttgctgataaagttcacctgtcgcgttcgtcagtagttgaatccgtaggtcaatttctaccggtggctgtgaacaatgcgtccccaattcaacttcagcttcccctcagcctcaggtggcttcgatcatcgctccctgcgtcttgctgacctgcatggctacatgtggttttctcgacgttctcatcatttctgcctcaaacaacttgatgtttttgttggcgctaatctagtcgccaaacactgtgagttgttttgttcggcggctctctacaat

SEQ ID NO: 177226 - DNA, 897 bp, Zea Mays
ccatcatctatcttctctcccagccgagctggatgacggcgcccatccatccaaccgaggtggcgcacgccggcgatgtccttgcacggacgatcctacacggcgtagaatgctactggccctaattgaattcacggcgaacgtaagggagggcttattaccttggtttggggtggtggctaccctgcccccgtggttgcacggttccgcgacggcatagggtcgacgacgagaaattgcgcaagaactagtggcttatccctgatactagagacacgaccaccatcgtcgtgccacggggaagatgtcagacccaaagtcaaagtattggcggcggtggatttgtggatcgatgatggcggatttaccctcactcgttttccatcatcagtccggtctctgtcgatgctcccacgtgatgaagcatgctgaagttggtcaggggcggtggcccacacttgagttttatatgcaggggggcagagttcgccgcgcgatccacccagggggttacgacgacgcaacattcgcggaggtcgttcggggcgcgcgggagctaggtgacgtagtctaagacgctgggggttgggtcccacacgacagcgtgtgtgagcgtgacgttggccgagcgggcccacaagccggagacgcaacgcgggatggagcatgggtcggctagatgaggggttagtgggctggcggttggcccatgtgggtagaggagagggggttggtgagctggtccacccaaggagaaaggcccatgggacagctaattgttctctctcctttttatttttattttattttcccaatttaaaatcagattcaaatttgaattttgaattaaattcaaatagagatcaaccttaaaacaatttaagtgcacagacaaaa

SEQ ID NO: 177227 - DNA, 668 bp, Zea Mays
gctagctcaccaaagatcgacacctgatggtaaggaattggaggaatcgggtgcgtggtggcctgcttgagtctacaccgaatggtgggccaaatgggggatgaggtttccaaccactctttggtctctgatatgtcgggtccttcatcaccgtacctccattgccttgatgggcgctcgactcgcgatcgtccttccaatcatcgcgagtgtcagtggtttcgtcacactctttctgagctctcatttcctaagtttgagggttcccatcctaagatttggttagacaagtgcatggactatttttcgtgtttatgaggttcagaaggtgttgtgggtgactatagcggcgttacacatggagggcaaggccgccaaatggtggcaggtttataaactacaagcatcagagtgttattggcgttaatttagacgtgtcgtggagatgaagtttggtgtggaggattactgcaaagcccttgccaccctgcttgacctgaagcaaacgactttctggatgactatgtgtaggactttgacgacaagcgccaccaagtctcgatgagttcctttttgtgtctcaatttatcaaaggaatgaagccaaagattcacgatccagttctagcttaggttactacggacctggaccgcgccatcttactagcc

SEQ ID NO: 177228 - DNA, 657 bp, Zea Mays
ccttgatactatccttcaatgagatgtcaagatactcagtcttcctatcccgacgaagttccaagctggcgttgctgaccaaccgatgcttccctccacccattttaggcttacagtgatataggtacttccacagaccaaagtgcggataaacccccaggaaggcctcatagagatggacgaaaacaacgatttgaagcacgaaattaggattcagatgagtcaggttgagataatagaaatcgaggagactacgaaagaagggagaaaccagcagacccaatccttgggtcaagaagggaacaaaaacaactgactcatgagtatcctctgtcgggacaatgatcccctacaagatctgccaagagcacaattccttggacgagagaacaccgattttgacaagatgaaggttagactcagagacaacagaagcataattatcacagaatggaagttggctattcagattgattgggggaatagcgggtgtagcagcccctgtctcttcttcctaggcgccatccggacctcacgagcaagtaggcttgagcacaaccgcaaggacgagcgggagtttcagagactagattgtggcaaaggaaaagcagagttagggttcatgcaccgggaaacagttggcatgggcatatatac

SEQ ID NO: 177229 - DNA, 958 bp, Zea Mays
ttggactcctgcgtaccttggcaagaaggcgacgagaggggtcccagatcctgatgactccatgctcgacctccacacgcgaaccgttctcatccagctgtcccaagctgatgatagagttcctcaacacggggatgtagtagactccggtgagcagcctgtgctcaccagatgcggcggtgaagacgactgagccgacgcccttgatctctacgccggaggcgtccccaaacttgacggagcctcggacgctagagtcaagctcggtgaagaactcccgtcggccggtcatgtgatgagtggcgccggtgtcgaggcaccatccttcgatcatgtctttgctggagccgtcgccgaggaaagcgcgtgctttcgactcatcaaggtggaggagtgccgctgcggccagtgccgctggagatagctcgatgcttgcatgtgctaggagcagagcctcctcctccgcctccgcctgtgcgacgttggcctggccacgtcgtggctatcgacagtccctggcccagtggccaagcttgctgcagttgtgacagctgtcgtctcgtgccggcttcttgttgccgacggcgccgccttgggcacctccacgggcaccaccctcagcatgtcctcgcgccccgccctgggcgcctccacgcgccttgcgcggcttgccgcgtttgcggcctcgtgtcgaggaggactcccccttcttctggtcaccctggcaggcctcccactgctcccgagtgagatgtagcttcccaccaatagtgatagggccagagggagcctgtggtttgtcgtcgtcgaccaccttgagacgacctatcgcctcttcgatcgtcatcgtggagaggtctagcagagactcgatcgagcgagcgatctgcttgtacttctcggggatgcaacagaagagcttctcaacagctctctcctcatcgtaggtgtcgtcgcc

SEQ ID NO: 177230 - DNA, 598 bp, Zea Mays
gccaccgccagcgccagtagtacgagctccctcgtggacgcgctcgcgctcttcaccaagagcagcgcgacgccgtcggccggaggcggatcaggggttcctgatcattaccaccacggcgtcaccatgggagggttcaacttcaacccgttcgatgatttcgacccaccgccgccggcggcggcagcggaaggtgagacggggagcggcggcggcggcagccatggtttcttctcctccttcgccaccggggacaagtacggccgccactagctagtacgtaacccatctctctcgtgctgtctggtaattcagctagcgtgtgcgtgcgtgtctgtgctcatgagagagtttgtgtggagaatggagagagagagattgagaaacacaagcaacaaattctacttcggccactgctgctatactgttttgcattataagtatttagcaagctgcataattgtgagttttccatttcttggttttgggatatggcgatgccttattatgtacatacataaatctgagttctctttgattaattccaagctcattttgtttggcgtccagatgttgacattttattggtacttccccg

SEQ ID NO: 177231 - DNA, 703 bp, Zea Mays
ttccaagtagtggagcaaaaggcatttcaaacttatttgtttgaaatgtggtgtcaaatgaaacatcatctccaaagcatgcataatctaatatagattgaccatcagcccaaaagaaattagctatccgaccatattgctcaccttcttccaaatctatttcaatggcataaaaaaatgcatgatcctctatttgcttattcttcaagtattccaatagtgtttgtgcatcattggattctaaatatttctttcgttcgcgaccgatctcattattacaatccatcctcgagaatggaactttatcagcacctccataaaattgcttcataaattcatacacttgcgttggtctcattccagcttcccgtatttggctaatgagttgtctgtccgcttcaataacatgtcgttgggaccttaacttgtgtgccttgttcggactagcgagggtatgattgtgttcaagttcaactttttgcactgtccaaaccccttccctgctaatgctaaactggacacgagctttgcaacctgtccttgtagttgattgtgatggctcattttttctattaccttggttgctgcaaactatatgtttctgaaatatagttttatctggtcgacgtcttgtatcactctttctaatactaaacccaaccatacatgcataagcattgtacatctcataagcttctttctc

SEQ ID NO: 177232 - DNA, 444 bp, Zea Mays
gggtgcgctactaaaaatacctagccaagactgtgtgcaggtcgggtcccagttgggattgccccttgggggtcatgacaccagttcctccttaagaatcctagcatccagccccgacacgtcgaggccatatcccaggggggccaagtaccagggaagaagttggtaacaatgcacacatcaaaggaaaagtggcatgcagataagttgtaatatcgcccgataagtagtacctaaagagtatcttacaaaatcaaagacatattacaacccgctccccagcagaaccctcgtttttctccatgcaggcctggctactcatcatcggtaggatcccgctagaagcgcccgaccaccgcatccacaacgtcctgcacgccctcccgggcagcatcttcagtattggccaccggacctgcaatgactggccccaaggagacagcc

SEQ ID NO: 177233 - DNA, 523 bp, Zea Mays
tgttcagaggtggcaggtgccttttagagtatagctcggacgaaagccgagtcgttggatccccgatagaagtcttcaatcacggctgcctcgaaaacctcagggacgcggttcctcatcatttgaaatcttctaaggaacgagcagagagtttcgttgttttggtgcttgatgaatttgagatcccatggttgcaccagtttgtcagagagggattggaagttcacgacaaaccggcggctgaaatctccccaatcgtcgatgcagtgtcgagttaaatgtcgaagccattgtagcacgtcctgcctaggacaatgggcaggtacgctgtcaagacatcttctgttgccccagcagcccgggtggcggtcgtgtagaaattcaagcagccccccgggtcttgcttgggttcgtatttgtcgacattggagactttgaagttgggaggccattggatgccccgaagccggggggcgagcgtggagaccctgcacgtttcctcttgtcgatgatcatgccacca

SEQ ID NO: 177234 - DNA, 444 bp, Zea Mays
ataatactctcgtcgcgcggtttcgccggattactactccgcagctccgctttgccaggatggtattatggagcacgcgaacacgctaaattggtatggtactcctgtaaccgtctgatttgttacgtttaatgaacgtcgtatatttctgtgtactaatctacccctagcgaccctgcccaagctcgtgtctagtaaactaccgcggcgctccctgcccactgcccacgagcactgcccactggtgcccgtgccgccaccatttggttcctgcgtcgtcaacctctggttccctcgctgccgcgcatctggtgctcgggccgtccgccatcgcctgccctcgctgcctgcgctgtatcccccgtgcgacgctgcttcgctgctcccttaacccgtctccatggaggacgagtacagcgcacacccacctgattcatctcccgg

SEQ ID NO: 177235 - DNA, 754 bp, Zea Mays
cgcccgacactttcgaagccggtacgattcacccctgcgtggcccaacgaagctccccaacaagattacgaccaccacggcgagcaggatagcaccgtcgattctccctgaccgtgactatttcgagccctgagaatagtatcgccatggaaactagaagactacactcaccagagatcccgccggagttgaagctcccaatcccgatcaccgagatcccaagccgcagcatcgtctgagttcatggcggcggcggcgacgttcatcagtgctctggtgatggattccccgacggccacattccctttaccaccgcacggagcctatgccatggaggacgagggtcgcgttgatttatagggacagggcaagcgccaagcacgagcgggctcgggatacagtgaaggagatctcgagcgcgcgcggttgcaaccggttcccgactgaggcggaggcaggcccggcgagtttgccgcaaccaccctgagctggatgataggactgacgataggggcccacaccacagtggcccaagagggaaaccacgcgtgtgagcgagacgccagccgagcgggtctaccgtccagggacacggtgcagggacagtgctgtgggtcggcaggccgtggggggccaaggggagggtttgggaagtacgtgggccagcagggtgaagggaagaagtgggccgtgggcaaggaaaggacggtgaattcccatcaagcggcccaattcagaatgcatttatttttct

SEQ ID NO: 177236 - DNA, 308 bp, Zea Mays
tgagagctgcgtcctttgtgatcaagatgatgaaacaatgcaacatattctctccaattgtgtttttgcaagacaattctggcactccatcctctcccccattggccttgctactattgttcccactaatagtgatgtttgctttgaagactggtggagagaggcctcatccaaaatcactaaagggaaatggaagagatttaacagtgttgttatccttggtgcttggagtctacggaaacatagaaacagatgtgtctttgatggagctcgcccttccctgaacactttagtggacgggttcaaag

SEQ ID NO: 177237 - DNA, 767 bp, Zea Mays
cggggaatagtactgggccagaagcagcccatacgacccagccactcagagaaacggggcgcgcccgcgttggcagtcttgcagaagagccctcacggtttttgaataacccgaagaagtccaaacactattgaacccagtcgctgacactttgcaaaaatgtccctagacttctgtctcttctccaaagacctccctggtcacggcacgctcgccgttcatcccggacgaggtctgtaccggctatggccggcgataactgcccggactaaccatcggggaggcttcactgacctaagatggcttcggaacacacatcaatttgacccgaacgcactgagaatggcatgtccacatgcacggcggaaaccgcggtgtcgattccgtgttcttaattatctacgcccgaattggtcaaacggatgctacggtgagctttacgtgcctacatagctgctagaacaacacttgagagatgcagagctttaccagagtggtctggccacggacgagctgttcttggcggcgcggcggactgaattgggggaaaacggcgtcgcggcggctctgggtgaaattgggggtggagattgaggcaaaacggccgtaagaagctgtgctttcaccgtgcacaatcgatttgggagaaggtggagggggcggtgtgaatttgacttcgatcaagtcactgtgtttgcgatgatcacacctcgccgtgaacccaatggctatttatagccgtggcggtccggcgatcacttcgcggc

SEQ ID NO: 177238 - DNA, 678 bp, Zea Mays
caagtgatctgcatgctcttcctcactctgagaatatatgagaatatcatcaatgaacaccactacaaacttgtcaagataatccatgaacacattgttcatcagatacatgaagaaagctggcacattgttcagaccaaatgacatcactgtgaactcatacaacccatacttggtgctaaatattgtctttggtatatcagaaggtcggattctgagctgatgataacctatcatcagatctatcttcaagaaaacactagctcctctcagtcgtccgaacaaatcttctattctaggcaagggatacttattcttgattgtgacatcattcaaagctctgtaatctatgcacatcctcttcgtaccatccttcttctccacaaacaacactcgggcgacccaaggcgaggtgttgggtctgatgtaacccttctccaacaactcgtctacaccaattctagtccggacacttgataggctcttttagaaataggggcggtgccagggataagctctatggaaaattcaacctttctctcatgtgtcatgcctggtaactcctcggggaacacatcggggaattctgacactactgtgatgacctcgagcggactgacttcctcactatggatagatatctggtgacagcttcctttccttggttcaaacaagaac

SEQ ID NO: 177239 - DNA, 675 bp, Zea Mays
cgaggtgcttggctatctgaaccatgatgctaagcaaaagatcacacgaaaaactaagctaaatccccctacctggtgcgccaaacgttagaggtaaactctagctagatggcagagagcacctgcctaatcctaagaacaaaggggtctgccaagggttagcttgaggtggtgcaagaacacaagaacaaacaggatattagagttgtttgggccgtcggagcgtaatatcctacatcacttgtgagttgtattactgaggatgtacgagtccttgagtccgtatcgcatgtgctctccctttatagtctaaggagggtacgcacatgggtgctgggtcccgataggtggccccaacgatctagtagtaaatagtgtacaacatggagtattaaatgctgaggcagatagagatcttctctcttggccttcgtgcggatcttttgaccagggcgtgcctttgtcccgtctatcggcgtgagttggctacggagtggagtcggttatgctgacatgtgtaggagctagttatgatgacatgcgcaggagttatgatgatatacccgagatgtcgactttgatcagtgctgtaatgggcgctttgcccaagccagtggtagttcatgatgggcgccatccacgcgcgtgacgttgagattcaacttcgcacctcgg

SEQ ID NO: 177240 - DNA, 588 bp, Zea Mays
tgagcatagagatttagagaagcaaaaaagtcttctgaaagagacatcaccagaatcgagatcacaacagtgcttacccccacacccgtgttcccaccctactagtattgtcgaacaattgagacggtaggtttagctcggcctccaacagctatcctgccccgcttgccgttggagcccccacttgctaattcttcctccctgtatatatatatataaataaataattaattatgtaagccttcctcctctcctaatcactcacactcattgcttccctgcaccttttccttgatccacttgtcaaacaaacccttgcaagctgcaaaccactccctgccctttttgttctccttctctacactaccactccttggtttgggaattgggacgagacatgagcggagaggagcctccactaaccaacccttaatcagagtccttaaccctgattagttcgctgcctccctcctaatcccccagctctagagctcattcagcaggctcatcacacgccctctgcgtctctgttgcccagctagcagctgtaccggttcttttcgggggccagggccagggccagggtca

SEQ ID NO: 177241 - DNA, 516 bp, Zea Mays
ggcggtggcgaagcatagagtgagtgaagtggatggtggtcggcttcgtgtgggcagggccggtaagcaggaattgttgtcctcgccggtaagcagtggcgaagcgtagagtgtaggtgagggggagttgcgaagtctttttgagggtgaagagctgaggataatgctatttaactattgggagatgggaatcattccgaaggttgaaccaatgtaaggtgtgatgccctcgctgtaccagtgtaactatagtttgtatgatgaggctgtgcgccttcgcgcatccggctatgtccataggggcgttgtgcacttggtctagcacgtttattatgtcggtccggctgcgcctgtagtcggtctttgcgcgaacagtttctcgatgtagacttttgcacggatgtaatgtgccttcgattttgcgcagtcgttgtgctagtccggctgcacccttaggcgacttttgcacggatagtcttttgaagaagacttcgattttgcgcacttgttgtgcta

SEQ ID NO: 177242 - DNA, 508 bp, Zea Mays
cagactgcaaagaccaccctcaatgatagagaggtcttcgtggtagatttgtccttgagttggtggagaaggatctccaaattgagcaaatgggcaaacgtacccgagagttagagcagcaagtggaaatctgggacaacaccattgaagtcctagaaagttagttccacgacatgcaagaagagcaggatgaggccaacgctcattgggatatgcaccatgaggacatgaactaagcaatggagaaagatgggaacatcgaggaggaggaggatccctaggagattgagccagcttccagtctggacacggcttactctggagtacccccttcacctgcggcctgtactgcctctgctactcagggttagatgggccaggaagaagcatattaggaagatgggaaactacataagcttagcttttggcacaaactgatgtactaggctatagcattggatctcctgatatgttgtaacccagaaaacctatatgagtaatgaaagat

SEQ ID NO: 177243 - DNA, 675 bp, Zea Mays
atttttatccacattactattttattaaatgcacaaacaactaaactccagcatgatgcacattcttttatttgatattttaattggtagttagggttaatctcatggtttgaaatacgcaagaaatgaaaataacaacaccaatggtcaaatgacccttttatatttcccattccattaatctcactatttgggtattacagctagccatcgacaaatctgcctcactcgcctctacaaactagacttgctcaaaaatggaatcccctcgatgtttcgtccggtccccctgctcgccgttgtggcactactgctgcactgcgaaacgccgtagtcagcccggtcggagtacccatcgttggcgggtggtcttcctgggagatcgcccagtcatactcattgttttgtagtgatgggatcgagctttgcgcagggggttcgggtctgcgctgctccggtggcctcaccggcgcttggggctaggcgccgccgtggctgagtacttggggaaaaagatggtcccctgggccgttggatcggacggtagcggtctagattaggtacacgaatgcctcttcacgtcttataatcctggccgctggattttgatcaatggctcgggatgtgatctgcttcgggcccttgatctctgatcaaacggtccatcacgtatca

SEQ ID NO: 177244 - DNA, 819 bp, Zea Mays
taattaggtcaaagcaccgttagctcatagctttccgcatcggcggcgaaactgaatcatcggcgcgtcgttatcggcgtacccaagccggtctagcttaatccaaggatgcagcacgaaccagtgacctaccggggctatggtgcttatgcaattttggacaaagactaccaggaacggtcggtcaacgtgagctatgtccgcggtgacattcctggacaataacgtgatgttcactatgctacagcgcggtagagtttattcggttgagccgatgagcttcattaacgcttaaggatgctaaaatatggcacaaaggggaatgaacggacctgcaaatggttgatcatggcagggagtttcacagcggcgttcttggtcgatttaggagaaaaactataattcgtgagctatggtggacgatttgaggaggagtggtgcactgggtgcgtaacaagaaggcagagcagggagggcctccaatttatagtgaccactcgagtgtttcgtgaatttgggatgagatgagcttgcaaccagaggggaggtgagtcaccgaagcacagctaccgtggcgctcaacaaggtatagactcaggcggcagatgggctatctactgcgacctactgcgacgtggtaacatccccaagcacgtggcacccttgcagcaagcggcgaactccggcgatggcatctcggccggtcatgaggcaagtgggtacggtggccagctcacaatctcatccgtggtcacgatcttttctctggtccggttgttgggggccttcttctctgccgaaggtcctctaagcaaaaac

SEQ ID NO: 177245 - DNA, 302 bp, Zea Mays
ctatatttatatgcatgcaacaataacatgatgcttctgtggcatactcattatacatgtatacatcaaggtaaacttattgaaacccgctttcaactgtctacatatgcaaccaggttatatgaataaaagataaatgggtgtgcttaccaaaggatatttgtgggattatatcaaataagtaatttgatatgatgtgtttcatgctctatcactattcgaagtcttcatgaacagacatttgtttgtctacattgtgtaataattggatgttacatttgtatcgatattacgcgtgtact

SEQ ID NO: 177246 - DNA, 455 bp, Zea Mays
cctgcctcgcacgacccactctgggactgccacacgcacattcttcttccggattcttgacccattggtgtttcctcctggtttgcatagcccacctacttgttgccttcaactggaactgggttgctaacattcatccgacgatgaagaccccaagcaggagccaatggaaaagcttgttgaagtgcttccagattcttccaagtagctaaggaagaagataaacctcaaacctgcccacttgatcaagccttatgagtcaacattagagtcaaagcgcttctgcagtattagttcaggcacttgaaaacctgccaaagacaccgacaactgagccacaatggcgggagagggtatggttttctttaactcagaaacatggaacacttggtgtatgtgagatgatgttggtaaagccaatctattagctactagcccaaccctggccaccacag

SEQ ID NO: 177247 - DNA, 797 bp, Zea Mays
acaaaagatcagagtaaaatatgatgtaagctactatcatctatctattattccggttgttaattaaagcgaaaagggaagtgcttacatcccagcccattgacattagttgtttgcaagaatattaataatactgtacctgctgtgctgctacaccaaaggtcaaacaatacataataatactatctactcgccatgtacatagctaacgcgcgcgcggtgctcttccgcgccacgtatatatatatacgcgtattcgttctctgtacgacgagagggtttgttgataggagttgaagactagagattcggtccttgactgcaacagcaacagcaacagcaacagcatccagatcgagcagccattcaatgtgctttgtagatccagacgacttgttcagaagcagtgctagactgctagatagtagatgtgtggcgtgtgtgtgtggacagcgttgcagagaagagcaagtttgagtacgcacgcgatgacgcgtttctaacagacgtggctaattaattattctgtatatgcaaaggccaagctcaagctgctcatgacgtacctgaccgaattattaggcagttgggatttcccaaaatatgactctagcgtgcgtatttgacaaatttcttttgcatgcatgaccccatgcactgaacccagcgctacgcccgcagccgtgatcgagctcgtcatgcttcaatcataatagcagccggccaaacgacgcactgcggctgcctttcattttcgccgctgctggtcggtaccttgacgcagaggaatagtcgca

SEQ ID NO: 177248 - DNA, 694 bp, Zea Mays
gaattcttgacgtcacagtcacacctgcctactttcacccatgcaacaaaacgtatacaagctcaagactggcttcatgcagtggattaggactgcccagtgcacagacagaaagatggtgatgcatattacaaatcaactgcaaggatcagctcatgaatggtgggaggcacatctctacgctcacactttggaacgagttcaggcaaagcttcaggacccacatttctaaaggcactttggttatgaaggagaagtttgtagcactaaaactgtaccgagacaagttcatctagttgtcatgaggcgagccctaacaccaagcgacaacatcactttctcaaaggtttagttgagcccctaaagaactagctgatgaatcacacatattggcaaacttctaacaacttgttgaccatgccacaagataagtgccatgagatggaggagaaaaagaagcgcaagctcaacgctcatcaataatcatgtagtagggggactccaaggcggtgatggaaaacagtagagactccatgtttttgtcatcagaattagtactcttatattcaaaactagtagactcggaatcatgtggagcgtcaaaaaaatcaggcatatcccgccattcggcaagaactaataatcctacaaggcaagttgccccggtgccacctaatgaatgttttaattgcag

SEQ ID NO: 177249 - DNA, 348 bp, Zea Mays
ctgctggttgcgccgagcaccaccgtccctgctgccaccacgccctttgcccttgccactgcccccattgctggaggaggaggtggaatggtaggcaggcgacgtgcaggatggggcggtggaaacagcgagtgccgatgccgaagcttccttgttctcggtgccgaggcgaagttccttggcacggagcatgttggtggcggacttgaagttgggtagcggtgacgtgttggcgatgatgtcggcggtgttggcgaagcgagggttgaggccgcgcagaagattaagaacgagctgcgcaggggagatagtgtggccgacctcccggagcgcatcagtggtgcgctt

SEQ ID NO: 177250 - DNA, 398 bp, Zea Mays
gctaagtcatccaatggtggagggatggcgggttattttcaatgaaaaccgaggtctcatatgtaaaaagtcctcaacgaaggggtacgagtgaagattggccgctggatttgagatggaaggctcagattaaatcgagcaccaccccgaagtggtacgcagcaggaacacgacacaccacgattcattgagacgaaagggtacgccaaatcaaatcttggccacccatatctaatctgtcgctcaggatttatttcgtctagatttaatcctagccgtttgctattggatcaacggctagatgcctcccactatcctcccccacgccaacacctgagcagaggcggcggcgcccagcccatgcgacggcgccatcgccggtgcacgcgacacatcac

SEQ ID NO: 177251 - DNA, 710 bp, Zea Mays
aggcgactgaatcctgttttgccatggtacagtatcacgactgaagaagatcagatcgccagcaaaccttcaccgccggcgacctcactgcaccgcgattcgtgctgccgccgtccggattcgtgttcacggctaggggataacctctcgggtaaaagaatcttcaccgccgtacgctggacatcactccggtgactcatcgtcgacttccttttggctttgcggctggcgccgatagcttcgccggtgaccgccgttctccgatcttgcgccgcgtgtcccaatctcgccaccgcatcgctgtgactccctctaagtgcccgtcgactgccggagttactgccacgccactggacacgtattcaccgcgccaaggctcttcctcatctccgcccgcccacgctgtccgctcaaattaagagccaccgccccgaggatctataaattgaccctgcagagagcttcacaacaccatcacccacctagccaccacgtattgctcgcaactgttcgcccaagcccgcgaattttgaattcgccccaaacccattctccgccacccgaaacccaatctcaccgcggccagctctttctaggttaattcattgctccctctcccttgtttgagcactctggttactctgtgatgctcgccgagcctccaatttaaactaggagaccaccagtcgctgggaacacgacgatctagc

SEQ ID NO: 177252 - DNA, 681 bp, Zea Mays
tctttcctctgagctataaacgcgagattccaccggccccgttcactgacgccatcctagtagagtcgacccgtcgccatgaccagtgagggagaagttgagcagggccgccggggatatcatgcatgctccgggccgtactgctccaaccgggtgctagggatgagtcgctggcatacgccgccctcatgcgaagagttttgggtggaatacttggtgggagtccgatgaattcttcatcaaggatcaacggtgtcgtgaagcaatccctcggcgcagtcgggtgtccccgtgtcacagtcgttggtaggtccctattccattaactcatcgtcatattcacatcgtttagcgcgttttatcgtggggaatagcacactcgggttgacatcagccgcacgccggcgaacgcgccgccgtggcgttcttgctccgccgcctggggttcaccggaggaggaagacggcgcccgggccatgtattttgcgatggtcggtcggatcagcctggtgagcgtcgaccgttggatggagatctagcggccttagtttagtaccggttcagttagggtagatttaatctgatccgtgggttgcgaatcgtgtggttcccgtgcgatgaaacaccttcgcccgaaataatttgctaaagagcccctaggatctttattattcaacccgc

SEQ ID NO: 177253 - DNA, 481 bp, Zea Mays
ggttgtgacagcagttttaggcttctttgtctcgaacaaggaaaccaattttggtatagaatttttttctttcgtgatgatgatggtttaattgtttgttcaagatcttttggggtggaggtggagcccttaatagcgatgttggtggtggagacagtgggtcctgaagaggatgaggaggtggttatggtaggtcaaaaggaagagactagatggtaggtgaagattgtgggttaggaaaaggatgtggaggtgatgacaatttattagcaatatgatcatcatgtgatgaatcctgagtttgggggagggcatgagaggatggtggtggtggctcactcaattggacatctcgtcgaggccaaaggatgaaaaatttgatagcatgtctaaatgtctgaatacccttggggctagggatgtctagcatgttgtccccatatccatggatgattgtcgacacttgtaccctacaatactc

SEQ ID NO: 177254 - DNA, 1077 bp, Zea Mays
ttcagtttatcatggcactggactgggcctcaaatccagataaacccaggggctattctacaactaatcctgagactcagagcactgttgctctggacggcgggttgataccctggaagcccgagggctcataagtaaaacgccaaggccgaaggggtacggggttctcacagtcgtccgattacaaaccgacggtccagattagaattgactgcccgcagggcggtatgcgatcccagacgttggatccccccatcggcggccctgatttaacgagtcctagtgcgagtaatcaccacctgatcccgatcggacggtcgccgtgcaattagaacgaaccggtacgcgatttctaatcagagccgtccctgattcgatcgacggttaccactgcctctggtctatcccgcgcccaaaacagagttaacgccggcggcgaacggaaccccgacggcggcgacattaccgtggcaccagtcaagcgcgcgaaagcctaaggccctcctccgaacgactctacacgacactgggacgacactgaatccgatcggaggtcttaccagggattgggagttgcaggagacgctggccacggaggatggcgggtccacggcggagcagcgagtacggtgaagaatcgtcggccaccaagtggttatctccctctgcgaaggtaaccgacaacaccgtggaggcgcggcgaagttccccgcccaggtgcagaaccaatcgcgcagcgtccgtgcgaatcaagcggcgacggcgaaccttctccaccccagctaatggtgtgcggcgatggtgaggtgcttctttgctcgggtccgcgtagggaggataggtgcgggaaggagaagaaacggggctctagctttatacaccgagggacgcgaggacttcggtagggagcaacgaccagggctggagcgcgcaccgatccgatccacccggcgaggcaccggagatcgcgggagttaggtgatgacgcgagggccccagccgtcagcgaggaggaaaacgagtatgcgcctggtgcacggttgccagtggatgaccagtggggccccactgtcggcg

SEQ ID NO: 177255 - DNA, 1027 bp, Zea Mays
ttgcttactgttcctctgtgccactgacaaattgcagaaatgccctccatcttctatctcttccccgcgaatgcccctgaccacaacgcacacgcagatcatccctgacgtggtccgtaccggccatggccggcgatgactgcttggaataactaacggggaggcttcactgacctaaggcgacctaggaacaaccactaaactaacatgaaccctattgggagtcgcttgtccacgatcacggcggacaccgatcatgggagcacacgttcccgcagattggggatggtctagttcgatcgggtgggttgatgagcatcacgaatgcacacaggtactgaaacagaaccgcagagagcatgatcagacctggaagtggctggccacggcgagggtgctttaatggcggcggtaaactgatttgggggaaaacggcgattctccggctagggtgggcaatcgagtggaagaacgggtgtgtgggcttcgtgatgacctaacgcagctgcccgggggctcaatttataggcagcttcgtcggtggcgcttaatttggccggaccgtgtgggcggccggagattaggaagaaccttggcgcggtgaatacgtgtccagtggcgtggcagttgttccggcgatcaacagggagttagagggagtcacggtgatgtggtggcgcggttgggacacgcggtgaacaacggcgatggcacgacgacggtgagcagctttacccgcgggcggtgagcaagggggaatgaattacggctagccggaatggcttccaggtcaccggcggcgaagatatttgaccccgcgacgttatcgacttaccccgagcatgaatcttgacaccggcgacgcgaatcacggcgggaaaggttaccggcggcgggatttttctgccgcggccgatctgatccgctggggacactataccatcgcgctgcttcatcagagcttctgacagtcaatgtttgggctcaaatttctctcaaatttcaatggcaacctatccgaggctct

SEQ ID NO: 177256 - DNA, 541 bp, Zea Mays
tcatgagacttctgtagcagtcttggcatggacattttatcttctatccaatgcatgctatatcagtatccaaagcccgctctgtagtaacttataatatccaatgcagtggtgttcttttatattgtcttcgtaacttacaggtagcttaatatttgtgtatttgattcgatttcaccatcttatagtagatgatgatgagaaacctcagcatatagacacacttcctagattaatattgagttttatggttagttgtagtaaccttttaaaccatagttcctggacttatcttgatcaatacttgtgacgtttagaagacactgattgattttggaatatgtagcaacaatgaatagaggataagtagtcacttttagacacggtgtatgaaaagtaatatgtttgtgctcaggtacctaaatttaaggcacctgaattttaacaacttcaaggggcagggaattccaaaggtcttcccaagtacttccaagtaagtatttttttcattttcagtgtttccattttctctcactactgc

SEQ ID NO: 177257 - DNA, 603 bp, Zea Mays
tgaagcccagagaagtctaaggcaaggcccggaccatcctcctccttggagttaaggcattctgaggggaagggaagaccagcgcacaagctggtgagggagcttgtgttgaagcttagctaaaaagcgatggggttgaacaccgatggttctcccccggtcctgacagagctaacatggcttgccatgaagtgaccgactcttcccaacccgcatgtgggaggtccagcgaggctcgcatgacctgaccatggtatgaggagctggtggagccggagctccccacgccgtgggaggaggagccaacagagtggagctgctgacgatgcttcgggtgtgatgctgacgttggtcaggtccctctcaagggagtctacatctttagttagtccaggaacttcatcagggcacggggcgctggtggtggcgcggttgcagttgctctgtctccgccttctatgacgagaaggacggggacagacgtttggttgttcctgagtgtcagctaggggaccaggtgagaggaacaccatgccatactcgatcccgagagacatgaactccagactcccaaacctgatcactgtgccgagcctcaagagg

SEQ ID NO: 177258 - DNA, 416 bp, Zea Mays
ggcccgttatcactcggctgttacttctaaaacgccaacgtcaccagtagtcactcggctgttacttctaaaacgccgacgtcgcaagcagtcactcggctgttgttcctgaagcgatgacatggcttcaaaggattcggctgttacttctaaaacgccgacatcaccagtaaccgctcggtcattatttctaaaacaccgacgcggcccgctatcactcggctatcacttctaaaaacgccaacatcgctgataatcactcggctgctactactaaagcgctgacatcgcgaagagggcagtctaaagcgtgactcaacgattctaagtcgctactcaagcattacattcagaaacagcatctgcagtaagcattaacatgatcgacgatcgacaggaaggcaaaatggtacata

SEQ ID NO: 177259 - DNA, 461 bp, Zea Mays
cgcgcatgttaccataccaaattatgtataccaaattatgtgaggttaataatggaagtgtttggacagttagcatatgcgagtatataatttcgaaaatacacatttaattaaatgtagataaaaaaataaacaaaacccatttggtttttggtctagctcttttgagcccactaaaaatcctaaccctaggtccgagtataaatatgtgccttcatcaaaaaatgggaaaaattcctcttctcccaccagcagccgccgcatagggatcctggcctccaccatccgccaagcacctcccatccattgtcttcaacctctagctcgtgagcccctctcttctctgatccatggtgcagccctctgctccttttccttgtgggtgctggcttcctcctccagcgaccagcactagggagcaccaccccttcccttccccaggaacgacgagctcctctcta

SEQ ID NO: 177260 - DNA, 776 bp, Zea Mays
aaatgatcaagggtcctatagtcgaattgtagctggattatagattaacaactttgctacagagggctggtcaagttgtcacataaaaattgaagaactaagccctctaattcgctctgtcaggcgccctgaaggaaaatttcaatggtacagtagtctgaagaagatcttgagttcactgaaccttgctgccggtgatccctgcgcttggattcgcgctggccgccacgattcgtgctcggcgcaaagtggataaccgcggggagtaaaagatcttggcgccaggataagctcggacctggtcactggattggccaccgtacccacttgctctgcgggcggccgagatgatcctctccggcgttggccgcttgccgctagtgcgccacatagtcagtggtgttaccacgtcgcagtaaaccgccttaggtagtttgtccatcgcctgagacgttgccccggtgaaagccacgatagtccgcgccggtgactcacccctctctccggtcgccagccttcttcatcccaaattcgaacccaccgctcctggaggctataaattgagtgcattgttagctccactaggttgttacgaagccatagcaccagccctcgcctccgattagccattgtagcgccccaattcctttcttcccccaatttggttctccgcgccgccgtgagccaccacgccgtggaccatcgtctccagatccattctcgctctcctcacccttgttttagaactcagacacgcttggcatgcttgtcgaccc

SEQ ID NO: 177261 - DNA, 767 bp, Zea Mays
aagaccgcgctctaaggtcgacgaggcacgggacgctgctcgagataactccagcccggcatcaggcacatcagcacaaatatccatcattccaccatctaccggctctgacaacagatcttctgggaccatatcttcaagagtctgatcaaagtttgctagagacaattcttgcagaccaatgagggcagacaaagctggagaaggaacaccgctgctttctccgctggctatgtagtgtcggctgttcttccgaactagagggatttcatcctcctcttcctcatcttcatcaacaatgcggacggtacacccatgggggtcagctttggccggatcacacccattgggatcagcatcatcaaggtcacacccattggggtcagcttcatctaggtcacacccattggggtcagcttcatctacgtcacacccattggggtcagcttcagcaaaaactggtactggcacttcctcagcagcaggagcagcatcctgatccaagcatgacactcggcgaagaagtctctttttctttttcttcccctcagcaggagaagttggttgagtggctcggcgaggacgcttcgagcgaacactatcggacctttgagtatccaaagctttgtcagcctctgggatgggtgctacagccagtgtttcagcaggggctgcatcagaggaatcttcagccaacatatccagcatggcacttatctctgcatcacttggattcaaaggtacctcgaaatgaacctgcctctcgt

SEQ ID NO: 177262 - DNA, 453 bp, Zea Mays
gttcatccttcttcgttcctttcagcttcggcatactccaaccactcaatgttggagataccctgttggccaagtactcttgcaccagatctttagtactaatttgttcagccaccaccctgaaatctgctatagcttgttggcatggtgaccccgacgacatgctacacaggggcctagtcaatccaaagcttaaactcagcggactcatcactagcgtcttcaacttctccctcttcttctcatcggccttgatatagaaccattcacctttccaaccagttggccatttggtgggatagctaagcgctggggccttcatatccttgcgatatgcgaagttataacagccgaagttttcatacagcccgtcttctctggccttcgtctggtaatgcagctcatgcactcggcagaaagcttcagcattcgggtccattccttggcttcgaa

SEQ ID NO: 177263 - DNA, 708 bp, Zea Mays
aaaacctctctagactaagattgccttgctggaggacggcaggttgatttggttaaagtcaggggtttcttttgtaaaacacacatgctgaaggggggtatcggccgttcatagccgttggatgaaacgttgatggttcagatttgataagacgaaggggtaagttggttctaatttcagccgccccgccggatagaggaacaatcatgggcgagtctcaggggcggtggcccgcgacgacgttgcatcgaacgacgacgactgcaccccgccaaaacaccgtcagccgccccagcgacttgcttcttctccctgcgcgaacacggcacggtgggacgagcggtgagccccagcgtcaacagccagcgccggatcctagagcgccatccgccccgcatattcccagacggcggccatgccagagctttcccccatggccggcatgctgttgacgacgaacgaaggagttgctctgatctggtgaccctagctctaaattttctcgtacgacgctggctactgtctcaatgacttcaatagcgcaggtgatggttcggctgctcatatatatacttgtggacgggaccgattccgggcgctctgcgggcaggacgtccgacggttacgcggtggttctgttacgatctgctatagcgccggtttgttacgggtctacgagatgtctcgatgtggaagaaaatatctgga

SEQ ID NO: 177264 - DNA, 377 bp, Zea Mays
gtggatcccttgctggtggcgtagacagtgggtcaccaagaggatggggaggaaaggtggtggagccctgaatggcgatgcttgtggtggagacggtgggttagaaagaggatgaggaacaatgtataaagtttgaggaggcgatgatgggtgtacaataggaactacaatttgaggaggcggagacggttgggaatgcaacgacgacggcggtggtggatcaaccaattcgacatcccttcaaggccaaaggatgaaattcttgatggcttgtccaagtgtctcaataccttcggacctagggatgtctagcatgttgtctaaactcgctatttgtggagacagattatttcgcgttggtgcgacagagttcgcac

SEQ ID NO: 177265 - DNA, 713 bp, Zea Mays
gcatgacatatagaatccaaacttttattacaagccagaatagctgaagcgagtttggagagggcctcgtgactgggatggccgaggcgatggtgccacaggtaaggtggcgcagagctggcgacaagggagtgagcgacgtgcagctgcaaggggtagagcggaccggagctattgcacctgatgatcacgttccgcgagaaaagttccttcacagaacaaccatacgggtcaaactccatagagcaattgttatcgacagtaaattggcgaacagaaataagattcttgataagctaaggcgaaacaagaatgttatttaaaacaagggggccaagttgcgccctgccggtggcagtgatgggcaagagcgaaccattaccgacaacaatggatgtgggagagggaaaccgaggggttgaggagtcagagagagtaccatcatgagaggtcatgtgagaggaagcaccagtgtcaaggtaccattcgttgttcaccggcggagtgagcgtcatggtactaaatgtagaggccagcgagttctggtcccaaatcggagagcccaccatgggctggtagtgggacgacactagctgctgggctggaaggcctgctggacggagacgccgggggccagcaggtaagcctgctggacagaggtcccgtgggccggcaggtaggccggttcggggagctacatctgttgggccagc

SEQ ID NO: 177266 - DNA, 362 bp, Zea Mays
cccgccgtaatctccgcgcttcatcgattgaccgtcgtcgttctcctcccctggttcatttcccctctccttctttcgagttccccacattcttttgcatagttcagtcgccaatggccatcaggtttgccacgccccttctacatccctcccattgattcgaaatttattgaatcgcctcattatatgtagtatccgataatgccttccaattttttcaattgcatatttgtttcatattgttcatttttatataggtactgaatgttgtttataaacaaattatatatatttttacaatagcaatcaatagattagtgatgttatgttactgtgttcttattgttgtttctgagagttat

SEQ ID NO: 177267 - DNA, 1056 bp, Zea Mays
ttaccgtttagttctttgaaacggtccaaacacgtgttgatgagcgcatttacttttaacatataattcgtaccgggtatcaaacacatgctctatcactcgcatgcgcagcaggctttgcattcacgcgtgtgcacatgcagactttgcatgtagtggtggcatttgcatgtacggttgcatgcgcagctttagttgcattcgtagttagggcgttcgcgcgtgtgcacatgcaggctttggattcacgtgtgtgcacatgcaaactttgcatgcagcggtggcatttgcatgcacggttgcatgcgcagctttagttgcattcgtagttagggcgttcgcgcgtgtgcacatgcaggctttgcatgcacgcgtgtgcacatgcagactttgcatgtagtggtgacatttgcatgcacggttgcatgcgcagctttagttgcattcgtagttagggcgtttgcgcgtgtgcacatgcaggctttgcatgcagtggaagcatttgcatgcgctggtttagttgcattcgtagttagggcgtttgcatgtgccggtttaggggttgcacgcgtgcggcgtggtgcgtatgagatttgaccgcggcgggcgggacttgcatgtacgcagaggacggggcttgcatgtatatagaggcttgcatgtacgcagaggacgggggcttgcatgtatgcagaggacggggcgcgggtacgaatctagtctacattagcctcttaatagatagtatatatagaagatagacagatggcagagaaacatcctctatatttaggtaacgtttttcgaaaatgttgtaagtgagaaaaactcttatatatttagcgtaccaaacccgttagaggtttctaatggagtcggtctaatggcgaggcttgaaggggtagatacgttcattcctttaacaacttcactaaaaaatcttttaccacttatttatagattttagaggggtatcgtaatgataactctaatctttttattctgtgtcaaccataatctttccattatttgtgttattcaacgctatcagtttat

SEQ ID NO: 177268 - DNA, 553 bp, Zea Mays
gggaagtgagcgattctccggctatgggggctaatcagagacgggagtggtggctatggcttcgcaacttcgagacgaaggtcggagctcggttgatttgagcgaagggagcgaggacggggtgaatttataggcgcggtgaagcacagccgcgaccatgatgataaccattgccggccttagctggcgatcaacggcgacgtcaggcgctacccttttcttacggcttgccacgtccttgctgcgacagtaacacagccgaatcgatgcggcatggaagaacgaaggtgaacggcgccgatgatcggacacgaccgggaggagggatggtcgcgtggcagccggagttagtgccctccaccgcggcggtcttacccggagcaaaaagatcttcacacggagatgctcgccgcccgatcatctcgaccccagcgcaaatcgcggcgcggataggtcgtcggtggtgaggttgacgcgctggcggtctgatccagtttagttactgtaccatggcaatccaccatcagatggcctgaccgagtgacttgaagcc

SEQ ID NO: 177269 - DNA, 393 bp, Zea Mays
cgaattattgggtcatgaaaaatatatgaatagccacaatggggtattttatcaactacgcgctgcttaagtgggacaattaagtgagtacaacgaatgccggggtattttggcgagcggcaacgacaagcgacctaaaaaaagtaattttccaccttaaaaactatggtggaaacccaagcaaagaagtgcgaaaagagaaatggtggaaaaagtattagacttcaagcgcaaagggaaagtccatgaataatgagataaatcaagtatcaccaagtattatttatacccagaaacattgacaacaaagggatgcccacaaatcagtgtatgataaaaaacatgtatagcctgagaggagctagagaaggggagtcgaacatgctgacctag

SEQ ID NO: 177270 - DNA, 954 bp, Zea Mays
cacaaatatcaacagattcagggtacctcgccgccggtgatccacgtgtccggatttgcgctggtcgtcgggattcgtgctgggcacgttgttgatattcacggggaggtgaaagatctcgcggggaggcagatagggtcgaaggggaagcttatcaccgtgcctgtagccgttgcgacgtggccggaccgccggtgtcgtcgtggacactccggcgacctcaattataccacgtcgtgactcttcactacgtggtagtaaccgtggcacacttaggcttaccctctctgaaccactacaccggtgaacgccatgattgcgccaccagtgacctcttccttctccggccgccaccgcgccaactccaaattcacaggccaccgcccccagagcctataaattgagtgtgccgtcgagtccgtaaggtagtcaagcacccaacccaccaagtcgtgcctccaattgctcaccagcaagccccaatttgggatttcccccaaatcaaccaagaacaccgtgcggtgtgagctcaccgtggccaacctgctccaggttgattcataaccctctgttgaatgttctagcatctctaggatctcctgttgctcataggctcgattgattgaactagaccataccgaattgcccataacaccgtagcttcttctcgagttttgtcgtcgacgtgaacaggcgtgctccggcccagattagtgcgattgattgaggggttagtgtcgccgagggtcgaattcggtgccggctaagttaggggtccggtcttggcatattccggccaatataggctcatcggagacgtgctcgtcgccgaccaccatcgcagacctggtgttgcgaaggaatagaacttcgagggtcttggtgcaaacgtcggtgagacaaacaaatagtgctcggggttatttactgcttattcaaaaagctgaggtcttc

SEQ ID NO: 177271 - DNA, 377 bp, Zea Mays
agatgaccaaataaagaaacctgcattgctattgtcagctttcagatatgaatagcaaagataaatttaggttaagaagacccagatccaatacataactaggaaaaggcatggcacaaacaatcctgctaacataataaaaagcatcaccaaaatgcaaaactgaaagtagaaatatgtaaaaccttactgagtgtattgtcacttccttcgctgtgccttcgataggcaatcgtcttcggcatttgcaaccgttggttgagggcaaggaagttgaagaggccttcaagacaacctgtgctcttcgtatcaaaccgcttgctctcagccattgttccagcaaagctatcatcaatttaccaagtgcaagattcaga

SEQ ID NO: 177272 - DNA, 281 bp, Zea Mays
ggctcggcggccttcgtctcagtaggcgctgaaggcccagctttggcttcgacttggattttggcagcttcggcagttttcttggtaggagcaggagttaaggccttcgtggtctctataacagcgtctagcacgctggccatcctcctcctcttgggagttgcagcaggagctttttgcatcttcggcaaatttgcctctaccggtgggctcaggatttctggcacttttatcactttttccacctgtgactcttcggccttatcatctttagcttcggt

SEQ ID NO: 177273 - DNA, 543 bp, Zea Mays
gtaaaaagtcctcaatgaaggggtacgggtgaagattggccgctggatttgagatggaaggctcagattaaatcgagcaccaccctgaaccggtacgcaacaggaacccttggatctaaaatcaagggcagggatttaaagaagtcgagatccccctggattcatccgatccacgacacacggccacgattcattgagacgaaagggtacaccaaatcaaatcgtggccacccatatctaatacgtcgctcaggatttatttcgtctagatctaatcctagtcgtttgctattggatcaacggctagatgcctcccactatcctcccccacgccaacacctgagcagaggcgccgccgcccagcccatgcgacggcgccatcgccggtgcacgcgacacatcaccccgacgtgctattcttcaatcccatgtgatcattacgaagtggaagcgatggcgaacacaacggaagtgatcataccggcgaacgtcgaggcgtagggacccatctacggtcgtggcggatctgcagcgatggggttg

SEQ ID NO: 177274 - DNA, 570 bp, Zea Mays
taagcccgtcgtacccccttgctgatcggtggatcgggataagacctcgccgccgttgatcgatcactgtcgtgcgccgcgtgtccagacactttaccacgtcacgattagtcacgttaggggatccggtgatcgccggagggagcgccacggtgaaaaccactaagcgcttgtgccagtgctcctctccttctccggccgccacgcatcgtcatccaaattcccggccgccgctcttgcttcctataaattaagcgcgccgtcagctccgtagtgtaatcacacacccagccacaaagtattgcctccaatcgtgtacccgagagctccaatttcacacttcccccaatctgctcaaaaacatcgcacggttaccctcgtcgtggacagtttgctccaggtcagttccaacgccttggtcatttgttctagcatccttaggctctcctcaaactcctcgacccctcggattgaactagactgccatgaatcgccgggaacacgttattcctttgattttccccgctgtcaccgtggctagagacatgtgggtagccgttcttggaatta

SEQ ID NO: 177275 - DNA, 780 bp, Zea Mays
gctgaagagccctccaacttctaagtcttcacagggagaagtccacgacggcggtgggcgcagggacgctccggcgaggttctagaccggccgattggggctatggctgggttctccgagcggcggacatgaaatcggggtcaccatgatcatttcccctaacttaattgcgtttataatcaactacggagctctggccacggtggccgtgagcatcgcggcaagacagctgtgttcccggcgaccagaggactcttagttcaattcagtggctcggcaagcatcgtagacgcataagaaggcttaaacaagagagcagaggggaggagctaaccgcagtatggctggcgacggtgaagcttgtttcacggtggcggaaagagatttgggggaaaacgcgaattcgagctcactggtggatgattgtggccgattagcggtggctagttagctgacgacctcacggagctagtcacgggctcaatttatagggaggacgggcggtggtgatcaattcggccgagccgtgttggcggccggagctgaggaagaaggcggcgcggtgaattcgtggctatcgccgtggcaagctccccgtcgacgatgggacgggtatagggagtcatggcaacgcggtggaaagttaaagccacgcggcgcaaggctaggaggcggcggtcaccggcgttcttatcgatctccgccgcggtgatgcatgtacggtggccgaacttgtttatggccggagttatccacgacgaggatatttacgtgacccaa

SEQ ID NO: 177276 - DNA, 424 bp, Zea Mays
tggaacagtaacgactagcttgggttgttgtgttatttaaccccctcccataagccatactcaatgtcttgccttctccaacaaccataacatttattgagagagtttaggacacccattgtatagtgaggtgattagcgaagccataatctcatgattaggaacctcattaactgcaagagagagccatcatgtgcatccaccgctcacaataggcttgtcatagtcaagtgagagcctatagcttattattcatgacgattgcatcacttagacggctcggtgacgattggagcgtagtaatcaccccagaggacttgttggtgacatggctcagagttgtacatggttgtgagcgattcatcatgctagagtggcagagaatcaccttgtagtgagtaattagttcttgcgaggactaagg

SEQ ID NO: 177277 - DNA, 510 bp, Zea Mays
cccgggtctaagttgtaatcttcatcgttaggaacaggtaacctcccgtgcggtgataccttatacacaacatcccaacccttaagatgttctttcgtttggcacacatatgggagataatacacttgtgtggcctgttgggccacgatatagaattgtctcctggtaaggtggaatcttgtcgaatttcgactatcccaagattagaatgtgtctatctcgtcacttgagggtcaaaccaatgacatttgaatatcactggagtaagaggtttggaaccataaaaattgagctcatatatttcttcgattcgtccaaaataatcgacatcgtcaaggccgggcgtaaagactccagaacacgttgttttccgattggaccgacttttgtcttagtttgttgtgcgaaaacggtatccattgacgtcatacccagaatatttcttgaccctataagcaaagctgttggctacttgtctcaactcggcactcatagacggatctctttggc

SEQ ID NO: 177278 - DNA, 466 bp, Zea Mays
atcaaggttggtgccataggtggtggtggtagctgggcccatgtagcttgagaatgacttgccgaagcaactgatgttgtgggttgctggttgcccacatactcagggatatatggcgaataacatgaagtagtctgcaagacttgcttcggctgattctgttgtgcttcggcttcaactatctccttttgcttttggatcatgacttggcacatccttgttgtatgtcccttatcctccccacagaataaacagatcaacctcctgggttgggtgccaaaccttcctccgaagcttcttcctcctctgccccttggagctggtggcctgtaagaggtttgctgcattcctaaagattgggagctttgttggttgccttgagtgtggtttgccctgtcatcatttgagctaggattgtggattgttctaacatgcctagggtggagccttcctccaaagcccctag

SEQ ID NO: 177279 - DNA, 721 bp, Zea Mays
atggaatgtgttacaacttgtgtgcgtgtgtgcctagcatcctgacaggaagagggtccatcccttttatatcctaagggtcagaccttacattactctcttttctgagagagagagagagaaagacagaataaaaaagagaagaagtccttcgtccttgtggcgggccccttctcctgatcgtatgaagtagtgcttatgggtatggtgccgcctgttactcttgtccctgcggtacgttcgtggatgacgtccccgtggtgatgcgcggcaggtcccatggtgtaggcctgagactcgactaatacgacatggttcccctccaccatcttgggcaccatgttgtcctaccgtgcatgtggatttgtccattcgaaaaggcgccatgtcttgtcgtttctaccatacttgcactgtagatgctgaggttgctcctgatgggagagttgtgtctgtgtcttatcatctgggctcctattgtcacggactatcgtggtcaacatatgcttgtagctctgactcaatgcttagacttgctaggcctcacaggcttggtcgtccgctctgcctcacaggcttgctcgacgggggacttgatcatctgctccgcctcacaaacttgctcgtctggggacttagtcgtctgctccacctcgcagagttgctcggtgggggacttgatcgccagccccgccttgcagacttgatcgccagccccgcc

SEQ ID NO: 177280 - DNA, 674 bp, Zea Mays
gagatatattatggctctaatcaaggccaaaaccatatttgaggggcagtgtgagactgctcacactccatttagaccgttcaaaaatgagattgattttctcactaggcatctcaccccttttcctgatgatgagggagttcctgcagatgacttcgccgctcagcctgaggcacatccagctcagcagatgccacctcctcatgagcaaggatagtactggcagcccgcacctagttattttgatccgtattttcagcagatgcatcatgggctccagactcatatggatggatgatttcagggcatgatgacacatgtggatggccgctttgatgctatgcaatctcattttgatgtctaatattctgctctgcacaatagattctctgatgttgacacccaactggatggggtatattcacagtttgttgatctttgcactcatattcaagatactgtgcatgatcccattatgagcaaaatgaacaacacgcaacagagctttcaagacattatgggtgctctgtttagtcaattcgagactctgtctaccagtgacagtattcattcactagatgagcgtcagcaacagcttcataatgacttcagtcagttcacctccatctttgacaacttcagctcccactactacagtacgtatccgcgtcccc

SEQ ID NO: 177281 - DNA, 317 bp, Zea Mays
gggattttaagtgtaaacttttgtctgtgtgatactgaacctcggttgctgcgcaggttccgacgtttgggcctgcgcaagcaaccgctactgacaatactgattttgtggtggcctcaaccgtagtgcctgccgatgataaatcgtttggctctatgtccgagtgttttttgtctgatggtgaatttgggagttcgatttcgtggacggaggagtcttcggatgaaggcttggattattttgaagcgttagatgtggctgtagcggagccttcgccgcgtgtggagggttctgggggtctccctagtgcgagtaca

SEQ ID NO: 177282 - DNA, 996 bp, Zea Mays
agtcattgccgacttaagccgattgctccgttagtagggcatagtggccaccccgagttaagtaagcgtgagcatgtcgcaccgccttaagtcattgccgacttaagccgattgccccgttagtagggcatagtggtcaccccgagtttagtaagcgtgagaatgttgcactgccttaagtcattgccgacttaagccgattgctccgttagtagggcatagaggccaccctgagttaagtaagcgtgagcatgtcgcaccgccttaagtcattgccgacttaagccgattgctccgttagtagggcatagtggtcaccccgagttaagtaagtatgccaattgacatcgaacaatttgagtgcctttgaagactttttattgatgatatatttcttaatttacagaatacatcgtcgtcccaatagcttctgggatgtagctaggggtaaaacttcctgaggtgttctatgttccatgagttcccaatttccgtgtcgtccatctgagtgagacgatatgatcccggccgagtgacttcagctactatgaatggtccttcccatagaggtgacaatttgtgccgtccctcccccgttagaattcggcggaagacgagatctcccactgcaaaggatcgatgccgtatggcctaatcatgatagcacctcagagtttgctgataccgtgctgattgaatcaccgtgttcagtcgctcttcttcgagtacatcaacatcctccagcctagtagcttcagcttctgctatgttttcaaagattaaccttggtgccccgaacttgagatcagcaggtagcactgcttccgaaccatagaccatgaagaaaggtgtgtttccatgcagagctcgattaggttgagttctcaggctccaaacaacatacgacagctctctgatcaactttcctgcgaacttttcattcttgtcgaagactttctttctaagcgcctccaatatcatcctattagctctttc

SEQ ID NO: 177283 - DNA, 776 bp, Zea Mays
gccgatcagcccacttctcctgctgaggggcagaaaaagaagaagagacgtcttcgtcgagtgtctagcttggatcaagatgtcggtccttctgttcctgctgctgaggaagtgccagtgcctaaatttgctgaagctgaccccaatgggtgtgacctgactgctgctgaacccaatgggtgtgatcctactgaagttaaccccaatgggtgtactgtccgtgttgttgatgaagatgatgaagaagaggatgaaatccctctgattcggaagaatagccggcgttacatagccagtggggaaagtagtggtgttccttctcctgctttgtctgtcctcattggtctgcaagaattatctctggcgaactttgatcaaactcttgaagacatggttccagaagatatgttgtcagagccgacagatggtggcgcgatggatgtttgtgctgatgtgcccgatgccgggttggggtcatctcgggcagcgtcccgcgcctcatcgaccttagagcgcggtcttgagggtcaggaggctggtctggattgcactgctcccacggaagtgactgagggtccttcagccttagaggtggctgttgcagagaactcgaccctcaaggatggtgctggcgcttacccagcccccgagggtgttgccggagatgatcccggctcggatgggtagcgcgagctgtgacccagctcccgagggtgtccgagtgggttctccttcccacacttccatggatgttcacgtagggtcttctcctccac

SEQ ID NO: 177284 - DNA, 523 bp, Zea Mays
cgccgcgtcgtcgtgctcgaacaagaaggccccgacggccttcgtggctgctgccttcgccaagaagccggagacgccgacgacggccgatgtcgcgcaggagaagcacgaggagcttgagcgatgcatcgacgagtgcgagagcggcagcgaggtggtgttcaggagcattgttcggaaatagattgatgatgtacgataaaatttgtactcatttacgttgtttggttcacgttttatgctgaaatttgaccaagccaaaatccgtgcacgatcgaacgtgatcagtctacgttgttttagctaatataggatttacgctaaattttgtattcatttatgatgttttagctcacgttttacgccggaatctgccctagccagaacccgcgcatgattgggtgcacgcgatttttacgccgtaattttgggcttcgtttgctgttacaaaacagttatatgatttacgctaaatttcgtactcatttacgatgttttagctcaggttttacgctggaatccg

SEQ ID NO: 177285 - DNA, 703 bp, Zea Mays
catcagatagatgatcaggtagctcaagctggtaggccatctccccaactcgcctaaagattctgaagggtccaataaagcgagaggataacttacctttaactttgaatcttctcattccatgaattggtgacaccctaaggtacacgtgatcaccctcttcaaattctagtggtcttcttcgattatcaggatagctctttttgccgagtctgtgctaccctcaaattctcccggattatacggacttgttcttctgcctcttgaataacctcaggcccaaagaactgcctttcaccagtctgatcccaatataaaggagtcatgcactttctaccatataaagtttcaaatggtgacatctgcagactggcctggtaactattgttatatgagaactcagcatatggtagactcttgtcccaactgcctccatgcttaagggtacaagctctcaatatatcctccattacttggttagtcctctcagtttggccattagtttgaggatgataggccgagctgaagttcaacttcgttcccatgttctcatgaaggctcttccaaaaccttgaggtgaattgggatccacgatcagaaacaatcttcttcggtaccccgtgtaaacacacaattcgagccatgtataactctgccagctgagaacctttataagtagtattgaccggaatgaagtgagcca

SEQ ID NO: 177286 - DNA, 863 bp, Zea Mays
gccgaaggagactgttgctgggtcctgcgaaggtggattagttcgattgaaatatacctccagattcagagaaaggttcgacgaaccgaatgacgactggttgaaatgcattgaggctactagcgacgagttgcttggggcatataccagagccgaagatgatgctttatcctcagcctttgggggtcggggcaagaaaagattgaacagggtttttgatgcaattgacttcatataccctgattactgctaccccttgcgaaggtaaggaaaaaagagaaaaacttccgcttcggccaccactattgtgccgaaggtcaagaaaataaaggttttgacccaccgaccacgatatattgaaacggccgcagtccctgaatttggtgaagggacctcctccgctgccgaagcgaaacaagctgctcccatcgctcggagcgctgagggatcgattgtagtgccgaaggtgcctatagtcgggtcagccgaagccaaagatgatgcggccagagagccaaagctggaaaaaacagtgatgctgccaaaaattctgagtcctccggcagaggcaaaactgccgaaggttataagggctcccaccacaactcccaagaggagaagaatggcaagcatgctagacgctgttgtggaaacaacaagagcactgactcctgctcctgtgaagaagattgcggaagctgctacagcacatacgaaaaccgaagctgggccctcagtgcccgttgaaacgaagctcgccacaaccgagcagagggccgtagaagaatctccagatactggcgtagctccggagaaaagtatggccaaagaagccaaatcccctgctctcgaagcaccgtccg

SEQ ID NO: 177287 - DNA, 520 bp, Zea Mays
tgagacgactaatggatcaagaacaaacaaaagaaatcggttgcaggcgctagacgcctagacccatgatgtgcactgctgcagctctgccagccagtgaatggatctttttctttattcgcaatgaatcgatgcatatgtttgcattgactcttcttccgtggtttaatgtccacaagtgattgaatcacctcattgccttgcctcgtgggatgatatatcgatttacacacctcactggagatggccttaggcaatcttactattatcacatttttgagataccttctgcaacattatctttgacttgctttaatataaaccatctggtgcccttttttcttcttcagatctttgtgtaaaactccatagagtgcaagttcgcttcacagtccatatggagcactaagatgtagaagttgatcagcagatgaaaacatgactgttttggctgttagaactggagtttcagatagtttgatgtttcttgtagcgtacaaaaccaacatccccatatcag

SEQ ID NO: 177288 - DNA, 834 bp, Zea Mays
caagacagtcggcccactacaccctcatagggggcgcactgtacagaaggggtgcgactggagtcctcatgaagtgcatttcctcaactactgggaagcagctactggatgaaatccacgccggacagtgcggagtacacgcaacatccagaactctggttgggaaagttttcagatctggtttctattggccaacgacgaagagtgatgccgccgagttagtccggaggtgtgaagcttgccaattcttgtcaaagcaacaacacttacctgcacagcagctgcagatcatccctataacatggtcatttgcatgctgggggctggacatgatcggacccttcaagaaagctcagggaggttatacccacgtgctggttgccatcgataagttcaccaaatggatagagtacaagcctattgcttctttaacctcagccaaggcagtggagttcatacaaaacataatattcaggtttgggataccaaatagcatcataactaacctgggatccaatttcaccaactctgaattctttgatttctgcgaacaacggagcatccagatcaagtatgcattagtagcccatccaagagccaatggccaggtggaaagagccaatggaatgatacttgaagcactcaggaagaaagtgttcgacaaaaatgaaaagcttgcaggaaagtggattagagagctgccatatgttgttcggagcctgagaactcaatctagtcgagctctacatggaaatactccaattttcatggtctatggttcagaagcagtgctacccgacgacctaatgttcggggcaccgaggttggtcttcg

SEQ ID NO: 177289 - DNA, 763 bp, Zea Mays
acggggtataccatgtagtgcttttgagaggacgacgaggtcgatcgtagctcgatggtttgtgccatgcacgatggaacacgatggattatacaggttcgggccgcttggatgcgtaatatcctatgtcctgtgagttctgagatgtatattgctggtggttgaggattaccggtgatttctggaagtggaagatggttgcggtatgagagtcccctgtttcgtaggggttccctcccagccttatatccgactaaggggagatcaccccgcacaatctcggagcacgattcctatctaccgactttcgctagaagcgcgccacgccttccggtggttagttggtctttgcgaggcctgcgcgtacactacatgggcaggacacgatcttgggaacatttgcgcccacacgtgcgtctcgttcggtcgtcttcgattgcacccagctgagggccactaggcgccttacaggcggcccattgggggccttgtaggtggcttacgaagcataacaatgccatgatgactcaagggatatctatcctccacaccactaatgcccgaaggtggattgctttagcattctgagcactagaattagcgtgcaaagaaacaaaataatcagtgtcagcagactgaacaggacattccaaagcatccaaaatctcatcagataggatgtcaccaccatcaggagtgtctggcacaatggcattgagctaagcaggtttaggagcaactaagacaccagaacacgtgtggc

SEQ ID NO: 177290 - DNA, 911 bp, Zea Mays
ggtagacagatgcgaacactgcctttatgtcgatggagttgcaaaattcccggaaatcttggttgtcgaattgctttccattgtcaactgttagctctgatgggactccgaaccgacaaacgatattctgccagaagaatttttgggttgtctttgacgttattgtcgatacagctctggtttcaatccacttggtgaagtattcaacgacaatgaaggtgaattttaggttgccttgcgctgttggcagcggcccaatgtgtctagtccccaacattgtagtggccaggtatgtgcaataagctttgtgagctgtgaaggggcgcccattcgaggtgagaatttctagcatgcttcgcacgaatgggtcaccctgttggccgtgcacacaattgccagccaatagaaaccttgacgtatgactttggcagccagggcccttggtcccgaatgtgatccgcaaatacccttatggacttcgcggagaagctgaattccttcggcttaagttatgcatttcaacatgtgttggcttatccccttcttgtagagatgtccgtcgactatggcgaggtctctgcttctgcgttttaatcttttggcttcgctttggttagagggatggtagtggccttagagataaagggtgattggtgcccgccagtctttggccattatcagatttaatatccaatgcctgtgggcgtcttgtgttattcgtagacccccgaggtttcttacggttggtgtgccgactatatgaaaaaatacaacagatggcaagggttcgcccttcgctgctgctttggctattgtgtcagcttctttttcttgttccactcaatatgatgtaatgtgaagcctttgaattgtttttctaggcttcggatagcagcgagatactgcattaa

SEQ ID NO: 177291 - DNA, 806 bp, Zea Mays
cttcactcagccagatctcaacctccgtcagagaagatggctggaactgatcaaagattatgaccttgagattcattatcagcccggaaaggccaacgtggtagcagacgccctcagccgaaaacctttcgggataaagggaaccaactttttagaagattggaagaaggaatcagctcaactgaatgcatgtttgggaaacaacagcagcctcgaagtcaaaccaatgctagaagacctcatatgcaaagctcaacgcctagacttagagacagcaagacttgtggaaaaagctcgcaaagaacaacttccggacctcaggacagatgaacagggagccctttggttcaaaaatcgtctgtgtgtaccgaaaggggaggcacgagaagtcctgctcgaggaagctcacaactcagcctactccatccacccaggaactaccaagatgtacctagacctcaaaactagatactggtggagagggatgaagaaagagatagcacagtatgtggcctggtgtgacacctaccaacgaacgaaggtcgagcaccaaaagcctgcaggcccattgcaacccctcccagtgcctgaatggaagtgggaagaaataggcatggattttgtaaccggactaccccggacgcaaaaagggaatgactctatctgggtgataatagaccgtcttaccaaggtggcccattttatcccagtgaaaactacctttggaggagccacccttgcccgaatttatctcaaagagatagtcagactccatggcattccaagaaagatggtgtcagacagag

SEQ ID NO: 177292 - DNA, 562 bp, Zea Mays
ggaaatgggagacgagtatgtcggcctaactgacaagcatgatagaagccctcagaatgtcaccctactacatgaaatatctaaattactggtgagcttggtcatgacatcgggtcctggatggccgagacgacgatgccaagtggtggaggaggtggtggagaccataacgggttgggaggacgcgccggtggaggaaggctgaagcatgtagaggggccccgagctatcacagattcacagcggacgaggggggtcctggtggccagatccttcacagagaaaccaaaagggtcaaactcaatggaacaagaattggcgatggtgaaccgacgaacagaaagaagattgtgagtaatgtgaggagctacgagaacattgttgagatagaacggtccaaggagaaccgaggcacatactgaggtgtccggcagagtggaactgtttccaatgacgatcgatgagggatgggagggatgggggaggagcgggataacatgctagtggtggaggtggtgtggtaagacacaccggagtcgaccacccagtcggacgggggtgg

SEQ ID NO: 177293 - DNA, 700 bp, Zea Mays
gtcctgaatttcaattgccggatcctgctcatgtcataggggatttaccttgggtgggtgcttttgggggagagatttgaggtcatttgcctaagctagattttcctaaatttgatggagaaaaccccaagttgtggattaagcgcagtagagattattttgacatgtatgcagtagaagcgaggatgtgggtgcgtgtgtcaaccatgcattttgtgggagctgttgctcgctggttgtcatccgtcgaggagtcctcccaattggctagctggtcagtgttctgtcaagctttgctggagaggtttggtagagataagcacacgatgtttctttgccaaatgtttagcatacggcaaaccacatcggtggccgactatgttgagaaattttctgggctgcgtgataatttggcagtgtatggttgttccatggatcctttgtactttgttcagcattttgtggatgggttacgtgctgatattcgcgcagctgtgtttgttcatcgtccctcttccttcgatactgcgtgcgtgttggctttgttacaggaggaggtgaccgcgcagatgcggcggccggaaggcgttcgactgtcgtttccgatggttgccaaagggctagcaagaggtgccttgccgctgcccttaccacctaagatggagcagactggcatcatgccagagaaagtgaaacgggg

SEQ ID NO: 177294 - DNA, 1766 bp, Zea Mays
ccctgggataccagaaaccctaattggaaccctggaaaaccctaacaccaaaccctaggggcttatgtaaaaaatgatgaacctttggactaaagtgtaaaaactactatgttttgacatataaagtcatttggttcacaaatatgtgaatttacaagccaaaccctgagatttggacttaagtgcaaaatggacctcatttgagttctacactaagtctgaaaatcagtgttaaaggctccactttagggctttgtaacttgcaaagcatagggtttttgccctagatcaccacaccaaagttgtagagcattcaaaggagaataaatttgctcaagagtacaagccttgttcttgtgagaaattgggagataatcttgcctgaagttggactgtcaggccaagatagactgaattcctgttggacagtgactttgatccaagattaagagtcatttagcctaagatccagtgggaatctacctaggattgctataacaaagttgtagagcttttatacaggaacaactttgttacagaaacttaggtgtgttgccattgaaatttaggagcaatttggccctaaatcctggctgtcaggtgctctgaataaggcttgccatggtacagtagttccaagctgaagaagatcgcaggttcacccccctgctcgccaccggtgtccatcaccgttgatccctgctcgtcgtgattcgtgcgtcgtggtcatcggttatgcacagctcggtaaaaatccttaccgccggtgagctggccaccactccgacgaccccctctcctgtcttcctttctgctttgcggcgggcacgataagttcgccgtcgaccgccgcttcccgaccgtgcgccgcgtggcctagccattttacagcgccgccatgactccctctacccgtcccatcgtcgccggggaacttgccacggcaatagccacgtattcaccgcgccaggcttcttcctcccctccggccgccgcgttgctcgtccaaaatttgcggccaccgatcactccgcctataaattgaagcccccactagcttcgcaacatcatcacccacctagccaccgtgaatcgctagcaatcgtgcaccagtgcgcttgaatttcggttttcccccaaatcaagtttccgccacccgaaatcaacctcaccgtcgccagcccaattccggtcagctcccgttccctgcttcctcgtttaagctttctcacatgccttggatgcttgccaagccattgaattgaacttcgggctctctggtcaccaggaacacgaccatatggccgctatgcttacggtcaccgtggctggagctccgtagttgatcattcgtgcaattaaattaggggaaacactcttcgggtagtgaatttggtttacgccatagctaggcgcctgtcattgccctaatcggccggcgtagatgctcgtcggagctcctccgtgcgtgaacggcgtcgagggcgcgtcgggtaaaggaatagataattggaggacttttctgcatttggtcagtgacacaaaagagcagtgagcaaacctgttttgatttagttaatagatcggggtcttctgtgcaaaactcccacgggcgcgcacgcgtgggcgtatttctgctggttactgggccgcctgggctggattcggcccagtactattctattgttttcctttttcttttatccccagagccaaaacaattatagaaaaatgtagaaaaatgctaaaattgtgaaactaatttt

SEQ ID NO: 177295 - DNA, 579 bp, Zea Mays
actttcctttttctcccttgttttcggacgggaaagcagtaatctgggtaaacaaacccaataacatcgaacaccctattcaacctctttttcccgcgagcgccgaaggcaactgtcatggccttgtcttctgcccttgagtatgctccaaatagctcatcactcatggcctctatagcgtctagctagtcatcatttggctcatcaaattggctcttgtacccgaaggtatacatcaaataaaccaagccactttggctggagacaacagcgacttccttcagcatttcccattcatttgcaagaggccatactttgtaagcaatatgctcttgaactaaatctcttatgccaatataggtgcatatggtgttgaaagcaatttgacacgcttgcacttcattcccaagcgcgagtgatggtctcctaatgccaaagcgtgaccatataggacgctggataatgcctctcacgtcctccctctgattcaggtcattcttcatgtaaaaccattccttcatccaaaagcctggccacttcttcctaaatgtaggcacatggtaatttgactcagagcga

SEQ ID NO: 177296 - DNA, 395 bp, Zea Mays
aagagaaacatcagcacgcgtcgcccagagaagacgacgaagaacatgatgtggatggatcacgcgaatacacccgacgacgaatttagaggcctgttctcccattctctctgtgctcgtagaagacgggacaaggacgtgctgtttgcaacctgtgtgtgagagagatcgcgcgtgatattctcagcaactccaatttgaagcgtatcagcgtatgcagcaagagcaaggagagctagcttccatccggccggtgacggttgaaccgcctttaatccacagcatcgcgtgatattctcgaacagggacagggagcgaacgcgattgggcagctgcacgccggtgcagcttgcgcgttgcggcagccggcagctagctactacaagctggtacag

SEQ ID NO: 177297 - DNA, 427 bp, Zea Mays
atacgtgctcaatatcactcttgatactcttcaaatgtgttatttaattccttgaacatcaatacctctctcaccgtgtgtatctcaattggtctcaaggatggttcgacgctgaaatccgtctgtcatcgaatccgcctctgatgatagctctcctgagattcgtgaggaggtgccctcacagtccagatccaagcgaggcagaggatctggaaatgttatgatgggtggtgaggcctctaggtctcagggtagtcgcgggtgtacggctagaaccccttctagtcgctctcgtcctgcagctaatccacagacatgggagccttctagtgatgatgaaggtggaaaatatgatgtcatagatcttccttccgatgatgctcctattgttcatgggttggttctacataaggctcaagccaggaga

SEQ ID NO: 177298 - DNA, 764 bp, Zea Mays
agaaaccatcacgaagtaaccatcctaattcaaatttgaaaggatgtggatgtgcacaatcattagattctccagtgttcaacaacaagggcgtatgatcagaaatatccctgttcagagctactactgtagataaaggatatttattgtcccattcagtagctactaggacacgatccagcttttcatatgtcggattaggtaacctgttagcccacgtgaactgccttccagacatctcaatctctttcaggtttaaactatcaattactgcattaaacataaaaggccatctactttgaaaattgtctttattcttgtcctttggacatctaagaatattaaaatcaccacctattactataggcaaggtctcacgactcactaattgaacaagctctgtcaagaaagcatctttcctatcattctgagcaggaccatacactacagttaaagcccatttgaagcaatcatttttgttgcacaaaatgaacttaacgtagaaatccccttcatcaatagctcctatgtcataaatatccatatcaatacccattagaattccccctgaatgaccagaaggttcttttgtatgccaaataaaatttctccctccacataaattccttaaaaaagattctgcaaacgatctcttaactgtttctgaaatagcaataaaagataaattttgctcctttgttaactctgaaataaatctatgttttaaagggtctctaaacccatcacaattccaaaacacccct

SEQ ID NO: 177299 - DNA, 471 bp, Zea Mays
tagatctaaccctggccgctggatcagagatccatgacccagatcaaaagatatcatggctgattcttaacggtccgatctagatcgagggttcggattcaatctcgaagggggtatgcccgggatccaatctcagtcgtacactctacatcctacggctcacactgattcacccccatcccaccctttttccttggcccgcatagcggcgacgccgtccagcatggcggcgccatggctgtgcatgctaagcaacggtcccaaggccaaaagtccaatcggagtagtactacgcgaggcggttacgatcacgagcataaagagataagtctcaccggttatcgcggcgtggagggcaccggccacggtgcagcacggaccgcggcggagcagaggcattggagagcaattccggcggctatagggtccttccctctcccctgacgcccccataagcttccctgcatatcg

SEQ ID NO: 177300 - DNA, 547 bp, Zea Mays
gtgcctctagcgtttcccctcaaggtgagcaacctcctcgcgcccctatttccatgtgtactgcactggttagcacgcaattgctcgtcggagtagccccacgccgccgttagccctctggtgctcccgcgccggcgtggtgccctcggctgagtccgccagatccccctgtgcgcgcctaggccaacccccaaacctctggtgccccgtcgtggccggtctgctcgtctccggtgagttctcgccgcgggaccgagcggcaccaccgcacccatgtccgccccctgccgttagatctcgaccgttcgctcgagatcggatagtgtagagctaacccgagcggatctaaccgtagccgtccgatccagatccaaccgtctctcctctctccccctcacccgcatctctgcccctgggcctggctggtcagcccgccctggctcgctgacgccctggcctcgcctgtcaatcgcgtccgcatgctcacgctcgcgcgatctaatctaggtcatcggtttctgatctgatggctgagattaccccgtac

SEQ ID NO: 177301 - DNA, 712 bp, Zea Mays
ctcataccggtggcaatgttgcggcaaagtctggccgcggtgagttgtgcatctacggccgagtgtatgctccagcgagcgattgccgagagcccggtgattctccctgtccgggaaggccatggtcacaatcctaggggtgggctgaagctcccggggccgagctcgttctccgaacggcaacaaggacacggaccatggtggtggacaaagcggaccttcttctcctctccttttctcacggcgctctcctagcggctcccattttatagaggtgatagtcttagggtggcgtatctgagaagcgaagcccgcaaggttctctacaccagtacaacggccagcgcgggatcggcggcatctgttgcgggcggcgcgtggggctgttgcgaggaagaagtagaacctgacgatgtgaggcccacccgtcaacgagaagtgattgagagcatgcgccaccgtgactgacagcgcaggctccacttgtcagcgtgagaagccagcgcgtgctagattgtgtgggggaggggaggaaaggatggagtgggccgcgctggtataccaagttaggccctaggatgaggaagtcggcccaaccgaaggtaagctttttctttattctttttttttcaaaattccaaattaaaaggttcaaaccaaattttaaattcctgttctgcactttcaatttccccaaagtgccaaaattaat

SEQ ID NO: 177302 - DNA, 687 bp, Zea Mays
gcagggggtacttattcttgaagtaacctcattcaaggatctgtagtcaatgcacatcctcttcgtaccatccttcttttccacgaatagcactggggctcccaaggtgaggtacatggtctgatgtagcctttctctaacaacccatcaatctgcttcttgagttccaccaattcaggtccggacactcgataggctctcttggaaataggggcggtgcttggtataagctctatggcaaattcaaccttcctttcaggtggcataccttgtaactccttgggaaacacatctgggaattctgatactacattgatagcttctgatggtttaatctcctcaatatgggcggcgacttggtgatagcttcccttccttggtcctgacaagaccaactccactaacacttcttctcctgatagggacactaacttcaccgttctcttgtcacagctaagactggcttggtacttggttagccagttcatccctaggatgacatctatagtcgcatcctggttacccataactattagatcagcgtggaactctatcccccttatttgaactcttgcactagggcaaaatctatctgtttgggttctaggcgaggagtatagaagttgcttgggagttaaagtgcctaatttgggtggcctcgtccgaatcgtagtcctcatcccccac

SEQ ID NO: 177303 - DNA, 658 bp, Zea Mays
cccaaatagaatcgtggtgtcgggatgtgttgggtaaacccacaataaaatccatgctgagatcctcccatttccaagatggtatgggaaggggctgtaaggtacccgctaccttcaaatgactgtccttgactctttggcaagtgtcgcattcagatatatacttagtaaattccctcttcatcctggtccaccagtacaaagatctgagatcatgatacatcttgttactaccggggtgcatggagaatttggaaaggtgagcttcatccaatatttgctttctgagttcgggattcttaggaacaaccaatcggtcttcaaaccatagaactcccttgctgtcctgacgaaagcatttgtacttatccaccttctgttcgagcatttccttaatgacttgaacacccttgtcacccatctgtgccataactattttctcgtgtagagtgggctctactgaaatataacccaaggtacctgaggaaacaaattccaggttcagcttacacaactcgtcacatagagtggcaaccttggagtccatagtgacatagttgcactgggcctttcgactttaggcatctgccacaacattggccttgcccgaatggtaatgcacttctaaatcatagtctttgatcaattccaaccatct

SEQ ID NO: 177304 - DNA, 320 bp, Zea Mays
gcaaccccggccgtaaaaagagtaccacatcatcaacatatagagatccaatgttgaatagaacgcgaagatagaggttggagcagtccatcatccgatgccctgataataagcgcattgagattgtccatgactagcacaaacaacaatggggacaaagggtccccttgctgcagcccccttctatgtgtaatgaaatcaccaggcatcccattgagaaggatatgagtagaggatgtcatgagcagcccactgagcacatcgcgccattcaggcccaaaaccaaccctctctaacacctctagaagaaaaggccagga

SEQ ID NO: 177305 - DNA, 613 bp, Zea Mays
cttggggttgagtaaatatcatcgccatggatatactccggccactaaattactccgaccaccataccgagctagtcatggatgcttcggatgtgttcaccggagacagccacttcacggccttgcgccatgtgcccgggcacatttaccacatcatcgtgactcgcttaagccatccgatcatcgtcggggagcccgccacggtattctccacgaatccactgcgccagtgaccacccattcctccgaccgccgcgcgtctcaatccaaattcaccggccaccgctcttgcctgctataaattgagcccgtcgtgagctccgcagggtaatcacacatctaagccaccaagtcttgtcttcaattgtccactaacgcccgtgaattgctcagtttccccaatccatgtttccgccaccgcgaaagagacctcactatggtcagcttgctccaggttagttcaagctccctggacgtttgttctagtcttcttaagaccccctaatgctgttcgacccctttgattgaactagaccaccctggattaccgtgaacgcccgtgttcatcctttgtctacgttgtctccgtggacaagatgatttagagtcgtag

SEQ ID NO: 177306 - DNA, 621 bp, Zea Mays
gtcctctgtttgggtgagcttgttttcataatgatctttgacttgacatcaatatcagtctttgatcttcttgacacaatcgggacttgtggggaagggacctttatcttctttgaacggttattttctgaagtggagggtgcaactgatctaaaattgcgcttcaatgatggagcattcatgaaatcatcgtcagacaatgcggatagagctgtaggaggatttttttgacacgacaagctagtgcctttctatgaacatgagtaactggtgctggctgaggatcaatctgctgctggttatggggattatcagcatgttgggctgagctgctagatcgtgttcgtcttgaaatgtcaacagaaaacacctcctgacttgactcaatcgttaatctttttgcattagatggtgggcgatcaacagacctcatggttcagcaagcaatgtaactgttgaaaaaattattgtatttaagtaaaatgatttatgcataaatatatgccaaaaaatggaatgttgtatataactgtctacaatgcatactacataatacgaaatggagttacgtatcttaaactaccttttccatttatatgccataatattaatgaaccatgg

SEQ ID NO: 177307 - DNA, 942 bp, Zea Mays
tggagaaaaagatccccgacttccttgaccggcgatcaggaagcaattgcgccaacaaggataacgtgaacttcggggaacttcccaggaataccacctccttacccgacggcgcctgcaataacactgtcttccagaagcaggatataactgcgcgatactgggataaccaatccatacccaagataacatcgaatgccccccaaggaaatcaccaccagattggccgaaaaaacctcatcagcaagaatgacggaacacccctaacaaactgaacagctactaatggagccattagcagatctaaccaaaattgggtgacccaacctctgcaccgaaagaccagcccgcgacacaaaatcctccgaaacaaacgaatagctagcgccagagtcaaaaagagcatggcctgcaaacgaatcaactaaaatcgtacctgtcaccacgtcaccttgctccctgccatccgtagcgggtagcacataagctccaaaaatacccgtagaagaggaagctcccggagtgaaattaatagaagaaccccactgagccaccggatgaggctggcgcggagctccaaactgagacagcacaggggtagacggtgcaggagtaggcacagcctgatactgaggaaaaccctgcatcggcacgaactgagaagtcccaggcacataaagctgccgtggaggaagaggaactgaaaactgctgctcagcacttgacatcatgttgatagtgccctgagaagaaaaggaagtcaccggctcccatctgagcttcccattgggattcctcctacacaccacatccttgtggtcctgactgcagatagaacacctgccactccactggcactctgcacggcgatgcgcatctccacagcggaaacacaccagccccagcccgggcttaggaacgacccgaaacctctgagtactt

SEQ ID NO: 177308 - DNA, 885 bp, Zea Mays
ctagtggctataaaagaatgggatgctcctgaatcaaaaagtacagtagcgggagtaaattcaacaaggaactcaccgagcactactcccggagcttgctgagcctcctgagcatcgacgtgatttactcgtgcccttccttgatactgggtcttgttctgctggctaatggaggagggcgccttgggggcgggtgttgaggtattcttggagccattcaccgagttggagtaagcaggtcctgatgccttcaactgggggcagttgttcttgaagtgactggggtctccgtagtgctaacatgcatttgctggcggttggttgcttgcaaccgagggggcatgaaaggagctcttactctcctgactgaaccgcgatggagtgggtccagctggtctaatgaagcttggtcccttgggtgggaacccaaaggatcgagttctctggtgccggtcttgctgctgagctcggaggacttggaatttcctcttgaggtgacctttctcttcttccattgccctttacacttgtatggctttgtttgagaggtgcgagaagctgaggaaatcttggctggctaggatggtcttgagttctggtatgagccccttcaaaaagcgggccatcttcttgacttcggtgctgacatcatccggcgcgtagcgggccaattctgtgaatttgtgcacgtattcactgaccgatcttccatcttgagttagttcccggaattcatcttccttgagctgaacgatcccttggggcacatggtgctctcggaaagcagtttcaaactctgtccaggtagcatctctgatggcagcgttgaaggtatcccaccaagctaaggccattccggaaagttgatgagcagccaattgaaca

SEQ ID NO: 177309 - DNA, 318 bp, Zea Mays
cggggaatgggaagcaacaaccatcttattgtgcaacaagggtgagtgttggtcacttgtcaaacaagatctttctcaaatttcaatttggccaatccttggatgaggccaagtgagctcagtcgacacaaaagatcaaagctcaagtgacctaacctcctatgccacttccaaatcaaagaggaagatcctgccaaaagatatcgagaaggactagaagaatatgtaaaatcagctcgaaaaactcgactaaaagaagaaatccgacaaacaagatccctctgagcatccaaaactcgagaaaggccctttttaaag

SEQ ID NO: 177310 - DNA, 863 bp, Zea Mays
gaaaattctagcaatagtgaaagcttcaatgtggaaagtggaaatgaagatgccgaagatcggccatggagaccgagtcatattgtctttggaaaatcaactattaaacaagggcagatcgatgcaatgagggggaggtaattccgtgatatctcaaccgtgagggccagaagggagaataatgttcctcttcccgaagctgacgtagtggtggttttcagaagcttcatgaaagttgggctttgattccctctggacaaaatgttggtcaaagttctgaaaacctttgaaatttaccttcatcaacttactcccgaagctatcgaccatgaggagccaaggactggaaccagatgcaagatgcttttgcaacattcatgagttatcttatgagacgaaggctatcggaaaggagtggtatcacaacaactttggttgttacatcttcgtgcctcgatctgaggcaagctacccagtgcctacgttttagaagaggtggtcgggctcctggatgcaggaatggttttacgtaaagaatgacctaagtcagagggaggatgtgatagggattagccctatatggtctcgcttcgggattaggaggccagccactgcacttgggaatgatgtgcaagcatgccaggcagctttcaacacagtgtgcacctacattggctcatgagagttggtccaagagcacattgcttatagagtgtggccacttacaaatgggtgggaaatgccgaaggaggttgctgttggctctagccaaggtggtttagtctacctgaagtataccttcaggtacaggagccaatttgatgaaccgaatgatgactggctaaatgccatagaagcgacta

SEQ ID NO: 177311 - DNA, 302 bp, Zea Mays
caccgactccgccgagatttccatttccctaacatgaaacaattggtgcaggatttcgttcgggagtgcagcgtttgccagcgttacaagtcggaacacttgaatccggcgggactgctcatacctctgcctgtgccgaacagtgtctggaccgacataacgctggatttcatcgaggcgctgcccaaagtgcgcgacaagtccgtcattttgacggtggtggaccgtttcagcaagtactgccactttataccactggcgcacccgtactcggcagagtctgtcgcagaagctttcttcat

SEQ ID NO: 177312 - DNA, 573 bp, Zea Mays
gtcctttgtcgttggtcaaacacggaagactgccagtgccatgcgatagacgacggacgaactaccaaacttttttcacaagctccaccgtccagatggtccagacagagtgaccgaaacttcaatcgcaggggtcagctcattggctccgaacactttctagcatgaaaggtttaaaccacctagcgtgattaaaaagtttaaacatgttataatgcatcacctgacgacatactctcggggccctattgcatgcaaacgcttcctagcaggggcggacccagcacccagacacctcaggcggtggcctaggctgcctcgcaggttctgatagatagaagcaagtataatgtgtagaaataagcgagcaacgtagcatgtacacggcgaaagtataggcacaaaggatcacaatgtaatctcgcctaggctgtctctaaatcctaggtccgccactgcttcctagcaaccccgttcagccaaggcatggttatgcaatgcccccagcctcaagtcacaacagcatcggtatgcttggactccaaacaaagcatcgcagcgaacaggtccgtc

SEQ ID NO: 177313 - DNA, 412 bp, Zea Mays
ttcattactccgaacccgagggactcttttgaaatgttacgaggccgaaagggtatcagacgagctgagttcgtccgatcaacgacccatcgctcagattagattcctatttctattgaaccggtatgcgatatgagtccaaggatcacagatcaatggcgatgatatcacttagttgagatccaatcacgagcctccgatttagattggaccgacgaccctatcataggacgaaacgttatctaaagtctaatcttatacatccgtatggatatcaacggtccaggtgtctcctccctcaaccccgacggagcaccgcaacagcgtgtggtcactgttgtctggcacgccggcgcggatcacacatatcaccccacagaaccaaggagaatgcaactacacacggaacgaa

SEQ ID NO: 177314 - DNA, 422 bp, Zea Mays
agctaatatctgttggtaccgcttttatgaagaattcactcctgatgatcgggttgcggccatggcatcatcctccactgctgctgatccaaactggtaccttgacttcggtgtgactgatcacatcaccgacgagctggaaaagctaacagcatgatcgttacaatggcaatgatcagattcgggcggctaatggtgcaggtatggagattactcacattggttattctgttttgcccacttccttccgccctctgcacctaaatcatgtccttcgtgtccctcatacccataaaaatcttgtttccattcatcgtttcaatcttgataataacacctttattgagttccatccgttctttttcttgattaaggatcaggccacgaggcaagtgctggtgcgcggaccatgtaggggtggc

SEQ ID NO: 177315 - DNA, 325 bp, Zea Mays
actacagcagccaaggtcttatttcagcttatgagacggactcttctgccgaggatgggatacagggaggctaccacacatatccagctctggctccttggtgccttggtctctcactctgagtttgacgttgttgatttccttatttgtgagattgaggacaccgtattggatggtatgcatgctcgtcgtcagctgccatatgctcactacttgtgccacatttttgctcagctgattcagcctccacagttctagggcacacttgaggcctcacgccttgtttttggatcctaccgtcctgcgcctgaggctcctgtgccag

SEQ ID NO: 177316 - DNA, 386 bp, Zea Mays
cacgtgtgggtttgcttctgccatggttcaacggccgatttgagcaccttagcgtgcagatcttggaaaaacccccgtgtacggtctcttccctgcaccaaatcctacctttttgatgtgagtcccaagtaaggatacggtcggggtagggagatataggggtgagaagttgtctttgtcctagctgtccaaaccgagacaaaagccatgccaagtcatgtcaaacgacttagggttgggttcaaacttttccagggtgttctagaggtattttggcgccactttgtcaattgggtcaagtggttttgaagtttgaatgagggtgaacatgtttgatctttggaaaagggttggttttggacttagaagaattctgatttttctct

SEQ ID NO: 177317 - DNA, 480 bp, Zea Mays
gtaaataagttcgaagtcgcaaaaataaaacataaagttagaagctattaagcaatacctatcctcttttctagttccgcggttttttcagctgccttcatcgcttcttttgcatcatgagaatcgttttcactcttttttattatctcgtgcgccatctttcggccgccgttctcccagatgtcagtaaagaattttccgcccactaagttggcttcggctgaagggtcttttgaatcttcaatactaaaagtagcttcggattgagccaaagttttcacatggtcgcagcctgatttctccaaaatagccatgattcctcgggcacctgagaaagcgcagatatccccgcgaccactcaaaacttcctcaaaagcttcagcttcgttgctgatccaatcaatcgggccttcaagatcacctcttacgaagttgtcttcgttagagagtgcgccaacattggcgaagctagtttttatt

SEQ ID NO: 177318 - DNA, 1027 bp, Zea Mays
gttcagggtgaagagcaccgcggcggaacccgctgcctgaggctgaggtgtgtggttctcaggccacagcgagccggctgattatataatctgaacggcagccttgtcgtccataccgccatcatttgaacatgctgcatgatagagttcctgcttgcttttttgtcggttctttgattatttgttggctttgttgttcttttttgggggtcgcatttttacgcatttgttacatggaaaccatatgtgagctagcgatggcttctatgagatagccagggtcactggggatgaaggtcctgaacaatatagttactgctctgtacatgtgccagtatatttcatccatagattctcccttgcatcaacatgttgattttagaaagttgtgtctgccgctgccgacgccgtgtgcctaatccaatgttcttctgctgattccgttttgtcgtttgccctggggcttttgcgttggatttggcatagatgaggacgagccatggacgtcaggatcttcactcctctccatgcttgtctaggggtattgttgtctcggtcctaaaacagacgacatttttttgtttaactatatattgtctgcattttttaaataaaacgaatagttaggtaagatgtctaaaaagccaaaaaacaccatgcacaacaaagcatgcaagctgtagatatagatagacgggcagctgcggaattgtagtcaaagcatgcaagagattttggtcagagaaaaaacttgtgttctcttttagttattctttctccagtttcacataaacttgagtcaatactttattaccaccattgttatatttttggggggaaacgagagagataagcaatgtctaaatatacttgcttacaaagtgcgcagatgtttagtacaaacattaaaattacaagactattttccccagtagatgatacgggctgattcatcactagatgacatggtgatgaactgatgatcctccctgtccctatccttagtgaagggaatagaagaagtgag

SEQ ID NO: 177319 - DNA, 636 bp, Zea Mays
gtgctcccaccagctaacggcagcctgtgtgcagaggacaacgcccgtgccttggagactcctgcgggcttactagcaaataccagacaaccaccttgctgttggcgcctgtgtgcataggacaagctgtggaaaatgtatcatcaccatcgtgaattgcggtgcatgagcttcatccagggaattgctgcattgtgcagagtcagatcagcagcaaagcgagaacactcggcacctgatgctgcgatgacaacacagttgccttctcctttttgaagattcagttgccttctcctgtctggctgatgaattgaattgataaataaaagaatattgttgcttgaggccatataagaactagaattgagactggttgtttgaatgagaattgagaatttaaattaattaaattacattgaatttgttggggtcctccctaaataggagaacacccttaaaaaattaaggtatgctgctaattatgatgagcacacagtattctttagtaaaaggcgaaagaatagttcgctttgtgctcaccacacagctccgtgttttagtctggtgacaccaacccctctcttataacttgtcccgtaaccctatgtctatcagctccacgataaggtactaata

SEQ ID NO: 177320 - DNA, 1513 bp, Zea Mays
ctgaaatatagggtttttgcccaaagtgaccacaacaagtttgtagcccaattataggaaaacaactttgtttaaggattcaagccatgatcttatgagaaatttggagaaaaacccaatcaaagatggactgtcaggctggtacagtctgaacttctgatagacagtgacttggatctaagtttgagagccatttcgactaagatccagagagaatctacctagggttgctataacaaagttgtagagttattaaagaggaacaattttgttatgggtgtttgggtttggtaccacatggaattgggagaaattggagctccaaagtactctgtcagctgctctgaatagatgttcgccatggtacagtaaaaataccggatcagaccgccagcgcggctgtcttcaccgtcgacgaccgatctttgccgtgattcgcgccaccgccgtgtgattcgtgtcgccgatgacccgataagaccgccaggtaaaagccaccccctggggataactccggtgactcaccgtgactgcctttctgctttgcggttgtagccgataagctcaccgtcgaccgccgcctctcggccgtgtgccgcgtggctcaactcttccaccatgtcgccgtgacccgctactgctgtcaaatcggcgccggtgagcttgccacggcgttagccacgaattcaccgcgccgccttcttcctcatctccgaccgccagcacggctcggctaaattgatcaccaccgctcgcaggctctataaattgaccgtgcccccagctccgccatgtatccaagcacctactgcacccacctgcatctcaaatccctcacccgcaagcacgaatttcggattctccccaatccggttctaaaacaccgtgaactcaaccccgtcgtggtcagcccaactccggttagctcctcccctctgctcccttgtttaagcattcttatgcgtctgcgatgcttgccgagccactgaattgaactaagagtcctctggtcgccgggaacacaaccgtatagccgccatgatcacggccaccgtggccagagctacgtagttggtcttagttgcaattaggttgggggaaatggttagggtagccccgatttcatgtctctcgctcggagaacccagtcgttgcctcgttcggccggtacaagtgctcgccggagcacggccgcgcgtgaacagcgtcagggacctagccgtgcgaagaaataggagtcggaggggtcttctgtaaaccgttagtggcccagtgaaacagtaaacaaacttgattcgagttagctattaaaccaagggcctctgtgcaaaactacctcaggctcgcgcgcgtgggcatgtttctgctgttgttgggccgacttggactgatttcagcccaagtctgttcattattttcctttttctatttttagccagctttagaaatctgttaaaaatggtagaaaaatgctaaaattgtgaaactaattttcctaggcttgttattttcc

SEQ ID NO: 177321 - DNA, 1174 bp, Zea Mays
cacaggatctatattatatttgctccaaaatgcatcttctgacacaacaaatgtgaagtcctcgagtttgtatttgttgctagccaccatgtaccactcatgcattctaatctccggagtcgataacttagaaagttgcaccgtcgtcaagaacggcctcccattcacaaatttaggaggaacatcctccttcttgtatatcgggatattgattttaagacgtaatgattctcgagtatgaatcattccatcttcttcccatacttcgaaattgtctatttgggaccgtgtgcgtactccacgagatgctgattccgcttttgattgatctgtcataactctcttcaatttttgcaggtagcgtgtcattgcttctgacggtttcttgacattgtcagtggcgattcgctgatgaattttctttgaagtagttggcccttcaatattggtgtcaacctttgcttcctttctgatgtccgcatcgatattctgaggaacaattttgtctacgtccccctcgtcgagttcctccgcaagaggtgatatgattgtttcaacggtttttgtggaggccggtgctatattttcctgcaccatggggtatggaatgatcgaactatctttctgttgcattggtgttgaatttggcgttggtgacttatgacgcgatagacggcttaagatcggctcatcacccaacttaatgtcgcctcgatgccaaaggaccaactcgttcattgcctcctgcaaagttatgatcccctcaactggaaagtctatctcccaatcttcacaaccactgtctgtgatctctagaacttggaccacagcatagtgtggcaggacaggattatcctggtagttaacaagtcctggttttaccaaaccagtagcatcttgttttgtttttgtcccagattgattgattggaatatgaagacaacaaggcttgtcctcaacaatatcgtctacagggtacttggtgcccgatacgaagtcttgcacagatcctacgctgctagggattagaggtggactcatgtggcctggcttgagttcacatgatatgcatcgtgttttcttcattttcttcatcacgtcatcaatagccttttgtaccctttcatcaattgtctcttcaagggtccttttcgacttcttgtgtttcctatat

SEQ ID NO: 177322 - DNA, 1304 bp, Zea Mays
ggggtggtggtgcactacaagaacgtgggtacccatgaacttaaccttaagttcgacaagtccaacaaacttaattggctaagttcatcgaaaaatcgtcatcgactatattagttggtgaaccgacgaacttaacataagttcgacagtttatatagtaagtttgatgttttgcacccacgttctttacacagatacctgtagtggtggaagttgtagtctttctaggtggttggataagtgttggtcgttttgttggtattattgatagggttgatagatttcttggtaagggtggtgaacttgagattggaaggtgtgagttatggcctttggtagctgatatgggtgacccctcgttacccttttagcttccattctctctttggtttccttggtggcgcggcagtccctggttgagtggcttgcgtcttcatcgtgaaaaacataatagggcttgcgatcacgactaggaccgcgtctgcgccccttgcccctgggtgccctaccacctcttcctagttgctggctgtggtcatagttatgaggggtcctcaaattgctggtagtggatgacgttgttgacttgctagttaggcgccaagggctactatcctcttgaccatgttttggagtttcctaggtgtgagggctccctcggtttgcgttgtgccttgaccttgcagtaatggagatcctcagaccatgcatacttctcgaatagttggtacagttcttgaagggttgttgggggatctcgagtgcaatggatgtagaactaaccggcacaaaggccgcttatatagagtaatggatggcaattctatcttcaaatgatgttagctgagatttgagcgacaagaacttgttgtaagtcatggaggctctcggtttctagctgcctgcacagtgatagctctacgagggcgtcagtctacgacatgtaccttggaaattgaggagaaacttctcccaaagggccgcccatgagtcgattgagagcgatggcagcctagtgtaccatgtcagagcggggcctttgatggctattacgagtgacttcgccattgcattgtcgttgccccccgacgaagccatcgtgacctgataactcatgatgaattgcgaagggttggcctttccattgtattttggccaatttcctgctctataattgcttggccaaggtgttgcttgcaacatggctgagagtgggcatccgttgtcagtgaagttgaaagcttggaaggcatcattttgtggagtctgtctggctttgtcgaagttatttggtcttgctttgc

SEQ ID NO: 177323 - DNA, 301 bp, Zea Mays
gaaatggccatgaaccggtacaaggccggcctgccaatgatggcattgaaggggaggttaacctccacgacgttgaactggacgttctctgtgcggaagttttccttggtatcgaatgtaaccgggagtgcaatgctcccaaggggatacaccggttgtggtcccactccgaagaatggacgagagggtcctagtcgggaccctgggatctgcagctgcttgaatgcagcatggctgatgacgttgagcctagccccaccgtcaatcagaacatggtgcagccgcatgttggcgatgacag

SEQ ID NO: 177324 - DNA, 632 bp, Zea Mays
gcgcgccagcccacttggcctttgctcctgcccgccccatgaatggatcgggcgtcgaccgatgggacccgcccgctatgtcgcgcgctcccgcttccttgctgagtctgatatgtgggaccagaggtcaggatacatcaatccactcgggtcgctgctttggggaccccacgcgtcatcgccatctcccaccttattagctatccactcagctatctagcgcttgggccttggccgtcagagtcatccctcctccccgcgaggatcgcaacaacctcatgcgcaatcggcgacaatagctccaccaacctcgcgagcaccttataaccttggagaagaccccctctattcccctctcaaccacctgcgaccccgtgcccattcacagctcccactttctccatgcaaactccgacgcggaaaggtgtgccgccgcacccgatggcgtgctccgtcgacgttggaccctcggttcctattcgcgaagctttgccaggtcaccagcaatgtgttcgagactgtgccgggcagaatttgaaggcggtggtcgggaaatttctcatcgacgattgcgaccgccgtgcgcccactcttcatcgtgtctggtccaccccgacccacaccatcgcccg

SEQ ID NO: 177325 - DNA, 567 bp, Zea Mays
gtagagcaataaaaggagagcaactttgatgcagacatctcctgttgttgttatacaaaaattggagaaaaacctactcaaagttgctctgtcagaactgtttcagaaaactgaaactgaactccaaatagaaatggtcagagtgaaatgtgaccggattgcaagcatcatatctttgaatcccctcggttttgacccaaatgtcctgtagaaggtttgaagactgttgaatcaagaacaaactttattaaggaagcttgcccagttattcacaagaatcaagagaattaatggatagaagggggccggttcaggcgactaaagaagatgtgccatggtacagtgttctgggtggatcagaacgccagctcagctcgccgtcgttgatcgccgtccggattcgtgcacggtattggatggataacgccggggaaagggtaactcatacgtggcgccatctcccgagctcagccggagttattcatcggcgaccaccgcatcagtcatttccgccgcggtgtcctttgcatcgtgatcctacctcactgtaccactcctctacgtgct

SEQ ID NO: 177326 - DNA, 533 bp, Zea Mays
cttcgagagccgaaaaaagaaaagactaaatagggtttttgatgctattggatttgtgtaccctgactatcgctacccgctgcggggtcagaaaagaaagggtgcaacttctggaaaggctgctgcttcgactgcttcaagcgagcctgcaccgaagaggaaaaagttgaaggtccttacccaccgaccgcgctacattgaaccggccatagtgtttgaatttggcggtgaaacttcttcagctattgaagcaagaggacctgctcctacgtagaggattgaagagccggctgcaatgccgaagactgacaaaattgaggaaccaagaattgaagggacaaaaacattagaagttctaagcccttcggcaagagtggcggtgccgaaggcacaaaaaggtctagcagcgaccccaagagaaaaaggatggccaatgtactagatgtgatggagacgataaaagcttcaagctctactccagggaaaattgccaaggcttcgaaagtgcaaattgaaaccgaaacaaaactgac

SEQ ID NO: 177327 - DNA, 610 bp, Zea Mays
aaaagaaagaagaaggacatgcagcggcatgatgatgtgcttgtatccagaaagggaggaagccttcgaccgaaaagtccaccaaccattttaagaagatgctcgaggctccatgttcgaaccaccaccaccccgtctagcacacctacaaatattgtgggttgctcagtaagttcctaagtaaggaggagccatccaggaggggccctgagcccagagagacggtgtgcaggaaagaaaaggccctgctttccccgacgagaccagatgtttgctgatatttggcgaccccaactactacatgtcgaagagacaccagaagctcgaacgacgtgaaattttctaggtttagtaagcaattcaaaggccctgtatccgatcttgggttgatattcgataggctgaaagctaacgacattaagctgaatcccgagaaatgtgtcttcagtgttttagggggcacgctgctgggcttcttggtatccgagcaggggattgaggcaaaccctaaaaggttgctgccatcttgaacatgggaccaataagggaccttaaaggggtgcaacgagtcacggggtgcctggcctcccttatccgcattatttcatgc

SEQ ID NO: 177328 - DNA, 448 bp, Zea Mays
tgcccgtacgcgaggcgatttcaggcacccgcagcacccggattgactaccgcgatcctaggcggtgctccatgacacttcaacggagctgaactgtcgaggaactgcggttggactggcgctgttatctccctcccgaacggcggcatcattaatttgcgtggcacgacatgggcaggtgaatatgttaggtctcgaggagggttggccccagcgcccttttatcctggtcagcggaggatggcgcatacccgcatgcaccatgtgcaacgaccccgcccgagtctcccggcatcaccgcgagtccacgaaccatggcgacaagaaaggcagagagtctgtccacgcgggtccacgggatggtgacgataatggcacaagggcacccagtggttgaccgcactggcccacgtgtcggcgatccgccagaactgcgcgcgcgggaggg

SEQ ID NO: 177329 - DNA, 1884 bp, Zea Mays
accagaatccatgagtcatatgatctctaggcctctgacctacttagtaaaaggtcatagggtgagaaaatggtgcaacaacaggtttagtaaattgcgaaggatactagtatgagtcatttactcaggaaaagtgttaggaaaaacaccagacatcctaggtcccatttgaggatagtgatcatcacaaaagggaaaacatggtccactagacctataggactttaaaaaactcctacgagatccatggtcatattgcccagaaccctgttaagcacgaccattgtgtggtcttgtagcctaaggactagcaccttgagacattgcacctcttggcctaacaactcgcctctaaataggcaatcatgtatatcattgggaggatggtagatgttctatttgttcacctaaaatttgtgtcactcatcactcttctctaaaatagaactcagtgaggtgatcattcctatggcaacatagtgttaccttacctctctcttgtatggttggttcactttcttgtaggtatggttcacgcttggtggctttttggctctaagaaggtatcctaaaaatgtcaagaagtttttcaaatgggttcctgggatggttaggtttcggaatccacacatgcttctaatgtggggattttggaggttctttaaacactccatcttcagtattaaacttgagggtcttatgtaaaatgattttgattagtttaggggtagtagatgtggttggtctctcactagacttcaaaccattataatatcccaattttcatacagcttgttacacccattgccctcaacaataaagcctaactctagtccaccaacaccacacttgaattatttgaccatcaccctaactatggttctctactggacactcaactcaagatggtttgaggtatgtgttttcttccttagaatgcattttatcatgtcaacaagactcaagctctagcactaggccatcatacagtgcacacttagaagcaggcagagtatctcagctagcttgttcaaaaaaatatcatatgattcttctttgctagcttagaatgcaaagcaggacaatattttcatatacccaacaacctaggcctagacttcaactcatcatgctcatcaagcaaagtgacatacatggttgggaaggtggatatgttttacatgtatatatcataagcatcacacttagtctcgtcaggcactatgacaacaaccttagcaaactcaagctcgctaaacatattgtctaacttggtcttaaatgcgttcctctattgagtaacatgcttaagaaacttatcatgactaagcaaggtggtattcatagcaagctcatttgtggaaagagataccttagatctagagtcaccgttgttgtcgctccctacctcatgccaagcaccatggtgcagaatcatcccttggtggagtcaaaaagtactagtttatatcttgaagagtatgaggagtgatcatcactagagtcgatgtcaaggtcgctgagggaggtgaggaaatcatgctcttgggacttggccttattgaggtacttctacttgagcgcctcattgtcgaacctcccttagatgtgtgcttgttttatgtgtaattgcacttgctaatggtgtcattgcccttcatattggagcagttggtgatgaagtggttggatgctctatagttgatgcaaccttccttctaaccaccacaccatcgatttatgcggctgttatggaacatcatgaactagttgatgaccaatactagtgtgtcgtcattgagtgcctcaacctgctcctctataacaaaaaccaaagaagtagagcaaacaaagcaaatgaggggtgaaagttgtctagagggg

SEQ ID NO: 177330 - DNA, 573 bp, Zea Mays
gcggtgtaggccttagcataagttgcggcgtagtctaatacgctgtcgtgggtgtctagacggtgtcatcctgtctcctccgcctatctcctcgcgcctcgggaacgcatgaggaacagtagaggccataatgaaaggcgcccaaatagtgcattgagttaatggtcttgccttggtaacgtgcgggcaatagtgtaccccatgtgttgtagactaggcgcgttgtgtgcattaaataaggggtacgccacatgccactggcgtgggcaagtgcacatcccactcgcacctatagttggtgggacctaggtcaaagacttatgtcagacgccgcccggtggcttacgtcaggtgtcctcagccacgtgtcagcaccagacctctgcttaggtagggagtaggcctaggaagatgtggtagcgtggcaccctcggatccctcctgacttgggatccagaccatgcttgagggggtccaggactcatctacaatgatccggacatgtggaggcaccagacctcacccgacatggggtccggatggcacacgcggggttcgggaccactcccaaaa

SEQ ID NO: 177331 - DNA, 967 bp, Zea Mays
aatgtggagaaaatctcaacccaagttggactgtcagactgctaaaggactgaaatcaggctaacagtgagctaacagcaacttcaagcccaatttcgagtatgatctaatggcttttagtggcaacaccatattgcaacatggtatatggtacattgctctacaatttttctgcagagattgacacgggttgtcattagaaattgagagaggattgggctccaaaattgactgtcaggcgtctgaaccgaacttcaccatggtacagtaacccaattggggatcagaccgccgcgacagaaaaatcccgccgacggcgacctccctgcgcgaacagtcacgacgcctccgtgattcgtgttcactggcggttggataactacggcggggaggggataggatcgcgtcgtggatattttcgggtcgccgtggcctcgcggtattccgaccacgtgcatcgacaacgtggccgtgcggccgtcgccggagtttgcgtcctccgccgcgattgtgccacgcttccggtcagtgaccacgtcgccgtaaaccataatcattccccagtgactgttgaggcttctcatcccgtgaactgccacgaatcaccatgccggtgactcacttcctctgaccgccaccgcgctccacccaaattcccggccaccgctatcgtcccctataaaattgaagccaccgtgagctccgcaaggtcatcacgcacccagccaccatgaatcagcctcaatcattcactgagagccgcgaatctggagttctccccaaattgttttccgccgccgtgaaacccacccccccccaccgtggccagaccactctggtaaggttccgcgcctctcaagtattgttttagcatctgtgtaggcatgtaaagctcaccgtagcatccgtttgcccaatccgggcctgtataattgggaacatgggatcgacgccgcggttctcgccg

SEQ ID NO: 177332 - DNA, 378 bp, Zea Mays
aaatacagacacaggctgatacgcgccggtggctctaatcattccatgccaccccacccctagatttgcatccagaacaaatacactaataagtaagccggccgaaacgcagcagcagattcccacaatgatgaggcgcatggaaggcggcatttcggcgacccggggggcaagctaaaaagctgggcatccgagcacgggagcatggcgctcaaagcaatggtccaaatcagtaccaaaactaggcaacatgacaagccaacccaacccagcaaacacctgaaaacctacacggcgccgctagcggaaagctcaggagccatcgccatcgccgccgccacccctgctgcagctcttgcccccagtcccccccccccc

SEQ ID NO: 177333 - DNA, 425 bp, Zea Mays
gtgaccctggaatctctcctgtgagagcaaggcccgcgaggtcgagcgtgacgagcatctcaatccctccaagctcagccggaatggaaccggaaatgcgagggttgcccgcgagccggagaacggagagcgaccgcagtgtcccaatcacaggcggtacagctccagcaagagcattcgcccccaaatccagaaccctgaggccacggcagttcaccacgctctccggcaccggccccgtgaggcggttgccggacgcgtccaggtacgagaatctggtgccgcaagtcgcaatgctggggatttcaccgtcaaaggcgttggaggagacattgaagtaggtgatgtttaccgatgcaaggagcgcaaagggcgcagctccggtgaagctgttgctcccgacgtcgaagaggtcaatgctgccg

SEQ ID NO: 177334 - DNA, 387 bp, Zea Mays
ataatcttagctcacaaaccaagctattagaaatgttagaataggaagctaagtcagagttccggtgagcagggacctgtgaacacaatgatacatgccttctcttcactaatcgcgcgcgtatagattagatcgtacctcgtgtgtgcttagaaaaaagtacgacaatgttggttcgtgtgttggccccttgcttgttatgtgaaaggtcacaactaataataagttgttgcgccccccgatcaaagagtgatgcttggtccaagtcaatattctatccaagtaagatgagatgaacctaacattctctcccttgatctcattcttaaacttaatcttttagcttacaatttacattcctccatatatcaatataccaagaccaag

SEQ ID NO: 177335 - DNA, 1522 bp, Zea Mays
ccggagcttgttggtttactaaattggattttagcgctggataccatcaggtctgcatggctattggagaggagtacaagacagcatttagaactcataatggcctgtatgaattcatggttatgccttttggccttacaaatgctcctgcaacatttcaaggacttatgaatcacatttttgctgatttactaaggcatggagtgctggtattcatggatgacattttgatttacagccacacattacatgagcatgagctgttgttgcaacaggtgtttcagactttgaatcaacacaagttcttgattaaaagaactaaatgctcttttgctcaaccatccatagaatacttaggccatgtgatttcagcccaaggagtatctactgaaccctccaaagtggccgcagtcaagaactggcctattcccaagaatgtgaagcaactccgaggttttttaggtctcacaggatattataggaagttcatcaaagactatggaattgttagccgaccactaaccttattgcttaagaagggttcagtgttccggtggtctgaggaacagcaagtggcttttcacatgcttaaacaaaagatggttgaagctccagtgttgatggttccggatttttctaaacagtttgttctggaaacagatgcttgtgatctgggtataggtgcagttttgatgcagagtgagcatcctgtggcatacctgagtaaggcattgggaatgaagaatcaggcgttgtcagtatatgagaaagaatgcatggctatattgttggcagtggaaaaatggaggccctacttacaatatcaaccgtttgtcatcagaactgatcatcacagcttgcggttcttaactgaccaacgggtttccacccggttgcaacataaggcgttagttaaattgatggaccttcaatataccattcagtacaaaaaaggatccacaaatgcagctgttgatgccttgtcgcgttgtcctgaccctccagacatttatgcagtttcgaaagtggttcccacgtggttggaaaaactgcagcaaggctatgatgatgatgaggaaactaagaaacttattacagctgttaccttggatccagacagtcataagaattatacattaacttcgggtattctgaggtttaaaggccgtgtgtgggtggggaataacgcattggctcagcaaaacattttacaggcacttcattcaagtgggattggaggtcattctggtattcaaggtacctatcatcgtgtgaagcaactttttgcttggcctgctctaaaaaaatcagtgcaacaatatgtccaatcttgtgagatttgtcagcaagctaaaacagaacatgtgaaatacccgggattattacagccactgcccattcctcaacaagcttgggagatagtgagtttggattttattgaaggcttgccatcctcagaaaattataatactatccttgtggttgtggataagtttaccaaatatggacacttcttagcctt

SEQ ID NO: 177336 - DNA, 498 bp, Zea Mays
tctaggggctaatacacaaaatcttcatttatttttattttcttgacactgaaaatggacggcaggttagtttttgaaaagcacggggtcctttttgcattttttcgcacgactgaaggggtatatgttcatgtgagtcgttggatcagggttggattagcgagattaaatcaaatcctttgtgaaccggtatgcacttgtggtcgtctaatcgtgatccaaaggttcagatcttaaagggatgcgatctaatcttacctgcccgatcagagttggacggctacgacacgatccaccctattctaatctcaaatgtccatacccggatccacggccacaacacgcttagctgaaacggtatgttacttctaatcgtgaccggatcagtggccacacgattgtctctcccccacgcccaatcccaacgacggcatagtgatctcccacggcggcgttgcctcggcgaacacctgctcaggtgatcgtgtgaacgaaaac

SEQ ID NO: 177337 - DNA, 530 bp, Zea Mays
cttgccctgtgtggccggtggaggagtaggcagcctctccactcctgcaccagcgacccttctactgcgtcggggtatcacctcagtgactgaagccttgccctgtcgcggccttctgactggcgccctcagaatcccaccagctggtctggtcagcttattgatgaactcttttgcacccgaaggggggggggggaggaggggacggggacgcgccaagcaactgactgggttgactatccttcttcctcctctgtcgaaagtaagtaatgatggggcctctccgagataggcgactcgacgttcgcgcctccaccaaggctgacatctgccctcccatgtcgaaagtggcccgagacggagatcccaggggtgacccctgaattgcctgctccttctcgcatccacccaaagagcaacaaactgccggagccctcaagggtgaagagggggaagatggaactggcaggggggagtgaactgggcaaccaccggacagccccgacgccccaacctccaccatgcaggcc

SEQ ID NO: 177338 - DNA, 479 bp, Zea Mays
ccaccagatatcgtcctcaatcgtccacctgagagctcgaattttggatttcccccaattcggtttccgccgccgcgatgaacacctccccgtggccagcccaactcaggttagttccagtgtctctgttgtttgttctagtgtccctagaccctcctcaagctctacgacccacctaatggagctagaccaccctgggttgccgtgaacgcccgtgttcttccccgatgcccgcggtcaccgtggcccaaagcaaaccgagtagccattcttggaattagtggaggggaaacgctcactagatcttgaatttgggttcggccaaagaggagcgccagtctttgagcaatttgtccgatgcgcgtgctcgacggagctctgcacgacaccgtccgccgtcgagggtgtcggcgtgtaaaagaatagaaacgcaggggcctttctgaaactgtcagtgactccccgaaatagtgcgaggg

SEQ ID NO: 177339 - DNA, 294 bp, Zea Mays
ccggcttttacccattttctcccaacggctgtcagcttttggggatcctttatataccccctcacactctctctctcattaattcctgtctctcacacgaatctttggctgaccaaccttcaaacaagagcattcacttcacctttcacacccgcaatcgcatctccttcaatcatttgaaggacccttggtgtgaggtgaactcgatcgaactcgctgtcaatttcttctcgattcttccattctcttgttcttgagctcgttgcaaacttaatcgtgtgcggatttgttact

SEQ ID NO: 177340 - DNA, 569 bp, Zea Mays
agaacgtgaagcaggggggtatggaccttttaatcctggcgcaaacaacgagatctacggtacacatgccacccaccaaattttatcctttatactcgatctccaccgtcgatccaaggaccgatgaccaccactcttctccctcaaccctgctctctcaacgcggagcacagggcttgtgcgacggcggccatggctggcaaacagcgccggtgccctggtacaccattatcatgaacgatcggttctacgctatgaataggacaaggcgaacggcaggggtgggtagttaccagctattgggccgcgcagactcccatcgacgatggatggagcagggctgtccttaccgagcccgacgagcaattgccaccaatttttggccaccagagctcaacgataaccatcgacacgctcctcaagagaatgcgaagctccctgaccccatgctccaccccgagcgacgacgttcctcagtttcccccgtggcggcgtctcttcttccgcaccgatccccccggttcttgtggcgaggcattacgcgttcttggggggctcccatgctggca

SEQ ID NO: 177341 - DNA, 792 bp, Zea Mays
gggccttgtaacttccaaacaaaaaggattttgttctatgtcaccacatcaatttggtagacctatggaaggagaataactttgctatagaaatcatcccttggtaccatgaagaattctgagataaatgagtttgaagttggactgtcagactgcttgaaatctgaaattcagattaacaatggaatggcatggagttagggctcgaatttaagcatgatccagtaagaatttgttttggaatactataacaaagatgaagctggtatgttggactacaactttgctacagaaccttggattggttgccaagcgaatttaggagaaaatccagcttcaagttactctgtcaggtcaaccggagatttatgccatggtacactaactgaagaagataccgattcatcccccctcactgccgacgatctctacgccgtgattcacgccgtcgccgcgattcgtgttcactggcgggtggataactatggtaaagtaaagatctgggcgtgggatcagctcgagctcggccgcggctaagcccgccgtacccccttgctcatcggtggatcaggtaagacctcgccgccgttgatcgatcactgtcgtgcgccgcgtgtccagacactttactacgtcacgattagtcatgttaggggatccggtgatcgccggagggagcgccacggtgaaaaccactaagcgcttgcaccagtgctccgctccttctccggccgccgcgcgtcgtcatccaaattcccagccgccgctcttgcttcctataaattgagcgcg

SEQ ID NO: 177342 - DNA, 1080 bp, Zea Mays
aaaaaatatatataatgaatattgcatcatgctggattttgattgtgcacttttgtttgaaatagaaaattcaaactcagattcaaaattgaattcaattggaaatagaaaacagaaaataaaacaaaaaaaaggagaaaatcctccacttcctgggccggatcgccaccatttcggcccaattgggcatctcactccccgcgcggcccaacaaccttgcgcaccagcccaccctattctcctgtttcgttttttttcttttctcttagtatggatgacatgtgggtccctcgcgtcggtcgcctagcttgtcaccttgggccgctgtcgggtggtctccacttgtcggacccattcttcttccccacgccgatcggaacatcgtttcctggcggtgggcagtgcacgaccacctccaacggaaccccgtgatccgcgcttggtggggtcatcacgtcggatcctccctcgttctcctgcaacggaacgcgatctcctcgccggtaaactcgcgccaaccgcggtcgccctgaccaactcggacttgccctcccccataaaatccacagctcgtaggtgctttccccctcgactcaacccatcgggcgctgcccaggtcatcaagtgaggcacgattgagagagaaggggggtgatccacgccaccgcgggcggaatctgcgccgccaccatgggtccaaatccctgttgccattcagtgcatgagctcgacccaatgagcttcaccacgccaccaattttctcctccgagtttctgcggcaaaatcggtgcaagggcgcgcggtgaactgctcgtcggatctccagggccgcgtctcaccgtgggcaggaaatcccactgctccgatctcggtacgaaccagtcacctgctctcgccttcatctacacatcacgtggcgtgtattggactatagcttgaggccggggagttagtcttgttttacccggttgcccgaactccggcgaattgcgtcgccgcggttccgcgcagccgtggtcgaggatggggtcaacgcgcgcaccgtgcgatggggaatgggcggtcgatcggaacctggc

SEQ ID NO: 177343 - DNA, 606 bp, Zea Mays
ctgaaattgtgccagtgcatgtgtgaagtttgtgtgtgcgtccgagagggtgagctagtgcttcttctccggcacaggtgaacgccggttgaagtccaacaagtggtaccagagccaaagagcgatccaccatgtcggctccaacaggagagcgttccctgactctgcctcgtcgtcgacaatggcgatcgccaccgcgtcgacgcaggaacggtggcgacgacgagcaagtggtggaaaggatcgtggagaggatctcgtcggctggacccgccacgtaccccatgctgaccaagacaaactacaacgactgggcgcttctcatgaagatcaagctgcaggcgtggtgcctctggcgtgccattgatccgggcgacgacgtcagcgagccagaggacaggcaggcgctggacgcgctgtgtagcgccgtcccgccggagatggtgcccacactcgccagcaagccaccagcgaggctggcgtgggaggccattcgcgtcatgcggatcggtgatgatcgcgtgcgaaagacgagcgcacaacgcgttcgccgccagtacgaggaactggcgctgcgcgaaggtgaaggtgtcgaggatttcgccc

SEQ ID NO: 177344 - DNA, 379 bp, Zea Mays
gtactaaaagtgtagaagaatattatcagaaattacaaatgggtatgttgcgttgtaacatagaggatggtgaggaatctgctatggctagatttttggggggttaaatatggaaattcaggacatccttgcttataaagattatgctaacgtaacccgattgtttcatcttgcttgcaaagctgaaagagaagtgcagggacgacgtgctagtgcaaggtctaatgtttttgcaggaaaatctacaccatggcagcagcgcatgactacgtccatgaccgaccgtacaccagcaccaactccctcgccgagtcgaccagcaccaccaccttcctccggcgacaaaccacgtgcatcttccacaaattcagcaaccaaa

SEQ ID NO: 177345 - DNA, 554 bp, Zea Mays
ctccgcgatacggctgatcagcgaagtcttcttgttttggtgcttgggggtggtttgggtggtggatgtttggctgatgcgggtgcggaggcgggagtgggggtggtacgacttgtacctcctggtggtgttggtatgcgtggttaggtggatgctgggcggggtcatggttgtatggttgtgggaggtggtgttgatgtgtgtgcgcgacaactcttgggttgtcggctggttgcgacgagacatcctatccctggtggccttcgtttccgggtagtccctcgttgggtgcgcgcagccttcgccgtgaaacaggcagtaaaatttgcgcggctgctgcgcccgtcctcggccccgaccacgagtgccattgccgcggccctggggggataatcttgacggcaaggggcctcaccagcggggtgctggttggcaatgttatgcacctgctgctgactacggctgtcccgaccggagtctaactgtgaaggtcttgtccatgttcggctggactgcagagggtccttgggtttcctctgggactcgaccttgcg

SEQ ID NO: 177346 - DNA, 615 bp, Zea Mays
ggagcatcggtggctcgctggccaggggagcacgtctggacctcgacgaggccaaggcgcaacgccagcgaatagggcacggcagggcgagctcgctgatcgggcacgaccagagtggtagcgccggcagggctgtactcatcggatccagggcagaacgactacacggagagagatggaaaaatagagcacaagacacaccttcacagaatgttgccttccatggatgccaatgaaactagacggtgccagttaaccaccgaaccagcgaggcaggacgacggggcacgacgacaatggcgcggcgcagcgagggcaagaataccacaacggcggggtgctatgcgcggcgactgcccgacggcaacaacgagggcgcgacgaacatcgacggcatagaggcgagggcgaggcatggcgcgcggtgtgtggagctcttggccgcagccttgctgggcggttttgagtgaagcgtggcaaggaagacgtcgaggcttcacaactaggactggcgtgggcgagagaaacagttctcgagaagaggagaacgtggaacgaccgaacggctgggtgcctggcgcgtgcagttctagcagaggccacggtgggtggttg

SEQ ID NO: 177347 - DNA, 456 bp, Zea Mays
caaaggacgcagtcctccaagtagatgatttcagacaatttttggtaaaatgcagaaaattaagcttcaatggggtatctttttggctttatcataaatcgattttttctctaaaatttctgcatttcgaaggagcctaaacatataaaactaccatgtaattaatccacattttccctcctgcgtttttttcatgtgaactaaaccaccttttccgagtaaaatttccatgtgaactaatccacgtttttccctgccgcgcaaatttgtcatgtgaactattttttataatgctcaattttccatgtgaactatgccccctgatacgtaatttttgagattttattaaatttatgcaatagtctatcacctgcaagtgtgtaagttgttgttgaatataccatagtgggtaaaaaattatacatatcagggtcaccaaatgaaaaactaagcata

SEQ ID NO: 177348 - DNA, 592 bp, Zea Mays
gtaaaaaaagggttgtcagtattctgggtaggcaagctacccgatctgtcaaggaggaccagaaagctttgaagaaccagaagactctttcagagccgaaggattcggctccctagaagcgaaaccttgttaggatatcttctgcagatacgaaggtacaggatgtgccagagaagactatgggtccttcaccctctgatgctgaagattcggaaattttgaaggcaatgactgaatccatgccatttgcactgctatgtcctctaaggatagatctgactagccttttgcaatcaaaggaagccgctccatctacggaggagaaggccggggggcagaagaaacggtggatgataaatgtgatgcaagctattgagcagatgtcacccccatcttcggtggcaaaagcagttgtgcctgttgatgccgaagataccgccggagctgatgaactcacaaccacaatgtcggaaatcgacagactcatatcggatgtggttgccgagaaggacatagccgcaatgcctcacaagggaaaaagaattgaagatgcctcttcggaagataaagattttgaccttcggcattgggg

SEQ ID NO: 177349 - DNA, 526 bp, Zea Mays
cttcacctctatgctagcaccttcttagggtcaactagcaatgaaccctaggtccttcacgtgatgtgcaggaccccaagtttggctctgcgaggtgccgattggtccgcgataggttgctggaccgttcgcggtaggcaccagaccgtccgcgatagggcggtagaccatccacgatggtgcaaagagctcttggatctcgccccccgggagggaccttgtcagggaaagattctaaggtcgtcatggggccgacaggccacccaagacacctctagacgatgtggagtcgaatagaggtgaagattgatatgtggaaactacgactaaagctacgctagatctactcttaagaaatgaatgataaataaggtaatgtaaataaattggttcgattggattgtgttcgggggttatcaatcggtcgtaccctttatatttatagggggggtcttcacccattcgtaggcgagatccaacagattcccacgaataggttaagataaccatgcttgggataagtact

SEQ ID NO: 177350 - DNA, 357 bp, Zea Mays
tggggtagctgacggccttgacctgaagtactaccctcgctgttcgaccgacagtgctggaggtgtgattgtctcgccagttggtgagggcaatcccaggctgaacatcatggtcaacctggccgccgtgctcaaatagagttggaccacgcccttgacaagttgggcaaggtctgagcagaagttgcggaattgcgtgctgagtgcgcagcacgccactatctggatggtggttctcccgcccctgtcgggattcagcacccttaccgttcacctccccgtggtcgctttgactatggtacccgagactgtaggacccggatagatttagatccatagatcgacagagtcaaagtc

SEQ ID NO: 177351 - DNA, 461 bp, Zea Mays
gtctatcacataacgctgccagatccactcttgcctttacattatcctttgacttatcaggaatgtccataattgttgcccacagtgcctcagcaacattcttttcagtgtgcatcacgtcaatgttgtgtggaaggagcaggtcgtcataataggggagccgatcaagccagacttatgtgtccacatatgctgctcaccatatcccacaaaaccaccttctgtattggccatgagcccatctatctgttgacaaatttcggcaccagtcatcgttgcaggtgggcggtttgtcactacgacacctttcgtaaagttcttgatgtctaggcggaatggatggtcaggagggagaaattgtcgatgtttatcgaaggacgaatatttgccaccctttttcaaccaaatgaacctgagaacctccttgcaaactaggcatgggaacttaccgtgaacacacc

SEQ ID NO: 177352 - DNA, 453 bp, Zea Mays
gcgacggagaggaagccgaaggtgccgaaactgctccaatctctgaagtgatgcaatggtcagggctggtagtatcggaggatgcacctgccgctgaagctgagcaggttgatgctgaagaatttgaatctgaagatgactacagcgtcgtgccatcaaaacccagtcacttggagtttgggaaatccaccgttaccgaaggtgatatgtctaagctgatgaagctgggctatttcagcgaagcaaaaaaggagctggttcattttggcggagaagagattactccgaagccggaaaaggatgaggtggtagtgttcaaaagcttctttaaagcaggattaagatttcctttgaatgggatgattggtgatgttttgaaaaagtttggaatttatcttcatcaactaactcctaacgccatcgttaggcttagtgtctatatctgggccctcc

SEQ ID NO: 177353 - DNA, 567 bp, Zea Mays
caataaaaacggtatgcactacatataagaatagcattgtgagattaagaatacatttgttaagttgtaagtacaaatgtgcaataatcatacttctctaaaatcttcaagaagtcattatacgcatcattttccattctcagtgagtcgaagaccacgcctttaccatgctttggaaagatcatgatacaaatgtacttgtcactatatagacatagacgaaaacacatgttaaggtcacgattgccataatttgtagttcaaaaccatgtcgagaacttacttaaagtggtgcggagctattattaagtccttgccatgttgtacatgattatacatggctcgtccaatttatgccgccattaccttcattttatttctcatatacatagacgaaatctatatattgaaacaattaatagcctttcatatatgaacattattttagatgctataaaatttgcatcaagctcatctgaagtttttttcttccttggaggcataggaggaaaatgattgtcatcactagaactatcctcctccccgctgccttcaccgaagctgctc

SEQ ID NO: 177354 - DNA, 687 bp, Zea Mays
gagaggtttagcatttttacttgggtcagtaggtagacataaacttctacaaattttgctaaccctagtcaaacaatatttctatttttttccctaatattaagttttcagcagtttcttaattaattcaaaactttagaaaagaatacaagaactaggggttttactatttttatctgatagttcatatttctcagagtctagcaaaattggtttgaccatttttggatgattattcttcaagttatgcatttattaagtcatctgccatattaaaagaaactaaattcggaaatggaaaagaaaacaggtttgcgctgaggcccctgggttttatctccttcttttctcccaaaacagtcctcggtctactattggcatgggtcactgacattgcacaaaaccccctggacctaaccgaaatctaacccacgctccctagctgccttaaacagtacccgcgacatagattacggcggcgaggcttaccggcggcagaagagctccggcggggtggtcagtgacgtccgggaggtcacgacggtcacgtcggtgtgcgggtcggcgtcggaggtggttggagctaccctggccaagagcacaggcggcgggggtcatcggtggctcctgttccggccaaaccacggcggtatagttcaattaaggtgcacgagaagctccacgggg

SEQ ID NO: 177355 - DNA, 506 bp, Zea Mays
cttctccttctctgctccactgaactttacagagctttacttctgaggtgcgggtttttctgactgccgaatcaagaatcttcactggtttctcacgatattgaaggtctttctgaatctgcactgtctcttcttcgaggtgactttctggtgcttgcaggcatttgcggagctgggacacgtggaacacattgtggatgtcggacatggattctggtagttccaggcggtatgccacaggtcctattcgggaaatgacagggtaaggaccgacgaaacggggtgctagctttcctttcatctgaaaccttttgacaccacgcatcggggaaaccttgagataaacaaaatctccttcctcaaatctgagctcccttcgcctattgtccgcataactcttctgtcgactctgagcttcaagtaaccttctgcggatcaaagcgactttttcttcggcttccttaacaaagtcgggtccttctagtgttctttcccctacattggac

SEQ ID NO: 177356 - DNA, 425 bp, Zea Mays
ccgccgcggtggagggcactaactccggctgccacgcggccatccctcctcccggccgtgtccgatcatcagcgccggtgacctcggttgtgccacgaccgaagcttgttactgcgggttagcaagcgtggcacccttaggagtattctccttgcgtcgttacaccggcgactgccacagttacaaccaccgtgttcttctctatctccggccgcccgcactgcccgatcaaatcacgcaccaccgcctaagcctcctataaattgaaggtcgggactgctgtgcaagctcatctcgaagccatagccaccactcccgtctccgattagccccatagccggagaatcgctcacttcacccaattcggtttccgccgccgtgaatcgtaccctgccgtggccagccctccacaggtctgctcatac

SEQ ID NO: 177357 - DNA, 370 bp, Zea Mays
cggtgttggaatcatcagtagcaggttcggcactgatctgattaactctagcaatattatatccccttgggtcgcgattgctagatggagcctgactctgcttgttaggattactgcctcgagctggggtggtgtatgcaaccttcttaggacaagcattggcatagtgacctgcttcaccacatttgaagcatgttctggctgctggagtagccggggtggctgcttttggctgtgtactagctggagtagcctgacgagtgtgcggtgtctgaggtgtggctggctgcgactgctgaatatgacgctgatatgactgttgcccacctcctggacgaaccggagtactctgaggctgagtgtagcgagg

SEQ ID NO: 177358 - DNA, 495 bp, Zea Mays
gctcgggtcaacggtggcggacaacgacggctgagcggaggacggcgggtgagcgcgggcagaggaaatcagggagggagaggagaaattggggcgtgtcccgagttgcggacgtcgaggcgaagctcaccgtggcagagggcacggcggggctccgacgtcgacggggaaaagggctcgggacggcggcgggtaacggcggcggcgctctagcgtgcgcgcaacgtgggggaggttgaaaaggggttctgcaggtgcgcaaatgaaggaggggggaagggtgagcgaggctctggggctcaagtggccgagggcggggcggttgcgagctttacgcgcgacgtgggcgcggagacctcggcgcgcgcagctcgggcggcggttacgcggggacgagggaactgacagagggggcccgcgtgcagagagagcgagggagcgggcgcatgcgcggggaaagcggccgcgctgacgggcgggcccgccaggacagag

SEQ ID NO: 177359 - DNA, 571 bp, Zea Mays
agggtatctcgggatcgcagcctgagccttggccgtgtacggacatacccacagtcatacctgactctatgttctggggcggttgtgatacccttccaaggggccaaccttcgaacccctgatcagtaacgagcctggagcccatgtgttctggggcggtctcccgagccttaccgagggctcaaccttagaacccctgagcaataggtgatgtcccttctcttccttcttgaggaaggaagcccgaggttgaggcgaccccttctgctacctgtgaagtagtggaaaaggagtcagagggagagagtgggagaggaagagaggcgcaccttttgatgcattatgtgaagaagcgcttgctggctgacgtcattccgataggaagagtggacatttaatgcgatgggacgctttggcccacaggccgaccgttgcggcgctcgtgcacgtggaatttgaagcgacctagtccactcctggttttgacttgggacgactcggcccacgcctcggtgattccgcccatccctataaattctcctgagaggggctcttcgattctttacctccc

SEQ ID NO: 177360 - DNA, 447 bp, Zea Mays
gccgtttctcattgaggttttgaggaagatggggtttgggcagatttggtgtgatgttgttagtgggttgttggctacttcctccacaagaatcttgctaaatggcgttcctggggagatcatttcgcaccaaaggggtctaaggcaagcgacccactctcccctaggttgttcattttggttatggatgttctgaacttgctcattcaaaaggcttccgatgaagggttacttcagcagctatcatctgggactttgcatcacaggctttctctctacgcggatgacgctgtggtttttcttaggccggtggcttcagacatcaatttggtcctggagatccttcggttttttggggaagcctcggggctcaagaccaatgtccagaaaagtagtgtgttccccatccgttgtatcgaagatgatttgatgcgggtccaagctttt

SEQ ID NO: 177361 - DNA, 376 bp, Zea Mays
cggaatcgtgtggggggatgactctggaccatctaatttggaatagacggtgtggattagggataaggtaccgcttcagtctagtgacgtcctggccgtcgatcgtgggatctacgacgcagattagatccgagggtagcgtttcgtccggttagcttggaccgtccgattccaatctcacgtttgtggatcgatcacgagcacttgatagtctgggccgtcaaatctgtatctcacaactgcgagcgagtaccaattcgggccagggggcgatataatccacaccgttggtgtgtgatctcgcgacccaaaattcacaataccctttcggccatggcaatttgtagatgagtccctctgttattttagtatctac

SEQ ID NO: 177362 - DNA, 573 bp, Zea Mays
aacagggccaaagggcggcggctgtagctatctctctttcctgttcctcacggtaatgatgctgggcatggttagggatgagcagggcgcaacaacgcggtataaatcacccgaggcaatacatggattatagcagtcattgcgcgacagactcggcctccctcgcgcgaagaccgtgaatcccagtagaaatcgcgtggagtttgttttggtcgcccgcgaggaagacggacctggtagatgggccccaccggcagtggcacaaaagggaaacgcgcagaggtgaaccgaggatgacaaatcgggcccacccgtaggtgtccaaggcgcacgcgagatcttcctgaccaatgggccccggttgtctgcgacgttggctcgagcgagtggacaaagaggctgggcgcggggtgactgacctgcgggtcccgcctgtcggcgctatggtgggagctgggccgcgcgaggtaaagaagtgggccagaactgaggcagtcggcccatgtaggtcttctattctttttctttttatcttttctccctatatttcaaactctagtatttgaattcaaa

SEQ ID NO: 177363 - DNA, 525 bp, Zea Mays
atcaggtccaggatttggaggtcgtgccccctcaggcccatgttgatgtgcctaacaataatcaccctcagaatttggagatgaatttcatgctccatcaggattggcatcctgaccccgttttccagatgattgaagagagaaatagagttgtccagttctctaggctctgggccaaatactttgctctggctggatcgactgatcactcggtggacgtccctaagaagtgggcacctttttttctttcgaatcttcttcagccggagtctttcaattggtccaagacttttcttctgtcagatatccctccaaatttgcaggagcaaggaatgaattccatcccttttgtggtacctaaggattgtccagttgtcccctccctgggggatgtcacctctgggatcgccaaggattccgatggttatggtgggccgtctccaatcattgtggagtcagggctcagaagaagcaaacgattgaaggaatcacgtgctgggttcaggcatggggcctgcccaaaaa

SEQ ID NO: 177364 - DNA, 442 bp, Zea Mays
gacttttgtgtggagtgtcgcacgcgagggtagttagcgctgcccctcgcggtgacttcggtgtggtcgaatgccaaagaccatcgatgcggtctttttcgacattggtttagttttttgcgggggatttttgcttgtatattacatggcgccgcctcattaaaaacctcaccccccctgggaggaaaagagtgcgggccggaataacaatgttaagtgaattacaagggcatgatggccctgagtcaaatgaaaaatttgcgaagattgtctatattccaggaatgttccaggtcttcgccagattgtgttgttaatctgtatgcgctgggagacgacttcgtcttgacgataaatggtccttcccacttcggttccagcttaccccgtgactctgtccgggttgtgcggacaagtacgaggtctccttcgttgaattctc

SEQ ID NO: 177365 - DNA, 491 bp, Zea Mays
ggcctcccttctatcctgttgattcaaatcctgcattgtaaattgaggatgacccataggtacttgctcatatggtgggggacctaggatgaatggtggagtagctccctaatgactagacaaaggactagttgaagcaatagagcctgaaggttgtgtcttttgctcctaatgctggatatgctgcaaaatgtatggtgaataatatgatgatgtgtgaaatacttccttcggttgacttggttgagtggtggcagcaagctccttttgcttctgtatttgtaatctggcaagtctttgtagtatggcccttgttttctccacaaaagacacaatacaactttcttggttgtgaattaagccttcctctaaagctttgactgcctcttcctcctcttggagttggtggttgaaagttgccttatgaagactgttgatgaatccctaacatttggaattgatattgtgattgattttgttgtgcttagcct

SEQ ID NO: 177366 - DNA, 749 bp, Zea Mays
cgacttcactcgacgtgttcaatgcccgagcgaagtcagggtataggtttcgagtgagaagaggattctcccgccggagtctagcatcttattcagctagttcctcctctcgttcttgagcttgtcggcgatcacggcgacgggagttgcgtctttctcggtgtacccgttcatcaggagtttctcccacttctgaggctttgtcctgagatacaggtcgcactgggtcccgttctctggcttcatgatgtcactgcacattccgacgcctgtttctccatcgtcgggcatcacgctggggaggttcctccccctacagggtaggttcatcgtcgaagatgggaaatgactccaatctcccctgaatgaagaggacgtcggggtagaaaggagcatgtatggcggtgtgcttattcccattctcttttgagggtggaggtgctaggaggattgctcgctgtgttttccttccccggtatgggatattcgcttccttccttcgagtgatccgtgtccactccttagtgggcgagatggacaacggagttcttcgggcgggagaggcctcgaccggctggccttgcattcttcgggagcctttaagccctgacttgtgtggggccatgccctcttgggcagcgagcggaggcatggctcgcggactcgcttcagcttctcgtggaattcacgaggagggtctcttcttgggtggatctgctatgcggtgcagagttccttctatgtccgct

SEQ ID NO: 177367 - DNA, 1639 bp, Zea Mays
ttcgattttgcgcacttattgtgctattccggctgcacccttaggcgacttttgcacggagtgtcgcacgcgagggtagtctgcgctgcctctcgcggtgacttcggagtggtcgaatgccgaagatcgtcgatgcggtcttttttgacatgttgtatctgagtttttgtgggggatttttgcgggtatattatatggctccgcctcgttaaaaacctcatccccaggaggaaaagagtgcgggccgaaatagtactgtttggtgaattacaagggcgcgtaggccctgaggatttaaacaaaaaatttgcggagattgtcaatattccaagaatggtctaagtcctcaccggatggcgttgttagcctgtatgcgctgggggacgccttcgacttgacgatgaatggaccctcccactttggctctagcttgccccgtgactctgtccgggtggttcggacgagtacgaggtctccttcgttgggccctgaggatttaaacaaaaaatttgcggagattgtcaatattccaagaatggtctaagtcctcaccggatggcgttgttagcctgtatgcgctgggggacgccttcgacttgacgatgaatggaccctcccactttggctctagcttgccccgtgactctgtccgggtggttcggacgagtacgaggtctccttcgttgaactctcttaggatgactatgtggtcgcgccaggccttcgtttgagcttggtatttgttgagggcctgcagggcgaagacgcggtctccgtcgatgaggtctttggacgttggttcgtctacgtcgaggacgactgaagcacttgttcgaggtgacccatgctttatttcctgcggggtcatggcctccgaaccatatagtagatgaaaaggagtgaatccagtcgcctggcattcggtcgtgtttagcgcccagactgcttcaggtaggtggtcggcccatttacccttgctgtcgtcgagtagccttttcttgatagcagtgaaaatattgccgttggcgcgctcgacgacgctgttagattgtgggtgatatactgaggcgaaggcaagcttggtgtctatggagaagcagaaatccctgaagtcctggttgtcaaactgtttgccattgtcgactatgagctcggacgggactccgaatcggcaaacaatgttttgccagaagaatttctgggcagtcttcgacgttattgtagatactgcccttgcctcgatccacctggtaaaatactcgacgacgacgaaggtgaacttgagattcccttgagccatgggtagtggcccgacaatatccagcccctagcgttgaagtggccatgtgtgggcaatcagttttgtgaattgcgaagggttgcccgaacggggagagaacttctagcaggcttcgcacgacctcgtgactcgattcgcggcgcagattatagcgggccagtagaacccttgacggatcaccttggcagcgagggcccgaggccccgagtgagagccacaagttccgttgtggacttcgcgcaggatctagatgccttcagtttcgatgacgcatttaagcatgggttaactgacccccttcttgtatagctggccctcaatgattgcgaagtcctggct

SEQ ID NO: 177368 - DNA, 673 bp, Zea Mays
attcaatattgtctcggcaaagaagggggattttttctctatgaagcgtgaaaagaagggaatgtgttttttcgcctacggctcaaaaacggtttgtacgaagatttcacgcatcacaaagaaacatattacattaaaaactatgcaaatagtcagtaatagtttcttacaaaaagtgaaaccatatacaaagattttgatctcccaaagagacaagctctagtcatctttcaaaaccttctcagcagcttcgtctaaaagcctttggacagcttcatcaacatcttcgtttgttatcctaattatgtctagcgcccctacaaagaaggatcagcttctggattgtatgtctctagagggggagagagctcagctgcaacaaaatacaagtatttgattagttcgaagctaaaataatttacgaagctaggtcatgataaatgtacctataagtctagcacgttcagcggcttcttcagttcttctagcctcttccaaggcatcatgggtttctttctcctttttctaatagctttgtcagttatatctctgccaccctttagccatacttcagaataaaattttccacctagagcaatggcttcggccgaagggttcttgatatcattggctaagagcggaaatcatggctgaactacagccttggcatgtt

SEQ ID NO: 177369 - DNA, 754 bp, Zea Mays
caaagatcttgcatgtagaggcaaacgcgttgtactacataggtgatatctggacgagtgaatgtgaggtaatgcaacgcaccaaccaaacgacgatacagggttgagtatgaaaccggagagccatcagaggagatcttggcctaagtatccagtggggtgttgtagggcttgcattctatcattccgacatagtctagcatatcaagagtgtactaggcgctgagagaggagcattcaggtagcggtgcacgtaatacgttcccaagaaaatgctggataggaccaagatctttcatatggaaagcggcttgcaatgcagtgatgatctgacagaggagagggttgtcgtggtagttaggacaatgttgtccacatagagcagcaggcagtagtgctagactcccgctgaagcacaaacaaggaggtgtcggacttggcttcaacaaagttgaatgacttgaggtgagtggtgaagcagttgtaccacacacaaggagcttgtttcaagctgtagagcgatttgttgagctggcagacatggtcgagtggagctgggtcaacaaaactaaagtgctgagtgcagtagactatctcaaatagggtgtcgtgcaagaagacattcttgatgtcaagctgatggatcgactagtctctagagagagccagattgaggacagtgcgtatggtggcgggcttaacaacaggactgaaagtctcattgaaatcgatgtcagggcgctgtgtgaagtcg

SEQ ID NO: 177370 - DNA, 572 bp, Zea Mays
gtggagggccaatatggcccggtattgcccaaacaataccttagcctagccgagctagcgacccacaataaaaagatactaaccttaacgctcatgttccactttctcgtccgccctgccgccaggccttcacgtcctcgccatcacgacgagtcttcgacccgcgcctctgagctctgttgccccgggtcgttagcatcggcgcggccgtgtacggtgaccccgtccgcctccgagccccatgttccgactagcaactagacctacacgcggccccacgccaaggccgaggcaccatcgtccgccgacccgagcagccaagctcgaagatcctccccgtggacgtcgagcagccgcaacagagctccaccatgcgggcaccgagcagacgagcaaacacaggtccacccccaaatcgaggcacttaggtcggcctcgcgggactacgttgctgtccaggtccagatgagactcctgttctggctctggctcctatttcagctagcggccagccgcgagctccaccaacgtccaggcccaactccgcccgtgttccaggcttccaacctctg

SEQ ID NO: 177371 - DNA, 814 bp, Zea Mays
caaatgtaatcaaaactaacaagtaatacaagaaaactaatcaacatgttgagataaaatgacaaatacttacattgtcataagttacttttctaaatggtttgctgccactgtgatggaggattgtcaagttagatctattttttgaatttctcttgctccttgcctagaatgcaatgaataattagattactatacatgttaacaacatcatctgagcagtaaaaattaagaactgtaatgggcagcatcatagcacttacaatgaactccttactatagaaatgttctttaaccaaccactcccacttagcttctagaaaatcttcagggcagttcttaatagcttgttgcatattctttgctggcttgacatagtgctgacaaaagtcaccacgccaattgttccatagatccctagcatgctccatgatatcattatcatagacaacaattttaatgttttcatctatgttttcaaacttgtcctaaaaaattgttaaacagatgccccatataaatgtaccatcttcaaggatacatatacatatataaaagataacacaacaatataatgaaagtataccatatataaaagataatacaacaatataatgaaagtataccttgattgcagcaaaaatatgcatcatagatgtctcggtaatgtctgtccatttcttcaccctcaccggggtaatagtaggatcacagacgattctaccaatgtttcgtgcgaatgatgtgccaagagcacggttgtatgtattacaacacttgatgcagggacacctaattttaccgccatcacctg

SEQ ID NO: 177372 - DNA, 649 bp, Zea Mays
ttcaccgctagcgatgaattgccgactgtttttccgagtcaaaggaacttcatcttctccctcctcatcatccacattagcaacacaggcagcacccccattgggatcagcaactgatttggtacacccattgggatcagcgtcagtaaattcagtcgcaggcacttcttcagcatcaggaaccgaggtaccaacgtcctgacccaaactgggtacttgccggaggcgtctccttttctttttctgttcatcagcagaaggatcggatggattggctcggcaagggcgcctcgggcgagtaccagcaggtttctgagtatctaaggtcgtaccagcctctgggaggggcgccaccaccaatgccccagcaggagcagcgtcagaagagtcctcagccagcaaatcaagcatggcatttatcttcgcatcactagggttcaggggcacctcaaaatagacctgccgttcatcatcaggaattcccccgagtgtggcaaccaaggcactaacttcttcagcagagggccgcactctaaggcccaaactgccgtcagtagcaggaggattcgacacaaaaagagtgaaggctttgggaggaggcaagttccaagctgagaatgccacgggggcaccaacatttgacactttg

SEQ ID NO: 177373 - DNA, 1221 bp, Zea Mays
ctcgggggctgggtcacagcttgcactacccatccgagccggatcatctccggcaacaccctcgagggctgggtaagcgccagcaccatccttgagggtcgagttctctgcagcagccacctctaaggctgaaggtccctcattcacttccatgggagcagtgcaatccagaccagcttcctgaccctcaagaccgcgctccaaggtcgatgaggcgcgggacgctgcccgggatgaccccaacccggcatcgagcacatcagcacaaacatccgtcgtgccaccatctgccggctctgacaacagatcttctggaaccatgttttcaagagtttgatcaaagttcgccagagataattcttgcagaccaatgagggcagacaaggcaggagaaggaacaccactactttccccactagttatgtaacaccggctgttcttccgaattagagggatttcatcctcttcctcatcatcttcatcaacgacacggacaatacacccattggggtcagcttcagcaggatcacacccattggggtcagcatcagacaggtcacacccattggggtcagcttcagcaaattcaggcactggcacttcctcagcaagagaaacagaaggaccggcaccctgatccaagctagacacccgacgaagacgtctcttcttctttttctccccctcagcaggaaaagaggcttgatcggctcggcgagaacgttttgggcgaacattgacagacctctgagcgtcgaaagctttgttggccttagggatgggcgccaccaccaatgtttcagcaggagtagcgtcagaagaatcctcagctaacatatccagcatggcacttatctccgcgtcacttggattcaaaggcacctcaaaatgaacctgcctctcgttgtcaggaatttctccgagtgaggcaaccaaagcactaacttcttcgggagaaggtcgcactctaaggcccaaaccgctatcaccagcaggaggatttgacacgaaactggcaaaggcctgagaaggaggcaaattccaggccgagtatgcaacaggagcgccgatgttcgacaccttgcctctgagtatcatctcgagccggctcaccaagtccacagcaggaattcttctattggttacccgggttgagtcagccaagcctcgatacagataagccggatatgctctgtctttcagtggctgaatgttcttgaa

SEQ ID NO: 177374 - DNA, 511 bp, Zea Mays
ctcctagcgcctatctggctgctggtttgtgtcacgccatggcatgggtggtgcaggtttcgtacctctgatgaggtcctgtgcccgctcatctgcgatgatgtagaggtctgcctctcaaaatagttgtttggaggtggtgggcgctttctgtagtatggctcggacgaaggccgagtcaatggatccctggtagaaatcttcaatcactgctgcctcggcgacttcggggatgcggttcctcatggtctgaaacctcttaaggtatgagcggagtgtttcatcgccctggcgcctgatggatttgaggtcccatggctgcaccgatttgtcagagagagactggtagttggcgatgaaacgccgactgaagtcgctctaatcgtcgatgcaatgtcgtggcagacgtcggagccactgcagtgcgtcattacgtctttcgttgccccaacggcccaggcggaggtcgtgtagacggccaaccagcctctcgggtcctgcttgggctcgt

SEQ ID NO: 177375 - DNA, 707 bp, Zea Mays
gtcttggactgggtattgcagctagctaaagggtggttgcttggcaagggaagttgagggtggtgggtttcttagtgacttgagtgtggatgcaccaaaacatttaagggcgaagggtgtgcatttggtccctggtgctggacatattatgacacgtaaggtggtgggctataagatgatgtgtggcatatttcttttgactggttggcctgattgacaactgtcaattctctatacttttgtatggtgattgttcaattctcggttgtatgggccatgttctctccataaaatacataatatagtctttgtggttatgcactttaaggacgtcttccttcaaacctgtggcctcactgcctcctcttggtgatggtccatgctgaaggtagttttgctctatttttatgtggttgcttgtgtattgagccgaccattgagactggatttgcctttccttcgcttactgtggattataaatatttctttcattgccttgagacctagccaaagcttcttgatactttggcatacttttgaatctcttggcggcgttgtcaaaagtcattttatactctaatatattcatctatcttgtgaagcagcttttccaaagtgtggggtggcttcctgggaaaatactaagaacatggtccaggccgaagcccatggatcatagcctcactcacaatgtcatctggtacact

SEQ ID NO: 177376 - DNA, 490 bp, Zea Mays
gaaagcctctggctcaactcccctaagagaagtggtgagcagcgatgcacgctgcgacctagttgcactgagatcatgggaattagggactcgttccatgacctccttctattagggtcataaggtggacttagatccttgtctactgtggcaagttacaacctgacccaggagtacctcgtagccaacacgttaggggatcgctctcccctcatggaaagccctaaggggactcccgccattgtcatgatgtgagcagtagcatccgcaccgcctcagctcgacctgccttcctagaagtggctgtcaagaccgaacccttcctagagcagccaatgtcccaggaatggaaaacaagggataccatagtggcgtatggggcggccacaccgaggagctggaaggacgcatgccacgacatctatcatccaccgttgcctaatctacgatggggcagaccaccacgattccctcgggcgagccagaatgt

SEQ ID NO: 177377 - DNA, 674 bp, Zea Mays
ctgctcggcgtttagcattgagcggcgtcggcattggggattatagatggggcgcctgggaggggacgaactacggcgaaagtgcgactgggggcactcctcgtcgccggtgagagctccggcgcgtcggggcgcgctgtgtgcatgcgcgcgatggagaagaaagctggcgaccgtgggatttatagttgacggctgcgattagatatggagtatcctattctcgcgcggtcgatcccagcccttcatcgagaatcggtcggtagaagcgtgtcttcactaaattcgaatctggaccgtagctggctaatcgtagggctgtggcgtgatcggtggagtggatcgatcctgaccgttgaccatcgatcgggcgggtgcgggtgatcgtccaccctagatgaagatcgatctaatcggatccactagtttctaatccgacggctggcaaacgtcagtaccccttcggcctggatatttttctctaaagagccctcggcttatttagaaatcaacccgccatccaccgtggggtagatctgtgtcttgggacttttcgcgcattaacccctggactttcctgtaattgaggctcagtccagtggcgtgttaaaatgaataaatgaattataaaataggtttttatgatataaatgagtgctagaacttcaataatt

SEQ ID NO: 177378 - DNA, 518 bp, Zea Mays
gccagcaatgaagttaagaccctgtgcggcattctctgctgattgcccttacaccaataccgaggtctaggccccgggcctgctcgactctgatagcaacggctacgagcacttctctctcacgtcgccggcgctcggtgatgctgggttcaatacgcaaccgcgacgaccaagaggagggcgatgtgtttgtggtccgacgcctttatttaaccagggaaatcacaacaacttcccccatgatcgacgagtctgttacaagtctatgcatggcttgctgtgaactgaacacaacggaaaatcagctcgcaagggacccacatggcggtgttagtgcacaaaagaagaggagagggtaaagtgggctgcgtggatgaggaagtggggagttgggccggctccaaggagataatgtgggctgaggtgagtagatttgagcccaggtgtaggtagtctttccccccttttctttattttcttttatatcttcctattttgtttcctagttttcaaagttg

SEQ ID NO: 177379 - DNA, 424 bp, Zea Mays
gactaatccctcttttcccggtgtcttggttattggaggctgtggagttttatttggctttggaaactcttccttactatttttgtggatcactctcaagtgcttctcgctctctcgttgtttcttctttagatcatccttcataatttcctccggtgtcaaaggaagcaaagagattcgctctcctttgtacaagtaaaacaacttgttggttcttccaaaaatctggacatcacgatcatataaccaaggtcgacctagtagcaattaacatgcttgcatagggaccacatcacattccacgtgatcattgtacttcccaacagaaaaaggaacatcaccacgtggctaacacgcaacgctccacaatcattaagccactgcatcttatatggactaggatgacgccttggttttaattcca

SEQ ID NO: 177380 - DNA, 580 bp, Zea Mays
ctttgcctacgctacactacacagaggagccgctgccatgccacggaatgccaaaaaggccacgccagtcgtcacgagtacttgcactgatttgtgattccggtcaccactggacacacgggttggtgagacgggcacgtgaagccaccaagtcaaatgatagcacaaacagagagacggagagagagagagagagagacacatgtacgtcatcagacgggggcagcagacgggcgtggacggcaagtacggccataccgacagatacaagccctgcacgttgacgtgtttccttcccactgtacgcggtaatggtcatgtgaagcgcgttacggataatgttagcaaagggtaaacaaagcaaagcaggcaagctgccaagcggtggggccctttggtttaggatagcacactggctagcacatgcattacagttactacagccaaagagaagcatcatttacctaagcaattagggtagtgtaattacgttaggttacaagctggttgccaaagttgaccgccagccagacagggttagctgaaaagtttatagcctaaaaaggtcgacacaactttc

SEQ ID NO: 177381 - DNA, 673 bp, Zea Mays
cggctgtcctccatgtggggcccgcaggtcagccttagccgttcatgcgtgcgcctggcagactgacagagcaagcctacttctcagctgccgcctcacgtcgccgtttggtgggcccagggggtcagactcgtcttcaacggcatcgcggggatctcggcggggcttgcggcgccacgactgctctgagcctggcgcaaatccgagctctctcgggtataaagccttgcgccgccagtccttatccctccatctccttcctttttccccattcccttgcctgccaccattgcaccgctggatttccgcacggggatatctcgccgccgccgtggttttgtgtctgcgtcgccggtgcggtcgcaatagttggcctggatgctcctgcacggtctctagtgtgcgtgtgtggcctcatctggcgcggttggtgctcggagcgtcgacaattgctcgccggttcttcatcaccagcacggttctgcggtgcgtcgtgggcgtcaactccggccatacctacggtacccgcgagtagccgtggagcatcgccgtcgatcggagaaggcgcgagcaccatcttcgggcggacttcagactgtttgtgcgggcaaatttctcgccgaagtacgaccttcgccgcggatccgcctgtaccgcggccagtggtcaccgc

SEQ ID NO: 177382 - DNA, 487 bp, Zea Mays
acctccccaactagcctaaagatcatgaatggtccaatgaagcgaggcgacaacttgcccttaactttgaatctcctcattccacgaaggggtgacaccttgaggtacacatgatcaccttcctcaaattccagtggtcttcttctattatcagcgtagctcttttgcctggtttgagctactctcatattctctcgaattatacggacttgtttttctgcctcttgaataagttcaggcccaaagaactgtctttctccagtctgatcccaatatagaggagtcctgcacttcctgccatataaagcttcgaatggtgacatcttcagactggcctcataactattattatatgagaactcagcatatggtagacttttatcccaactccctccatgttgaagggcacaagctctcaacatgtcctcaagtacttgattagtcctttcagtccaggggtgataggtcgtactaaagttcaactttg

SEQ ID NO: 177383 - DNA, 382 bp, Zea Mays
ttagaacgccgccgtgagagagctcgtcgtggccagacttctacgggttagttcatactcttctgtgatgttctagcctccctcatgtcttatgtttctcacagacccattcgattgaactagaccacgctggattgccctgaacaccatagtttcttctcggttttcaccgtcgccgtgagcaggcgtgctccaggacggtttagtgcaattggttaagggattagtgttgccgagggtggaattaggtgtcgagaaaaggaggggcctagccattgcgttttctgtccagtacaagttcgccggagatgtgctcgtcactgatcaccatcggggactgtagcttgcaaagataagaaagaggaagggtctaagtgcaaac

SEQ ID NO: 177384 - DNA, 415 bp, Zea Mays
agcaaccgcgtcgcgcgggtgctcgcgtacgcgctgctcgagtggatcctcatcgcgctgctcctcgccaacggcgtgaatgcagacaaattacataattcaatgactgcactttggcccttggcagactggagaccaaacaatttgaccgtagaaccgttgtaaggaatcatcaaccacttgtctgcccaattcaccatcataggactgaatttttcaagccaatccatgcccacaattaagtcatatttctgcagtggtaagacccgcagactagaagtgaagtcacaccctgatagcgaccaaactgcattggtgagttcgtgagtacactgcagttgagccacatttgctacttgcaccgtcaagggtcgttgcagaggagtaaggccatggacatgagctgccacttgag

SEQ ID NO: 177385 - DNA, 1419 bp, Zea Mays
aaaatgtaaaaaccatgttaaataagtatcttaagtcatatggttcccaatcatgagggtttgcaatccaaaacttgagatttggacttaagtgcaaaagagccacacttgactcatgtgatgaagtctgaatttcagtgtgattgcttcaactttgagcccttgtatctttcaaattaatgagaatttacccttggtcaccacatcaaacttgtagaccaaacaaaggagaacaattttgcttaagagtgtaagcatagttgttaagaagaaatggtagataattaagcctaaagtcaggctgtcaggatgatacagtctgaacttcagattgacagtaacctagatccaagtttgagagccatttagactatgatccagtgagaatctacctagggttgctataacaaagctgtagagctattatagaggaacaactttgctgcagaacttggtatgagttgccattgagatttgggagaaaatcaagctcaaacattgactgtcaggtgcactgaatctgacatcgccatggtacagtgcctgagcagatcagaccgccagcgcggcaacttcaccgccgacgaccaatttccgccgcgattcatgccgccgttggtccaatttgtgctcggggtgagtggataacacccggtgtacgtcgtcgtggataactccggccataaacaaatctggccaccgtactgcacacgccgcggtggaagtcgataggcacgacggcaacagccgccttccggccttgtgccacgtacttgggcacctccaccgcatcaccgtgaacccttgtgactctccgtggctcgtcggagtgactgccacgatagatgccacggattcacgcgcgccagtgaactcttactcctccgaccgccgcgcgtcaccgctaaaatttccggccaccgccctcccgtagtataaattgaccccaccgcgagctccgtaaggtagtcaagcgtacagccaccaagaattagcctcgatcgttcaccagggtatgcgaattttgaacttcccccaaatccgcgcaagaacaccgtaggagagacctcgccgtggccagcgcaattcaggtcagttcatatcgactgctccctcgtttgagtgctctcatgtacccgtgatgcccatcgacccactcaattgaactgggttgccttagatcgccgggaacgcttgtggtcgtccgccttacccgcggtcaccatggtcagggcgtttctgtgtgccgttcctgaaattaacttaggggaagtgttcggtaggagtctaattcgatctctgtcgctcgggagctcctgccatggcagtatccggccggaacaggctcatcggagatcgaccgggcactgtttaccatcgcccgtcggggatcccgttctgcgaagaattagaaactgg

SEQ ID NO: 177386 - DNA, 464 bp, Zea Mays
tcacaaactatgttgttgcaagacacacccagtggcgttgaagacactcctaacaaagcctctaacttggtcatgccttcgaccctgctcacaccacaaagttccgcaaccagtgtgcaagataaggtgtgcatcccataaacttccaaatttatgctgcaaacagtacaccgtctgttactgaccccttctatgcagacttttggtattggcagcagcactgtggttccaggtgctactcccgctataacaaaagaactgacatccacgcctaggaagaggtaaattccgcttcatcgcaccccaacacagctttattacaggccttcatggttcatacaaacaaaaaatgtaactgataatgattagtgtgcatatactcaatttgctcgtatctgaaatatgtgattcacatacatccgattcgcaaggatgaatcaacttctgtctttagaatgatttag

SEQ ID NO: 177387 - DNA, 514 bp, Zea Mays
gacgacgcgaccacagggcggggggtggttgtgctgcattgataacatcatcttcaacctcggacgactctgcgaggcgggcaacggcgcgcaccgcagaggccagagagtggtgcggaatgagcacagatgacgcaagaacaagaggaccccgagtcacaattacattcgcaatattttgactggcgactgagaccctgaacacccaaggacgcaagcacacgacgcggaggcgatccggatgcaccgagaggaggtagtttgcggcgttgctgacggagtggatgttgtagtgggggagaagggaagatggagttaaccagagatgagccgacatttggtggcaaaccgaacctggggtagcggtggaatgatagttggcgaggagccatccctgcatgcgggcacctggacggaggagcgtccctgaaacaagcggcaaagctccggcgcgcgaagctccagtgggcggcagaacgcgtggcgtgaggcctgggtgggtggtgcgggcggt

SEQ ID NO: 177388 - DNA, 710 bp, Zea Mays
gtctaaactgcaaaatacaggacctatatgcaattacttttgaactggcgtggatggcgggttgaataatagaaaccaggggtctatttattaatttgcgcatggctgaaggggtacggggcagtgtgatccatccgatccaaaactagtggcccagattagaagttgtctaaattgaaccggtattcaatccgggttgcccgatcagggatcaacggttaacatttaacgaaagggcccatctgttgtacaccgtccgaccggagctcgatggtcacgatcggacgagcgaagagctaaagcacgaacggatcctggccactggatccgtgatcaacgaatgtcgctctcccctcacctcacccacaccacactgcccctaagcgacagcgctatacagggccacggcggaggccatcgcttgccgttcccaatccacgatcccgagcaccgtgcttcaatccgaagggcaatacatgaaaaagggacgccagctacccgtatgggaaacttctcaccttgactctggtaacaacgggacttggcgacgtggaggagcaacgctgtggacctctggaagcacggcgaggaattgcggctgttcagagcatgaacccaccgaagcgaggttacgacggtattccgagcagcatgatgaggcccatgggtccaattccgaagacccgcccttgccattagctcaaatcacc

SEQ ID NO: 177389 - DNA, 999 bp, Zea Mays
agcatcaaggcatgatctagagcttaccatggtaaggatgatatcaaataaaagctaaacaaaggatggatttatgacaagacaagacttgcaacgtggcaaataaaaaggaaacgaccaagagcgggataggtgagacaacaatctcgaactgaaatgggagagatgaggctttaaagtgcgggtaagcgtcatggtaaatgttgagagatgacaagggttaaaggtgataacaaacatgggtataagaggagaggtaaaggtgcagaagaaccaagggtatgagtacaacaaagaatggagttaagacaagacttgcaaatggaaaagatgaggttacaaccaagggcgggataagtaaaacaccactctcaaactaaaatgagagattggagaatttagataacaaacataatgtaatcaccaaggtaaaatcaagagatgagaaaggtaaaggaaataacaaacaaaagcacataaaaggatggagttaaaaactcgcaagcgacaaagaaggggatacgaccaagggaaaataggtaaaatacaactctcaccttgagatggaagagacaagattttaaagggcaggtataagataagcatcaaggcaatagaggtgaaaagggtaaagatgataaaaatgaaaagccccaccatagatagagttaagacaaaactcgcgaagtgacggagtggagaaaaccatcaagagtaagataggtaaggttccaacataatggttgaagtaaaaaattcattaccgagggaagttataaggaaacaacgagatcaccaaggatgtgtgaaataaaataattgctcatggatcgtcaagaaacaagggtggtcaagggcatgtaaaataaaatgttttaaatagacattgggatatacaggtaagcatatataaaaatgagattatgcaaaattccaatgatatgagcataccaagaccaagagaatagaaattgctgaaatatagcaacttaataatag

SEQ ID NO: 177390 - DNA, 540 bp, Zea Mays
ggtattttatttataatctcttctctttccctttactcttcatcgtgcacgtgacttattattggataggaaccgctcccttttgctcgcactgcccatacaactctcctgcttatctccccgtgttgttctccgtcttcgacagttacgtacacctgctcacggtcgtccttaattgcgcacgcctatgtacttgtgtcggcggtcgtcagatccgagtctgacaaggagatgagatgagggagaagttctacagggcgctcatcaccaatgacatgcgcaatgccatcggggacggcggcatcgccaatagcaatgtctttgtcctggtgctttagtgttcgaacatcaagatggagagccctgatgcgtcggtacggtccccttctcgtccttctgacttcaatccgttcgattccatataatttttgatagtttccctagatttgggtgttgcctcggtacgatttcatgcagtctggtgcagcgattgtactgccgatcggcggtatcacaaggggctttaatctgaatctaggg

SEQ ID NO: 177391 - DNA, 821 bp, Zea Mays
gcgggcatagtgatgagtacctttctcctgagaaaatttcttttttttccatgctttcttttcaactatattctttgctcgcttactttttgcacctttaatcacacgaggaactcgaaatgatatggcactttttattatatctacattggagtcatttaaaaccataggaatatcatttactctcgaagaagatagagatgccataggaacatcattttctctcagattacttagagaagcatctgattccatctccaacttctctaatgctttctctaaataatcaagaagtggccttgacactgagcacttcaatgcaagggatgttgcctttcgagacatgcgtgcagcatgtgctttcaaggtttcattctgatttgtttttctttcaatatgaaatcccttttttgcatattttgtccacctatttaatatatatttcggtggtaaaatgaaaacatcgttcatattaaatactttgaaggcatgcttgcacaatatacctataagatatgaaagttttggttagcaacttgtattagaaccaaaactatagtttcaaatgaaaatacatacctatggattcaaacttcctgcaagaacatgtaatggtcaaatctgcaacattgaatgttactgttgctccataatttgaatgcatatgtgtaaccatgaatgttgatattgacccctcagattgtaacaatttacatgaatatgaaaactgacatttaaattcttcctcaaactccatatacatcctccttgtatatgattcagcagcatacttcaacaaaggtaaattttggatgtaatta

SEQ ID NO: 177392 - DNA, 287 bp, Zea Mays
acccaacccgagctcgagttcgccggcgtatgcctagtgaacggtgtgccagcggctatgcaagccacgaccactgtagaccggccaaaccagccactctctgtcccgtccgacccttgggttagcttctacggacctcggtgaagctccccgagccaaggattgaacaatacctcgccggagacgccggatcgacgtcgccagacttcaaccggccgccgtcgcacgtagaccgagctccacggtaagtcattcgtcgattccttgcacctatagcatccttagca

SEQ ID NO: 177393 - DNA, 483 bp, Zea Mays
gtctgattgcgggtcgtggcctggtgatcttcgcaaaggcacgcggatggttatcatgccctcaccatgcggttctgggcccgaggcggcgaggaattgtcaagacgcacccctccatggtcgaaggtcgcttcgacaggaacttcggtgagcttcttgaccctttggttcacttgttggtccgctctgcatagcacaaatcgtaggggggaaagtggagctctagtgttcgatttgacgggacaccggcggggcaccaccgcggctggcgagagctgctgcgcctgtcgcatggcctgggcgacctgaggaggaagacgaggggagatccgttgatcgtggagcggacactccagattagaagtgagggagtaccccttcgtcattttaatccgagccatctaactttaatcgtgtggttcggggaggattgaatcgtgggcattcatggaccgtggatctctgatcatatggttgacattg

SEQ ID NO: 177394 - DNA, 663 bp, Zea Mays
aggtagcataagaactatcatgtaccttgtttacggcaacagagacgttggcgaatgcgagttagggaaactggcctcccgatagcgaacgacgagttggggcagtggaacacgcggaggagagcgcgagttacccagtgagctgctcgtcggcgacaggagggagcagagggctccggtgacgacggacgacagcgatcggcgtggttcaccgtggcagagagttttaggtacggggaagagtcggcgtgtctaggaacggctcgaccagggtgcgggctcgtgatttatagccccgaaacggagccaaacggcgccaagggggacgacaaggggtgtactcgccattgatggtgagcggcggttacaggaagaaacgctagtgctagtggggagaaaaggaaggggcacgggaatggggaataaatggcggcgcgacgaattgctccacaaatgcagggcacgcaggaaggcggaggggtgtctgtagcatccattcgaatggcgacggcgtccacatcagctgaacccgcgacgcttggttgcgccatggggctgctgcgttcgtgccatggggcggaggcggcgctgagaagaaatgctgagtgaggccgggcccaccagccagccaataggagagggacgtgagcaagggagtctggc

SEQ ID NO: 177395 - DNA, 290 bp, Zea Mays
catcgaatgcccctaaggaaatcacaaccagattggccgaaaagacctcatcagcaagaatgacggaacacccctgacaaattgaaaagctactaatggagccattagcagaactaaccaaaattgggtgacccaacctctacaccgaaagaccagcccgcgacacaaaatcctccgaaacaaacaaatagctagcgccagagttaaaaagagcatgggccacaaacgaatcaactgaaatcgtacctgtcaccatgtctccttgctccctgccatccacagcgggtagc

SEQ ID NO: 177396 - DNA, 566 bp, Zea Mays
tggggaaaggagggaagtagcagcacgatcactacacctctaaacaactttaccactgcttagtaatgattttaatcaggggcttcaagttaaggatgttggtcatttttaaatagtgtgtgccagtggtctaatatgttctagttattatggtggtcgtatttttggttagctgaaaataatcttgttctgaatgtttacttttctcttgcatcatgattatacaccatggattacctttctcttgcatcatgtttaaacactgtggtttcctcgttatgcaactttcaagagaggtgatgccgaatttttcctttctgtcttcatctttttatacataaccacttgggggaagtgtttttgggcatccattgtgtttgagttaatggggtgttacaggaatggtattttctcatggcttgttggtacctagttgattgcacaatcaccgagtctcttgcttcttcaagctccaacatgacatgccacattggtatccgaaaaaaggcgccaacaccagcaaaccccaacaattgccgtctaagacctttaaggcttgttccaac

SEQ ID NO: 177397 - DNA, 1090 bp, Zea Mays
ttaatgtgagattaatgcaactggaatggatcaaaaaggggttaaaatgaattacttatgaattaaacaagttttggaattatttttatactagaaaatattttctatcttaattatgaatttctttaaagactcaggacagtggacacaaataccaggaaatctagggttcctaacgtaaaaatctgggctcggttgtaactattctatacctgtagtggacggtgggttaattttgtgaaatccgagggtcttattgcagaagacgtgcgggggaagaggtacgagtcgatcacggccgctggatcagattcgagggccgggattagatcgcgcccacaccgaagcggtacacaatgacagtcgttggatcatcgaccaggcgcccagattttattaaatcgcatccaacttcaccagcccgataacgaatcaatgaccaagatgaaatgcgaccgagggggtatcagcatcaattggagccccacaatttctaatctacgcacccacattcgtcttctacctcacgatggccaggggcgctggagcagaggccgaggcggcgctcccggccggatttcccctcccccgcacccgaatgcacgaactcgaccccacgggtgctacaagtctagcggactacggcgaactcataggggaactcttaccttgactggcgcgtccagaagctttgaccatggcccgcgacggcacgaatgactccggtgatggttctgatgggggagggagtttacaacggtttgcttttatagcccggaggcactggtgaggtggccagatcggcccaagaatctcgtggtagccattcaaagtcggtctcggtgtttgttttggttcggactcgaggtaggagatgatctccgacaacccgggcccaccaggcggtagcatacgcgcgcggcagcggggagttcgtggctgacatcggggcccgccagtcagccagagagggaagatggcaggggctggcgcacagggcccaaatgctagcgagagaggagggaggcacgtgtgcaggagagatggctgcaagccgaggcaaatggactggcgagttccggcccaagct

SEQ ID NO: 177398 - DNA, 565 bp, Zea Mays
ggaaaatctgaacatcatgagggcctgatgtcatcttcctcgggcgaaggaatccaatcaggtaaccctgtcatttctccttctgctttgaagaaagaaaatgatcctgttcgtccggctttctgtcagaaatgtggagttgaaggtcaccatgctagaaactgctttaatgcgttgtggtgtgacatttgtcgcaaggaaacccacgttacttctcgatgtgtcttgccgaaacaaaacaaacctaccattcccatagttggtatggcggtagatggtttagggttttacctttctcatttcgctaaacccctgtccaaaaaaccaaaaagggttttcatcggactgataaaagtgattgaggggttagtttcagctcaggatttggaaagggattttggatttcacttctcttggggaaaaatgtggaaggctacaaaatgtcattctggctttttgatgcaattcccttcacaagagcgtcttgatgaaatgattagtttccctgaactcaaaatgaagatgtctggtgccaagattgtggttgttccttggagctctcggg

SEQ ID NO: 177399 - DNA, 684 bp, Zea Mays
caaacttttcatttttatcgaagacttttttcctgagtgcctccaatatcatcccgttagctcgttcgacctgcccgttggctcttgggtgtgctaccgaagcatatttgatctgaatgcttttttgctagcagaaatcaaagaactctgaacttgtgaagttggatcctaggtcagttatgatactatttggtattccgaatctgaatattatgtcttgtatgaattccacggccttagctgaggttaaagatgcaatgggtttgaattctatccatttagtgaatttgtcaattgctaccagtatatgagtgtatcctccttgagctttcttgaaaggtccaatcatatccaatccccagcatgcgaacggccaagttactggtatggtctgcagttgctgtgctggtagatgttgttgctttgacaagtactggcaggcttcgcacctctgaactaactcgactgcatcactttttgttgtcggccaatagaatcctgacctgaaggccttcccaactagtgtcttggatgctgcgtgtattccacattgcgcagcatggatctcatccagaagttgcttcccggtagatgagagaatgcacttcatgaggatgcccgatgcaccccttctgtatagtgtttccccaatgagtgtgtagtgagctgactgtctagcgatgc

SEQ ID NO: 177400 - DNA, 596 bp, Zea Mays
ttgattttgcttcgtcacaagaggaaaagcttcgggaaatcaaaaaagtcagcaatcttcattaaaaaattgtaaggaattcatcatcaaatggcaagggtacgctctacggccagggttatacgtgacggagaggaagccgaagctgctgaaactgctccgatttccgaagtgatgaaacggtcagggctggtagtgccgaaggaagcttctaaaggtacccctgctgccgaagctgagcagattgatgttgaagaaggtgaaactgaagatgagtacaacgccatgccatctaaacctagccacctggagtttgggaagtctactattaccgaaggtgatatgcctaagttgataaagctaggttatatcagtgaagccaagaagaagctagttcgttttggtggagagaaaattactccgaagccagaaaaggatgaggtggtagtctttaaaagcttctttaaagcaggattgagatttcctttgcatgagaggattgcggatgtgttggagaagtttgggatttatcttcatcagctaactcctaacgccatcgttaggcttagcgtttacatttgggctctccaaagcca

SEQ ID NO: 177401 - DNA, 636 bp, Zea Mays
cactctgcccacggtgacagcggagaaactcaaaggaacaacacgttctaagcaattcatggcggtctaattcaattgggtggttcggtgagcatcaagagcatggaagggtgttggaacaataacatagagggtgagatcggaccagagttgagctggccgcggtgaggtctctcttacggtgttcttgcgcaaatttggggaaagttcaaaattcgcacactctggtgagcgatcgaggctaattcttggtggctagatgcttaactaccttatggagctcgcggcggggtcaatttatactacgagagggcggtggccaggaattttagcggtgacgcgcggcggtcggaagagtaaaagttcactggcgcgcgtgaattagtgtcccatgtcgtggcagtcactccggcgatcaacggggagctagagtgagtcacagtgatgtggtagacaggtagagacacgcggcggacggcggtgagggcttaacagcggtgagaaccttattcgagggatagtgcgcaagggagaggcacggcggctagccggagtggcgtccagttcaccggcggtgaagattttcctaccccgcgacgttatctatccactccgggcacgaatcgggacgtcgac

SEQ ID NO: 177402 - DNA, 826 bp, Zea Mays
tggtcacgcggcggtagtagttgtcgtagatcttggagcaatttgcgtgccgaccgacgtgcatacgagtgtgtcgccaagtcggcggttgattcatcctggtcctcagcccctcgccaaggggagccatggttccggtcatagtcttcatggtgcctcatctcttctttgtgtcgccgggtgcgggagaagtcgatgtcgctccacgctcgtgtcggtcgttgagacaatgacacatatctccttccggatgagctagcgagaggagatggtttgtcgctcgggtgaggaacttcctatacccatccccatcaagcgtttgtggcagctcgctcgcaaggcaagctagcgctccccgacttggcttggggtgtggatagcccaaatgaactcgggttgtagattgtgagggatgggaggatgacctcaaggaggtcggggatggcaccctgctagctcacgaccatgttcctgggccacctgtcactgatgtcggtgagcattccattatagatagaactcccactcctcgggagtttcatcgtccttggatgcctcgtcccgggaaacaggctgagttgtatcctgttcccctgcggcatggtgtcgtcggatgttgcgttgatggttctggtggaggctagattcacgttgcgggggctcctcccccagcaaggtcagctcatcgtcagatatggggtcacttttaattcctcctttttgtgcagaggaggttggggtagtagcgagaggcctccggcgctgcgggcgcaactggagccttcgggatctcaccaacccccacagtcaattgtcgtgcgatgcc

SEQ ID NO: 177403 - DNA, 798 bp, Zea Mays
gtgggagatgaccgaatggcagcctgccagccatatgatatgccgacgcactgacgcagaatcctcgcatttgctccggctgggtggataggacagacagccacgcgaagcaatgcacccatgctcggcgacggcgagagagaagggaagcggcggcaacgcgcgcgggtgaattatgatatgacgtgcacggcatgtactagctacgtacgtaccgacgacgtgctactaccctataggctatagcatagtactagtacaatatacgagtagtgccgtcggaaagcgtctactcctgggaacgtacgtacagagggaaacgactcttcctcctccccgaaagcactgctgtaagctgggtaacatgccatgcatggcccatgaccatgaatgagcacgagtttcacgtactacacgtacgcgcggtgaaaaaaagtaaagaaccacgtaaaaggcgaggccgatgatgacgacgagcgatggatgcgcatctccacgcgcctgtcgtggcctgaaaagctgtgactatttttctactcgatctccagttttctttttttttttttaggatgcatgatggcaaacggcagtacttttgtctgtgtgtcaaaaagacgcgcgccactgtcgtcaagcatgcacgtacgcgcgcccgggctgatcggcagcttccgggtgccgggggccaccgcgattggatagggtagtaggataggatagggaagatgcccgcctgctggctgctgcccaaggaaggaagaccacgacgacgccttcaccaaacgttacggtcggtcg

SEQ ID NO: 177404 - DNA, 1529 bp, Zea Mays
ggaattgtttttatataagaaattcattttataactcattttctctgatttcccatttccctggactgctcctcaaataacagttaagacaaggacccctgcgcaagaattttcgtgactcagtgcccacagcgcaggactgcgggttgatttgtgatttcttcggggtctctttagaaaaattgacctgcgaaggggtatgggatggatctggccgttggatgaggaaggaatggctccgattagatctaggttttccatactggaactgaatctcagccgtctggtcaaaatcccacggttgaagattccccaaactagcgctgtactgcccgtcgttcgatccagatggacggctacgatcaaatcaaacggaaggggacgcgcactttctaatctcgtacgttgaactaggatccaacggcccacgcgaaatcccagcccaatccgtagagcgcggcggcgccgccaccgcccatggtggcgagttcaccggaatctcccggaaccacgcatgggcgccctagaactaaggatttccatcgcacgggcaaccccaagccaccacggacataatgaaggcagtcacatcgcggataataccccggcatgccctgcccccgacccaacgcgacaccgcggcggagcatagattccggtgagtaattccaggggttcttgtaagctaacttcaattcaagttggtgcaacacgatgggggtatgaagtacaagcgagggataggatgtttaccacggttttcgctgcgccaagctttggccacggtgaggtgtggccacggtggctgcccaacccggtgaggaatcctcggttgattcgagcttcgctttatgccgcggcgatgcctattttgtccacgaggatgccacgaaagtggtagggcagtcgcacgcccccaatttgccacgtcggtgaagaacggctgcaacagaactccctttctcccacccccttacggcaatggcgcgcccgaccctcggatcgcgagtgtggcgagtatggtggggagttcgcgggtggatgagaggggcaaggaggggcggctcaaatacccacggacgtggccccgtaagcagttttcccctcccgatccatcagcgcgaagatcccggcgaggttgttagcagcgcgcgcgagctgaccgcggaggggataaccctgacaccagggccccacatggaagtcacccggcgtgcgtggggatgaaaaggaggccgaccaggcggcccacaggtcagccggttggcacgaggttaaggggaaatgggccaaatgtgcagactgaggcccaaataggtattctttcttttatcttttcttttcttcccttttctttcttatttttgaatctaagtttgaatttcaaatttgtgatgaacttgtactcaaattttctgagtatttgatttggataaatcattgtggaataaatttgtctatttataagttttatttttgtattgcatagtatttttctttctttctttccaaattttagaatttctttt

SEQ ID NO: 177405 - DNA, 425 bp, Zea Mays
ttggccacgagaaacgtacccatcatgaccggttctccctctggcgtagtggccacttgtgcataatagattcgcccagttttcttcatattcttgcccgctgcattatttgccgtgtttcccttgccttgactggaattctccgggttttgctgattattggagttgttccgcctaggatatgagcagtctttgatgaagtgtccagacttcccacaattgaagcagccagttgttgaactcgggagtgcgggagaacgagcaccaggggcactcggctgaattgttgaggtgggggcagtagcagggcgaatgaatacaggctgtttgaaggggtaggagggtggacgaggtgaagaacggttttgattgaaaggtcggatcaccaacctttgtcgcttttcaggcccttggttggacctgtc

SEQ ID NO: 177406 - DNA, 419 bp, Zea Mays
gattagggttagagaatgccgactggggagtgaggactggtgaggaagatctggagagtgacatacctgccaagccggagcccagagccggagacaagggtcaagtgcacgacgacggacgacgcgagagggagagtctgagaagaggagattagggttagggttagggattgggatggccgactggagagggagagccggagagggacgtatctgccaagccacaacccgaagccggagacgatgacatgggagggagagtcggagtactaagaagaggagattagggttagggatttctgattgggcagggaccgagccaccgagggagagccggagtctggagaggggcgccgcacggaagggggccggtgacgaagatccgacagagactatgacgacgggacaacggtgaggcg

SEQ ID NO: 177407 - DNA, 377 bp, Zea Mays
tgaacgtccgtggaagtacaagagggagaccccgctcggacatcctcgggggctgggtcatagtttgcactacccacttgagtcggatcatccccggcagcaccctcgggggctatccttggggtccaagttctttgcggtagccacctctaaggctgatgggccctcagttacttccatgggaccaggacaatccaagtcagtctcccgaccctcgagatcgcgctctaaggtcgatgaggcacgggatgacctcaacccagcatcaagcacatcagcacaaacctccatcacaccatcatctgctggctccgataacaaaccttctggaaccatatcctcaagactctgatcaaaattggccagggacagttctt

SEQ ID NO: 177408 - DNA, 653 bp, Zea Mays
tacccacagaagattgtcagggctttcagcgctgcggcctcagtggtttcgtccgccctgaacccgacagtctcggagtcaagggaaagctaacccggctgcagagggagagactccagggtcagccaaaccctgcaatgtggcacccgatgctcctcgtataactgcaccgtatacagaggtggtgtagggtaaccggcagagcagagcacctcccacaagatggagggaaagccctcgtgggaaaggtagtcaaaactgaagcgagtgtctcctccattgatgggggtgggtaaagtcatctatgaaagagggttagacgtaaatgttaaggtagtggaaaggaaaaacatgtgcccgggttgttaaaaaggaggtgggttaaattagattcatctactcattttgttattcattattaaccctatttgtacattcctagtgagatgcatttttccttagtttctaatttcttcatattttatattgcatgcatgctggaaagaacgtcttctcaccgatcagaggggtgcttctaaggcatccctacaattctaagactggcctacatggtctacttatatagcaacctattttccccactattcctaaggcctttcgtcctaagtctagcgttctagtcctgacgattc

SEQ ID NO: 177409 - DNA, 541 bp, Zea Mays
agctttggagctataccccaactgcaattcgactataggaactaaactcaatcgagcactagatcctttataatcttgatcccaaagtttggtcaataacactggcgaccacttctgcttttcagattcaaattcagttcttcaatacaagtctgacagagcaactttgggcaacaatttctttaatctctactactctataagacgttagtgtagacaatcacaaactttggtgcacggttctgcctttagagccgcccgctctctctcgcgcccccgctctctgctatccgccgccagccccacagattgcgctccatttcgccaccagagcatccacgccccgatctcctctctcggtcgccatcatggaaggttcacgtgttccatggaaatcgccgcccacaaatcgccgcgttttgcccaccagccgcgcccctaccgccccttccatccatggcagctgcgccctctctgctggatctctcgccgcccacaaatcgtgctatgtcagccacaaatcgaccaccagccacgcccc

SEQ ID NO: 177410 - DNA, 950 bp, Zea Mays
ctttgattcaacactaggtatgcaatgcttctcaacaaaagccttgctcatgaaagtatgtgatgcaccagaatcaaaaaaaattatggcaggatgattggcaacggaaaatgtacccatcatcacaggctctccttccagggtgtatagtagactcgtctagttttcctttcacctttgtctgcctgagtgcctgccacatttcccttgccttgagatgtgcttccagaagcttttgaaagttggatttattttgctttggatagggacaatccttgatgaaattcctaaacttcccacagttgaagcagctgttaaatgaactgggtaaggccgagaaacgagtaccatgggcactcgactgattgttttgagcaggggcagtaatgggacagatgaaaactaattgattgaaaggataagcgggtgaacgaggaaaagagcgatttgggttaaagggacggatcaccaaccttgaccgcttcttggatccttgagaggatccttcaccccattcacacccaaatctctttgtctttccctgccccgaattcttggcctccaccgaaagtgttgtgctcatgaccctactgtaagtgagatctaaacaagtggccatcttccgctgtagtcgatcattcagacctctcataaaacagttcttctttttcaggtccgtgtcaacttgctctatagcatattgggagagatggttgaatttggcaaggtattgcatcaccgagtctcctccttgctttaagcgaacaaactcttctagtttcatctgcagaacaccatctggaatgtaatgttccttgaacgcttgcttgaactctgcccacatgacaagatgtccttcaagttgaacagctacaaagtttgcccaccaggtactggcgggacctctcaattgttgggctgcaaacaggggcttctggatctctgtgcac

SEQ ID NO: 177411 - DNA, 758 bp, Zea Mays
cggttggtgaggtaggtggctatgttcagcatcttagcctagtaacagacgggaagagaagcctgaaaaaggaggcaacacaacatgttgttggtggtgaatcatgcgctcgtctggaccattctaaggggaggtgtgaggttacgacatccgcagttgcacaccatgggagagaaagaaggtacgagatgttgagttatcaaactcccgactattatcgcactgaacagcctagatggtgcaaccgaactgagtcaatacacacacaaagaagtgacaaagactggtgatggtgtcagacttacggcgaagggaaagatccaaaatagtgagagaagtcatccagaatgcccagataatacctatgaccggagatgcttagaataggggatgtccaaagatcacagtggatgaggtcggagggacgagtagtgtaggacatggaagaagaaaagggtaagcgagtgtgatacccaaggtgacaagcatagcaaagtgaggcaacattgccatggggacaagggatgacagtgccaagtggagggtagaggcagcagaggcgagggtgtaagttgtggcaacatgggcggaggaaggtggggtggtgaagtgaatggcatatgatgagcagagctgttgcatcaagcgactacatcacgattggtgagatctcgtatggtgagaccctagggatcgaaccccatacaatagtggttgtcagtggtgaagcggtcgactaagggtgcgtttggttggtg

SEQ ID NO: 177412 - DNA, 762 bp, Zea Mays
tacagagttagtgggggggagtagcgatattccttctccagctctgtctgctcttgttggtttgcaagaattatccatagcaaattttgatcaggctctcgaggatgttgtccctgaagatctgctatccgagcccattaatggtgatatgatggacgtttgctctaacattctagatgtgggattagaggtatcccgggcagcgtctcgtgcattgttgaccttggagggcggtcttcggagccaagaggttggtcaaggttgttcatatcccatggtggtgactgagagtccttcatccttagaggtggctgttgcagagaacccagttctcaaggatggtgctagtggttgcccagcccccgagggtgttgccggtaatgatccagctcgggtgggtagcgcaagctgcgacccagcccccaagggtgttgccggtggtgatccggctccgatgggcagtacgggctgcaacccagcccccgagggtgtccgagcgggctcctcttctcatacctccatggatgtccatgtcggatcttctccaccacattctggaggtgtactagcagtgcatgcttcaagtgaaggagtcaccttagaggtcggcgcactagatgctggagttctgatgcctgttggtggcgtcgaattgatccctggtgatgttccttcaccgagccatcatttagcttctcgtgacctaggatttccatcgttcttctctaatcttcaggtaacttggcttttcctattctggcg

SEQ ID NO: 177413 - DNA, 646 bp, Zea Mays
gaagcaaccgctcatctcctaccatggtcactgaacagtcgcaagtattcaataagccattcaaactgcttggaaacaagtcaggtggcagacgccgtctcacgtaacacgacaccattgggactgaggtcaactacttggacgatatgattacgccccgcggtcacgtcaagttactactcaagggcagtttgctaaacgctcagtgcaccaagccgtcccttggctacacccattggggggacgtccaggaattttcaatagattttcccaagcagccacacccatacagtatacgcaatgaatgtatcaagacagaaggaagatatcgatagagatcagaggatagccaaaaatagctactgaagtacaagtctaatcaacagaagcattaaagcacgaagtgaaatgaagaccagccaagagccatctaccggacgtccaatctgtcgccaatcaaataaatttcaaacataacaggacatgggtataccgcgttgccgatctctaaggcaagaattaaagacaacaggctgatctctaaaagcataagctgatgatataatgccaaattctaaggcatgagatgaagacctttgagtggattattttcagtaatccactcaaagctcgggggctacaccca

SEQ ID NO: 177414 - DNA, 877 bp, Zea Mays
gagaagtgcccgggggcgctgtccctgcgggtgctgttccaggtggcggggccgaggtgcctcttccagtcagtggtctttctctaatgtagtggatgggcatgaagttggattcttttgatggcagtggtactccggtcgaggcggcagattggttgacttacgtggaggataagatgaatgtcttcgagattgtgtatggagatcgagttcgctttggcacacagctgctgaagggagaggctcaaatttggtggaggggcgtgcaggcagcgcagtcctcctcaccaggagtcctgtcttgggatgtcttcatcagacagtttgaaaggagattctacccggtcaccttcctggagaaaatgaagattgatttgcagtcctacaagcaggagaagaagtctgccaccaagtatgaagtgggcttcaacaagatggtccgctttgttactcatgtggcttataatgagaaggaaaaggcgagccagttccgtcagggtctgaaaccttctatcaggcatgcactgggagcctttccgttggtggacttccgtactacggtggagcaggcactgggtgtggagatgcaacaccagtataccatggagtcgcagaagtcttcgggtgttgatcagcctcgtggccaggacgcgaggaggggcaacacgggaggtccagcccacaagaaaggcaattctcagcatcagcgccatcatccttatcgtggcaaatcttctgactcgggtacttcgggaggaagtactcagaggtttcgggctattcctaagcccgggctggggctagtgtgtttccgttgtggtgatgcgcatcgccgtgcagagtgccagtggagtggcaggtgttctatctgcagtca

SEQ ID NO: 177415 - DNA, 641 bp, Zea Mays
atgatggtcagttagttcaagaggggaactaatggaccagtgttaggcgctgctaaggatgtgagtgtcgcttgttttggtaaggttggtgagtgcagtggcctgaaaccctcagagaaacttttagccaccccaagcttgtcaagttcactccacctaaaaatgccacccctactgtgaaaaatggagtgattgaggagcctatgagagcctctccacagaaacaagtgtgaactccaaaaccttaccatctcaggaacacacttgacacccttcacaacatttctagtggtccccttcctagagcctctcagccatcgaaaaggaaagccccctcccacaagcaaaatccacccaagagagaggtgaggttccattgtgagtattgtaagagggatggacatcaggcttctttttgctttaggaggaagagagatgagcggtgggtttctaagtcgagcaggaagaacatgaaccgcccttcgcatggtgttcatgctcagtctgtttagagacatcctgagtcgagcatggtgttaatcacttagaggtgcttttactcttgctgctaggcctcaggaggagagaccacgtggtggtcgtgcccaacggggtgttggtcatgtgccatatggtcaagg

SEQ ID NO: 177416 - DNA, 394 bp, Zea Mays
tgaatagccaagtgcagcatcacatcaaagaaaggaggaaatattttctcaagtttgcacaaaatgattgggatttcaactttcattctttgtaaaacatccaacttcaatgtcttagcacataactactgaaagaaaatacctaattcagcaagtgcttcatatatgtccttattcatgattcctctaatagcaacaggtaaaattctttgaagaaggatatgacaatcatgagttttcaatgcttggaggttgcatccataagtactaaaacatgttgctaagttagaaacatagccatcagggaatttcacacttctcaaaaagtcacaaaaagcaaccttttgtgttttattcattgtgtatggtgcatgcggaacactgtatgagtccc

SEQ ID NO: 177417 - DNA, 377 bp, Zea Mays
caggctggcatcctcccctgaggcgggactcgggggccattgtcgataccctaaattaggggtactctctcctacagcatagaggcatcgcacccatgcgacgtctcctagccgcgtggaggaccgtgcctaactccaccggatgggcgggccaaagggcgccatgtggcaaggaaaggcaccatgcctcagtaaggccagacccccacaaagggtcaccgggcccctatatacatacaggtccggagcccccaggtaggtccgaaccccggcagggttccggaacgagaaggaccttggagtgtgcaggggtccggtgctgacacgtgtgcgggccttgctctccacttcccgcacaggcgaagacccgctgcttg

SEQ ID NO: 177418 - DNA, 403 bp, Zea Mays
gaccgatttaaagcaaggttttctcccaacccatgctatagcaagtcgacctccgttaataaaacttgttgacaaaatatagctctataaactcgctgcaacatcctaagttcgaaagataacaaattaagagatatagtgctccaaagttaggtgaaaatactgcagctcggcttcagctgactgaatctgaaactgcacatcacacgcctgacagtgaaagttcaagcacattttactccacttttcatgcagcatcaggccatacacacttcaacaaacttgctcatcattatatgttctttaagttttctatagagactacaacccataactccatggattagtgaaaagaaagctccaaagttgagcaaaattcactaaaattcagtttcagtgaact

SEQ ID NO: 177419 - DNA, 281 bp, Zea Mays
acctctcccactcactttaagatcaagaagggtccaacgaagtgaggggacaacttccctttgactttaaatcttctcataccccggagtggtgacaccttgaggtacacatgatcaccttcctcaaactccagtggtcttctattatcagcgtagctcctttgcctggtctgagctaccctcaaattctcccgaattatacggacttgttcttctgcctcttgaataagttcaggtccaaagatctgtcgtcctccagtctgatccaatgtagaggaatc

SEQ ID NO: 177420 - DNA, 540 bp, Zea Mays
cagcttcccctcacctatccaatcgttgccccgtccgccggatctcaccatccgtgacccctcactgtgaagtcccgcccccgtcgcggccgccgcgattgcattcgtcgtcgagccatcgtgctgcgctgccggacggcccaagggcctgctgctctgccgtgtgcgttgcccctgagctgctccatctatggcagccccatctcctcaccccctgcgcttatgtgcctcccatcctcggtgacgaccccatgtcggttctctatcctagccacacatggcttggacttctcctcccgtcgctaggggccctgcctcccatgtgttcgctatgcctcctatcgccggttccatggattcaccccaacatacatgagctttacctcgcccacttccatcgggatcgttgtgcgcgtcctccttcttgacggccacctcgtctggggtattttcgtgtccttcgaccaggtcatgtaccctattctccgtgattgcgtcgagctccacccgcaggccgaccgtcacgtaccaggacccacc

SEQ ID NO: 177421 - DNA, 515 bp, Zea Mays
tccagataaggaaaaaaattcccaagtaattcaactgacttctggctgcctataaaatatcaaatatgaactttaatcatcaaagaccatctacgagcactttgttttgtattgatctttgagaaaaatatgacagtttttgttcgtagcttacatttaacatctttgagaaaaatgagatagattcataccagcagctccccagaaatacacggcacgatcgccttagaaaccttcagagcacaatgatataaatcaaatacaacattaaaaggactgctattcccaactggactttgagaaaagcctgttgattaattcgaggaagcaaggatcgcccacctggaaggtgtaactcgaagagatgacgtcctcggagactcgtcatggcctctacggacagagcgacgccgcaggctagggtgcctagatcggcagctcgcctttcatgagcgctgagggtaggtcgatctggcttcttctctatcatcgcgacctagcaggatccgaaggag

SEQ ID NO: 177422 - DNA, 307 bp, Zea Mays
gtgatgtattgagcttgagagcttgtatgaacttgtgagtttgagtgagtgtgagagcgtaagttgggtctgccttgtaacgtcgtgtgccctcccttttatagctcaagggggcacgtacaaggatactgagccccgacatgtggacccagggacaaatggaaggaaacaactaatgcctgtaacgtcagggtgaactccgagcgccataatgtctgtagcatacagtgttgatatgccgccgcagcttccttggtacacgcgtgtcattatgagtgcagcgcatgcggcagcatgggcgtattgc

SEQ ID NO: 177423 - DNA, 440 bp, Zea Mays
ggggaggtcaatctcatcatccttgccaccatcatcatcacttgttggctcccatgcctgtggatttgccgcgggtcgagaccgaccggagggattccaggccgtccgaccacgagcaccatgagaccctgaggcctcaccaccttgcattacatttctggatcctcgccctcgcttggatctagaacgcgggggagtttcttcatgaatttcttgatcatcatcagagtcagactcaacaacttatgggttcctccgacgcaccatccttaagataaaaagtagaacctatggtgagcgaggagatcgatgttcaaggattttaacaaacacgtttgagtaaagacgcgtatgatattgagcatgcacttcaaccgttcatgcgagcggttcaactacaacgaacaataccaaactactaaactaaaacaatgttcgag

SEQ ID NO: 177424 - DNA, 474 bp, Zea Mays
gatgaccgccctgtccaagaaggccaagaaggcgcaggtgcaaggcagccagctcgccagcgaggctgtcgtgaaccaccggaccatcaccgcgttctcgtcgcagcgtcggatgctccgcctgtacgaggccgcgcatgaggcgcccaggaaggacaacagggtgcagtcgtggtactccggcttctgcctgtccctgtgccagttcagcaacacgggcagcatggcgctcgcgctgtggtacggaggcaggcttatggccaagggcctcatcactcccacgcacctgttccaggtgttcttcatgctcatgaccatggggcgggtgatcgcagacgccggcagcttgacgtccgacctagccaagggcggtgacgccgtgcggtccatcctggacacgctggaccgtgaaccgatgatccaggatgacggcgacgaagccgacggaccaaggaagaagaggaagcaacagca

SEQ ID NO: 177425 - DNA, 535 bp, Zea Mays
ctgatttgttcttccacaatgctgagaatatcggtcatattgccaaggtcttcccaacagcaagtgacacacaaacatgggtgcaacattgcactccactgtgtcaacaaactctccaatcttgtacgaaactttcaccttataaccaatcttgatatctccttattcattcaaccattggacatgatatggatgagggtgtcgctgcaacttcagatcatgcctttcaaccatctcacgacttacaagattatgactacttcctccatcaatgatcacctttactactttgtcttgcacttttgatcttatttgaaaaagattatgtcgctgtccaatttcagcttctttcatttgaacgctcaatatttgtgtaaccacaagagcggtactatgctcaaattcacatcctgtatgttcttccaatttatcagtgtcatctacatttcctgcttcagatttctcttcactagctgatgtatattctccatcatcagtcacaaggatcacacaattatttggacactccttaatg

SEQ ID NO: 177426 - DNA, 484 bp, Zea Mays
ataaaggatatacctataagtctggcccgcttagtagcttcttcaactcttttagcctcttttaaggcgtcatgagacgctttctcattttttctaatggtttcatcagatatttctcggccacccttcagccatacatcggaataaaacttcccacctagtgtagtagcttcggccgaagggtttctaacatcgtgggctgagaaggcaaaatctggctgaactacaaccttagcataatcacagtcgaccttttccaaaacagacacgaccccgcgggcactggcaaaggcacaaaaatcccctctatcactaagaatctcttcaaaggcttcggtcgtgccgttaatccattggataactccatcgaggtcaccgtggatgaatttctgagaatgcacgaactttggaaaagttgttcttcaaattcttagcgcattccatagccacatcgtagcatttttctttagctgcatgaagctcg

SEQ ID NO: 177427 - DNA, 449 bp, Zea Mays
tattaatgcatattcatttatgctttcagaaattgaatatccgctgcattccttatgatgttattgtctcaacttggataatgggcgatcggcagcgcgatgcagtcgctaggttgggattttccagtatatttgatctgcgaactgatgccttagagagcagatctctcattaggtggttgatggataaattggatccacatgacatgaccatacgcccaggggctggcaaggaactaaagataacaaaagagacagttcgtcttattttgggtttgccatgtgctggagggggcaaggagtttactgattggtatggtgaagtggatgctgttgcaaaacttagacgtgatctcaaagttggtaaagaagaatttgatgttgtcaagcttcaggacaagatagtgcttggcactgatgatgagttatcaatcagatgcttttttctg

SEQ ID NO: 177428 - DNA, 282 bp, Zea Mays
ggtagatcatccttcgataagaccgaaaggccttcttcaagtttaggaaatcccatactcttagctatctcctggcaaacagatatttctttgttatccgggagacagtacaggaaatcttcttcgttactaccattgaacactaaggcccccttcggatatttcaatctttgggtgtagtgtctggcttctagtatttcttcttgggataatttcttccccaaagcatgtcgaatgatgtagtcaacattttcgttcagagctttgggagcaggagcttcg

SEQ ID NO: 177429 - DNA, 637 bp, Zea Mays
cgcgaacgcgaggtcagttcgagcctataacctaaggagaccgcggctacttacatgcatctgggcaaggcactggggcggcggatgcaaccccaacgaccagcgaaatctgcgcagtcactagcggcggaaattgcgccgttcagctgagaccggttcagcgtcgagcgagtggggaagaaggaaacccccgacatcctgggcccgcatggaagtgaaggaaacacggccgaacagggggtaaggggctgacccgtgggtccaaagcgtcggcgcccaattcctggtgtttgggctgtgcggttgagaagttgggccgaggtggttgggccgcaagtgggagaagggaaagtgggctgaaatgagctgaccgagcctagttggttctgtttttattttccttttctttttctgatttcttctcccttttttttaaaattcaaatttgaatttaaacagtgatgtgaacttacactcaaattaaatatttaaaataaacttagtagtatgaaaggaggtttaatatgattatttcctttagtattattattatttgtttgtatagtgtcctttcttcttttctcaaaatcctaatctccaaatttggtttaatgcacattttcactttagttttttt

SEQ ID NO: 177430 - DNA, 594 bp, Zea Mays
gtgggcattgagccatggatgggaagtgggggaagtcaagctacgattgacgtcgtcttagaaaaatagttagttcaaagtcttgccttcgttgttgacttttgggggtgggacactgctgcttttgttaaggaggtggaggttggggcggtgaaggtggtcgataaatactcgacaaagttggaactggcaaagagttgggatattcgtggttccaatgtttagctgaattgtgtcttcgagctcaatggacttccctatgggccctatccggaggaggcctctgaggacgctgatgacactattgagggaaagaaaaggcgttgagacaagggtgccacggcggatgagggattcgaagcggaaggttgtggctccactgctgaaaaagaagaaaaagaaggctgaagttggcctgactggcggtgcaggacatgaggagagcggtaaggcacataaggcgtcgaccagctttaccaaagatctagccgagacatgcgcggagtcaagggaaattatgaattcgcctattctctgggaggcctccgtgcggatgctgaaaatgactagtggtgagtggcataaggacgaccc

SEQ ID NO: 177431 - DNA, 629 bp, Zea Mays
gccgtcgccatggtggccaccgttaatctggatcgcgccatgccataggccatcttaccacgtcgcagtaagtcgtggagagtagccggtacattaccccattgcgcgccaaagtgaacttgcctcggtagaaatatcccgccgccgtcgtgaacaccctcgtctcaaattcgcgaagcagtgattggctcctttaaattgagcactcccgtcgcttcgcctctctgttatgcgcacatcccaccctcagctagcctctctcgtgcaccatagcctccagtcaccggaattccctgaaaccagtcaccaacaatgtcgtgagacatctcaccgtggccagcccttatcatgttagttcgtgtctctctaggccatgttttagcatcctctagtgctagtgaagctcactaacttgaccgattgaacactactgcagcagggcatcgagaacatcgcttcaccgccatagagcaccgccaagaacgccctcacgtcaactggccctcccgtgctctctccatccaaattcgtgcgcgtaccatacctccgatgagccagtgatactcaccctagctttaatttaaacgctactgtgttctgttgctcggaacgggcttgccggagctctg

SEQ ID NO: 177432 - DNA, 1152 bp, Zea Mays
aagcccaccaatttcccacgtttgttgtgcccctccgatcgctcctcctgcactccgacgggatactagtggaatttcttcttcacgtcagccaccaccactcctccggcatcttacttaaaatgatggggcccattagtcgatttctttctcataactcaggcaccttgttaaatcctgttcaggctcagctgccactatttgtttcgtttcacatctttggaactgttcacaatcttgcagtagaatcaatctgaggaagctcgctgaaggccaaaaacaataacaatgtggtcagtagataagtctgttgattttttttgtctacttaaattaaatgcctagtgcttgaaattaagcggaacatatattagtatactagttcacaaccatacatggaaccaccagtagaggcaatgatcatcaaatgtgttttcagtaatacttctctatatacttctaaagtttgattgaccaataatattatgcagaactaaggaacgccgcataacaccatctaacaggctaacagtaaagcatgtcaattctttatagaaggcaacataataggcaaactaagatcaggtgatcacaaaagacatgtatcatgcagagtaaaactgtaaaagctatgagaagttggcaattaaaagattttgcaaaagtcaggagtaatggtaattaatagaaatcagatttaggaaagggaacagctcgatataaagcatgaagaggagaaataaaatgtgatatagcacctctgctaccttgggtcttcaacaggccttgccaaagcaaaaaaggaatcttgatttactgacatcaataattcgatcggggcagccttagctggacgagaaattttgagcctgggttctataatgcctgacaaagtccatttcaaaagataaaattgatatccagtgcccagtgcccatacatataaaagagaagcccattgctcctgttgtacctggagaaagtgaccgtccttgatacagaagtgttgctagtgggtttgttgcccaatggttcacagctgggaggttagttggctgaaatcccactactttaccttcttctgacatgaccacctaaaaatatgtttatcaagttgggggtataagtgtgagctggtgacctcaagagaat

SEQ ID NO: 177433 - DNA, 479 bp, Zea Mays
cctcgtcatcttccgccacctcgaatcaagggaacgctacataataatgtgagcaaagaatggccggaggaaggccagacaggtcttcgacatcaccaggagaaacatagaaccaataatcccaccagttgccccacttgttcctagcgcaagggactatttccatgacctccgccgaagtctttccagtcctcggtgtgaaggtgcacgatccaaattgagcaatcttatttcctatcttcctcttctaccaatgcaggcaataattcttggtgaagacctccacagacggctgcccaccgtaagaagtaactgccaaacatacttcgccagcgcaaccatggcgttgggtgtcaactggtgaacctgcacttcgaacctttgcaacacctccgccacgaagcgatgtgccgggaggcgaaggccagcgacgaaaaaggactcaaaaacaaccaactcgccctcaggctcggggatct

SEQ ID NO: 177434 - DNA, 677 bp, Zea Mays
atggatttgaggtgttacacaagcataccaaggaatcagcttcacctgtgctggccttgtacctcgaagccatttgtgcaaggtcaagggtagggatgaaaacggtttcagaattttccagtattccggttaatgttttcgattttttatctggttcgtcggtaacggtaattctcgaaaacagaatcggtcaccagaaattttaatcggaatcggtatggaaatcggtgtaggcttttaccgacgttcacagtaacggtaattctcgaaaacagaatcagtcaccgtaaattttaatcagaatcggtgtaggcttttactgaccgtttccttcggttaccgattttggacggaatttaccaaaattatacctcagaatttaccaaaaataatttagtccagcccatctcaagcagtccatgggatacggaccagaggccgaccagcccactcgcccagtccaggcctagccgccagccccattctgttggcgtgtgtaaagtcgcacccagacttctataatgcagtggttggtgtgctcctttctaattcgccgacgtggtaccaaaatgctttgcctcccattgtgctgctactactagcactagaagacgaagttcgctgctatgccatcgactggccaagcctatttaaatgggtcgaattctactcagccg

SEQ ID NO: 177435 - DNA, 774 bp, Zea Mays
gcatcaccagcagaaatcaaaactctagcatcaggtgcgccggactctaaggcgacttcctgacccaaagcacgtgctgctgccatgcaatttgaatgtggaggagaagacccgacatggacatccatggaagtatgagaaggggaacccgctcggacaccctcgggggctgggtcatagctcgcgctgcccacccgagccggatcatcaccggcaacaccctcgggggctgggtaaacgctagcgccatccttgagtaccgggttctctgtagcagccacctctaaggctgaaggattttcaaccacttccatgggaacgtagcaatctagatcaacctcttgactcttaagaccgcgctccaaggtcgacgaggcacgagagacgagacgctgctcgggataaatctaacccgatatcaggcacatcagtgcaaacatccatcataccaccatctgtcggctcggacaacagatcttcagggaccatatcctcgagagtctgatcaaaatttgccagagacaattcttgcagagcaacgagagcagacaaagctggagaaggaacaccactactctcccaagtgactatgtaacgacgactgtttttctgaattaaggggatttcctcctcctcttcctcatcctcgtcaataatatgaacaacacacccattgggaccagctctggccggattgcacccattaggttcagcatcatcaaggtcacacccattggggtcagcatcagccgggtcacacccattgggttcaac

SEQ ID NO: 177436 - DNA, 498 bp, Zea Mays
agcttaatctcaaaagctgcatcgtgctccggaggaatgcctggaagctctgccggaaacacgtcagcaaagtcacacaccacccggatgtcctgcacccgcaaggcagcctcaccctccaccaccatggagaaatagatccctgacttccttgaccggcgatcaggaagcaattgcgccaacaaggatagagagaacttcggggaactccccaagaacaccacctccttacccgacggcgcctgcaataacactgtcttccagaagcaggatataaccgcgcgatactgggataaccagtccatacccaagataacatcgaatgcccccaaggaaatcaccaccagattggccgaaaagacctcatcagcaagaatgacagaacacccctgacaaactgagcagctactaatggagccattagcagatctaaccaaaattgggtgacccagcctctgcaccgaaagaccagcccgcgacacaaaatcctccgaaaca

SEQ ID NO: 177437 - DNA, 950 bp, Zea Mays
gggatggtcgggggacaacaccagctcgtggggggtgcgagtttggagatgcgccgtgggaggaaaatcgagtacctcgacatcccactcaaggacagcatcaaaggatggcgcctggaatggtttatcgtagagaatcacgggaactctctccccctcggtcagggagatagccagatgttcgcactccaagttggactgaatcccccacagacttggaggtagctgaggccggggctctgcttgccgaggttggattgttgaaggagaagggtctgactgtcgaggccgtggtcgccgattttgtttttaagaacattcagccactgaaagacagagcgtacccaacttatctgtatcgtggcctcactgattcgactcgggttaccaacagaaggattcctgctgtggatctggtaagccggcttgagatgattcttagaggcaaggtgtcgaatatcagtgctcctgttgcatactcagcctgggatcagcctccttccaaggctttcatcagttttgtgtcaaatcctcctgctggtgacagtggcttgggccttagagtgcgaccttctcccgaagaggttgaggctttggttgtttcgcttggtgaaatccccgatgacgagaggcaggttcattttgagatgcctttgaatccgagcaacgcagaaataagtgccatgctggacatgttggctgaggatctctctgattcggtccctgctgaaacactagctgtggcacccatcccagagtctggaaaagctttggacattcagagatctgatagtattcgcccgaagcgccctcgccgaaccaatcatccaacttctcctgctaaggggaagaaaaataaaaagagacgtcttcggcgagtgtcatgcttgaatcaggatgccggcccttctgctcctgctgtcggggaagtgccagtgccaatttttact

SEQ ID NO: 177438 - DNA, 640 bp, Zea Mays
accggaaatcaaacacctatgccagcttatattgagataagctcatgattcggcttactctattcacactggaagcacaaagatgtaccaggatctaaaggaaaagtattggtggtacggtttgaaaagagatgttgctactcatgttgcactatgtaacatgtgtcagcgagttaaagccgaacaccaaagactagcaggattactacaacctctcaaggtacctgaatggaaatgggaggaaattggtatggatttcatagttggactaccccgtactagggatggctatgattcaatatgggtcatagtagacaggttgactaaagttgcacactttatacctatgaagacaacttactcaggagcccagttagcagagttatacatgtcgaggattgtttgtctgcatggagtaccaaagaagatcgtatcagatcgaggaactcaatttacctcgcgcttttggaaaagactacatgagtccatggataccaagctaaactttagttcagcttatcatccgcaaacgaatgggcaaatgaaaagaacaaaccaagtgttggaagatatggtaagagcttgcactctaaagcatggtagaagctgggataaaagtttgccttatgcagaattctcg

SEQ ID NO: 177439 - DNA, 880 bp, Zea Mays
caattgttccccggtcgaagggggtatcgcgtgatcaaagccacctgatcaacctgggatggtcaggactaaatctcacaaccaccaaatcggtacgctatgctagtcattggatatagatccaacggttagagttctaaaccacagagatcacctggcgtccatccgatcatcggtcgacggccgaagctgcgccacaccatggtcaagccggaactgcctagatctgatcatacgattgaggtttattgagcaaaggggtatgtccatgttttaatcagagccgcctaggagaggatcatctgctctgctagcttttccctactcgaacctggacaaaggtcgtgttgcccctccccacggcggaggttcaccgcagcaacggccacaccccgccacaatgtctaaacctccaaatcaaccacatctacgcgttccaggggagatattgactggaattagaccatcattaacgcaaacaaccatgatgagagccctgccaggcatatagcgacccacggcggattcgtaaagtccggcgaggtattccctacccacggtggcccgacctaagttaccgtgaagcaatctaccgaccctaccgtgcgatgaaccaacagggttaacacttaccaggattcaagcggtggaggtcgctgaccacgaagaaggaaggactccggcggcgtttgaccctgatgagcgattccggtcaggcccgccctaatcttccacctagttaaccacgaacgtgatcagtgcgacttggcgaacgtgcttgaccttcccccgaccaaggctgggcaactatagcacgaggaacagctacggctgcgcgaagtcggcttgttgggacacggtgagctcgtggtagcaccac

SEQ ID NO: 177440 - DNA, 404 bp, Zea Mays
catgcttggtggggattgcctcctccatccgcgcggggcaaaggcgtccacacccatgcccccacacccgtccgcgtcgtcgctccagtcctccctgatctctcgatctagtatgacatgaccaccaatgggtcgtcagaggcattttctcccacctctcacatctgttccacacatcaggtctccagcaccacctcttcggcgccgtcccaacaatgttcgtccaggggtacacacccgaggtgcttgccatcacgaggagttccccatcacctggctcccctcctcagtcgctcaccatacggaccagcaccgccgcttctagatgtggcggctttgacagctcttgccccatctcatcggtggagatgctggagcgcattccgcatgaaccccgcagagcc

SEQ ID NO: 177441 - DNA, 700 bp, Zea Mays
gatccccatataagtgaatcggtgtgcgacacagaccgttggatcaaaaggctacggtcacgatttaaaacactagcgatggaatctcatacgcccggtcccaatccaacggcttagcctcgatggagcgaaagggtaaactaagatctaatcctagccacccatcttgaaatcgacggccacagacccgtcttctctcccacggccgagtcatagcggcgccacccagaccatgcgacggcgccatcgccggtgcacgcgatacatcaccccggcgcgctattcttcaatccaatgtgattattatgaagtggaagcgatggcgaacacaatggaagtggtcttaccggcgctggtgcggtggtgaggccggtcggcggacccaggcggaggggtgactactggcgcacgattctagcagcacagggcgcaattccggacaggcgaagctcaatagtattccatgtggtatggcgagcttcaccggcccgattccgactactcgacatcgccggaggcttcgaatccaccacggcggcacctgctctactacttcgcctcgccgtgatgcgattgatgagctggggcgagcgctggggttatatagtgtggggcacgtgggcaggcagagtccacacggtggaggactttatccccggaatcaggtgacaacaacccacccgaatccaaggggaagact

SEQ ID NO: 177442 - DNA, 455 bp, Zea Mays
ctggctaacctagactagagcattccttgcatgttggtaccctatgttgtaaggcaaattttgtgtaaacagggcctaacagcatggtatgtgcaagaaactgaaaactagttgttgttttggaaatcataactggtgcgaatcctcagcataatatattggtattttcggtccttgcaatgcataccaaatgttgttgtgaattttgttgcctatgcacctataaaatcttaattaccttcatcatatgcagcacatgtgatgcctaaaatactaatataaaggttcacagttgcagatggcggatgaaatgcgccagcaccatagaggccatgatgagactagtggaaaccagcaggcaccacccgtgccgcaaccgccttccatggaggcgatattgcccgctcagacagaactgctacgagagcttgttcaaaggcaacaacccctgccac

SEQ ID NO: 177443 - DNA, 738 bp, Zea Mays
ccgccgagtggctccggcgtgctacaccagcatcggacgagctctggctgaagctggctagcttgtccccaaggtgaagcaccgttttgttgtactcatcaagaccggagagtacatagaacaggtgaacatcacgagacggaacgtcgtcctgctcggcgagggcagaggcaacacagtaatttctggcaacctaagcaacccaacggggacggcgatggtgatgacggccaccgtgagtaagtgctccgatcgacgatcggcgtcgtcgtcttccgatccgatgatttgctagctaactagatctgtcatatgcatcacacacaggcatgcatatatgcgatagtaactaacattaacattttattttattatgcatgcatgcagatgttgtagccgacggctttttgccccagaatctgacgatccgtaacgaggccgggccgaaaggaaggcaggcggtggctttgaggtcaaactccaaccggaccgtcgtatttggctgcgctatcgaaggcttcgaagatagcctgtacgccgaaaatggagtccaggtgtacctagagacggacatatacgggaccgtggattttatattcggaaacgcgaaggcggtcttccagcgttgccgcatccgggtgcggcggcccatcccctgctagcacaacgtggtgacggcgcagggctgcgacaacaatatgtacgagaactccggcttcgtcttccaccggtgcagcg

SEQ ID NO: 177444 - DNA, 834 bp, Zea Mays
cgtggagtagtggtttagtcgtcgtctggggcgctaaataatacgaagggcttgtttggacgctgacctccaacgcaacaccacgtctaaggcgcggcagccgattcggccgccacaactgtggcgcggcgtgaggacatcggcggtgatccaaacaggtactaaaaacgtctagaaatctggtttcgttttcttcatcaatcatcgtcaagcgtggactctgaaaacagacagccgatacacataggcattagctagcattatatatacagcgtattgtttattggccgtgtgcacatgcataggatgataaaaatatatggtgactaataacaacaataacgtacacgaatcacggagcacaattaggccaaacgactaaaggtgtatatatatccagatgcacgtgctgcctgtgaggcacaagctgtaattaagagagagatcgagagagagagagagaggatgaaagatcatgggcggatcaagcgcaagtgaaggcaacggctagccatactgttgtactattactagtattttgttgtgcctctgctgtggagatacggcaaacggtatactatactataatagtcgttggagcatgtgatttcagaaactctgaatcgcctgttaaaactctgaatgtatgtgatttcataaggaaagaaacgttgaatgaatattcttcgttaaagcacagtagtagtatggatgcatgatagaaaaagtctttggtcagaggatggatggcgtgcagaggtgaggtcaagtcatgcaatgcattggttggagtcgtctcctctcgtgttctgttcctgtatctgcttgtcagag

SEQ ID NO: 177445 - DNA, 488 bp, Zea Mays
cgcctaagggtgcagccggaataataggtgcgcacaatcgaagtcgctcccaacagactctccgtgcagaagtggcctatgggtgcggctgtatcaacgaaggcacgcagccttatcatacaaattatggttacatacacacagcgagggcatcacatattacattggctcagccttcgggatgatgcccatctccctgtagttgaacaacattatcctcaatttctcaccctcaaaaagatttcgcagctccccttcacccacactaaccccagccggcgaggacaacaattcccgcttaccggtcccgtccacgcgaagacgaccactctccatctcaccacaatgacgcctgttacttcgcaacaattcactcactctccgtttcgccaccgcccttcgccgcctacacccagtactcgcacctggaagatcctcagcacccaccacacgcgacgaagtctccgccgctgccacgtccaacgccg

SEQ ID NO: 177446 - DNA, 693 bp, Zea Mays
aagcagactaccatttggtttcatgggcatttcatgagcagagtcaaagagggacttgtgaagatgtttctcttcctccgaatcccagggcagatccatcattttatcaactaaattccttttaatgcagatagcacaaaattcggtcaccatcatctcaacatgataaacccaagagttttttaatgtatcctcagcatgtgtcatattttctgagtgttgctctttcaccttagagcagtagcttctatgatacataaacgtttctgttaggaggcgacattcaattctgacacgaaccacagtcactgcctcactaagaaatgaaatgccatcttttttaaagttttctgtagcagagaagcttccatgccctgtgcactttagcacacgaagtgccatatcatatttttgtcgttccagcagaacttgtgctatttttggatgtgtttccttgctagagattttgggaagatgagagtacgcctcctgcaaaggcagcagggttgcatcacaaacataagataatgaagacaaaatccatgaaactcaattaaaatggcactgcatacatatatagacgagattcaaatctgaagtcaatggtaccatgaacagaaacaacaaatcattgttacatagcagtacgtaacacaaactataacacgattccaataacaaaacactacaatg

SEQ ID NO: 177447 - DNA, 601 bp, Zea Mays
aaaatgttggtcgaagttttgaagacatgcgagatataccttcatcagcttaccccgaagctcttatcagagtggtggttttatatgggccacgaggagtcagggactggagccgaatgctagatgctttagcaacattcatgagctatcctaccagacgaaagcgaccatgcaagaataatatcataataacttcggctgctacggcttcgtgcctcgctctgaggcaaactaccctgtgcccacatttcggaagaagtgcccaggttcttggatgaaggaatggttttacgtgaagaattacctgaatcagagggaggatgtgagaggcgttatccaacgtcctgtatggtcatgtttcggcattaggaggccatccatcgcacttggaaatgaggagcaggcgtgccaaattgctttcaactccatatgtgcctacattggcacgagagatttagttaaagagcacattgcttataaagtgtggcctcttgcaaacaatttagaaatggcgaaggaagccgctgctggctccagctagagtggtttggtctatctcaagtatacttttcggtatagaagccaatttgatgagccaaat

SEQ ID NO: 177448 - DNA, 480 bp, Zea Mays
tatgggtcggaggcagtgctacccgccgatctcaagttcggggcaccaaggttgatcttcgaaaacatagcagaagtcgaggccaccaggctggaggacattgatatactcgaagaagaacggctgaatgcggttatccaatcagcacggtaccagcagactctaaggcgctatcacgacaaggctgtgcgacagcgatctttctcagtaggagatctcgtcctccaccgaattctaacgggggagggacggcacaagttatcacccttatgggaaggacctttcatagtagcagaagtcactcggcccggatcatatcgcctcactcagatggatggcacagaagtcgagaactcctggaacatagaacacctcaggaagttttatccctagctgtatttcagaagctatcgagacgacgatgtaccctgtaaaatggaaacatgttatcaatagaaaaaagatttcagagatactcag

SEQ ID NO: 177449 - DNA, 623 bp, Zea Mays
cagcagggaagttactcggattcattgtcagccaccgaggaattgaagccaacccagaaaaaatcaaggccatcatgagaatggaagcaccacgatcacagaagaaagtgcagagacttactggatgcatggcagccttgagcagattcatatcaaggctgggtgagaaaggcatgccattctacaaattgctcaagaaggtggacaagtttcagtggaccacagaagcacaggaagctatagaagcactgaaaaagttcctgactacgccaccagtactcaagccaccacgtcgagccacgctgaatcagccgacagaagatttgttgttatacatctcctgcatgactcacgtggtgagcaccgcgttagtagtcgagcgggtggaggaaggacatacatatctagtacaacatccggtctacttcatcagcgaagttcttggaccctctaaaaagaagtatccccaagttcaaaaacaactgtacgtggtacttctaaccgctcgcaagcttcgtcactactttgacgaccacaaagtcatagtagtcaccgggtttccaataggggatattcttcacaacaaagaagccatcggaagaatagccaagtgggcctgcaaa

SEQ ID NO: 177450 - DNA, 883 bp, Zea Mays
gaaaggttctacagtattgggctgaaactggcccaatctggcccatgcccaggtaaagactcgcgcgcccgcgcccgcgcgacggttttgcaccgaagtcctcggcggtttgaaaatctagcaaggaacccgcgtactattttcttgggtcactgacaaatgcaaataagccctcacacttctatttcttcacaccccgaggtcaacgacggggagcggcggaggaccgagctccggcgagcctacaccggccggatcactcaactaccggtgctcccgtgcagcagacaccaaattgaacccttaacaaacatttcccctcgcttaattccaccattcgtgttcccaaactctctgctcacggtgtcagtgcaatacaagaacaacaccaagtgttcccggcgatttaataggttctagcttaatcggctgggtcggggagcatcagggacacacaaggatattgaaacgaaagagcagggggcatgagcggacctggtgcacgctgaccacggcgaggtcacaaggcgcggtatttcacactaaattggaggaaatccaaaattggggcaatctggtgagcaattggaggcacagcttggtggattgggtgcttgactaccttacggacccgacgacacactcaatttatgggctctgggggcggtggcctatgaatttggagttggcgcggtggcggccggagagaagagttgcactggcgcaagcgattagtggctttcaccgtggcgggttcaccggtgatcaccggacatgcataacgcgagcgactgcgacgtgataaatgccaaggcacgtggcgcaaggccgcgaggtggctaactccggcgaacctatccaaagcgaccgtgacatactcggg

SEQ ID NO: 177451 - DNA, 353 bp, Zea Mays
caggggggtaatgccgcagatcacggctgccgatcgatccgcgtccgcatcgctcggagctaaccgtagaccgtagaagaatacgtagtggtcccagctgacagcgacagtggaggatacgctggtgatgtcacccctgacatcacaacgtcatcagctggctgaaaaaccataaactatcgtggctacgtgactatgtggctgccaggcgggcccatctcgtcagtgccagtcgcacgttcagccggctcacgtcgcggcgcgcgcaaggcgatgggccgaggcgcgggagagcaagttttaaatgtgccaaaagtgaggcaggcggcctgcgaagcttttattcttttctc

SEQ ID NO: 177452 - DNA, 493 bp, Zea Mays
agattctacaaggttgccaaagctttgtgggccgtcccatttgggtccacctgtcaatgtaccaatcatgtagatgttttggtgcgctcggccctatcacgttactgcactgtaattaccctgtcgtacaatatattcctaggatgtagttggtaaccgggggtttgaatgtattttaggctaccaacccttgttaccctataaatacccctgtcctgtagctggacgggacacgcttgataggacgttgcagtttttcgacttaacattttgttgtgcatcgtgcttctcacctcctcccgagtgttggggtccacctgtcagaacccaacatttggcaccatcgtttatgcttcaaagaccaatcccacgatgcctcccaagaaaatcaacaccatgtccaaattactccaccaccgatgaagtcgcgaaggcagccctccttgccaacgccaagaaatctaaggttgccttcgctgacgacatcccacaa

SEQ ID NO: 177453 - DNA, 520 bp, Zea Mays
ttgccatctcctcttcacatagcacatttcgattgtggaaaatgatcgcaacagggtcgggttgccgttctccggcgtgttcgtcgccgcggcggtcctgggtgctgccgctggccgatgtcgggcggtggtgaagcaaccctgtgcgtagatctgttggcgaacagccacgattagaagttagggggttgccttggcgaccgtcagatcttcaacgagtggataggattagaacgtggtaacgtttcgagtgaatcgatctagcgtcgttgatctgttaacgaacgaatgtggttagattcagggctttcaaatcatggtcgtctactaaaaatcgaacggctagagctgcataccggttcgaggatgcagggatctaatccgagccattgaccgatgatccaagggctagaatcccgcaataccccttcgatcggttcttttacaacatagcccctcggtaatttcaatatgaaccctcagtcctggcgctggtattctgagtcttaggaatctttgc

SEQ ID NO: 177454 - DNA, 663 bp, Zea Mays
cagatccttcgccttcatgaagaacactcaagaatagtgagaaaaatcgtcaacgaccacaagcacataccacatccccccgaaagagtaaactcgaggtggaccaacaatgtttatatgaagcaattcaccgggctacaaagtcgtcactttggtgactgaggaatgggaagcaacaaccatcttgccgtgacaacaagggtgatagacaagatccttctcaaatttcaacttgggcaatccttggatcaagccaagtgagctcagtctacacaaaaaatcaaagctcaagtgtcctagtttcctatgccacttccaaatcaaagaagagaatcctacctggaagcatcgagaagggccagaagaatgtgaaaaaacaacactgaaaacttgaccgaaaggggaaatctaactaacaagatcacccgagcatccaaaacctgagacaagaccttttttaagcacacttcatagtcatccccaatgagttgtgaaacataaagcagattgaaatgcaaattcgaaaccaaagcgacaaccttgagaacaaaactctcgtttacttgaacagagccacgtgagattaccttacctctcgacttatcccaatgtgatgtattccttactaatcacagggtcgagactggagaaccattttttgct

SEQ ID NO: 177455 - DNA, 532 bp, Zea Mays
cttcgtctaacgcgaaaactaacttattacaacacaaatgaaaaatctatagcagcctggtgatggatcctggttctccatagcggatcctcttgcggggaggggataacgccatggcatggacttgaacttcagggggaatccttccatcaagatgagcttccaaggctgcgatccttgcgtgtgcatcctccagctccaagtgtaccctagagaggtccagggtagcactatccaggtcggtgttaagacctgccaccacaccagctagggtgttgaggcgatcttctccagctccacctagaacaatgctggtctggctttctccacgaatatgcagaggaagatgcatgtacttcatgttgtgcagctgctgccggtaggtgtggctgagggaccacagagtttgcctagtagcattgctgaccgaagaagcataggtggtagcggcgtcagagactcatgagctgatagagtcctgaaccctctatcacctgcatccatcaccctgacatgaatgcgagtgatgtag

SEQ ID NO: 177456 - DNA, 339 bp, Zea Mays
gcatactgtgcgtattagataatgtaaaggattttactaaaagctaagaggtactactatttgcagggaagataagaggaaagaggtagtagcgccatgtgtagagcaaatagataagatgtgtagattcagtcataatgaagcttgcttatgattctgcaatttcataattgtggttgcactataactgttgtttttcccctgatctacgtaattgttggcttctaagtaaaggaaaaaggcattatgggactctttggtggcttgcattagcctgtatctaggcttctgcagtgtatttcgcctgtttggttgtggaaatctttatgcaggcttaaa

SEQ ID NO: 177457 - DNA, 804 bp, Zea Mays
gggggctcttccttcgggataaatttgtgctccctacaattgaatagcataatctcaagctcccggccttcgccaaaaagtctgaggacgaactcgctaacacgatctaaagtgtggtctctactcaaagcccccgtcaaaacaacatgacgaggcctaaggtttacctcactgatttcgctagcgttaatgcacagctccctactcgagacatgatcaactaagttaaaataatgtaacacctcaagtgttagctaggaagtttaacccaacccacacccatataacctattatcacatttggatcacttagggcaaaagacaccaaagtcaaggatcaaaactctaattaggtactaaatatcctagaaggcttagcatagccatcccatagtgatcaatgagaaggagtgaccaaaaccctgaccttaccattttaagagcatataggccctaacatagagtggtaaaaaactacaaaattaacttattacaaagtggaccattaacaaaagttataactcactaaatacttagcaaaagttattaagggctggtcactaaaaaggtaaagcaaagaccctaaataagtcacccaaagtgagagaagggggagaaaatctggatttgcataaacaccaaaatcagcccttagcaaagaccccatgtgttgactaagctacaaactccaaacctgttgaccctaattacaaaagatgtgcctaattacctaatctaaccccgatcaaaaggtgatctcgagaccaggccttttgacttgacttgacacacattttgcctctt

SEQ ID NO: 177458 - DNA, 689 bp, Zea Mays
cactttaccagagaggtctacagaagaaaccagaagcacttcggcatgtcagaccagtttggtgtgcactataccagtcgggtccaatggaaactttagtgttcaatggtcgactccaatgactagctggtgtggcaggacacatagcgaggtctggtgtcacggacaaggcaagcgcaatgcagatcctgttgattgaggtgaccgttggaggtccggtggtccagttcactcgaagaaagcaggtttttagcaattttctcaacgacacttgtgcaacaccaaccaccactggagctaagcatcattcccaaacacttgtgcaacaccttcaagccattctgagtgattcgagcaccccgtttgtgtagagatagtcattctagagagagtgtgctcttgtgatctacgtttttggtgttgtgttgctatatttcttgctcttgtgtgagtgatactctattgaatattgtaaaggctagcaagaggatctaagtttgtgaagtaccttgtggagactatctcttattggatctgagggctcaagcttgatcgttgggatcgcttcagagggtcgagagagaccctgtcctttgggacacctcaatggggacgtataatttggaatcgaacatcggtaaataaatagtgtatcttcttgtgttctttactttttgttgtgatttgtt

SEQ ID NO: 177459 - DNA, 737 bp, Zea Mays
gccggatcattaccggcaacaccctcgggggctgagtaaccgcttgcaccatccttggggaccgggttctctgcagcagccacctctaaggctgaaggattcccagccacctccatgggaattgagcaaccttaaccagcttcttggctccgaggaccgcactccaaggtcgacgaggcacgagacactgctcgggataactccaatcccacatctggaatgtcagagcaaacgtccatcataccaccatctgttggctcggacatcagatcttcaggaaccacatcatcgagagcctgatcaaaatttgctatggacaactcttgcagaccaacgagagtagacaaagctagagaaggaatatcactactctccccattgactaggtagcgccgactgttcttccgaattaaggggatttcctcctcttcttcctcatcctcgtcaacaatacgaacaacacacccattgggggtcagccctagccggatcacacccattgggatcagcatcgtcaagatcacacccattgggattagcatcgtcacagtcacacccattggggtcagcatcagcagggtcacacccattggggttagctccagtaaaaagttccactgatacttcttcagcagcaggagcagaagggccaacatccaggtccaaacacgacactcaccgaagccgcctctttttcttcttcttcccctcggtaggagcaattggatgactggccg

SEQ ID NO: 177460 - DNA, 481 bp, Zea Mays
tctaggtgctctcagtggtagtaaaggacggtgtgtgggctcaacgtttggtgttgagaacaagacgatgtgtcaggagaaaagaagaaaccccatgcatgagaaagttgttttcgtgtttcgacgacttatcctgagaggggcatgacgaccggtctcggcctctggctcctcataccatgatgcctcaccacgtacgtcggcgacggggcggtagccctctcttctgtgcgccctggggcaggggcctgaggcggagcgatggccgaggccactatgggccccgaaatgactgcgtggagaggggtgacgggcccctcctccgtattccctacaacaggcgatcgctgggggtcccgacctgcacacctgcaggctccacaacaacttcctgggggagggggcgacctcctcctccatgggcctcgcctctttcacggaagcagggtcggggcaggctcggctaacacccgtgccctgt

SEQ ID NO: 177461 - DNA, 342 bp, Zea Mays
gaaggcggaggactggagccgtctgaagagcttgtttcaaacgttgaaaggcagctatagcagcttcggaccagtggaactgttggcggcgaagaagagtagtgaggggttctgcaatcgaagcataatgatgaataaaacgtcggtagtaaccagccaaccccaaaaaactccggatatctgccactgacataggagtaggccaacgatccacatcttgcactttgttcgggtctgcctctactcccttggctgaaatggcatgtccgagataacccaccgtatcttgagcaaaggcacacttggactgtttaaggtacagctgatgatgacaaagctgag

SEQ ID NO: 177462 - DNA, 655 bp, Zea Mays
gaagagcaaaagggttatgttttaaatgtggagaacggtggggccatttacaccgttgctcgaccagtgttccactccatttggtggaagaaatgtgggaattggctatacaaggggagagtatgtctgaggaagttaatgacgacaacaatgaacctacagccgatgaaagcatccaggccatatatgtagcagctgttaatgggagcgaaggtagccaaacaattcgattgtgggcctcggtgcattgtcaacaggtgtcggttctagtagattcaggaagttctgccagtttcttgggcagtcatcttatgggagtcatgccgggggtacagttactggccaagccagtgagggtcaaggtggctgatggaagaacttttgtgagcaaatattgggttcccaattgcaagtggctttgtggtgggttgacattttctactgatttcaagattttgcctctgggtggttacgacataattttgggtatggactggttggagtgtcacaatccaatggaagttcactgggcagaaaaacggttggagtttgactataaccacagaagggtgcagttacaaggagttcaacccaaaattcagacctgctacagtctaacttgttttcaactggggtcattgatcagacaggaggc

SEQ ID NO: 177463 - DNA, 545 bp, Zea Mays
gaaacacttcaaatccacctgactctcctcattcaccaacagctagaaacacttgacacaaatacagagtcattatcaagtcagtacaactctccttgctttcctcgttggggaatttgcacaaccaatttctgctgaagatttcaccagtggcacaagttcacatcaagaagacacgaggacaatctgttgtggggaaaagacatggggacaagcagctgagaggaagaaggcatgtggacaagatgttgaggcacaaggcatggacacaagctgatgtgacgaagaagcatcgagaggacaaaaacgcagaggcgacagtgcaggaacgaagagagctacgacgaagaggagtactcggcggagactaccgacgagcgaccacagagtatagcgagggaggaagcgacaaatggagtactgcaatccgttttgagtaacgactagtgagcacaggggcattgtcgttgttacagaggtgccggttatggctgatgacgcttgacgacggcttaaaccggcgagaacaaagtaccaaacctgtg

SEQ ID NO: 177464 - DNA, 765 bp, Zea Mays
acccctggctactgttcaacatctcactgacatctacaaaaacaaccccgtgcttctatcctttctccgttcgaagtccacggcggcgaaccgcacagggacgtactccggcgagcacctggaccggccggagggagccaagactggcggccctgagtggcgaacaccgaattggatctcccccgaacaattcccctaacttaatttcatggttggtaaactatcaagctctgtccacgcggaccgcggacgatgaggacaattgcacgcgttctcggtgactagtgggctcctagttcaattcgatggttcggcaagcatcacggggttatgagaatactcaaccgagggagcagaaggtgtgggctgacctgaatcgcgctagccgcggcgagctgttcttcgcggtgtattcgaaccggtttggggaaaatgcaaaattcgagctcgctggtgatcggctgggggcaatactgggtgtcggggtacttgactaccttacggagcttgcggtggcttcaatttatagagttagtgggtggtggccgcggatttgaagaaggacgcgcggcggtcggaggaaggagagttcactgtcgcagtggattcgtgtcccacgccgtggcaattactccggtgatcaacggagagtgagagtaggctacggcgatgcggtggaaaggtagagacacgcggcggacgacggtgatggcttaacggcagtgacgatcttatccgaggggtggtgagcaagaggggaggcac

SEQ ID NO: 177465 - DNA, 459 bp, Zea Mays
acaaaattgcagctggtatgaagggctgcaagtttactactggcaaattagcaagttcttatatagaaatttgtgttctgggcgctacaagttggactgtcaagagctacgaatcacagttccgatggtacagtgtcccgatcaggtcgccagctctatccctcgccgccgacgagccgcgcctggattcgtgctttcaccgccgtgattcgtgctcggatcggttggatagcgcttggggttgagtaaatatcatcgccgtggatatactccggccactaaactactccgaccaccgtaccgagctagtcacagatgcttcagatgtgttcgccggagacagccgcttcacggccttgtcccacgtgcctgggcacatttatcgcattgccgtgactcgcttaagccatccgatcatcgccagggagcctgtgggggacagatatcccccgggtccac

SEQ ID NO: 177466 - DNA, 470 bp, Zea Mays
gaaatctccacctagaattcctaacctcgacgtggatggtgcaacacaaagagaacgactagaagcttgaggcaatgggacccataccgtagctcacgcccccaaacacaccagccacggcaaagtggggttctatggcggtgcacgagcttcagtgacaaattcgcgtcgatcccatgacccagcacccaaaatttctctcgcccatcttccttacatcaccacgaagctccctggcatgaatctggaccctaaacggcggcgcactatggtttcgcccgttgtggcgtagcttctctctctctctctgctccctcccttgttttcactctgcacacacgctcggcacggtgctcgagttttatgcacgggaacgggtagtccgagccaggttgtttcaaccacccggtgagttcggtagcaggcatggcgagtttgccgcaaccaacccgagctggacgacagtgctg

SEQ ID NO: 177467 - DNA, 428 bp, Zea Mays
gtccgagtgttgggcgtaggcggcgaagggcagtggtgaagcgtagagtgagcgggtttgatggtggtcggcttcgtgtgggcagggctggtaggcaggaattgttgtcctcgccggttggggcgagtatgggtgagggggagttgcgaaggctttttgagggtgaggagctgaggataatgctatttaactatagggagatggggatcattccgaagattgagcctatgcaaggtgtgatgccctcgctgtacgcgtgtaactgtagtttgtatgataaggttgactgccttcgcgcatctgggtgtgttcgttaggtgttgcgcacccggtctggtacattattgtgttggtccggctgcgcctgtagactttcggactgatgtaatgcgccttcaatttttacactcgttatgctagtccggctg

SEQ ID NO: 177468 - DNA, 884 bp, Zea Mays
ggcacggtgcgcgggggtttctccgtggttgtttagcggcgtagggaggcagctgttccgcgtcatggcgggcggtgtgggtgcggatttcgcggcggtcgtggggtttcccgggcggtacgctggcgcgcgggcggttcggtggcagactctggcgcggctggcgggcggttcggtaccggagggatgcgtgggtgcggatttcgcggcgacgacgggcgtgcgggggtgggcgttgcggtagcggaggtcgtgcgagagtcacggcgggatgcgcggggaatgcgctgcggcggacaggcgggcgtgcagaggtttcgcgcggccgggcgcgcggtagcggagggcgttggggagaggcgggggcagtctacagttcgctcttaatagttgtagagattaatcaggccaatcccacgttaatctaacacaaagtcggtatactacgcacgctccttgtcatcgctggggcagtaatgatcgatcgcacaccatgatggccgcattaagctggctacatactcctgttactctgacaccgcgcaacaccaaggtccggggatcgaagtagaaagcatagagtgcagtgcagaggttgtacgtatacgtgtatacacaccaggttagatggagagtcctgtcagacgtgcatggtcccgtacgatcatggcagcgcgctcatgctgcatctatcgtacgtgtattattgtacttggccggccggccggtcggggccagaagtgcgcatgcaaaatactccccatcgtcgttcgttcacgtgtgtctccgggacgccagcagcccactacacccacacccacatggaattaatgccatgcatgtgctccttccctgacgtgactccactcgccagggctattacc

SEQ ID NO: 177469 - DNA, 327 bp, Zea Mays
gcctttgcccatggtcggatagagaagaggataaaggaagaagaaagtaacagatgatcgaaggatgagtaaagagaacaacggtgcaatcaggctatttacagaggccgggaatgaccgtccacttcctaccacgctcgccgaacagtcgcaagtattcaataagcaattcaagccgcctgaaaatgagtcaggcaacagacgccgcttcgcgtaacacgacaccatttggactaaggtcaactgctcgcgcgatatgattacaccacgcggtcacatcaagttactactctaggatagtgtgctaaacgctatgcgtaccaagac

SEQ ID NO: 177470 - DNA, 1082 bp, Zea Mays
gcgacagtggatctggggaacaactcgcatcggtccagtgaagaagaaggttcctgaatcctatagggggcggtgggggacagaagtgcttctcgtaatctcgttgacgtgtgggccagccacagacagcggctgtttactgcgtctactctcccataggtgtcatcttgcgccactttttttaggaagaaaaactaatgggccagccacggacagcggctgattacttcgaaattaatttgtattggttttgggatacattatgcacttttgtataatcctcatatttttatggcaaacaactaagaccagattaaggctccaggcaaagtttcactattttttaccacctttggtatttatttatttttctcggattggaaagtcattaaatcatagaaatcaataaataatccgagaagggagatcttcagtggaagtaagtttacagcggttagaagaaacaaatgctacacttttgaagaaaaaaacaaacaagagtatgaaatatgtctcaaatcgtgaaatcctactccaatgctatgaatcttaatgagagagatgagcatctgtgcacaatctacaaactaacttttgtataatcctttgattttttatcgcaatcaactacaaccaaattaagcctccatgccaagtttcactattttttgaccacctttggtatttatttatttttctcggattggaaagtcatttaaatcatagaaatcaataaataatccaagaagggagatcttcagcggaagtaagtttacagcggttagacgaacaaatggtacaattctgaagcaaaaaacaaaatatggctcaaatcgtgaaatcctactccaatgctatgaatcttaatgagagagatgaccatctgtgaacaatctacaaactaacttttgtataatcctttgatttttttattgcaatcaactataaccaaattaaggctccatggcaagtttcactatttttggaccaactttggtatttatttatttttctcggattggaaagtcattaaatcatagaaatcaataaataatccgagaagggagatcttcagtggaagt

SEQ ID NO: 177471 - DNA, 1147 bp, Zea Mays
cgctgggaccgcgccgtggtcaaagaccgggttgggggagccgtagcgcctccggtgcgggtcacgcaagttggtgcatggctgggcgtggtcggaatcgataaccggagcttggcgtcacctcgactctgcccctcgcaggggattggctccatcgcagtaccgctgcaggtatggccacttctgtcgtcttcgttgaccactccttgaaatataccgcgtgattggttcctctgaccgcgagcgctaggctcgcgccggcctggatcagcagagacgcctcctcccatcgtccccacgcatgtaaacgggagctgaaaaaattaactatgctgcatgcacgtgagcaggctcatcgcatcctgcgcaggagaccaatcacgggcacggctatagtcaatgcacccgctgagcttgcacatagccaaccgggctaccaatcacatggatagtgaaccgcgggggaggtaattatacatcagcgggttgggaattgcttgttggagccccctggctccgtggcgccgcgtcgcgctgtgggcaaggtagtaccaccattcaaacattgaatcgggggtctcgtgtgattctcctagcgccgggttgtatttagagccaccggccatgggtacatatgtcgttgggcgccgggttgatgaactccggcggggtcatcaccatgaacacgacggcgcacccgtgctcggggttgggcaagggtggcactgcatccgaccgttgatctgtaagcgtgtggcttggttagatcctggctccggtattgtgtcggccgttcactccccatcatgtggctacgattagaatgaagataaggtttcgatggttgtgatcctagccgctggtgggtgatctaagggttgaggttggatcaccgcgtaggtgtattgcggactgtacgatttagatccgagggctcgtatcgcgcatcggttgacttggttatgagatctaacctcgtccgtggagtttcgatcgggtagctcccatgtgcgggtaccccttcggtgcgggcgaacttgtaaaagggaccctgaacaattggctaatcaacccgcaatactggtcatttacaagatccttacgcagagacctagaatccttacagaatacaccatgcactttccag

SEQ ID NO: 177472 - DNA, 486 bp, Zea Mays
ggggagcaacgagggatctaggagtcgagttcctactgtaggaaatatcagctttgatcaaattgaacctatccccaagttgagttcccagctgctatacttcctgtctgtattctctggacagggggatattttggctgtaaaaaaaatatcaaccaagtgcagtgtatcagccgaacctgttaatctgagtgatatgggagcagtgagaagaggggcattaatgagtaaaaatcatgttgtggactgctcgactgaaatatcaagttgtggacctgttagagcatatcaacaatacatatttgtgttgtaagtgaccaagttcaatgtctcagctatatggtgtgctggtgcagatctggtgcatgagggccacgttgattaactcaagtagtgctggcacactgaaaatactccttcactgcatgtttgccaagttccgggaacacctacctcatttcagctgtttataagcgcaggatccag

SEQ ID NO: 177473 - DNA, 457 bp, Zea Mays
gtagggccttcgatttatagtgatccgctacagtggttccgaattttggaggagagtgagactcgtttccccggcggaatgattaccgagacccactgtggagctcatgcactcaccggtcgacggtcacgactcaggggaaaaccacgacaccacgatgaatcaggcgactacatgtctttcatagggaacacgacgaacaccagcgatgatatttcaactgaccgcgtgggcaagtgggcacggcggtgatccagctcagggatgttcacctcacccaggatcttttcatccaccaagttatccactccagacaatgcacgaatcttaccgatgacgtggatcacagcgcggagatcaccggcgacgggtgcactgcacctgcgatcttctttagacaactgtaccttggcaatcttattcagttcatctgatagagcaacatcagggcactttt

SEQ ID NO: 177474 - DNA, 495 bp, Zea Mays
accacggatgaacgggcccaggacctcatcggaggcatgaaactcacaccacccgcgccacggcgtgacacgaaccagcagccagataggcgctgggagaaaagaccccgtgatgaggtgcacaccgccaggccacccaccgctcgagcccgcggtgcactccatagtggggtacagacactcgatgaaatcctcgatgcctagtgcccgtaccacaaggacatgcgccacaccctacgtaactgtacggacttcaagcactctgttgggcatggccgacccttccagcctctaccgcctcccccaccatgaggagatcctggcgagcccaagcagcctcagcagcagaaaggggagggggtggagcttttccaggcattgacagggaggtcaacatcatcttcagagggcacagagcacaagagaacaggaggcagcaaaagctcaacgaccgacaggtcctggtggccaccaccagtgccctagctccttacc

SEQ ID NO: 177475 - DNA, 566 bp, Zea Mays
ggggagtttgtcggcggcgagtattccgcctgctcacggcgcgatagtccaattggttggcttgggaggcttgaccaggtgacatagaggtggtacatggaaggaatttgagaatggcgcagagacttacccggtccacgttcgccggtgagcggaagaagtccgacgagggtgattcggggtctccggtgaggttatgccgggtctgagggcttggggagcttcacggttctctagcgaagctaactgaaatgctgatatagactgggaatggctggggtgagctgaccacggtggccgaagctcgggtggcttggcgggcggtggcgcgtcgtgctcaaggcgaagtccggcgaactctggcttgggcgagactatgagcgtgcgggggagtacggccgaggccctagggctgatttataggcacggcgcgaacgagggcatgcggcggacttgaccgtgcactagggcgagcgcgcacgtgggttgggcgaacgccggcgtgccgaccagggtcgaacacgtgtgcgcgttttttctgcccgagttctagagcgtgtagtcac

SEQ ID NO: 177476 - DNA, 599 bp, Zea Mays
tctttggacacgagtaaacaaaacactgaagataagtctcaagacacggattcactcgttttgtctatccatcggattgaggatggtatgcactactgaggcacaactatgttcctgctaacttgaacaattcctgccataatttactattaaacacggggtctctgtctgaaatcattgtagctggtaaaccatggagtcgatatactgcatacaagtacagtttagccacagaaagagctgtaaatggatgagccaacgacagaaaatgtgcatactttgaaaacttgtcgactaccactaaaatgcagctatacttgtgcgatggaggtaacctagtgataaagtccaaattgactacatgacacacgtgagctggaattggcagtggtaaaataaggcccgggtacttgacttgatccggttttgcttgctggcatataagacaggattgcacaaactccttaacatgttcttcactctaggccaaacaaatgtaaaaaaatgtttaatctttatatatgtgagtatagttactaggcaacacttggagcatgtaaaatgagtgacgtcctttaactcctcaccattgccatatc

SEQ ID NO: 177477 - DNA, 444 bp, Zea Mays
ctcttagaaaatggagctcctaaacaggcccgggccaaaggcatgtgcagtcagttcgcccgaacagggcccatgaaattatgggggcgcacaaaatttttcctctagtagactatctagtacatatccgtctgctagttgcgttcaagcgtgtgacaactgacaacgtgactgtgtgagtccctcactccctctcaaatcctgtcgttcccaattcgctctggtcccctgctaggctgctcctcctaattctcaatcacaattctcctgacatcaagcctgcaaaatcgtcgggcggctgctgcttgccggcccctacctaaatgcccctacgacctaatttgcactacacagcaccaagaagtacaacactaaggcactcatcaaggcgagagaagcaggtaattgctcaagatcatctattcataattcatctaatgtgtg

SEQ ID NO: 177478 - DNA, 397 bp, Zea Mays
acagaggaatgccgagggaagacgggaaggaaggcggtgcggtggatctcgtcgccggcgagatgaggctagtggatagatgaagaagacatggtggcatcgacagcgacctcacctgggtcaagtgtcgtggcgtcgacgcaggtgcacctctaattgccggcgacattattatcacctctaattataaaagactctttgttatgatcactgacaagaggatctgaaacaacagtctttttacaaattatccgataaaatggcaagatcatcttttatatccatgcgccaccagtggtctgcctgtgtgggtgcgtatgtttccatcagctcagctgtgtcatcggcttgctggcacctgcatcatatgcagctttgtaagatatttacagtaacc

SEQ ID NO: 177479 - DNA, 723 bp, Zea Mays
gtcgttgttccgacatttcgcgtcgtactcgtatgattcatgtcacgaatcctgcgacctgaattccatggtctgctgcttttcagtgctatctgtgtgatcaggggcggagccaagggggggcagcaggggccatggccccgcccaaggctgcggtgtgcgcacacacacatgtatatactctagattttgtgtagtctaaatatatataatttagattttatgcggcataattaatcaagggtttaatatagtggatggtaatatgtgatccgtaactttgttgtagtatgccaaccaaagtttaaaagagacggaatataagataaaatactcgttgaatgactaatcgatgatatgagacgtcaaacataattctcttgttgaaatctaaatctcacccatttatgatccatcttagcatctgggtgggcagctatcgattgccgccgaccacttgacttgtctctgccatagccccacaaccaaagtctagagaaggtgatcacgtgaaacaacagaatgagcgccaacagcccaacaacatcaatcaccagaaccacatgtcgcagccggaatgtccgcataaactacaaaactagatctaaatatggttaactttattattttggtattgttactgtgacacaactttagttcaatataacaattagctagaaaatagaatcatggactaagataatttataaaaaactagaattc

SEQ ID NO: 177480 - DNA, 826 bp, Zea Mays
cttctctaaaattaataatgtctgataattaaacccaatattcattgaataaacaatagtaaaaacatatattcagatgcgatgaagccccaagcagttaggttgcaggtcctcaaaaagaaggtggatgtcttggctatcgtctcccttccgtctcttactctgtagtactcgcttggtttgcccaatggatcaagttaaaatgttaaaaaataagcaaaagtagcagctctctgcctgtgaactccagtatcaactgccatccaccttgcctgcagtctgcggctcggagctgcactcaactaccaccttctccaaaattttcactatttatttttctaaatgttatttatctcttcttttttgttctttagtttagttcatacaagacttctcagattacccttcttattttgctctaggctttaaataaatgttgtgattggcgaccttttattccttggacgacaatatgggtgatgatttttccaacgatgtctttcgcaggtatgatcgctttgtcaatacagcagaggtccttcgcaggtatgatcgctttgtcaatacagcaaaggtcctagagcgggtcacaactatagtctcatatattgtttattgaggatgccatcgccttggtcctagagcgggtcacaactatagtctgtaagcagttcttttatccacaaacaagttggtactagatggcttaaagtatagtttgtaatttattaaaactattacatgaatattttggctttgcttctatgtagatttctcacacatgttcaggaaaaaatgtataatgataaaaaaaattccaaatacg

SEQ ID NO: 177481 - DNA, 463 bp, Zea Mays
tggaggcgagaggacgccgcgaatgggagagaagcaaggcatggctgctactcgagggatgaacccaccttttaaaggcagactcccccgctcccgcctcgaaacatcacgagaagtctcccccaatgcacaccgggggtatccatcctatgacacgggggcccagtcccacacttaatactgctggcgcgctggtcttcgagtgcgaagaaggcgaaccgtcgcacaaggagcgggctaccgccccgcggtagtgcgccccttcatcttcgccacgaccaacggtcaagaaggcgaaccgccgcacaaggagcgtgctaccgccccgcggtagtgcgccccctcgtcttcgccgcaaccagcggtccaacccctagcatgggggcccaggtccacatgtcatacacctggcgcgccggtttctatgtgtggggaaggcgaaccgacgcgtgaagagcgcgcc

SEQ ID NO: 177482 - DNA, 322 bp, Zea Mays
ctttggaagaagagattcgtaaaggacaagagttgaatgagaaaatcaaggaaattaaaactttgattgggatgggtaaagccccagatttcacggaagacgatcaaggcacaatatggtttaagaagagaatctgcgtactggaaatcgaacacctgcgccaacttattttgagagaagctcatgattcagcttactctattcaccctgggagtacaaagatgtaccaggatctcaaggaaaagtattggtggtacggattgaaaagagatgttgctactcatgttgcattatgtgacgtgtgtcagcgagttaaagccga

SEQ ID NO: 177483 - DNA, 1117 bp, Zea Mays
ctgaattcagactgacagtgagattaggcaatctttgagcttggattcgatcatgatccagtcattatttggatatgattgatatagcgagattatagctggatcatcggacaacaactttgctactggtcgatcaacaagttgtcatgtaaaaacctaagatctaagccctgcaaagtggtctgtcagtcgcactgaatagagactccatggtacagtaactgaacaagaccccaagttcatcccccttcgccgccggtgaccgtcgcaccgtgattcatgccggccgctgtgattcgtgcactgtgacttgcggataaccgtgggtgagtaaagatcttggcgcctggatcgactcgggctcggtcacagctaagctcgccgtacccacttgctcgtcgatcggtcggatagacctcgccgccgtttgtcgattaccgtcgtgcgccacgtgctaaagcgcttgaccacgtcgcagtgaatcacatcgtgcatgcccggtgatcgccggggagcttgccatggtgaaagccactaatcccgagcgccagtaaccttcttcctctccggccgccagcacatcttcgcgaaattggacgccaccgccgtgggagcctataaattgccgaccccgcctgctccgctaagtaattgtgcaaccagtgaggcaactcgtgcctcgaatcatccactagaactccccaatttgggatttcccccaaatcaatcaagaacaccgagcggtgtgacctcgccgtggtcagcttgtctcaggtccgctcatgccctctgccctttcgttttagtgttcttgtgtgcccctgatactcctcgaccaactcgattgagctaagctaccttagaacaccgagaacacattagaatgtccgttgatgatacggtcactgtggacagagtgagttagaggtccaatggtgaaattagttgaggggaaacgatcgttaggcctcgaatttggtttcagctgaagtagagcatccgtcatcaagtaatccggtcggtacaagctcaccgaagctcggccccgcgccgttcaccgtcgtggacttaaggttgtgaagaaaggaaagcgcgggggtgttcttacaaatgttag

SEQ ID NO: 177484 - DNA, 608 bp, Zea Mays
cagaatttgaaactgctttccgagaacatcatgtgccccaagggatcgttcagctcaaggaagatgaattttgggaactaactcaaggtggaagatctgtcagtgagtacgtgcacaagttcacagaattggctcgctacgcgccagacgacgtcagcatagaagccaagaagatggcccgctttttgaaaggactaagactagaactcaagaccatccttgccagccaagatttcctcagcttctcgcacctctcaaacaaagccatacaagtggaaagggcaagggaagaagaaaaaggtcacctcaagaggaaattccaagtcctccgagctcagcagcaagaccggcaccagagaactcgatccttcggatttccacccaagggaccaagctacaacaagccagctggacccactccgtcacatttcagtcagcagagtcagagctcctttcaggccccctcagtcgcaagcaaccaaccaccagcaaatgcctgttggcactgcggagaccccagtcacttcaagaacaactgcccccagttgaaggcatcaggaccgacttactccaactcggtgaatggccccaagaatgccccagcgccc

SEQ ID NO: 177485 - DNA, 649 bp, Zea Mays
gctggacgataggagccaaaatggaagcgtgaggcctcgagagtgccctggaactggggtggccggatcaactgtgtgaagatgaagcagatataatgcgcatatggaagctgtcggcgagcatgaagaccatccaataccatgtcctcgatctcagataaggaaatcaaccacatcaaactctgaatgtgagatcagggcaccaagtagccagagatggatgtgagtggtggcctctctataacccatccggggcagtagcgtccgtctcatgatctgatagagatacttggtcgctggagtgaaatctgctagagagcgtcgcgacccatctgtgaaagacagtcagaatagggctgcgacatgagctgtggctggagcgactccgccgtgagggcatcgaggaggatcagaagtgccataacacaggctgtgaaggcgagtcgacaactcaggaaatccaaacagctggcgaatctggctggcatcaatagtgacatcctctcgctcaaaacaaaacctcatccactggtggtcggtctatccatactgaagcataaaacactcggaccactcctcaacatatctgccgctggaagtcagtaaagtgagaagtctaggcagataagagaggtgaacctcgaaatcc

SEQ ID NO: 177486 - DNA, 613 bp, Zea Mays
cgagagaagcaataaacaacaaaagaaagctgcagacccactaaccaaagtttgaggcctttagatcatcttattttcctctggagtaggagaggattccactgcatcaaagacaaaacttgatcagggacaggggcgccacaagatttcaactaggccaacacagagttgagtacattctgcaagctcaaaagttagcaagggaacctgtttgccaacataaataatgcaaggcaaggatcagctcacctggaggttagaaaggaataagggaaatcccagagccggaggcatcgatgcactgtctgatgatggagtgttgacagagacaatgtttagagcatcactcagggagatctcagttccaacagcaggtggcagattcccagcatccgggtcattggcctctaaggtgatcggatcgacaagagcagtaggcgggctcatcaccacaggttcctcagatggaaccggtggcgatccgacatgaacatccatggaagcagccgaagaggaaccaagctcggcacccatgggggctgggtcatcctcagcaccacccttaggggctgggttatcctcagcagcaccttcggaagctgaagcaccctcg

SEQ ID NO: 177487 - DNA, 738 bp, Zea Mays
ttttctccttcgggctgtttctcactctgtacgcctctctggggccgcggacgtgagaggctcgcatcaaatcgggctcagggccggccgggcgcgtccgctttatcggctcacgttggcgcggcctccgtttcctctcccctttccttgtcctctctccctctccctccctcccggcctcacctctccagcctctctcccccacctcttccacccctccacgcccccagagagccccaggcgcaccgccgacgaccccggttcaggcgcagatcagcgtgcgcagtgtcccgcccaccctgcctccgcgacctccgaccctgggagcgcctgcccgcgccgcagggggcgcttcgcatatctccccttctcttccctcgccggtgggtagcggccggcttgctgctgccctgtccacgccgcgtctacgtgtcctcaagggctgggcgctcttgtcctgccaaacccggtgcggcctctgcttggaaccgtgagttttgagccccttaatccgtatccctgccgccggccgcccgggtttccttaacctgactgactcgtgcttcccgcagactccgttcgtgtgcctctctgtaggttttctacgctctaggaggaggtcagagacgcctcagagttggcttcgccgcgcgcatgcgatttgcggcggcggccggaggctggcacagccgccgctggggcgacgacgacaacggcgccgtggatgcctccgccgcc

SEQ ID NO: 177488 - DNA, 589 bp, Zea Mays
agagctcgataatcgatacacatccttctggtgccatctttcttctccacgaataggacaggggcggcccaaggcgaggtgcttggccagatgtaacctttctctgacagctcatcaatctgcttcttaagctcaaccaactctggtctcgatactctataagctctcttaaagatgggggcggttccaggaagaagctctatggcaaactcaacttttcgctctggtggcatacctggtaggtcctttggaaacacgtctgggaactcggacacaaccttgataatctcaagtgggtctgcttcactgctatcaacagccatctgatgacaacttcctttctttggctcaggcgggactaactcggtcaccacttcctctcctagtggggacatcaacttgattgtcctcttatcacaactgataactgcctgatacttatctagccaattcatccctaggatgacatctattccctgagtacccattactataagattagcgggaaacactatcccccttatttccactcttacattcaagcaaatgctatctgctcgaattctaccaccggctgaatcaatttgaa

SEQ ID NO: 177489 - DNA, 314 bp, Zea Mays
taaagggcagtgaagtcgaggggagagggtgtaccttttgagacgggatgcggaacggcgctcagggtgtttttcctcagaggggacatggtcatttaatgcgtctggacgtcttgcctgtcagcaaaccgttcgtggcacacgtgcgtgtgggattcgaaacaaccgtcgcccaaccattttcgaatcacaccttggtggctccgtccgtccaataaactaacagggaggggggcttcagaccattacctttgcttagccctttgccttctaatgtcgttttcgccttctgctcaaagagcccttcgtcttcc

SEQ ID NO: 177490 - DNA, 588 bp, Zea Mays
aactccaatctcttaaagcttacatagacgaacagcgagaacagttgcaacgtatcgtaggggatatacaaaatgatcataaaaggctagtgcgtgcgcttgataagtctactatggcaaatcttccttcacacgaggttgaattgagggaatacacatataattcatcggctacaggttgtcacgaccagtcacaacccctttatgggatgccaatagacatgtaccttgggcaacaaagcctcccacgcacatcggtgataaatttgccgatctgcgcatgtccggaccgtccgcacgtgagcgcggaccgtccgggccagcggcgactgatcccatttttagtagtgaattaccaagacctgcacccaagccgccacatgccgtgcaaaccctagataacccatttggaccgtctgcgtatggcgccagacagtccgaatataatgtcggacggtccgaccacatggccggacagtccgcgcacggagccggacgatccacgtatttaaccggacggtccggcacagagtttttttaaggaggatggatatccaactccgtatccgtcccagctagactccccat

SEQ ID NO: 177491 - DNA, 320 bp, Zea Mays
tgtgctttgacttcatcgccatgagatgtgttaccatctgcagtacgctcacgttggttccttcatgcactttagcctccgaggcttcaagaaacttgtagaactctctcacatcctctggaaaagcttgattattctgtagttctgggtactcattcctaatatcatccaacatctcttccattcggtctacatcctagtccccatccgactcaatagtatggtccacctctccatgctcatgccatagtagatagttcggcataaatccatgtttgaaaacatgatacgagagctccacaaatgcgagtgccacaaat

SEQ ID NO: 177492 - DNA, 811 bp, Zea Mays
ggagcatattcgaaggccgaagatgacgccatgacaactgctttcggagctcggggcaaaaagaggctgaacagggtattcgatgtcatcgggtttgtatatccagactatcgttatccttcacagaagcaaggaaagaatagaaaagctgctacttcgacgacttccagcgcgtcgaagtaaaaaacgttaaagttttgacgcgtcgacccaggcgcattgagacggctgaggtgccgaagctaattgaagggcccacttctatgtctgagccaagtcgatctgtgcccgtcgaagctggaacgaatgtgactgaggagccgaaaatggagaaaacagcagaaaagttgaaagtactgagtccatcctgcgcaacgactttgtcgaaggtgtcaaacatccccgtagcaactccaagaaaaggagaatggctagtatgctggatgttgtaatggagcccgtgaaaacatcaactcctgcttctgctgaagcgccaaggacggaaagtaaagtttcaaagaaatctgacgaagctggaatggcgcagactatttctgaggctggaccctcaatttctaccaaagcaagaccttcgaaaattgcaccactaatcctggaaaaagatgatgcccctaagaaatccatgtctcctgctcccggagcacctgctgaagagctagagttcattgtgcgacatggttcggggaagcaattatcggaggagcaaattgccgaagcaaaacaatatgctaaggatctgaagtaccccgaggatccttggtgtacagtggcaatgacaaggatgatttcc

SEQ ID NO: 177493 - DNA, 571 bp, Zea Mays
atacgatctcgttcattcgcggtgcaagcctgtttgccagaatttttgttatgattttcatgaagctattgataagactgataggtctaaatttgtctattgtgtcagagacctctcttttgggaagaagaatgatgtttgcctcattaactaggtgcaagctcctgcattttaggtgataaaagtcgttaattgctttggaaaggtcgtctttaaccacgtcgaagcagcatctatagaacagcccaatgaagccatccggtcctggcgccttttcgggattgcaaccccataaccaccttctgatctcattatcctctatcacattgtctaactcggatagatcaaatggcaaacagcccaaattatcccaacgaacagccctctgtctcactccacttgttccaagcactgcattaaagtgatgatgagcctcatgcattttatctcgttggctggtcaagattgaatcaccatgaactagagatctgatattattttttcgtcttctattgttggccatcaaatggaagaatttgttattagcgacccccagacgcatccaggtgag

SEQ ID NO: 177494 - DNA, 365 bp, Zea Mays
gtgataccttgaggtacacatgatcaccttcctcaaactctagtggtcttcttctattatcagtgtagctcttttgtctggtctgagctaccctcaaattctcccgaattatacggacttgttcttctacctcttgaataagttcaggtccaaagaattgtcttcctctagtctggtccaaaataaaggagtcctgcatttcctgtcatacagagtctcgcacggtgacatcttcagactggcatggtaactattattatatgagaactcagcataaggtagactcttgtcccaactactaccatgctgaagggcacaatctctcaatatgtcttccaatacttgattagtcctttcagtctgtc

SEQ ID NO: 177495 - DNA, 651 bp, Zea Mays
acaaaatggaggcagtgaggagtgagccagtgacaaggttcaaagcaactatccacacgattacaagaattaaatgctaaaattaaacatacctttccaagccggagcaccagagacgacggaatggagccaaggtccgaggagtagtcgagcagaggcgcagagcgaccagcaacagcaagcaaggaccagccgagcaccagagaaagtcgggcaaccggacaggttagaaggaggacgagaatgggaggaaaatgaaaatagaacaaaattatagatgtccaagcagccagcaggggcactactgcaccagtgaggcagtgaggagtgagccagtgaccatacaaggcgcggagccgcggaccaccggaccggagacagagaagaatcaggaagggaatcacgcacccgcaccggcaccgcacggagcaccagtcgtccagctgtgaagctacaactcgatccgaggtggcgaggagcaccaacgatgaacgagcatcaccaatcaccagatccgaatgggattagggttagggttaggaacagggagacgtagggagggaggaaagggagtcagggagcaccagagacgtcggaggtggcgagccgtcggtcgtcgacggtgggaggaccgaaggaggcagcaaggcg

SEQ ID NO: 177496 - DNA, 494 bp, Zea Mays
gttcggtgacggcatcattattctagaaatcagtaaagggcatatttgtattgcgtgattcttctataaattgttaagagagcatatgtttatgcatatagcaaaaggcttgtttgattcttgctgacaataactagtaaaatacattttcggtccttaagcttgtacgtagcatagcggatcttaaataagtcattgctggagacaacctaacatcatcatgtattcacacatgtagcaaagcacgagtgaagaaaacgtgccctgggaaacaaaacaaccagctgttcagagcaagaagatagtagcagaaccaaaagggaggcaaaaaaagaagaaggcagagagaagaagactgtgccaagtgagaggcatgtatgcagtggccgcacggcacaactccgataccagaacagaactgcagcacaacagcgacgtgcgtcaaaattattgccatcctatttctgaacgcaaacgcgttccacttccacccc

SEQ ID NO: 177497 - DNA, 592 bp, Zea Mays
gcgatatcttgtaatgcgttgaatgttggtaaagtctattattcatatgtggtggcgtgaacgcgtgtgcaaatcagggaaataactgagttatgttgattggacgtgatgtgtaaatttaaaaatagtaggtttgtgtgtagggtgtattattaaacatgtatgtcgatgtattaaaatagtgattgcgttaaagtcgtttgaagtattttgaatgcatgacgaagatggttgcattcgacataggaaaagaaacaggttgtgcgataaaaaggctagattgattttataggtcttatgaaaaacgttctattaagtgtatacgtcgagtatgttaaatggatcctacgtatgtagagtgtagtgtattggttaggcgaagaatttttgaatagacgagtatgaggcgtgcagttaaatcgagattgaagtgcaaatcctacgcaatgtgatgggattcgtggtaatataggagttataattgttgatgtgacgagtagtttagcgaatgctcgtttgcgtggaggatgtatcgttaagacatgagtgtcggagttcatttatattagtggtcgcgccacattgattgaag

SEQ ID NO: 177498 - DNA, 864 bp, Zea Mays
gaagcttatgtggcgagttgtaggtgttgactattcgaatccaaaagattgattccttcttgtcattgctataaatggggtccataaagtgcagcagccacatgtgaacctaaaaattgatgaagtcaaaaaactattgtcgacaaaaatgtgtggacttcaaaaaacatgtgtacttagcagtcttttgtcctccatctttgtctagtcccttcgccgttgaaattgagtatcaccagagtaagtggattggcccgaatcggcatcacggtcgatgcttggaggcactatcatgcatgtaggaggacataatggagaagaatcaccatatgaaggaggagcgccatatgagagaggacctccaaacgggggagggaatggaggaccaccatatggaggaatagcatcataggatccatatgaaggaccatagtatggatatccctacagatatggaggtaaatggtggaggagcgtccgacgtaggagcttcaatgatatataagcttcagtggtaggaggagcgacaatggtaatatttttgttgagaggatcatccatggaagatcatggggatacgaagaatgaagatatgagtatagaaacatagtttgtggaattagggaatgaggaatcaggtcgttgaaggtttggaaatttaaactctacgtgagatccacattcaagtagagagtgagaggctataatatgaagacgaacggagtggagagtggaggtgtgaatctacctaaacacattatttatatgtcagattacattttttctttttggggtttttagagtctaaacaatcaaaatggtattgaccaatcaaaacacaacatatggtttcgagaggttagc

SEQ ID NO: 177499 - DNA, 431 bp, Zea Mays
ggccaagaattatggtgggaatttgatattcaaaccaaacttatgggcaaggaaaatggcaaaaaggggaaacgccttacctgggccatggagctctgatcggctcacccaaccggcttgggccagaaaccacatggccgcgcatacacgtgacgagctgccggaattgtttaatgtattcatgggtggtgaggtcatgccgatgtcaggggtgacctcatctccatgggcacctgtaccactgacggttgggccccggtaatgctctgtatgcctaaccgtatggacctaggagcagctgcgtgctgctcaaccgccaccgtaaccaccggccgggcatgtaggatctacacaaagactgccttgggttcctggatatatagaggggaaaaccctctctcatactcctctaacccaaccgcgcaaaacac

SEQ ID NO: 177500 - DNA, 1215 bp, Zea Mays
caccacctgggcgctggttttccagacttctagtgaggacttcaatgagtcgggtctgattggctagaacttgggccaggtctagtggtagttccggaggtgcggggaggtgggtctcacccacttctccgccagcttctccttcagctcttaggggaaaacctgctccaatcccggaggcggtaggcgtggttttatccgaagccatctgccaggggaaaagagttactaccatgcacatgccaattttttttaaacagttactttattcattacatcaattcattacataatacagcacacaactaccgtaagcttattacacgcgagtgctatcgagggtactcccgaactccttctctaaagtgtccccaaattccttgagaaggtcatcaaggctggctagggacatttcctcggtgtcggacgagtttcttatcctggtagggggtagggctggaggggcttcttccttctgctcagtctgacatccttgacttttggttttcttgcggattttcctcgtgggggcgagcttcttcagcttcttgtcgtaatccatctttagagtgcggtaggcctcatgggtgttggtttcctcgccttctgctatctcgaggctctcttgaagggacaccttttcccttgtaagttccctgactttttgctgcaggctttccacccgagagtttaggtgagtgcagtgggaggcaaggtcatcatattggttattgagggtgtgaaggtatccagccatgtagacgatggtggggtcatcctcaatagggtctcctcctgacagggcctgaagtctcttcctccaggtaggtgtatttttgttgctgggtgggaagtagcgaaggggggtttcaaagatcaccttgttgtagctctggcatagttgtcggagggctttccgggcaacattttggcaagtatttgggaagcggtattcggtgaaagtgacttggaaagaaggatggttcggatagtttcggctttctcccaggtagactgccatagagcatttttccataccgttctcgagatactccttccagacatattctggctttttgtggattcccatgcgaagcgcacaacttcgcaacagatgtgggaacccctccacctctgagcagtaggatgtcctaatgaccagagagtcttccatctggaataggaaaagaagggtctgtcaatatcgggggaaaa

SEQ ID NO: 177501 - DNA, 765 bp, Zea Mays
gaagaagatgtggaggacctcgctggccttgaaagctcggtgacccggagggatgctttggtggaggcgggagccgaagagcaaacgatgcttctaggaggtgccgctaagggtcttgcgacgacaaatgcttcagtgtaggttgagagaatgtaatatggggtagactgatagtgttagttttgtatgatactaaagatcggttgttgcgtaggttctggcgtccgggcctgcgcaagcaaaccctgataatgctatgagtgatgatgttatgatggatgcaaatgcgatgtctcttagtggtaatgtgtcgggggaatcagactttgggtcgtggtcttcggagggtggaaatttggggagcccttttttgtggatggatgatgaatcctcggaggacgatttagactattttgcggcattggatttagcagcagtggagtcttcattggggaccgccccccacgaagcgctggtgacttcgatcggtgcattctcaggtgacttgcgagggcgaaaaaggtggggtgtccaaacaaagtgtcggtgagtcttcgcaaggtgttagaagacatcgacgaatgggcatggagaggtcatgtcttcggatcggaccacggctggatcagggtgcctgtcgtgagttactggcgttgacgtctgggtcatgtatcgaggaaggggacctgcgagacctttttgaaggggaagagttgagtttgatgatgtttaattttcgggaagctagtcttattacgaaggaag

SEQ ID NO: 177502 - DNA, 377 bp, Zea Mays
tcagtaaatacatccataagttcacatagcttggtcgttatgcatctgatgacgtcagcacggaagccaagaagatggcccgtttcttgaaagggttaagacccaaactcaagaccatcctcaccagccaagacttcctcggtttctcgcacctttcgaagaaggccatccaggtggaaagagcacgagaagagggaaaaggtcacctgaagaggaaatttcaagtcctccgagctcaacaataggacagacaccagagggttcgatcttttgggttcccttccaaggggtcaaacttcagcaagccagcaggatccgctccgtcacgtctcaaccagcctggtcaaagttccttccacacccaatctgttgcaagc

SEQ ID NO: 177503 - DNA, 805 bp, Zea Mays
taaaacacgagcaacaagagcgagggcggacctgggagtagctagccacgaggaggcggttcacggcggcgtagtcgactgaattgggggaagaaagaaattctccggctatagtgactaattgaaggtgggactgggtgctttggcttcgtgataacatggcgcaacagacctggccatcaatttataggattgctaagtggtggctagtgaatttggattgaacgcggtggcggttagagaagaaacgagtcacgggcatggtgattcgtggccttcaccgtggcagcctccccggtgaccatcggacgtgcataacactggtgattgcgacatggtaattgctgaggtacgtggcgttcggtcgacgggcagccaactccgatgacttattcggaccggccgcaaagcagaaaggagcacgtcggctagctggattagtacccatagcccaacagcggtgacgatctttttacctcgcggcgttatccgggcttaagtgggcacgaatcacctcatcggtgcaaatctacgcgcgaggtcaccggcggcgagggggatctgcttctgttgatattttggtactgtacccttggaagctttttcagttagcctgacagccgaggtttagggcaggttttctccaaattttccatggcaacatcatcatccttctgcgccaaagttgtagacctatagatcatcttcatctttgttatagcagtcctagtcgaattcccactggatttagctcaaatccgatctcaagttcgacaaataatactgacgaccacttttgctatca

SEQ ID NO: 177504 - DNA, 455 bp, Zea Mays
gggctatggtgtttgagccagctgcacgcatctggagacatgggcgcctcctaagtgcaagttcttcctttagttggcctctctaaatcgctgctaaacagtgagtggatcgcctggctcctcgaggcttagagcaccctgagtcaaagttgagaatgtttgacttctcggaatgtgagatgtgcacttattcttggttggagggagtaactatatagggtacattacaaatttataggagggctccaagatgacaggtcaaattgatcatgtttaagcaaataagaagatgccacgtgtaatttgtgtgggtcagcaaggtaactaagctaaagataagagaattctcagtcaagaagaggctaaaagaaacagcgcaattgatctctagaaagtgtaaataagtaagcagaggaataacaaaaaaaacaccaacatgccacctctgaaattac

SEQ ID NO: 177505 - DNA, 644 bp, Zea Mays
atggtattcagtggcatgggatgaactttgggggtcattttgaagatgattccgtggatgtttgagtatggttaccacagtcggtttatagctggatcattagacaacaactttgctactggccgatcaacaacttgccatgtaaatttaggagaaaatcaatgccaaacttggtctgtcaggttaactgaagaacaatccgatggtacagtaaccggataggatcaggttcaggtccctcgccgccgacgagccacacgcggattcgtgctttcgccgccgtgattcgcgctcagatcagttggatagcgccgaagtcagtaaatatcacgccgtggaaacactctgaccattattttactccagccaccgtactcgagcagaccacgactgattcggatgagttcgccgaagacaaccgcttcacggccttgcaccacgtgcccgagcatcttaccacgtcgcagtcgatcgtgttaagcctatccggtgatcgcgggggtgcttgccacggtaaatgccaccggtcccaagcgccagtaaccctcttcttcttcgactgtcgtgcgtctttgtccaattccccggccaccgctcatgcctgctataaattgagcatgtcgtgagctccgtaggataattac

SEQ ID NO: 177506 - DNA, 1001 bp, Zea Mays
gggtcgatgaattcggcgtggtcgttggcgacgaacagtacgtgtggatcgacgatgagcagagtggggaactccggtgatgtctagcaagcgaaattccggtggcaccggggcacagaagatgacggtgtgtggacgaatagggaacggatgacgatgaggtcgctgggtgagcttgggcatggcgatgaagaacaacgatgatgtcgtggcttcaccgatagtgctccgacgaggaaaattcacagacagcagggcgtcgacggtgaaggagcacagcagcacgccacaacaatgacgccgagtaggagtggcaatcgatgaacgagcagagaactcggatggcagcctgcagcgcacggcacgacaataaggaactcagagcacgaagggagagaagcgaggcgagtgacttagcagctggagcaagtgtcgagcagggagaaaagggatgaagctcagcaccatttataggctggtagaaggaaatcatggcctcgaatttgattgtcgtagagaaacgtcctcacgaaatgccattaatggcaaggagaaactgtcatcgcagagaagaggagtggtggcggcagtggtggagagtacgactgggttggggagatgaatcggacgagcggtggtgagtgctccataacgccgggaggtgaagcggtgacggcataaggagcagggcgcgctagacggcggcgagatttatagagcacgaaagggagccagggcgtcgacagccattaatggaggtggagctatgtagaagaaacggttagcagtagtgaaagggagaggagcggacgacactcgggggaggagaatggccagtgcgcggtggtgttctatggaggtgaggtggaatccgcggggagccgaaccggcgttcactatcgatggccttgcgtgcaaacaggcagaacgaatcgagagagaaagagagtcgtgtgggagaaagaaaagaaaaggaataaaataaagagaaataaaggtgg

SEQ ID NO: 177507 - DNA, 368 bp, Zea Mays
ctccagagtcgacaacttagaaagttgcaccgtcgtcacgaacggcctcccattcacaaatttaggaggaacatcctccttcttgtatatcgggatattgattttaagacgtaatgattctcgagtatgaatcattccatcttcttcccatacttcgaaattgtctatttgggaccgtgtgcgtactccacgagatgttgattccgcttttgattgatctgtcataactctcttcaatttttgcaggtagcgtgtcactgattctgacggtttcttgacattgttagtggcgattcgctgatgaattttctttgaagtagttggcccttcaacattggtgtcaacctttgcttcctttttgatgtttg

SEQ ID NO: 177508 - DNA, 569 bp, Zea Mays
tgcagcgccagctcggatttaggacttgctgatccccatgagctccagggtctcgacatagatgacattgaggcttctgcctccatccatgaatactttggtgagtatggtgttaccgatgacagggtcgacgatgactaggtactttcttgggttcgggatgtagtctaggtggtcgtcttggtcgaaggtggtgactttgttagaccggtctaggtagaccgcgcgctgctacttcgaccgagaagacttcccggtgttcttgtttccgttgtctcactgagaggttcactattggtccaccaaagatcatgaagcagttgtggacatctgagaactcctcgtccttgtagtcgcccttgtcactagggccctcttattgttgtcgcccaccgaggggttgggtttgttgaagtagtgtcagagtaggtcacactcctcgagggtgtgcttgattgggcccttgtgataggggcacgcttccttgagcatcttatcgaagacattgagacccctagggggcctcgaagatttatttggtatgtagcgatgacaagatcagtcttgag

SEQ ID NO: 177509 - DNA, 495 bp, Zea Mays
cggtgagcaattcaggccgcttcttcgtccagctctccctgatacacccacggtcaccaccgccgtgcaccagagacgatcaccgacccgatctacagctctccgcggcccagacgcccagatggtcgtgcggccgcccaatctctctctgcctctgctctgtacgcacacacgacacggggactacttgctttgacttggcgtatccacaggggagcgatagggctcgagttttatgcgccccgccagtgaagtccgggtccgcgattcctggcggctccaccggcttccgttgctacagactgagcaagaagacggagtcagaggcgctggggtagactttgctgcagcgattcgcggttcaggtagttggtccgagcggaaaccacggaggtgaatcaccggccagagtgccccacacggcatggattacttaccccggtctaggtgcctgcgcgattttatcggaggagaagacgactcgaacgcagagtg

SEQ ID NO: 177510 - DNA, 535 bp, Zea Mays
ttgtcaaactagtgaaaacagtttaaacaaatgtaaactccaaaccattcctttgagaaaagcttggtgatggcatgcacatatcgtcgagactatacataatgcgtaaaaggggaaaacaaatcaaaatcatgcattctaataaacttattacataaaccgtagactaccgagctagctccctgcagcgtgtacgtacctctgcttctctatctagaaaattaattagtctacgcgctacacgcaacaatcacctacgtctcactctcacctcgctgatcatctcgtcaccaacgccatggccatttgcggtcaccatcggcaaggccttcaccttgatcattaccaccacctttttcttccagcggcacgacctgttgtgccctcctcttcttgccgtcgttcaggcgcacgccaaacagcttcaccggcgcctcatcgtcgtcgccgcggcgtggcctccacgtctgtgccgccgaggcgtcgtcggcagagccgagctccaccagcctgcagctggcggcggtcgtcgtcg

SEQ ID NO: 177511 - DNA, 1101 bp, Zea Mays
ctcgatgcactcaggaaaaaggtgttgacaagagcaaaaagctcataggaaaatggatcagggaactaccgtatgtggtctggagcctgcgaacccagccaagcctggctttacatagaaacaccccattcttcatggtatatgtgtcggaggcagtattaccagtggatctgatctttggagcacccagattaatgttcaaaagcatagctgagacagaagcaactaggctggaggacattgacatattagaggaagaacggatgaatgtggtcatttagtcggccagatactagcagaccctgaggcgctaccacgataaagcagtgcggcatcgatccttcgcatggggagatttggtcctccgtcgagtactgacgggagaggcacaacacaatctgtcactgccatgggaaggaccattcatcgttgcagaagttacccagccaagatcctaccggctcactcaaatggatgtcaccgaagtggggaattcgtggaatattgagcacctcaggaaattctatccaaagcactgcctcaaaactcttgtggatgagttgtactttgtaagcaaagggtctcattatcaataaagcttccatattctatggcatacaagttcttgatcagcaactgtcttaggtcgggcacaactcaaaagcggcacaacatacctacttagggtgaccactataccctactaacatagcaatggcttaagtcggaaatgccttaatcgatgcgacatgctcacgcttagatgacttaaggtgatcactataccctactaacggagcaatcggcttaagtcggaaatgccttaagtcagtgcgacatgctcacgcttacacgacttagggtgatcactataccctactaacggagcaatcgacttaagttggaaatgccttaagtcggtgcgacatgctcatgcttacacaacttagggtgatcactatactctactaacggagcaatcggcttaagtcggaaacacttttagtcggtgcgacatgctcatgcttgcacgacttagggtgatcactataccctactaacggagcaatcgacttaagtcggaaatgccttaagtcggtg

SEQ ID NO: 177512 - DNA, 928 bp, Zea Mays
catggatacaataatacaaagcaatccctatctaaatgtatttcagttctaagaaagaatttgtgttgccactacagtaacgttcaatattatagcaacataaggaactcgatcaacatgctcagtatctaaaatgcaaaaggtctgttactaaaggtctatgtacacagtcctaaccatagtaactaggttaactagtttataggattgaggatcgagaacgtggtacgatacttacagattttaacactacgggacgagattattccctcgtctctatctatgatccatggcctaacaccatcccatatggtcggcctcgtcagtagtctcatccgacggccaataatgccagcagcaaacctagcaatagatgtcggccatattggctagcaccccaccttacaagtatcagcttcacccacccatggcggccctgcccaccctgctggcagctcgataggatctagatggcaatagggggtggatagcctataaaattctttctctaataaaagttaacacaaaaactaaaataaaacttatatgcgaaagtgtactaagtaatagagaatacttcacaatatgatgatgaaacaatatgtaatagcaagcgtgactgtattattctgccatcaaactagtcaaacgaccaccatcagaaccaaacaccatggtccgatgcccctgttcctagtcacaacggttacctatgagtgggaccccatggtcaatagtgtgattgtattgtatgatgctgcatttttctcaattgtcgaaccaaagacaacgggtctgagcattctagagagtaacctagtcagttgtattattctggcacccactatcgaaccatagctcaaggtctgatgaaccctctgctaaagctctacacttagtggttggattgacactatactagtccgac

SEQ ID NO: 177513 - DNA, 995 bp, Zea Mays
ccgacccatgtggccatcacaccattcacatccaactcccactgataagataattgatttcaagcaagctcaaccagctcccacctcgccaccgacttggattcatagagaagctggtgcattatgacacggaggttggcaaggcttgttcagtgatcaaacagactctttaccggattgttgagatacaatataatctatctgatgtatttgccgagttaattgatgaagtcctccgtgctgaatcagatgagaatgaagatggttatgatgtgcagcaagcatccaaaaaatcagatgatattcatcaccatttagcaagttagtcagtttactggtttttatgtgactgcacacagttatgcaaacctttaaatatggttatgatgtcattattaaataatttgtttatgttgcttcaatgttacataaagaagcatgtaggagtccggccacccgaactgtatcagagatgtctactccagcatcgcagcctttgacgcagttgacacacacacgggtacatgaattactgttaaggcaacagcatattcgtgtactattacaaagttgccctgatgaagttgacattgatctactagtgcatacaatcccagtggcaatgctatttttttaattgcttgttttttccttgaaggtttatattcaatgttttttctaattagcatataactcattacattgtcgtcatggtcaacacggtgatattggcaagaacacgtcgagcaacaaaacatcactcctcaagtaacaccataatgcacaatcaacattccacatggaatcttgctcgccgatatttgatacgacgccgcaaataaatgtatgattattcccactcgcagtatttttatataataagtagtgtactaaacaactaatccataactaccataatttttacagtgtccaggaagtgtctagtcggcggcaaaatcagatctccccgacagtggcccatgttttgaccagac

SEQ ID NO: 177514 - DNA, 622 bp, Zea Mays
gggccatccagcgtcgggcgcatacgaagcaattcgaccgagaggaaaagacaccagaagtgaaagtggggagaaatcctgaggaatccctcgcacaaagccacaaaagcaaccatatgttgaatcccattagggtgaagatggtgtagccagatcttgtattggtgaagaagccctactaggaacgtgtgagggggcatcatgaagccccgctcgtggaattgcacgaacgaaaccatgaagcccgtcgatggttccagaacacctttagagccagggagcaggtattctccttcatgaaggagcccatgaaaaaatgcatctaggcagccttgatcaagcaaggtgcagctccagaatcccatgatcaccaaagggcggacggtggcgacagggattcgaggtgagcgggaggcggaaacgatggagcaagagatgcatggctccctagaagataaacaaaaagccaaagccaagcggcgcctgagcctcgaattgatactagccgacccactaagccgcaacctccatatctaaggcgcgacccaataaggaacaagagtgtaaactaacatgttaccgaccttggtgaataggcccgggtcgaacaggacacctaccc

SEQ ID NO: 177515 - DNA, 629 bp, Zea Mays
atatcaccatcagttggctctaacagcatatcttcaggaacaacatcctcgatagcctgatcaaaatttgctatgaataattcttgcaggctaacgagggcagacaaagttggagaaggaatatcgctattccccccactgactctgtaacgccgactgttcttccgaatcaatgggactttctcttcttcttcttcgtcctcgtcaacaatacggacaataaacggcgcagggtcacacccattaggattggctctggtagggtcacacccattgagatcagctcttgcagggtcacacccattgggatcagctctagctgggtcacacccattgggtttagctctggaagggtcacacccattgggatcagcattagcagggtcacacccattgggttcagctccagtaaagatttccaccggtacttcttcagcagcaggagtagaagggccagcaccctggtctagacatgatactcaccgaagccgtctcttcttcttcttcccctcggcaggtacagttggatgactaacctggcggagacgtttcgagcgagtaccctcaggctttcgggtgtccacggttccttcaagctctgggatagttgcaacagccattgttttagc

SEQ ID NO: 177516 - DNA, 536 bp, Zea Mays
atatcatcaacataaagaaggagaagaatccaaccacgagataaagtatgtacaaatagcgcaggatcatgagcgctggtagaaaacccagctacagtgaccacagacgcaaaccgctgaaaccaagcttgtggagcttgattgagaccataaagagagcatcgaagatgacaaaccatatcctcaggaatagaatatctaggcagtggctgcatgtatacctcttcacgcagctcaccattaagaaaggcattcttgacatcaagctgagagatggaccacccacaaacaaaggccacaaagagtgtgaacagtcgtcatgtgaacaattggagtaaaagtctcatcataatcgtggccttgtacctactggaaaccatgaacaaccaagcgatcctttagtgctcaagagaaccatccgagcgggtcttaaccttataaacccagttacacgtgataggacgaacatgtggtggacaaggtatgagttcccatgtgccagtgcgatctagagcaacgatctcatcagccatcgc

SEQ ID NO: 177517 - DNA, 788 bp, Zea Mays
gtgagagtgaagaagactacaacattctgatcccaacgaagcctagtcatctagattttgaaaaatctactgtgacggaagatgacatgactatgatgatgaaattgggctattttggagaggctgagagcaaacttgttcaatttgctggagaagaaattatcccagagccgaagaaggatgaagttgtcgttttcaagagcttcttcagagcagggctgtgattccccttgaatgaaatgataggggtagttttaaagaactttgaaatatatcttcgtcggccgactcccaacactattgttagactcagcgtctatatctgggccctccgaagccaagggatgaacacagatgcccaagctttctgtcgagtgcacgagctgcactatcagacaaaggccagggcagatggccttcatgaaaattttggctgttacaattttgcgtatcgaaaggatacaaaggcaccagtccttagctactgcacgaagtggccaactagttggaaaatgagtggttctatatgaaggctgacgagaaaaagagggagaagttgatgaccatggttatgagtccattgagtttgagcttcggaatgaccaggcccttatgcaatatgcaattggggtcaccctgtcagttgtctgaagtagaatttagaatggtagctgagcagattagtaccagggacttggtgcaagaatacttggcgaacagaacatatccgacgtcaagtggctggggaatgccgaagaggaaagaagtggggaagaagcatgaacttg

SEQ ID NO: 177518 - DNA, 391 bp, Zea Mays
ttccttggaatgtactagaattatgcatcacagcttgggttgtctccaatagctgtattgttgatcgatctgttttttatctatgttgtgttatacttcattttggtattaatatttagcctttttaaaaaaatttggtagatctttttaagttatcatcatgtccctgattagaggggcgtgcagaacattggtcatttgggtgattgtgggtggtagggtgaacgaatgctaaaccgagcactttttattgggcagtttgggacagcggtgattgtgggtggtagggtgaatggatgccaaaccgaacactttggattgggcacgctggggacagcggtgattgtgggtggtagggtgaacggatgccaaaccgagcactttggattgg

SEQ ID NO: 177519 - DNA, 523 bp, Zea Mays
atttaatactactaactagtgtctaaacatctgatatgacgtgttggggttcggatctccgggtccccggaggccatgagtcagcggacaaacaacatcgagtttgttcgtcacgagtcaattaagagtccaccccgcccacgagatgtcccccgcatcaagccaaaggatcgagcgaggcgggagaaggcaaaaagggtcaaatgaatcgatcaaagtccactcgagtagattttgcgtatcagttagactggtcgcactgtcagctttgcatacgcctcattaattatgtcaatcgacagggagtgacatgaatagtataagtcttccccactcataatctacgaatcctgggcacgagtacctagaagacctatggctctgaatggagataaggcagaaaccagctgacaagctacaaaaaggcagaaggttggcaacaaaaacaatggtgatgacgcttggactttcatcgccagcacagaccgcgtcctcccccggcaatcttagaggtacacgatag

SEQ ID NO: 177520 - DNA, 875 bp, Zea Mays
tgttccacgcctggtggctaaacggtcgcatgtgcgcagaggtggcggcgtttgccaacagcacctggccaatctgactcctcgggagggaccccgtcaaggtggagagatcctagggtttctcttataatcagtagaccacccaagacgcctcgagatgacttagagtcaaagagatatgtaaattaaggtgaagaaggctacgttattgtttactcatagggcaaaaggtaaaggaacagaagatatattgatttggttcaattgttgatagttcaattcattgcatcctttcaaatatataatggggaggtctggacctattcctaaatgtcctccaacaacacacacgagtttagaaagataaatatgcgtgaagatagaagcttaattcgctttatctgatctaattatggactatccacgcctcaagaccggactgtccgattgtgtccaataccataaataatattcaagaaatgagatactagctatttctgtcgcagcatgtgtaaatgatgaaagcccgaccaatcatgcatgtacctacgacgaaggcgatggtgcgcttgcagaagcatatccggtcgtgtgatggggtgcataggaaatgcacgcaatgtctgaagagaatcgttgtttgatcagcaacgagcagtctgagtctccgattcattccagtcaggggcataattaattaaatatattaaacggctgccgaacaaagtgcaacgacgccgtccacgcacctaaactattttccatcgtccgatgctaaatatacgggattgaaggtgtacaaatcgtgaacgagcgacctgtcagtctgattgcgtgagctagcgcatcactgcctgagttgcacgcgcggcgcg

SEQ ID NO: 177521 - DNA, 448 bp, Zea Mays
aacaggcgccaccatcctatctcctacgacgtcggcgattgggttctcatctgccttcgacagcgctccgtcgcctctctatcacaagagaccaagggcaagctggaaccacgcttcttcgaaccgtaccgcgtcgccgagcgcatcaacgaggtcgttgtccacctcgtcctgcctccccgcgccaagctacacgatgtcttccatgtcagtctcctcaagaagttcgtcgagccgccaccagacgttccacctccgctgccgaccatccacaacggcgatgtgactccggaaccagagcgggttgttcgctaccgtctggctcggggcgtccgtcaggtgctgatccactggaagggccaatccgcagcgtcggcaacctgggaagacgtggattgtttccgcgacaagcatccgcagttccagctcgaggacgagttggtcgtcg

SEQ ID NO: 177522 - DNA, 780 bp, Zea Mays
gtttgagtgttgataatgattattactagactccagcaacccatgttatattgtttatccattccaaaaaaactgtgtgttattagaacgcttgaatctgttttatttgggttgaattgttccaataataccttttttctattggattcttgaaatccgataggaccagcatcatctgaacctttctcccgttcggtgaaaacaaaacatgtgcgcggggccgcgggtgcatcggatgtgttatcagtcttggctggagccacgtgggcatgtgttttcgggtggagaaaataccgcacacctgtggggtctgtgggccaaaaatcgtgggaaagaacttagaaacaactagtaaaagatgtgcgaatgccataacccgtctatcccaaatactcacatttttgtcgtgcctgcaaacccgtaccgtttgacgcctctgtcgcgctgtgctgccgcggcaatacgtgcctcgtgcttgagaatgattgagatcccgtgcgcccatcagcccatgtgggaaggcgaactaactgcttgtcttgttggttctgctcagctcttgtagcactaggcagctgtgctcccccagtcccctcctccctcctcatgaaacgggcgggcgatgattcctgggcatgtgctcgctcgctcgctcgcttgccaacaacatgttagcgtcgggcactgaagctggtagccgtcgctgtcgctgtcgttgtcgaatctaatggcccgagccgtccttgattattccaggcgtgaaaccttataccaaacacg

SEQ ID NO: 177523 - DNA, 405 bp, Zea Mays
caaacttggacaaagcaactggggtgactgagggggttaacacaagcgtaaagggatgatgagccttggtgaacaatcaaacggagcgatggggcacgggaacagcgaaattcagccagaacccgagactacgatagcggagagctaacagaaaccgagttctcgtggccttattggagcttaatatggagggagccagagcgagcacatctagcttcactactgcacggacaccacatatgtccaagggcacagagaaacagtaaacggtgaccaatagtgttcggactggaggcaagcagacaggcaaacatcatagtcaacagataggcttcacctcttcaatccaatccttggcagtgaaactatcccaagttatcccaccctcatcctgccagcacaaac

SEQ ID NO: 177524 - DNA, 435 bp, Zea Mays
ggagtatcaggggcacaccagaacgctaaaacgggagggcagaggatatgagtggatctgaggcgcgctggccacggcgaggtcaaaccgagcggagttcttgagtgatttgggggaagtaaggaattggagctctctggtgaacgattggaggcaagacttagtggattggtgcgtgattaccctacggagctcgcattgcgcacaatttatagagccactgagcggtggccgatgaattgaacgacgacgcacgatggccgaagaaaaaaagggcactggcacaagcgcttagtggctttcaccgtggcggtccctccggcgatcaccggatgcgcctaacatgattaaccgcgacgtggtaaggtgcctgggcacgtggcgcagatcggcaggcagccaacgccggtgagcttatccgtgccggccgcaagg

SEQ ID NO: 177525 - DNA, 1362 bp, Zea Mays
gaatgatcgaactatctttttgttgcattggtgttgaattcggcgttggtgacttatgaagcgatagacgacttaagattggctcatcacccaacttgatgttgcgtcgatgccaaaggatcaactcgttcattgcctcctgcaaagttatgatcccctcaactggaaagtctatctcccaatcttcacaaccactgtctgtgatctctagaacttggaccacagcatagtgtggcgggacaggattatccttgtagttaacaagtcctggttttaccaaaccagtagcagcttgttttgtttttgtcccagatcgattgattggaatatgaagaaagcaaggcttgtcctcaataatatcgtctacagggtacttggtgcccgatacgaagtcttgcacagatcctacgctgctagggactacaggtggactcatgtggcctgccttgagttcacatgatatgcattctgttttcttcattttcttcatcacgtcattaatagccttttgtaccctatcatcaatagtctcttcaagggtccttttcgacttctcgtgtttcctatatgacgccgcatactctggaaatgcctctctccaggaaatcttagaagagattccccgagcccgtccagtgtgttcaggattgcctagtgctgcggtttgtatgtcattctccctccgaggcttaaattcgcccttctttctcttttctgcatattcttgaatttttgtcgaaacttcgcctaccaattctagatgcaaaagtttgttgtcctcggtcaaacctgcccgacctaagatcgaacgaatagctcgctcatcgatatcttttattattgggtccaaagtgtcgttagctatagcttcctcgattatcctgttccactgcacaactttatggtgatatccggttgaccccaggcgatgggggtgtttgttcatcttcgctctctgagaattagtttcgcccagttctatggccttcagttcagtcttctgacgaacaaattcctcccactgagcatgagtgattttacccattttcttgggcgaaggaaccttattcttcttaacaaaatccctattcatctcggtcttccacccacgaaacatcttggccatagcagagagcatcgacttccttactgcatcctctgtgccttttgggaccttgaatgactcagacaacttagcccatagcttattgcgggtgtcttcatctaaatccttccatttctgaagtgtgattggcactatatctctaacagtggacccgcaggaatttcgaaactttgtaaccacgtcaagtggttcttcaggaaacccctctgcactgagttttgttacgtacataattg

SEQ ID NO: 177526 - DNA, 601 bp, Zea Mays
ctagtgtgtggaagaaagaatgttccgtccttttatagctcaagggtggactttaccgttgaaacttatattctactcgagggtccttggcttgttgcccctaggccgctctagccctcctagcgtcgtctatgggggtgtgcgttgtcgtcctcccgatacgacgttatgtcatgtctgctctccatacggggcactgtagcttgctcggtgtcaaactgtcaatgttgcggtaccgggtcctgcaaagtggactcacggcgaggttctgggttgtgtctaatatagcttcatcttccgtcataccccttacatcaccttccagcatgtgtaggtatacatccactatggggtattgtgtctaatatagcttcatctgctcgttgcggtcccacacgtcggtcccgcctccatcctggcctccctcccattcgctcctcgcgacatcgcctcctcctcgatgcccgcgcctctgctaaggatttctcgggttgtgccagtttcagggaacccacttcctccacgaagaattccgttgatagccatgagcatgtcgatggccagaagcccagaacgacgacttcgttgttatatatgggcc

SEQ ID NO: 177527 - DNA, 976 bp, Zea Mays
acgtacttcatgcaaaatggtgatcaattagcaaacttgctcacgaagccgctttcatgcgaacgtctccaggagctacgcgttcagagcgacatcatcaatatcgaaccagtgctacatgattagggatagtttgtcaaggctaatatgttgtgcctagtttctatctaagtttagcatagtggtctacatggtgtcttcctcacaccatgcgtagagtctttttcatttcatgcagagtcatgtgaatggtggagcttggagcccagaaatggtgactatgttcattggttgtgggatggccaccatttttaggctccaagctccaccattcacatgactctgcatgaaatggaaaagactgtgaatagtgcagggaagacaccatgtagaccactatgctaaacttagataaaaactaggcgcaatagattagccttgacaaattccaccctaatcatgttacacgggttccatactgatgacgctgctttgagagttgctcctagagacgttcgcgtggaagcggcttcgtgagcaagtccaccaattgatcaccatttcggacgaagtccatctccaattaccaattgctaatgcagtctctaatgaagtgagaacggatgtcaatgtgcttacttcgatcatgaagcaccgaattttcggcgagggcaagcatagacttgttgtcgatgtagagcagcgacccaacgacatttaatactgagtcaagcttaacacttggtaccggagctgtttcgtcgttgctccctgcctcgctctctcacgatggactcaggttttggcacaacatatgtactgttgcattttctattttcttctccttttataatatagattacaggctcgacttagactccagatgcatgcgcccacaccccctgaattagttgtgccatccacaaccaaggaacgtggtcaccatttacggtctccaagctccaccgttcacacg

SEQ ID NO: 177528 - DNA, 801 bp, Zea Mays
tcaatggcgatggtagggtttggctccatcggctagggagcttcatgggaagttgaaagtgctgctggtgcaaggaatcgggcagtcgtgctcgggttggcgctggtcacgttcgtcggcgctcgtgtgaagtccggcgagcagtggcacgtcgctggaggggagtagggggtgaatgggctggccgaggggcttcactacgactctgggaagctgtttgtgtggcgaagtgggatggaacacggtcgaggtgggttggtcatagcggccaatgcttggaggcgattgtggggcgcgctgagctcgcaggagttgacaaggtctcgggtggagctcggcactaggctagagaagtgttggtggtactgcctaagggttggagaggcctttataggcacgagcatgggtaggcagggcacacgcgcgcgtgggttgggcgtgctctagcgtgccatccctggtcaaacacgtggcttgtttgctttagctcgtcttctcgcgcgtgtagtcgtcgtttcaagcccaatcttggcaagatctctgtacatggtgtgttctcctgactctaagcaaactcttttttatgggggttcaatgattttgtccactgttgtaagagatatggggtctggaaatatggattgtcatcaggtgcaagtctgaggcaaaaccaacgttttgtcttgttcatcgatatgttcttgggcccacctttcattagaggatagataaggtacttaggcacaacttttccaattgggggtattaggactgagccctaaatccttttgaacatgtcgg

SEQ ID NO: 177529 - DNA, 507 bp, Zea Mays
gtgacaggtacgatctcagttgattcgtttgtggcccatgctctttttgactctggccctagctattcgtttgtttcagagaattttgtgtcgcgggctggtctttcggtgcagaggttgggtcacccaattttggttagttctgctagtggctccattagtagctgttcagtttgttaggggtgttccgtcattcttgctgatgaggtcttttaggccaatcttgttgtgatttccttgggggcattcgatgttatcttgggtatggattggttatctcagtatcgcgcagttatattatgtttttggaagacagtgttattgcaggcgccgtcgggtagggaggtgatattcttgggaagttctccaaagttcacgttatcctcgttgtcgcaattgcttctggatcttcggtcaaggaagtcgggaattctttactccatggtggtggagggtgaggctgccttgcgggtgcaggacatccgtgtggtgtgtgactttgtcgac

SEQ ID NO: 177530 - DNA, 721 bp, Zea Mays
ggaaagtccaggggttaatgcgcgaaaagtcccaagacacagatctaccctgcggtggatggcgggttgatttctaaataagccgagggctcttctgtgaaactggctcagcgaaggggtaccaagcatccagagccgcccgatcataaatcagtggctatgattaaatctacattaatcgaacggatacgcgacgtggaccgcccgatccaacatcaacgtcatggattttattaggcgcgatctgatctactccctccgatccgattacaacggtccagatcccatcaagtgaagaggtatcgcgatttaatcgtgaccacccattcacgatccgatggcccacactgcctggtatcgtcttctccctcataaccctcagacggcggcgcggaccaggtgaccaagcaggccacggcggcggcattgacggaaagcgcccatcgaagtccgagctccccatcggtcaccactaggcgaaaaaggaagcggaggtaatacataactcgagagaggcattattaccgaaggttaaagcagccgggaaactctccgaccatgcgacagcaaggaattccagggacctgagctacaaattcccctgtacgagtttacggaagcctccactgcatccaggcgaagctccccgaacaatcgccagagaccgagcggtggcacaccgtcgactaagacccccagcggcggatatgttcatgccccg

SEQ ID NO: 177531 - DNA, 867 bp, Zea Mays
aaaaacaattatacttacatgtgaatgcagtatttgaggcgtatccatctccctggagctaatgttggacattggcggtcgaatccgttgatgcccttcatccctatgcttgaagcgtcgattacaggccccagtagagcaggaggcggtgtaaccattaagttaccatcaacaactccctcactgtttggaccaagatgaccgccatctcctaccatcgccggtgattgtccagagccggccatctccatcgccaactagttctccagtagtcggatatttttttcgaatgcaaggaaatcacggatgatactctaaacaagtaactgcacccacgtttccagggtatttccataatttccgcaaccgtaccgatattgtaggtgtttaacttcaatacaaaacaacactacaacttcttacgcacaatgcctcaacattttacgccattctgtatatactatatatgcaacatttatagcgtacctttttatgacaatccattcatcatcttattcgatattatctttaactgcctcaattaaacgccatgcaagatccattaattccgcgcccacgtttcagattacacacgtttgcatgcgaaatctaattcctataattctgccaattaccaaatgattcccgcctttccattaatccacccgtcacggcgccgttggttctgcatgtcctctatctcctctccatcagacccacgcgctgacggctgagcggactagaccccctccacggcctgggctctccttaatatccgaagcccagggctcccgttacacctgtcctatatatatatatatatatatatagttagttaaagatggattcctatttgaagagtgccta

SEQ ID NO: 177532 - DNA, 764 bp, Zea Mays
taaaagtccagggtttcttatgtaagaaagcaaggccgaaggggtattcctggtttctggccgcccgatctgcaatctagggtccagatttaattattgattcactcacttcagaccgcccgatcaaacagggacggctaggattaaaatctcgcacgcccgaaccgttacgccacgccaatcgttagatctagatcctagggtttatcacctatccatgccccagcccaacacctgccatctgatgcgatcgaacgacccagattaagtccccacaaaaacgaaccggtactaaatcctaaccctcgactagacgatcaacgactatagggtcttcttcttccctctgactccggacggcgccacaccacaccgagatggtgcaatctctcggtgagccggtgggcaacagccccagcatgtggatcaaggcgtgaaccgcgacagcgcatagcgaagataatggagaactacaggaatgtgctcttactagcgattgaggcgtagttcggccgcgtgacgtgatggtgcttcttcatcaccgccggtgaggttctgcttctttgtctccgtgatgttgcggacgattcccccaccctgaatcagggagacgtcgtgggccatcccccatgctttgacgtcgaagaacccatgccctcctctcggtttcctgcgctcacccgcgatcaaacccactcccttctcccttggtttctctctcttaatggctgcaatccaggcggcgcacacctgccatttttttt

SEQ ID NO: 177533 - DNA, 498 bp, Zea Mays
cttctatgacaagtttgtctccaactttcaatcgcactctaataagcccacacggtcgtgggacctcaagtctatcagacgcaagggtgacgagtctcttcgcttgtttcttatgcatttccagactatgaggaaccacatccccaacattgctgatgcgacggtgattgaggacttctactaggggtccagtgataaggtcttcgtacggaccatcctccaagaggcctacatgaccaccgagcaactcttctagaaggccaatgcctacatcaccgccgatgagtgggcccacgacctcattgagtcatccaagcccacaccccagaagaaagaaacccactacaagataagcattgggacaagaggccaagggacaaggttcacgagacagggctgccgccggctcaagcacgtggcgccctcgagacaacccatggatgttggaagaaattctcaatggtttgtgcccctagcacaaggataggcgccataccc

SEQ ID NO: 177534 - DNA, 782 bp, Zea Mays
attttataattcttgagtcatagaaatcgtcgttcaattaagagggatccgcaatagttaagtaagtaatgcgatgagctcagtccaaaccctttcaaatcctctaagaaaatattttactagatcatgaatgctcttggaaaaaccaccttcactccccactaaagttttaccttggttcacctcagttttctcaaaatctgttcatcagtttcaaaaatcagttcaaccgaacctaaaaccggttcaaccagtttctgcactgttccttctgtcattttctgacctgctagtctgccagtcaatgctgtcagaaaaagtcgtgtgcagagttttttgaaaaccggttcaaccggatttgagtccggctcaaccgaatttagggtcggtcgagtctccggctgagtccctcagtaaaccgagaactccctggtggaaaccggttcaaccgattttgagtctacttttcccaacggctgtcagcttttgggggatcctttatatacccccacactctctctctctctcttcattcacttctgctctctccacgaattcttggctgaccaaccttcaaacaagagcattcaattcacctctcacacccgaaatcgcatctccttcaatcgtttgaaggacccttggtgtgaggtgaagtcgatctaactcactgttgatttcatcttgattctcccattctcttcatcttttgagctcattgcaaacttaatcttgtgcggatttgttactcttggaaccttatgttccttgacggatagagg

SEQ ID NO: 177535 - DNA, 709 bp, Zea Mays
tctatttctactataatgcatgagttcatctgtgcatctcttcttgcttccatctccatttccgtgcaccactcgcgcagggaggtaacaacacaagcaaaacaatgcctcgtgcagtcaggactactaggtgtcgacgtagtagaactgctaggtcatcgattgaggtatatagattttcgatttaataaatttagaattagttaaatttgatttgagattgtagttgctttattaaaggaggagtggttgcccgccatgcaaagctgctcgagactttgtgttgctcactatagtagcaacaaggcaaagaggggaggaggaagggggcaatgacgacgtataaggttttgcgcccctgagtcacctcatggaagacgacgggggattgaaatcataattttcttattcggtatatgaaatgcatttatgtaggttgtgtgatagatgtgttgagatcggcacaatgaccataagtcattgtaaaggtctaaaacgcgtttgaacttactaacataaagcatgagtttcgttgtacgttaggtgtagttattagggttcaatccgtggtctctaggaagagagcactcacctctaactattgtagcttatgttggtttgtgtcgtacaagaaattatatcatatatagaaatcatagtgatgcactcgcaactaaccggtgatatagaagtcgtaacaatgcacgag

SEQ ID NO: 177536 - DNA, 1934 bp, Zea Mays
gctgaatttgtggtcttcatgggaataaaatgtgcagacttagtcaagcgatccactaccacccatatagcatcccatccccgaggggaatgaggtagacccaccacaaaatccatggtgatatgctcccatttccactctggaatttctaatggcttcagtaaaccagcaggtcgcttatgcttggccttcacgcgttgacatacttcacaggcggccacgtacatagaaacgtcaaccttcatccgcttccaccagaagttttgcttcaaatctcggtacattttggtttcgccagggtgaacggtgtaaggcgttttatgagcttctctcaagatatccatcttgacctctgatttctgaggcacacaaagacggcccctgaaatgaaccaaatcattctcatcaatggtgaactctcgtggtttaccatcaccaaccctctttcgagcttcctgcaatagacgatcctgttgctgagccgcacgcactctctccatgagggaggattgaataagcatccgagtctcctcgctagcggtgcctacataacacaaagcgatccccaaacggtccagatcaacgatcaacggcaaggccacttttggaaccccggacctgctaagggcatcagccactacattagccttccccgggtgataatgaatggacaaatcataatctttaatcaattcaagctaccgacgctacctcaaattcagctccttctgagtaaaaatatacttgagacttttatgattggtgtaaatgtcgcaagcctcgccataaagataatgcctccacgactttagagcaaaaaccaccgcggccaattcaagatcatgagttgggtaattcccctcatgcttcctcaactgccttgagccataagcaatcactctgccttcctgcatcaacacacagccaagaccaatacgcgaagcatccgtataaactgtgaaacgcttaccgctctcaggaaaagctaggataggggcgtccaccaacttgctcttcaatgtctgataacggacctcgcaaatcaccggaccagatgaagagaacacccttctccaagagtctaatcagaggcttagcaatgctagaaaaatttggtacgaagcgccgataatatccagcgagccccaagaaacttcggatttcagagacactagagggtctcttccactccaccacagccgcaacattcttgggatcaactgcaatgccctgttgattaatcacgtgccccaggaaagccacttcggatagccaaaaggcacacttcttcaacttgccatagaactaattcttccttagggcacccagaatgagacggagatgctgatcatgatcggccttggtctttgaataaatcagaatatcatctaggaacacgaccacaaagtcatccaggaattcatgcaacatcctattcattgcttccataaaaacagcaggggcattagttaagccaaaagacatggctatgaactcataatgcccatacttggtgcaaaaagtggtcttctcaatatcctcctcacgaatcctcaattgatgataacccgagttcaaatcaattttagagaacacctgggcacccctcaactgttcaaagaggacctcaatacggggaagcggatatttattcttgatcgtcacttgattcaaagcgcgataatccacacacagccgcttgcttttatccttcttctcaacaaacaatattgggcaagcccatggagacctgctaggcctaatgaaacccttagtcagcagatcatccaattgccgcttcaattcaacctgctcctttggggccattcgatacggggccttatgaataggctgcgtacccggaatcagcttaatctcaaaagctgcatcgcgctccggaggaatgcctggaagctctgccggaaacacgtcag

SEQ ID NO: 177537 - DNA, 541 bp, Zea Mays
gaggagcgactgtaggatttctctgagctggaaaccaggactccactggcacgtgtttgaaatggcaaactctagtggaagtggccctctgaaggtcaaaaagtcggggatcctcagcaattggtcgaacctctttctcgtcgcgctctcgaaaacgatgtggaggtactggtggagtggtagagggagcgagagcagtgggagtaggtgtggtggaggctttaggtgtagcgagtgtggaagtgggcaatggagtggcggaggctggcatagtggaggaaggtggagtggtagtggtagtggtggaggctcgcatagtgggtcaaaccgagctagagtggagtgagttcgagacgagaggtaataaacatgaagacattttgattagatccaatcctcaactggcctccctactctactctcttagctactattgctgcttctgcaactgctcgagtggcgctatccaactttctcttcttcttgcctccctactgctcaaggtagacatccttgcccttgtcctgtctgaaagggcgag

SEQ ID NO: 177538 - DNA, 370 bp, Zea Mays
gcgcagcttttgcaatgcaagctgttcccgccccgatggtaaacaaacatgtgaggaactattctagtaatggttaaacttattcttgtgataagtctacaaattttacagggaaaaaaagagaaacatacctgctatgtagcacattctgcaaatggctttgtttgcattagaccgtaataatgaacaaaatgaaaaagtggtgtgtatgttatgtatattaagagaccggccctctggcttggaaaggcaaaagcacacacatgtttagtgctcaccacaggccaccttccagaacacggcctcggcctggccttcaagcgctgggaccaaccactacaccaagaacggtggatcgtggacggatggc

SEQ ID NO: 177539 - DNA, 658 bp, Zea Mays
ctttccaacgagttaggataggcatggtttcccgaataatgataccagcctctgatgcaaacttgacagcttgaacaggttcatgtgtcctttttttgccttcctcaacagctatgggcagtctcctttgcataactttagtcatcctatccagttgttttcccttagttgctgccctgggtctccttggtgctcgctgtgtaggagctacaaaatagaattcacatttattgaataatgaaattgttttgtttcatgcaaatcagcaaaagagatgccatatttgactgaaaaaactataacttgccttcagtttcttcatctctagctacattgccttcagcatcacctgtactgtcatgagcagtgaatgccatgtcttcctctgcagctctgctgaaatgatcagcaagtccaggtgtagtagggctgtttggtatgtcatcattagcatctgttggttcctatacattgtggccatctgtctctatagagtgaagcctttttgaaggttgctcctctagttgtggacctgccctcactctcttgctgaacctaattcctagagccatgttggggtttgtcttcttctttgaagcacgggttgtgtttgtagcacttctaggatactgtccacaaaaaaaatagtcatgtgcat

SEQ ID NO: 177540 - DNA, 452 bp, Zea Mays
ctgaaatcctctcaaagtaagtgctcggaaaccataatttctcactcatctgttgaccctgaatgaatcttcatactacttggccttttcaggcatgaagccgaactggcaactacggcaactcaaccattaccagatgacaatgacgacctgatcgagtagatgttgcattatactactttatcgatctacatgtctcgcccaatgcgtcttctcataagttctcgtgtcctaaactttgggatggtgaagttttttgtagctaactgtcctgattagttgggttccaccatatttgatgaactggcttcattgcaatggttatttgcttaattgctttgattgccaaataaaatgcacgttttctttgtgtttttgtatatcacgaaatagtaggcatttattggtgatagatggagatggcggttataaagtctgattcagttataaat

SEQ ID NO: 177541 - DNA, 413 bp, Zea Mays
gttgacaccaattcagggtaccatgtagtgtttggcttgctgttgacaccaattcagagtaccaaatagaattcgacttgctgttcacatcaatcgaaatatattgtttgggttcctgttcgcattagttcagactgtctaaaagctcaagggacagacgacacagtttttgttgttctgctttttgttcattgcactgacctaacgctatactgaattttgcttcccatcaatcccactaatagctaggctgttgttctccttgctgttcattgcattgtgctcccatcaatcccatcagttggattagcataagctgctttgattttcagcagtccaaactcatacatatgtatgctcccatcaataccatcaattggattagcataagctgctttgattttcaacagtgc

SEQ ID NO: 177542 - DNA, 301 bp, Zea Mays
tagcaacgtcgtctcctaggtaaccgccatatggcagacggttcaactcgaaaacacggttcaaacaaacattggaaccacgaatatcccaactccgcaaagcctccgtcctcggcacatatcgccccacaattctcactgctccatcctctacttcacgcacaaacgcagctggggtcccggccgcgcaaatccaaagcaaaggtaggacttcacaccaactgctcgcccaaggtaggcatctggcgagggcacacttcgccaagtacccagtcgtgcgccaagggccatactccataac

SEQ ID NO: 177543 - DNA, 366 bp, Zea Mays
taatcgcgattagtcggtgactaggacgactaatcgcttcctagtcgctctagtcgagtcggagaccctaatcgagctccctctagcgataaggccgactaatcgctattagtcggacgactttaaaaccttggccaaaagagtaaatggggagtgctatcattgtcctgataaatactcggtagcccacaagtgcaagaccaagggtattttcctcattgagctggatgatgatgaggatgaagacgcaacagcagcaacttgggcatctcattacatgccctgactggaattcacattggggggaccatgcaacttccagtacacattggtaacaccaccttggtggctttgttggactctggc

SEQ ID NO: 177544 - DNA, 403 bp, Zea Mays
cggtaaataaacagacgttccacgcgggctcgcaattaaggttaagagtgaaagagaaaaaagacagtcgagaaacgatcacgtcacatgattataaattaaattactcgctcaatggaagggaattaatttggatgctacgttttaacataaagtaaaatcaggttccacatttaattattgtaaacaattgaaggtgaatgaaagggaatggtcgcacgttgagacgtacgacacgacatttagattgaattaagaagtaaacgactcgccgcgcgacagagcgcacaatgagacacttgcattaattataaagagacgttaagcatcgcgcgacgaagcgcacgacgacatacgtcaacagagctgagtttaaagtggaacgtcgcgcgactggacacgc

SEQ ID NO: 177545 - DNA, 727 bp, Zea Mays
cttttgtagaaatatattcaataccaaatagccttcttgctagtcgttcacgaacaaaatgataatctacctcaatatgctttgttctagcatgaaagacctgatttgctgataggtacttagctcccatattgtcacaccatatttttgcctttttcggtgcctgaatgcccaactcatatagcagagtttgtatccacattacctcagcggtggcattagcaactgctttgtattcagcttctctgcttgatcttgatactgtagattgcttcctggcactccaagaaataagattagatcctaagaacacaacaaatcctccagtcgatcgcatgtcatattgatctcctgcccagtctgcatctgaaaaggcacttacaagaagagagggtgacttacaatttttaagtccaatctccatagtatgtttgagataccttagtattctctttactgcagcccagtgaacagtagtaggtgcatgtaaatattagcaaaccttattcacaacaaaataaatatctggccgagtcaaggtcaaatatttcaagcctcctacaatgctcctgtaagccatagcatctttgggaccaagaggatcaccttcgtgagcagatattttgtatgaggtggacaacggtgagctaaccagtttgcactccatcatattggcacgatgcaacacatctttagcatattttccttgtgttagcagaattccatt

SEQ ID NO: 177546 - DNA, 468 bp, Zea Mays
gtcgtgacaagcatgaacaaataaaaaaggagttgaagaatttcctcgcagatacaagcatggtactggttttgcagccactggtcataaggcttcaataactggagtgcaatattatgctgatattggtgggtttggtgagatatctggatgtttgcagaaaatgaatagcgcacatcaactggtaattttgatggcaccctatttatacgttgcctaactctgaagtagccagtaatctctgtttaacttgatccattggggaagactggacaaggcatttcttcagctttaaacctcaagagattccatttaattttctatgcccactttttttcagattggaagacctactgaagaagacttaggaagttggggacatcactgtgacccatcaactgtacctgatactatactgcagtgttctgctggcgaagaggtgacaacctaagaccctctgtgcatctg

SEQ ID NO: 177547 - DNA, 495 bp, Zea Mays
actacgtcgagtgggacgtggtgatgagggtacgactccaggtttgccacatgtgggaagcagttcggtacgacgacgtcgattactatgaggatcgatgggcgctagatgccctcattgttgtattcctgctcgagatgcagttttcgctttcccagaagtggactgccaaggaagcctgggacgccatcgctgcgacccgcatcggcagcaaccgtgtccgcaagaccacactgcaggcactttgcaaggagtgggagaacctagccttcaagctaggtgaggatgttgatgactttgctcttcgccttaacactctgttgcagaagatggtgcagttcggtgacaacacctacgatgaggagagagccatcgagaagctcttctgttgcatccccaagaagtacaagcagatcgctcgctcaatcgagtctctgctagacctctccacgatgacgattgaagaagcgattggtcatctcaaggtcatcgatg

SEQ ID NO: 177548 - DNA, 640 bp, Zea Mays
tctctaacttcagctaaggcggtggaattcatacaagacataatattcaggttcggaataccaaatagcatcataactgacctgggatccaatttcacaagctcatagttttttgatttctgcgaacaaaaaagcattcagatcaaatatgccttggtggcgcacccaagagccaacgggcagatagaaagagccaacgggatgatattggaagcactcagaaagtaagtttttgacaagaatgaaaagttcgcaggaaagtggattagacagttgccgtatgttgtttggagcctgagaactcaacctagccgagctctgcatggaaacactcctttcttcatggtttatggttcggaggcagtgctacccgctgatctcaagtttggggcaccaagattaatctttgaaaacatagcagaagctgaggctactagactggaggatgttgatgtactagaagaggaacgattgaatacagtgattcagtcgacccggtatcagcaaactctgaggcgctatcatgacaaggtcatacgacatcgatccttcgcagtgggagacctcgtcctccgccgaattctaacgagggagggatggcacaaattatcaccactatgggaaggaccattcatagtag

SEQ ID NO: 177549 - DNA, 283 bp, Zea Mays
aagcaccgttccccttcccgaagctgatgaggtggtggtctttaagagcttcatgaaagctgggcttcgcttcccactacacaagatgttggttgaagttctgaagacattcgaaatataccttcatcaacttacccccgaagcctttatcaaagtgggggtttttatatgggctatgaggagtcaagggctagagtcggatgctaggtgcttctgcaatattcatgagttatcctaccagatgaaggcaaccagaaaggaacaataccgtaacaacttcggc

SEQ ID NO: 177550 - DNA, 457 bp, Zea Mays
tcagcttttagtctatcattggttcaaaaattcagagactcactttctttatagtcaatagtgggtgattaggagagcataggtatgtgagatataggctggacatgttgaggtgagaaagattatggcaaggaaaagacttcatcatgggtagtggatcctgactcatctggtgatcccgcttggtccttgaagacttgaattggtgcttatcctttcttgatgaggttgatcctcttcagtcttcgttcttgaagttgttatccaaattagggatatgtggttaaggcagcttcgtaggtaaacaaaataggttagtaggtggctatgagttaaataagtttaagcagaatctgtcttgttgttttgcttctaggtcgggttaggtaggttatgcaacccaacatgtaggtcaggttggttgtatacgaccaagttagtacagggcaccaatttt

SEQ ID NO: 177551 - DNA, 1195 bp, Zea Mays
tgataacagatcttctggaaccatgtcttcaagagtttgatcaaagttcaccagagataattcttgcagaccaacgagggaagacaaggcaggagaaggaacaccactactttccccactagctatgtaatgtcggctgttcttccgaatcagagggatttcgtcctcttcttcatcatcctcatcaacaacatggacagcacacccattgaggtcagcgtcagacgggtcacacccattgggatcagcttcagtaaattcaggcacgggcacttcctcagcaacaggagcagaaggaccagcaccctaatctaagctagacacccgacgaagacgtctcttcttctttttctccccctcagcgggaaaagaggcttgatcggctcggcaagaacgttttggatgaacattgacagacttctgagtgtccaaagcattgtcagcctcagggatgggtaccaccaccaatgtttcagcaggagcggcatcagaagaatcctcagctaacatatcaagcatggcacttatctctgcatcactgggatccaaaggcacctcaaattgaacctgccgtcttcatcaggaatttcttcaagcgaagcaaccaaagcactaacttcttcagcagagggtcgcactctaaggcccaaactaccatcaccagcaggaggatttgacacaaaatgggtaaaggccttggaaggaggcaggttccaggccgagtatgcaaaaggggcagcaacatttgataccttgcctctgagtatcatttcgagccggctcaccaagtccacagcaggaattcttctgttggttacccgggttgagtcggctaggcctcggtacagataggccgggtatgccctatccttcagtggctgaatattcttgaagacaaagtcagcaaccacagcctctgcagtcagacccctctctttcaacaatccaacttcagctagcagagcccctgcttcagccacctcctggtctgtgggggactcagtccaactaggagtgcgaacatccggctgtctccctgaccgtggggggagggaattcccatgattctccacgatgaaccattccagacgccatcccttgatgctgtccttgagggggatgtcgaggtaatcagtcttccttccgcggcgcatctccaagctcgcaccccccaccagctgatgctgtccaccgg

SEQ ID NO: 177552 - DNA, 899 bp, Zea Mays
cctaaaactaaaagcaaggtggtaaaacaaagagcaaagttaaggaacaagattaccaacacattgacatgagagaattgatctttattactctcatgatatattcataagatgcttcacatgggcatcctgcaataattcaccatgaattcataaaaccttagagcagttctctcttttgcctctatctaggaaaagcaacctctaactttgcctctagttctataggtcaccctttgttcttttactcttcgatgttctcgtgatgcacggaccatgagcacatggcctccttttcattacttgccaagtacaatgctcacttataagaatgttgtggttcatcttgaaaatcaaccaactacaaacaccaacttctaatacctacccatcattcgtccatggtgcccctcagcacgcatgcatgtagaaaggttctaggggaacaccacatactgttagttttaggtaacttatatatatagtccaagggtatgcgttatagatatatacaaaactaggatatgtgcatacacaatttgttataatgcataagcatgctaaaacaattcatgcaccacatcagtcatcaaatcatgtccaactaaggtactacatcttgcttggcacaatgcacacatctgagtagtatgcacaccacaacactattttaacaacaccaactaagacaaatttcatgctaaaatccgcatatcacacatgtacatatcatgaagtgaccaccttcattcagtctcatctagtttcagtccatcatcgaccacattcttcctcaagcaacatctgcacatgaatcaacatgcaagtgagtactagaacaagttggatgagtaaccctaagctctacccaaagtagagaaaaatgagaaaacccaaag

SEQ ID NO: 177553 - DNA, 449 bp, Zea Mays
caagtccccaacaggtatgcgggcaataaatgcgtatgggaggttgaagatgcacggacgttgttcgatctcctttgggcgactgagattagaactggggcattccttcgtgtagttgaacgggggcagtcagatcgggatcggacgacatcggttagattagaaaccataaaatctgggtcgtcgtatctccatccaacggtcgacgcaacataccctttcgcaacctaatctgcaccatgcattataaatcctacgaccgagatcttgagataccccttcggccaagcattttttacatgagaaaccctatgttttagtgaatgaactcgtcgtcctgtgtgtgtggggaaacattcaatttaggtcctaggactttctgaagtaacccttggtcttcgttatatttgtacccgatgtccataagttaatcaattatgagaataaat

SEQ ID NO: 177554 - DNA, 589 bp, Zea Mays
ttgactagtggggccgagccatcggctccgccttcacccactgtaacagactctaacgaagcttgtcgtgcccgccgggatcgaggctaacggttgtaccgtgagccttggcccgggtataagaccagccaaaacctgcaaccccttcctctcatccacttggtaggtcgcaccgtcaagatcgactccggggaaacatgcaatcggggcagagtgaggtctgggtgtgggagattgacaccgccgcggtcgaatcaagcctatggtgacgagggtgtccacggaatcgggcctatatgcctcgccatgtcgtgcacgatacattcagagcatcgcttgggtggattcgtgcttggatggtgggggattgctcatcgatgttcaaaatttgtcgtcgaccgcccccactgtggccttatggttctgtgtcgccgcagtggaagtaaggtacgtacatggaattgttgtcttccccaaagtatttacagcctattagtttaagatttggggcatcggggtagctcgagcggaccactccggtgttgcgccatgggcggcgccaccgcgggattgttgtaatgctgtgtcc

SEQ ID NO: 177555 - DNA, 946 bp, Zea Mays
ggggtatggacgtatgaccgagctatgaagacaaacttcagaatgcatgtttggtaccagtactccatgcatgacttaaggattgcccgatttcatttcctggttcaaacgtaaggtacgtgcttagtttgtcaaagagatccgtctatgaactcaatttagcgtcttttaacttgcgaatacttgcagggccaaagagatccatctatgagtaccaagttgagacaagtagccaacgactttgcttatagggtcaagaaatattctgggtatgatgtcaatggataccgttttcgcacaacaaactaagaccaaagtcggcccaatcggaaaacaacgtgttctggagtctttacgcctagccttgacgatgtcgattatttttgacgaattgaagaaatatatgaactcaatttttatggttccaaacctcttactccagtgatagtcaaatgtcattggtttgaccctcaagtgatgagacggacacattctaatcttgggatagtcgaaattcgacaagattccaccttaccaggagatgatgtctatatcgtggcccaacaggccacacaagtgtattatctcccatatgcatgccaaacgaaagaacatcttaagggttgggatgttatgtataaggtatcgccgcatgagagattacctattcctaacgatgaagattataacttagacccggacacatatgatggagagttcttccaagaagatggctagaagggcgatttgagacagacttaaccgaagctatcggaatggccgtagatattgaaatggttgttgatgaggaggatgatgaggtgcaaaatgatattgacttagtaatccttgaaggcaatgacattattgacgaacttgcgccttcagatgatgttgactatgaaatggttgatagtgatgatgaaagttatgatccgactaaccc

SEQ ID NO: 177556 - DNA, 351 bp, Zea Mays
cgagctcagaaagaaaatattggatgaagctcacctttcaaaattttccatgcacccaggcagtaacaagatgtatcataatctcagatccttgtactggtgaaccagaatgaagagggaaattgctaagtatatatcggaatgcgacacttgccaaagagtcaaggccagtcatttgaaggtggcaggcaccttacagccccttcccataccatcttggaaatgggaggatatttgcatggatttcattgtaggattgcccaatacctcccggcaccacgattctatttgggtcattgtggataggttgaccaaaacagcacatttcttgccagtacataccacccaccg

SEQ ID NO: 177557 - DNA, 673 bp, Zea Mays
cagtaaaccgggcagccgcgggtgaatcctgggggcaccctcgcctagggtcgggcatgtggcgggtgctgctcgcgtggggttctagatcacattggcggtgatggcatggtggagttatgacctgtgcatcggcaatttctcgccaaagtggaggaaccaccgcaatgccaccctccgtcgtggacagtgctcctactcgcgtggcgcatggtaaggaccctctcatcccatgcgccatcgtcccctatgcgtgtagcacccattagttcgcgaattatggaacctatgcgtcggtcgtggttacgtcggcgagctcaccgtcagggactactcgggcgccaccattgaagacggtctcacgccgtccgatccggactgtgcgggggggggggggggattagatctaggaataaccaaaacatgagccgttgggtcgtatgcgtgcggtcaggataagatcttagcgtaccttttcgtgagatcggatcgtgaccacagatcgtggatcgtgcggtttggatgagtggaaccataataaaatctgagccatccaaatggaatctagcggatgtcagagcgtaccagttcgtgtgagattgatttaatctgggccgtccgtgtgggatcggatggctcagagcgggtggtaccccttcggccagcacatttt

SEQ ID NO: 177558 - DNA, 682 bp, Zea Mays
ggccaaaggagaaagagttcacccggctggtttattgcaaccacttccgattcctcaaggcgcctggcaggatattgcaatggatttcatcgaaaaactgcccaagtccagtggctatgatacaatcttggttgtggtcgaccgtttctcaaagtacgcccattttattgctctgaaacatcccttcactgcagcacaggtggctcaggttgtgttggatcaggtggtccgcttgcatggtcttccgagatctattgtcagcgacagggataaaatctttacgagcatattttggagccaattattcaagctgttgggcactaagctgaacctgagcacaacctatcacccacagactgacggccagagtgagcgggttaaccaatgtctggagatgtacctgcggtgtgcagtccatgctcaaccttctaaatggaagaattggttgcctctggcagaattttggtacaacactacataccacacttcactggcttgttctcctttcaaagtgttgtacggttatgaccctccatttgcagcagcacctcatataccatctgatgctattgttgatgtggcacagctgttagaggacagggctcagttcacttcgatgttgcgggagcagcttgccgcagcccagaaccgtattaagctgaaggcagaccggctccggacc

SEQ ID NO: 177559 - DNA, 477 bp, Zea Mays
tcacagtacatttgttgcatttaaatatttttcttaagagcttcgtgcatttgatttacttcaacattcatgtcatggtagtttccgaactggttgtggtgaataattttaccactgttttagacacacagcgaaccaagataaaatgtgtgcaaaactatacatgtacacaatagacaaacgatgtgtgtgaaaatatgtttagtttgttaataccactcataatccaataaccaaactgattagtaaaattgtgactgaaataggatataaatgtacttcaacatgtggtacgataaaactctttaacaggggtactatttggtactgttttctggttattggaaaagaggtggtctgcaaacagacaaaacgtttgtcttatacaacagtagtcccataccattcctaaaattgagttagtttgttcagtttactaaaccctaaataaaaatagaatagttcccttacgcagac

SEQ ID NO: 177560 - DNA, 1050 bp, Zea Mays
ataatttttcacactagtgctttattggtacatttaagcctatgtgtgaactcccaaacgaatttgaattcaaatactaaactttgaaattaagaaagaaatgcaaaacaaaaataataaaagaacaaaaaatggggggtcgaattgggcccaaaacccccggctggcccatttctccactcccgccgcctacttcagggctacgctcccaggtgccgaccggtgggcctgcccaggcagccacccggggcgtgtgcggtcgctgttctgcgaggcccgagtagtcggtctctggggctcgatagtgactcccccttttcgctgaagcatgggcccgggtgtgcgggagtcatcccctacctcgtgaccagactgccgctaccgatgtcgcgattctcgcgctgcacccggattctgttgccgctttcccctggactcgatcctcgcggactctgcctataaaacccagccctcgtccctgctcgtcaccagaaaacctttgtggcacatcaagcacagggtgagagataggggagcgctgagtcgagccgggagccgccatagccatctatcgccgtcgtttccgattgacaccggggtgctgcgggattgtgtgctaaggctccccaaaaccttctcgggtgcgggcgcagctgtccttgggtgcggtggtgaccggggatcccgggatttcgtcgccgtcgaatccacgcctccgctagaccaattttcgtggccgccaacggtgagacccctactgtgctcgcgccccgccccgggatttcggtcggatagcgtcaccaggacccagggaaggtgtgcgtgcaccggcatcgggttgggggcgatctacactagcgaattcttcaccggagcttcaccaccgcctcggatccgccgcgcaccgtggtcacgtctacgcgatccagaaacacaggtgagaactccactcctaccttcaccatgtcgatctcgtggtgtagagcggtccaattttgggtatggggtagtgattagccggattgtgtgccgccggtgagctatccgccg

SEQ ID NO: 177561 - DNA, 1054 bp, Zea Mays
cccagctcgaaccccgtcgtctgcagcggcgagctcccggagttggccagcaaccccggccacaccgtgccgccgcaccggttcgtgaacgtgaacgtgatcccgccggccgcacctgcacgcgcaatgcatccggacgtaattaagccgttgccagagagctcaaacccaggaagctagaaagaatccaccattgccaatcacagtgcctgcctactataccttgaaagaatgataggatcacgaatgacgacagactgatcatcaaagaagccatcgtcggactcgatcgaacccaatttaatttacccaacaaattaaaattgaatgtatgtatgtatgtatgtatgtatgtgtcaaaaaaatgtgacaaggctgaccgagaagttgttgaaatggcagttgcggttagctatatgggggtaagcagtgcagtggcggttagggggaggaagaaggaagtggtggtgaacggcacgggaggggggttggttagctagctggtgcattttgcgcggacctggctgggcatttatatagatcaagatcacgatgacgttatcgagctccttctgacgttcctcatagtgagcaataatacgacgcattcgtaaccatggataattattcgtagggtatagatatagtggaattttgttatccacggctaggctacagttatagatataataaggtatccacaggtaatatggatattcggtatttgtacctgttatccgatgggtatctgatggatattcggtatccacaggttcctcgtagtgatgggtatttgatttgatgggtgctaatacaatattgttgtctgatgagtcggaataatgaaattattgaattatgatacaattgttgtttagtgctaaatgctggaattatagtggactggcggatataagtatgggtagctccaaaaagctcgttccagatatttgagcggcggggtacggtcctcgcgtgaaaatgatgtgctgatttctaacagcgactttacagattgctacctacctacggttacattggaatgcgtttcttt

SEQ ID NO: 177562 - DNA, 635 bp, Zea Mays
gttggagtgtttggtgcttgaagaagaggttaaagttttctaatcagattgtcctcagtatatccatgtaggggatatacctccattctagagcaggtagaagagcaacctggtctcatataatccctatggactcctatagatagcgcttccatgggcccttgtaagcaggtggtgaataatcatgtcatgcatgccaagatctcctttctcattgaagttgattccattgtgatttgtttttttttggagtgggggtggggcagctagttgattcgataatcctgaggttcaatgactactatttagaacaacagtatcacccatcgggtttgttcaaaccttccatggtcttgaggaagtctgccaaggtagggatcaaagatgttgaatcatcaaaggcgactaaggttgttgcgaaggaggtagctagaggcctagagcgaaataagccatagccataatcactactgtcgtggtgatgataccctcgctaactgacacattcgaagctcaagttctagctgacaagaacatggcagccccaagcaagctcaacctttaaaagggctttcttacgatctccctttcaaagaagatgatgacaaagatcatgaagtgcatcaacaagcttg

SEQ ID NO: 177563 - DNA, 604 bp, Zea Mays
ggcatttgaagattctattttatgtaatctgtatgactttatgtcatggctatagttcatacgggacatttctgagatatatgtgactggtaaaacatttgaactataggtatttatgtggttgttgtacgagttaggaatgaaatgatacttcaacagacaacttatgtcagccggacccggacccaaaatgcggcggccaaatctacactgcagcaatggaccttggacgcactgccgtcctgctcacaggcacctcctcacgcactcgcgctccaccacaagctgccgctagccggagccgccggatgacatcgtcgtgcgatgtttctattcgactgcgtgccaccctctccggtggctaattttaggtctattcccacgcatctatcgccgcctctcatgtgatacttcagtttcgatttatatgaaatgaattatcctttcgcaatctatatatttaaggtatcatgggagctcagtcggagaatccactcatatcacagatccaatcccgattcccgacagcatgtttggattagagcacgaccaggcaagatatatgcattaccttggtgaggtcggggacgatggtggccagcgt

SEQ ID NO: 177564 - DNA, 388 bp, Zea Mays
ccaaattcaggcactacaaccgttttaatatatcgtggctggtgggtcaaaacctttattttcttgcccttcggcacaacagtggtggccgaagcgacagtttttctcttttttccttgccttcgcaaggggtagcagtaataagggtatatgaagccaattgcatcgaaaaccctgttcaatcttttcttgccccgacccccaaatgctgaggacaaagcatcatcttcggctctggtatacgctccaagtaactcgtcgctagtaacctcaatacatttcagccactcgtcatttggctcgtcaaacctgtctctgtatctgaaggtatatttcaaacgaattaatccaccttcgctggacccggcaacagtctccttcagcattt

SEQ ID NO: 177565 - DNA, 744 bp, Zea Mays
gggctcatgacattgagtttcggcctcgcacagcagtaaagactcaagcactagttgacttcgtatcagaatggactaagcatcaggtcccggacaacccagaggctactgaagtttggcgaatgtatttcgatggctcgctgaagctatagggagcaggcgcggggatcctcttcattgcccccagaggtgaacaactcaagtatgcacttcagctattattcccagcatcaaataatgcagcagaatatgaggcactgatccacgggttgaacatcgatgtgtcactaggcgttaagaggttgatggtatatggggattcactagtggtcataagccagataaataaagactgggattgctcgactgattctatggacaagtattgtgctgccgtccgaaaattagaagacaagtttgaagtgttggagttccatcacgtggaaagagaccacaatgcaacagctgatgcgttgtcaaagctgggatccagtcgggcgcaggtcccactcggaatcttcgtccaggaagtgtcacacccaagtatcccctcagatcatacagaagaatgcaacaccttgagccaaccagaatcggaccctaatgactggagagagcctatcattaggtacataaagaatgaagaagaaccggatgataaggctgcagcagaacgcatcgcaagacagtcggcccactacaccctcatagggggcgcactgtacagaaggggtgcgacgggag

SEQ ID NO: 177566 - DNA, 654 bp, Zea Mays
ttgaatttggtttggatatttgaaatagaaaagaaaaagggcgaaagaaaaaaaaagaaatctggccatcctcggccgaatctccccctcggcccatcatctcgcgtgcgtcgtccccataccaccgcaccccccgcgcgcgtgttcgttggcatgcgggccctggacgtcagtgccacacgaacggatccaaagttgtccgttacactgccatgtgggtccgctcgctcagatgcgttaattaacaacctcgcgagcatggcgcggccaggtgtatcagcccgactcttcggtaccgcccggatccaacccttccccatgatataaaccaccaatcgagccccgcctcatctcaaccactcgacgccgccaccagaagcatcgacaccgagacacagaagaggtcacggtagggagctcggactgcaccgccaggggagcgtggatagacatcttcgctgctccaatcatcgtgagtttactctcgagtctacccctattcctcctctttcattcgcgcccgaaatcactcaaaggtgaacgttttactgccgacaattgctcgtcggagctaggcctccgccgcggggcgacaacccacatgggcacgttcctatgcctccatctctagtgagcgctctacctggcaactcg

SEQ ID NO: 177567 - DNA, 419 bp, Zea Mays
gcctttgcctagcctcatcttcttagcaacaatttccttcagcttccctcctctaccactaccttcctttgatgttattgggtcacttacattggttgtatcctcacccgaagcatacattttcatatactctttgaataactcatgaagacatgtgttaattgcttccaaaactatttgtcccctttcctcgccaaatatctcttcaacgattatcttggtatacaaagatagcttgtatcttggatcaagacaaccagcaataaaaatttgtaaattcaagttctccttctccattgccttccccctccccttctccatctccttgtcatgttcactcgtagagttccaaagtccccaatatttgtcaaatttttctttcattctgattcccatcagtgtttgcaaatcatctgtac

SEQ ID NO: 177568 - DNA, 437 bp, Zea Mays
caaagatcggccctggcgaccaagtcatactatcttcgggaaatcaaccatcaaacaaagtcaaattgatgcaatgaagggaaggtacttccgcgatatttccattatgagggctgggggtgatagcagtgcccctttgcccgaagctgacaaagtagtcgtttacagaagtttcatgaaagcgggacttcggttccctttagataaattgttagttgaagttttgaagacttttgaaatattccttcatcaaatcaccctgaggctattatcagaatggggatttttatttgggccatgaggagccagggttagaaccaaatgtaagatgtttttgcaatattcacgaattgtcatacgagatgaaggccactggcaaagaacaatatcacaataattttggttgctacagcttcgtgcctcgctctggtgctagc

SEQ ID NO: 177569 - DNA, 558 bp, Zea Mays
aggtagctaaatcgcgaggcagaccggcccattccaccagtacctgttgtacaaggcgagttcccttggtgatgccccgagtttgctggatgttggcagggaactggattctggtagcgacgaaggcaaggaagtagaagcagtgcccttgaaccctttagctagcttcagctgagaaacatgcacaatagggtgaatacgactggaagcaggtaagtccaggcgataagctaccttgccaacacgggccaacacacggtagggaccaaaatatttaaaactgagcttgtgatgggcgcggggcagcacagaagattgcacatatggttggagtttcatgtagacccagtcatcaatagcaaaggagcgttcagacctgtgtttgtccgcttggcgctgcatgcgagcctgagcacgcaagaggtgctgatggatgaggtcctgcatgtgggagcgctcctggagccagtccgaaatagactctgggatggcactgtctgaagaaatgcccaaggatcttggttgacgaccgtagagaacctcaaaaggtgaacatcc

SEQ ID NO: 177570 - DNA, 381 bp, Zea Mays
aaaaagttcacctaaggttcagcacaagggagaattcagattttgcctaagtataaaaactaacccttgaacaaagattccacatgttcaccttaatccaaatttcaaaaccctttgacccaattgacaaagtggcgccaaattaaccctagaacaccctggaaagagatgacacctaccctagggcgctagacacgacttgacaccatttttgtctcggcttagacctagctgacacagccaacttctcccccctctatctccctaccccgaccatatcttgacttggaactcacagcaaaaaggtaggatatggagcagagaagcgaccgtacacagtgactttgccaagatacgcacgctatggtgctctaatccgcc

SEQ ID NO: 177571 - DNA, 592 bp, Zea Mays
cgcaccgacgtttcccccaacaacatcgtgaagctgactctggagaacctgtcgaccgaagatcatcagaaatttgaaaactacaaaaggcagctgatcgaggaggtccaagcgaggtacctagccaatttcaagatggactgacactagaaggtcgtcaaacaaggggagatcgagatgccatctctcttaccttcgctgatccttaatgtaagtaaatccaatgacatccagtccctcaaacaatacgtagatctacaagggactcagttgcaacaacgcattgggggatagaagacacacttaagaaactcacgcgtacgatagaaaatctattgtgtctaatttcccatcgcacgaggtcgcaatagagctaaatttgccaaaagcatcggctacaaatgggccctcacaaacccagccattatacgacatgccaatgaacttgtgcatgaccggaccatctaggcctgagctcagatagtctggtccaacagcggctgtccccgtaatccgtagcgtgccgtcgagatccgcaactgatatgctcggatcgtccgcgtatcatgccggaccgtccaagcacatctcc

SEQ ID NO: 177572 - DNA, 538 bp, Zea Mays
ggcaacttctcccactcgcttcaggatcaagaagggtccaataaagcgatggggcaacttccctttgactttaaatctcctcatacccctgattggtgacacctttagatacacgtgaccatcctccttaaactccagaagtcttctccgggtatctgcatagcttttctgccttgactacacagttctcaagttctcccttatcaaccggacttgttctttcgcttcttgtataatttctggcctaaagaaccgcctttcaccagtttgatcccaatatagaggagtctggcattttctgccatatagagcctcaaacgaggacatcttcaaactggcctaatagttgttattgtaagagaacttcgcatagggcaaactcttatcccaactgccaccatgcttaagagcacaagctcttagcatatcctccagtacttggttggtcctctcggtctgtccatcagtttgaggatggtaggctgagctgaagttcagtcttgtatccaagcactcatgcaacttttgccaaaaccga

SEQ ID NO: 177573 - DNA, 897 bp, Zea Mays
gtgtccctttcaggaggaaaggaaccttggttggagctatgaccagcagatttcgactggatctcgaggcacagcgacgcccatcacgcgcttcgagcacccatcggagattgagcggcggctgccggctgccgttgagctgatgatagggaggcacgcgcgcccaccaccatgcaagaacatttgtggagctatggctgccttttggctctcaagcttggaccacctccccaaataccagtgccgggatatatatatcgtcgcttgtccccgactggtttgcccggccggccacagccacagtacgttgaaaaaaaaaaaacaaagcaggcagcggctgtgcagctgctagtctatgattgttggatgattggctggtcgtttcatgtgttatgctcgatcttctgaactagctgaaaaatatgccagggcaaccaatatttttttttaaaaaaaaatctagtgatgcacgtatgatgcaagaaacataaactaaattgtgctgatatattacattttgtgtgaatgcaggtagtagctcagtatttacaagctgatatatcgagctgctactgctagctgcatctgcatatcaacctagctgctggcgaggatccaaaagaagggcttgcttttttgttaatgcctgggcaggctcgatcgcgaagggcagagaccggcaaaagggaataaagaatgcaaagcaaaggaagagaaagaaagcaaaggagctagggggggcaattgggatacttggtgagttgtactaattccctgcaaatgcatggcctcttttcctcaaaagcctggggttcagtatatgcatgcatgcatgcctgtccttgagatggatataatcccaatccctaggtttattccgtccagactttatgccct

SEQ ID NO: 177574 - DNA, 697 bp, Zea Mays
cctctcgcaggtaggactcgcccgtcagccccttcttcctcgcccggtgcaatccccgctggccaccatcctctctctctctgccattactcctgcaccagggaagttagacaccactttgccccccagttcactatgcttgctccctcacacgatagcccgtcccaagccatctcgtccccggtgctgtgcgccattatcgctgccgctatacacctcgccggtgttcgccagctctgctcctccccttcctcgggcgcctataaaagggccgccccaagcccctcatctcctcgcaccggcttcgaccactctccctcccctcccccggattcaattgagcttgacgacgccgccttccttcactccggtgagctcttcctcccctctccggtagcttagagtcaaattagagtgattctcaaacttcaccacttcaccgtgaacacagcgcaccattctttttcccctatcacacccaatagcctcgccagtgaccttgccgcgtggaagcctgccacctcacgatggaccgccgtcctaaggtgccatcgaccaaattgaccccaccaacatgaccgcccgctctgctcatgctggcccacctacctgatcgtcgggaaccggaccactgtggggaaccgccatcgaacccaccgacggtcagtcttttctccccggtgaaccaccgtccccc

SEQ ID NO: 177575 - DNA, 474 bp, Zea Mays
gggaatgtgagttgtccatatcaaaccctatatcttaaactgcggaagacatccacgagtctgcgggcttggaacgataagcatgttggtcacatcagatcccagctggccttggcaaaggaagttttacataagatggaaatagcacatgatgaaagggtgttaactcctgctgagttttggctgaaaaacaagcttaagaaacactctttgctgctgtcctccctgaagcgtactatggctaggatgagatcaaggattttatggcttaaagatggtgatgctaacactaagtttttccactagcatgccaggcaccgaaagagaaagaatttcattgcttctttggttgatggggatgtcattcttaccagtcatgaggacaaggcagcagtggatgactatggacttggaggcactttggccttgctcatcatgacctagcacagcttgaggccccctgttcagaagatg

SEQ ID NO: 177576 - DNA, 617 bp, Zea Mays
agctgctgaaaacgcggaattgttctgtttttttgtgtgtaaaattcaagtcccaacggacgatcctgtagtagacctccataatttttatgtaagcatgcaggttgttgcttctcggttgtccaaccaagatgagaaaaaaggctgataaacaaatagtcacagcttgaagagggcaagaagataatacatgtttgggatggggaaaaatgtgttctgcaaactccaatttacccgacattgaattagtgtggaaaacacgaggagatttcgacgagctgctgaaaacgcggaactgttctgttttttttgtgtgtacaattcaagtcccaacggatgatcctgtagtagacctccataatttttatgtaagcatgcaggctgttgcttctcggttgtccaaccaagatgagaaaaaaggttgataaacaaatagtcacagcttgaagagggcaagaagataatacatgtttgggatggggaaaatgtgttctgcaaactccaatttacccgacattgaattagtgtggaataattgtgcgcgtgatgccagttgccagcctacacaacacacaggttaattgcaatgctcagaactgatcatgttcagacttgag

SEQ ID NO: 177577 - DNA, 501 bp, Zea Mays
ctttgtgaatggctgtcaaagcattataaagaaatttcacagtaaacttgttcttttccagtttccaacagattagatcatctccatcctagaaatagaaatcggtaacatcatgacaaatttggtcccagcaatgtgccacagttatatcttgctgttcacagagctgaaacatcgtatgaaatttactagccaaaggttcattatagagacaggcgtctttccagaaactggttttatttccattccttgatttcccaccttgtaagtatattggtttgactttgagaaggtcatcctagattggggaagcatcatacctgtgattcacagaatataatgattgattgtgtaaatatttggctttcacaatttcatgccatgtaccctcctgttcaaatttccaccaccatttgcacagaagactaatgttcagtttccgttgttctttaatgcctagaccccctttacttttatttttgcagattttatagtgtgctc

SEQ ID NO: 177578 - DNA, 282 bp, Zea Mays
gcacggattgcggattacacggcctcgtttcgtccctcaatccgtcgatggagggaacatcctcggcgcccccaaccaaactgcgactattaaagaaacccgaggggagcaaccaatctgtgcggagaccgaacccatgcgccataatcctcgcatcttcactaggtacccgatccattttagtgccccaatcctcaattctcttatgcacatgcaggatggcatccgttttataataatgtcaatgttcattctttagaactctgtaatccatactcggtc

SEQ ID NO: 177579 - DNA, 679 bp, Zea Mays
cgggtccatatccaccgtagagatcctccacgagaagagagtgacgattgcggggataataggcaattacctccgccaagggtggcccgcttatggtgagaaaacttcccctattcgcgatgatggttgacgccctttcggagggcacaaagctagatgcagcagatccaagtgatgcagacattgcccataaggatgtagatggggccaccatcctatatgtctttccggtccccgagtgtccttttatgcgcacggcccaggcttcgttgagttcatgagtccattcgtctgattcgcttttggtttcattttcctttgctattgttgacatccccttcttcttccatccctcctacatggtgctacaggatgatcctgccccatgtccactaagtacttgcactcataattatgcacatccaaatatatctggtggaaagcaagtaatgcaattcaaaatgtaaaagagacaagacataaggatttattccgtggttcatcttgccacaaaggcttgcctagctccacgtcgttgaggaagctaaaatagctttggagtctctttcaacttactcctcttctctaactcaccactgaggttatgggttgagatttccactaagatatcgggtgattacagaccttctcgcggctcaccacaggcacgggagctcac

SEQ ID NO: 177580 - DNA, 519 bp, Zea Mays
tcaatggcgaaggcagggctctgcaccatccgaccactcaaaaagggcatcagatgaagcttgacttcgcccaaattccacccatcagccagcggtcatacaccataggcaacgaattcttcatccaaatctcggtcgctgctcaactgggctgcgtgccaaagggcctcttagctcttatctcctttcttcactttaaattgtggaaacgccacataatagtgcgaacacaagatagaagtggcagcccaggcaccccttcgacatcctctggtgccacataaaaccagaaattccaccaattaccccacttgttcttggcacatgacacaatctcaacaacttcgaccgacgtcttcctagtcctcggcgtaaacgtgcaagacctaaattgggcaatcaatccatcaatcttcttttttctgccagcaaagacagtaattcttgacgaagacgtcaaccaacggttccccatcatatgaagtcaccacccagactaacttcgtcaacgctaccata

SEQ ID NO: 177581 - DNA, 1304 bp, Zea Mays
cacaagaagcttatgtaagtttggttagcaaaatggaataatggttgcacttgtgcagtagacaactattatgctaacaaactattagccatcatgtaagcaagaccatgctaacttgatgaagaagaaacttgctcccatctgacttgatattaggatttttcctgcacaccacgtcgtggtcctccttgccgcacctagagccccaagtagtccaccgataatccattttttatgagcatcactacaccaaaaacacatcaaacccatgcttacattcacaatagctcagtactaaacaaatcttccaccaaatcaaactcttgaacctcaagactaagaagagttatcaacataaggtgatgacgatgatgtttgtccttcctctgaataggacctccaatctagctagtctaccccacctgatctctttgaccttgagactgatatctacctccgcctatagtcctaagctattcgatgaactcatcttgaaccttaactccaaaagcacgctccatatcaagcaaaagtctactataagaaaaacaccaacaacagatcaaatagatttcatcaagccatacctaaaaattctcaccttctcatactcatcatgaggaacaaagcacacaatttgtttgaaatcaatctgaaactctgccacaaaccttttccttagtggcacctctaaagctaagtcttcatcttatccatgaaagcaattaggtagaaccccctctcaaactaaccaacaaacttctaccatgttacaagaccagatctagcactgagagaggtcatcacattcctccaccacacaagaatctcacccttcaacaactatctagcatagcgaatccagtctaaaaaagaattttgaaaagcctctagtttgtgaaccacaagagaaagccaatttgtagccccaactggagcaccattattatcaaaaagctttagatgtggcacaccattcttttaagtccaatgcataatgaacattccctctggtcataggttcacccccatgagtggtgttaggaggatggccaataatgttaggaggagggtcacaataccaccaccactaaaaggagcctcacatagagcattcatatctttgcttgcattgctggcgtctctactaaaattactgccatatctcgaggagcctcgtgtgctggatcattctcatcacaaccaccatgaacacaaccaccacgaccactatgaccatgaccacaacgtcgagccatctacaactcacacaacaacattaatgcattgataaagtgccaaca

SEQ ID NO: 177582 - DNA, 446 bp, Zea Mays
ggtgaccttgctccaatccctgaggcggtaggcgtagttttatccgaagccatctgcgagggggaaaggattactactatgcacatgccatatatatattttaaacacattattttattcatcactcaagttcattacaagcatacaattgtcacagatcacgctacgcgtgggcgttttctaaggtgcttccaaactccctttctaaggtgtcccaaattccctgagaagatcgtcaaggctagccagggacatctcctcaacgtctgacaagctttctatcctggagggaggcagtgttggcgaggcttcctcttttcggtcagtctggcatccttggctcttggtccgtttctggatcttcttagtgggggtgagcttctttaacttcttagcgtagtccatcttcagagttcggtaggcctcacgagtgttggcctcttctc

SEQ ID NO: 177583 - DNA, 390 bp, Zea Mays
cgaaccagatgatgactggctgaagtgtgttgaaaatactagcgatgagttacttggagcatattccaagtccgaagataatgcactatctgcggccttcgggagccgaaaaaagaaaagattaaatagggtttttgatgctattggatttgtgtaccctgactatcgctacccgccacgggggcagaaaagaaagggtgtaacctctggaaaggttgccgcttcggctgctccaagcgagcctgcgccgaagagtaaaaagttgaaagtcctcacccaccggccccgttatattgagccagccgtggtgcccgagtttggcgggaaaacttcttcagctgttgctccaaaggagccaattccttctacacagaaggctgaagaaccggc

SEQ ID NO: 177584 - DNA, 683 bp, Zea Mays
acataaaaatttgagaaccgagccctttaaattgctctgtcaggcgcactgaatggacttcccattgtacagtaacctgaagaagatcacaggttcagtgtatctcgccgccggtgacctcgcgcttagattcgtgccggcgctgtgattcgcgcccagtaacgtgcggataacgactcctggtgaaaagatctcgccgtggatgaagtcggagcactgtggtcgctctattgcctcgtccacttgcgccgcgacgtggccacgcggccgtcgcgatgatgatcgccgttaacccgagcctgccacgctactgccttgttaccacatcaccgttggtcgcgataggtagcctgcctgtcctctgagccgacgcgccaatgaatgccacggtaactcgcgtcagtgaacttcccctctctccggccgccagcacatcttctcaaaattgggcgccattgctgatggactctagaaattgatgccccagtaagctccgctaggttattacgcatccaaagcaccagctctcgcctctgatcgttcaccagagcctcccaatttcgtatttcccccaaatcggtcggaacgccgccttgagacatctcgtcatggccagtcgtctacgggttagttcatgcccttttgtgtgatgttctagcctccctcaagtctcctgttgctca

SEQ ID NO: 177585 - DNA, 420 bp, Zea Mays
acaatgttgtacattccattaaaacttggttcatgtggcacactagatggttcgagcattgagagacaaaaccttactctagcctttttgttttcttcattcaatgtaggcttgattgcatttgagtgacgtctaaactccccctctttgaatctcctatgaagtgttgacagtgacatatcgagcgcattggataaatccttgaaagttgttctgttttccagtgctattgttttgattatttctgggtcaaatgacttttttaggaccacattttttggttttttgctcataacaccgttaaccccaccgccttgttttgcatcgtaccatatgcgctggactactctcaaaggtacaacagtttcacacgaaacagccttagtgacccctctatctaacttacagacactagttcgc

SEQ ID NO: 177586 - DNA, 452 bp, Zea Mays
cttagactgtacgtcgtatgtccgagcatactcatcgtggacctatcgtaaagtgctgacggtggtagcggatgcccctgatatgagttcattaacatttcataatatggttggcattgagaaattccatttgttgttgatgtgtttggcacagttgtttaagagcctaatttatgctacagaaatttaggtataaatttttttctaatacatgcatcattttctctatagactccaccataaggtcaattcgatcataagaattcttagtagattgaataacgccggataacacggtgttacttacattgggggttgttgcgaggccataaaagaagcaggctccacttccctctcctgaatgaacttgttgtggtgatctaccgtgaagtgccagaggtacccacctctccgcctccttgtctaactacttcatatagtcttcaaattcc

SEQ ID NO: 177587 - DNA, 386 bp, Zea Mays
ggaacatctcgacaaatccagaaatctcttcattgagtctgcctaaaaatcttgccatggttgactcgggatcttctctgattccagttcgcactaacaacaactccatctccttaaaatattcatcaacggatttctttccttgcttcaataattgcaatcgatttcgaagatcacgttgatagctggaaggaacaaattgcctcttcatcactcgcttcatctactcccatgtattaatatgtcttagtcccaatctaagttgatgttcttgcagttgattccaccaagtaagagcataaccagaaaactcgactgaggccaagttcactcggtgttgatctgaaaaattgtgaactctgaaaatttgatcacattgctcagcc

SEQ ID NO: 177588 - DNA, 660 bp, Zea Mays
ctgcaatgttgtttcattttcatgcacatcaattcgtttcatgttttatggatgaattcaattaattaatgattttattgatgttaatcaatataggaaaaggtaatggaccgaggttggatgtacaatgtgccaagaccacatccgtcgtacattcgaaatttgagaagctttattgaagcggccaacaagcacacgaatttgcgaaagagtaaggagatattatgtccgtgcatcgattgtgataataaggtagcttggagagatacaggagtaatccaatcacatcttttgaaaagagggtttaaaaacaattacacgatatggacagaacatggtgagttggatccatgtgaagtgcctggtaatgacgagagagttgttggaattttagataaagtggatggtaaagtggattctgtggatgctaatcaaaattttgaagaatttgattgcgaagagatgttgcaccatatggaaccagaaatgttgagttctgtgggatcacagaaggggctatctaaaatggagggactggaaagtgcctcaaaagaatctttatatgatgaatcaaagggttgtgacaaagagtttactacactgcgtacagttctagaacttcttaagttgaaggctagcgccggatggtctgatactagc

SEQ ID NO: 177589 - DNA, 611 bp, Zea Mays
cgtctacactctcagctaaccagtgcctgggcctcggttggccacggtgggcgaccctggtggttcaccggtgcactgcgaatctaggcgggtcttcctggggctcgatctgggtctcatggttggctaatttctcaccggtgttcctacgccgccgcgggctcgccctccgccgtggactgcatcgaccgagtctctgccgtcggtgagaatcacacctccctgttatctatgcgttgcgattcacgtagcacccttaggaacggggattggggcatctaagcgccggaacagcaatcgccggcaggctctccgtcgcgcgactctggtgcgccgccgccgcgatccactggggaaggaagaaggctcgtgggccgttcgatccttctcgggcggctgcgatggcgcccagcgtaccgtttcgggttgagtgttccgcgaccgttggatcgtcaacgcaggggcacgatcggatcaagcccatttaaaatcgtcaccgttggtagttgatctgatggaccagatggcgtaccggttcgatgtaatatggatctaatcgccgcccttcaattctaatcggacggtcgcgataggcccataccccttcagcc

SEQ ID NO: 177590 - DNA, 454 bp, Zea Mays
ttcttctccacaaatagcactggggctgcccaaggtgaggtacttggtctgatgtagcctttctctaacaactcatcaatctgcttcttgagttccaccaattctggtccgaacactcgatatgctctcttggaaataggggcggtgcctggtataagctctatggcaaattcaaccttcctttcaggtggcatacctggtaactcctgggaaacacatctgggaattctgatactacattggtggcctctaatggttcaatctcctcaatatgggcggtgacttggtgacaacttccttcccttggtccagacaagaccgactccactaacacttctcctgatagggacactaacttcaccgttctcttgtcacaactaagactggcttggtacatggttagccaattcatccctaggatgacatctatagtcgcatcctggttacccataac

SEQ ID NO: 177591 - DNA, 476 bp, Zea Mays
gcactacaatcggctcttcagcactctgcataatcggagcagcttgcattgcttcggtagttgaagaggctccttcgccaaattcaggcaccacagtcggttcaatataacgcggccgatgggtcagaaccatcacctttttgctcttcggctcagctggggtggccgaagtggcaatctttctctttttcccttgccctcgtagtgggtagtggtaatcagggtatacaaagccaattgcatcaaataccctgttaaatcttttcttgccccgacccccaaaagctgtggacaaagcattatcttcggccttggagtatgccccgagtagctcatcactggtagcttcaacacatatcagccagacatcatctggctcatcaaacttctccctgaatctaaaagtatactttaatcgaaccagaccaccttcactcgattcagcaacagtatccttcagcatttcccaattctcc

SEQ ID NO: 177592 - DNA, 1386 bp, Zea Mays
caccacatcaaatttgtaaacctatcaaaggagaacaattttgcttaagagtgtaagcaaggttgttatgaagaatttgaagataattaaacctaaagtcaggctgtcaggctgttaaagtctgaatttcagactgacagtgcaactgcagtgactttgggcatgaattcaagcaggattgagcaagaatttgcttaggattgctataaaaatattgtagctagatcttagagctaaaactttgctaaagggtgatgatcatgttactgcacaaaatcgggagtaaacaaccctgcaaatcgctctgccaggtgactgaatgggctttcccatggtacagtaacctaaaacggatcaggacgccaactcaactcgctgccgacgatccccaccgcaattcgtgtcgccgccgtcctgattcgtgcccggtgaggatcggataacgccggggatggataactcgtacgtggcgccatctctcgagtccagccggagttcttcaccggcggccaccgtgactcgataactttcgccgcggtgtcactcatgccgcgatctgcctcactgtgcctcctaccgacgtggtatgcatgcgctagcaatgctatccgtggtcgaagatcgtctgtcgggtcgccgtggctataaatagcacggtggtccacggcgaggtgtgaccatcacacacacagtgagttgaatcgaagccgaattcgcgctacctctgccccctcctgtcaaattaagtgtgcgcagtaaaactagagttctttgcgaagctgaagcacccgctcccaccctcgattagccaccatagccagagaatcaccaattttccccaaatcggtcagccgcgccaccgagaatagcccgatcatggccagcccgctctggtgagttcctatccaattcaagtgttgttttcgtggctctgcatgctggtaaagctcaccgtggcacccgtttactcaattcagccatgatttggcggggacgcgtactcgttaacccggtttacgccatgatcgtgggcagacagttcccagtggggtttatgtcaaattaaaggatgttcctagattatccttgatcggttatgcctccccgatagttaaccatagcagtcattgccggccatggccggtacagaccacgtcgaagacgaacggcgagtgcgccgtggccagggatgtttctagagaagaaatagaagtacgagggtatttcttcaaaccgtcagtgactcagggcaacagtaaaagaacccactttgagttaaccagaacgccagggacctccgtgcaaagtctgcagcgtgggcgcgcgctttcccctggaattgggccgtttgggctactttcgacccagtactgtttaagctttttc

SEQ ID NO: 177593 - DNA, 304 bp, Zea Mays
ggaacaccatgcagactaagaatacgagcaatgtacaattgggcgtagacagtgaccggggaatttgtcttgactggcagaaagtgagcaacctttgtaagccgatcaattataacccaaatagagtcatacccttttgtcgtcctgggcagtcccacaataaagtccatactgatgtcttcccatttccatgttgggattggcaaggattgtaatggaccagcagttttcatgtgtatggccttgacacgtctgcaagtgtcacacttagccacatagcgtgcaatttcgattttcatctttg

SEQ ID NO: 177594 - DNA, 271 bp, Zea Mays
cctctccccgctagctccggcatttatctccgccatgcatcgtctccgtcattttgctctccatgtgctccttctcgtcatagcgcatgcacccttgccctccgccgcggtagacacgctacggcccggccaagcacttgccggctggaagaagctcgtctctgccaacggcaagttcgcgctcggcttcttccagctccaaccagggagctcctactacctcggcatttggttcgacgaagtccccgtgctgactccagtgtggacagcc

SEQ ID NO: 177595 - DNA, 311 bp, Zea Mays
aacacttacttagaacctcggttctcaagtttggtgtctcttgctcaaactaaatcacatgtgataataggtcaagggtgtgaatattgaatagaaaccctaagtaacacttgggatgttacacgacagtgcaatgactcaggggcagtaacttactgcctgccacgaccatagcgacatggtagaaccaactatcgcgtggcacggtagcagtgaacgacgactcctggcgataacaactcgacaggccgcggagcaagtgggtaccatggagccaacgtatggattcatccctcgcacgatcttttcac

SEQ ID NO: 177596 - DNA, 1865 bp, Zea Mays
gattgctccgttagtagggtatagtggtcaccctaagtcaagtaagcgtgagcatgttgcaccgtcttaagtcgtcgccgacttaagctgattgctccgttagtagggtatagtggtcaccctaagtcaagtaagcgcgagcatgttgcgccgtcttaagtcatcgccgacttaagccgattgctccgttagtagggtatagtggtcaccctgagtcgagtaagtgcgagcatgttacactgtcttaagtcgtcgccgacttaagccgattgctccgttagtagggtatagtggtcaccctgagtcgagtaagcgtgttgattccatgtccaattgaatcgaagtcaagtgatagttaacagtttgaatgcccttgaaaatgaaaactttattgatgatgtattctcccattatagagtacaatgttgctctgatagctttcgaggttttgctaagggtaaaactttctaagatgctctatgttccatgaattccccacttcagtaccatccatttgagtaagccggtatgatcctggccgagtgacctctgatacaatgaatggcccttcccatagtggtgacaacttgtgtcatccttcccccgttagaattcggcgaaggaccaagtctcccactacaaaggatcgatgtcgtacaactttatcatgatagcgcctcaaggtctgctagtatctggctgactgaattactgtgttcaatcgctcttcctccagcacatcaatatcctctagcctggtagcttctgcttcagctatgctttcgaagaccagccttggtgccccgaacttgaggtcggcgggtagcaccgctttcgaaccatagaccatgaagaacggggtatttccatgcagggctcgactaggttgagttctcaagcttcaaaccacatagggcaattgtctgatccactttcttgtaaacttttcatttttgtcgaacaccttcttcctgagtgcttccagtatcattccattggccctttccacctgaccattggctcttgggtgtgctactgatgcatatttgatctggatactctgttgttagcagaaatcaaagaattcagagctagtgaagttggattccaggtcagttatgatgctattcgatatcccaaatctgaatattatgtcttgtatgaactccactgccttggctgaagtaaaagaagcaataggtttgtactctatcaatttggtgaatttgtcgatggcgacaacacgtgagcaataggtttgtactctatccctgagctctcttgaagggtccaatcatgtccagtccccggtatgcaaatgaccatgttacaggtatggtttgcagctgctgtgctggtaagtgttgttgctttgacaagaattggcaagcttcacatctctagactaactcggcagcgtcactctttgctattggtcaatagaaaccggacctgaaaactttcccaaccagagttctggatgctgcgtgtattccacactgtccggcgtggatctcatctaatagctgtttcctagtaaccgaggaaatgcgattcatgaggactcctgtcgcaccccttctatacagtgcgccccctatgagggtgtagtgggccgactgtctcgtgatgcgttctgctgcagctttatcatctggttcttcttcgttctttatgtacctgatgataggttctctccagtcattagagtccgattctggttggctcaaggtgttgcactcttccgcctgatctgagggaatacttgggcgtggcacttcctggatgaagactccaggtgggacctgggcccgactggatcctagctttgacaacgcatctgctgctgcgttgcagtctctttc

SEQ ID NO: 177597 - DNA, 421 bp, Zea Mays
caggagcaatgaagagaatccctgcacctgctccctgcaacttcaacgagccatcaaagtacattctccatacttcggtagtctccgggttgtctgggacctgatgctcagtccactctgatacgaagtcaaccagtgcttgagtctttattgtcgtgcgaggtcggaactctatgtcgtgagctcccagctcacatgcccacttgactatccttccgatagcttctttgttgtggagaatgtcccctattggaaatcctgtgactactatgactttgtggtcatcaaagtagtgatggagcttgcgagcggttagaagtaccgcgtatagcagtttctggacttggggatacttcatctttgagggcctgagaacttcgctaatgaagtagaccggatgctgcaccaggtatgtatgtcc

SEQ ID NO: 177598 - DNA, 274 bp, Zea Mays
atcgcttcttcgatcgtcatcgtggagacgtctagcagagactcgattgagcgagcgatctgcttgtacttctcagggatgcaacggaagagcttctcggcggctctctcctcatcgtaggtgtcgtcgccgaactgcaccattttctacaacaaagtgttgaggcaaagagcaaagtcatcaacatcctcacctgacttgaaggccaagttctcccactccttgcgaagtgcatgcagtgtggtcttgcgggcacggtcgttgccgatgcggg

SEQ ID NO: 177599 - DNA, 448 bp, Zea Mays
ggaaaggtctatcagaggcgcaggaagataagggcatgatccttagtttgtttcagtttaaactgttagcattttcagttgcagaggatatttgttaagtttagatctattagattggatctgttatccatttagattggatctgttaacagatcctgagaacctctcggtctatataagagacgctggcagattcatcaaaatgtcagcagctctccggtgatcttcctccttcctacccataccagcttcgttctcttcctcaatccgcttgtgttttgcactctccctggcgcacacccccaaggaagtgacgcccacatcagaaattgtgttgtccctggaactacacagatcacgttatcactatggctaggattgtggatgctccttcatcctcattcccagtgaaatcccatccagattatcaccgtcacagtgaaggtag

SEQ ID NO: 177600 - DNA, 433 bp, Zea Mays
ggggattctatgagtccggcggcaatgttagccgcgatgcaggccatgcagcaggagttggccattttgaggcaagttattcctgttgcccttgcgggtgctgctcagggtgcaggaggtggaggagtgcccgggggcgctgccccgcgggtgttgttccaggtggcggggctgaggtgccccttcccgtcattggtctttctctgatgcagtggatgggcatgaagctggacacatttgatggcagtggtactccggttgaggcggtggattggctgacttatgtggaggataagatgaatgtcttcgagattgtgtatggtgatcgtgtttgttttagcacagaactgctgacgggagaggctcaaatttgatggagaggcgtgcaggcagctcactcctcctcaccaggagtcgtgtcctgggatgtttt

SEQ ID NO: 177601 - DNA, 592 bp, Zea Mays
aacaaagaaacaactttggcccatcatcacacatgatgtaattatccaatcggcggggtggaggagagctaatactaataaataataaacacaaccgggcatgcatgcaggatcagatacaccgggaaacctttggcttgttgccagcttcgcttcgcttcgcttcgctttaaccatccatgcaatgcaggatatggatacccgatccctctgaaaatttcccgacggatggccccgcccaaacaaaatcctaacgacgacgacgacgggggcaccgcctgttgcgccaggctcacgcatcccagtgaaaaaaagagagaaggaaacaaaaaaaaaaacaggaaaaggcgccagctttctgacgacgacggcgatgagcgaagaggtacataacagacatgctccttgaacgttgcaccccaccaataacctgcgcaaagctgaccagcacggtttcccagctagctgagatcgagggtggaaaccatctcagaaaccgcattgttttttatgcgttggtactatagtactgctagtgctagcctggtaggtccaagggttcgcgcggtgatggatggacgccgtggacccc

SEQ ID NO: 177602 - DNA, 528 bp, Zea Mays
ggagaaatgacctagaagctgacctcctgacgactgaagaaatacccgaaaattttctcaggcaaagatcctagcagactcggcggatgaagagagacggacctattctcgctgaccgtgctaaccgtcgaggcagtggcgttccggctggtgctgtcgtccgaggacgccgatgatttatccccgcacgagctcgtgcccatctcacaatagtcctcagtcaccccgtttctgtccacggcacacaggtacggcaggtactgcataacggcgtcgttctgctcccgtgaactcgatccttgagtggtcaacgatcatgggcgcggggccgaggatgaccacctccaacgcgatggacaactcgtcgccacgggggaaccgcagacggagcaagagcgagaggcacaaggtgcccgcgggcgacgaagatgcatcttttttcctgctgctcgtctggaaggttctcttggccaagcacatgacatatttatctggaggtcgttcgtcttcatatgatgcctttctgac

SEQ ID NO: 177603 - DNA, 298 bp, Zea Mays
tcaatttggctaaattttctatggtctttattttattttgagaaacgatgtggcaaattgatgtgtggtgttttacttgagtggacataaacaccatctaagtatgccatgaatagacaggattataggaaacctgttatcacaaaaggtcattagctagcccactaacgtcttcatccactagttgtactctaataccctcttgtgcgattacaataccctcaatatcatagaaacactatttttagtttcaaaggtgatctattgttttgaattctttatattccaactttttagc

SEQ ID NO: 177604 - DNA, 377 bp, Zea Mays
cgtatctccagttagccaagaacccggggtcccttctgcaaagatgccagagcgcgcgggcgtgggcgtgttttccctctggtgttgggccgcttgggctagaattggcccagcactattgaagcttttcctttttcttttacaatagagctttagaaatttgttaaaaattgtagaaaaatggtaaaattgtgaaaccaattttcctaagcttgttattttccctagaatttaataaaaatagtttcatgatttttaagtaaaataaggaattttgaggcatttaaactagcttaaaccattagttctggatttttagaaaatagataataatcccaaaattgcccaaactttttatgtgagctttacacattatt

SEQ ID NO: 177605 - DNA, 313 bp, Zea Mays
agataaactttattattattcattgacttgacaatcacgatcttatgtagcaagctagatcattaaagcaattatgtggctagagtcttactcccacggatgatggctgccttgattctacgcattagacacaattcagtttgatctagagacgacacaagataaccatgatagtaaggattcaagggaggacccggatgtctaaataccttggtgtatggagtcaaaacagagctatgtaccagccttcgaaaatgaaaatcagccaccagacaacaatttcaggttccatgttctttcatattttcacaat

SEQ ID NO: 177606 - DNA, 519 bp, Zea Mays
atctttcttgtgtcgtggactcttgtacttattaagtcttcaaatgtcttctaatgttttgcttgaggtgttgatcattcggatcttccttttgtgtccaaatccactttgcatcatttgaactatataaaaaaacactagcaaataatgttagtttaaatagtcatattgatcatcaaacatcaaaatctaattgtaaatggacctcagtctattttccttaccgttacatcttcattgactttcacatctattgtagatgtagaagcaatagaatctccaaagtcggcctcacaaaactgagtaaccttgtcacaccgatctttagtgcaacattcaaagaaagcttttagatcgacattgagtttagcctgaaaccgttgatgaagttcattgggaagctctttgattcatgtaggatggttaatgtttttttgggctaaagggatcaggtgatgccctttccccttagccttctcacccaacatatctctattagattggatattgttcttattc

SEQ ID NO: 177607 - DNA, 582 bp, Zea Mays
acggcgtttgaggggagaggggggaagggctaccgcctatcggccatgtgaggtcgatatctaactgtctcaatgttcagttaactatctaggcatctcgtaaacattgtaattttttgtgctcagtgaactctatgtttattgacctcagtacctcaatgtttagtttatctatatttttgaccaaaggcttaagatggctcgattgctttcgtatttgatttcagcttccatcttgagtattcaatatatctaactttgtgaattctgagtaaacaaaaaaatagtaaattatttattctataatgcgggaggtaaagagggagacaatgctggggagcgtaacacgctgtttttttagttatggagcttgtcatgaataactatgaggctctgggttttttccttacatactggagaggcattattgtacccagatagcctgcagatgcataagaagtcttctagtatgctaatttatgatgagcaaatggaatttgtgatgagggaatggatgatgaacccaaattattgcactaaatcttctaattgcaaaattgaaaaagtgatagacaccaactc

SEQ ID NO: 177608 - DNA, 406 bp, Zea Mays
caaaccctatcaaggccatgtttctttccatagaccatgtcccgaatcttcatagcatttctgctgctcatcctagcagatcttgttttcctacctctcctttgtctgaatctggtaatcattttcctcgtgaatcatgttgtggctttatcatccaaatctctggatccttcatcgattttgccccgttatctggttatctgctataacccgtccacaagtaatggatgttgatttgcctaaatctctcatttctggtcattctcacacccccttctccgaggatcatgacgcttgttttatcaacttatctctaaacgacatatccatgtggattaatggatgttgctgttatctttggatctctcatgtctctaaaagcttatcaatctcgatctcatggttg

SEQ ID NO: 177609 - DNA, 630 bp, Zea Mays
ggatctgtagtcaatgcacatcctctttgttccatccttcttctccacaaataacactggggctgcccaaggcgaggtacttggtctgatgtagcatttctctgacaactcatcaatctgcttcttgagttccaccaactttggtccggacactcgataggctctcttggaaatgggggcggtgcctagtataagctctatagcaaattcaaccttcctttcaggtggcatacctggtaactcctcgagaaacacatctggggattctgacactacattgatagcctctgatggtttaatttcctcaatatgagcggtgacttggtgacaactccctttccttggtcctgacaagaccaactctactaacacttcttctcctgatagggacactaacttcaccgttctcttatcacagctgagactggcttgatacttggttagccaattcatccctaggatgacatctatagttgtatcctgattacccataactattaaatcagcggggaactctatcccccttatttgaacctttgcaataggcaaaatctgtccgtttgggtccttccaccaactgaactaactctgataggtggatacatgggtgctactggtatattatgtgat

SEQ ID NO: 177610 - DNA, 401 bp, Zea Mays
ctaggttgttatatatctttgttcatcattgggtaagaagaacttgtttcatgtttgttgatgcgagaggtattatgggactgctacatataactgccaatgctttaagaaatgcaagtgagtggttgtctcacagagcaatcgatgtaactggaaaataacatgaagagaagcactaaagggtgtttgcctttgtgttgaatggtatattcggaaaagaacatgaagagaagcaaacgacaaagagaattgtgaacggatgcaagtgcaccgaactcaaagtatactaccagctaagcctccccactatcattttatttaaaaattagcatcaaccgatatatatcgaaagaatgcaaataaactttatacctcaataaaaaaaccccaatacacacaag

SEQ ID NO: 177611 - DNA, 747 bp, Zea Mays
cgtaatatttattcatgatggagagtgtatatatagaagtattctccaacgacgaagagaacatatataggagtatactccaatatggcaatggcgtgcctgtcctgcgagtctgcaagacaacattttgtttctctctgttaattaggtagcctgtcaacgtctgtggttccctatcactagcgatttcaattaggcacaggtcccagatcttgatctgcatctgagtcatgcgaactgtgcccctaacacagcgaacaggcaaccgcccctgcatgcgaactttcattctactaaagaacacttccattttgtcaggtcctatcatgtctacatatcaatcatgtgcccctgcatgcgacacggtgaagaactgaagatcggctcgtgagtcgagctacgctcagttgttgcactacgggtgcgactcagaatttcaacagtgaagtgatctaacgtttaatatatagagacggcatggataagctgtctagacaattagggccaggtgtttaatgtatgtagagagagagagccataagtaatcgtcgaggacttaagggctgtttggttcgtcactaactgtgccatctaaagttagatgtccgagttgaagaactgacggcctagaaacgcaccagcaaaagcctggctggccaaagacagcctaactgacgggctcagcgtcaaccagaacatggtgcaacaatacagacttttttgcatggacaaagcaagagggataat

SEQ ID NO: 177612 - DNA, 891 bp, Zea Mays
cggataaacgactaccctcgatacgccgagatccatccgatcgtgatcctacgctctgcaccaaatcgcaccggacatcatttgtgaccgccggatgccgaattgacggtcacagagacaccccgcctccccgacggcacccagtcgatgtcgcccacaaacgcggcggagcatcgccggcgcgcatcaatttcggcctccagtgtgttttactaccggatttctagcgctatgccatgagtagagaatcgcaaagctggtagtggcaccataccgaaagattaggccccgcagaacgcacgcccacggagagggaggaatccacggcggcgcccagtcttcggcgaggaattggggcggagcttggtgatcaatctcgggtagagcagccactaatgtctttcctcgagtatgagggaggccacagaccacaccgacgaagcagatgacgcccagaccggaggttccccgcggtgggtcttctacctcacgacggcggtggtggcgttgtaactgggttggcgcggactcaatagggtagggcaagggaattgggtgaacgcttggtttgtatagcccacgaatccggtcaccgggcgagatactcgacgtgcgggcggaattagcggcatggttgaacggcgtcgcggccggtggaggtccgaggatgcaggcgattctgttgaaggagctgttacgcggaccatccagtcagtgggacaacggaaactctggtgctccacagcgtatgacacgcgggacctggacgtcagcgctagcccacacagcaaggcgcgcgcgtagaggaggcgtgggtcgcgcgagtgtaattcggagttgggcccaaaagggtttccgcggcccaggtggggtttcctctttttttttctt

SEQ ID NO: 177613 - DNA, 490 bp, Zea Mays
tcctctccagtaatgctgatattgtttgtttgcaagagacgaaggtcgctattttgacccagcaggtgctcctttcagtttttgggactgtctatgataacttcgtggctctacctgctgttggcactagaggtggagttctggttgcttggaaggggggttcttgtcaggccgtcgcttcaagggttgataatttctcagtttctgttcttttcgctgagcatgaaggtcgtaattggtggctaactggagtctatggtcctcaaggcgatgatgaaaaagtgttgttcctgcaggagcttagaaatattagggctctttgcaatgggccctggcttgtggcaggtgattttaacttaatttaccaagccgctgacaagaataatgccaatctggatagggctatgatggggagattccggcgctttttggatgataatgatctattggaacttccgttgttgggtcggaaatatacttggtccaatga

SEQ ID NO: 177614 - DNA, 643 bp, Zea Mays
ggccaagattgatatattcttaccgactaaagtcctgtttggcaactcagcaatatcgtcaaggttgaagaatatatgttttgggaatggcggcatttgaattggaacagtgtatggctccacgatagtttgttggttgaaatacaattccataggaccatttagatgtcgaaaattaaattcacccggatgaagaccaaactttacgttatgcatatggtaaacatgcttttcatggagcaaattgttgaaatgtttcactgtcacggacacatatgttatggcctcgatcttggctccctaatagtatttcagtaggatttcattaggagaagaggcgatggtatgaagatcgtgtaactttgtaaatgaaacttaaataattgttggcttacatggatgtcagacaaaatgaaatgttgtctatcacgataacgtggctcaatcgggaatttaacttctacccgagcgacaatactgtatttccgaggtagcccataaaaatcttcatcacggtagtcgtcgaacaacctgtagctatattaaacatacgactaaataacggtcatttctttgatagacaaattttgtgtaaatagatttatgtaataacttacataggcttccgttttatgcggtccgc

SEQ ID NO: 177615 - DNA, 341 bp, Zea Mays
gtcgtatttaatatcagacgtcagagcggtcatatgaagcggtcatgtgaagctaaagaaagcgctcatgagagtgtccttcgtgttctctatcagccgccagaatcttcgagaggaaaataaatatgcatcgagaaattcacccccacacgagatatttccagagagtcgagcagacacagaccaaaaagggaattacggatgcagtgttctcttctccgtcaatgacgacgaccttagccatttgcacctgtcgcccctacttctctatgtccctagtccttcccaagccacagtaaccttctattaacagggcatgctgtggaactccttgcgccgcc

SEQ ID NO: 177616 - DNA, 505 bp, Zea Mays
aaaacgctggcggcaatcgtgctgtggcaagcaacagtggctagactttgatcacccatgaatgcaagacttgctgacgatcataattcatatgaactaaccacgtactagttatttaactctgcctattggtgcattatgtagtctggtagagtatcgctagttttaattgcacagttgaccgtaatgattattcctttaacacggcttgacggggaagggcatctcgtcgttgattggcccccgcaccagatttcaaccaagcaacaccataatgcctagcgacgcctaatctgtttttaccagaatctagtctagtattcgatgcttcaacgtacttattatactgtcagtgttttcacctcccactaataatcgatgtattcatgccatgctactaaacagtggtcatagcggctgcaatagcagtagcagtgttggggagagctagtctccggtttaaagatctcccaaataatcaaaacagttcctaattatatttcac

SEQ ID NO: 177617 - DNA, 1047 bp, Zea Mays
tggccacggcgtgctcgcagagcatccctgacgtggtccgtaccggccatggccggcgacgactgctacggctaacgaccggggaggcatcactggcttaaggcgacctaggaacacccatttaatcgacacaaaccccactggaaactatatgtccacgatcagggcggaacccgtggtgtcgatcctgtgttcccaataatctacgctcggattggtcaaacggccactacgaggagcttcatgaatacagagagctgctaaaacaaagcttgaatcggacagggccttaccagagagggctggccacggtggagctgttcttcgcggtggcagcgacaaatttggggaaagtttgaaattccagagttcgggtgaacgattaagggtgggagcgggtgctatggctttgggatgacctagcgcagttgcccgggccatcaatttataggaggcttaggcggtggcgcgggatttgatcgggcagtgcgggcggccggagacagagaagaacacagtggctgtaaccgtggcagtcgtcggtgtaacgacgcaaggagaatactcctaagggtgccacgcttgctaacccgcagtaacaagcttcggtcgtggcacaaccgaggtcaccggcgctgatgatcggacacggccgggaggagggatggccgcgtggcagccggagttagtgccctccaccgcggcggtcttacccggagcaaaaagatcttcgcacggagatgctcgctgcccgatcatctcgaccccagcgcaaattgcggcgcggataggtcgtcggcggtgaggttgccgcgctagcggtctgatccaattttgttactgtaccatggcgtctcattcagataccctgacagagcaactttaggtcctattttctccagattttctatggtaccaagcccaaacatctatagcaaagttgttctactatgattggtctacaactttgatgtggtgacatagggcaaagaccctagagtttgaaagttacaaggctcaaaagttgagcccacaaatctgaaattc

SEQ ID NO: 177618 - DNA, 665 bp, Zea Mays
agttcgcctagcaaggcgtaccattggaccacgtccagactgaacaaagttcgaccaagaagggtgacaaccaaaacagtaaagttatatgcggctggcgcagaaggagcgttgatgtgtcgtgcgcacggttcacatgtacctgaagagctagatagtcgggagataactcggatgaaaggcgaacgaactccagatgagtaggagcacctgccatgttgaagatagatccagataaaattaaataggcttcacggcttataaagggatatccctgggaagataactcggaggaatggcgaccgaactccgaatgagtaggagcacatgtcgcgtcgaaaatatactcagatagaattagataggcttcacggctgtaaaggatatccctccgctcccctatataaggccaagggcccggggtaccccttcaaaatggtcgcattccatctcatatctcgtcatccctctcatagaaactatgccgtcattagattgatcggagaattcatccatcaacacccacaattcatctctaacctgtgcatacctcaatactcagcaccaacatgacgtacgatattacgcattccagcagcccgaacatgtataaactctcttgtgttacgacgtgcatctgcacgaaccatcgagtcacaatcaac

SEQ ID NO: 177619 - DNA, 747 bp, Zea Mays
ccgccccgtttcgtgagtcccggtgccggctgtgcttggcgattttcttgctcccggtcccggcggctctgcccgtggctcgccgtcgccttggtgcctgctcccaccgtcgacggccgacggctcgccacctccaacgtctcttgtgctccctgactccctctcctccctccctacgtctccctgttcctaaccctaaccctaatcccattcggatctggtgattggtgataccctaaccctaatcccattcggatctcgtgattggtgatgctcgttcatcgttggtgctcctcgctggtcggctggtgctccttgcctcctcggatcgagttgtagcttgacagctggacggctggtgctccgtgcggtgccagtgcgggtgcgtgattcccttcctgattcttctgtctccggtccggcggtccgcggctccacgccttgtatggtcactggctcactgcctcactggtgcagtagtgcccttgctggctgcttggacatctataaatttgttctgttttcattttcctcccattctcgccctccttctaacctgtccggttatccgactttctctggtgctcggctggtcctcgcttgctattgttggtctctgatgctcacctgcaacacagtgtggaggaagacacaaaagaacttgaagctgagcacgacaacctgtggcttgataatccagcaacacaatcaactagggatgatgaaaatgcttagtcttgcaaccta

SEQ ID NO: 177620 - DNA, 641 bp, Zea Mays
agctctgcatggaaataccccgttcttcatggtttatgggtcagaagcagtgctgtctgcttatctaatcttcggggtgccgaggttgactttcgaaaacatagctaaggcagaagcaactaggctgaaagacattgatgtgctggaggaagaatgattgaacatagtaattcagttggccaggtaccagcagaccttgaggcgctaccacgacaaagttgtgtggcaccgatcctttgcagtgggagacatggtccttcgccgaattctaacgggggagggaagacacaagctgtcaccaccatgggaaggaccgttcatcgtatcagaggtcacacggccgagatcatatcggcttactaagatggacgacacagaagtggggaactcgtggaacatagaacacctcaaaaagttctacccttagcaaggcctcaaaaaactcttgaaggaatattgtactctgtaatccgaagacttcatcatcaataaagctttcgttttccaaaggcattcagactcttgacttacaattgacttcgattgggcttgacttgaaattggcatgacttgacttagggtgacaactataccctgccaacggagcaatttgtggcggaaccgcccgaattattccaact

SEQ ID NO: 177621 - DNA, 685 bp, Zea Mays
ctggctccggcgacctcgcccgtgcccttcccctcggtgagcagctcctttccttccctcaatctccctgctctcggattgaaggtctctgtggcattccattcaccacccccttttgcaaatcttccaaatctgtaaattcctgtgaatccaattgatggaatgagttcatgtacctcccttgtgtatccctgcaaactcttagctccttcgggagggcattcccacctcaaatggccatttccctaaaaccatagatccccgcacaccacgtgctcggtgaaatgcccaaaccagccaaacttgctccaattgaacccaaatttttcaggcaccttcaccacacttccagtaacctacttgccaaatttcacgccaatccgagatcccaggcttaaatttcaccaaaattcccgttttgcgcgatcgttcccgagccgagtgccccaaaccctttttcttcgccaaaattcaaaccaagcacacacttcactcatattgacctatctaaacctattcgtgaagtatcggctcaatcccatatcgttttgtgcctcaatttgaattccaatcatcctatgtctctatttgtctgtcaaacgtcgttttcacggcatttgacttatcgatcgtcccgtctcgtgccatatctctttgtgtatgtatttattcacatttcatatgc

SEQ ID NO: 177622 - DNA, 620 bp, Zea Mays
gctgaagaagttagtgccttggttgcctcgcttggggagattcctgatgatgaacggcaggtccattttgaggtgcccctgaaccctagtgatgcagagataagcgctatgcttgatttgctggctgaggattcttccgacgctgctcccgctggggcgttggtagtggcacccctcccagaggctgatacaactttggatactcagaagcctatcagtactcgcccgaggcgccccatgccgagccagtcaacctgatccttctgctgatgagcagaaaaagaaaaagagacgccttcggcgagttccaatttggatcgggatgttggcacctcggttcctgctgctgaagaaatgcctgtgactgaatttgctgatgttgatcccaatgggtgtactcaatccgctgctgatcccaatgtgggtgcttcttctgttgctgaacccaatgggtgtgctgctcgtgttgccaatgtggacgatgaggaggaggaagatgaagttgctttgactcggaaaaatagtcgacagttcatcgccagcggtgaaagtagtggagttccctctcctgctttgtctgctctcattggcctgcaagaactgtccctggccaattttga

SEQ ID NO: 177623 - DNA, 563 bp, Zea Mays
gcaggaaaatcaagaaatcgagaatagacaatgaattggaattttgcaatagtgagtttaattctttttgtgctgatcatggtattgctagacacaagactattccaggtatgccccgacacaatggtcttgctgaaagaatgaatcgtactattttgtagcgtgtccgttgcatgctttctaatgccggtttatgggataagcatgatacgtgggtggaagctggttctgccgcctgctatttgattaatcgctctcccaattccgctattgattttaaaattccaaaagaggtatggacaggtaaatcagttgattattctaatctcagaatctttggttgccctgcttatgctcatgttaacaatgagaagctagtgcctagagctcaaaaatgcacttttattggctatggttctggtgttaaaggatatcgtttattatgtgttgattctaaaaaggtgattgtcagtcatgatgttacttttgatgaaagtacatttctttctctagaggtgtttctgatagtggtttctcatccacatctatgcctgaaactaccg

SEQ ID NO: 177624 - DNA, 812 bp, Zea Mays
gcgattaggcagaacatcaggcaaaatatatatgcttcagcatgatgcaacaacaatatcaacttaggttttgtttacacgcgatacggacaccggtctctatattgctttgaaaaatgggaggaaggagcgaaacgggaagagaaaaagagagtaacgtctgaatttggtgaatatcggagacgaaaatttatacccccaaattcagggcgttgcacctgacacttagtctgggaccccacttgaagatgaatgaggatcgaattactaggaactcggtccaggggaaagaaccatgttctcaggggtggttcggagctaggtagccacttagcctggttccgtaccgtaagcctacaccctccaccaccctaaaacaattggcctagtacctcaatatgggaccctaaaggtccaaacctcgtataaacataagagctagttcccaaaactaggctcgacaaggtctacttacatgattcaaaggattgaatgcaacagaggaagggtcacaagggtacgctactaagcatcgatcttgaaccatattcaggatcgctctctagttcgatggtagccttagacatttgagactacctcctagagagccaaggtaccaagaggccagtataggaaaaaccttgcccttgagccaagaagcacttaagtgaggtccagtccggtgggatctggcccataaacccggtctactggcgtacatcacatagctcaaatgcactaacccatgaaagagttatttgctccaattttgtctttacagaagtggtgaagcgtcagtaggtgaaccactt

SEQ ID NO: 177625 - DNA, 617 bp, Zea Mays
tgcaatctcaatcttcatttttgtccaccagtagtgttgctttaaatcttgatacatcttagtacttccgggatgaatggaatatcggctaagatgagcttcatccaaaatttgctggcggactgtcgcatccttaggcacaactatgcgatcattaaaccatactatcccttgatcatcctttctaaaacaattagctttgacggcttctattttctcatgaatatgtttcatacccttgtcacttctttgggcatcaataatcttttgcagaagaactgactcaagctttaattgggtcaaagttccatgttgtatcattcccaggtttaacttctccatttcttgacataatgtgatgtcaggggtcctcactgtaagacaatggcaggaagccttccgactcagtgcatctgccaccacattggcctttcctggggtgataatggatttctaaatcgtaatccttaatcagctcaagccatcttctctacctcatgttcagttctaactgggtaaaaatatatttcagacttttatgatttgtatataaatggcagatatttcccagcagataatgacgccatatcttgagggcatgaacaactgtagctaat

SEQ ID NO: 177626 - DNA, 962 bp, Zea Mays
gtgcacatccgatagactagcaggtagctcgagttgataggccatctctccaacttgcctaaaaactctgaatggtccaataaagtgaggggacaattttcccttgcatttaaatctcctcattccacgaagtggtgacaccttgaggtacacatgatcaccttcttcaaactccagtggtcttcttctattatcagcgtagctcttttgcctgattcgagctaccctcaaattctctcgaattatacgaacttgttcttccgcctcttgaataagttcatgtccaaagaactgtcttcctctagtctggtccaaaaatagaggagtactgcacttcctgccatatagagcctcgaacggtgacatcttttagactggcctggtaactattattatatgagaactcaacataaggtagactcttgtcccaactactaccatgctgaagggtacaagctctcaacatgtcttccaatacttgattagtccttttagtgtgtccatcagtctgaggatggtaggccaaactaaaattcaacttcgtatccatattctcatgaaaacttttccaaaatctggagggtaaactgtgatcctctatccaaaatgatcttcttcggtacaccgtgtagagacacaatccgagccatatataattctgcaaattgagataccttataagtagtcttgaccggaatgaaatgagccactttggtcagtctatccacaataacccatataatcatatcctttctgggtgtgaggcaatccagtaatgaaatccatatcgatctcttcccactttcactcaggtatctttagtgggtgtagtagtccagctggcctctggtgttcagccttaactctttgacacacatcgcacatagccacatgtgtgaccatatctctcttcaatccataccaccagtacttctgcttcaaatcctgatacatcttagtgc

SEQ ID NO: 177627 - DNA, 720 bp, Zea Mays
cgagtcctcaaactcctagccttccgtcaacatcatggtggtcgaaccaccaccttctcctaggggaacttttttacctcccctggggatgttgtgtcgtcctttcgacgaccagcaccatgctcaccacctctgtagccgctgcaatgtataagtacaacgtctcccctggctctggagctaccagtattggtagggacacaaggtgctgcttcaactcttgaaaggctcgttttgcctcttcggtccaagagaatgggccggacttccgcaatagcttgaagaagggtagtgccctctcagccagtcttgagatgaagcgactaagggcagccagtgaccccgtaagcttctggacgtccttgatgcgggctgaaggcctcattgtatcgattgctttgatcttctctaggtttgcttcaatgccccggtgcgaaaccaggaatcccaacaacttccctgcggagacaccaaagacgcacttttccgggttcagcttcgtgcgtgttgccgcagcttgtcaaagaccagggttaagtctttcactagggtcgaccctctcttagtcttgaccacgatgtcatcaacgtatacctctaccccgtccctaattaggtcaccaaaagtcttactcatcgcccgtacaaatgttggtaaggcgtttttcagaccgtaaggcattacaacataacagtaaagcccatccaccgttacaaaagc

SEQ ID NO: 177628 - DNA, 556 bp, Zea Mays
gggatacagctatgttagggacttgagcttcagggggttcctttcttcaagctaagcttctagcgctgcaatccttgcatgtgcatcttcgagctcctcatgtacccttgagaggtttacggtagcactgtccaggtcggtgttaagaccttccaccacacctacaagggtgttgaggcgatcttctcctgcttcacctggaacaacacatgtctggctctctccacgaggacgtaggggaaggtgcctatacgtcgtgtcgtgcagctgctgccgataggtctggctgacggatcacaaagctctccgagcagcattgctgactgaagcagtgtaggtagatagcggcgttagagactcatgggatgatagagtcctgaaacctctatctcctgcatccaatactctgctatgcacacgagtgatgtagtaacaagcctgagggggctccgacacccgccttgtgtaatatagaggtcgaacgtaggttcccagtgcatgcagcacatcatgcaacaagtttggaaagtgtcccgtctcgaacattgaagtgtaa

SEQ ID NO: 177629 - DNA, 475 bp, Zea Mays
ctgcggtccatcggacgtgaggcagcggcagagcgagaggaggatgggtgatgtggaggctgaggaggtggctcatcagaggaagcagggcctccagagcctgagggagcccgcttcatacgagcaactgggttggtggaattaacccagtagggtacgtagcgggagagtttgataggttttttgaagtgagtctgggtgaccacttcgatcatcttcatgataaagggtgcatgaagacacccttctagaggagacaggaagcacgaaggatctcttcccagatcatgtcaaacacatttatgcgggcgagactgttgggagcaaggaggagaaggaagacctgactctccccaaggacgttcatttgattcccgcccttcgggagaacggtcatcctggacaaagagttaaggtacctgtagtacctatgcatgttggcggtggtccagaactcccgatccatagagacatg

SEQ ID NO: 177630 - DNA, 557 bp, Zea Mays
aaaagattttgcacatatattataaactttgatggccccacaagatcactaccaaagctactgatgcccttaagaacctcatgtagaaggttttaaacatcaattatacactctaattacaccaccagagatctctagagcctgcgtttgaaaactctcacatgttgcctactcgcatagaacttcaccatgtgtaacgtctaaagtatggtgctcttctctccattgaccatcagacagataggtccccactattaaacttgttgtgtagactacacaacctaagcttttgatggttttctctctagtgatcaccaaacacatttggtgcctctaaaaactatagcatgatgaccggactcacctatacaactccacctacgctttaatggcacttattcggtgaccaccagagggctctgtttagtataaaaatacaccaccaagcttctcacctaaaccttttcaaatgtgctaattcttcaaatgtcccataggatagcaacatctttagtatcgacttagtattttcaaaacattttgcaaaggcttttcgc

SEQ ID NO: 177631 - DNA, 427 bp, Zea Mays
ctgaaatgggaagaagcacaattgtggttactgaagcgcaagtcaaatcaacagaggcattgaagcacagagcagggtggtgtccaacagaaagccatctgtctcaaccagccagatgtccaacctgtcaccgatcaaattgatttcagacctaacaaggcatggacagacggcgtcgcatggttactttcaaaatgctgatttcaaaagcataaaatgaagacctttgaatggattatttctaaaaatccactcaaagctcgagggctacacttgttgggtgcaccaatagattcacaatgccctgaagccaaaatgttgatttcaaaagcataaaatgaagacctttgaatggattgtttctaaaattcactcaaagctcgagggttacacccattgggtgtgcacccaatagattcgcaatgcc

SEQ ID NO: 177632 - DNA, 756 bp, Zea Mays
ggccagggcgtcaggcgcgagtgcgcgaagcggtatcccacggtccgggccgttcgatctgaattggacagaggggatcagaccggggaaacagatggctgcgggcggcgttgctcctctccgcggcggtgaggtcgccggagttgaggcgggcatgagctagggtggctccggggtcgctggagttgggcagagaggaagagggtgccacgacgaactcgatggcagggaagaggccatgaatccacgggcagagagggtagaacggcggtgagaaggtctcaggcgggccggaggaactccggtgagcgattccggccatggggaggggacttaaggcgcgctaaggccttggctagcttcagcagagacaggggtgacatagggaactactccggtgaactagaccgggctaaatcggatggccactgcgcgagcacggcggactgtcgtgaccgagcaccggcggaagacgaaattggacgaacacagggcgcaataagggaaattgggcacgaggacgggtgtctcacctcggggcggagctcggggaggctaggagcgatctccggcgagctggatggccgggaacacgggcgcgggtctccagcgacggctggcggcgagggaagagcgcgagagagggcgaagctgcgcgaaatgaggtgaggggtgtgcgtggggcactggcgtggctctaaaaagagagctgggcgcgtgggccggcgtcgtggctgagaaatccggcgacgtgcg

SEQ ID NO: 177633 - DNA, 894 bp, Zea Mays
gcggaaaatgccgctagatcgccccgacgagtcagggcgccagaacaccttagcaaaccctaagcctgcccgcccgcctcgcgaatttggtcaattgggagctcccctcccctcccgagacctccgggaggcaacgaaaagaggagcagaaatggccccggatgaagctggccagatgttgacgatgataaatcggcctcggattttggggttttttcctctgtagtctccaccgctctcagttgcttgttcacggtggaatagagaagggaacgcagatgagtggtgagggagatgcactttttcccctcccgaaatttcctcgtgcgatcgaaggtggtgctcgtgcggttgccctctcgattttgtggtcgctgatggcggtcgcggtggtgtgcatccatggagatgggagcgggagtgatgatgggtggcacgagtctgggcggttgcattttggtagcctcgtggtcggatcgtgatttgcgctggcagtttcgtttctgattttgttcaatgtatgattttgaggagctgtggatttgggtttcgagcgattggaatttggaaacgagttgtgcttggggaaattcgacttcgggaagtggtctggaacagcatagaatcgtggtgatttgggcgtggtctggaggagagggacaatggacatgaacaagtattgtgctgcggcagaggagctgcagcgtaccacctcctgggggtgatgtcacgaggagcataggcaggtagaggtaggcgttgttggttgagttgagctcggatgattgattactacatgcaaagataggatagacgatgttccgccacctcggcgcggcaggggaaccggggaagcagatgttgacgaagaatttttgtaatttttctatgcca

SEQ ID NO: 177634 - DNA, 579 bp, Zea Mays
ggatctttgggcgccattttgtcaattgggccatagggttttgagtttgggatcaaggtgaacatgtttgatctttgaaagagggtcggttttgaacttgagcaaatcctgatttccctattatgctctactctttggtgacttttgtgaggtttttctgaaatctttttggggtcactctctttctagtttttgtaggctattaagtgtactacaacttttataattagcccaagtcaagacaatgtgatttacatagactttttgccataatcccttcaagggctccttttgtctataagggatttggattagggtttgagtcatcctcttctctttagtgcatgataaggccaaggcatgacttctaagttgggttacacctacttaggatcttgattcccatgtttgatgtcttctactcaaaccaattcacatgtgatgatgggtttactagtgtagtcttaagtgaaaaccctaagtaacacctggggtgttacatgcagcctcggccgtactccctctgcgcctcacctgactcaccaaacccagcacttagctccggcgagctctacgccg

SEQ ID NO: 177635 - DNA, 623 bp, Zea Mays
tcgaggcgggggaggcgacagtggctggaacggtcggccgtgcccaacagagtttttgaaatccccgcagttccgcagggtgtgccgcatatccttgtgatacgagcactgggaatcgaggatctcgtccagtgttcatacccctctgcggggtgcgctgcaggctcgagcggcagatggcccgacggtgtgcacctcctcgtggggtctcttctcccagcgtttgtcttattgttggttcgtgtcccttcgcggtgcgggtggtacgggctttgcgcctccaatcaggtcccgagctcgctcatccgcggtgatgtagacgtccgcctccctgaacatttgttcgaaggtggcaggtgctttttgaagtatggcccgaacaaaggccgggtcgttggatctccgatagaagtcttcaatcacagccgcctcagcgacctcgggaatacggttcctcattgtttgaaaccttttgaggaatgaacgaagagtttcatcattctgctgcctaatggatttgaggtcccatggttgtgccgatttatcagagagagactggaaattcgcaataaatcggcgactgaaatccccccaatcgttgatgcagtgtcgaggcaggtgtc

SEQ ID NO: 177636 - DNA, 805 bp, Zea Mays
ctcctggaattttttcatgattttgtcccagttacctctgatatcatcattcagccatctacgaaagtcaagttgggcattcctttccctagcaagctggactagaataaatttatcattgcacagttcatataaatctggttcagacacagctagaggaatctcattaagccaaggatcctcccaaaatctggttttatcaccagaacgagtgataattttccttccaataacataatgatctctaatattcaacagatcatgccagacctgagaatcaaacgatttgtgactaacattcatgatactgtcactgtgaatatattttttttcacaatttcttgccagatcccattttcatattcaagtttccaccaccatttgcacataaggcaaatattcatgactctcaaatctttaataccaagtccaccatttttcttgtttgcacaaactctatcccatttaacaaggtgatatttctttttatctccaccaccttgccacagaaattttttccttttaatatccagttttctaatggtggtgctaggaaggagatacatcgacatatgataaatgggggaattggataaacaagcattaatcaaagtgatcctcccagcaatggaaagggagcttcccttccagctatccagtctcttgtcaaatttttcttccaaccttatccaatctgcaattctcagacgggaaggactaacagggaccccaagatacatcatggggaaagagcccaattggcaatcaaagagattcacataatgcatcttaatatcctcatccc

SEQ ID NO: 177637 - DNA, 539 bp, Zea Mays
aaataagctacaaaatgtagtaagaaagatttatcgagaggattttgcaaaattctcaaattaacccctcaagtgaaaactcaatgggaaattcagaaaattcaaaatatgaattttgaccacttcacaaagttctgccgtgttctttgtcttccaaaactcaaatccacaaagtccaaataccaaattggcgccaaattacctaaggcatgtcgtggaaatgtttaggggcaaatctcaaccgtttgacatggttttgccttgggacgcagcagattgacactggaaacttgctgacacgactactcacagtacactgccggaaacccctcggctcccacacataaacgacaaagcttgcatcagggaacaaatattacacgatgatcttgcccaaattcgtgaagatatgcgccctatcggcgttagaacaggagcagaagaaaccatgccacgtgctcgaccgcggctgacgcgccggtgcacgccagcccacgcatccgcgccgagccgtgcgcgcttgcacgcccacaccagtc

SEQ ID NO: 177638 - DNA, 434 bp, Zea Mays
tctggtgagagagttgatatatctgtaatatttgtgcagatttgtggactcccaaaattttccagtctcagagatatgaagatctctggcttcatctttggtgggttggcgaaaatcatgaattttgattttgtccccagaaatgtcatcatcagagaatccaagaatgtgagcgaaccgccggtagctcaccttgtaccagctgccttcgatatagaaattaagataaggaaagttgtagggactttcctcatcggccaacttgatccaaagagtggaataaaactgagcaatgacctcatcattccaatcatattggaaggtcataatattcttcattttcttcctctcacaggccctcaaagcctgtgtcatttccggatctccaatagcttcacatcattcccagttgatgtaccgctgatgcagaatgg

SEQ ID NO: 177639 - DNA, 623 bp, Zea Mays
tcctcttccccctcggtgagcagcttctcctctccccttctctgctgttctctgcctgacagacagtggagctcccccctttctcacccttttgcaaatctttcaaatttctgtgaaatcccatgaatccagttggtaaaatgctttgcattatctctattgtgtatccctgcttgcttttagctccttcgggagggcattcccacctcaaatggccattttcctaaaaccctaactccccgcacaccacgtgctcggtgaaatgcccaaaccagccaaacttgctccaattgaacccaaatttttcaggcacgttcacaacacttccagtaacctacttgccaaatttcacgccaatccgagaccccaggcttaaatttcaccaaaattcccgttttgagcgatcgttttcgagccgagtgccctaattcctttttcttcgcctaaattcaaaccaagcacacacttcacttatattcacctatataaacctattcgtgaagtatcggctcaatttcatatcatttggtgcctcgtttcaaattccaaacctcccatgtcactatttgtctgtcaaacatcgttttcacgtcgtttgacttcttgatcgtcccgtctcgtgc

SEQ ID NO: 177640 - DNA, 738 bp, Zea Mays
aactcgcaaggttctcagttttgctctggaaatcagagtgtaaacagtaattatcaagtacaacgctctggtcaacaaggacagagaaacaaccagaaccagcagaagaacaactctcagaccagtcataggtctagtgggtaccaacagaatcatcaaggaagcatcatgaacacatcggccataaacaacatcacaactactccagtccaacccaatggttgtttcaagtgtggcgaacatggccactatgctaacaattgcccaaggcgcagtcaacaggcaccccaaaggaacagcaaccaaagggctgatcagaacacacctgctcgtggaactgcacaaaacaagactccacagaaccaaagtaaaggaagacttaatcgtgtgacaacggaaacagttcctaaggataccgacgtggtgtatgttatgtttcttattaactccatacctgaatcagttttatttgattctagagcatctcactctttcataacaaagtcatttgtggaaaatcataatatactaaactatcctttgaagaagaaactattaattcgatcaccaggaggtgaacttagagccactcactcatgccctcagactaagattgaaattagaggaataagctttctagtagagctgataatcttggaatcgagtggaatcgatgtgatacttggaatagactacttaaccaagtatgatggagtaatatcttgtgctaagaggatg

SEQ ID NO: 177641 - DNA, 756 bp, Zea Mays
aattggtgccgattgcagatggctacatatttctagaatttcatatttctttgtagcaaatagtcattataagaacaagtattaatatcctctccaggttagcaatactaaccattatagatctatgtttatttatattgtcccttcatacatattaatgtacatacacatcctttctttctcgttattccaatccctcctagacatagatacaacaaatgtgatttgttccgtagcatcacaaactcttttgtacaggttgcaacttttaccagatcaggtatgatttcccacaaaaaatgtaccctgcttttttatagtccttgccaatgcactcaacttaatagtttttttccccacagcgcccttaattggacggaaaaaagtagaatccatcactcatgttttattaaacactatgtgcgtatccatgtatgttgttgtgtaaacatttgcatatgtatataaccatacacacagacatatgtgtcagtacacataatgcatgcatatggatcttattagttgtctcctagcctgcagcattgcataatatgacttcaaattattttcattgcatttcaatcaatactatacttcattatcattttccctttttcacatttttaataatctacatattgggttgttcattttctagaaccaggctaagtattgatgttaatgttctctagccattgtcatttcagttgcttagatcagtaaaacttgataaataaatgtttgatgcagatt

SEQ ID NO: 177642 - DNA, 742 bp, Zea Mays
cacctccccataacgacagtctccgcctcgtccgagcctgccttgggtacaaactcagggcaagactcagccaaagtccacaggggacataagcattcaatgcacatacataccccacgcaaggttgtaggtgaacaggaacaacgagatcgtagtccagtcaagcttcatcaactatgatgatgcatgcgaccattgttcccgcacgccgtctgccaacccccgatgggacgtacaatacgacaagagtacaaagctagccctcggaagtaaactctgcctcacccgaagtcgacctcggccttgggacaaactccgcctcgcccgagctcgacctcgactccttgctccctatgaatcacgtaggaggccactccttcaactgtggcgtgcacgtcatcgaattttggaacgggctcggtcgcgacctcgggcggacctccgcctcgcccgaggtcgactctgacctcgatatccgcaacagaaaggcgcccaacgtcaacatatattgcagagatgacgtatatttaggagttttttttccatacttaatactgtgtcaaccactacggtatgggcaacccccttgccagaggggctcgggtacgtgactgagccctcgatcctggcctcggctcttagcagaaatcaagcgggcacaagtcaacagcaagtacaagaccatactctaggccataccatctataggggcatgtcaacacctccccgccgtacgcggcca

SEQ ID NO: 177643 - DNA, 403 bp, Zea Mays
gtggagcgaggggcgagcttatgaggagcagtggatgcgagattggggtagcaagcgcacccgaagacacgaagatggttgtaagagggatggatgccgaagagagcgaagtaaggagtggggtgggcaatcgccttggtggggagatggttgaggaggtaggtggcagtggcgagggcctcagcccagtaatgagtgggaagagaagcctggaaaagaagagagcgcacaacatcgttcgtcgtgcgaatcatacgctcagcgcggccgttctgaggagacgtgtaggggcatgacatgcggaggtggacgccgcgagagaggaagaagtcacgggacacattgttataaaactcgcgcccgttgtcacactggatgctccggatggtgcgaccaaactgag

SEQ ID NO: 177644 - DNA, 696 bp, Zea Mays
gttgtcgcagcggtgcatacacatcgtcatcatcgtcgtcgtccacaggagagtgagctggggctggagttggtggtgggggatgagcctccagtacgtccatgtgtgtaacaagttcatcaactcgtcgatcaagatgctcataggatatcgccgcagagtcctggtattttttaaaagcttcagtcatcgcgcgcatcatctccttcaattccatctgagagacacactcatcgtcgttaagcttaggccccttgtccttgtccatttgattctttggtcctatcattgttagcacaaaacagagacaaaaaggcaacaaacaatgtgaaccctacaactatctctcagggtggtggtggtggaggtggtggaatacaaattatgaagcatcctaccccgatcttacaacgttcttaccagcactgcaggtggcaaatggtaaccggtgtgactatccaatgagcgtgggtgtgattgcaaaagagtacctattctgctcgagagaaagctggagttctgggaaggctgactaaatatatatatatgtggcacacaagtcagtaacagatagcaatgttgaataagtgttccaagtactcgtcctagttgctggcctagaaaatgtaatagaacagttggaccaaggcacaagaaaggaggtacaagtatctaggtgcagcaagaaacaggctt

SEQ ID NO: 177645 - DNA, 518 bp, Zea Mays
ggaatatgaagctatatagaatctcacaacctcaccactcttaccaaccaaagctcttatgaggtccctgcgggttgcaagaaaaatgtgtggtggtaacaagaaagtaatggttaagcgaatacatgactagagtaccgattacgatggcttatatgtggagcttggtggggaatagtaaacaaggaatgcaatctgaatcctagttgttgtaaagttaaataacaatccaactagaagttcactgcctagtgctgaccacaagatacgagtgatgtaagtagatcaaacacacgcgcaaagaaatttcagattttatgcaaatcaaggagtatgattggaatgcaagtgttgcgatcagatccaaccaaaattttgcaccaaatgacaatagtgaactggttgaacaacttgatgaactttcagcacttttgcacataaccaaactaattgttctacttttctttcacaatcttgctcaacacttttttggtacttttctttcttctctctttttt

SEQ ID NO: 177646 - DNA, 462 bp, Zea Mays
gcaggtaatgggaatattggagggaggtgacagtgcggggtattgaatagtgaataactgaatactaacccggaatgcagcggcgttgtggcggatgcggaggcagtggacggtgatgtaggtggcgtcgtcctggttaatccactttcgctgggcattaaggatgcgggtgaaggtggagtgcttgtaagcggggagctccttgcagagccaggcgatcctcgaccgacgccactgctccggcagctcttcgagctcgaaaacctccagctcgggggaccttaccgcgtccctctcgtcggcggtcgctgcccactcctcaccctggaacaggcctatcccggactcctcttcctcgtcgtcagattccagcacgagggcttccagcgctgacgctgcccttcgaggagacacggcgaggcggcgcgcgagaagcggcggggcggcgagccggacggcggg

SEQ ID NO: 177647 - DNA, 827 bp, Zea Mays
caacgattgttccctacagaaacaatagctgctttggatcatctaaaaaaatcacgctgttatttcttgagggccggtccaataattcaccaggtaatgaaatccttgtatgggacaacctagtactgactgacgaacatgtggcttctaagccgcaccaccctagctatggttttaggggcgaggttagggtagatttcgaggggattttctagaatacgattctccgtcacacagccgtcagtacaaacacgaagccgagcaaagatctagcaaacggaggacatgaaccctagaaccaagaacgcaaccaaaggttgaaaggcagaatggtgccgaaccagaaaaaatccagcgcggtcgcaatagcggagggagcgaggtcggttcaaacttgtagcgctcggcgcgaagaggaagaggcggcagagtgagcgacgacgccgagaagcccccacgtggggccgaagcgagcgtcagagagagtgtcggccaaagcatccaaaggcatagtgagctgagattacaagagagctaagagacggtataaggattttttaggtcgacctgaaaaatttgcgtccacgtggacaacgtatctagccagctttcatcaatctggaccgtctgtgcccacgatagccgcgtgcgtcagccgctcgtgatccatccgcccgcgctcccgtgtgtgtcctcccccacgatagccacgagcaacctctccctctctagaaccgacgtcgccgccctctcctccctctctctctccgtccctctcgcctccttcgaaccaacgaagactcactcgcctcgcttcttcctcactg

SEQ ID NO: 177648 - DNA, 323 bp, Zea Mays
aaatatatcacccaacccagtttagggttagggttttcagtctctaacatcttatgccgtccagcaggtgtgccatcatatgcacaccccgcgggagcctggcctcaccgctactaactggtttcttcgctacctctgcgacacccttgactattgtctgcttcttcggccttatccaacttctgagctgattgcctccatcgacgttgactgggccagctgccccgacacgcgcggtccaactcttgctacgccgtgttcctaggagccaacctcgtcttctggttgtcgaagcggtagcctgtcgtctcccgctccagcgt

SEQ ID NO: 177649 - DNA, 473 bp, Zea Mays
gtcacggcttcatagtacagaacctgacaatcagaaacactgcagggccggaaggcatgcaggccgtggtgctaaggtcaaattcgaacaagtcggtcgtctaccggtgcagcattgaaggtcatgaggacaccttgtacgtggagaatgggatccagttctacctacagacctcgatttggggcaccgtggtctttgtgtttggcaatgcccaggccatgttctagagctacccactgctggtgcaccgcccaccgaaaggcaagcacaatgtgctgacggcccaaggctgcaacaatgcaagccacgagtccggcttctcattccacatgtccaccgtggaagcggcgcagagcgtggacctcgacggcgtggagacctacctcggccgcccctataggaacttctcccacgtcgccttcatcaagtcgtatctcagtcgcgtggtcagccccaacggttgggtcacgtgg

SEQ ID NO: 177650 - DNA, 1688 bp, Zea Mays
gcggagcgcaggaaacccagccgctctccctcgctcatctgcaggttgcgctggagcaaacccttcatctgcctctcccaattccattgccccttagcaaagccctcgagtgttagctttgttttggggttctctctctctctctctctctctctctatcctcaatcaaaaaatgaatgaatgtaagaaaatgtggcatctccaccggcgggttgtcctgttgtgcggcgtggagtcggctgcaaaagcgaaaataaaacacattttgggttggaccttggtatcaaaatttcatttttttttcttcttttctctctacctccgtatcgtccgtacttcgattcgtggcccagtctcccttttcctatgatgaatgctcgtgcgcccctcaaaatcgattttggtgctggtgggagagggtttttacagagggaccaatacatgtttggtgttttcttggtccttgttattaaaaaaataaatcaacgcgcaacctttgctgagttagcttaagcacgtgattacaaggtgctctggttttttttgtgctctgtttctcaactcaccgcctttatttacaggatataaatccccaatccatgtgtactgtatcttaaattgttccatgtgtaccagtataacttaattacacatgataagccttgttggaaccaagaacaatggcaagattgccagactagaagctatatatgtaaggcgtttatcagattgcagtattattgggacacctgaggttttgagttataatagtctggacgaccctctagggggtagaaatgtatgatatccagcttctgttactaattcaacctattctcagcttatatgattaagctctagtgactgcttcagcatgttttcaactggtcccataaatttctactatgcgtcattatagtatttctgttatgtgtgcttctttagcatactgtactactgacaaatggtaacatcattttcatactgtgcttgctactggtttgtatccttcaggtctcaaggttgtttgccttttcccttgccttcaggaatggactacacatcagatggagattctgaggttgaagcttatggatccagcacttttgagcttctggaatcaggagatttaaaaatgatgagtgatgaaggcttgtaccgatgccccttttgttcagatgacgagaaggaccacagtctaaatgatctgctgcagcatgcctctattgtaggagctgcacatgatcggcaagccaaagagaaggcggaccaccgtgctcttgcaaggcatttgaagggtaagccggttgaatcacctggcgcacttttgcagccaatgcttatggatgtgcaggatcctgagcatactcaagatgagcaatttgtttggccctggatggctatcctagtcaatatgccaaatgaattcttcggtaaaagtgcgaaccgactgaaggagcattactcatcttttcgtccagtgaaagtgcatcctgtatatagcaaaggtcgtcccacgcgtgatgctgtcattgagttcgggaatgactggagaggttttaggaacgcacgggcctttgatggtcactttgcgatgaaagggtacagtaaaaattgctggaaggagatgaagtgtggaggtacagagactgttgggtggatggcaagggctgatgactacaattctc

SEQ ID NO: 177651 - DNA, 785 bp, Zea Mays
atcactgacattctcacttaggcccctgtatttctgtttctttactttgccaagtccacgacggtgaacaacgacgagcatgcctccgacgaacttgtactggctggagcacacaatggctggtgccctaacttgcctaacaccaaatcctaccccaggcgaccctaatccctccctcaattgcgcaaatctagctcagattttgtctgctcacgacggcggtgaaaaccggagacaaatcgagatgttcttggtgattcagtgaggtctagctcaatcaaacgggtctacgagcaacaggagacttaagggaggctagaacatcaagcagagaagcttgaactaacctgtagagggtggccacgatgagatgtctcacaacggcgttccaaccgatttgggggaaatttgaaattcgcgagctatggtggctaatcggaggtgagggctggtgcactgggtgcataataacctaacggagcacactgagtgctcaatttatagagatcaatagcggtggcatccaatttagggaagacacgcgggcgggtagagagaggggtgagttaccgacgagcgctaacgtggctttcacttaggcaatgtcttaggcgatggacaaactaccaaaggcggtttactacaacgtggtaacgcttctcagcacgtggtgtccaggcggcaagcggtagactccggtgaggtcatctggaccggccgcagggcaagtgggtacggcggccagctcacggcctcatctgtggtcgagatcttttcaccgccgg

SEQ ID NO: 177652 - DNA, 495 bp, Zea Mays
gtctgctcgtttggtgagcacactaattttgtcgtcgctcctgtgctccaaacaacttgatcatgcacgcgctaatgaacagtgtatcggattcggatcccctgtctcttccactccccccattggggaatgcgaatgctcatccaccaaatgggagctggcacctggaatcaacagcacgtcgtgtagtctagcgactagtgaggtcctagtcatgcaacaatgcaagtgacaccccatatatatacgcagccaaattaaaaaaggcttaggtttaggtatacctgatgcccctacacaacatgagattcctgacccttgcagtctccaacagctattggctcctcccccattttataggaaaggattggaaagtttgtgcctatgtgagtttacaggtcattttcttgcttgcaatcgacgtgatggtttggaagggatggactacaaggtcgttttgtcgtcacttgggtcgtatacgttgtctttatgtat

SEQ ID NO: 177653 - DNA, 334 bp, Zea Mays
cttgcccatgattagatggaagagaagagggagttggaaaagaagcaacagatgataggaggatgtgtgaagagaacaacggtgcaagcaggctatttataggggtcggaggcaacgattcatctcctaccacgctcaccgaacagtcgcaagtattcaataagcaattcaaaccgcctgaaagcaagtcaggcagcagacgccgcttcgcgtaacacgacaccatttggactaaggtcaactgctcgggcgatatgattacgccctggggtcacatcaagttactactctaggaaagtgtgctaaacgctctgcgtaccaagacgtcccttgg

SEQ ID NO: 177654 - DNA, 632 bp, Zea Mays
tgcaacgtagtatatgtttgttagttccgaagctaaaacagattacgaagttaaaccaaaacaaatgcatacctataagcctagcccgctcggcagcttcttcagcccttcgtgcctcttccaaagcatcatgagtttccttttcttttcttcagatggcttcatcggcgatttctcgtccgcccttcagccacacgttggagtaaaattttccacttagcgtagaagcttcggctgaagggtttttcatgtcgttggctgagagagcaaagtctggctcaacaacagccttcacatgatcacagccaaccttttccagaattgatgcagccccacgagcaacggtgaaggcacagaaacccccccgatcactaagaatttcttcaaaagctttggcttccccgctgatccactagataaccccatcggggtcgccgcagataaagttttgctcagaggaataggctccaactttagcgaagctgttctttaaactcttagcacaatctaaggatacttcataacatttctctttggtagcacgaagctcatcagcattcttttgcgctctcaatctttcgatctcgcaaatttcatgcttcaccacttcaacttcaaatttttcggttgct

SEQ ID NO: 177655 - DNA, 632 bp, Zea Mays
cttgcctcgatccatttggcaaagtactcaacagcgacgaaggtgaacttgaggttcccctgagtcgtgggcaggggcccgacgatgtctaggccccagcgctggagaggccatgtgtgggcgatcagctttgtaagttgcgaggggctgcctgatcgaggagaaaatttctggcaggcttcgctgaaccttgtgacccgatttgcggcgcagatcattgcgggccagtagaaaccttggcggatcacctttgcggctagggcccttggccctgcgtgagagccgcaggtaccactgtggacttcgcgcaggatctggacgcctttggtttcggtgacgcatttaagcattagctgactgacccccttcttgtagagttggccctcaatcagtgcaaagtcccggcttcgatgtttgaggcgcttggcctcgttgatgtcggttgggtggtagtacccctgtaggaacagagttattggtgcccgccagtcttcggtcatgataaggttgactatgcggtggccctcgctgtcattggttatttggagcccttcggggctccggacggctggcgtgccgatgacatggtagaacacgtcggagggcagggactcgcctctggcggcagcctt

SEQ ID NO: 177656 - DNA, 1146 bp, Zea Mays
ggattagtgagttgtcacataaaaattggagaacgaagcctttcaatttgctctgttaggcgcactgaagagtgttcgtgatggtacagtaactaacccgatgccaggttcggtgcacctcgccgccgacgatccccatgcctggattcacgccggtgccacgattaatgctcagtgagtagcggatatcactgtgggagtgaaaagatcagtggggtcaggattgagccaaccccatcatactaacttgcacggcaacatggcctcgcgaccaccgccggcgtgaccgcagtttaccagagtctgccacgctatgtgccattgtaccacgtcgcagtatgtcatgatgaacgtcaaactattatcacgagcctttgcctcattaagcgccacgacagataactctggtgactcaccttgctccgtccgccagcatgtcttccccaaattgggcgccaccgctgttgatcactataaattgatgccccgacctgctccgttagctcgttacgaagccagagcaccacttctcgcctccgattagccactatagcccccgaatttggaatttccccccaaaatcgtcttagaacaccactgcgtgatctcgcgtcgtggccggcccatctcaggtccattcattcccttctatgttgtgtttaagcatccttagctgttaacattgctcatcgacccaaccgcttgagctagactgcgctagatcgccaggaacaacccagtccgtcctcgggtttcgccatcgtcgtacgcaagtgaactccaggtcgaattagctcgattagggcatgtactaagctcgcctgagcctagggatgccagtatgatgcttggtttcgaccatcgacaccgtttgtggcgagttccagcgagaagatggccggcaggcgagcgcgctgtcgccagggattggtcaggtaaataaatagatgtttgagggtttttgcgtaaatgtcagagaggcagtgaaatagtgccaagggttccttaccggttattcgagtcaccgagggtctctgtgcaaatttaccaatgcaggcgtgggtttcccccgttggtgggccggtttgggctggtttcagcccaatactgttccttccttttccttttctttttactgcaaatctt

SEQ ID NO: 177657 - DNA, 514 bp, Zea Mays
gcctaactggcacgcatgacaaagatgctcatcatgtgatctagtacatgggatagtggcactacgagtaagctgcatcaaggcatcgcatccgaggtgaccaaggcgacgatgccaggtggtagaagacgtgatggcagcaaaaacagcagctatggcaggtgacgaagatgaagaaggggtggcgtgcggaagccgaagggtgtagagggggccggtgctgtcagatctgaggagggggcgccgagttgccgagtccttcacagtaagactagaagagtcaaactcgacagaacaagaattatcagtagtataacggtgaatagaaaaaagattgtggaccaaagaaggagcgacaagaacattgggaatgcgaaaagagccgggagggccgacggtgcccactgatgtgacgggaagacacgagccattcgccaccatgatggacgaagggagagaggaagaaggagggcgaacagaggtgagtataccagggtcgggagtggtgtggtag

SEQ ID NO: 177658 - DNA, 1218 bp, Zea Mays
ggagatgccattagacctagcccaagttctggccaaccaaacccgactcattgaggtcctcactagaagcctcaagaaccagcgcccgattggaggaagacctcaggacagaatgggagagttcctaaggctcaagcctcccacattcgccggatccatcaacccactcgatgttgagactggctacgcacaataaagtggaagttagaggccatcggataccctgaaaaccagcgtgttcatctagctgctcatcaactctccgggatggccctatcctagtgggatacttttagtgctgccatcagagatgctacctaggcagaatttgaagccgctttctgagagcatcatgtgcccttggggatcgtccagctcaaggaagaagaatttcgggagttaactcaaggagggagatatgttagtgattacatccacaaattcacagagctggcttgctatgcgcctgatgatgtcagcacagaagccaagaatatggcccgtttcttgaaggggctgagactagaactcaagaccatcctcgccagccaagatttcctcaatttctcgcacctctcaaacaaggccatccaggtggaaagagcacgagaagaagaaaagggtcacctcaagaggaagtttcaagttctctgagcttagtagcaggacaggcactagagagttcgatcttttgggttacctcccaaaggatcgagcttcagcaagccagcagggtccgctccgtcatgtttcagccagcctggtcaaagttctctccacaccccatctgttgcaagcaagccaacctccagccaatgcttgttggcactgtggagacccagtcactacaaaaataattgtcctcaattgaagacatccgtacctacctactccaactcggtgaatggccccaagaatgtttcagcacccgcctccaagacaccctccaccaacagccaggtaagcaagacccagtttcacggcagggcttgagtgaatcacgtcgacgctcaagaagctcagcaagcccctagagtggtgctcggtgagttgctagtcgaatttacccctgatgcggtactttttgattctggagcatcccattcattcatcaccactagttttgtggaaaagcatggcattcccactgcatctttagaaattcctttggtcacccgaaccctagggtcagaccttctatgccacctcaaatgctcc

SEQ ID NO: 177659 - DNA, 550 bp, Zea Mays
caggttgcatgtgtgcaccggttgcaacaaaagcagtgggttgaaagagaacagagtctatagcgtccacgctgctgctagggccggctacccattgcgcgtccatggcgttgagaagctccgtcaaaccaccacagctggagcatgctggtggcagcgctgccatgttgcagcagtccttgaacgtggtgaccagcaggtggcggctgcgacagcaacgacattcggcgagggcacctgtagacatagacgacatgggtgttagccctagcatgtgacgatgacggatgtatgcctcgacggcggcggcaacgatgttccgcgagggcacctgcaaagcgtcggcgtaggcggtaggcccaatcgtgaggcttctacgagaagacaaaaagtcccatgcgtgcggctgtttggggaaggagaagggggttttgcaaaaagaattcgtatcacacgtaaagcagcgggaggattaaagtgttaaaccgacagcagccattggatcttgattgaagggatgggattgaagatgtgcatatgtgcacagcca

SEQ ID NO: 177660 - DNA, 421 bp, Zea Mays
ttcgaagacatttctttaactgggacacgtagaacatgttgtgcactgttgacaaattctttggcaactgtaccttataaactactagtccaccaaatgaactgagctccaaggcttcacgaataggaaaaggtagtatagaaaagcaaagataggtaccatgaatagggtcgatgaaacacatactataatagctacacaaggggtttaacttaaaattgtatgtcatgatgcatgctcgtcctatacgtcctcacaatttttgccaacatatagtggcgttcatgctctatggcggtggcatacctacactccgtcattgaatactagtcgcacttttctagggtttagttagtgtacctgcagaaaattacattatagttgtgggttagtggttagcatcctaaactaagccacctta

SEQ ID NO: 177661 - DNA, 807 bp, Zea Mays
cccgaattgagtagccaggcctgcagtttggggtccctcgataggggggtccggcagcctggggtccagttctagagaacgggttcttgtctactagggtggtccggagctatgtagccatttagcttggttacataccctaagcgtgcacactccaccactttgtgacgggtaccctagtattcgaaactatagtcctgtgggttcgacaaccggggtccggttctagagaacggacacacatcccctagggtggtctagagctgtgtggtcgcttagcctggtcccataccctaagcctacacgctccaccactctgcgacgcgtgtcctagtatttggagttgtgatccagggggtccagacacacggattggcttcctggtctaaatcctgcaggtcctgttgcatgaatcaaagggtaaaagataccagttagtgggggtcctatgggtgcactactaaagcttcctagccaaggttgtgtgcaggtccgggtcccagtcgagactacctcctgggggccaggtcatgaatttttcttaagtatagtggcatccagcctcgacatgtcgagcctacataccagggggccaggtaccagggagaagttggtaacaaacgcacacagcaaaggcaaatagcatacagataagttctgtcactgttagattaatacttcccaaaagtatcttacaaaaccagaaaatattacaagccgcctcccagcgggacccttgccttctctctgcagattcggctactcgtcattagcagaatcccgctggaagtgctcggtcgccagctc

SEQ ID NO: 177662 - DNA, 463 bp, Zea Mays
ggctggtggacgaggacgagcagattggttgccatggacgtggttgcgaacgcatccatggaaccgggcacggactcgcttaagcgcgcgctagaaggtcgttagcttgctacgcagggagggatgtccattgctgtgcaccgtaggctactgcggcgaccgaatgctagcgagaggcaggagtgagcttgggacacggattggaaggagaaagtggttgcgaagatttacgtagtgaaggaattccttttggcgtgcgactggataagggtgtttgataaggatcagttagaggattgttttttcattttacctaaattaatatttggaattatgatttattaggatctattggagatgctctaagcgcatgggaaggccgaagacttctccttttttagtcgtctctctcctccacctccaggggtgaaaacgatatgtaacggtcagagaaaccttccac

SEQ ID NO: 177663 - DNA, 707 bp, Zea Mays
agttgaagctcgaccaacaggacctatgttctgggcgacaccaaccaacacattttttgcctgcataaacctactctctaaccgacactcttgctagtactactctttgcttaacactacaacccgattgtttggccaacgtgtgatgctctcctctatagtggccatccatcataacaccaggactgactttgcgttgatttgcaatcattttagccctgcgttccccctcccagctagcagaattactcatttctcgtgcatccactacatcaagcctaatatgcttggtgctcatctcttgatcaccaccactttgcagcatgctaccctgtaatttgtttgtcccaacagcaactacgtgtccatgccctatgtttggcttagctaccacttctttcaccctgctttgtgtgatttttagtgacaaccacctgaccgatttgacacctctgtctgggaacctaccaccaacgtggcatcttctttagcatttattatgtcgcactccattgttcccactatgatttctgagtagcttttgctcagcggctcatcttgcccatcaacaataacgcccccttctcctgattttttgcctatatacagccctctggcatccgctgggctgcgaggagcccatttcttttgaatcttcaaacgcaactcctcgagaccttttaacatggcaacagccctgggctgac

SEQ ID NO: 177664 - DNA, 455 bp, Zea Mays
tttcgatatttagcaaggtctctttaacaaaaatgcatgatgagggggtatgcttcaattctggccgcaggatcacgaaccgagcgcctggactagatcggcagccgcacgaaccggtatgcaacgcggaccacatgatttgaaaggaacggttcagattttattaagccagagtcacttagatccacccgatcggatccgacggctacggttaactcacgcgaaagggtattcgggttctaatcctagccgttcgctaaaggatcgacgaccgagatcacctactccacccggacgacgaaacgcggcggcggaaaagaacggcgcggcggcgccatgactggtgagctcctactttgcactctagcgcctaaaacttcgaacccaacggtgctgcgcgtagcggatagggaaccaaggaggatgggggtagttttacctcgaattggggcggt

SEQ ID NO: 177665 - DNA, 448 bp, Zea Mays
tgaacacaatgagaacggtctgcccgcgtgcacgacggaaaccgtgaccacgagctcgcgttcccgttcaaccctggccgaattgaccaaacggtggccacgatgagcatccagttcataccaagttgcgaaaacggcacttgagaggcgtagaaccttaccagagtgggctggccacggacgagctatccacggcggcttagagaccctagttgggggaaaatggtgtcgcggcggctctaggcgaaattgggggtggagattggggctacacggccgttaggaactgtagtttcaccgtgtatactcaatttgagaggagggggcggaggctgtgcgaatttgggcttggatcatcacactgggtggaggtgtgcataccctaccgtggatcatggtgctatttatagccacggcggcccggccagctatctacggccatggataa

SEQ ID NO: 177666 - DNA, 456 bp, Zea Mays
tagttcaattggttggctcaggaggcttgaccaagtgacacagaggcagtacacgtgaggaattggaaaatggtgcagagacttaccagtccacattcgccggtgagaggaaaaagtccagcgacggtgattcagggtctccagcgaggttctgctgggtatgagggcttggggagcttcatgggtctctggcgaagctaaccgagctgctatcgtggactgggaatggctggggtgggctggccatggtggctgaagctcgggtggcttggcgaacggtggcgcttgctctctgcggcgatctccggtgatctccggcttggacgagagtgagggcctgtgggggaatacggctaaggccatgggggcacttatagacggggcgaggcacaggcgcgcgaggaggggcgaccgcgcgagggggtgcgctgccgtggctaatccgcgctcggctgg

SEQ ID NO: 177667 - DNA, 1115 bp, Zea Mays
ggctgctgtgatagatcatatacttcaatgacaaatataattatgttgcattgtgctttcagaaaaaaaagtctttcattattacgtttccagaaatgcagaagtccttgaaaaaagttctgatttcttgaggctagtactagtagtcttttggttttgttatgggggcatgaattctggtataccagcctgatgattatgatgttttttgcatcaagaatggaaatccgagtgtatttctcccattgaagtctgcttggccgctctggttgatggcctgctgctactgctagtaccagtactactgctttcttggggctcatctgtctgtctgtctgtcttgtctcgttggccacaaccaagctggctaagtgagctctggggaatccttatgtggacataaggcttatgaaggcttggcagtaggagaatgcccctgataaaatatttccatttattttgagtgatctctgcctagaagcttgtctttcactgtgttttgttgtattgtcctaaatgcaatgtgatttgacctcagtttttgtggtttaagtttgtgctaataaatcaaatggagctgtgaatgattttattattgccaaatgttatcatctatgtcgccagctctcgaaattttgtgacttgtcgaaatttggatctgatttatgtgccacccagtgactcggttagctctctacaaacatatttagttttatttggacagctttgaccaacaattactccataagaccatgtctagcagtgcgctgtacatgacactattcatagagtgaacacagtgaagcttaaatatgggcatgaggatggataagctgctcgagatagcctaatcttcgcaataaaagtaagaatgctatcagattcatattgaaagttactactgattttatgtcatgttagtggcattaatagattatttgtcagtcgaagatttaccctaacaaaacaaaatatgccttgtatttccagagggaatagtggattttgagatgcagggatgacatcttactcaggtgatcagcattgcaaatatgatcagctgaagtgattccttttcatgggggttctgctgttccagcatgacgattatcttc

SEQ ID NO: 177668 - DNA, 484 bp, Zea Mays
agaaaatgcctaaaattctgagcccaccagctgaggcaagtttgccgaaggtgcaaaaggctcctgccgcaactcccaagaggaggagaatgaccaacgtgctggacgctgtcttggagactacgaaggccttgagccctggagctactaaaaaagatactaaagctaccaaagtccaagatgttgccaaagttgggccttcagcgcctattgagacgaaggccgtcgcgcctgaagataaagctgatccacaagcttcagatgttggcatggcagaaggaccagacgtgggagaaagggcaaaatctcctgcccccgaagcggctgtcgagaatgttgattatatttatcatcatgcttcggggaaaaagttgtccaaagaaaaagttttggaagccagacactatgcgcgaaaattgaaatatccgaagggagctttagtgtttaacggcactaacgatgacgacttcttatactgtctccc

SEQ ID NO: 177669 - DNA, 598 bp, Zea Mays
ctttgatgcagacatcctctttggttgttacacaaaaattggagataatcaaacacaaagtcgggctgtcaggctgtttgatgtctgaaatttagactaacagtggtactgagtcatcttgggagccttgcagatcaagaacttcaaagaatttgtctcgagtcaatatagcaaagttatagagccattgtagaggaacaactttgctataggtgtttgggcttggtaccatatgaaatttggagaaatctggacctaaaaatggactgtcaggcgctctgaagatccttcccatggtacagtactgaaactgaaacagatcatttgatttttccccttcgccgccggtgatccaccgtcacagttagcgcctgtctgatagattcgtgccactaggggaatggataacgccgaggacggtaagaatatcctacgccgggtgaatccggtcactggccggacctgtcgccgtgtcccgtcgtagatagttgtgctggcatcatcggcgttcgttgttattcagccgaactacgtgccacgaaactattctacatcgcggggagtcactaggagccgctttgtagcataagttcgtcac

SEQ ID NO: 177670 - DNA, 401 bp, Zea Mays
gcaattctagaatttgatttatttgggaactgaggcagtaggtaggtgtcaaatgggtttgtttatctcattgctgtcatcaatataaatgaggatcaagcctctattcttgtcaaataaattggaacttcagttcctcgttacgtcttgttgagttctccaaatatatatcatagtttgattgctaaaatgttaatctccctgtatggttatttttcaatattatatccttagacttgctcacaaagaagtactttcaagactgaaaatgattgtggtgctcgtccagattggtaatttcatttggttttttttatatttacaattggatgtgaatgacaacaatgtggttttgttagattatttgataactgttgatatcatgtgttcttgaaacaagg

SEQ ID NO: 177671 - DNA, 648 bp, Zea Mays
gcaagttgatcaagtctgtgatggttgtgtcctaggaaaacaacacaggaaaccatttcccaaagtgtcaggtttcagggcagttaaatatcttgagctagtccatgcagatctttgtggtcagattgctcccaagagcatagggggtgcatcttattttctgctagtggtagatgatcacagtagatacatgtgggtagagatgctaaaatccaaagatcaagcgttagaatgtttcaagagaattaaacaaagggctgaggttgagtctggaaataaactgaaagctttaagaacagataggggtggtgagtttacctcaaatctgttctccattttctgtagtgaaggtgggatcaaacactatattacaactccatattccccacaacagaatggagtagtagagagaagaaataagacagtggttgaaatggctagatgtttgctcaaaacaatgcaagtctcatctgtcttctagggagaagttgtcaggacagcagtttatttactgaacaggtcaatcacaaaagctctaatatctaagactcctttcgaagcctggcatggaaagaaacctagtgtcagtcatttgagaatttttggttgtgttgcccatgtgaagttggttggtccaggtttaaataa

SEQ ID NO: 177672 - DNA, 363 bp, Zea Mays
tttggatagttgcggcagggttattcttagtgttccatataggtttggaacatcaatcaatttattcttagtgttctcatgtatgtgcgtcaagaggaggatccctggaacttgatttgttctggtgtggccattggtgcttaggattatggaccaactaataggatttatcaaagaaataatgactccaccatcgtgccgggctgctagctgtagggtttagggttacatatcatcagtgaaacttatacaattccttatttcaaagttcaatcattagtgaagcaaatccatatacatcttgcaaatgccaagtgaaacccattacacattttgtacacaaactattttgatcatacagct

SEQ ID NO: 177673 - DNA, 362 bp, Zea Mays
cgagggggccatgaatgctttgtcccgcgaggggtgcaggcattacgaggtcttcgaccaagcggacgaaaactttgaacgtgaaatcttcaaggtcgaagaccctgtggtgaagcagtcggcgagggcactcttcgataggatgtggggtccgcacggccgggaggcggtcagggatcggcccaatcgagcgatagagcaggtaaaggctatttttgtgtggttgtatgtgtgggtatgtgtggttttgctaaatgagtgtgctgttgctgtagatggtgcatgccgaagacgtcgaggaccttgttggtctggacggcgcgctgcccgaggccgcggaggtcggtctggtgccgccgtcg

SEQ ID NO: 177674 - DNA, 1080 bp, Zea Mays
gcatggggttcggtctctagcacaagaatccacaccacacgatccaagtgtcttcacgacatgtgtgttatttgttttctatttatttattactctggctaggatatgcatcctgcatggtgtcggcggtgatatcagtcattctcctccatggttcgatgattgtggaccacagggagcaggtctcgctcacgcgtggtacatgatcgtcgcagaagcatttttttagccgctgactggtaggacctggcatccagaagactccttcccctcagcatcataacaaacgtagcaagaagatcgtaataaaattccaataaatcgcaacaaacttttctttccccgactgattcgttcctcgccttcagcacaaataccgaccctttccccgaactccttgacccatctagaacaagcgcctggccgtagtcgagcagccatgaaacagagttcgtcgtcctggagagaatggatttctgccggtgtgagtcttgtgcggtggtcgccgagcaagcagcgtcgagttaggggagagaaaggagtagccgccgccatggatgaagctagtcaggctccagccgtggagtcctgctgtgcttcgaacttggtaagaagatgtccctgtaattcaacatttcatcctctctgcataggttctatccgcgctccgatccatactcctgggcggtagttagggctcgaatagcgagctcgaaaccgctcgctgccgtgttcatggcgttctgtcgcggcggattacggaggaaagaaataaaagagagagagagaggaccgggggtagaagaagccgccgcagacctgggcgttcggctggaggaggaagacggcacctggtgccgttgatctgcggggtaacgacagggatgagatcaagcgtcgcggattggttggggccattggatcgacgatggatggatattattagttccctgttttattaaatcatgactgtcagatccagatctaacgatgggcgttgcgtaccgattcagtgtggtgaccgatctaatctgggtcgtccagtgaggatccgatggccagatttctcccgtacccttt

SEQ ID NO: 177675 - DNA, 529 bp, Zea Mays
cccaaaccgcgccgcgcccgcttccccccctctcctccaacggcccaagcggcccagctgcgcgcgcccacaccgcgcctgacaacccggcccaccggtcagtggctccacccctctccctctcgcgccactctccctctggcagcccgggcccgcctatcaggaccatcgtcccgcccatgccatcaccggtgcgttcgccgccgaccgcctcacgccccgtcgcttcgccattaacgctcgcaccggcctcagcgaccaccccgccactgtacccgagccgtcccctcacccctctcctgcccgagccatctcatcgccgtttgctccatccccgccatcatggcaagctcatcggcgctcgccgtccctcccttccttccccctcccgggcgcctataaaaggactgcccgagctctgtttcctccacaccagccccagccatctcttcccctcctccccaagcccaattgagctagcgccgccgtgtttccccttcactccggtgagctttgttctctcctccct

SEQ ID NO: 177676 - DNA, 623 bp, Zea Mays
cattggtgttctaatacttttggcaggacctgtgttattgtattgttagaggcaatggaccaagtattaatgttggtagtcattgtaactatcgtctatccattggtacctcgggtgagtaatcaccgctggtctaacgctcttttacgttgttgtcgtgccagtgcagcgtttttttgggtagtcacaattgaaaattttctccgaggagtaaaagcccaagtatcggttacatgtgaagccacatgataaatagggggatctgcttcgtcgtcgccgtccatttcctttgttgctgaagaatcactcattttctagattaatctctatatgactggggaattacttgtcccataacattttgtcgaggtattatatgttagtttgcgttatgtatgaatgtaagtactaattacgaaaatggggaaaaaatgcagacatatggtagaagtgtaatcaatcaaagagatgggagtggtaattaccattacagattctgtgaatcgaaactgaacatagtaaaattgtgatccaaaaatttattgcaatgatcagaacaggaaggaggtactatattgcgttatgcatgaatgtaagtattaattacgcaaacgaaaaaaata

SEQ ID NO: 177677 - DNA, 623 bp, Zea Mays
gctaacaaagatgtttcgatgcagtgatgtcctgcaaaacattcgatgtaatatgaattctatatgtatgtgatggttatgttagaacttgaatattttgtgagcagggcgctagaacatgctcctggtgccaacaagtaaaacattcttttttcctggagtgctaattgttttgctgttagggtatagcagtcaccctgaacaattgtgaaagcaagcgtgccatgctggttttaaggcgttttctgacttaagccgatcgcctggttggtagggcatagtggtcgccctaagataagtagtcgtgagcatatcgcatcgtattaagtcattgccgacttaagccgattgctccattagcagggtatagtggtcaccccaagtcgagtaagcgtgagcatgtcggatcgtcttatgtcatcgctgacttaagccgattgctccgttagcagggtatagtggtcaccccaagtcgagtaagcgtgagcatgtcgcaccatcttaagtcgtcgtcgacttaagccgattgctccgttagtagggtatagtggtcaccctaagtcaagtaagcgtgagcatgtcacaccgtcttaattcgtcgccgacttaagccgattactccg

SEQ ID NO: 177678 - DNA, 289 bp, Zea Mays
cgaagtcgattgataaccaatagtttgaatgcctttgagaatgaaatcttttattgatgacgtattttccaattacagagtacaacgttgctcttatagctcttgctaagggtaaaacttcctgagatgctctatattccatgaattccccacttttgtgccatccatttgagtaagccgatatgatcctggccgagtgacctccgataccatgaatggcccttcccatagcggtgacaatttgtgccgtccttctcccgctagaattcgacgaaggaccaagtctccc

SEQ ID NO: 177679 - DNA, 796 bp, Zea Mays
ggatcattgatggatgagtagtagtgggtggctgtgtgtgagtgggccatgttgggccagtgtttcctagttgtggcgtgtgggtggcctgctaagtgccaggtggtttaaatattgtaaccgtgaagtcttggacagaaaggaaataaggaaatcaaaaatactccccacggcatacctgagccttgctaagtgtgtcgattatttcgctcttttccatgttccagcgacagtgtgggttactagtgcttcgttgcatatggaaggcaatgcatcgcgatggtttgaggtgtataagctgcagcatggtctcggtagttggcaggaatttgttcaggcagtgttgcagaaatttggtgtggacgagtacccttagaccatgagagagttggtggatttacatcagaggggtaccgtggaagagtatttgaaggaatttaatgaagctcgttatgctgcttccatgcataaccatacattggatgagactttgtttgttacacattttatcaaaggccttaaacatgacctgcagggtgtggtgcagtatcatctgcctacaacagtggatcgagctgctttattggctcagatgcagcaggctataatggagaaacagaagcaaaagatgttgaggttttcaggccaatctcggtcctatgggcaaggagggaggactaaggtgaaattatcttctagagtcgatttgtccaaggagagggcagtcaaggagtatcgaagacaacacggtttatgttatacctgtggtgagaagtttgaggccggtcatcaaagc

SEQ ID NO: 177680 - DNA, 725 bp, Zea Mays
gggctctttagaaaaataaccgcgacgaaggggtaagatgaaatctgagccgcccgatccagaaccgaaggccccgattaaaagccggctgcgacgaaccggtacgtgctcacgaccctcgaatcggaattcgacgttcgggatttaaaatgccgcgatggaatttcatacacccggtcccgatccaacggtatagcttcgatggaacgaaagggtaaaccaggatctaatcctagccacccatcttgagatcgacggccacaaacccgtcttccaccccccacgtcccaattgcggcggcgcgcagtccgcacgatggcgccatagccggtgtcggaccaggagcgcccgcagtgacttctctccccaaatcgagccaagcaacacgatgctgagcttaaggcgagtagttctaggacccacttacctagggttgggacgacgagatgacccgtccacgctttcagtgacttggaagtggaaggcatgctccggcgacgaattcccccctctccagcattaaactccacgcggagaagctgcggacccatcatcgtgccgaggcgagtctcccaggactgcaggttccatccccggcgacggatttccacgcacagttcgacacatggcgacgacccttctcaattcgctcacgatgaagccctcgatgaccctctggtgatgggcagggacgacggtttatataccccgcgaggaagcccccc

SEQ ID NO: 177681 - DNA, 634 bp, Zea Mays
ggtgtttttagaattaacggccgagtggttactgttgatatcagcgttatagaggtaacaaccgagtgactgacggcaacattggcgttttagaggcaacagccgagcgactgatggtgacgtcgatgttttagaggtaacagccgagtgactgacggcaacatcgacgttttagaggcaacggccgagcgactgatggtgacgtcggtgttttagaggtaacagccgagtgactgatgatgacatcggcgttttagaggtaatagtcgagcgactgatggtgacgtcggtgttttagaggtaacagccgagtgactgacggcaacatcggcgttttagaggcaacggccgagcgactgacggtgacgtcggtgttttagaggtaacaaccgagtgactgatgatgacgtcggcgttttagaggtaacaaccgagtgagaatgagccgcgtcggccattttggaaataacggccgagtgatgacatggcgcgccagcttttttagaaataatcgccgggtgatgacggggcactttttggagacggcgtccggcccgggaaaaaacccccttattcactgcgccgtcgcataccttgcttttcgtgccctagttcttgcttttctgcattcagg

SEQ ID NO: 177682 - DNA, 384 bp, Zea Mays
caattgtatcaactgagcttcgaaattggctatttgcacttgaaggaactgacgaagtaggatattatttttctcatggaggtgatcgtattagtagagaagaaaaatgttggcattcaaccttcaggagtctacatatgtctctggcaacagcagtggccgacttaagttgggggtggaggacaggtgtcgcaaagaaggcattttcagtgaaacgctttatggtacaacataaatgactgtcataatgttgcatttcaacctggccctctctccttttgatgttccattatttcagtttgtttgaaacttaaaaattttaatgtcaattgcggaattgcctgatatccattctcattttgtttctccctaacttgatcttag

SEQ ID NO: 177683 - DNA, 1088 bp, Zea Mays
cttcttcctcatccacttcatctgtcatagcctcaagtatgtcgctacccacaacctcttcttcatgatcatcaaccccatcgacgcctacaatctcgcctgcaccattagtttcattgattgattctggagccaattcttgagaaaggataccgccagcactagtagcatcaacattttcagcatcctgctccttcttagggtcttcctcaagcacactgaccacactagcaggaataaactcatcactgtttcctccatttataaccattgcggttgcctcactcggtgggtcaggcctgctggcctcatcttcaacgtcaccctccttcttagctgattcttttaaggcttcttcaccttgagcaagctgctgcagtaatccttcatgcgtgtgagttttagcttgcatctccccatcccatgccactgtaagacccatttcactggaaattgagtatgtacttacttgttgtgacattacaacaaacaaccatggggcatcaggcacaacatcttgcttacaatcgttgggcatctagttccccactccatgagctagacgctaccaaaaatcaagtgaatcgaaaccaagtaacacttcttcatcccagaccaccttctcagcagatgtttcatcgaacactgaataaccagaacctccaaagcaccttggaagggcaatgacctcctcactgtagtagggggcatttcatcgaacacagaaggggccatacctccaagcagaactgggatgttccgcactgctgcttccacgttgcacgtatgatcgtgcagacccttctacttcacctccatcgcctccaacctactgtcgaggcgatctaggacccgcatcaccttgtcccatcgttcctcgcccttctgctctgatgtcggcatcgcagcaagcaggatgcttgtctgagcggacggcatcaccaacgatgttgtagcgaggaaacaccgcagatcatcgatggagaacgaagcctgcatcgatgacccaaccgagtgaacgacacccaggcaactcgtcgaacaggttatctccggtctccgccgccaacaccaccaagtcgactgtc

SEQ ID NO: 177684 - DNA, 631 bp, Zea Mays
cacgagcaaaaggaatgcaaacagaggtgggggccggtctccaagggaccattgcagagggagcagtttggttggtgcggccaaccctgagtggcaagattgttagcagtaaggagcttgtcctgtagaagaatccaagcaaaaatcttgcacttttgctctacccgtgcccgccagacaaaatcagaattaatgtggctgtacgatccgatgaattgcgcattgtaggctgattttaccgtgaagacaccgtcggggttccatttccaggtaatggagtctgacacctgtggttgaaggtggaaatcatggagtctaatctagagggagacgaattcctcgatctgaaccgtgtaggtaatcttgcctctcaacgacctgatccaattcccgtcattgatctcattggcaaccgacttgttctttcttgagactagcttgaagaggtgtggtgctaggtttcttggcgccatatcatcaagccaaatgtcgtgccagaattttgatgtcttgctatctccaacggtgacgatggtggagtcactaaagagaagcctgtccgcaaggttacaaggcacatcaaaccctttccaagggtgatcctctcccgtcgagctcttccaaagccatc

SEQ ID NO: 177685 - DNA, 647 bp, Zea Mays
acgggagggaccgccgcagaggtgagggagtcaagtcgtcaggggaccttgccggcgcagcggagggatcagcgccgccaggagccagggactagtgtcgccaccccttacgaccagagctcgatcgggacaatttcaaatcgcatgcatcactcaggtcagatccaaccttaagaaccgtattccatccctacaacaccccaatgtgtcctcttctcatcgccttatacctcttcaaggtgccagggcgatgccctaatggccaaagcggacaccttaagctcccaggtaaggcgatgcagatgccttacgaccggagcacgtcttagcgcttatgcgtcacctaagcgtcgccttatggacgccttgacaactatgcctgggcgatgctgtggaagttctaggtgccacgctaggcctaggtggggtggtcacacctaggtgaggcgagtcgggctaggcgcgttggcgatcgtgccaagcccaagcgaggagcggtcgaccataggagccttaggtgccctaggcgtggcctcagtcgcacatgacatggctatgcagaagagtcgttggggagtcttgtagaaggggaaagtatgatggtgctagaggggccatcacaatgttagtagagagtaaaaactaaa

SEQ ID NO: 177686 - DNA, 703 bp, Zea Mays
atgttttatttattcagttatttgttcatccgcttacatggatcgggctgggctaggatgactacactggaataaaaaaatttcaaacccatttgatttagcaatggatcaatttcaggtcagtaatctaaagcatagcccaacacaaagtgatatgggtaaggctagcacggtccgaagatagacctaagccaagcctcaaattctagcatgtcggccctcgcatgtcccgctcgcatgtgttgtgcttgggccggtccagcccaaaaaaggcccgtgcaaggttttttgtaatgtagatgtgcaatgttgctacttttgtactatgaggtgtgcaatggtgctctgtatcatagttgtgtaattgtattcgttttatatattgaaatattgtcatgttatatggcgatccttagtacggttgtattggtttgccttttccttgaatactgtcatttgaaatatgtgggttgggcttgggtcatcacagcccaataaaggcccgacgtgttttagggtcaggctaggacactatttttattctttggattggactggcacgacacggtccgaggtattttgagccttctcggtatgagcctattttacctaagcataatggaactggcctatgccaacctaacccggtcgaattcctaccactaggctaggttgtctgcattggaacaaaaactttttagat

SEQ ID NO: 177687 - DNA, 1181 bp, Zea Mays
ctggtatcgagttaactgaaactgcaatcaggaatggtcaccgtgatatgggaccaatttgagcatgccatatctttgaattcgttcggttttgacccaagaatcctatagtaagtttgtagactgatgtttagtgaacaaattctgttaagaaaggttgctcagtccttaacaagaatcaagagaaccagtagattaaagggagccggttcagaagaacgctgaagatcaaacactaaaaaatctgaagaacaccgaaaagatctacgtcactgtggattcagatgagctcgagtgatccggggggggggggggggaattgatccgggatggataacttcgaacgtggtgcgattctgtgaacccagtcgagcgtggccggagttagtcaccggcggccgccgtgactcagataattccgccgcggtgtcacccgtaccttgctccttcctcactatgtctcttccctacgtggtaaccatgtgcaaacaaagttatccatggccgtagatagctagctggaccaccgtggctataaagggcaccatgaaccacggcggggtatgcacacctccacccagtgagttgatcgaaatccaaaatttgcgctgcctctgccccctcctcccaaattgaatgtgcacggtgaaactatagttccttacggccgtatagccccaatctccacccccccaatttcacccagagccaccgcgacaccattttccccctttctctgtcaccgacaagcccaggtcctccgtgctccgtggccagaccactctggtaaggctctgtacatcttgagtgttgttttagtagctctgtatgctcgtgaagctttccggcaaccgttggaccaattcaagcatgattgaacgggaacacggggtttgatgtcacggtttccgccgtgcacatgggcaggccattctcaatgtgttcaagccgaaatcaacgagtgttccaaggtcaccttgagtcggttatgcctcccctgtagctagactagacagccaccaccggtcatggccagaacgggccgcgtcagtgatgaacggcgagcgcaccgtggtcagggacctatttggagaagaaacgaagttctggggacctctgtgtaagatgtcagtgactcttagaatattctgtagaacgttttacaaattagttaagacctc

SEQ ID NO: 177688 - DNA, 280 bp, Zea Mays
ggtgaatcaattgggaagggtattacctgttgattgggtcgcgaagggggccggccacggcgtggggcggacggtcgccgccgaacgaagtccggtgggaaattccgaggtgctggagcacgattcgcccacggaaagtagttgaccacccttcccaggaccgggcgaacccaattggacactctacgcgagtacggtcgcgttgagctcgagattccagtgcggcggcaaactatgggttcctcactgacggcggcaccctctcctacaatggcggcgc

SEQ ID NO: 177689 - DNA, 439 bp, Zea Mays
ctcaatcggagctagctcaacggaactcctgggtgagcgcaacgacctccctaccagactggcgctaatggtgggctgcagggcactcggaccatgggtataaaacctcctgctgcgaccctctcgcctttcgttgagactacctagggagccacggatttgccagcgaactagcgaaggaagtttgagccgccaccgtcgaccggcgaggagacttcgattcgggccacggaactctcggtcgcggttcaatttgcgtgggtggaggttgtgcgtggtgcgggagcgttcgttgcagtgaggactgggcggaattccgcgtggatctcatccgccgccgtgcgattccgccactgacgccattgttccgcaattggagctctgtgccgcaccattgccggtaagaaactgtcctgcctcccgctcgttaccccttgtt

SEQ ID NO: 177690 - DNA, 840 bp, Zea Mays
gtcggaaatgccttaagtcagtacgacacactcacacttacatgactcagggtgatcactataccctactaacagaatagtcaactcaaaacggcagcacttcgaagaaaaataactcgttcacatccttaagggtgttttcagcaccctactgacagaatgatcagttcaaacatagcacaattacatacacatggaattcataatacactgttttgctaagaagtactaactcaataaagagatgttttcgattcaaacgaatcactgcgtaggagcatttttgtaggaagcctcggttgcagcagtagcagaagaagatggtcgactcatgatagcaggtgcggcaagaacatctgcaacaatatcttcaggcatcacaacaccaggcctcctcattaggatccgcccggcgtgaatgaccttgtccatggctttgtcgtacatcgccttcataacagcacggtcatcctctaaggccctgatgctgagatgggcggcctccagctcttacgtgacaagcctctttgaaacacgcagctccttgatgacagaatctttggaggacagcataccctactaacggagcaattggcttaagccggaaacgccttaagtcgatgcgacatgctcacgcttacacgactcagggtgatcactataccctactaacggagcaatcgacttaagtcagaaacgccttaagtcggtgcgacatgctcacgcttacacgactcagggtgatcactataccctactaatggagcaatcggcttaagtcggaaacgccttaagtcggtgcgacatgctcacgcttacacgactcagggtgatcactat

SEQ ID NO: 177691 - DNA, 1185 bp, Zea Mays
gcgagagcagcagacatatatatctctcaaccagaggatgcgagatggaaaagaatccctgcccaacagcagctatgatgagtgttcacttttttgtttgctgccggtcggtcctccatattcataagacctaacagataacaatccctctcctctcacattcctatcaccaccacttccctctctcgcctagcattgttctggccggccaactgcgctctagctatacccaaccatatcttgctgctgcatctcggttgagcactggatcgttggatgggcgggctagcctgcaccgctgcggccatcgacattgcggcggccgccgcctatgccacctacggccggcctaactatcaacagtgcatgctacgacctctgctctggctctcctctggcacgcgcgcaccaaagagagggaggcatacactatatttacgtgcacggtaaaaaaaattatgcacatgaaaaagtcaaagacgatatacaatttatatatgtagatgaaacccttgataaataatgtggacgtgtaatacaaattaaaaatcatggccaacaaatgtggataatttaattagtaatgtagaattcatgtctgacaaaacaactttcttgttttgactttaggggtgctcctagtagcatatatgactctaaatgcttcttgcaatagcttattcttcaacgggtggtagggacgggatccacgactcccctgagatgtagtgtatcccgataaagggtattgcctgcacataggtcagagttgaggttaccattggagacatcctaggcccataacacttgaaagtggcgcagtagtaccccctatgaaaaaagaatgcaacccaacaacacctttcatcagtatacataatcaacaacacctttaatcacacaatcatatacaaacaaaggagaggatgtaatggatgtaggagtggtacctctcgacagtctggacgttctgaccatcaaatattatgcctacaatctccttacccatatcagtgtaggagtagatcacaggcgtgcccaccctacccaagtaatttttttctccttccctctcgattgtgcaagtcttgaatgccaacccgctcttgcttggggcgattttgatgggttttctagaccggtcccactccggtggcgccattagcaaagccaccgcctccttct

SEQ ID NO: 177692 - DNA, 518 bp, Zea Mays
gggagactacatgagagcgttcttcgaggtactagcgagttccttgtctaaggtgtccccaaatgccttgagaaggtcgtcgaggctggctagggatacatcttcttcgtcggaccagtcatctattctggggggaggtagggctagaggggccttcttcttcttcttctctgtctggcatccttggttagtggtcttcttctggatcttctttttgggggcgagtgcctttagcttcttgtcaaagtctgtcttcaaggtccgataggcctcacgggtgttggcttccttgccttccactatgctgagactctcctggagggatgccttctcttgcgtaagctcttttacttgctgctctaggatttccactcgggagtttaggtgggtacaatgggaggagagctcatcgtagtggttgtcgagggtgtggaggtatccggccatgtagacgatagtgggatcatcttctatgggatctcctcctaacagagcctggagtcttttcttccaggttg

SEQ ID NO: 177693 - DNA, 692 bp, Zea Mays
cacacaaggagcgtgcaacagtcctgcggttattcgcccttccatcttcaccacaaccagcggtcaaggagcgaaccgccgcacaaggagcatgcaaccgccccgcggttgcgcgccccctcagcttcgctacaaccagtggtccaacctctagcatgggggcccaggcccacatgtcatacacccggcgcgccgactcctaggtgcagggaggtcacaccgctgctcgtgccaataccgcgcctcctcgaggccgtcgcagaagactaagaagataaattttcaaaaccgatgcagcgactcgaggcaccccgagcatggctcaacaaagacattaagtacggaggtcacgggctagtcagccgcgggggcaggcgtggcagtcggcgtgaccataggcgggccggcagtaactgcatcaacgggtgcgcaggagcagcgagccgatcgccagtcaaactctggccccacctgcaggctcgcatcctcccctaaggcgggcctgggggccactgtcggtaccctggattaggggtaccccttgctacggtatgaagacacgatgcctgtgcggctacccttagccgcacggagaacaaccccaagagtatctcgtgagcagttgaggtggcattctcggagacaacgccatcgggcccagaggacacaggacctctgtacgcacaacccgg

SEQ ID NO: 177694 - DNA, 491 bp, Zea Mays
tgatagtctagtgaatctagcatttctccttcatcccttgtgttcgctctaggtttagtatgttggcatagccctggttattattgtagacttcttagctagactttgggtctgtttggattcaagatctaattactagctagctaaaattagctaaaattgattctagtgcatccaaacaagagggctaatagacgtgataattttttagccaagtttttaactagctgttagccaactagctagccaaactcagctagattttaacccatctagtagccctaactcatccaaacatgatcttttctagtcatgcagacaacattttaataaggtaagttagttgcattttaaatgatgagtgtttattttttaaaacagaacaggtgtaaataaaggaactagaaacttcattcaaactaagaaaggaaactctacaaattatttgaccaccgctccttaagctttccatgcaaatcagttcattcacc

SEQ ID NO: 177695 - DNA, 909 bp, Zea Mays
tctccttcaggatcatcgtcgtctctctctctttctctcgttctagctagctagtccatcttccattgcgattttgcgactgcaattgctgccggctccagatgcatgcatgttaaagttgcagtgagcgcgtagctgaagctgactccggtgtgcacactggtcaaccctgatcctctcttctttcacacttgaagatcgtcgatcgagggaaggggttcgattagctcttgatgctttctttggttgggaggaagtgtggtgattagattagcatgtgggtggtgatagatagggcactgattagaggagagggaataatgatatgtcagccaggctaggcttgataatcaatcataggatggaatgggagctagctctagtagagtagacactagtgctgtaccggctgaccactgcgctggcttggtttttcttggcttctgcttgcttgcagcagaaaccagcaatgcatcagaggaaaggaagattgtactggtgtgtgcagcaaaacggaacccaatgtgaatactccagcttctgctagcttgggggcatgtgtgtgtccttatcgtgtgcgtgtgattcatttgagagaagaccaatcaccgagaagctacgggggcatagggctgagaaaaagagatccgcgaacctcggcggtgaatctcctttgcagagccgggggtggcgctttccatctccttctctcgccccaatgcagtgctgcctgtgctgtgctactccctaatccctatccattctgcctaattgccctactagagagctagctgcatgactacacacaccgtcctcctctctcctgtcctgtgtcccttcttccacgggtgactgggttataatagtctctctctcttcaacaccagtcatacacgccagcattgcgtt

SEQ ID NO: 177696 - DNA, 723 bp, Zea Mays
ctgagacgcgctggccacagtgaggtcaaaccgagcggtgttcttgagtgatttgggggaaatgagtgattcgcggtctctggtggacaattgaagacaagcgtgggtgctatggatgggtgattacccgacggagctcgcagtgcgctcaatttataacgggcttaggcggtggccggggatttggatgaagacgtgcggcggccggagaattaggaggtcactagcgtagttgattcgtggagtataccttggcggactcaccggcgatgatgagacggctaacgtgagtcacggcggtgcggtgaatgtgccaaggaacgtggcgcaaggccatgaagcggctgtctccggtgaactcatccgaatcatccatggtctgctcgggtacggtggccggagtaaaataatggccggagtttttccacggcgtgataattactgacccccggcactatccaactgatctgagagcgaatcacggcggcgatagcacgaatccgcgtgcggctcgtcgacggcgagggggctgaaattgggattatgtctgttactgtaccatgggaagcatttgacagagcgcctgacagaccactttgcagggcttagatcttaggtttttacataataacatgttgaactgccagtagcaaagttgttgtccgatgatcccgctataatttttttataacaatcatagccaaataatgactagatcatgat

SEQ ID NO: 177697 - DNA, 1150 bp, Zea Mays
cgcatctccttcgagaaggttcctttgaaatccttgtgggggggagggccccctcctccaacctagttggtgcgtggagggggtcgtcgagctacgaacgggttatccaagtgagatatgacaacccttcgactgggcgtagtctcggcgagtggtccgactagggggctcgatccgctgggcatcttatcaagtccttccttatgcaatcctgtatcagccctttggtccgtggccaccccgtcggccgagttttcacgggagaatgtgaggtacgatcttggacgtggattcgagcaaatgacctatgggacggtcaccttgcctgtggctcgctaggagcatgctcggtccatcccttgctctatgtgggatttttgaatgcattttgatttatcacctagctatttcgagacagttactattgtggtgcggtaataacgggtagccatcatgatgttacttggtgtgagcgacctgatgggacgtgaaatggttcgtctgtcatgtcgtgcttgggttgcgtggtggtctggctaacctccccggtcgttactattgtacctctcgtggcttatcttcctggtgctctaccccaggcggcgaggtcctgcaaaacacatggtctctttgctctatacccgtggttcctccatcgtttgttcgtggttgtccctggctttgcataaataaaggaagagtgtgctcaaggtcagtttacgcttaccatacccttgcgttatgccttttggaacctctcgtgttgttcttcctccctgtgtcgttccgacttgctccctatgtgtatggcatcattcccagccaactcaatctgagagagtctcctccatggcctagagaagaaagggttcattcccctgaaggatgtttcgaggtggagattggatagagaggggaaagtgccatgtcctggggatgatgaggtggtcatgctcgcgtccttttatgagtgcgggttcggcctccccctgcaccccttcatgcatgggcttcttcattactatcagttggaggtgcagaaccttcatcacaatgtcattcttcacatagtgtgtttaatcatgctaggtgaggtgttcatggggatcgatccgcattgggggatgtggcaatacctcttcagtgtgcg

SEQ ID NO: 177698 - DNA, 356 bp, Zea Mays
ccaaaatggacaagtgataggcatttagggctgcgcaaacagaaaccagggttcctttcaccattaccgtcgccgtgctcagacgccgtctgtcgtcgtcttctccccttcgcggctaagcggattggatagttgtcgcggctgagtcttctccccttcgcttggacagttctcggtgcttggagatctcgcggcggtgagttctcgtcgcccttcttacccatccatctctctcccttctgttcttcctctgactggcactggatttgcgtttaggctttgtctgagttcggttcgatggatttagatccacccgaaatctctgcagtatgcatcactcgtatgaactcccccga

SEQ ID NO: 177699 - DNA, 863 bp, Zea Mays
ctcgtccgcatctacaacgatgtcgagtggaggagcctcgaggctgaaaggccctgaccgaggaaggtatgtgaccaacttgctgagtgcagcgatagcgagcaatattttatcaatcccgcagcagccttgatgctccgatccaacccagagtcgggcgcgttggaggcgaaggtgatgtactggaaccttcacaactttgtggatagggacatcgtgcagcaaggtgtgatcgataggcagttccccctcaggatagaaagctacggcccagaaacaacctcgtcttggagtagaggggcacatccctcctatcaagaaggacacatgttcccatgaaggaccgccttggaggcatctgcgatatctgacacatcatcgacaataggtgttgggagtaggaagaagtcgagcagccgcacaaaagtaggcgcgagcgcaaccccaacccgcttggaccaggatcgcgtgccttcgggcatgagatcaggattgcgcatttccccctaaaggtacatgcaccagcaaacatctccaaatatgacgaatccacaaaccccaatgtatggctgaaggactactgcctcacatgtcgcatggcggcgatcaaggatgattacctaatcatccagttcctcccctacaccacatggaaggggtgagagcctggttcgagcatctgccggccaacaccatacacgactaggcagaccttcggaaggcctttgtcaggaactttagggcacctacaagtgtcccaagagctcctaggacctccagaggtgcactcagatgagtggtgacaacctccagaactacatccggaggtcctcatagaaaaggaacaagctccccgatgccac

SEQ ID NO: 177700 - DNA, 730 bp, Zea Mays
ccgctagcacggtgcgaaggtgacacagatggtctgcctaggtggagctgtatatcaggatgtcatcgaaaaacacaaggacaaaccggtgaaggaagggcctcaagacgtcgttcatgagagcttggaaggtcgccgacgcattgcagaggccgaacgacatcaccaggaactcgtacaagccgtcgtgggtgcggaaagccgtcttgtggacgtcgttggccctcatgcgcacttggtgataacccaaacttaggtctagtttggtgaggaactgggtgccattgagctcgtcctgcagctcgtcgatgactgggatggggaacacgtccttgacggtgagcgcgtttagcgcacgatagtcgacgcagaaccgccacgacccgtcgggcttcttgatgaggaggaccatcgaggagaatgtcgagtcgctgcgccgcacgatgccttggttgatcatggctgtgcattgccgctcgagctcatcccagtgagccaccgagtaccggtatagtcggactgtgaccggagtcgcgtcaggaacgaggatgatgcggtggtcacgaccccgttatggaggtagacccgtgggctcggcgaagatgtcggtgaagtgagccagcagcacgtcgaggggttggtcgctgccggtggtgacgccgaaggccgatgtcgtggtcgacgtggttccggaccagcggaccgtgcgtccctggagctggaactacat

SEQ ID NO: 177701 - DNA, 716 bp, Zea Mays
agagtgatcaccctaagtcatgtaagtgtgagcatgtcacaccgacttaaggtgtttccaacttaagccatttccgacttaagccgattgctccgtcagtagagtatggtgatcaccctaagtcatgtaagcgtgagcatgtcgcaccgacttaagccgtttctgacttaagtcgattgctccgtcagtagggtatagtgtccaccctaagtcatgtaagcgtgagcatgtcgcaccgacttaagaagtttctgacaaaagccgattgctccgttagtagggtatagtgatcaccctaagtcatataagcgtgagcatgtcacaccaacttaaggcatttccgacttaagccgattgctccgttagtagggtatagtgatcaccctaagtcatgtaatcgtgagcatgtcgcactgacttaaggcgtttctgacttaagccgattgctccgtcactagggtatggtgatcaccctaagtcatgtaagcgtgagcatgtcgcactgacttaaggcatttctgacttaagtcgattgctccgtcagtagggtatagtgtccaccctaagtcatgtaagcgtgagcatgtcgcaacgacttaagacgtttctgacttaagccgattgctccgtcagtagggtatagtgtccaccctaagtcatgtaagcgtgagcatgtcgcaccgacttaaggcgttttcgacttaagctgattgctc

SEQ ID NO: 177702 - DNA, 711 bp, Zea Mays
gttctggttaacaggaaacaggttcttttactattcttatgtgtcgctgacggtttacagaaagcccctacggtttttatttcttcgcacgggcaagtccccgatggcgttgagcgcggccgaagtccggcgagctcctggaccggccgattggggctatgaccggcacccccgaccggcggacactaaatcggacccatcctaagtctttcccccaacttaatttcacactcgatcaagtggtttgttctggccacggtgaccgtgaacctcacggcgagacaaccgtgttcccggcgatgggggtggcctaattcaattggaggggtcgaagagcttaaggaggacctaaggatgctagaacaagcaacagagaaacttgagctcacctaaaccgagctggccacggtgagctactttcacggcggtggagaactgtgttgggggaaatcttaaattcgagctcactggtggatgattgctaacgattcttcgtggctgggttcgcgataatctaacgcagctgtccaggccttcaatttatagcgctcgcaagcggcggccggtgaatcgagcgagacgcgcggcggtcatagaaagaaggagttcactggtgcagcggctgggtgtccagtgtcgtggcaattgctccggcgatcaacgaagagctagaagaagtcacggcgatgcggtggcgaggttgggacacgt

SEQ ID NO: 177703 - DNA, 496 bp, Zea Mays
ccatttccaagatggtatggggaggggctgcaaggtgcctgctaccttcagatggctggcctttactctctggcaggtgtcgcattcggatatatacttagcaatttccctcttcattctggtccaccagtataaggatctgagatcatgatacatattgttactgccggggtgcatggaaaattttgaaaggtgagcttcatccagtatcttcgttctgagctctaggttcttggggacaaccagtcgatctccaaaccatagaattcctttgctgtcctgacggaagcatttgtatttttctgccttctgttcgatcatttccttgataacctggacacccttgtcaccaatctgtgccatgactattcattcttgtaaggcgggctccactgaaatataactcaaggcaccggaggaaacgacttctattttcaacttgcataattcatcacatagggtggtgattcttgcattcatattcatacaattgcac

SEQ ID NO: 177704 - DNA, 727 bp, Zea Mays
gaaatttctttctccccttgtgcttatgatatatgtctcgtgtgtggaatttggatatggattatggaagtatcattaacaatgtaattatagaacggcttttgtgcttatgaaatatgactcgtgggtggaatttggatatggattatgggagtacaattaacaatgtaattatagaacggtttttcgtaccaatatattgctggtggtattgagcacttcatgaattttgtactgtgaatattatgtattttcaaggaccttaagacgaacaaccatgataactatgaaattaattttgaagacattgagtacctttttatggctttagctttagagcattatatcattattgtttgtgtgttcgcgtattttaacagacaataatgctcaatttttatgataaatataaccagaaagtggtgcttatcaagatgtgggctatgatgtttgaatacataaatgctaatggttggctaaaccatggtgcagaggttatgccttttctcttctgcatgttgtcaacattgccaagttggaaaataaatgcttagtgactaatatattgtcaaagctaaagtcaagtaaaacagggttgaggaggggccaaggcaacaaccaagggtgtgaagaggaaaatgcctttcgtactactatctagaactggtttatggggatgacagactgactgaacaacagagcaagaagaaagaaaaataaaacgaag

SEQ ID NO: 177705 - DNA, 692 bp, Zea Mays
gcacgaacgattatagcgaaacaactaattaatgtgcgcggatcgcgtgcgcgacaaagcgcgaatggacggtgacggcgcgccccgaccgcgcacgcgaatggcaacaatgatacgtgcgaacggtgcaaacacgcgcacgtgcagggggaggggatagacgagatagacgggggggtagacaggtaggcaggggtagacgatgatggggtagacggtctcatctcagacaacgacgcggtcgcagtcgtgagacggcggtgggactaggaaagcgaggcacggcaggagcctcaactacggagtccgagtagcaggggctggcggtgaggacacggcgcgcccgcgcacgaaatcgatgggaacggcgtggtggggagcgcacaaacgttctgcgagtcaggcggttgtgtccacacacacgcacgcagggagacctatctggaatcatcgcggtgctagggtcactaatccggccgggggcaggctcgccgaccgtggggatgaagcaaggttgaccagtcgtgtcacagaaaagggtccgaggtggccatgtggatgggagtcgagacgcaggggctctgctcgagaagggtgtgggctcaacgctagcgccatggtggacaaggccgcgcctgacgaacagggtcgcgcaggggcaacatcgttggagctagagttcgtcgtaggag

SEQ ID NO: 177706 - DNA, 1241 bp, Zea Mays
gagggctcagatatttttaagtttcggtaagaatgtatttgatgtgtggtttgctgtgaggataattttttaaaaaaaacgtggattatgtgttggggaatgcatcgataggtgtctacgtgaaaagtgtatttgttttgtgcatgtgatcggcgattgtgatagtcgatgcgaataaggagtatgattaatcctgttggagtcactggtgcagttgatgtcttgtgcgtaatatggggacatgtaggtgcgtgtatgcattggtgtattatagtagcggtggcgtaagatatttgattgaggtgtgccggtatatgccgtaatatggttatactcgcaacgaaggaagacatatgtattgtgtaacacaacgtttaggtggctgtcgtataactgtgtgaaggatgctcccgatggtcatgtgactaaagggtgttgtagtggcaaagcgagaattaagtttagtatttttaaacggttagttgatagcatctatcggtgtcgtcatgatttttgttgtatgacggatcgatgcttcactttataaattattgcattccatgcccatcggataaataaatgtcttgttgatcgattagagatcttatatgagcgttatcgcagcccaagaattattggaagcaagtagcattcgtaagtcggtcctggttaaaattgaagaacaatccgataacatatgcacctaagtgctttaggtccttcagtagcaaatgtaagtcttatggagttttatgccatgtgttaatgcctccatgttaggcccccaagaatgtgccattttaagtgacctgtgtattaacaactttaagttgagcaatgattaggaaaagctgattaatctgctccaacccatggtttcgagttacaatgtctaaaatggtttgctaagtcttatactgcgttagccaactcatgtaagtaggagtcgattgcgtaagtgattgtgatatatatgttgtgtctcggattgcgataataataggcaagccgatgtgtatggtgtatagcggcctaggttgttgctctcataaatcaacttgttagatggctttggttaagctcgtagtcacgatgatttgcttgttgtagtctagatgcgcatggttatggtcgcaggtaaaaattagtagtgctcatgtggtgtctaagctaaaatgagaactagtgggtgaaaagcgctttgatatacatatatgccggatttgatgattgtggtgaat

SEQ ID NO: 177707 - DNA, 388 bp, Zea Mays
gtcctatgtttggcttggctgctacttcttcgccgttctttgtgaaattctttgtgacagccacctgaccattctgcttagccatctctgtctgggggccttctgcaacatttaatatgtcgcactccactgttcccactatgacttttgagccgcttttgcccaacggctcattttgcccatcaacacccatacacagctctctggcatccgctgggttgcgaggagaccatttcttttgcatctgcgagcacaactcctcgggaccttttgatatggcaacaaccatgggccgactccccatactcctccctagcctgctccacactccatgctttcgctctgtctccaaatatggtcgcttcgggaattcacgttgtgagaacaa

SEQ ID NO: 177708 - DNA, 655 bp, Zea Mays
gaaagatgcaactggagccgactaaagtggtcacgtgccgagtcaaggggatccccgaagatgcgtcccatgcaagcctcacgaaaaactaaccaaactatggaggacgtgttgcacctatagcaaatgtgggtagatgagtagagaatcctgatatgtacatggttatctcttcagccggctatataaggctaaggaggtactcctacgaaaacattagatactccatgagactccattagacctagctagatccactcatcgctttcatcttctaccttcagcaatcacttgcaatcctcaaactaaaggcaatacaaccaccagaaactcaaaggacatagggtattacgcctcttggcggcccaaacctgtataattcattgtgttctgtcgtaccatgcataaaccatcgagctacgattgacatcatcgttttatcaaaagcactgcgtggtatgtcccattgtcccatagtgcgtcatcggtaccaaacaccgatagttggtgccctaggtagggggcacaacgttgattcacgatagctctatggttgttgtcttcaaaatttcctttaacttcaccaccagggagatcttccactttggatccctctcctgcgtcgccgacgaaggggcgctatgcaccgtgtcgc

SEQ ID NO: 177709 - DNA, 717 bp, Zea Mays
tgtgccctagttcaccacagtttggacacttgaacttgccctgaatgcttttcttaccattgtcattgttagttttcttttttccactacctccctcaaggcatcctttcatcctatttttcctctgtcgacccacagcgtgttttccaattggagcacccacttcttttgcggaaggaacttctggccaaaatgatttttcaccgataggtggaaccacccttgagtacgctgtggtgaaattagctacagagtagtactcatcgacaaaatcctccatcctgacatccctaaattcttgagctgttatcaagcacaatgcatggatacatggtttgcccgtgtgctgccactctttgcaagaacattcctgcagctgagcattgacaatgtgcttcgaatgcacatcattgttgtcccttacctctgcaatgtagttgtcagctttccgtactgataaatgacctaaacctcttgttctggcgtgtaggatatgcacaactgatggtaaaatccgtccttgcaacttttgtgcaatcctcctcctcctgtgaaacatctccataatttcctcccttatcctgtcagccaaatcacatacaggcagatccttccaatccataatccaattgttgaaatcctcagcaatgttgttggttacatagtcgcacttgatgtccgtattgaagccacttcggtaccaaagacagtcatgat

SEQ ID NO: 177710 - DNA, 307 bp, Zea Mays
accacgatggaacatcaatttgcggtagaagaagatgtcgatgtccgtgaatccagttatttgcgacctccagtttgaaagcagactacagttgctactgtttcgctgagattgggtctcttgcggatcagttcatcgtattcattctacatggtatcagccttcttcgttcctacagcaatcctgtgtctcaccttccacatcaatggctcactccccactcctttccaacgactcctctgatgatgagctcgtcgttctagcacccgcttcagttatccaaagcatttccatccgccagcacgtt

SEQ ID NO: 177711 - DNA, 291 bp, Zea Mays
gtgctcagtcccttcatcaaacttgttctcctatgatagctctacaactttgctatattgactttgagcaaaaacttcaagaatcctgagatgtagggctccaaagtgagcctcaatcaactggttctaaacttaaacacatgagatacatagagtggcctttttgcaattaggcccaaatctcatgacttcttttgcaaatcttcaaatatatgaaccatatgacttaaggtaccctaattccatggtttttgtacttaggtccaaaagtgggcaacatttgcatataac

SEQ ID NO: 177712 - DNA, 322 bp, Zea Mays
taccgcttttgtaaccgtggatgggctctactgttatgttgtaatgccttacggtctgaaaaatgccttgccaacattggtacgggcgatgagtaagacttttggtgacctgattagggacagggtggaggtatacgttgatgacatcgtagtcaagactaagagagggtcgaccctagtggaagacttaaccctgttctttgacaagctgcgagcaacgtgcacgaagctgaacccggacaagtgcgtctttggtgtctctgcagggaagttgctgggattcctggtttcgcaccggggcattgaagcaaacccagagaag

SEQ ID NO: 177713 - DNA, 514 bp, Zea Mays
cggaaacgatcgctcaaatcgggaaatttggtgaaaattaagcctggaatctcagattggcgtgaaatttggcaagtaggttactggaagtgttgtgaaggtgcctgaaaaatttgggtttaattggagcatttttggctggtttgggcatttcaccgagcacgtggcgtgcggggaattagggtttcggtgaaacggctatttgaggtgggaaaaccctcccgaaggagctaaaagcctgcagggatacacaatagggacaattgaatacattccaccaactggattcacaagatttcacaggatttgaagtgatgcacaaggggtggaaaagggaagctcaggtgcctcaaacagagaactgtgagggagtggagacaggggaggaagaggggagcctgctcaccgagagggagaggacgagcccaggtctccacggtcgccggagcacggtggtcgccggagggtcgccggtgggggagagggagacaccagagacagagacagagagcgg

SEQ ID NO: 177714 - DNA, 801 bp, Zea Mays
ctggcacactaggtaggggtgcgacgtcgattcacgacagcttcatggccgtcatctgcaacaccacgatcatcttcaacgtcagggaggttttccactttagattcttctccttcatcgctgaccgaaggggagtcctacatcgtgtcacagtcgtaggaatgggagcccccagaagccacgctattgactcgactgagaatgggttctctccgagttcaaagatggtcctcatcgcagcgtgggtagggtagacttgaccacgacatgggtcaaaatgacaagaaccaaggctcggggaccccaaccagctcgcgtgccatggcgccctacatctacgccagctagagccagagctgcgccagcgccttagcaccgaccgactgatgcagcggccctgacatggaggactctattgtgtacttcacccactcggttatggactcgaatcacttggaagaagggaacagaaggccccgacacccccatagtcgccggggaagaaccaaataccaccttggataccctaccagttagagcagtagctaggacaccaggggtgtctccatgcccctacttcccggacgtcctcttcatccacgaaagaatagaagacactcccatctccgacaacaaaccaaccttacaggggaggagcccccgtagcgtgaggcacacattgtcgaaattggcaccggaatgctgatgtcaccacgcagctggagatcgggatcccacccaacccttttcttgggacgaagcatctaaagcggggaaacccctgatgagcgtgcgttcctc

SEQ ID NO: 177715 - DNA, 699 bp, Zea Mays
ccgatgccgcggactgctacacgaacacgggactcgagtcgaaatcgcccgccatctccttcggaaccggtgaccaccactactgacttgttgggagctccggggaggggttaaatgctcaccggagattccttccccgccatggaacaccctctgccgtggccagggagcttcacgtcgtgcctgccggtactactccccccttgcttcgcttttcacctgtcatcacgtagtggggtgttaattgaattttggagagtcggggatgagatctcggtgcactccggcgaaggcgccgccgtgcgggcgcgaccgccgccgacaccgggtcacggaagggagtaatcgtgtcgcgccgtccgattcaaagtgtgcggcgatgattagatcagagcataccgactggggagggctgccctggggcgttggatcctgatctgaggatccctgtagaatactggttcgcgtgagtgatgggtcaatctgggcggttggtttctaatctgacggctaaaaacacaggataccccttcggccgagaacatttgctaaagagcccccagtctttacggaaatagaacccgccgtccattcttggtgcgactgagtctgtggaatcttgcgccagaccccctgcactttccagcaaattgtgcccagtccagttaacagaaaaatcagggaaattaatttagaaat

SEQ ID NO: 177716 - DNA, 867 bp, Zea Mays
gtggaactgatctggtaccgtgagatgcaaatgacgggcatggaggtcgatgcaatagaacgctgctcgatccaaacgggagggaaaggaactaacgaacgaacactgaaattcgctagtaatccaccttaaacctgatttaactagtggttgaactgctgctcttgactgcagtgcagatatgtgaactgatctggtaccgtgagatctccgcttgtggatctttgatcggtgcttggttggactctaaaatctaaatacgcatcgtgcacggtcaagtcggaaatggaaagcgaagttggcaccgaaatggaatttaagggtcgatctgctgtggcttgactatatgaacttgaatttttgctggatttgattttcttagtggagttctagttatattgctgtgagatctggtctggtggtctgagggtaggaagtacggatctgataactcgtagctttgatgcagtatcactgcctggttgacgttagatagtgaaattctacttggccttgtgaacagctaggtgaagctgataaatcagtagtgatggtaaaagcttcatgaatctctgatgtgattgcctgtcggagtaaacatcagtttgtgcagcagatgcagagttagttggccttctgaagaacaccttgcttgatctaagatgaacttggtgccttctctatggcaaacaggggtgtcatttggtacatctatgaatttggttttggggaatcaacctattctagatgaggtgatgatgagttcatttgtttaaatttagtggaatgttcccattcctcatcctagctatattactaattactccctcggtcctaaaatataattcgttagactaatcatatatt

SEQ ID NO: 177717 - DNA, 657 bp, Zea Mays
aattacaggaaagtccagggggtctcggggtaacatttctaagacacagggaacagtggtggagaatggcgggttaaatctctaaaaactgaggggcgcataaataaaacgacccagcgaaggggtatcgcacgccctgggccattggatcccccacgaacgacccggattagattaattcctggtggagccagcgttcaatccacgccgatgagtccaagatcggcggtcccgatttaatgacccgaaggggtacgcccaagatcgatctaggccattccctacacgatcgacggttgagatccaactcccactagatctaatcctagccctccaacggtccgcgcgttttcttcctccaacgccgcctaccagacggacgacggcgtgtatggaagcggcggtgccatggccgaagccttcctccctccattctaagccttagaatccaattcggctggtgaaacgtgactagacaattacatagaatgagggcgggggtcgattaccagtgatcacgtcatgaagcgctctggccacggttgagtccgaaccacggcggaaacgaagctccaacgacgaattcaggccaccaccgcggtcgtttcctcctcagatggccgcgaaatcttcactcgacaccccgcaaagcccctg

SEQ ID NO: 177718 - DNA, 662 bp, Zea Mays
ggactctataaattgggcacgccataagctccgtagggtagtcaagcaccaagccaccaagccgtgccctcaattgatcactagagctcgctaatttctcattctccccaaatctgttctctgccaccgtgaaagagccctcaccgtggttagtgtattccaggtctgttcgtgctccctgctctcttgttctagcatccttaagtcctcctgaagctcctcaaccaattcaattgggttaggctgccctggatcgctgggaacacgttagttcctttgactgtctgcactgtctccgtggacaggatgattcagagccttgttagtaaaattaagtggggggaatgattaggcggggtccgatttggtgtctgccgctcgggagcgccggtctttgcatgatccgaccgatacaggctcgccggagatcggtgtgtcgccatccaccgtcgtggaccgagctctgtgaaggaatagaagtttagggagtctaactgtaactgtcagcgactcattgaaatagtgcggtgaactcagtttaggttatttaaaacaataggggtctctgtgcaaagtctgcaagcgtgcgcgcgcgggcgctttcctccagtaatgggctgacttgggccggtttcggtccaatactattcatgtcttttctt

SEQ ID NO: 177719 - DNA, 602 bp, Zea Mays
cggaggcggaggcagaatcccaaaatcatcatcatcatcatcaggaactgctgtgccctgagtctcgaaatgtagaaaggtcgtatcctctgcctgagtgtatgtcactggatcaggtgccggcactatgtcctcaggggctggacgataagagccaaagaggaggcgagaggcctcaagggtgccctggaactgtggtggcaagatcagttgtgcgaagatgtggcagagatagtgagcatatggcagctgtcgccgagcacgaagaccatccaatacggtgtcctctatctcacaaatgaggaagtcaacaacatcaaactttggatgagagatcagggcaccgaggagccagagttggatatgagtagcagcctccctgtaacccatccgctgtagaagcgtctgtctcatgagctgatataggtacttggctgctatagtgaaatctgtcggggaacgtcacgacccatctgagaagggtggtcggaacaaggccgcgacgtgagctgtagctggagcaactctgccgtgagggcgacggggaggattagaggtgtcgtagcacaagctgtgaagacgagtcgatgactcgttgaatc

SEQ ID NO: 177720 - DNA, 413 bp, Zea Mays
ttcttataagcgatgtcttaacagggactggtcccattgatgattcaaattattgaaggcttgcattgtgatcccaaaacaaattcttgaagcctcttcttggactgcgaatggatggagtagatgacttcaggttttctgcttaatcaattgcttgcatgttgcgatggtcattgtttcttccaggatgtctcattctggtgtgtaaggtgatgtgcagctcctcctacatcagcgcaatgtaaacataggatgctatatgtttttcattaacccactttcgtctctgaactagatgataagttgaactatacgatgttgttataagtttttgaactctgaaggatactcttattgattgttcttggttgaaagggaagcattgggttgctacgcttcttgattgttcttcc

SEQ ID NO: 177721 - DNA, 514 bp, Zea Mays
atggggatgggaacgagattgaaacccaagaacacaagaaccaaatgcaacaagctcaaatgaaacactccacaaggcactaccatttctctagcccaatcttggtgaatttggcacttgggaggaattgggaggcttggagttgttgcaagtattaaatacaagtttgttgaagctcttgtgtgtcttgaatgttggtggagggggtatttatggccccaaccacttcatagggccattgtgaaaaagcaaccaaatctgcactttaccatccacctacagtgtcggtccagtgcatcaccgggccgcatgatagctgttgtagtaggttactgttctaactattcagttgcatagtaactggtctggtggcactttggacctgccaggtcagcaaatgatcgttgaaatcggaagagagtcattggatgctgaaggtatggtatgccaccagaccggtccggtcctccgctgctcagatgtccatttgcagtcctctctgcataaacggtcc

SEQ ID NO: 177722 - DNA, 607 bp, Zea Mays
caattatgctattaaacgtagatcgctgaaggtattagtaagatttttatcttctaccttggttaagcacgagcatagcagactgagcgaaggaggcttcgacgacggtgtgctcgggcggtgttcagtgcactacacagggcgatggatgatggcgagattggtgctgacgacggtgaacagcgagcgttgacaacgcgttgttcagcgagcagggcgcgatacggcgagcagcaagcagcgaacaggaaacggcggcgctgcgagcgagtgtgcagggatgctgagcaagggatccggctgaggagggcgcagaagctgggctccgaggagttgcgagaaggcaccaacgacggttgaggtgggagaaaccggggagctcaggcggattttatagggagagggcgctgcggagagaagagaaacgaccctggctttaaggctattgatggcgtgtatcaatggagggaagtaacggcggcattgaagttcctttacgttacgcgggagaagaacggacgcggtcacgcgggcttcggacggttcttggctgggcgcgaggtcgcgacgcttgggcgctggcggggctcggcgcggtcggataagc

SEQ ID NO: 177723 - DNA, 386 bp, Zea Mays
gtgggcagcaaatttctgttctatcgtcatctcccaatcaagatatccctcagcatcataatgacccgaaaaagatggtatagaaaatttaatcttagcataagggtcgtcaggagcacgattgttattaccttgctggcggtgtggcataccttctgtgttttgatgaagacgacgacggaggcgcaaatctctggtggccgcttcatcataattaccttcttcatcaatcaccgcatcatcgggaagacgtggacgaggaggtggtggcggtgcttgttgttgtgtctccaacacagcaagtctgtcgatgatctaggacaatcgtcgatctagcctctcgtaagtcctgccaaggtccatgttaatgaaggcatcatgcactg

SEQ ID NO: 177724 - DNA, 914 bp, Zea Mays
aaataacatctaaaaaactggaaggcaagaccatggggcagtaagatgaaactatcataggggcacgtctgagagggtaattcttttctttataacttatcatgcatgggtgcagaccaacaggccgggtttatggggatggacctcatcgggttggcgtacacgtatgtgttacctagttacaaaagggaaacaaattcgacccctcagactggctcctatggatagaacttacagagatgctccagcactaggaggaggcactcctttagtcgcagctagacggtcacactcgggtctgatgaggacatcctccactattacccgttggcaaagacacaattggcctagttggcccaattgtagtcggacggcgactgtgtgagcctcagaattatcccacctcgcttaacttgggaggaggaagccactttaaaagggagagccacccttcccccattggactagtcttttggggcgattaggcctttccctaagttgggtgtgcttgatgaactgttgggctccgggcaaccctaatttgttgggcctcggccaaccccacctgggctgggtgtatcatctggtatcaaagctagggcccattttaagaaggtgggaatgatgaggacatcctccactattacccgttggcaaagacacaattggcctagttggcccaattgtagtcggacggcgactgtgtgagcctcagaattatcccacctcgcttaacttgggaggaggaagccactttaaaagggagagccacccttcccccattggactagtcttttggggcgattaggcctttccctaagttgggtgtgcttgatgaactgttgggctccgggcaaccctaatttgttgggcctcggccaaccccacctgggctgggtgtatcagggtcggcg

SEQ ID NO: 177725 - DNA, 517 bp, Zea Mays
cacttgctcgatttgacccctcagctccagtccccactaccactccaccttcctccattaccctaggttctaccactcctgagcctaccaccacacctcctatgcctacagcctccaccacacctgcttccaccgctcttgctccctctgccactccactagttcctccaccccgttttcgagagcgagatgagacagaggtgcggccacttgctgagtaccctcgactgtttgaccttcagagggccactgctgccatagttcgccgcttttgtcacgtgccagtggagtcctggcttctagcttagagagatctagcatcagctcctcttttcaataccaagacttaggagtccttctaccatgctcatttgacagctcagatagctttgtgggctcaccgccaccttgacctaacaacattacgtttagcagcttgttcagagattgagggccacatcacctacttaccaggtctgtactctatgctgacctttggtggctgatacatagagga

SEQ ID NO: 177726 - DNA, 506 bp, Zea Mays
tgtatacttaaaggtctgctaatgtatattatcttattgtaaagtcttccgctcaactcctgtatttaaagtttatgttcttgttgggttattgtaatacttgcaactatggtgattggtccttgggaatgaacgagttcaacgaaactcggcaccccgagtaagttatatgattcacttacatatccatccaaggccttgagggcaaggattgtgtacgtgggcccgataatttggttgggttgtgacactaattgaccaaatggcaccaaaataccttaggtgtgccctagaaagttttcaaatcaagacaaaattggttgacattatttggcatggattttgcctcagattcgggctgaaagacaaaccgaccttaggaggtaagcaactccttacctctgacatcaaacgcctcgggccctgcacaaacttgacggagtatagaaaggggagagatcttaaatgggaggtttgcccaaattcacaaagatttggagccaatg

SEQ ID NO: 177727 - DNA, 472 bp, Zea Mays
ctcgagttagataagcgtgagcatgtcgcgccgccttaagtcattgccgacttaagccgattgctccgttagtagggcatagtggtcaccccgagtttagtaagcgcgagcatgtcgcaccgccttaagtcattgtcgacttaagccgattgctctgttagtagggcatagtggtcaccccgattttagataagcgtgagcatgtcgcaccgccttaaatcattaccgacttaagccgattgctccgttagtagggcatagtggtcaccccgagtttagtaagcacgagcatgtcgcactgccttaagtcattgtcgacttaagccaattgctccgttagtagggtatagtggtcaccccgagtttagtaagcgtgagcatgtcgcactgccttaagtcattgccgacttaagccgattgctccgttagtagggcatagtggtcaccccgagttgagtaagtatgccaattg

SEQ ID NO: 177728 - DNA, 596 bp, Zea Mays
gggagttcggttgagtggacggaggagtcgtcggatgaggacttggattactttgcggccttggatgtggcagcggtggagtcttcgccgcgcgctgcgaatgctgaagttgtgcctggtccgagcgctgggcgcaggcggcgaagagcggttgcgaagcgtagagtgagtgaggtggacggcagtcggcttcgtgtggacggggctggcaagcaggagttgttgtcctcgccggccattgcgagtgtaggtgagggtgagttgcgaagtctttttgagggtgaggagcttaggataatgctatttaactatagggagatggggatcattccgaaggttgaaccgatgtaaggtgtgatgccctcgctgtacatatgtaattgtaatttgtatgatgaggttatgcgcctgcgctgtgcttgtaaaggagttgtgtgcttggtctagtatgtttattatgccggtccggtgcgcctgtggtcggtcctggcgcgggcagtttggtgtagggtttagcatgggtagacttttgtggaagacttcgaatttgcgcacttgttgtggtagtccggctgcacccttgggcgacttttgca

SEQ ID NO: 177729 - DNA, 619 bp, Zea Mays
cggcagctgtctcaggtgcttcaaggagtttacgtacggatcagcatttattggttcaggtatgggtgcccatcaggggggaggtgaggcagccatttgtgaactgtagctaattagtttcatttacaagggctggaaactgcaactaattaggagtatcacttacaaaggcggggaatgctagctagtgatgccttctgaactagctcttgcttgctgcactcgctgtaaagtcgccgagtagtatttcgttccagatgaacatgatcaacgcagaagtgctagcagtgggatgtccctcttgtatttccagctcaaatactgtcggcttttggtttcctgcgccggagagcggcaaatgagccgtgagcggttaggggaaaaaaacagaggcaataccaaactctcaggaggtgaatgttgggggtgaagagctttaaattttaacccgtaggagcaggagcaagctaaggccacatactagaccttgcttctcaaacccaataaataaatggggcagatttgtgtgaaaaggataataaaaaaggttttttggtctgggactgaagatagtaataagattggacaacacaaactctgcactactgtgaaaaaaaaa

SEQ ID NO: 177730 - DNA, 694 bp, Zea Mays
ctttgtgcttcaaaagagaaatgttatgaaatatcctggaatgcgtggagaaactgaaggacatctttgctagagttggggcatattcttctaaacaaaaattcatctgtggcgaccctgatggaatcgtctagtggatcagcggagaagtcgaagcctttgacaaaattttaagtcaccgaggagacttctgcgcattcgctggtgctcggggggccacgttgattttaaagaaagctggctgtgaacatgctaaggttgtagttcagccaggatttgttttctcggtggatgacatcaaagacccttcggctgaagcttctgcgctaggcgggagattttactctaaggtgtggatgaaaggcggccatgagatagctgatgaagcgattagaaaaaatgaaaaagaatctaacgatgctcaagaagaaactaaacgagctgatcaagttgtcgagcgtgcgaggcttataggtacctttagtgaggtttagcttcggaattaacaaacattttttatgatgtagctaaactttcacccccaccggagccatataaccccgaagttgacctgaccatgaaggaagcgttagatataataataatcgctaatgaagttgttgacaaagctgtcgacagactactaaatgaagccaccgagaaagtgctaaaagaagattaataactttgtata

SEQ ID NO: 177731 - DNA, 596 bp, Zea Mays
ttcctcgggcatctctggggtggcgacaattgctcaccggagctatactacgtcgcggatccgccattgccgtggctacctatgtgtgtcgccctaacatcggtgagtggttacccatgtagttcgtcgtgttgtctacttcgcgtagcactagtcgaggtaggaaatggtcctccgtagcgccggttggccggactccggtgagagcgccgccgttgggttgggcgtcgccgcccaagtccggtgggtgcgtgcgcgtggtaatagcagggtcgctggaaccgtcgattcccgagttagcggttgagatgataagcagcgataccctttcgccacgattcgatctggtccgtcgatctggatcggacagacagagttagacctagagtaataaaatcctcaccgttgaagtcgatccaacggttactatcgtgtaccggttctgtataagtcaaatctaatgtgagccctcgaatgtgaatcgaacggttgtaatcagcgtataccccttcggtgtacacatttacataagaaaccccctgttttcgtagaataaacctgcattccaactagcaatgttccttgtgtcttaaaat

SEQ ID NO: 177732 - DNA, 634 bp, Zea Mays
gctaaccttggggagggttccatgcattgcatattattttctagattctatgaatggttagtataatatgtcgtcatttcgccgccaaggtaagaaaagaaagagtaggaccatgcaaactggggctagtcggttgtcctcatgtgtgggtcaccatgcatgttgtataaggaccgatagaatttcttaccgcaacttagcgaggatagtggtatcttgtcattatttttcaattaatgttgtcgcatcgtggggatgggttggaatgaactttttctgtaggtatactaacctcaatgcgagtagttggtgtagttgcacgataacgagtgaacgggtatgccactgcttattgcgttaacacgaacatgttgtgaggccgtaagttatgtgcatacattggcataaccatcatcttgttcatttattacatcgctcttttttaaagatagggtaggggttttgtctgcgctattaatcgataaaaactttctcaccctaatcctcacccatctgacattgtaacagatggctcgtcgtaggctcactgcccgtaagtccacgggaggacgtgtgccttatcaccagctggctgcacgtgtttctcatcgccgcaactcttttcttttggagt

SEQ ID NO: 177733 - DNA, 704 bp, Zea Mays
cgagtttgggctacttcccatgtggatacaggcgtaccactggggtggagactatgtcgaggccagatggtgaagtgctcgttttttagggttgttcgctgcaagacttcgtctgccgtgtcaagattttttgactaaggtgcttgagaagtttagggttcaaattcaccaactgacgtcaaatgcccaagcatcgaggtcttcgccaagaactattgcttgcactggcagaagaggtcttcaggtggtggagttgatcagtttggaagctatacttttaccttgaagactgggaagacgaaggaaaaagttgttcagttagccccttgtgcgaagaataagtggagggatggacaaaattggttttatgttcggtgcattaagggcaaagggtggcctcgggcgagtaccctgagtccatttcagtttgaggctttcccacactttgcggttgaggagagggaccaaaatgactattcctttgattttgctgttgttgcctgcattggccaagatctggttgatgagtatttggcgtgtggggtcttgtcgcttggtcagggctgggttgtgggtccggttgcccggaaacacttcactagttttgataggcagattttgagtcctatcttcacaattgagcttagggaccattctcgggacatattttttgcggagacataagaaagcagaagagcttgtca

SEQ ID NO: 177734 - DNA, 433 bp, Zea Mays
atccatccgattctgagaaaaggaagaggaaggcccctatattaagtctggccctgggcccctaatttgtcaggaccgtcgctggtaatactctatatctattatgagttgtattgctttagagcttgggtcatgagtctgagtgagggggagacagggatagagagtgagggagagcagtagaggatcaacttccgtcaacaccggaaggagaggcgagaccgtgaggcgaaggcggctacgatggaggcagcgtacacaagggagggatgaggcgacgaggtgctagggttctgggttctgaacttatggcagagcgacgtacacgagtgataggcagggacgaggtcggacggtgggacgatgggttaacccactattagcgggccttagccggaccgacctgtttagcgtgcttaggctttcactgtgg

SEQ ID NO: 177735 - DNA, 809 bp, Zea Mays
ccactcacttctaggtggccgcagctgcgctactcctttgagccaactaaactgaaccaaagctgtgtttttgactgcattggtgactgagaagctgtgcaggcttgctaacccttttctggacccatctattcacccaacaactgtatgcatatgcagctctaggttcgggcagtccagattcagaactcatcacaggaggcaggcaggcatgcaggcatactatatccttcctctccacactttattagatcgatacaagctatcagatgtgcggcacatgccattggttttcaaacatgcattattattgtaggtcacctttagttgcccgacgcatgcccatcttaaaagtattgtacagctcgattagttcaagaaaaatcacctaaacatgtttgagaattaacaaaaccttttcaagttcgacctccaaaccaatcccgaacccccctagccccaagccaccagctggcctaccttcatgcgatggaaacagtactgtttgagagtagcacagaagcatttgtgaccaactgttcaggcccccagggttcaatgcatgcaaggaaccactttccttagctttatatagcaacattggagaaacaaaacaaagccatgaaggcacatgaatgagagagagagagaaagagaaagagagaaggcttggcaatgccatgtctgcagcaggcagcaggtagcatgcatgcttgcagacggtggtggtggaggactggtggctgtgcttcagaaagccactccattgcccatgggggggcagccgggcagggcaggcattttcattg

SEQ ID NO: 177736 - DNA, 713 bp, Zea Mays
aaaaatataaaattcattgtgggattcacagtcgtcatgcctgccgattcgggtttgtttgttcctatagtgaatggacgaaacatatacgtccatagtcataaatcataatagaatacgacataaaaatataaaattcgttatagaattcagtcgacatgcctaccgatgtcggatttgcttgttcctatactaaatgaacaaaacatatacgtgcatagtcataatacaatacgacataaaaatataaaattcattatggaattcagtcgtcatgactaccgatgccggagtttcttgttcctgcgtggcgtgcggatcagcgacgacgacgcttgcaccccacaattcaacaaatagctgtagtatggcggtatgtttgatctccatgccacggcttgaaagtcccctcgaggtctcgtgcttccgatttgcacctcttccatggttgtcatgggcagatcatgctgctgggctgagcacgcttggtaacaaccgtaagctattagcatagcatcagtcttgggtaatctccacatatatattgggcgaccattcgctaggctatcggattgatgctcgccaaagagattcaggtgcatacttgcgtaatgtctgtagcctttgagaaccttctgccaaaactgaggacagaggttggctctcagatagccaccaaacaaatttgccgctacgaatgatccgttcaacag

SEQ ID NO: 177737 - DNA, 631 bp, Zea Mays
gtaccatggaccacggtagctaatagacccaatacccaatagcccaagcccaatatctggctctcactgattcatcgcaaccctagtccctacctccctggaggcttcgctggatgcttggatccactctaccaaagtaccaatccaaccgagcgctggtcgccgaccgccacggcaccagcaccacctagtccaccaccggccaggcgtccaccgtggcgccgcccagggcctaggcgcgcccaccaccacaggcacggcagcacgggccacgctgccatggccgagcccagccactgacgaccacgattcatcggagatttgaagattcagagtatcggaccaccgcctaggctcccatcggccaaggactggtgtagtggtgtggagtgtggacgtgtgtgtgtaagtgtaactgtgtctgactctatatgaggttggcaggtgcaggttgctatccaccgtcctcgttggctcgttgagacttgagaatactttgaggttgcaatttcaaactgcagtatgatgttgtaaactgtgagttaagtattacgtgtactgttaaactcaaagtagtatgacgttgcagacttgcagtactattgtttcctgtgaatctcttgtgtgttgt

SEQ ID NO: 177738 - DNA, 595 bp, Zea Mays
ggcggattgatttttttctccctttttcaaggtccaacattttcatgtgtgaatgaaacagaaaaaaatggagtaggaagcgtacacgcaggctggaaagttacggcggtgggcaatagtgtcggatctgacctggacaactatcggagttgagaacgaagctctctactcactatcagctcacacacagttgtaaaactggaactaagagagacagagtttttgtgccgcgagagcttcacgacgttttctgtttcttctatttattacagtagaagtggaacgtacatgcagtaaaataagctgaccgagtaagccgcgcgacgtgctcgagtgcgcgtccatccccacgccgcacgctgcgcgagttctccgttgtggataacaaactggacctattctacaggacatcggcctccacaaatcggggctcgacccttgactgataatatagactaactgaactaactaactcaaatgcagacatataacttaactgaatatgcaatatgcagtaactgaactaactggagctgggcttaattgtttgacaaatctccccctaagccttgctcctttggacaatctcaacaag

SEQ ID NO: 177739 - DNA, 933 bp, Zea Mays
ctccatctccatcgcgtggcgtaggctctggttgcacaccgcaacagacggcgctagaaccggtcgtttctgtttcccccaccaaaatcggactcgttaatccatgcctacatatatgtgtgaatcgagctcctcctttcccccatgaaccgtgtgggcgagcctcgagggagcgtggagggaaaccttggctcctgtacgggagagggccacctgtgcgctatgaatttctcgccgatggagatcctctgccgctgggccactacgctccgtggttgtgctccaccacttacgtccagctctcgttgatcgacctgggaggatgcgcagcgcacacggatgttcgtcgcagcttcgcctgggtggattcattctcggcgcggctggaatttctcaccgatgtgagctctccgccgccaaagcttcacctgccgtgggcgggcctcgtcaccacctcgcactccggtaagaagcctcactatgatccaccatattgcactcctcgaatagcactgatcggattggagtttggggcacggggcgtctgtggaccgagcgccggtggtgggcgccaccattgtggctgatgcgcctgaccggagttttgggggtgggatggtagaaagaagacaacgtttggggccgttgatctgcgattcggcgcacacgattagatccaggcggtgtcttggcttcgggcatcgtggaccgttgatcgttcatcgaggggaggagattgatttcggctgcattgaattcgggccctcggatcttgatccagtggccgttatttcaataccggttcggggttaatacgttctaatcgtggccgtagacttgtgatccaagggatcaaatcgcttgccagttcgttgttttaatctgagcttttcatctcagatccgacagccatagatcaccaataccccttcg

SEQ ID NO: 177740 - DNA, 680 bp, Zea Mays
aagctgctggcaccggtagtagttcaggtggctgatggtactcgtcttaagtgttctcatcaaatcaagagtgcttgttggtccctgcaagaatgtgtgtttattaccgatttatgtgtgctggacttacctgtctacgacattattgtgggcatggattggttatcttcttacagccccatgcacattcattggttacacaagtgggtatgcattccttatcaacagtcattagttactttatatggtgtttcggctgttctgcaacctggagcggtggtgcaggtggctacgattgcaaaggagttgcccaggttcaatgaaatgagtttgcccacacccatggtgcagctgctgtccaattttttagatgtttttgaaccacctactggtatgccaccaatccgtgactgtgatcatgtcattccattgatcgtcagtgcgactccagtgcacgtccgaccttatcgctatcctccagcgattaaggatgaaattgaacgccaaattgccatcatgcttgacactggcattattcaagcaagttccagttctttttcttcttcggtcctgttagtcaagaagaaggacggcacgtggagattttgtgtggattttaggcatctcaatgctatcactgtcaagatgtcatttctagtaccggtcattgaagaattatt

SEQ ID NO: 177741 - DNA, 553 bp, Zea Mays
ccagaccaatgaaaaccctctttggttttttggacagaggtttagcgaaatgagagaggtagaaccctagtccatcagcagccataccaatgatgggcatgttaggcttgctttgcttcggtaaaacacatctgttggtaacgtgagtatctttgcgacaaatatcacaccacaaaacattgaaacaatccctagcatgatgaccgtcaaccccacatttttggcagaaaacacgacgagcaagctcattttctttcttcaaaacggatggggtaatgttagggttacctgattgaatcccttcacctaaggatgaagacatcaagccttcatgatgttcagttttctcaggcgtcggcttcaatctccaactgagattcatgttcctgttccagggttgaggtccctaaggattctctctctggtcccaacgatctgattgggggttcttgcttttcggatccatcatgctcggtggagacgagcccctaaaatcgcccgtacccagccgcgaccactcttcttcaacaaccgaaggacgcagagaggttac

SEQ ID NO: 177742 - DNA, 293 bp, Zea Mays
agcccacaacatgtttgcagactcaataagtccctctacggactgaaacaagcaccacgtgcctggcatagtcggtttgccactcatctactctccctgggattcatcgaggccaagagtgacacatctctgtttgtctaccatagaggaactgacacaacttatttgttactctatgtcgacgacattatactcacatcatcctctactgttctcctccgacacatcattcaggccttacagttggagtttgctatgaaagatttgggtgatctacatcactttctggggat

SEQ ID NO: 177743 - DNA, 649 bp, Zea Mays
ttcctaatggattggtcatacacacagatgcttgcaaaggtttggagtttgcggtggatcatgtgttccctggagtggagcacagggaatgcatgcggcatcttgctggacactttgtgaagaagtttaaagggaaatcattaagtgacagcttatgggcagcatcattgactttttgtgtggaacaacacatggaccatttgagcaaaatatacattaagccaggtgtgcaaacatggttggcaaacaagaaggtgtgaacaaggagcaaattcaatgtattttgtaaagttcactatgtgaacaataatttggcagagtccttcaactcaatggttaagggggtcaaaggtcttcacatagttgatgtattggacaagataagacaaatgattatggtaaagtttgagttgcgcaaaagaattgcggaagaaagatttaaaaaccatgagatcatcccacttgtcatgaagactttgcatgcaaaaacaagaggtttgaggatgaccatcatgaaattcaagccttatgtggcagagatgattttatttgacaaagagaagacggagtggaggttttcagtggacttagagaagagaacttgtacatgtaggcaatggcaaatatgtggattgccttgcactcatgc

SEQ ID NO: 177744 - DNA, 657 bp, Zea Mays
aatgaatgcaatgcaagggttatcaacactaagatggatgcaatgcagtgtttaaaagggaaaaaacattaagcggacacaccaccaccaactcatcttgaacaccttaatggaggactgaccatccctgtggtacaccagctgaagctccttctcatcggctgcatctgcgttgcaagctcccatcgccagcgcgtacaacacttcatccctgcaccaaccacgtgaaacatgcatcagccattccgactttcagagcaaccgctgggacatcccatcgagcagatcgtgggtggcgatgacctctcatcatactcgtacgcgacctgcaaaacagagagcagctctcgtcaagtcagaacttagaagagtccggtgatcgacgatggaaagctagcgaaaatcgtgcgacctcggggaacttgtgagagagaaccatggcagggtcaatggcgcaggagacgggggccgtcgcggaggcggagcgcgccatggtgcaggaatgccaggaggcgaagccaagtcagagcaggtggcaatcatcgcgccgcgcgagccattgttaagtatgccaggtgcgaatccaaggcggagcaggtggctggtgttctggcggcggccggtgttgtggcggcggcacgggggtgggaaagggcg

SEQ ID NO: 177745 - DNA, 723 bp, Zea Mays
atggcctcggcttactgatcaatccgaagtgggttcaattactattgcactgagtcgctgacggtttgcagaaaagcccctcacgttctattccttcaccgtgccaggtccccgacggtgcacgatgcggcagagctccggcgagcacgtagaccgaccggaggaggccaagaccgatgctcccgagcagcgggcatggaattgaaccattcccgatcacttcccctaagttaattgcacgaatggtgatctattctactctgcccacgagaacagcgaaggctatgggcatttgctcgtgttccctgtgattggtgagctctcagtccaaattggtggttcgacaagcatcacagagttatgagagtgctcaaacgagggagaggggaggatgaactaaccagagttgtactggccgcggagaggttggtttcacggtggtggaaaccagtttgggggaaaaccgaaattcaagctctctaacgcacgattgctagcgattctcggtggctgggtgggtgatgaccttgcgggggtggcggagggctcaatttataggaagcaagagcggcgaccgggaattttagaggtgacgcgcggcggttagaggaagaagtagagcactggcgcagtggattcgtggctagcgccgtggcaattgctccggcgatcaatggggagccgctaaggcttacgacgatgcggtggaaagttagagccacg

SEQ ID NO: 177746 - DNA, 613 bp, Zea Mays
ggaggcgaaagtgacaatgaaagtgaagataacagtattttgagcctaacaaagcctagccacattgaatttgggaatctactgtaacagaggatgacatggttatgatgagaaaacttggctatttcggggaggctgagagaaagcttgtccggtttggtgggtaggaaatagttctggagccaagagaggacgaagttgtcgttttcaagagcttcttcagagtaggacttcggttccccttaaatgacatgataggagaaggtttaaagaactttgagatataccttcatcaattgacacccaatgccattgttaggcttagtgtttttatatgggctctccgaagccagggtatgagcgctaatgccgaagctttttgtcgggtgcatgaactgcactatcagacgaaggccagagcggatggtcttcataagaactttgtctgctacaactttgcgtatagaaaatatacaaaggttctagtaattggctatcgcactaagcggttgggggatgccgaagaaaaaagaaggggggaagtatgagcttgtatggctcccctatcactttaaatttgagaaacaattcaagaaaccttgcaacgaatggc

SEQ ID NO: 177747 - DNA, 536 bp, Zea Mays
agatttttgttcaaattaaaaggcaaactattgagcaaggtaaaggaagttattgtctttactgctaagcaaagcgaaggagcaagaagaatgacctcgattgaaattaagtcgcagtaatttcataggagtgaaatggagtgatatactttgtagaaactaattgcaaaaatgtagtagtgataaactttgcagaaaccaaatcgaacctggcaccgaaggctgctttgtccgtgtcatgcttgcgaggtcgctcctaccaacagcaacaacaacctacaagaggcacagatatagtgttatcgagcagctgcacggtgaagcaaaggcaaggctggcatcttatcagggagcgtgctacatgaaaaaattgttctgtcgaaacttcagatgattggggatggtagtaccatcaaatatcctagacacaagccagattgataaaatggatctcagagacaccactgtactattagtgcaccaagaactgaagaacatggtcatctaaaactgaatcgcaaacttctgcattaaga

SEQ ID NO: 177748 - DNA, 682 bp, Zea Mays
tcctcaacctcccgcgaaatccgcgtgacctccacgggcgctgacccatttcggtccgcaggggagggagaagaactcgcatgagctgttgccatctcgtcgccatcgggggtggttgggccttatcccctgtgccgcggccgcctccatggaaaccacgcgcaacggcctccgcaagacctcggagctggccgggccggctcaacgacctccctacctcctcggacgccctctgctgcgcataagtagcctccatggacccctgtcacgaaaacccaagcttaaattttgcgccgccgccactgtgtgggtgagaagggaggtgcaccgcgagcccattggcgaatctgttcccctggtcgccgccgaccgatagcaagtgtgggcggtcgcatcagggtgtggcggaagtgtttgcgggggcagaagggtggttggacccgtggcgatcgcgagatttctcatcggagtcgcgttttccgccgagcttgcgtcccgccgtggccgcgaccaccagagcaaggatccaaggtaagaattgccccacccagttcgtagtgatctcctatacgctcagcactagacgggggttaggatgggggcaggaatcgccgggttgtcaccaccggtgaggcgtgcggctatggcaatgctcgccgccgtgccggtctcggcggaggag

SEQ ID NO: 177749 - DNA, 644 bp, Zea Mays
gcggcgtctaatctaagccatccacccagtgattaacgacccacgtactaccacgacttggtccactcatggtcgctagattttgatcctacggtctagaggccatcttccacccctagcgctaaacagggcagcgcttccaccgtgatggtcgcgacctcgtcggcgatgcgcccaagtgcgccgacctacaccacccgaccctaaaacccagcgcaaaggagtgcgtaaccaatggacaacacgataggggaagccttaccagagaccgaggtgtagatgctgccgcgcatggcacgcggcgaccctgcaatcaccggcgagcaattcgaattgctctgatgattcatgtgccaggacgtgtgtacgaacctattccgagagtgcccgccaacgcccccgagccccgggtcgagccttgtgcgatggcgcgcgtggatgttgacagcgacgacgcttcctacctcactggacactcccacacgacggcgactaggttacgggggcgagagggagaatagttcctaggtatgtggctttatagccccaagaaggcgatcacagctcgataggtaacaaacctgccactatcggcgtccgtgccccgcgcgcagtggttgcaagcggaggagagctcccgtgtt

SEQ ID NO: 177750 - DNA, 663 bp, Zea Mays
tcccccctctcctcccacggcccaagcggcccagctacgcgcgcccgcgccgcgcctgacaacccggccccaccggtcagcggctccacccctctccctctcgcgccgctctcccactggtagcccaggcccgcttgtcagaaccatcgtcccacccatgccatcaccggcgcgttcgccgtagaccgcctcacgccccgtcgcttcgccattaacactcgcaccggcctcagcgaccaccccgccactgtacccgagtcgtcccctcacccctcgcctgcccgagccatctcgtcgccgtttgctccatccccgccatcatggcaagctcgtcaacgctcgccgtcccctcccttccctccccctcccgggcgcctataaaagggaccgcctgagctccgtttcctccacaccagccccagccatctcctccactcctccccgagcccaatcgagctagcgccaccgcgttcccccgccactccggtgagctccgttctcgcctctctggtagctttcgatcgaattactttggtgcttgagctccgccacacactcacgatcgcaaggcacctctccccacctcctattgcgctcggctgcctcaccggcgacctcaccgccgcgaacacccgccgctgcgccgtggaccggccaccctgg

SEQ ID NO: 177751 - DNA, 732 bp, Zea Mays
tgcgaagaatacggagatgagaattctggtttcggccatgaattcgatcccttcggtggtggccatagaggttatggtgatggtcgccactctaatttcgataattttcatagaaggcgttgtgcacatggacgtcgagtaagatttgaagacgaggagtttgaagatcgtgatcgtgaggaaggatctgatgagaatccctttgcaaatgatggaatgtttggtcggcgtcatcatcaccgacaagctaactttgaagatagagaccgttatcatgggcgttgtcatagaaatgactcaaacaatattgcctgagtcaagttggatattcctaaatttattgggaaagaaagtgcagatgaatatcttaattgggctgagcagtgtgatcaaattttcagagttcacaatctttcagatcaacatcgagtgaacttggcttcagtcgagttctctggttatgctcttacttggtggaatcaagtgcaagaacatcaaattagattgggactaagacatattaatacatgggaagagatgaagcgagtgatgaagaggtgatttgttccttccagctatcaacgtgaacttcaaaatcgattgcaattattgaagtaaggaaagaaatcagttgataaatattttaaggagatggagttactgttagtgcggaccggaatcagagaagatcccgagtcaaccatggcaagatttctaggcaatgaagagatt

SEQ ID NO: 177752 - DNA, 878 bp, Zea Mays
aaccgtttggctttgtcgggcagatcaacatgtcctcgagctcatccgacgacaccatctagaaaagaggaatgtggtaggccacgagtgtgattggaagctcccctaaagacttaggggctactgttgaagataaagcaatataggttacatgtaaaacccaaataaaatatgaggaagaggtaaactcccagacatagaaatcaaaccaacgattctgtctcactcgaccccaacctcttagggtcggggtgcaacatgggatccaagaaactctgcgttgccttagcctagacatcgagagcgtgatcgactccctcgatccaatagaggtgttataatacacgatggttactccccgagacatgcgaaagtgttaagccctgacatgagagtaacctgattgacaaacgtaatgtataggaaccgggcatgcggtcattgacgcaaaggacatgtcgattgaccattcgagaaagacatatcgactaagtatggggaggccatgccacgaccacccacgacccaaaaggattaatctgcagggcaagatcggatttaacaatatcgcgtgctaccacaacaacacaacaggaggagagcactaggaactcttttcactcaaggacgaaggtcaccaacaaaacaataggtcaaagccttgctccgtccaggtgggcgtgtaacatgatcccctcctccttgggatataaaaggagaagggaactttcaaagaagggggcgatcacgatagcgcctgcttgtaactccacgaaacacttcacttccgacactagaggcccgagcctcgagctccccctcgaccaagctttgtattcccccttatacaaacattggtgcagggtacacaaataccc

SEQ ID NO: 177753 - DNA, 718 bp, Zea Mays
gaaaaagaaacagaaaagaaaaaaaagaaaatcactcacctgggcccaatcccccgttttcggcccacttgacaaatctcgcaactcggtccggcgctgtggggtggcgccgacagacagcccccatctgtcagccagactccgcgcgttcgcgcgcatggctaggtcttcctgtgtttttgtcgctggcattggggcccacgtcgactgcgcctccctcgcatccgtgccttaccagcggatcccgggagcagtgacccacacgatcttcacgactcagtcgggtgaggccgaccccacctgtcagctggagctcccccttcttccccgctaacagaacaccacgcagccataaccgccccatccgagatcctagccaacctaacaaccgggccgagatccgctcgacactatccggctgcatcctgccttctatatatcaaggccaacccctcctttcatcctccttttccccaacgacacagagcagcgagaaatcggctagtgagggaaagagaaggttccgccgcgtggtgtcgcatccgcgtcgtcggtgtggtcacgatagtaggccagggtgctccagcatgatttccggtgtgcgtgcatggcctcacttggtacgataggagcatgaggcgcagacaatcgctcccggtgcttcaccaccgtcacggatccgcggtgcgctgtgggcagactgcggctcgactgggac

SEQ ID NO: 177754 - DNA, 1036 bp, Zea Mays
atgattttccacaaaactagtggctataaaagaatgggatgctcctgaatcgaaaagtacagtagcaggagtaaattcaacaaggaactcaccgagcactactcccggagcttgttgagcctcctgagcattgacgtgatttactcgagcccttccttgatactaggtcttgttctgctggctgatggaggagggcgccttgggggcgggtgctgaggtattcttggggccattcaccgagttggagtaagcaagtcctgatgccttcaactgggggcagttgttcttgaagtgactggggtctccgcagtgccaacacgcattcgctggtggttggttgcttgcaaccgagggggcatgaaaggagctctgactctgctgactgaaccgtgacggagtgggtccagctggtctaatgaagcttggtctcttgggtggaaacccaaaggatcgagttctctagtgccggtcttgctgctgagctcggaggacttggaatttcctcttgaggtggcctttttcttcttcccttgacctttccacttgcatggctttgttggagaggtgcgagaagctgaggaagtcttggctggctaggatggtcttgagttctggtctgagccccttcaaaaagtgggccatcttcttgacttcggtgctgacgtcatccggcgcatagcaggccaactatatgaatttgtgcacatactcactgatagatcttccgtcttgagttagttcccagaattcattttccttgagctgaacgatcccttggggcacatggtgctctcagaaagcagtttcaaactctgcccaggtagcatctccgatggcagcgttgaaggtatcccaccaggctaaggccattccggaaagttgatgagcagccagttgaacacgctaattctccgggcatctgatggcttccagcttacttttaatcgtctacagccaatcatcagcatcgaggggattgctagatccagcgaatgtgggaggcttgagcctcaggaaatctcccatcctgtcttgt

SEQ ID NO: 177755 - DNA, 319 bp, Zea Mays
gcttcacacctctggactaactcggctacatcactctttgccgttggccagtagaaaccagacctgaagaccttcccaaccagtcctggatgctgcgtgtatcccgcattgtccagcgtggacctcatctagcagttgcttcccagtagccgaaagaatgcatttcatgaggactcatgtcgcgccccttctgtatagtgtttccccaatgacggtgtagtgagctgactaccttgcaatgcgctctgctgcatttttgtcatccggctcctcctcgttctttatgtatctgatgattggctccctccagtcatcagaa

SEQ ID NO: 177756 - DNA, 641 bp, Zea Mays
gcctaggcgtctttgtcattcgatggtgagctgggacgagtgtttttcttgggaggcgtcgtgggtgttgtcttcatcgcaggaacagtgggcgccaaatgttgggcactaacacacgtgggcgtgctgttaggtggacccaagcacttggaaagcaggtgagatctcaggtacgcgacaagacaaaatttggggaactgtagcatctcgttatgcgtgtcacaccccgctatatgacaggggtatttataggcttgtccaggggtaggtggtccaaagtacaatcctatccccgactaccacctatatcctagggacatcccatgtaactgagtaattaaagtgctactcgtacaacagacggtgcgcaccagataatgcactcgcactctacgttgaatggtgggcccttgtagatgtcttctggtggactggtggcgtatagggtcgacatgtagccttcgtccctagccttcgcatcatcgcttccttcgctgcacctggcggaatgaagtcgtttagtcaacgtaatggcgaaggcctcagtcattgtcaacctattgtggtcgtccgctagatcagagaccattcacttgtggatccctcgtcaacgtatgctgcttgagtcgagaaccccttcg

SEQ ID NO: 177757 - DNA, 695 bp, Zea Mays
ctttctctgttcttaatactgataatgttgttcttatggatgttgctcataaaattggagttgatttaggttcttcctttaatgatgttgtggaaaatttaaacttgattaaatccttagagctgtctaggaaaaatttagttgttcaatctgttaagattaatgttgataattccaaagtagattacattgcttctgatgtggataataatagtcataatgatagtgtggatgatgaattgtctgatcttgatgatgttatggtccttaggaaaggtcgcaaaattcgtcacagaaaaaaactgtgagaaagaaaaaaagactagtaaatctcccaataataggaacatccctattaagtggagaggtcagactgaagggcataccctgaattgttcagaatgattggtgtgatttggaattgtcagggtctgggtaaagaagtgaaaagtgaattcctctgggatattatcaggaaagagaaaattgactttattggtttacaagaaaccaacaagaaagactttgaagattcttggttgaacttcattagtggtaacaggaacttcgtttgggtctggtctccccctaatggtaggtcgggaggtttgctggtggggtttgattctgacatgtttgatgttagagagaaagagttgggtgaatttatgattcggactctggtgattcaaaaa

SEQ ID NO: 177758 - DNA, 619 bp, Zea Mays
ggcactaaatattgcacatatatagctaggtagtatacaagagtacttatcatattcaacaaaaagtgtgttaggatagcttgtcctgtgacacatggaatcatctatatttactagaaaccagtgcaatgggaaatttagttggaagtcgttctagaatcccatgtctacgtaacaaaattaattatatttggttcctatgactaattgtaatatgttatgtttaattcccctcaactcatcaaccaccatgtcatttatacaacatgttttattgaactaaaaacttggaatttagcaagtcctagtcaccatacacttcaacacgcacaaaaatttagaaaccttacatcatgaattgagcaagatgtctcaccttacacccgagtgagtagaagtggcaggcctcatcctggaggggaacatatcctatgcataatatcaccttcatacacatatgcacaaaatcaatttggacccttcgtgcaacaatcttcaagcatcatctctaatggactatatataggttgtccactttcaactagaattcattagggtaccagtttcatctcatactggccctagaaactcctttttacccaagaggagataaaaaaac

SEQ ID NO: 177759 - DNA, 312 bp, Zea Mays
gaaagcaataccagtaagggacaaggaaacaggcaaacacggaatgcctccgtatcgaccaactctccaagttgttctgagaactggcctatatgctcatatgtgcttttaccgcattcacaggaaaatttggagaagtccactatcctagtcacttgcgggtatgggatggggtgtcaaatcgatgatgatatggtttttgatatgacgaccttgagtcggacatactaatatgtagcatgtctcaaaataatctgtctatttcctctcaaatcttatccacgctggctagtggtataggaccggactcga

SEQ ID NO: 177760 - DNA, 640 bp, Zea Mays
ccgcacgttggtgccgactagtgggcacgactcgtctgtcttcgcgcgcgcctcaaccctttctcatttcacggggagagacagatggggccatgcagtcagttgcaatcttccaccttcaacagaacgcgcggagctcgcccgcgttggtcggatcagccgcgcaaaaaatcatgtcgcgaaccccggagcccatggcgtgacctcgtcagccggtacgccccaacgcagctgaccacaattacctcgccgtactctctgggaacccgtgttgtggaccggtcaactcaaccgtgatttccgctaaggccgcgaccataccgccattgtcgcgtgcccgagatcccggccgcacaccaaccacccgtcctcacctggccatataaccctggcatctcgacccccttttctccattcactgaggtgccaaacccaatcgccaaggagtgtgctgaggagagtgagaaaagcggggaggcagaggcagggaatcacggggtctcgtctccgttgccgtcgggcgctcgggtactagtcagggaccagcgcagggtggttgcgaattcgttcgtggcgctggccagtggaaacaacgggcggtgcgaacttaatcgctcgccggagttcagatcgggggctg

SEQ ID NO: 177761 - DNA, 546 bp, Zea Mays
caccccagtaagagggggcgatgatcaggacccccctagcccattcagacgggacaagggcaaggaggtctaccctgagcagcagggaggagaaaagaagagaaaattggacggagccattagagcagcagtagctgagagagcagagcagggaggacatatgagaattggtttagatcagatagtcttccatgttcgtcgcctctcatttcgggtatgctccactccaaccagattcgacccctctgctctagtcaccactaccactccaccctccactaccacgccagcttccgccactacagtgcctacctctccacttgctacacctatagcctccaccacacctgcttccaccgctcccgctacgtctatcactccaccagtacctcccacccattttagagagcatgacgagactgaggtttggcctcttgctgcagattcaagactgttcgaccttcacagagccactgcagccaaggtctgtcgcttcaggcacgtgcatgtggacacttggcttccagctcagtgtgatccagcggc

SEQ ID NO: 177762 - DNA, 299 bp, Zea Mays
ctcggccacaggaatctacggcggcgaccacgggttgagctcgggattctgctgtgcatacggtccgattcttacgccgaggtgggagaacgagctgcgcaaccgatcaaggcgggggtcgttgcggcgaactgcgagaatcgcggcgcccggttctgttgcgtttcgaatgaagacgatgctcctgacgccacgggcagagggagtaaacacacaggcgcggtcggttttcctggccagcaggcccacgttgtcagcggcccagaggacgagtccgtgcccgcggtgcgcatgaggag

SEQ ID NO: 177763 - DNA, 1114 bp, Zea Mays
gtgggtttagtgcgtttgtctgtgggtcgtccagtttgtaatgaggactgcattgtttggcagtttggcgtctgggtagtggatcccaattccttggctaccactgcatgtgtatccgtctgttttcagtttggttgtaaggtgtgtgttgttcctttctagaacaatgatgcatgttgtctatggaaggatggtccgaacctgtgttcgttttactgtcttcctattgtgacatttttttaagtagaggagccccttttggttaatgagtaccaactgcactattctctcttggaacataagggggttgaatgacccagctaaacgggaaaatgtgaagcaaccaatcctctcatcaggagcaaccatcgtttgtctctaggagacaaagataataaactggaataacaacttgctaagggaaactgtgggctgcaagctagcatcttagactgtccatttgccatctctcggatcctcgggtggaatcctaattgcctatgtgccgattattttgacataaatattatctcttatgcatcagcttgttcaatatctgttcaaatcagttcccgcttggaggacgcggagtgggacctcatatgagtatatggccctccacatgaaaatgagaaaatagctttcattgctaagctatggaatatccgtaatatgatgaactctgaaggatgattctaggtgacttcaatatgataaggagagcgagggagaaaaacaaagggtcaatcaatagaagagtaatgagatggctcaactccataattgactctctacagctgctagagcttgatctcaacggaaaaaaatcacctggataaatgaacaagatgatcctatgatgtctagaattgatagatttttagcgacaacggagtggcatgatctttccccgaggctgacctacaggccattggtaccatgacctcggaccactgccctttaatattgcagggtcattctacttttatctcttataggctttaataatgcagggtcattctacttttaactcctatagggggtttagattcgaagctttctggataaaaattgatgggttcaaagaggtggtttagcaagtttggacgtctag

SEQ ID NO: 177764 - DNA, 837 bp, Zea Mays
tctgccccgaggagaacgaggtaaacccaccacaaaatccatggtgatatgctcccatttccactccagaatttccaatggcttcagtaaacctgcaggctgcttatgctcggccttcacgcgctgacatacttcacaggcgaccacatacttagaaacgtcaaccttcatccgcttccaccagaagttttgcttcagatctcggtacatcttggtttcgccagggtgaacggtgtaaggcgttttatcagcttttctcaatatatccatcttcacctctgatttttgaggcacacaaaggcggcccctgaaacgaaccaaatcattctcatcgatggagaactcctggggtttaccatcaccaaccctctttcgagcttcctgcaataaacgatcctgctgctgagccacacgcactctctccatgagggtagattgaataagcatgcgagtctcctcactagcggtgccgacatagcacaaggtgatccctaaatgatccagatcagcaatcaactgcaaggccacttttggaaccccggacctgctaagggcatcagcgaccacatttgccttccctgggtgataatgaatagacaaatcataatctttaatcaattcgagccaccgacgctgcctcaaattcagctccttctgagtaaaaatatacttgagacttttatgatcggtgtaaatgtcacaagcctcgccataaagataatgcctccacgactttagagcaaaaaccaccgcagccaattcaagatcatgagttgggtaattcccctcatgcttcctcaactgccttgagccataaacaatcactctgccttcctg

SEQ ID NO: 177765 - DNA, 272 bp, Zea Mays
tgcacatgtggctatgtgcgatgtgtgtcaaagagttaaggttgaacaccagaggccagctggactactgcatccactgaagatacccgaatggaagtgagaagagattagtatggattttatcactggattgcctcgcacctcgaaaggatatgattctatatgggttattgtggatagactgaccaaagtggctcatttcattccagtcaagactacttataagggatctcaattggtagagttatatatggctcggattatgcctttac

SEQ ID NO: 177766 - DNA, 803 bp, Zea Mays
gcggctgcgggcagacagagctgagaaccggagaggtgaacgccaaagtgatcggccggagcggagaagtaccaacaggggggtcctgacaaaatcgatggcacaactggagcgtgaagcggaggaggtggggcagactgaaccggaggtactgagacaccagactgctgaagcataagagccatgaatgccctactctcagcccgatcctgaagtagctgctgctgaagcgcatcctgcctgtcctgcatgttctgaaacatcgagagcatcctctcggataaccgggcctgcttggctgccaggtgagcctgctgctgagagagagtctggagaatcgaagcaagagcagggtccatagcctgaggagtagcaggggcagcactagaactcccagcctcatgatcatgtgagcgtggaggcataggaggcggaggcggaggaggaaccccaaaatcatcatcatcagctgctggaacctgagtgtcgaactgacgaagagctgcatcctcggcctaagagtcaaaaacaggagcagaagctggcacaggaatctcaggcacaggacggtaggatccaaaaacgaggcgggaggcctcaagggtgccctgaaaccgaggaggctgaatcagctgcgcaaagatgtggcacaagtagtgagcatagggcaactgccgacgagcacagatcccatccaaaacggtgtcctcgatctcaaaaatcaggaagtccacaacgtcaaacttagagtgagagaccagggcaccaaggagccagagctgtatatgtgtggtagcctccct

SEQ ID NO: 177767 - DNA, 1407 bp, Zea Mays
cgagatagcagtagcattactgtgaagagaacaatctggaaaaaatcctcctagtccgtagtgcagaaaacatggtccaatttcacaagagtaggcacttccctctgatttgaccaagtgaatcttctgccaatcaaaggaatctcttttagctccaaagaattgacaaaccccctaaagatacccatcattgctctgattatgttggaattattcttatcttcctcttggagaatcatgttaaaatccccacataaaaaccatggccccacacactcatcacgaactgttctcaattcatggataaactcatgtttaaaaatatcctgatgaggtccatacacacctgtgaaccaccaggaagaaccagactcatcctgaaattggacagagacatagaaattcttcactaccgaagccacagagacaaaggacccgtcacgccaagcaattaacactcctcctctagtcccctatgtgggactagaaacaaaattgttgaaaccagaccaaagaatagacagaatgtcaaagtccgagatagaacacaatttggtctcctggagacaaacaatggaaggcttgatatcaaggaccagagttttaactgaatccctcttggtacgatcatttaggcccctcacattccaaataagaaaacaactattctccattggaaacaaatcagatcgcccccacctgaggaaccttccaaccaaacagagctaccaaagcagcaatatgtgcactcgaaagcccggaatcaaataattttgcataattgttggcatcttcgagagaaatattctccatgtcatcacaaaaacccagacgcctacacacttgcgcagccacattggaactcaactccggaggaaatttggccaccctcctacttctccttggtcgaaaatcacttagcatggcctttttccttcttttggtccttcggtggggaggggtggtaacaagccatcagaaggcttagtgaccacaaacttgaacgcatccaaaggtggaatcatttccaccacggattgtagaaaaaggtcttcttggacaatctgagcctgagataatcttcttctggaataaactttaaacacggtggcttagatttccatctatcagcactggaagactgacaagacccaagcctccgcaccctggaagagacaatagcagaagaaccattgaccaccaaatgagagaacccggaaccatgctgcccaacagtgacaacctcctccaagtcggtcacatggaccacctccaaaggaacgtccgagcaaggcctaaccgacaagagaacatcctgtgacgaacaatccacctgacaactgacccccaaatcctctgtgagatccaatgccaaaactgaagggtgaccaggcgcctccagctctg

SEQ ID NO: 177768 - DNA, 596 bp, Zea Mays
atggttctcaaccattgctcaacttgaattagttcacacacaagtcacctaaatagcacatttttggggtctatcgtggaggcatttacacatggcgtaaaactccataagactacatttgctactgacaccaacaatacctaccgacctattattcaccatacgaacgcagttacacaccgcctactagtttttaacataatcctcatatagctcgtaattcaaactactcactaacaataaatcacgcacgacaactaccacatcgaccggttaatttatttggacaccactcgtctagcgtaccactagtatcccgcattttgacttgacttataaacatagaggaagtgatacaacgaccaaacatttatgtcgagcacaattatttatgaccacatttatcgactagacaagtggaacattaaccgattattcgcacacctcgtctttaaacacaaatcacatgtctcataatttatatcttcgacccactctatcctacaccacaatgaatacataaaatatatttaacatagactaactcattagctgactatggaaattactaagtatgttttacactttatttaatt

SEQ ID NO: 177769 - DNA, 314 bp, Zea Mays
gaagtggtgaccgagttagtcccgcctgaaccaaagaaaggaagttgttatcagatggctgtcgatagcagtgaagcagacccaattgatattatcaaggttgcgtccgagttcccagatgtgtttccaaaggacttaccaggtatgccaccagagcgaaaagttgagtttgcaatagagcttcttcctggcaccgcccccatctttaagagagcttagagtatctagaccagagttggttgaacttaagaagcagattgatgagctatcagagaaaggttacatccagccaagcacctcgccttgggccgccc

SEQ ID NO: 177770 - DNA, 595 bp, Zea Mays
atttcaaatttcccccaaatcaaccggaacgccgccgtgagaaacctcgccgtggctagagaaatttcaaatttcccccaagtcggttcatacttctctggtttgtgttctagtattcttagggtctcctgtttcttgtaaacctgaccgattgaacgctacagcgctatgtcgatgggaacagctctaccgatcctcggtgttcgtcgtcattgtggatggggggattccgggtcagattggctcaattagtacatggactaggatcgtcttggatcggggatgatgatctgatactcggattctatggtcatcatagtttgaagcaagtcccagcaaggggtggtaggtggtcgagcgcaccgtcgtcgaggacctagagccatgaagaaacaaaagtacaggggcctttgtgcaactatcagtgagacatgtgaatagtacctggggctctttaatggttgttcaaatacctaggggcctcggtgcaaatccgtaacgcgggcacgggcatgggcgcgcgtgcgttttctctattcgcaggctgacttgggcaagatccggcccaacactattcatcatttctccttttctt

SEQ ID NO: 177771 - DNA, 1019 bp, Zea Mays
aggtaaaagggaagtattggctacttgggccgaagaaagccattttggcccacttatccctctgcgcagctcaacattccactccctccattcttgcttgagtcgctgtcacgtgggtccatcgtgtcatcttcaggttcctacgcgctgcgtgcccgcagagattgtgaggtgggtccgctcggttaggccccacacacgtgcgggacagaaacgattcgtgctctctcgctgataaatcagccatgcgacctgttccatccgtgtctcgcgtctcaaccttcactttcttgtgggcccggcaagtcagagctttcttccctagaagaatcgcgcgcgcctgtaatagcctaagcaaaattctgggcaccgttggggtagtgcttacctggtcgtggctataagctagctgccgcacccacgattcccttcatcaaagccactacttgtgcctcaacctgtttcacgacacagcccgtgaggaatactccaccgctgccaccactgcaaaccgcctcacccatccccgcgagggccccagttgtgattcatgtgcattcgtcggtgtgccagcattgcatgtgtggcttcggtggacaaggatgcgacccaaagactcaccaattgctcgccatcatgccagggctaccgccgaccgcacaatcaccgggagggaaccagcatcgctttgatccaaggtaaaagcacctccgcaaactttgttaagctctattacgcgcgtagcacctctcggatttgggtctgggcgcgtttggagcgatctggccgtgcgccgatgatgatcctccgcatctaaggcacggcgccgccatgcgcagtgttggattgggggaagaagtttggaccctcggatttggtgacaacgaccgcgattagatctatgataacgcttcggttagaatcagtgtgggttgtagatatctgatcatatggtctttgggctcaagtcgcccaagattcactttaaactgtcgatcgccgatccgacgtctcacgct

SEQ ID NO: 177772 - DNA, 336 bp, Zea Mays
cacgcgctcagggtgtgcgtgggcaagcgctagtgcgtgctctggcgcttaggcatggcgtcgagcacgaggcagcgcagagagaggtcaagttcaagcgcggattagctccaaatctttgtgattatggccatgatcccattgagagatctcttcccctgacattcctttgtcgtttgtgtgtggaggcttatgggttttgctgactggagccaaagatatggagtgatgaagtttggtttgtctcactgatgaactctaagaggaaatcccagatttgacatgtctaggttacgaatctcgatgccatcttcacacacgttgcagaggggttag

SEQ ID NO: 177773 - DNA, 794 bp, Zea Mays
ggggaggaagaggtcgaagatcatggcatgctcacctatggctcaaatcgacgatgagggcttgtcctctggtttgaagagtaaggcacgcgttgttcggatgtgagggtgacaatgagatggtgactggactgtgaggttccgtggcaagggcatcagtatttataggcggaggaacgacaatttataatggagggagtctcgaccggcgtactgtgattggcgacgttgccacagtgcaatcgcaacatcccgaggttggcagggtaacttggctcatggtgggtcattcatttagttgtgattgtgacaagtgactggcgtgtgctcaggcgggtgcatgaggtcttgttggagtgactttctgcactgaggtatcacttcaaggtctgcaacccgaccctttaatatagcagtttggcatgcatgacaaggctgtctcagggcagagggtgtaggtggggcttgctaggacgcacaaatgccaaggcatgtagaggtaggcttacgatttatttacgcatgtgttttgccacaagtggttgtgggctccctctgtctattgtgggcgggcattagacattttcaagaatttacctcgatgaaagacaagcttagcctataatttagaaggatatcaaggaataacccatagaggcactggtttgcatagctatcaataattctgaacaagttttattccatagttgaaaattgggatgttacaaacctaccccacttaggtcgaatctcgccctcgagattcagcttggtctaagaaaaggttaggaaat

SEQ ID NO: 177774 - DNA, 512 bp, Zea Mays
ccggaccgacataataaacgtgctagaccaagtgcacaacgcccctatggacacggccagatcagcgaaagcacacagcctcatcatacaaattatagttacatacgtacagcgaaggcatcacaccttacattggttcaaccttcgggatgatacccatctccctatagttaaacagcattatcctcagctcctcaccctcaaaaagacttcacaactccccctcacctacactcgccccaaccggtgaggacaacaattcccgcttgccagccctgcccacacgaagccgaccaccatccacctcactcactctacgcttcgccaccgcccttcgccacctacgcccagcactcggaccaggaaaaacttcagcatccgtaacacgcggagtagcctacgctgcagccacatccaaggccgcaaagtaatccaagtcctcatccgaagactcctccaaccacacaaccaaactcccagaatcatcaaactcaggaaacttagacacagac

SEQ ID NO: 177775 - DNA, 1041 bp, Zea Mays
gctataggtacaaggaatcaaagaatggcttaccgtggagctcggtctatgtgcgacggcggccatttgatgtctggcgacgtcgatccggcgtctccggtgaggtattgttcaatcctcagctcgggaagcttcactcggtccgtagaagctaacccaagggtcggacggggcggaggatggctggtttagccggtctacggtggtcgtggcttgcgcggccgctggcacgggattctctgggcaaacgccggcgatctcgtgctcgggctgggtcagggacgcgcgggggtgtacggtcgaggccatggtcggctttatagccacaggcgtggacatgggcgcggggttggcacggcgcggggctgcgcgcgcgggctgagcgccgagcgcgtgctctggcgttgccagggcgcgtcgaacacgtggtcgtgttcatctgcccaagttcttgcgcctacagaggtcacaactgtgcgaaactcgccaaaggtcttctgaaagatttcttcctggcacctagggctagctagtttgtgtaagttccaatggaagatctgtcgtagtttacaagatatgtgggcgccaagtcttgtctatctgcactgttcaccagcgataaaaatgatgccaaaccatgtcaaatggcactggtttggtttcaaacttttcaggggtgtgccttgggtaatttggccactttttgttatttggtccaagtgattttggcgccaacacaaaggtgaacacatctgatctttaggctagggttggttttgagacttagagaaatttttgatggctctattgtgctctccacttggttaactgatttggggtttttgttgggcctttttgtaatatcttccttaatacatttggtagattttctaatatacttcatctttggtaaaggtttcctttcatgatttggtcatttgcccactctttcccctttaatcccatgtttagggtttaatggcttaagaggggaattagggttttggaatctttttcatgagtgagaatgtatgaaggcta

SEQ ID NO: 177776 - DNA, 806 bp, Zea Mays
caaatagttccaagactcaggattggaccgcgggttgattactatatagagcaggggcgctttagcaaatgtgttggccgaaggggtatcggccgagcacggccatccgatcaagcgcggacggccgagattaggtcgatccagactaaccctcgcccacacatgacaccgtcggatcctatatctacggcttggatccaaaataatcgagatcgaatcttatccatcggattacagatcaacggtccgggttctcttaactgaaggggtaagctaccttctaatcctggccgctggcttctaatcgcacgactagacacccttcttctacgtagcgtccattactctctccctcttcgcaagccagcacagggcgacgcatacccaacgacgagcaacctcgggctccctctcacgggcacgctggttcccagtgtgaaggcgccatggccggaccatggccaattgacaatctgtcgacccaaccagagggaatctacaccgagaagaaagggggaagaaggcggacatggatgggcgacgcataccgggatttgtcgggtgaaggcgccctgctccggcgacgtgcggacccgcgatgctgctaagcgacgatggaggatttcttctccccgcacagcaccgcacccagtagtgccccgcgtgcaaatccccaccctctctgtttcccccctctcgctttctcaactctctgcttctctctactagggccggtgtatgcgaccagagaacctccaggcggctagggtattggatgcttcgggctcgcctgccggctgcgcgat

SEQ ID NO: 177777 - DNA, 599 bp, Zea Mays
gaactattttgctgaaagggtccacaggttcagttcaagacaaagcagcatttacaagtcacaccacctgaacagatggggaatgatggaacttctctggaaagacaactttagaggccatcgtatgatggaacttctccggaaagcaagcaaaatgcggacgaaaaagattttattgtaacatttgataattttttattccattttaatttatatttatatcgcttcactaatatatcaaacttggataagcagcaaaaaaaataagatgttttcgaattggtctaaaaactgccttttcaaagtagtagcagaaagtgttcaggaaacacctttttccaaaagtcaggttagaggccaacattgagatatacctctcatcaattcaaactatcggtgtgctctcagttcctcttacattcaggaacagacatagggtgtatttggttcagttttttgaaccaaattcgctgccaaaattccggaatttcaaccaaatgagtagaataaattcatgaaaatctatagagtcctctagttcaattcagaatcaccttctatctcagatttttatcattcatattagttattttgaccaa

SEQ ID NO: 177778 - DNA, 598 bp, Zea Mays
caaagaaagagaccaccctagaaggactcgccctcgagatcgagggtcggatgaggtggagccagaagggaggtcaaccgaactgagaggaagccagccgagtggattctgcacctggctcatgcaccgcaccccgtcatcaatgactgtctgcattaaatgcgcctgacactgagccgcggtgaagagtcgatcttacactcatggcctgtgagcccagaccaaagccccgctcatgacttatgagtcagacttgcggctcattcatagcctaacgagcacaggcctgagtcctctaacgacctacgaaacccgcaacatgacgaggaatgccaaggcttcggctatgaaggccaaggatcgacgcgacgcaggaggagtaatgatgacacttgggtcccccgccacccatacgcgtcatcctgatcgatgcaaaggagcacaaccaaagagctcaggcgacaggtttctacgagcgtaggacgcctcgtttcaccacgacacagtaattccacgagaagccacttgtaaccggtccctccttagtctataaaagggaagggttgactcatcccagggacagacagacagagagcaa

SEQ ID NO: 177779 - DNA, 499 bp, Zea Mays
gacgacaagggcgatgacttccccgacgtacacaatttctacatgattcttgggggtgacgtcgtcaaccattcttcaaaacagcgaaagcaggagaactgggaggtttttcagttgaggtagtgatcccaatctatctaggttggtcggaccgtgccatcaccttcgaccgagatgaccacccagactacatcccgaaccccgagagttactcgttcgtcgtcgaccccatcatcagcaacacacgcctcatcaaggtactcatggatggaggcgacaacctcaatatcatctatgcggaaaccttggagctcatgggggtcgggcgatcctagattcggtcaggggccacaccatttcataggatcacccctggcaagagggtgcaccccctcgggcagatcgaccagcctgtctgctttgggactcccgctaattttcaaaaggaggtcctcacgtttgaggtggtggggttctgaggcacctaccacgacgtgtt

SEQ ID NO: 177780 - DNA, 443 bp, Zea Mays
gaatcagactaataccgagctatgtagggtcgagtcaaggtacacccctaattctagggtactagtacaattctactagtcgagtcctttaaaatagtgctgccaaacctaggagcctcagctctgattgctcgttctccttttcccgattcagaattcgcaagcaggatcgatcaaccctatcgagttcccttgccaagttcgcgtcccaaagcaagagccgtcgcatcacaatcccgaatcgagaaactgtgcggccatccgtcaaccggcagcaggttcgcattgcaagcggatcgcgacgttgccagcctttcgccttcacggcgctgtgctcgcatctcactcaccacgaataaatggcgccattcaagcggctgtacgacggccgagtcaaggcccggggccggcgggcgggcagctgcctccaccttcacccgtcg

SEQ ID NO: 177781 - DNA, 486 bp, Zea Mays
agcttgccatatagtccgtacccggaggggcactcttctgacgaccgaggaaagcaggtgaagacccagcctgaggagggcacatcgaaggagaaggttgtggttgcagctactcaaaagaggaaaatagattcgcaaggtacgtgggatgaaaagatggggccaaaggcttctaggctttttgttgaggagttaacagggacgtgtgtgggtcctggggaggtgatgtcttcgcctgagctccaggaaacatcttcgcgcatgttgaaggttaccaggggtcgatggcataggaaggaccctataccccgggccaccgacgatgactattttacgtcccgtttgttttgtgaactgaaaatctttccttacgagagaaatattggtgttgttgtgtcagcagtgatagagaaagatcgacaagatatccagcgaaagaagcagaaagccccgcttcagctggtggacccgcgccgcgatgccaag

SEQ ID NO: 177782 - DNA, 349 bp, Zea Mays
cttgtgaccagtgttatttccaccatttttgtgaaactaaaacattttttcgcatgcaagcataaactctttccactattttttgtgaagtgttatctgtcgctgcctctatattcttcttgcaatgctactactggcctttttattgttcagctagctataatcactcatgggaatgaaaagtgatggaggagttactacaaccagatttggtcagacacatctggcaaaagtttgggcatcaaagtaattaggcactaactaatagattgtgtttcatcttgctgaatgtttctgtgttcagttcttgcaatgcttcattatttaaaatttatgtttcctgtgttca

SEQ ID NO: 177783 - DNA, 1162 bp, Zea Mays
tagctgctgtagtgtctgctatcatatgtatgttcgtatttctgctgtcgtatccttccattcacttgcctttctaccgttgcctcgtgttcatccaccaattccgttgacggcgtccgcttgtcctttggcagggtactagatgcatgtttcctagactcatccaagctccatgacacatatatatcatcaggatgtcttatagtgtgtcatagtaccggtgatctgatgatctacgatgtcgacactgacgatcacaatgtcacttatcgccaccatattagaacagagctagaacttgataggtgataataggttgtgccgagtaggaagtaactgccatgctttctagtttttttactttagatgataattataaaaacaaacgaggttgcctaaggttagcctaaggagattgaagaacacaagaacacacaagggtttagagtggttcaggccgccgaagcttaataccctacgtccacttgcgagttgtattgctagggatgtctaagagattgagtttgtatcatatgtgccatcccttttacagtcttatggaggcatgtaatgggtcccacaagtggccccagcaatctagtattaaacaatgctcaacatggagcattggagcattaagcgctatggcaaaaggagatcttagcccttggcctttgagtggatcttctaacgaacatgctttcatctagtttgtcagcgcgagctgctacagagtggtgtctgttactgatgtgcgcaggggttgacgggttggctatgctgacgtgcgcaggagttatgataatagacccgagctgtcgtctctggtcagagttgtagagggtgctttgcccaagccagtggcagttcatgatggccaccgcccacacgcatgtcgttgagacacaactgtctaccttggtaacacatgacttactatgtgacacgtgtgcgaggagctgacacacaatcacccgcctcggtaatgtaacacccctggtgttacgagaactaaaactttggcatgacatcatatgcattgacatttcattatgtatgatacacctaggatgcatccactaggctaaaatttcaaaacaaacatgtgtgatgatctgacttggtcaaagaggcccttgatcctaggatagagtatttcccc

SEQ ID NO: 177784 - DNA, 417 bp, Zea Mays
ccttgacggagacgacaatgacggtggcagttcgagccatagcacagtgctctcggaggagcaggagccggaaggatggatcgctcggcccaacactcatgacatcgctcgcggttgtcattttcacgacgctctcaactagcagtaccgaaggtgtgattgtcaccagttggtgaaggaattcctagattgagtagcatggtcaacctggtcgctgtgctcaacaccgagctggaccacaccattgacaagttgggcaaggctcggacagagattgtggaactgcttgctgagcaagaggagcgccgccaacaggaggatggttcccccgctgctgtcgtgatttaacacccttactgctcgccgccgcgtgttcatcatgcttatggcacccctgactgcaggacccagatagac

SEQ ID NO: 177785 - DNA, 701 bp, Zea Mays
actccattatacaactcaacttttcttacttattttacataagtacaatacttagactatactactctagtcttcttcatccttcgttgctccattgtctgctgtaggagatcgttcgtcagcaaggttcatggaagaagggggcctaaaaaggtccagctccccatcaggtccttcattagctattcccgatggtccggctcccattgcagcaacgtctggtggcacgtctgggtgcagccgatcataaaatacatgcacttcttcgtgcaaagtgttgtagtatgcctgcaggttttcgaaggatgtgctaagttttgccacgcgagctagagcttttgcttcacagccccaagcgaaagagcgcgagttaacggcccaatcaatggttgtatcgcattccgaaagtttgtactgcagacgactcactttggctgacagctccgcaatacggtggctatcccactcacgtgccctattcctgtggcgtagttctgaccggagttgctccaccctggcttccaggtctccaattgggtcattactgccactactacttccttcatgcctggaggctagctgatgtcgtggcacaccatgaggtccagtcgatttgcggtgggtagtcttagtgcgcgccatatctccataagaggggaagatttattagtatagttttaaacatgatgcatgcataatct

SEQ ID NO: 177786 - DNA, 719 bp, Zea Mays
ctgtccacgacgcctggcggtgcacggtggaacacacaatgccagtgaggaattcgctgccccatggtaacccccgacggatttctttcgccaggcgcagaggcattgaattgaacgagataaatgcacttgattcggtaccttgagccaacccacgccgactagcccacggactgggagatatggcgctcacgtcgagtagcaagggtgctccccagtgagcttcaacggcgatcttccccgaaagttctggagcttggccgccagggatgatgccgagcggctcttgaatcaggcggcgtcgaggtaggggctgtggtcggacttgggcagcggcgcccagagatggtggccaaggacccgcgcaccaggaagatctcggtgtagaggatggtgaccggccaaagttggagcacgagcgttcggatttggagcctgctggtgtcctcacgacgaccaaaggtgagcctgcgcggaggggaagctgaagaggagcagggcccatggtggctgggaggaggccggtccgacggcttgggagatggagaccgagcggtcgaccaccaggcggattgcacgaggaagaggagaaggctgggtgggcgaaggagagagcaggggagtgctcccacttatcctccgtgggctcggctcgggctggaaggcggtcgtccacgattcacggcaacggcggcgagcatctcgcgcgaggtgggtga

SEQ ID NO: 177787 - DNA, 515 bp, Zea Mays
cgcatgaatagcacaattttattactcattttctgcattcataggtgacctgttggaagcaacctaaggccagcaaattatgcatatggctgtgtaaaatatatttttgcactgtagagtgcatagaaaattaaaacaacctcctctgtagatgaagactacctacgcggaatatgcatacacaaactcgtgagcttttgtgtaactcaaagaaagtgaaataaaagtgtaaacccaatgagcatagacgtccaaccaataataccacagccttgaaatgttacatgcactttcccccttacacacaactcacaagcatcatcatacccgtatgatcctcacaaacatttgttggatccaatccagaatatatgttcatcccaccctccactgttcaatccggatcagtttccacttggatgcttgtgtgctctcgtttgtagaatgcagttcctccattttgtggggatcatttgtgatctctgaactggagtgaaaacagtcgtcccttccaa

SEQ ID NO: 177788 - DNA, 745 bp, Zea Mays
acgttctccaaaacaatctatcttgcacccgcgcgtgcattttctagctccattacgcaggtaaccaaacggacgcacttgctcagtcatggtctggacacgtacatctgggcaaccaaacacacggatgctgaaccgtgcagtgtaggctgcctgtacgtatatatgatgcatttgtatatatcacgtactccgtacaggacaggcgtattgcaccatacgtacacgtacgtatggccgatggttccgttgaccgagatgcatgcattggttgtttaatttggaacattattggagtttgaactttgaagaggcgccgtgtcagtggctgtctcctcatcaacgcaatgctcgcagaataggcagaaagatgcacagtaaacctactactacctgagtacctgctacctctaaagtttgttcaggttttccgttttattcctgcgggctgcggtttgtgagtgccgagcatgcatgtatgtgcactcatcaagttgccgtatatatgttggagctgaaaaacaactccttgcttgttgatcgagctggtatgcgtcaaatagctgtagttttaaatagattaattaatggtactagaaaaaaacatatgtttggaaggatttataagttgtgttttgagaaataatacacgtatgtatacctatgcgtgactaccatatgccaaagttccatctttcgttacattaacagccatttttttagactttgattttttacttccgtt

SEQ ID NO: 177789 - DNA, 720 bp, Zea Mays
gtaaaacaagagctaggaaggcgtgatcggacctgtgaagggctgaccgcggcgagctcacacacgtggcgttcttgaccgatttggggtaaatctcaaattgaagcgctctggtggacgatctgaggcacaggctggtgtattgggtgcatgactacctagcggagccgatggcacactcaatttataggacccgagggcggtggctcttgaatttggcgtggcgcggtggtggccggagggagggactgagtcactggcacggtgaccgtggctgttaccgtggcaaggccttaggcaatagaagggctgtgtattgtgatcaattgcgacgtggtaagatggctaacagcgtggcataaccgcgaggaacgacgacactacggtgatggtcgcacggccacgtcgccggcaagtggatgagcgacagagcggctactgtgctccaagttcatcgacggcatgatcttttcacccggggaacgttatctgcgtttaactgggcgtgaatcgcggcgccggcgtgattccgagcgcaagatcaccggcggcgaggggggggatgaacctgagatatttcaacagacactgtaccatcaggatcttattcagtttgtctgaccgagcgttttgtaagacctggatctctgatttctatataacaacttgttaatccacctgtaacaaatttgttgtcctataatccagctacaatttgac

SEQ ID NO: 177790 - DNA, 727 bp, Zea Mays
tccacgcctgacaaaggactgatataccgtaagtgtttgatgacattaactacacctggcacgagcaacagagggagagttggtccaccttccactcattagctacgggtccctaggcctatggcccattcatgacctatcgagcctaggcatgggtgcactgactgcctacaggacccacaacacgacaggccacgtcgagacccaggctatggaggctaggggtcggcatagcacatgaattgtatatgatgatgcttgagctctttgtcgcctatgccgccagccataaagagcgcgaccagggaaaccaagatgacctaggcacatgtggacaaacacgactttaccaaggtagaacgcctcattttaacacaacaccgtatttccttctgtgagaagctaccgatagccgaccccaccctggcctataaaagggggaggtcggccgacgcatagggagaaatagacagatatacgaccacccaaaagaccaggagaaccacgaaggtcgaagccaaagagtgaaccaccacgacgctcaaggcttagtagagagcaccagacccatagtccttaggtctagccaatcataagagacttgggagctcctccctctctcgcccacttgtaacccctactatgaatattgagcaacaaggtgccaatagagcgagccatcaaagactagatgtagggcgttctgcctgaactagtataaatcttg

SEQ ID NO: 177791 - DNA, 389 bp, Zea Mays
cccctgcatagcctgagcttcgcctttgcacccgtcaccaaatagcgaacatgaagagcattcactccgatctttgccccctctcttctcccaccagatgccgcataatttaactgagcgagttcatcgacattcaaacggtgtccgaccccctccctccaactaatgtcgcgcacctataaatatcgaccctagcacaccatgctcactcccattcgagcttcaagacactagaaccctctcctcgtgccactagtgccgccgccaccgttcaagagcatcgaaggtcacgttctgtcctcaccggagcaccccccgaccttcccgccaatgtttgttaaatactataaactatagataatcataaataaacccctagcatctttaaa

SEQ ID NO: 177792 - DNA, 536 bp, Zea Mays
cttcaattctttctcattgcggactggttaatgtaaccattcttttggcacaggatattactccatcatacttggtcaagtagtctattccaagtatcacatcgattccactcgattccaaaattatcagctctactagaaagcttaggcctctaatttcaatcttagtatgagggcatgagtgagtggctctaagttcacctcccggtgatcgaattaatagtttcttcttcaagggatagtttggtatattatgtttttccacaaatgactttgttaagaaggagtgagatgctccagaatcaaataaaactgatgcaggtatggagttaataagaaacatatcatacaccacgtcggcatccttaggaactgattccgttgtcacgtgattaactcttcccctactctggttctgcagagtcttgttttgtgcagatccacgagcaggtgtgttctggtcagtcctctggttgctgttcttctggggtgtctgttgattacgccttgggcagttgttagcatagtggccaagt

SEQ ID NO: 177793 - DNA, 508 bp, Zea Mays
tccacccaggaatttaggtgggtgcagtgggagaaaaggtcgtcatagtggttgtcaagggtgtggagatatccggccatgtagactatggtggggtcatcctcattaggatctcttcctgacaaggcctgaagtcttttcctccaggtaggagtatttttgttgctgggtggaaagtagcggaggggtgtctcagagacttccctgctgtagttttggcatagctggcgtagtgctctttgggcagcattttggcaagtgtctggaaagcggtgtccagtggcagtgacttggaagggagggtgatttgggtagtttcggatttctcccaggtagactgccatagagcatttctcaattccgttctcgtggtattccttctagacatactccggcttcttgcggatccccatgcgaagcgcgcaactctgaagaagatgagggaatccttccacctccgagcagtaggatgtcctaatcacaaaggatccttccatctggtagcaag

SEQ ID NO: 177794 - DNA, 301 bp, Zea Mays
ccacatcgtagtagacttgctccaaaaacagtagtggggttgatgtgtatgcaagcttgggcccgagctgacatgttaggcaaccaatcctgttttataaatgcactaatgacttgtttggaggatgaagacatgtatcattgactagaaaaattcaaacacagctactataacgttagctcaagtgctcaacactacactcagatcggatcagaatcacaaggcaaaaggcttaaggttaaaagtagacatgtatttgttgtcatgtatttgttttcatgttgagacatgtagacatgta

SEQ ID NO: 177795 - DNA, 661 bp, Zea Mays
attatgttttgtatcgtgtatatttgtagttttgccatattgaaatcggcccggggcgctattaaatcctagatcggccatagggcttcttacgccgttgttgatgctaaggcgatgctctatggccagtggctaggcgaggcctgttgcatcttgctcgtgtaagcaagctgtttgatgtaatacctcaacgcatcttcctatttgaactgcattcagtttcttgcgtacctgatgccagagttcatcaagggaactttgatgatcttatcttgcttgctagtttcatagcacaaatggattttcaggctttagattcctgccagtttacatgctcaaattattgtactaaaggctgtagccattttgctgtgctcttgtattagcacaattatccttaaaagattgttttctctcctcccccctcaatcctgcattgttttggtaacatggtgctactccgttcacaggtcagactagctaacatcagaatgcctcctcctgacctcctccatctcatccaccttcagctgctctatttctgcattgttgacgtgagagttggtcgacagactctgatgcatttgccttgctatcattatagttgtaggtatgcaatgcagacctgtggcgggtcacatataaagaagcaatgttttcc

SEQ ID NO: 177796 - DNA, 594 bp, Zea Mays
gcagagcggtgagtagcaaggaacgagcgatagctcgggcacagtggtgacaaacggcgacgtcgacatggcttcacgaataatgcttcggtaagggaaattcacgaacaacagggcctcatggcgaggagtctccgacgagtagcacgtgcagcaaagagcaaaattgacgaattagagacactgcggcgaacctggaatagggcgagctaggtgtaggggtagatctcctcgcgacgacgacgacatacgcagcaaggtgcgagtagcagcttcagccagtgaggaacgggtcgacagcaccgaggtgacgctgggaagaagaacggtggtgtcgaggaccggctaactttgacggcgcaacacatgagcatgagcgcggcgtcgacaaacgacacactccgatgatcagggactgacgacgtccgcggcgagcagtaagcagggcgaggctgtgccagcaagttcatggccgatgaaagggacttggctacgacgacatgggagcagctggcagtggagaactccgagaagaccaaatcaagcactgcgcagaggagtgtggcggtggaggtgagacgagtagctgggaca

SEQ ID NO: 177797 - DNA, 515 bp, Zea Mays
  misc_feature (481)..(515): n is a, c, g, or t
cgctcgaattggtcccgcgggggttgttgaaatgcgaccgttgatgggatgtgttattgtgggactgttggtttcccgaggcgtcgcttcgcgcctataaaaagccgggctcaaccgaggctttttacctgctcgagcttgcactggaaaaccctagttttggatctgctcgcctgccctctttgctccttctctgccattgatctagctcgtatcaagcaaacctcgcgccgctgccgatggtacatgacaatgacatcctcttcttcgtccgctgcgagcgcgtcgtcggacacgtcattgtctgagaagacgttgagcgattcgacagtggtagaactgcagcccagccacaccgtcgagttcgggacctcgaggatatttttgtgccgcgtgctggagatgaagcgactaggttattttgggaatggcatcgggtgggctccgggacgaattcaagcaaaattattaataaaagacnnnnnnnnnnnnnnnnnnnnnnnnnnnnnnnnnnn

SEQ ID NO: 177798 - DNA, 355 bp, Zea Mays
atgtctagccattctttgcaaggcttcttgaattgtttttcaaacttaaaacggtaagcaagtcgaacaagttcatgcttcttccccacttctttcctcttcggcattccccaggcacttgacgtcggatatgttctgtttgccaagtattcttgcaccaagtctctagtactgatctactcggctaccactctaaattctacttcagccaactgacagggagaccccagttgcatattacataagggcctagtcattccgaagctcaaagacagtggactcataaccatggtcataagcttctccctctttttctcatcagccttcatatagaacaactcactcttccaactag

SEQ ID NO: 177799 - DNA, 893 bp, Zea Mays
cgggttgactggtgctccggctacctttcaacgggcaatgaatactactttgtcaccgttgcttcgtcgttgtgtgctggttttcttcgacgacatcttgatatacagtgccagctttgaggagcatttgcagcatgtgcgccaagtcttggagctattggttcgggacaaatggcaagttaagtggtcgaagtgttcgtttgctcaatcacagttgacatatctgggtcatgttatttctgcggctggtgtggctacagatcctgcgaaaattgaagttgtggctcagtgggttactcctaagaatgtgaaggaactgcgaagttttttaggcctggccggttattacagacgattcgttcgacattttggactgttagccaagcctttgacgaccttacttaagaaaggaaatttgtttatctggacaccatctcatgaagcatcatttgtggctctcaaggaggctttgatttcagcgcctgtgttggcacttccgaatttttcattgcctttctcgttggaaactgatgccagtcagttgggtgtgggggcagttttgatgcaagctggacatcctattgcatatcttagcaaggcattgggacccagatcgcagggactttctacctatgaaaaggagttcttggctcttttgattgcagtagatcattggcgccactacttgcaactcaaagaatttcacatacatacggatcaccgtagtttggcacaattggatgagcaatgtttgcacactccttggcaaaagaagatgttcacacgtctgttgggtttgaagtaccgcatcatatataaaaaaggagtggacaacgacgctgcagacgccttgtctcgtcacccaagtctgtcttcatcatgtttagcaattt

SEQ ID NO: 177800 - DNA, 941 bp, Zea Mays
ctggagtcgaaaaaaatacaaatttctcctcaggcgctgaagacagtctctcagactgtctttgtcaccacccagaaaaacctgtggccttggttcctctcatgacttccacatatcaaagcagcagctgctagctagctagcaatctactagcgtccagcagcaccatccaactggctcatccgcaagcgaacccgatggatccaatcacaaggccggcagctccatcgttccatcggccagcagtcgcgaccgcgaagcatctccatcaggccgccgccaccttggctcggaggaatggagtcagcaggaggtgccttctgacgctgctgatgtccactgcggccatacctggcggcagcgaatcgaggaaggctctactgcaaggtgagcgggaaactgatcagacctttcctgggcttgaggaattggtattcgtggttcctttgcatgtaaactaatgcgggtccgcgtgcgcacagagtatctgaagaaatcgaaggagaacaaggaaaagaacgacaaggaggtaactggagactcttttcccgtggtttaatagtgccctatcgttgccagtcgattgaggggtaagaatgggtggagtgaactaaccatcccacaaacatggacacttttaagagaggcttgattacgtatttaagcgaacgatatacattgaaggactgaaaacacggcactgatcatgttgatatgctcatgttccagaggctggatgactacaacaagaggaactacagggactacttcgggctcatcgagggccaggtcagagagaagacggaagaggagcgcacggagtcggagaaacggatcctcgagtggctcgacaagaacaggtagtctaatgagcaggatcgaatggtcgatcatggagggccggccggtcgcacggggtgaaaattctcgcaggattcttc

SEQ ID NO: 177801 - DNA, 423 bp, Zea Mays
gtgtggctaggagacgttgcatgggtgcggcgtcttcatgctgtagaagagggtacccctgatttagggtaccgacagtggcccccgggcctgcctcaggggaggatgcaagcctgcaggtgggaccagagtctggttggcggttggacagctgctcccacgcgcccgttgcagcaattactgccggcttgcctatggccttgccaactgttgcgcctattcccatggctgactggcccgtgaccatcgtacttaatgcactgttgggccatgcgcggggctgcctcgagtcgctgcactggttctgaaaaatttaccttttcagactcccgtgacggccccaagaagacgtggcattggcgcaagcggcggtgcggattttttgcacacggtaaccggcgcgccggttgtatgacatgtggg

SEQ ID NO: 177802 - DNA, 366 bp, Zea Mays
cttgcaaccatagttcataacaaagaaaagcaaggtgataaaaatcatggaagcatacaaaactccaaacatcttcttcaagtcgctcaagttgttattcatcttcttcagttctgcagtaaacatgtcccagttcgccgccactcgttcgtccccaaaattagacgccatcatctcccccaggccgctagtaaaccctgtcccttcgaccatcttaatgtaatcatccatccacatgaaaaatttgcattttcctgaacctagaccacaaaaataaacataattgagcagtaatatagtagtaaccatcaaaataagtagtaatcagcaaaacaaagacaaaccttccctgggcgtggcttgctt

SEQ ID NO: 177803 - DNA, 712 bp, Zea Mays
ggggagcatgagccataaacgcgctgcagtcccgaggggttcgtaggctagctatgagtgcgttgtagcccgaggggctcgtaggtcatagtgggaggcggaccaatgcccctgctatggcacaatgctaggtgtagttaatgtgaccggtcactcatgacgggtcggtctcgagacgagcgaaggatccactcgattagttttccttcggcgcacttagccccctgtttagttccgccacgttcgaccttggtcttggtggtgtggggctcgtccggggcaagttcttccaggaccgacattacctttctcctcctgctaaccgatgggcctcggtcactagaggctttctctagcgcgctcactgaccgatgggccctagggaccggagatcttatccccgacgcatgggtacaatcatgcttttggagaagttgatgtgaggtatgttgcctcgttgaagaggtcaacattagattttaggcatatggcatcggtgaggtctccacggaggatggccaacgtgtcattggcatattgaaggaccaagtaggagttgtttagcaaggcggggtggttggtgccaaaccgcaacacgcaataaccattcaagcacccagagttaataatggttgacaacaacaacaaccattcaaatagttcactcatatgacaacaagttaagtgtgctgccaaacacgttgacataaag

SEQ ID NO: 177804 - DNA, 605 bp, Zea Mays
gccattgttgatagagtagctagccttctgccaggatggaaagctaaacttatgaccagggctggtagagctattcatgtgcagtttgtcatgacgacaaagatgatttatgcagctttggcacttgaccttcctgtttgggccatcaaagcaatcgataagctaaggaagggcttcctctggaggggcaggaaagagttccgtggtggtcattgcctcttggcttggcctaaggttacccgtcccaaggagatgggtggtcttgggattagtgagttaaagagcctctgttgggctctgagagctcgttggccatggctgcagaaaacaaatcccagtaggccttggacggatttccccactcatgtatgtaaggtggtaaaaaatcggattgctgcagccattattactaagcttagtgatggagccaatacccttttctggaaggacagatggttggatgggagatgtattaaggacatagctcctgcaatgtttgatttggtgcccctgcgtcttgccaacagacggttggtcaaagatgctctccctaatttccagtggatctccgatgtgaatggggcaatttcagtcagagtcattgc

SEQ ID NO: 177805 - DNA, 315 bp, Zea Mays
cgtttctctatgccatcagacgacgcttcaattggtaattcaatccgtggttaattcgtctctaatcctcctcttgttctctcctatattagtgtcagcagctcctccacctaaccgaatgtagcggtagccaccatttccctgctctttcctcccactaaccaaatccatatgttcctgcttcctccataaatgccgacagtttctctcgccattgtttgttacaacgtcttcaccggcgacctctctgtttctcttccccacgacgtccgggctcccttcgtctcactataaaaggcatgccctcgacctcgc

SEQ ID NO: 177806 - DNA, 500 bp, Zea Mays
taattaccacatcatcaacataagcttctacctgcttgccccagtgatcggctaagcatgtttgaatagctctctggtaagtcgctccagcgttcttgaggccaaatgacatggaggtatagcagaaagctccaaacggggtaatgaatgcagttttttcctcgtcttcttttgccaggctgatttgatggtatctagagtagcagtccaggaatgacaacatagaacatccggcgatcgaatctaccacctaatctattctaggtagtccgaagggatccttcggacagtgtttgttgagatctgtatagtcgacgcacatgcgcctatccactttattctttttgagtacaagaacaggatttgctaaccactcaggatgcatcacttctctaatgaatcctgctacgactaatcgagctagctcggcatgaatagcttctctcttgtcgggcgtgaaacgacacaacttttgccggatcggcctcgcctggggatag

SEQ ID NO: 177807 - DNA, 546 bp, Zea Mays
ctttttttcttggcgtcttatctcttcccttctctgcctcgcttcgcttcctacccacgccacgcgtgtgttcttggcagccacccaatccccgcctcgcgaaatcagacgccaaatccccttatcttatcatcaaatcgatcgccaacgggcatgatctgatggctccctcatcatagcctctgctgctgcaccgcagcaaaatggccctggtttagtttagtcctcaagatcccgcctttctggtgctctgtttggctagtgtcgtgccgccgcgcgaggacccggagattcgattccggtccggtgtatctctaggctgcttggtttgggttaggatttagtgggcagggttgtgcagctggtgtctcgtggaggaagaatttcgtgggaggattttgaccgggtttgggcaaagagcgcgccgttcgggaggaggtgattctcgcgtggttgcgtgctttgctgggagtctgctgcggccaccgccggtatggcgacgcacttcacgccgtcgcaggcgcacgcggcgtcgcaccacgcggc

SEQ ID NO: 177808 - DNA, 613 bp, Zea Mays
ataacatctaaactatactattctagtcttcgtcatcctttgttgcttcatttcctgctgcagaagaccgttcgtcagcaaggttaatggatggagggggcctaaaaaggtccagctccccatcaggtccttcatttgctgttcccgatggtccggctcccattgcagcaatgtcagaaggcacattcaggtgcagtcgagcatacagtacatgtacttcttcatgtaaagtattatagtacacttgcaggctatcgagggccgcactaagctctgccacacgagctcgagcttttgcttcgtggtcccgatctatcgaacgtgagttgatggcccaatcaatggttgaatcccgttctgaaatctcatattgcaagcggctgaagtcagctgacaattcagctatacgtaggttgtcctgctcccgtgccctatttttgtgacatagctctgaccaaagttgttccaccctggcttccaggtctcctattgggtcattgctgccactactactcccttcatgtctgggggctagctgatggcgaggcacgccaaaaggtccagtagttttgcgtgttgttttccttgtacgcaccatgtctccataagtggg

SEQ ID NO: 177809 - DNA, 527 bp, Zea Mays
ggatccagcggcccaggggtttcttctacatcgtgaccgacagactcacgccccacaccacccatggtggcgacgcacggcggagatatcgccggcgcactactgtttgctgccccggtgcactaccactagttccgttgatcgcaaaatgaaattgacacgatggcgagtccggtaaggggagttattacgatgctcacgcagcgccgtttcccgtccacgatgcgccccagatttgcggccccagcgttaaattgatgttgcccaggtcgtgcttcctcccagccaccgccttcaacacgatcccgatgcttgaagggacactgccgagcgcgcatagggcaccaatttgtgcagtatacaccggacaatgatggggccacggcggcgatagattctccctcacggtggtgcttatctcagattctgggttcagcgcgcgcggtcgagggggtaccctccctttataggcgaagatggcgcacacagctggagatccgagcgaggggggaaggtgggagatggtt

SEQ ID NO: 177810 - DNA, 512 bp, Zea Mays
acgtcctcgagattatacggcgccatccagacgcgttcctctggcatggtgcgctgctggcggaagtacgatttgcacatgctgaggaagagcatggggtcggacttgccatcgtagtggggaaaatcaagtttctggaatctggggggcgatcaagatcgcgttgcccatctgagcggccaccggtgccggtgttcggactcgaagccggctgctccttcagagcgaccatgtcggccttcatggtggacatctccttggcgatggacttgagcatctccatcatgtccttcattgtgggatcggccatggctggctgttgcggggcggaggcagtagaggactgtggtgatgtggatggctgggtttgggcgcgacgactgtggaggacgaatcagaatgggtggaagaggatcgacgtgacgttgataccaggttgtcaagggcgttggttcctaaggtagttggccctcgactccgcaactcgtagtctcgatcgtcttcgtcggcag

SEQ ID NO: 177811 - DNA, 759 bp, Zea Mays
tagatctcatccaatgtgatagattaatctaacctaacaaaggctaaccttaggttgagctaatctaatgtaaattacttaacaagaaggataataccgatgaaataaatgagactttactccgatagaacatgttttaacttagttcactttgcactaaattaaggccgacagaccaactcggctttatgcaactaccttacccatcctatggttgcataacccctctaatttaacataatagagattctaacctacatacacatatgatccataccatctcaaaagattctaacatatcctaataatatatatcttaccctggtagatctatctaacctaaactcgtctaaactagtcataacaatctaatctagatctcatctagtctaacatgatctaatctagtgtgagttacttaatgctggtacaaagaataaggtcatactcccaattcacttaagcctaaattggagacttagatcaactcggccatatacaacaacttgacctacacaaaaggttacatagcttatccaaccaatctagaagaaaacaaccaaactaaattctgactaatcagctacctactaactctcttgtccctaactcagataaagacaccaaggtctgaaaagaagagctcaacctcgacaaggaaggagatgggtcaaatccaacttcaagaggaatcaagatccacagttcaggatgaagtctttccttattatactctcccttgccacaacctatacttgc

SEQ ID NO: 177812 - DNA, 561 bp, Zea Mays
tccaaatgttggagtaaaattttccgcccatcagagtcgcctcagccgaaggatccttcgtgttttccacagtaaagacagcctccgtctgggttgcagctttaacgtgttcgcagccagatttttccaaaattgctgcaacccctctggcaccggcaaaggcatagaaatcaccacgatcactaaggatctcttgaaaagcttcagcttcttcatcgatccattcgatgattacttcgggatcgcctctaataaatttttgctcggacgagtaagcacccacctttgcaaaactgccttgtagcttcttggcacaatccaaggatttttcgtaatatgtttcctttgattcctgaagctcatctacattcttttgcaaccttgagctagtccactcacttatttcctgcttcgccttagccacttcgaaatcttcatttttctcggcaagccttttctttaaattttcaatttcggctctatgagtttcggaatgcgcggcaaggttggcttcactagctttgactctgtctactaagcaaagcaaaattttgtccttct

SEQ ID NO: 177813 - DNA, 772 bp, Zea Mays
tggatgtgccttggcattggtttatgctggcagtcaacggctatttgtgtgcaagcatgtgcatgctcagtcagtggttccttgtcaatttgttttcttcatgattgtaatctgtgccttttcttactacactgttattatgtcttttatgtatgcttggtcgaggatagacgtacactaatatggctggatttggtgaaagtggatcgattagtaatataggcagagatagactggactcaccctctgaaaacggtcttagtttttatgtttatttctgcttaaaccaaatgaatctgccctactctgttacatagagtcagccctgacaagattgactaacatactgctgtttcttctcctctcaaataacttatgcgacttacagcaatgaattcaaacaaacttgaacaaactctcaactaggataagctaggccactggtggacgcctgatgctgcttgctgcttgcatcatgttatcatgaataggtcttgttgatgaagacatccacaacgtatatgttgtccatgccagttgtttttcatagcataagctccataggatctggaaaatcacgttgtagcaatgccttcattaactttgaaagttgtaatgtggttgatagttgactttcatgtcaagccctttgtaatcaaatttagtgacttacaagttacaggccatcctgttcaaacaacaccaatttcagtactctcatgtgaatctgacatgcattattttttcctttacattataatccctcatggct

SEQ ID NO: 177814 - DNA, 575 bp, Zea Mays
caatcggcttaagtcggcaacgacttaagacggtgcaacatgctcgtgcttacttaactcggggtgaccactatgccctgctaacggagtaatcggcttaagtcggcaacgacttaagacggtgcaacatgctcacgcttacttaactcggggtgaccactatgccctgctaacggagcaatcggtttaagtcggcaacgacttaagacggtgcaacatgctcacgcttactcaactcggggcgaccactatgccctgctaacagagcaatcggcttaagttggcaatgactcaagacggtgcaacatgatcgcacttgcttaactcggggtggccactaaaaagagtgatcggtttgagttaatactaacttaaacgggcgcagcacactcgacgcgcatacggttactcatataggggcaacctctatgtcccatgaagaagtctcgaaatcatcacacaacattttacttctgcaaatttagatattgctgaattctaaacaataggagaataacagtagcattcagtatcaagcaggtgtcctctaacaaaatatccaagcgcgttaaccg

SEQ ID NO: 177815 - DNA, 800 bp, Zea Mays
ccctcccctttctattccttcgcaaggtgaggtccccgaccgtggacggcggagcagtggctccggcgagcctgtaccagccgaatgacgcaacgactggtgctccggtgtggctgacacctaattctacccctaacgaccatttcccctcaatcaattgcaaagttctagctcctaatctctctgttcatggtgacaacgcgaactacggatgaaccgaggcgttcccggtgatcctacgtgttctagttcaattggccgggtcgagaagcatcaagagcacacaagaggactgaaacaagagcgaggagggcgtgatcggacctgtggagagctggccacggtgagctcacacacggcaaagttcttgactgatttggaggaaatcccaaattggggagttgtgagggacgattggaggtgagggctagttcactgggtgcacaattacttagcggagcaggatggggcatcaatttatagtttccaagggcggtggctccaaattttggcatggcatgctggcggccggagaggaagaaggtcactggtggctaagtcatggcgttcaccggtgcaagggttcttagatggtaagcccaggcgtgccacggttactattgcgtagtaaagagccatggcgtggcataattgaggtcgccggagtttccacgacgacaccggcggtccggccacgtcgcacggctacaggcgcggttgataagcttcaccccgcgaccaaatccgctccccctccgatcttttcacccgcccggtattatcctgcccgagtcctgcac

SEQ ID NO: 177816 - DNA, 453 bp, Zea Mays
ttcaagcatggattgtctacaaatatttgaaattatggccatggtctcattgagagatctgttcccctgacattcctttgtcgtttgtgtgtggaggcttccgggtttcgctgactggatcaagagatatggaggggtgaagttgggtttgtctcactgccgaacactgagagaagatcccaggtttgacgtgtccagggcatgcgtcccaatgccatcttcaggtatgaggtagaggggttagttagacacatttttggcaatgggagcttagagttttgagatagagatcaaggtgttcgcgctcggtttggtttagaggctgaaaattcagaaatctgaatattagatttccccattaaacctccacttgaatggcttgcttggagtttttaacaaactattttggccaaacttttataatctttattgtagcttagttagtgtattcca

SEQ ID NO: 177817 - DNA, 594 bp, Zea Mays
gtttagacttgcttatgcgcttttttctaataaaggttatcacaacaataatccataaatatcacatattggttcccatatgttctgactctgtttttgaagagttcaacaatatatcaacaaccgaacaacattgttacctataatgtattttgaggattgaatgcaaccggttgatcttaagactagatctgatcaagcgaacatgttatcaaccaatctctactcctataaatcactagtctcaatgatcattctgtgtcatgcacaaaagtgcataagtttgttcctctcttccgcatctcatctaacaaaccagataagataagccttgagtgtttcctgctcctcgtgttgtcgttgtatattaacccaaattcccatctctcttttaccgtctctgcctccatcacctagattcttccaacttcccatctctcttttttcgtctctaccatgctcaccaagattgttctgcaccgccatagaagacatcctacaacttcccatctatcttttttgtctctgcttccccacctagattcttccaacttaccatctctcttttcccgtcttcatctctcttacctagat

SEQ ID NO: 177818 - DNA, 1102 bp, Zea Mays
cttcgataacatcttgaatggtagccgaagcccaactcaaaagaaactcctgaaaactacaatttcatcatcctttagctatggggtggtttcgttaccagcaaaacgaattccatcgttatgaccaatgtagccaagattattgataatatcaaaatcgctaggcttaacaatagatttagcaatatcaatgtaactcgattttgtgggctaaaggtcattatcctcttcttcgacctctgaggcattcttctcgggaatgtccccctccttgacaatctttgtcttagtcgttgcttcctggcttcagtaatcaacattgtagcccccatttccatggtatcaggagcatctttgtccctctagactgcttcggatgaggtcagagttgtcatcttagcggttggacgaatcctggccatttgatgaattaccgaagcaccgagcaaccaaagcttacacaaagagttagaggagcaaaaaaagctttggaggcaaagaattctatggcagcacgttggcatgagagtaaatgccatgacgatcatatggtgctgacagggttatataggttggtgggcatggaagctaaggaatcgtgtcgctctcgcccgctgccttgtggaccatttgcaattgttttgttttgttttcaataatgtgctctaggaatgtgtttttggaccttcggcacaaggcctccattgtttttgcggtgtatgattgttatggaaaatgaaataattttgtgatgggctactaatgggacccttcctcgaccaaaggtcctaaaagcattgatttctcaatagttcctaagtctatttcaggtgggaacgatgtgcaactaacatacaaacacaaagacaaagcaacgaccttgggctttgtattgcaaatgcatcaacagaggtagaagatgaaatcctcaaggcttgctcaacacggctatgaaggaaatgacaataataccctttaagttcttgtgtataggattgaggacatggatgtaatttttatgacgttgtactccaccaatataaatagaggtacaataccattcaaatgggtacgtcttctggagggagaaattgaattgttc

SEQ ID NO: 177819 - DNA, 403 bp, Zea Mays
cacgcacacatgcacacattcaccgtaccgtacgtcgatctatatatagcagagacacgcacaccacgatacgtgtcataacaactttgaaagtacgccagaagtcctaatagtggactaaacctgtgcgccacttttttcctatttttggagagaacaggtcgatggagaggaaaacctagctagaagaaaaatcacgagtcgatctactacattatacaaggttgcttattgggggcgctggttggatctgtggcgaatggcgaagcgagaagcgagaagcgacagaatgggtagtagtacgtgaagattccgtggtgggagatacgacaacaccctcgaaactggtccttaattaagcgctgatgatggacggcaataatcgtgttggctcgctttccat

SEQ ID NO: 177820 - DNA, 561 bp, Zea Mays
accattcacggtttcaccagccattcagccaataactgcagtggtctcgacacaattccaggcaggcagtggtctggggctcggctgctcatctcgtcgctgcaccggccgaattggaatcattggtctgcgttgccgcagatagatagataggtaggccaggaaggattgcaggagcaggcgagcagccgagcagtagggatgaaaacgggacgggtacccggaacgggtatcggatacgggtaccaaaacgggacgtaatttcggatacggatacgggtattttgtttgtcgagacggatacgggtattacccggatattgaacctcggatacgggtaggatacggaatcactaatactcggtcagtacccgaaaatcccgggtcggatacgggtacccggaattcgggtacccgttttttctttttctgcataatatagttataaaatcataacttttacatatgaaatcggatgaagataaagtttatatgaaaattgtagagcttgaagagatctatgactttgtaatacatcatgtttttgtttaaacaatattt

SEQ ID NO: 177821 - DNA, 1044 bp, Zea Mays
ggaaagagaatccaattccgccgccatggaccttcttgtctatcggcattgaagctccgttagccactcatggactcccctggacgctcgggcagaggttcgcaccgtcaccaatccaactcggtggccggaacctagacaattcctcgtcggacttcatggggcgctgctgaaccgccggtcgccgtggccgacccccgtaacaacgccatcgccggtgagaaacccctctgtcgagctcgccatgaaccgtagggtgtttctaccatgtagtgttggggaggggcactttcacgcgtggggattcatacccaccggcggaccgcgccgccatggggcgtggtgttcatcatgtagggtatacgggtggagaagatgggtccgtagccatcaatcggctatcggatggccaggattaaatcatcacttaccccttcgtgccagaaaatcgtgaccatcggatccaatgggagcggtgtagattagtcgagggctggacaaatctcgaccgcggatccgaaatcccacggttgagagcctgtaccggttcactcaaggggcgatctaatctgggcggtcggttattgatctaacggctagaacgggccgatacctcttcgtcttggacaatttgctaaagagtccccacgtttttcttaaaataacccgtgatccatcctatgtaaaagaaccttgcatccgagcctaggtatttgcagtttagaccccatgctctcggaaaatagtgactgcagtccagtttggaattcgaattaaataaattaaatcagaaaatggtttttatgtattaactaaaacccaaaacttcataaatcaataactcctttattctaactccaatttgacccgttcaagttgcgatagttttgtaataaatttgcctacgcagtagtaacattagttgtgtcatatcccacacttttaaaattagaagattgtttacccctctgaatagtagatttattttactaatcaaggttgatatgtatataattacaattttactataatatgattttaaac

SEQ ID NO: 177822 - DNA, 279 bp, Zea Mays
aggagagaggtctgaccaccgaggctgtggttgctgactttgtttttaagaatatccagcccttgaaggacagagcatacccagcatacttgtaccgtggtgttaccaacttgactcgggttaccaataggagaattcctgccgcggatctggtgagccgactagacatgatcttgagaggcaaagtatcaaatgttggtgctcctgttgcctactctgcttggaatctgccacctcctaagtcctttttcaatttcgtgtccaatcctcctgctggtg

SEQ ID NO: 177823 - DNA, 835 bp, Zea Mays
tcttcatggtgtatgggtcggaggcagtgttaccagtagatctgatctttggagcacccagattaacattcgaaagcatagccgaagcagaagcaattaggctagaggacatcgacgtactagaggaagaacaactaaatgtggtcattcagttggccagataccagcagaccctgaggcgctatcacgataacgcagtgtggcattgatccttcgctgcaaaggagaagaacacagtgttacgataacgcagtgcggcattcatcgagtattgacgggagaagaacggcacaaattgtcaccaccatgggaagggccattcatcgttgcagaggctacctagccaggatcttaccggctcactcaaatggatggcaccgaaatgggaaattcgtggaatattgagcacctcaggaaattctatccataataatgcctcaaagctcttgggggtgagtcgtactttgtaagcagaagatttcattatcaataaaccttccatgttccaaggcatacgagttcttgatcaacaactgacctaggtcggtctcaacttgaaatcggcgcggcactcttacacgacttagggtgatcactataccctactaatggagcaatcgacttaagtcagaaacgccttaagtcggtgcgacatgatcacgatcacacgactcagggtgatcactataccctactaacggagcaatcggcttaagtcggaaacaccttaagtcggtgcgacatgctcacgcttacacgactcaaggtgatcactataccctactaacggagtaatcggcttaggtcggaaatgccttaagtcggtgcgacatgc

SEQ ID NO: 177824 - DNA, 469 bp, Zea Mays
ctcgcttccttctccaatggcgtataggcgtgttgatccggaaccttttcttcctccgagcttcagtgcaacggtggtcatgcatcgcgaggtcatggccaggtcagtgactaggcgtctccctccaatgcatgaggattgggctataatcaatattcaacctttgccggagcatgaagttattttcccagcggttagagatgtggtcagagaatatcttgtggagcaccggtggctcggggtgcgggacattcagcggtcgcacctgggtcaagttctggtgcagtttaacagggtgctagatagagacaatcttgtcttgcttggaccgcaacaatatcttgatgccaccttcactgctcagcggcataatgatgcctggaaccacagggcacttttttttaatcgtgagtgttggcttatgctgttgggattccccttagactatcattcctccgagtacttgcag

SEQ ID NO: 177825 - DNA, 289 bp, Zea Mays
tgggtagccgatgctctatgatctctctgcttaatcccggcatctcagtgtaattccaagcaaagcaatctgaatattccttcaatagaccgatcatctcatttctaggatcggtctccagggtcttgtttacaaaagttggccttagagttttatcatctcctatgtcgatctcctccaaaggatcggccgatgtaaacccctgccctagtttatcgagatctctgaattcctctatcatgtctcccacagaggaatcagatgatctttgtgtgatggcggactctcc

SEQ ID NO: 177826 - DNA, 437 bp, Zea Mays
tcgaatttcataacgcgacgcatgtgccgccgccgaagcggatggttgatgaagtgtgttcatgtgtttgatagtagttgttcaaagaaataatgaatgtttggttgtttatgcgaaaggggaagagacagattggcttaaattatggccatattcaacacaaagaacgcataatgtcattacagactttgcgaaatcgcagaacgttgggtaatggggtcccgacggcaacacaccatgttctcacatgtacccccatccattagcggcagcacacacaacaacagggatgccaaactaacagggtcgtatggaagggaagataccactgccacatctctgcgagaaaggaggcagcaagcgcggcaatagaaccaatgagaaagcagcaagcacgcaacaccatatatgactaactggtcactgcgcactgcgct

SEQ ID NO: 177827 - DNA, 404 bp, Zea Mays
tagttgtagggttcacattgtttgttgcctttttctctctgtttgtgctaacaatgacagaaccaatgaatcaaatggacaaggacaaggggcctaagcttaacgacgatgagtgtgtctctcagctggaattgaaggagatgatgcacgcgatgactaaagcttttaaaaaataccaggactctgcggcgacatcctatgagcagcttgatcgacgagttgataaacttgttacacgcatggacgtactggaggctcgtcccccaccaacaactccagccccatatcactctcctgtggacgacgacaacgatgacaacgatgtttatgcaccgctgccacaacgcttcgcacgtaatcgacaaggtatgggaggtaatggtagacgtcgtcatcataatcct

SEQ ID NO: 177828 - DNA, 285 bp, Zea Mays
atacatttcagccagtcgtcgtttggttcatcgaacttatccccaaacctgaatgtatacttcagccggaccaaatcaccttcgctagagttagtgatggtctccttcggcatttcccagctttctacaagtggccacaccctgaaggctatatgttattgaattaaatcccttgtcccaataaaagagaaaacagtgttgaaggccctctgacacacttcggcggcgtcatcaaggccgaagcgggatcagatgggacgcataatgacttccttaatgtcttcc

SEQ ID NO: 177829 - DNA, 809 bp, Zea Mays
acgggtgctccccagggagacgaactgggacggatgtaccctttttgttgcagctctgcaatctggagttttaattctgctaactctgtgggggccatgcggtatggtctctttgcgataggtgcagtgcctggaatgagatctatatagaattccactcctctttcaggtggcattccaggcaactcttccggaaatacatccatgaattcttctattacagatatgttttctgctgccagattaaacatcattggatcattggcgggcggttgggcctgacaggaaactgcttttccttgtcggtcggtgagaaggacggtcttacttgcgcaacttatgatacccttgtgcttagttagccaatccattcctaggatcacatcaatcccttgggatggcaagacagttaagtctgctaagaacactaccccacttaaaaaaattctgacctgggagcatttgagttgccatagaaggtctgaccccggggttcgggtgaccaaaggaatttctaggggtgtagagggaatgccatgtttttccacaaaactagtggctataaatgaatgggatgctcctgaataaaaaagcacagtagcgggagtaaattcaacaaggaactcaccgagcactactcccggagcttgctgggcctcttgagcgtcgacgtgattaactcgtgctctgccctggtactgggtcctgctctgctgactgttggagggggtgccttggaggcaggtgccgagggaatcttggggccattcaccgagttggagtaggtaggttcgggtgccttcaactgg

SEQ ID NO: 177830 - DNA, 489 bp, Zea Mays
tgttttcaccgcgtgtacttgcctcagaggaacgccgacatcagggactcaccttgtcagtcgctgcgcgcctctctcacgacccagtcaccgacccgtgggccaactacgtcagcgctactccttcttcttcgcaacgactctcgcggaccgaactcaactgaacgcggcgatttaccagccgcggactccatgtttggcgcaacaaacccatggaatcggttttcctccgccagcgccacttcatctggacttcgtcatggggtttatagggttcaatcagctcctacaaccgagcgctgacagagaaagagagaaagggccgagagcctcgcccgtgagagagctgagctcggcgagaggagagatcgagcaccatcgtcgtgcccttcattcccttgccctataagatagatccgtgaccgagcccgcccaaccgcatcaaggctcgagctgacctcaaccacggaatctggagcagcgcgggtc

SEQ ID NO: 177831 - DNA, 658 bp, Zea Mays
aggcgacagaaacattacaacaaaccggatacagctagaaagaaatcaaattattttcagttgcagcttgcaggcgactggaacaaattcagtttcaccattcatcaaattttcatgctcaagaattggtaggggtggttgttgtctccttagaaacagtgaggccacaaaactctgcagtaatagtaaggagtaaacaaattagtcaaatctgaaatcaataagaacatagtagaaacaattatgaaaaaatattgcagactaatttaccttcctcaagcttggacagttcttctaggttctcttcaacactaatgaaatcagatccgcgaatccaatcatttgtacaaataaagcgctcaaccattgctggggtgagtgaactcctaaactcatctagtgttctccccctgcgctaaaggctgactcagaagcaactgatgagataggaattgctaaaagatcacgggccatgcgagacattattggcaacctagtagcattgtccttccaatacttaagaatatcaaaaccttttttgtcctcttcattgtcctctaaaagatatttatctaattcagacttgacagtactattgcaacacccattattgctcatctgttgagcaattatagacctcataagccttttgttcaat

SEQ ID NO: 177832 - DNA, 729 bp, Zea Mays
ctctgtcaggcgctctgatgggggttctgatggtacagtggcttgacaaagaccagcagatgcagtgcacctcatcgccgatgaccccgcggcgcgatcctcgccgacgctatgattcgtgcccggtggcgcgcggataatgacccggggtaaaagatcttggtgttgggatgagctcagacccgaccactggattattcaccgtacccacttgttgtacgaccaaccgaggtgtcctcgctatagttcgccgcctttgtagtcgtgccacgtgcttaggaacgttaccatgtcacagtgaaccgtaagagggagtctgtccattgccgggagttttgcctcagtgaaagccacgttagcgctcgccggtgatttccccctctctctggccgcccgtgtgtcttccccaaattggatgccaccgttgttgatctctataaattgagcgctcagcgtgctccgttaggttgttacgcaccaagtgcaccagctctcgcctctgatcatccaccgtagcgtcccaatttcacttttcccccaattctgttttccgcgccgccatgaacatctcgtcgtggccagccatctactggtcagttcaagattctctgcttgatgttctagcatcccttaagtttcctgttgctcatagacccgtttgattgaactagaccgcacggaaacaccaagaacacctcggtttgtctccggtattcaccgctgtcgtgg

SEQ ID NO: 177833 - DNA, 434 bp, Zea Mays
tgttggatgggcagattacagagatgcttacacctaaagtcaagagattaatccacaaacacatgtagatatcataacaataatgggcaagaccaactagtaacatgtttgttcaaaatttgtgcaggttaatctaaagcatatccgactaaagacattagaacatgcaatctaaatacagatttatagacggggagacttcagatgaattacacttatgcagggttttttggcacatcacattctttaggctgaaatcggtgtcgacactgttgaagaactccagcagctcaactatatgtttgtggagatggaaataatagaacagaccttaatgttaaggcgattggtttactgtcgattggttgccaaaatttaccaaattttagtgcaacaaatgtggttaaaggggtatttaaagaagtggaatccta

SEQ ID NO: 177834 - DNA, 784 bp, Zea Mays
gcccaaatgccaaggatgtagaaatctatgtgaaattgctgaagtgtcttttgtatcccctcatggctgatggtatgggccaatacaagcacctgtgaacacaagttaggacacaacagcatgaggacacacttactatgaaacaagaagtcatcgatggtctaccatggtgccccaagagtagcatcttggagcatctagtgaaggcaaccaacatcctaattgttagcagtcgtagcatagatcttgtcaagtaggtgcaagaagggcctagagagggcgggcaaccatgtgtagtccacggaggtgttggtgtcacaacacgagatggtgtctatcgttgtgttgaggaatagttgacaccctgttgatctactaatgttgtagaatagttgatattcactggaccaagagaaacttgaggttatagttgtcagtgtgaacaagaaagcggtaaccctagaggtatgactaccaaggtcgcacaacctaaaccaggttgatgagtttacactcatttgttgtagcttatgatgatgagtgacaaagggtcaactaaagaaggccaggggactagtttcctcatggaggacgacactaaaacctgcacccatagcatcgtagttgatgataatatatcgaagtaagtctagcatctatagaactagccccatggagagggcacacttgaatgtcacaaactcctccaatattaggtgtcttagcaagggcgtcattgcgcaacaactgtgtcaaagggaaagcaattgtatcaaagtctaat

SEQ ID NO: 177835 - DNA, 704 bp, Zea Mays
tttgaaggcagacatttaatgatcggatcaatctcatgacaagagaaggggtgctcaagttctgacaaattatcaatcggctgaatcaaggatggtaagttaaaaaccatgtatgtttgttgagaagtccccaatctgttcttgaaggcattaaaaagcacagttgctttgtctgtatgagaaaaggtcgtatttccattatcatcctttagtgacgaaataaggttgtgacgatgcttgatagtagcattggcgtgaaagaacttagtgccagcatcaccaagggtaacccatttaatttgacctctttgtttccaataagttcgttgtttagacaaaagatcatgcagatggaggataagtatgtctttgaaattccattcctgtatagttaagtctctactctcctcaatgaagtccaatagctgaataaccaatttaaccttatcaatcaattttgctaaattagggagagacttataccaacccttaatcgcttttcgtgcccttttaaacttggtcatgagccttttagctaggtctggttgaaatagaggctgactccaagaatcttgaaaaattgtatgaaaatcttcaagctgaagccaataatttttgaatctgaagacgggcggtttaggaacattaatttggacattgaccatccaaggaatgtgatccgaggttcctctagagagcaaaag

SEQ ID NO: 177836 - DNA, 486 bp, Zea Mays
ttcatgaaagttgggcttcgctttccgctccacaatatgctggttgaagttttaaagacatttgagatataccttcatcatcttacccccgaagctcttatcatagtggaggtttttatatgggccatgaggagtcaaggactggagccagatgcgagatgcttctacaatattcaggagctctcttatcagatgaaggcgaccggaaaggaacaatatcataacaactttggatgctacgacttcatgccttgctctgaggcaaattaccctgtgcccacatttcggaagaagtggctaggttcttggatgaaggaatggttttacgtgaagaacgacctgaatcagagggaagatgtgagaggtgttatccaacgtcctatatggtcacgcttcggcattagaaggccatccatcgcacttgggaatgaagtgcaggcgtgccaaattgctttcaacaccatatgcacctacattggcacgaga

SEQ ID NO: 177837 - DNA, 389 bp, Zea Mays
cagcagctgaagaagtctccccaccaaactcaggcaccacggccggttcaatataacgtggccggtgggtaaggactttcaactttttgctctttggcacagactcatctggagtagccgaagcagcagtcatggccgaagcagcggttttcctcttctttccctgtccccgcagcgggtagcagtagttggggtaaacaaaaccaatggcatcaaaaactctgttcaatctcttttttcctcggccctcgaaggatgtggataatgcgttatcttctgccttggagtatgacccaagcagttcatcacttgtggcttcgatacatttcagccagtcgtcatttggttcatcaaatttatctccatatctgaaggtatacttcagtcga

SEQ ID NO: 177838 - DNA, 526 bp, Zea Mays
ggtccttcggttcctgctgctgaggaagtgcatgtgcctgagtttactgacgctgaccccaatgggtgtgctccatctgctgctgatcacaatgggtgtgctccatctgctgctgatcctaatgggtgtgctccatctgctgctgatcccaatgagggtgttgtttgtgttgctgatgaaaatgacggggaggaagaagatgaggtccctttgactcggaagaacagtcggcagtatgtcaccactggggaaagtagtggagttccttctcctgctctgtctgccctcattggtctacaagagttgtccctggcgaactttgatcagactcttgaagatatggttccggaggatctgttatcagcgccagcggatgatggtgcgacggatgtttgtgccgatgcgctcgacgccgagttggggtcatcccgggcagcgtcccgcgcctcatcgaccttggagcgcggtcttgagggtcaggaaactgacttggatcgtcttgttcccatggaagtaactgagggac

SEQ ID NO: 177839 - DNA, 500 bp, Zea Mays
cagctggaatatggtagttcctgaattgtgtactgaactctgcccaggtaatagtatcagcagcatcgtgggcagcagtatatgaatcccaccagtcagcagcaggaccagtcagatgtcccgaagcatataaaaccttctcccggtcagtgcattgtgcaatattcagcatcttctcaattgacttcaaccaatcgtctgcatcaagtggatctggcgaacttgcaaatgtaggtggcttatgactcatgaactctctatgcttgtctcggggtgggactggtggtggtggtggaggcaatggcacttgctgctgttgttgctgttgttgaagttgttgttgtagctgctgttgttgcgccctcctttcttgacatatctcatctctctcctggcgcaactcctggcgtatatcttctctttcctgacgcatttcctggcgttcttgctgcatctgggcacgcatatcagccatagtgtccgccatttgctgcatcacc

SEQ ID NO: 177840 - DNA, 945 bp, Zea Mays
tttgggagggggctgaaattcagatttctgaatttctgaatttccccaagtgcatttgtttaggggctgttttggggattttaaaaagttcaaaaggcaaaacttccttactatgttttgttagttaattagtgaactaaaactttataatttggttttctccaaaattttatttttctcccaagggtttcccccatttaccctttatgcttaaatggttcacttagggttaactagggtttaagagtttttccttctttagaattcatgaaaactttaaggagggtttaagtagacttcaacataattctttgttctcattttcaatgtgcacccttttattgagattgcatgtgatcatgggttgggccgttggggttagtttaaggaagaaccctaagtgacactggggtgtcacactattcaccccctctaggtgctctcaaccttccaacctcgtctttttacgacaaggtcaattgagcactttaacccttgggcggtcggggcttaggttctggtccttgttactatcatagcgacctccgcgcctcaggcatgaacgcggggggtttggttcattcttggaggcgctcgttcacgcacaagatgttgtgcacgcgatgggtgtcccctaggcgtttctccccgacaccacacttggccttttactgatgtgcgggtcccgttgtagaggcatgatcgtgtctacctttgcgaaagacatgtattggccgggattgcccccacattgcttcacaagaagctccgcatgctgagccatggcacgcccaaagagtggatgggccttcttgcttgtctcaggagcaaagtagtttctgtcccactcaagtccttgttggaggagtcaagcgactcgtagacgaggaggtcctatatcgattttgaggcatgctcaatcatgcccatgaactcagcgttcgt

SEQ ID NO: 177841 - DNA, 474 bp, Zea Mays
cctcagacatgtccactctcggccaatcaccaggaggaataaccttcacagaaatgggataaaccaaggtgcgagggacaatggttgcatcttccccaacaacaagaggttcctgaacatgaagatctaataccgctggcaggccatccggagagaaacaccacgctctgagcttgagaacagacatatccacactgtccactgaatctgggtgaagtccctgaaccatgcacagaccatccaataggagctcagcggttccaacccccagaggtgagcagggaccccttccacctcgatatccttgagcaatggcaggctgcccccgccagaggccaaggctcgacgagaccaacgcctaaggtgcagccggacggggggaacgaaaagcgactgcccaccaatgaaggcacgtgaagccatatcctccgaggggaagaagacgaggaaagagttcgatgcaacatgccggag

SEQ ID NO: 177842 - DNA, 337 bp, Zea Mays
gagagaggtctgactgccgaagctgtggttgctaacttcgttttcaagaatattcatcctttgaaagacagggcgtatatagcttacttgtacagtggtattactgactctattcgggtcaccaacaagaaaattcctactgaggatctggtgagccgactagacatgatcctgaggggcaagatatcaaatgttggtgctcctgttgcctattctgcttagaatctgccacctcataggtaatttttcaatttcgtgaccaaccctcctactagtgatggtggtctgggtcttagagtgcgaccctctcccgaggacattgaggctctggttgctc

SEQ ID NO: 177843 - DNA, 1573 bp, Zea Mays
cccctgccatggaatccggcaattgtaagcgataagacaagctgcccacccgggccaagatagtgaacggtccaatacatctcgggctaagctttctggagacaccgaatcgaactcctttagtcggtgataccctgacaaggacttggtcacccactgcaaattccaaatcccgcatcctcacattagcataactcttctgacggctctgagcgaccaaaatattttgacgaatttcccgaaccttctctgaagtctgctaaacccaatcaggaccaaccagggatctctctcccaaggtctcccagcaaagaggggagatacaccgcctgccatataaagcctcaaatggtgccatcttgatgctagcctggtagttgttgttataagcaaactctgccaatgcaagatgatcttcctagctacccttccaagacagtacacaagcatgcaacatatcttccaaggtttggatcgtttgctccgacttaccatcagtttgaggatgaaaagcgacactaaaggaaagcttggtgcccaatgcactgtgaagactctcccagaatttggatacaaatttggagtctcaatcagaaacaatggacttaggtaccccatgaagcctgattacttccttcatatacaaagggaccaattctgaagctgaattggtggtcttcatgggaataaagtgtgcagacttagtcaagcgatcaactaccacccaaatagcatccctgccccgaggagaacgaggtaagcccaccacaaaatccatggtgatatgctcccatttccactctggaatttccaatggcttcagcaaacttgtaggcctcttatgctcggccttcacgcgttgacatacttcacaggcagccacgtacttagaaacgccaaccttcatccgcttccactagaagttttgcttcagatcttggtacattttggtttcgccagggtgaatggtgtaaggcgttttataagcttctctcaagatatccatcttcacctctgatttttgaggcacacaaaggcgacccctgaaacgaatcaaatcattctcatcaatggagaactcccggggtttaccatcgccaaccctcttttgagcttcctgcaataaacgatcctgctgctgagccgcacacactctctccatgagggaagatttaataagcatacgagtctcctcactagcagtgttgacaaagcacaaagcgatccccaaatggtccagatcagcaatcaactacaaggccacttttggaaccctggatctgctaagggcatcatccaccacatttgccttccccgggtgataatgaatagacaaatcataatctttaatcaattcgagccaccaacgctgcctcaaattccgctccttctgagtgaaaatatacttgagacttttatgatcggtgtaaatgtcacaagccttgccataaagataatgcctccacgactttagagcaaaaaacaccacggccaattcgagatcatgagttggataattcccctcatgcttcctcaactgccttgatccataagcaatcactctgccttcctg

SEQ ID NO: 177844 - DNA, 408 bp, Zea Mays
caaaacacaaattccaggaccctccataatattcttgtcataagggctgatggcaggctgaattggatgaaacacaaggtctctttaaaaagaatcccgcgatgaagagtgagattgagtctgactgtccgatcatgtcccaacggcctagatgaaacctggcttgtaatgaattggtacacgcgtatagccctcggatcatcgatctacgctcgatgaatcgcccacatcatggtttcgttcaacccatccgatcacccagcaacggtcatattttaacagaccgaagaggtacgccttgacccaatcctgaccgcacgcatacgatctgacgacacccgcacacctcccctatttcaccgcccagttcggaggagcaaaggctcgtggcggcaccattgtcggcac

SEQ ID NO: 177845 - DNA, 734 bp, Zea Mays
gtccgcagccttcggtggccggagaaagaaaatattaaacagagttttcgacgccatcggcttcgtataccctgactaccgctacccgcttaggggacaagggaaaaagaggaaaacttctgctccagacagcccagataatcctgtgctgaagggcaaaaagttgaaggttcttacccaccggccgcgttacattgaaccgaccgtggttcctgagtttggcgcagggacatcttctgctgccgaaagaaaagaaactgcttcaactacacagagtactgaagagccggctgtaatgccgaaggtgcctatagccaaggaagttgaaacgaaggttgataaggttgatgaaccaaaaattgaagaaataacgaaaatgccatatattttgagcgctctaacaagggcgacagtaccgaatgtacaaacgggttctatcgtgactcctaaaaggagaaggatggtaaatgtattagatgtattggaaacaaccgactccataagtcccgctcccacagggaaagttgccgaagctgacaaaacacaacccaaagctgatactaagcaaatagaagttgaagctacaataacccaggctgaaaccgaagcagggcccacagtgcctactgagacgaagcttgccacagctgagcagagggccgaaggaataactccagatactaatatagcttttgataaaagtgtggccgaagaagccgaatcccttactcccg

SEQ ID NO: 177846 - DNA, 416 bp, Zea Mays
gtcgggtcgctagaatctctgtactttcatatctatcatgtttgctctcaaattcacaagcacaaataggtgctctgttcacaaggaggagcttcaatctggatgaattatgttgttttctggggaaatgaattgtgtttagttgatttgattcttcatctttgccgtatataattgtactaatggaaacacaaagctacagtacaaggaaagagagtggaagctgaggactaatttcagtattcgttgggcgcgtgagtggtaattaatttgattcattttctctgttggcgcaattcgagagttcgtgttttggacgtgtgggttggtggtggattagctgaggattcactgtcaccgcttccagttgttgtcacagccgctcaccaactaaagacagtgaccaaggcaacaac

SEQ ID NO: 177847 - DNA, 1146 bp, Zea Mays
aaggttgggacaacaagcaaaactagaatcgagtaatgattcaagggaattattagcaaaatctcaaggtctctacataatataggacttgagataatgaattataacgattcatggaagtatggaacttgtgttagatcagaaaaaaatcgtacaatattaaatctgtattagaaattagaataggatggggaattaccaagcttagaagctagaattatggctgcggcgtgcggcctggtgccctggcgggcgagcggtggcctgcctctgctgcccatgcggccaaccggcctgctctgcgacccgcggcaaggcaggccctggtgggtgccgggctggccggtggctgttggcgtcagccatccaggaggcgggcggccccccggtggggacgcggattggagtactagccacaccgcgacgagcgacaggcggcgactagggtttgcaaggtcatcgctcgagttggaagagcagaaacggggacagggagtcggatgacagagagcagtcaaagacggatcactatcgatcctacgcccgcgtagactccatgcgccggcccaaaatcgtctcttgcgttgggtatggcctggcgagaagaggagcgtcgatctgcaaacgaagccaacaacaggcacaactagtggattggtggtgagccgaacaaaaacaggccttgcattgcgtccttggttgggatgggccagacactctgtacttgagtggccaatctgctcgttcacttccgaaagggagtcacacgccaacaaatcacgaaaacaacggtgccatggctctttctcacgcctagccagcacctcaacacaccttccttcctagcttccacgccatcgctttaggtcgagctcgcccccgctgtcaccctccaggagctcggcacctccaggtgttcatgtgcttcgccatgctctacgagtaaacgctcgaacttgtcgtactagctcctctttcactggaatccgcccccttccctatcatccgccaccgactgtggttgtgaacacataaatagagagggttaggagacattcttttgtcttggctcggtggagatctctggtctgtcgctgggatatcgatgtcgtcgtcttgtagaggagagacgatctgagccatcat

SEQ ID NO: 177848 - DNA, 360 bp, Zea Mays
gtcagatatgatatgtgtgtgatttctacagatgtctgagaacaggcgcagaggtgcaaggcgtgctgagctagaacaacaggcaccctaggcggatgcagctcagcagcagttgccaccgccacccccgatgaccattgagcagatgttcctgatgcagacccaagcagtccaagcaattggtcagactttagcagcggtgcagcagcagccacccccacctcaacctcaggtgcaagtctagatgccacaggtgcccagggacaagcgggtagaattcatgaggggccatcccctgtctttgcccattccgttgatcccatggacgctgaagattggctgcgtaccgtggaacgtgag

SEQ ID NO: 177849 - DNA, 882 bp, Zea Mays
ctttggagctctgtagttctaaaaatacaaagaatttgcctagggtcaacacatcaaaagtctagagctataataggagaacaactttgcttaagtaactaagctttgatcacatacaaagtttggagaaaaataagctcaaagttgtgatgtcagtcattctattgattgaattttggtcaccagtgacattggccagacttttgggtcgaattagagtaagatctattgctcgattgagggtagttgctatagcagaattgttgctggtatgaagggctacaagtttgctacagatgtattggcaagttgttgcacaaaaattcgagacatacacattgcaattcggtctgtcaggcgctctgaattgggtttcaatggtacagtgaccagatcagaacgccagctcagagaactcaccgccggtgaccatgcgctcggattcgtgcccgccacggtgattcgtgctcagcgcagttggataacgtagaggggtaaggaaatatcgcgtggatgaactccggccactattctactccggccgccgtacttgtctgagtcacagccgatgtggataggtttgtcggagttagccacctcgcgaccttgcgccacgtgccctgacatcttaccacgtcgcagtagctcgcgttatgcatatccggtgatcgtcggtgagctcgccacggtgaaagccactaatcgcttatgccagtgcatccccttccctctgatcgccaccgcgcaatcacaaattcatgggccaccgctcaagggccctataaattgagcacaccctcgactccgctatgtaattgtgcactcaacacacccactcatgcctccaattactcatagagcccccgaatcgctcagttcccc

SEQ ID NO: 177850 - DNA, 631 bp, Zea Mays
tgaagatgatgtttggttagggacgacgtctgactgagctatagctaagatgagatggacctgcccttgatccggtatcctttcttggcaggtcggtgactcggctcatcaataactgccatgcctggggtccgaacggcaccggccatgatgctgccaggctttttttcctcacgacccgttcccgtgtctcgctaaattattctccctgttgccgtgagccactgagaccagagatcggcgtcgaaggcaggtccggagattaggcggctgtgtcgtcggaaagaaaggcggtcatgtcatcatgtgttgtgcctctccggccgggtccatcggtccctacggtatatgcgctcagttgagcatacaaaaaaaaagtttctcataagtcgctaaaactattgaaaacagaaaacaaaaatctcttctaatctaaataatggttacatcacgatttaatacacatctgaatcgaacaaaacgtagattggatctgcaccacagctgccgcaccaggttgggcaagaacggcctgtttcgcttgatggctgatggggccggcgcaccaggttgggcaagaacggcctgtgctcgggacgctggacgctggagcaaccattcccgctcggct

SEQ ID NO: 177851 - DNA, 361 bp, Zea Mays
taagaagcctttctcaataaaactgtgggtggtaccgtcttaccaacaatggtgccaaatgtaaccaacaagaacacataaagtaatgatatgtgaaaaaagtagcaatagataatatatatttggaaccagcttggctccgttcggcagcataggaacagttccaagccaggaactgtttcaggcctggatttagtgcatccggctctttcgctctttctagtccagaattaatccaattggattacttttgcctagaacgcttcttctccttgttcgacaacctaggattggaaaacgttgtttgagaaaaatatgagttacaggcttacaacttcaaacatgtgatagccaaacctga

SEQ ID NO: 177852 - DNA, 318 bp, Zea Mays
gtcggggccgacactcttaaacttaccgacactccttcaacgttttcttgtagtggttgaggaagtttttgcgggatcctgaccatcaaatcgagttggaaccgatttctgtgcatcaaaatctgactctggagtgtcgcctggtgtgtatcttggagtcctcggagcgtgtcatgagaaggagaacaattaagtatgttaaggcgttgtggactaatcagtctgagcgcgaggctacttgggaacttgaggagctgatgcggcagaagtaccccaaacttttcgttatgggtgagtttttgtcttcgctgatctctc

SEQ ID NO: 177853 - DNA, 627 bp, Zea Mays
cttcggaagccgaaggcccccaacaccaatccatacccaagataacatcgaatgcccccaaggaaatcacaaccagattggccgaaaaggcctcatcagcaagaatgacggaacactcctgacaaactgaacagctactaatggagccattaggagaactaaccaaaattaggtgacccaacctctgcactgaaagaccagcccgcgacacaaaatcctccgaaacaaacgaatagctagcgccagagtcaaaaagaccatgagccacaaacgaatcaacttaaattgtacctgtcaccacgtctcctttctctctgccatccgcagcgggtagcacataagccccggaaatacccgcagaagaggaagctcccggagtgaaattaacagaagaaccccactgagccgccgggtgaggcagacgcggagctccaaactgagacggcataggagtagtcggtgaaggagtaggcgcagccagatactgaggaaaaccctgcatcggcacgaactgagaagtcccaggcacataaaactactgcagaggaagtggaactgaaaactgctgctcagcacttgacgtcatgttgatagtgccctaagaagaggaggaagtcaccagctccc

SEQ ID NO: 177854 - DNA, 551 bp, Zea Mays
tcgactcggaattgatcgctcgaaacagggaattgtgtgaaattgaagcctggaatatcggattggcgtgaaatttggcgaatatgttactggaggtgttttgaaggtgcctgaaaagtttgggttcaatcggagcaatttgggctggtttggacatttcaccgaacacgtggtatgcggtgagatagggttttggagatttggtcaatttaggctgtgaaaccctccctaaggagctagaaacctacaggagtacttcaaggagcacacatggactcaatcatgcacttggattctcaggatttgatagaaattggaatttgaatcaaagggtggttgaggagtgctcattgggcagagaaatggtgagagagagggaaggcactggagctcaccagaggagaagggaggagcaccacaggagcacggccaccggcgaagaggaggtcgccggagaggagagcaggggagatcgccggcgagggaagacacagacaaagagctagagaggaaggcagcctctggctcggcttcgggttagaggcgttttt

SEQ ID NO: 177855 - DNA, 632 bp, Zea Mays
gggttagtttagcacatatttgtcaatgggagctcacggttttgaattaggggtcatggtgaacacgctcgagtttgggtgagggggctgaatttcagaaatctgaaattctgatttctatagaaggcttccacttgaatggcttgtttggggattttgaaaaatccttttgggcaaactctcttactattttttgtagcttgttttgtgcattaaaacttttataattggctcaagtcatgataatgtagttttcttggtctttattgagttttctttttagtgctccattgccctctagaaagggttgttagggttttggcattttctttcttccttaagcttcatatggtcagggtatggttcctagggtgaaaaagacttgattaagttcttgcctctaaattttggtgtcttttgctcaatttaattcacatgtgataatggtcgcaatgtggggattgagggaaaaaccttgggtaacagtggggtgttacaaccctcccccttaaaagaatatcgcctcgagattcgggttagggtcctccaggggtatggagaaggttacggcttgcttccatggccttggtttgtttattagggttctttagagaacttgctcttcgaatgtc

SEQ ID NO: 177856 - DNA, 705 bp, Zea Mays
cggggttggtaatttatagcaggcttgagcggtgaccggtgaatttggattgagacgcgcggcggccggagatgaccggggttactggcgctcgggatcagtgtcatttaccgtggcaagctccccgacgatcatcggataggcttaacacgatcgactgtgacgtggtaagatgcccgggcacgtggcgcaaggccgcgaggtggctatctccggcgaacccatcggaagcaaccgtgactagctcaggtacggtggtcggagtaaattagtggccggagcatatccacggcgtgatatttacttaccccaagtgctatccaactcatccgagcgtgaatcgccaatggcaagcatgaatccgagcgcacagctcgtcggcggcgatgggatctgaacctgatcctatccggttactataccatcgaattgttctttagtcagcctgacagaccaagtttggcattgattttctcctgatttttcatggcaacttgttgatcggccagtagcaaagttgttgtctaatgatccagctacaaccttgctatagcaaccatagccaaactctcactagatcattgttgaattccagtccaaagatggctcaatcacactgtcagtctgattttagacctaagacagtctgacagcccatctttgggtccaattttctcaaaacttttgacagtaccaggacttgat

SEQ ID NO: 177857 - DNA, 695 bp, Zea Mays
gcctaaagtcaggctgtcaggctgattaagtctgaatttcagactgacagtggcctggacccaagtttaagagccaattcaaccatgatacagtgagaatttgaccatggctgctatgacaaagatgtaaccggtttgtagccctacaatcttgctgcagagcttgggatgagttgtcattggaaattgagagtaaatcatgctccaagatgttctgtcagtcgactgaatggcgatcgccatggtacagtacctggctgggatcagaccaaaatatctcaccgccgatgaaatcccaccgtgattcgggtcaccggcgtcaagattcacgctcgtggtggatggatagcatcacggggtaaggggatcttcgccgccggtgggctggacgccactccagccagccgtaatccctcccccttgctcactgcccgtggataaggttctcaccgtcatcaaaccttcgccgttgcccgccgcgtggctctgcctttccaccgcgtcgtcgtgactccctatagctgtcccatcgtcgccggggaggttgccacgacggtggacacgaattcactgcgccaaggttcttcttcatctccagccgccagcacggctcggccaaattgatcaccatcgctcgctctccctataaattgagccctccaccagctccgcaaggtcatccagcacccagccac

SEQ ID NO: 177858 - DNA, 631 bp, Zea Mays
acacaactaatgacaccataaatgtttagtcgagggcaatggttattcctttgtcttgtggctatttatacctccccccaactcatgcatagagcctcccttgcatagttgttcagctaaggaacacattgaggagcaaggatgagttctttccaagtggggtggttcagatttgtttatcgcaatgttaaggacctcattagtgcatagatagtagcaagtgtgcgcccactcttttcattagggttggttggattaggtgagagtttgttcttgttactcttagtgatcggtattacatagatgacttgttggtatttgtgagtttcgtgatcactcggtggagtttgtgggtgacccaactcatggtgtgagtggttatgggtgattcaccttatcagagcgaaaaggaatcaggaatattgagcactcagtccttgcatggatcatggcagagctacacctttgcgtgagtgcacaaatgaggacaagtagggactatcgacgctctaatatcacaagaaaacattgtcatgttcatgtccctctatttactttgtgcatttgcaatggtacaattactttgatgatcttacattactataattgacatgctagagtacgattggaa

SEQ ID NO: 177859 - DNA, 900 bp, Zea Mays
gaaatacccgaacccgaactcgtaatgtcgggtacccgaaatttgtttgggaaattcgggtagtaaattgtgaaacccgaaattattctgggtaattcgggtagcaccaaccggtacccgaacaacccgtacccgaatattacgacggctgccgcggcccaatgttcacaaataatcacatgctggcagctggccggcccaggcggccaggcccacccacgccatgggccacggtccatctccaggcggctccatgcctccatctctagagtctaggcggcagtcacggactcacggacgtcacgctccatctccagactccagcctccaggcggcgccgcgcgacatctccactctccagcgactccagcggcagccaagcgcccaagcctccaaggatccagcctccaacgtccacgccgtcgacgccgacatctccagccgctgagccaagcgcccaagcctccaacgtccacgccgcgacatctccagcggcgccgcgacatctccaggccgagccaggcagccaggcgcggaggcgcccaggccgcagtcgtacgccgtcctgctcctgccatccaggttagggtccggtcactgatatggtcatccttaattttctactgagccccgcccaaggaatagagcagacagcagagcacatccctaaccctaattgcctaatggcctaatccgatctcgcaggctcgcaggctcgcatcaggcagcacggcagtagaccacgcatacctcatcgcccgacacgacgacaccgaccgaggaatcaagcaacgtatgcaatttttagcatcagtatatgttgtctaattatcactaacttagtaagttagtataaggtttgagttttttgcagatgcctaatagtatcgatgatatagt

SEQ ID NO: 177860 - DNA, 703 bp, Zea Mays
aggatggcacatggctacatcccaacagagcaacgccaaaaaagagatcagggacacaggaatctagacttacaaccttatttagatcaactaagtcttaccaaacacttacttaattgtctacagccgaccactctcagctgccaattcaccatgtgatacttcttgtcaccggagcccacccatgcgcgtgattaaacacctctcttgccgtctctctgattcgcttgcttcctgcctccaacatcttttttgttctccctgtctgcattagtgcccagtaatccaaaagagaacaacacatgaagattacatcagtggggtcattatggagttttttattaaagcaaacagaatttctggacttccagatcgcccatagaacagctccgcacccaactgcaacagattttctgtaccccttatcaaagtttctaagccacaccccagttagatgttccacatctgacggagtagtaggcaaataaagtgcaatctgaatcagacgccaaatgaatcgagctactgagcattcaaaaaccaaatgcttagtagattcaaacaagccacaaaagacgcaatcagagaccccagaccagcttcttttaatcaaattttccttcgagagaattctgttcttgataatcagccataagaatatcttgattttatgggggattttgattttccatagaaatctgta

SEQ ID NO: 177861 - DNA, 698 bp, Zea Mays
gcacgagagagggtatcagtggaatatgaaaacaaattccttccaaattttgacaaaaaaatcatgctccaagaatgaatgcactaacaaaggagtttgacttttaagcataagatttgagggttttatttgaaaacaaatacttttagggaatagatttgaggtgctacaggcgaggatgatgatgagggatcaggtggtgtgattgcgcaacacgtagagtgattggttacgcagcagagggtttcccacagctacgcatgacagaacagagaaaaggagtaagtagctatcgcggaggtcgttgggaggtaggagggcgatcacaattctggcgcagaggctattgcacgagcgcatggtgggggcgagggcaggagaaacggtggccgtgtcagacggagcgcgggttgattaaagaaaagtgagggaggtttgtgaaaaaaatatagcacagaacgactgtcgaaactaatgcttgaatggagtagaggttagacaccaagctattttttactctcaatagatatttggcaactagctaaacattggtttaggaagattttttagagaactattgaaattgatgtttcacaactttgaactgggttacatgagccaccgaaatagttgataggcccatcgccgtgcccttgaaatctgtcattttattatattttttattaatcaaacaaaaa

SEQ ID NO: 177862 - DNA, 1159 bp, Zea Mays
gaaacaacaagggcgataagtattgagatgacgtagctaaagagtacaacctcactactatcaaagcgagatgaaggactagaactcaagtcaaggaaaggtggcacaaaataaataagtgggcaaccacgttcaatgattgttggttgaaaactagaagggtgctcaccagtggctattcggatcatatgtggatggagaaagcacaaaagttttatcaagatgaaaacacaggatcatattttgtgcttgttgatgtgtggaacataggaaaaaatgaggccaaaagtggatttatataacaacaacctacaaagtaacgacaaccaaaaaaataagttaaaggagagggacaatgttgtctggtatcgtaattaggggtacttggattacgctcctaaaatacgcttaaccccaagaccaccgtcagacacattcctcgaggtcaagagagcataacccgcgcttcgcctgaggccccactcggtggtcaccataactccgcttcgcccgagcctgccctcggacaagctacatactcggaagaatcctcgtcccggtccaggtcccctctccctagaattgttgtctcagcctcgctcgagcccatctcgggcaaggaagtcaatcccgaggcaggtctcagccgttggccgcaagagacatgagcattcaatgcgcacacctaacccacgcagtgttgcaggtgaacaggagcgacaagactatggtcccatcggacttcaccaactacgatgacgcatgtggccattgttcccgcacgctgcctgccaactcctaatgggacacacatacgacaaaagtgtggggtgatcctcgagcgcaagctccgcctcgcccgaagtcagcctcagcctcggaacaaactccgcctcgtcccagcccggcctcggctacctgctccctgggaatcccgcgtgatgtcactccttcaagtgtgtcgctcaagtctacgaatcctagagcgggctcggtcacggcctcgatattagcgacagaaggtgcccgacgtcaccaaaaactgcagagctcacgtattacccaagggcttttcgctatactcagcactgcaccaaccactatggcatgggtaacctccctgtcaaataggcttaggaacgtgaccgagcccgtggcc

SEQ ID NO: 177863 - DNA, 474 bp, Zea Mays
gcgcaaactgctccataagatctgcctttaagtcacgttccccctcgctgcaatctttgcccgaatccaatcccactaacatcgtcgaactgacacagaaggactgggcagggcgagcaccactgagcggcaagacgtgaaccggcccgacaggatcctccataaactgcttgagcaaatctgaatccaatgcagaacttaccatcgtcgggatgacaggaacctccctagcatcagatctcgcaagcgccaatttcccatccggaacggcgaagacacctccattgaggtgaagccctccagccgaagagtccaaagtcgggcacctgagcgcaacccgatggccattttcctctggatctagggtttggcggctggctctggcgactgggttgggggaggaggagaggaccatcccgctagatcccagttgagttcaatctagttcacatatgatactcatagtgtagccat

SEQ ID NO: 177864 - DNA, 449 bp, Zea Mays
gccggaattactaggccattggggccgacctcaggcggccataagaagggcgaagccgggtctttgccttcccctttccctcgaccacgtgcaagcaaccacgccggatccgacctccaccatcgccgtagaaccgggagggaaaagggagtcgcgacgacctcgccgctgccactgcggatcaccttggggttcgtcgcctggcctcaatttgtgttcgcggtggattaccagaagttggtgaagctgctcgggtcttcggatggtagagcctagggccgggattccaccaattggccgccgtcgacgcgtcaccaccgctctgcgtggccagatcccgacactgcgccaaccgtaggtaagagccttgcccagtcttgtactactaccgaattagtgaaatatatcctcgactgtagagatgggtccctgggaccccgggtatttgc

SEQ ID NO: 177865 - DNA, 791 bp, Zea Mays
cagatttgtttctgcatttttaatcttcaaatccttctctgctagagaattttcaagttctttcacccttttctctaggttactgacaacgagttcattcttctggtcttcagcttcttgctgaagcttcaaagccttactcagcaataaactctaccaagaaacaaaagctagctgcaaaatctaaaagtttaaaaatttaaaaggtcaaaggggcggacataagagtttataccttaaaatttgagtagaataagctcccagtaatgtgttgtcttctatagttactgaggtctcgctcaagcttcagaaatcgaatagtctttgataaagtattaacaatctttgctccggcctggtcaggaatacaccccaaaatctcttcgtctacaccgccaaatagcacagatctgggcttatatccgccatcaagggcgaattatttcaattcagaaatatcatcatcagacagttcttggccgcctaggtgccatatgtccaactctctgtcctccgaagccttatcggtggatacttcggctatatctttcttgggagccacatcagatataagcctgtccatctctgacagtgtggtcccgaggttctcagcttcaggtgttgcttcattagcttcaacttcggtagtatcttcggcattggtaggcacaacaattttttccaccgaagccgagggcggggtcttttggatggcttgcattacgtccatcatccgccatttcttctgaccccctaacatttccctgggtagccaaagcagtttcctttcc

SEQ ID NO: 177866 - DNA, 429 bp, Zea Mays
acagtgcagtcgcaacatcctgaggttggcagggtaacttggctcatggtggggcattcatttagttgtgattgtgacaagtgactggcgggtgctcaggcgggtgcacgaggtcttgccggagtggctttctgcactgaggtatcacttcaaggtctgcaacctgacactttaatatagcagcttggtgtgcacgacaaggctgtatcagggcatagggtgtaggtggggcttgctaggatgcacaaaagccaaggcggctagaggcaggcttacgatttctttacgcatgtgttttgccacaggtggtagtgggctccctctgcctagtgtgcgctatggcgggcaggcatcagacgttttcaagaatttaccatggtgaaatacaagcttaggctataatttagaagaatatcgaggaataagcga

SEQ ID NO: 177867 - DNA, 422 bp, Zea Mays
ttcggcgatcttggcgggtagggaaacgacacgaggtctggccgaggtgctgcgtggacggtgaagctccggcggggaacgcggatggtgagcacgacctccggcgaggctccacggactccggcgacgatgttcgacggcgagcaacatagtgagagagagaggcaagctcggctgtgcaagggaaaagagaggagcttggcctcggattttatagaggagaggcaggaagagcaaaggtcggtcggggtcttcaaggctgtcatcaacggcgttggttcatggagtaatggggaagaaacagaggcattgaagtttcataatgcaggagagaaacagacgagtgatcgaggtcgcgggcggttcggctactcggtcgggcgctcaaccggtcggggcagcagggcgaggcggctgcgcgg

SEQ ID NO: 177868 - DNA, 454 bp, Zea Mays
cgcactctaaggcccaaactgccatcagtgacaggtggatttgacacaaaaagggtgaaggctttgggaggaggcaggttccaggccgagtatgccactggagcaccaacgtttgacactttgcctctaaggatcatctcaagtcggctcaccaagtctgcagagggaatttttctgttggtaacccgagttgagtcggctaggcctcgatacatataggctgggtatgccctgtccttcaacggctgaatattcttgaaaacaaaatcagtaaccacggcttcagcagtcagacccctctctttcagcagtccaacttcagctagcaacgcacctgcctcagctacctcctgatctgtgggagactcggtccagcttggggtgcgaacgtccggctgtcttcccgaccgaggggggagagagttcccataattctcaactatgaaccactcca

SEQ ID NO: 177869 - DNA, 1149 bp, Zea Mays
gggcacatcctatcttttcactgttccttcccacacattccattcatcagaaggggaagggtgagctataccctcgatggtcaagaccatggtgttcagtgggcttcaatcggttgatccgaatgtgccctccttttgtggagcgagcccctgagtccctcgttcgttataggggatccgtctgtggcgccccatctttttaatacttcttcccgcacattctattcattggaaggggaagggtgagttgtatcatgcttccttcgatggtcgagatcatggcgctcggggagctccaaatgggtgatctaagtgaggccccgactcctttcgtaggatcaaggcgtggggttcgctggggaccgtcctcatactctcaggttccaactcatatagttgtcggccccattcgactgggtccaacgactcacagcctctttgtgcggtaaactatgagccaggaattccctgggactcgaacatgatttagaagtgcccttgttgcccgtgtgctagggtactggccgcttcgatgctcacttcataattgcccctcgcgttgggtttcgggaggggtaacaaacccttcatgggctgaccttcatactccaagttttaccggattgatcgggtcacctcgtagtcatgggttggcgagggtccactagttccttccctacatgtgggagataatatcgagtattgaaaagatgggtcgagtcatcttacccggttttgccttggcagtagttgggcctcggcgctgcttcctgcgtcgtgtgggcattgctcgaccctttcatcgggctcgtgggttccatggcccccagggcatgtgcctcatccggcccagctctgctcatcgaaaccggcaatacattagttgtaatctcctacttaccagtatgggcccttgatcgggtgaccatggcctagtgggtcgtccatccttgatttgaagtgatggcgttgcccgacttcatcccccagttcaccttcttagggtttgctcgcccctgtcgttgccttgcgccgtcgttgcctgccctcggactgccatgggattctagaatcgctacctggccgtccaaagctggatgcctttgcttttcgcgggcttctgcgtgagggagactacctgctccccag

SEQ ID NO: 177870 - DNA, 479 bp, Zea Mays
tagtgttgaggcttggtgcgccctgttccttattggtggaggtgctcgtgcccgtgcccgatcgggtggctgctgtggcctgtgggctctaggttttgtccccgagccgccgtagagcgggattatggtgttcgggtctaggatcacttcagtcttcagtgctggtgatctggcatagttctggtgcaaccgcgcgctcgttcttcgttggttctagcttgagtcctgatcctagactatagtcaatggtgatttttatctgttggtgttggagcaccaagctaagctgcagatgcttcatcacactgggctctgttaattattactaagttcccagaatagtaagacatatgttgcagctgtttgattggtgtagcctgtgctgccacggtggttagtgattcggctagcgatgtagcatcagaatgcagctttgaatagaaattggttttattttatcatttggggaaaatttacgc

SEQ ID NO: 177871 - DNA, 367 bp, Zea Mays
tggaaccttccactagatggttgccaactggtttgcaaaggaaactgattcaccagagtagaaccttggccatacggaacaatctgcgtgttcttgcctccataagcatgcacagtttcaaatgtttggctcccattagttgccatcctttctgcgatattactagccaatacagatgttccgagttctttgtccatctcagatgccaacttattgtgttatggactgtttccatctccatccttgtcatctgaatcgagaactattatgtcacccttttctttttgttcggctggctccacagaatggttggtcgatttgccacctccgattttgctggctatcgcagaggagttttcagaggcgc

SEQ ID NO: 177872 - DNA, 668 bp, Zea Mays
cacaaagtgtgagtctctgaggagcgagaactggccctaagacacaagtatgttgggtgcagacatagccccttctagtcaaacattgtagaaatgaaatcttcagccactaaaagaatcataaagccataggtgaatactttcatataccacaagaccactctaagtcgttttagcatgagacctatgttatacatgcaagtatttggagtagatgttgagtcactctttctctttttttaagtaaagtggtttaaagcctaaaatcccatagacagaaataaacatttctttctttaaacaccattgggctcctctcccccatggcacacaatgtccttaaaagcaaacgcacacatacaaccctttcctttttcgaaccaaaattctctaattgtcatagccatacccaacccatccataacagcgggcatggctattttaatagattttgactctgcatagaggtacactttacccactagtctggctctgcagtctcacttccatgtgacccgataccaaaacccatcctcccttgcatggctttaccttggcgattataccgagaggaaaaggctaccatctcgcccaaaccaggacggtaatgctccccttccttctcctttcgatgctccccgccaccgataaccctagggtttagctca

SEQ ID NO: 177873 - DNA, 524 bp, Zea Mays
aggggcagaaatgtacttgagcctatacctacccgtagtgccctataaaatacccaagttttgtagccggatgggacacgtataacaagacgctacattttactaaccaacgttttgttgtgcaactcacctcccacctactccctagtgtttgggcccacctgactaactgtcattatgtccgaaatttggcgcccaccgtttgtgctttgaataccaacacccgtgatggctcccaagaaagtgaacactagagtcaactcctcccccggacgaggccacaaaggcagcctgatgcaaagtaaccttcagcgacacaaacccaccaccgatagttggaaacaccaccaacagatgtgaggtagaaaacaacaaacactcttagaccaaagacccacctaccccggagggcagcatccactcctgcagctccaagagcacacccgaagatcccctcccaaacctaaagagccttttctatcaagccatagtatggccaaacttgacaagaaacagaatgcccg

SEQ ID NO: 177874 - DNA, 561 bp, Zea Mays
ccctcaactaccgataggcggggcccacgttgtcagctgtgtatgtggtgcgtgtgcctgggtgtcccgtctcactgccaggtgggcccctgttaccgggtctccttctcccccacgcgactcgctcgcgagctcaccggccgccgggaaattcggggtagttaggccggttgattacctccgcccacctctgcaactataagtccctgccgcaacctcttgcctcacctctctgtttccctggtcgagccatcatcacccccgcgcgccatagccgatgcagagaggagaggattagggagggtggttgcgccaccgttgctgctcaattcgccgctgcgcagagccaagacagggtaccagggagatttgctgtgacgtcggggtcttctaatcatgatctgggcgaccaaacgcacgggcaacgactgggccaggaaggatttctcgccgtaattcaatcaccgccgtggagctccacctccgcgtggtcagggccaccaccgccacaatccgaggtgaagaaaccctcatctagtttgtctcgttggttaaatcgtg

SEQ ID NO: 177875 - DNA, 589 bp, Zea Mays
cgagtagacacaaacaattatcctagttcgggcaacacaaggccctacttccagtagagggggatgaggcttatattactcgcacctaggtgcttgtagtagttgtttacaagcactgtgggagaggggaagtcccaaagtccctagaaatgattgaggcaagtgccaatatctaaggccgagtagatcgagtggagaactaggcattcgccggtgcgctgctcgtatggtcgtcctttgcccctggagggaccactgccctatttgtacacgaaggggagcgtccagggtgaaactgggtgttgtatccgaaggagagatgtcctggcgtctgtaagccgacgtgacagtgaactttattgttgacttgcgcccgctggtttcccgtagagagccgaggccaaggcagaggggtcgtccatacgcctaagcccccgagggagaggcttcccatgccgtagttgttgtaacagcgctggggtcttggctaaagactgcttatgaggtgcgtcggcgtccttgcacgggatgacattgagattccctactgcgttcatcgagatcagagccctagctcgaatgaggcgta

SEQ ID NO: 177876 - DNA, 454 bp, Zea Mays
ttgggaatcttcaggcggaggtcatttccctaaggaacaaagcccttgaaaaggataaaatattgcttttcttagtggataggttgaaggccagtgaagctaagctcgatgcacaaaccgaagctcacaaggtcgaaattgaaaacttaaagaagcaactcgcagaaacaagtgagaaatttgaagtcacaatggtaaaacatgagataagcgaaattgaaaaatccagagcgcaaaagaatgccgaagagctccagaattctaaagagaaatgctagaagtatccttagggtgcgccaagactctaaaggacagttttgcaaaagtgggagcatactcttcagagcagaaattcatccgtggtgaccctgatggtgtcgtgcaatggatcaatgaagaagtcgaagcctttgaggaaatattaagcgatcgaggatacttttgcgcgtttgct

SEQ ID NO: 177877 - DNA, 858 bp, Zea Mays
ccacgagacacagaacaggctgaacatgttcgaggtcgatgatggtgtcgctgaacaacctgaacgtgaaataactatggctttgttggccatgttaaatgacaataacaaacttgtcaaagcgtttcaatatgcaagggagcgattggaacaagcgggtaaccagagaataacactcaggttgttaggttgcgatgcaagacaagacgtccaatacaatcttccctccggcggtgaagtcgctgccatcgttgtgggcgactacaccgctgatgaatacacatatgatgtccttgtgcacgatagaaattgcgggctacgacgtgtctcatgcttgcatccatcctacatggctttgcagtaccctctgttgtttccttatggtgaaaatggttaccatcttggcattcggtactgcgatgacgaagatagtgttgggaccaaacgaaaatatgtaacaatgcttgaatttgtaagaagacatttacattacagattacacgagtcaaacccgtacacatgttatggtaggttaagtgctcaggtcattgtcgacgcatattcaactatcgagggctccaggttacagttcatagctgaccatcaaaaagacctgcggtctgaatcagtgcaggggatagctgatgccattgatagaggactaattagtgcggacgctgttggcggtaaagtaatcgtgcctgcgagtttcactggcagtaggcgataccatgttatgaattaccaagacgcgatggctatttgcagagtgtacggcccaccagatctttttttgactttcacatgcaaccccaaatggagggaaattgcggatgcgttgcgcttcgaaccgggtca

SEQ ID NO: 177878 - DNA, 335 bp, Zea Mays
caacggcagcgtcgctcgcgcaacggcggtgtttgatgagtaccggagagcgctctgcggcatcgtgagcgggttagctttgcattgcaactcaatttcaggttcagccatggattggtttagctcgatcggtcggtatctgacggtggtggctgagtttgcagctgcgttcccggctgggcgtacaaggacagctgcccgtacatcgagctgccggaggcggacctcacgacgtcggcgttgctgccggtgcagctacagttctaccacgtcagtagatgcgccatctatctcatcctgcaaactttaaatggattcgttttttctttcaagtc

SEQ ID NO: 177879 - DNA, 794 bp, Zea Mays
gcttcaagcttcgggaaccccatgcttctggccatctcccggtagacagataattctttgttgtctgggaggcaatacaagaagtcatcttcatctgtgccattaaacactaaggcccctttcgggtactttagttctcgggcatagtgcttagcttcaaattttttttcttcagacaatctttttcccgaagcgtgccgaataatataatcaaggacttcggaaggcgcttcgggagtaggagcggcagctttttcaggcagaatctgttctatagcttcttcttccgctgccttttctccagtttctaaggatttctccttggcgggctctgaaggcccagcttcggcgtcggcctggctcattgtagcttcggcttcgttcggctttgtctcggtttcaatctgcgctttcgaagccttggcagttttccctggagtagagcttgaagcttttattgtctccagcacatctagtacactagccatcctttttctcttgagggtcgttgctagacctttttgtgtcttcgacacctccactcctgccgaagggcttaggacttctaatgtttttgccccttcgattctcgatttttcaattttgtcattctttgacattgcagccgactcttcaatcttctgcgtaagagcaggtcctttggcttcaataactgaagaagtctcaccgccaaattcaggcactatggccggttcaatgtagcgtggtcggtgagtaaggaccttcaactttttcctcttcggtgcgggctcgcttgaagcagccgaagtagc

SEQ ID NO: 177880 - DNA, 476 bp, Zea Mays
cgccgctgcgtgacggcgtgttgggcgatggcgcgtgttccgttggatccaacacggacgatcgggattaaaccagagcttaccgattcaatctgttgatcatgtccgtcggtggcagatcaacggccatgggagtttatgactttgttttcatcgtagtcgtaggatcttgatccgatggccagtagtgcgtaccggttcgcaagtgtggtgatctaatctggaccctagattgcagatcgggcagtcagaaacgcttgataccccttcggctagagtagtttgcaaaagagaccccacagttttaggaaaccaacccgcagtccaagttgcaggaaatctgtgtctttgggaattttctgcgctagcccctggactttcttaatattgacgcctagtctagagaacaaataaaaccagagaaatgaatttatagtattaattaaatgccagaatttgtataatccatagaaaat

SEQ ID NO: 177881 - DNA, 1030 bp, Zea Mays
ctgatctacaaaaattccttagactcagagaatatgactctggaccgcgggttggttataatattttctagggtttcttatgtaaaatgaaacgacgaaggggtatcggccatcgagagccgtccgatcacgaccgatcggacgagattagaacacagcactgtagacacattgcaacacgccctggccatcagatccgaaatcgacggatgagggacgaccatgccttgattcgatcccaagccttcacccgcgatccaacggtccagttttcgcgtacgcgcgttctaacgccacccgtgcgatctcgaccgtctattttctaatccacgggcgccctggcgtcttcaacctcacgccgcccacgtacagacgtcgtgcccaccccagcactctctctttctcccgttggtcaaccggcgagcccaccgcccggaccagtacacggcaccgccgttctccggcggcgcaccaatcggtccacacctaaactccgctcaggctaccgctcctccacggaccgcacaaaaagccacggaatggagaaaatgaggtgagtccgaggtggctactcacccgaggtcccagcgtcgtgctctgttcggtggcgaagtccctgcctggtgaggaatcggccacgcacgaacggcgtccacgcactgagggcgacggtgaaccccgcctcactttccttctcccgccgagttgcttgcgcggcagcacccggggtcggctttcttccctggtgctttggagcttctaggcatacgcggcgaccgcaaggagttttcctatgcaaacgcgacagggttatagaggagggcgaggggtaacgtgggttggcttcccgcagaattcggcgacgggttcacggggttgttgccgaggttctcggccggtttcccccgatccgcggcgacgccgttgtgggaagaagtcgcccagccaacgcggtcccgcgcgccagtgacagcggagaggtagtgagcgggtgaaagtctgccagtggggccagcggatcagtggtcgc

SEQ ID NO: 177882 - DNA, 637 bp, Zea Mays
atcacatgtatctactcgtatataacatatgcatcagaaatcctcatgtttattaatcttggtagtcactttcatctgctcatataatctagcatctgagaagaaacacctcatgcttattaatcttagcaatctagtctagtctagtaggagtatttccaattgatcttggtcccatttctgaaagcttgcatttgcgtacatgtcgaagcaaccgcgagagaacgcaacagaccgtcatgataatttggcaaatgtgccatcgtgcaagatcctaacgtacagcacgacggaatggttcatcgcactcttggcctgcaaatctaatacgaaagctgcaaaaaactatctatcatcagttcatcgcacccttctaagtgtggtgctcttcagaccagcactcggattgtcaccttagatttcaacggatttgtaatacaaaaaacaacagagaactatcgtcacagttcaggtcaggattcactcctcatcatgcaacttcagtgtttagtctaatatacgattccagacctgttggtgtacaaaaaaattgagaggcctgaaatatattataagaaaaggcattccatccgtgataaacgatatcctcaggagagaatggagtgaatggccatga

SEQ ID NO: 177883 - DNA, 737 bp, Zea Mays
gcggcatatagaacggttcaggttagaggaaggggggaattggagagcccagcgccccaccatcgcctcgtcttgtggtgccatcgtagttctgcaagtgcgccgtcgcttgggccttggtggatatccaggaaggttcgccgtcgtttgtggcatcgatgcatcgttccagtgtgtgctggcgtctggggtcaggggattacgcacctggttctcggtgccgccgcacggcatggtctgcacctaatcgtagaaatcccgggtaagacatcatgaactaactcgcgtcaatctgtgtcgtgttgctggggtgccttgcgccgccactgtcgtggggaggaagaagctgaccagccgttggatccggtacgattagatctgcggttgatagtgtttcgatcgccagatgtagcttgtgcggttaagattagaaccccttacaccttcgccttgattgaacttagaccgttggattagatcggatgggtgagaccagttcaaacctcataaaatcggggtcgtctattttgatctgacggctcagatcaagtggttccctcggccgcgcccattttacttagggaccctcgttgttacaccaaatcaacccgcagtacgtcctattgttgcctgagtcttagtgcaaattgcgccagagcccctggacttttcagtatttagcgcgcagtccagagaacaatgaaaatggataattaattacagaaattgatttttag

SEQ ID NO: 177884 - DNA, 703 bp, Zea Mays
cacgtattacataaaggaactagctctactcatgcttcactcttttgtggcagttgggaagctttgatcacttgagagtgttgctctagtgtattggagttattactcaactcgtatgtattgaatgggatggttggaggtgtatttatatcccccaatgacctatataatcgttgggatcaaatcccaaaatctgctccgaattcgggtgcatcgaaactgctacactgtccggcccagtgcacaccggacttctgccatgcctgtagtttcagtgatagttctgatccttctattagattgttaggcacaccgtaccggtcaggtggaccatcgaacctgccaagtcggtgccacatcatccgaccgttgagcaaactctttcgaccgttgggtgtagggaggtctggtgcacacctggactaaggtctgatgcgccagcagtctcgatcccaaaagcatcatctttgtgtaactggtttggtgctccaaccgttgcacaccagactggtccggtgagaaaaacccttgttctagaattgtgctctctacgtaactagttcggtgcactccggactcggtccggtgtaccgcactgcatcagtcttaagtctattttgggttttctaactttgtcttggtttggctgacttcttgagcattcctatgacttagacaaacatacctagattctatccaaccg

SEQ ID NO: 177885 - DNA, 843 bp, Zea Mays
gagaggttctggccgcccgatctgaaatggacggaccagattagatctgggccggctaataacccgcatccattctgatcaccggatccaagatcaacggccgcggtttaatgaatacagagctacgcgcctatcgtccgattatgatccaagggttaggaatcaacggttcacacgatctaatctcgggcgctcctttcccatccaacgaccatcggtccgtcatcaatcctacaccagcagccagctcccccctgcggcgcgcgcagagacacctccgcacggaccctgccactaaccggacttgagacagagatctgcccgccgtgagatcgatagccgatttaacggccaggggcctcccttcctcccgaccgacctgggtggctctgccgtgcccacaaattcacagatgaacggtcacagacctctgggacgaagggataaggtaacaactaatctcagccgtccatcacagaatcaaagggcacccgggcgtcttcaacctttcgccgcccaggacgccatcgtgccatacccggctccctctctcctgtcggccaaccagcgctctgcccttgagtctacagcggcaccccgatagcatgccagccccacaggataccggagaccccccagaccccagtcacggcgagttgcaacttgcaatatggtctctggaatacgcgctgaggaaaaaaaatagtaaaactcaccggagatcccgtgcgccagccaccgattgatgtggaagcccgagcttagcgagggagcggcgacgttcgatcaccatcactcacgtccatggaacttgaatcaccaccgacgtgaattcccgacggc

SEQ ID NO: 177886 - DNA, 850 bp, Zea Mays
gctatgcacccggctctgccccccagaaccgggtgtgacaatctccctcctcccggcgcggcgacggactcagaaccatgggattctatgaattgtgcagatttcgtcgtaccattactcctcagggccaccgtcccctagcatgggggtataaatatcgagctcttgtgccccctgatgcacccaattctagcacctaagagccgcttggaactgtaatcgccatcgctgtcaggagagtgacatcggcaccacgcgccacccccttgctcgccatcgacatatcgcaccgttcagagctctagagttgccctagaaacatcgttgcgccaagtggaaggtgttgccccgcatcagagttactctgcgggcgggggagtccgggaattccttgccggtgctcgtgcccaatctctctcccgcaccccgccatgtcctgcttccgccattgttctgcgcgctcggtaagccaccttacagtgttcgccattgtgctcacgctgtttaggttgtctcggtaggggagtttggtcgccagtgggccattttggccatctccagcaagctcgccgccacggaggcactgtgtgccgctgagggctgactgtgaggagaaagggaatgtggagcgatctgccaaccgttaatcgtagtttggacggctccgattagatcgtgcataccctttcaccactacggatccgggacattggattgtgatcgggcggtttagcgcgctcgctggttcataagtgacgagatctgatcctagccgtcggtgcaatccaatggctaatatcgattggtaccctttcacgatgactttatgctaaacagaccctgcacttag

SEQ ID NO: 177887 - DNA, 343 bp, Zea Mays
gcttcaacaacaattacaagggcgtgaggaaggcacacatgctgggggcaggcctagttattctcatgtgaatgaacatgcgaggagcagacctattcattctcatgaaaatgaacattatacccatggcaggggcaggcctagccgtccttatgagaattacacacgagccgggggcgggtctatgcaccgaactcgggaccgttatcatgaagagccagagtcatctcgccaaactaatatgaggcaacatatctcgggttatcgtcctcaatatgatcaaagaactttggctccaagaagaggttctcatcaatacttcaagactaggcatgcatcatcg

SEQ ID NO: 177888 - DNA, 507 bp, Zea Mays
tttgaccggtgtaactgggaaattgagtcatcacacaaaagcatctgaggtagttaaggtggtcagtgataaagttttgattcgttgcatcctgggtgatttttttttgtacttacgacctgtttctctcgtttatccatcttgtcaacctcttaggctcttactatagtatgtagttggtggcttggtgctattcccatgccaaagttatagccatgatataacagctaataaatattatgcataattccgatgctttcagagtctgaatcaattagttgatatattggaatacctttttgttatggttgcctcaattctttgacacatattttcatgttgctgttgtcaatcccttggagatgcttgctcttgcaaaagaccaagtaatgaaaaaatgctgggaacccagcctccaaaaagttgattcctatgatcgtttctgtctctaatatagaccggattgatgccttttccagcagagtattttacattcatgagttggcc

SEQ ID NO: 177889 - DNA, 401 bp, Zea Mays
ttttgttgcaagctctcgcctttcgtggtcatgatgagtcttctacctcttgcaataagggaaactttcttgaatttgttgattggtttagaaagaggagtaaagttgttcaaaaccttcttggtgattctcctgctaaccattcattgacttcaccaaaaatacaaaagcagttgtgtgaggcttgtgcaaaagagacctccaaagctatcttatctgatattgggaataaaaatttctccattcttattgatgagtctcgggatgcctctataaaagagcaaatggctattattgtgaggttagtatttttatgttaagcaacaagtatatgttttgtgatttaattggcttctatgtgttgtgatataggtatgtgaacaacaaaggctatgtcatcg

SEQ ID NO: 177890 - DNA, 487 bp, Zea Mays
taggggttgtcacgacggcgttctacggagcagaggagtgttccggtgttaggcttctgccgaacttcaattggttgactatgagagcaataggaggctataaataggctagaacagaaagcaattgggaagttactaacccgaggagtgctggccacggtggagttcttcacggccgtgcgaagaacagggcggactgattttgtgggcggtgggagttcttctggtgcaattgagctaattactcacgggctagtgtgcgtgatgcagtgaagaaggaagatccgggctcaatttataggctgctggctgggaatggatgagattcaccaagttgggattgtgctggcgagctcacccgcgcgatagagccacagcgaaagtacggtggccgccgattaaccgggtaacgccacctccctgctttaacgccacgtcgcgggactcctttaccgtggccgctgacccatccctgaccgcagtggcg

SEQ ID NO: 177891 - DNA, 364 bp, Zea Mays
gactcacagagaggcttaccagttaccagccacagtttttggggcccccctttggtgatcttggatcctagcttccttgtctgtatgggccacgcactaggaagtgaagcggacctagcttgctgctactttagagtacctcagtagagctagagactggggacaaaaatatatacacacccctgtcttctacagtagtacaggaattgcatgattagtgtgttatccgtgatctcgatgaataataagaagcgtcgaagctgagccaccactggtgatgaaaagattattcgctcaaactgtcttggtctgcgagattgagagcacactttcgcctcgaaatcccatgcaaaaaaagttctct

SEQ ID NO: 177892 - DNA, 358 bp, Zea Mays
catcgacggggcatcgcctcaaaatccccataaatgaagcatctaccactgccaccatgcgactggccgaataaaccaagaaatccaaccttggtttctccaacaaacgcaagatgacgatcatcagttccagcctcaccgccaaataggaaggcacgctcgtccagtttctgcaagacaactgggtgtattcgcgtggcaacccgcggacatgccgggagtccctagagagctggccaagatcaaactgaaggtgtatcctcaagcaaagccgatccgacagaaaatgcatcactttatgcccgacaaaagagaagccatacgtgctcagttagttcgcctagtagcatcaggcttc

SEQ ID NO: 177893 - DNA, 514 bp, Zea Mays
tgcatatgataataattaaaagcataacaaaggatacagttaaggcaagactcgtgaaacgacaaagtggagaaaacaatcaagggtaagatcggtaaggttccaacagaagggttgaagtaaagattcattaccgagtggagttacaaggagacaacgagatcatcaaggatatgcaaagtagaatgaccgctcatggatcattaagaaacaagggtggtcaagggcatgttaactaaaatgtcttaaacagatatcgggatataaaggtaagcatatataaaaataagagtatgcaagattccaatggtacgaacataccaagaccaagagagtacaaattgccaaaagataacgacttaacaatagaataggaaagggtctcaaaagacagtaatatcatggacatataaactgaaatgtttaaataggcaacagagtttttattagaggtaggtattgaaacaagagtattaaagaatccagggatacgagcatgtcaataccaggggaa

SEQ ID NO: 177894 - DNA, 573 bp, Zea Mays
ccggaacgcagacgtggtttgtgacgacaagacccctcgtaaatcctccccgtgccgtcttggcaccggcacccccggacggaattgacattccacccaacagggatcgagatcgccatggaaattgtttctaggacgaaagccatgtaggctcatggttaccggtatctttgcacgctgctgatggcgaaatgcaaccaccactatagaggaggctcctggttgttgttcttgactgcttggatcgagtagaataataaagacagcaggggatgattccttccccctgccgctgcatgctcgtttcttctctagtgtttgttcccttgtttcttttcccagtactgctcctttgttcgcttcctatccttcctcctcctccccgcctcccgagtcccgtccctctgcggatttagctcccacccagtggctcagctcaactcggaccactgagctctgaccactaactcaaccactccagatcacggcgggcactggtgcagcaatagcaaccgggtccaagtccaagaaatgagctcgcggggtcccgacccggcgccgcccggggaggag

SEQ ID NO: 177895 - DNA, 352 bp, Zea Mays
ggaggtcgttgccccacctcggccacctcacgtctatatggggtacccagaaccctggccgactcgttcatcctgcttttgagactcaccctcgccaaataccgtgtcgtgccgccgtagcatcgagagtggaggggagagcgctgccgcatcctatcctcggcctcatcaccattgaggtcttggagaggggtcatgaagcttcaccatgacaccaggaggacgtccctggtagtgcctggcgagattgatcctcaggacgacttcaatttctcgccgcacttcgccgccgccgctggggccgcaatgcgccgaggatcggcttcgactcgtgctctgggcttgtattttc

SEQ ID NO: 177896 - DNA, 1444 bp, Zea Mays
ctgagtcactggctgcatgtacccatgctcccgaagcggctgcgccatatcacagccaagaacgtggccacaatgcccagtattctagctccagcgtttgactctgcatgaaaggcaaaagctgttcaacgcacgcccgcaacgattgcgcaggaacgccacgacgtgctgaccacaaacccaacaaactttatcccgaagcggctgcggcatctcatagccaagaacgtggccacaatgcccagtattctagctccaccgtttgactctgcatgaaaggaaaaagatgctcaacgcacgcccgcaacgatcgcgcaggaacgccacgacatgctgaccacaaacccaacaaactttagacgctaaaatcctctagagctagacaccagcgctacagattattcttctacaatctccccctaattgtgttgcgttggttcaatactggtgacaccacttcgtatccgcagttcctgaagacgctcgcgcggaagtggctttgtgagtatatcagccatctgatattcggtgcggacaaagtccgcctgcaacgagccgttgctgacacagtctcgaatgaaatggaagcgaatgtcgatgtgctttcttcgatcgtgcagtactgggttcttggcgagggctagcgcagacttattgtcgatgtagaggagtggcgcgacgacctttgtgttcagcaagtctgcaagcaggcgtgacaactatactccttgacacgccgcggtggcgctggtgatgtattccgcctcacacgacgatatcgcgaccacgcgctgcttctgggaccgccagctgactaggctctagccaaggaagaagattgcaccagaggagctcttcctgtcatcaccgtctccggcgtgatcggcatcactgtacccgatcaactccaatgttcctttcccgtggcgataaacacacccttgggtcatcgttctggcaatgtacctcatcaaatgcttgacgacgcttcagtgctcagtcgtgggctcctccatgaaccgtattacatagccaactgcaaacgcaatgtcaggacacgtgtgaactaagtacctcaaactcctgacgatgttgtggtacaaggtcttgtccactagtggatttgagctcgccttgctcagcttgaggtgtggctccatcggagtgttgcatgagttacatcccgcgagccctgccttctcaatgatcttgcctgcgtaggtactctggcacaacgtaatgccccttgcgctctagctgaccttgatgcccatgtagtagtggagtggtctgagatcgctcatgtttaaaagcttcgccatctcgcccttgaacttgacaactttctgcctggtttgctcccactacaacgaggacatccacatagactccatcgatcagcaaatcatcgctggtgcctcgcacgtacacaacatgctcctcc

SEQ ID NO: 177897 - DNA, 861 bp, Zea Mays
aggaataagctctatggcaaactcaactttccgcttaggtggcatacttggtagatctttagggaacacatccggaaattctgacacaaccttgatagcctcgagtggatcgatctctttgttatctatagccatctggtgacaacctcctttcgttggctcaggagagactagctcagtcaccacttcctctccaagtggggataccaacttcactgtcctcttatcacagctgataacagcttggtacttatctagccaatttatccctaggataacatctattccctgagtacccatcactatgaggttagcgggaaactctatcccccttatttccacacttacattcaagcatacactatcggctcgaacttttccactggctgaatcaatttgaattggtgttgtcatgttggttattcggagattatgcgcttctacccatgatgcagtaataaataaatgtgttgctccagtatcaaataacacttctgcaagatgggattcgactagaaacgtatctactatcatacctggtgtgttcctagactgctttggcctccagatgggttagcctaccatggttgtagcgcgtctaagcacgattgcctgctccttgctgaggtacattctgccttgcggggcattggggtggtggtggcaactgctgctagggtgcctcatcttgcggtgtctgctgctcttgctgggcacgcctccctcctctgctcctgttgtctaacatctacgaaaggcaatcacacattagaaccaatcttgcaaatctttcatcataagaaaagggtttatagttcttccaaaacactaaacaaacaagcatcttcacttactcccaac

SEQ ID NO: 177898 - DNA, 407 bp, Zea Mays
atgaagaatgccatggtacagtgatctgaataagatcagatcgacagctcaaccatcgccgccgacgagccatgcgcgattcgtgccgtcgtcgccgagattcgtgctcggatcatgtggatagcgcttgggatcgagtaagggtccttgccatggataactctggccagtaaacaaatccggccaccgtactgcactcaccacggtcactccggataaccttgccggtgactgccgccttttggccttgtgccacgtgcctgagcacctccaccgcatcgtcgtgacccattgtgactctctgttgatcaccggaatgactgccacggtaataggacaccaatccgcacgctagtaactttccactcctccgaccgccatgcgtcgtcactcgaattcccggccac

SEQ ID NO: 177899 - DNA, 547 bp, Zea Mays
ggcaggttgaacgagctaacgggatgatattggaggcactcagaaaaaaggtcttcgataaaaatgaaacgtttgcaggaaagtggataagggaattgccctacatcgtttggagcctaagaacccaacctagccgagctctgcatgggaacactcctttcttcatggtctatggttcagaggcagtactacctgctgatctcaagtttggagcgccgaggatgatctttgaaagcatagcagaggccgaagcaactaggctagaagatgttgatgtactcgaagaagaacggctgaatgcagtaattcaatcggcacggtaccagcagactctgagacgctatcacgacaaggctgtgcgacaacgatccttttcagtgggagatctcgtcctccgccgaattctaacgggggaaggacgacacaagttatcgcccttatgggaaggaccattcgtagtagcagaagtcactcggccgggatcatatcgtctcactcaaatggacggcatagaaattgggaactcctggaatatagaacacctcag

SEQ ID NO: 177900 - DNA, 757 bp, Zea Mays
agaagtagtagtagtgagtagggatcttttgcaagggtcggttcataataaaccggctcttcttctgtaatgtcactcctgcttatataaataaagcttgttggttttaactatcttgaatattgagtttcttttggtctcattctgcatttggagtttaattgttggtactgagttccttgttatgttcgatttcctgtctcccgactgatctctcccgattgattctacatagaagtgtgtttcctatccgacttagtttgtctgacttaactcgtccgactttactcgtctgacttaacgtgccctacttagcatttcttccatttgatctgaaacaatcatttctctcgcgttggtgcttgtggaaggtctggagcaaacacgtatatacacgcccactgtctgacagcttctagcgaacaaaccctagctctattctttcaccgcaactctccactttgaatttctcatgcatcagcgaatccacgctcaattccaagcttacgaaaggtctcatggcgcccaggaagaagcagggggcacagcggccgtcatccccatatcgatcccaacagccagctccccttctgtggtaactatgcttccgttgtctttgaatccgatttgctccaccttgtccaaattggtgttcttccctcggaggagttgtgtttatggcatatttggcaagggactaccgtgcccatggaggatacccatgaatccgtggttttcgtccctttctttatctaag

SEQ ID NO: 177901 - DNA, 537 bp, Zea Mays
cgttgattatagcgaagtctctgcttctgtgttttagccttttggcttcattgtgatcggatggatggtagtgaccttgaaggtaaagggtgattggagcctgccagtcttcggccattatcaggttgactatctaatctccgtcggcgtcctatgttatttgcagaccttcagggtttcttacggctggtgtgccgactacgtgataaaataaatcgcagggcaggggttcccccttcgctgctgctttggctaatgtgtcagcctcttcgttcttgtttctcttgatgtgttgtagggtgaaacctttgaattgtttctcgaggctgcgaatggcggcaagatactgcattagcacgagctctttcgctgagtaatatttttcaatttggctagcgacgaccttggaatcagctttgatgatgcatgtggtcacgccgagggctcgtagcttgcgaagtcctagaatgactgcttcatattcggtgatgttgtttgtgcacttgtatgactcgagtgcaaagctgagacgcatgg

SEQ ID NO: 177902 - DNA, 568 bp, Zea Mays
gacggtttcgccgggccacgcgcgaggcgcctcgattccgctgcattggtttgaaaattcaccttctctgttttctgcggcggccccaaggaggcgtggtactggcgcgagcggcagttcgctctttctgcactcagaaactgtcgcccaaggagtatgactcgtgggcccggacccccatgtcagagactaggccgttgttttcggcggagatgaagaggcgcactacctcgggcggcggttcgctcctcgcgcgacggttcgccttcttcgtactcagagacccgcacaccagctgtatgacttgtgggcctgggcccccgtgtcataggcttgactgctttggtgcgcgtcgggcgagacttcctgcggtgtctcggggtgcgagcgggagagtcttccttgaaaagggattcaccccgcgtgtagcagttacgctttcgcattctccccaaccgttgcgccctttcgccttcgagctctccgcgcccctttgcatttgcgctcctctgctttccaccgctgtagtcgccatggcctcgctagttcatcccgagcacttccagtc

SEQ ID NO: 177903 - DNA, 644 bp, Zea Mays
ctgatgaggacatcctccactattacccgttggcaaagacacaattggcccaattgtagtcggacggtgaccgtgtgagcctcagaattatcccacctcgcttaacttgggaggaggaagccactttaaaagggagagccacccttcccccattggactagtcttttggggcgattgggcctttccctgagttgggtgtgcttgatgaactgttgggctccgggcaaccctaatttgttgggcctcgaccaaccccacctagctgggtgtatcatctggtatcaaagctagggcctattttaagaaggtgggaatgatgaggacatcatccactattacccgttggcaaagacgtaattggcccagttggcccaattgtagtcggacggtgaccgtgtgagccttagatttatcccacctcgcttaacttgggaggaggaagccactttaaaaggaagagccacccttcccccattggactagtcttttgggacgattgggcctttccctgagttgggtgtgcttaatgaactgttgggctccgggcaactctaatttgttgggcctcgaccaaccccacctgggctgggtgtatcatctggtatcagagctagggcccattttaagaaggtgggaatgatgag

SEQ ID NO: 177904 - DNA, 1066 bp, Zea Mays
ggaatgcaacgctctgagccaaccatgtcaaattctgatgactagagggagccgatcatcaggtacataaaaaatgaggaggaaccagacgacaaaaatgcagcagaaagaattgcaaggcaatcagctcattataccctcattggggaaacgctgtacagaaggggcgcatcgggagtcctcatgaaatgcattctctcagccacaggaaagcaactgttagaagaggtttatgttgggcaatgcgggatacacgcagcatccaggaccctggttgggaaggtcttcaggtcgggtttctactggccaacagcaaagagtgatgcagccgagttagtccagaagtgtgaagcctgccagtacttgtcaaaacagcaacatctaccagcacaacaactgcaaaccatacctgtaacttggccgttcgcgtgctggggactggatatgattggacctttcaagaaggctcaaggaggatacactcatgtactggttgctatcgataaattcactaaatggatagagttcaaactcatcgcttctctaacttcagctaaggcagtggaattcatacaagacataatattcaggtttggaataccgaatagcatcataaccgacctgggatccaacttcacaagttcaaagttcttcgatttctgcgagcaaaagagcattcagatcaaatatgcctcggcggcacacccaagagccaacgggcaggtagaaagagccaacgggatgatattagaggcgctcagaaagaaagtcttcgacaagaatgagaagttcgcaggaaagtggatcagagagctgccgtatgttgtttggagcctgagaactcaacctagtcgagctttgcatggaaacacacctttctttatggtctatggttcggaagcagtgctacctgctgatctcaagtttggggcaccaaggttaatctttgaaaacatagtagaagctgaagctactagactggaagacgtcgatatactagaagaagaacgattgaatacggtgattcagtcggctcgatatcagcaaactctgaggcgctatcatg

SEQ ID NO: 177905 - DNA, 493 bp, Zea Mays
tgaagggttggaattccatcacatggaaagagaccgcaacgcaacagcagatgcgttgtcgaagctgggatctagtcgagcccaggtctcacccagaatcttcgtccaggaagtattacacccaagtattccctcagatcagacggaagaatgcaacaccttgagccaacctagagtcggaccctgatgactgaagacagcctatcatcaggtacataaagaatgaagaagaaccagatgataaagctgcagcagaatgcatcgtgagacagtcggcccactacaccctcatagagggtgcactgtatggaaggggtgcaacaggagtcctcatgaagtgcatttcctcgactactgggaagcagctattagatgaaatccacgccggacagtgtggaatacacgcagcatccagaactctggttgggaaagttttcaggtctggtttctattggccaacaacaaagagtgatgtcgccgagttagtccagag

SEQ ID NO: 177906 - DNA, 672 bp, Zea Mays
ctttgttttctcctcacttttttttcttgtcattattaaaccctagcgcaccaccttcctggatcgtgcgccgccacccttgggttacgccgctgcctgatcgccccccctgcgttggcaagttaaaaaaaggaaagtacacaaaaaaggcagttacaaaacaaaaaatggaaacagaaagaggaaacaccaccgaaacgcaggcgaccaggactcctagcgcgcgcgcccgggcctccttcacgccgtatcctctctggacaccgcgcgcgttttcccctcccacaccttactctacctggacattacacgcacgcctgtttttctctcttctttggtaccatattctgaggttggccttactctagagagatagtatcttttttaccagaatacccctacccttctagaaaaagtgtgtgtggtgacttgctatttgagatcctctgtgttcatattaccagttttgaggactccggcaaaaaaatcagaaaaaaatcagaaaaaagaaaaagaaatagaaaatccgaaaaatagcttttgtttcccctcctcctctctgtcttcctcttcttcttcttttgcacttgtttccagcagtttttgtacgtgttttagcactataattcaactttgcatctattgtttgattgtgctaatccttgttttgag

SEQ ID NO: 177907 - DNA, 937 bp, Zea Mays
aaccgtgcgacgtccacacacaaacgacaaagctcagtcatgggaacaaatccttcccatgcgctctcaagtccagcccgagccaagttcaccggacttcgcctcgagcacgccgcaccaacgccccccatcaccacccgagcctcagccaccatggccagctctttccagtcacttccaagccgcgccagccactcggttagcttcgccaatagcccgtgaagctttccaagtcctcggacccgacagaacttcacaggagacctgagatcgtgctcgccggacttcgatcgcccgcctgcgcgtgtagaccgagcaatccagtaagccattctcaaattcctcacgcacacatcttccttgacctctggtgaagctccctgacccattcaatcggaatatggcgcagtgagcaggccggattcctcgccgctgacgagctcccccgcctgcgcacgcggaccgacctactccgaccaccgcagccgatgatccgtacctcgacgtgatctccagagactcccggacctcactcgacccctcaccagagcagcctcgccgccggtaagcccctccgcccttttcttccgccgcggtcacagttccattaggtgaaggattgcgggttcaagttcgtgaaaccctagggggttttctgtagagccatagactcagatgaatagtgaatcgaggacctgtctgtaatacacttaaaacctttcgccagggaccccagtgcaaaaccgtttttcctttaactatttctaattaatcttttaaaattcagtagagaacttagaaaatttatatcttgagttatattcaaccaaatttaaccaaaccaattttgctggattcaaaatattatgaattgtcacctaaaaatactaaaacctatgctttctgttttaaattttagagtttgagattaattaag

SEQ ID NO: 177908 - DNA, 302 bp, Zea Mays
gggagaggaggggaacgcattaaattgcctcggctgctctctcgttgggtttggtggtcttgctgctgctgctggcggtgatgcaatggcacgccgatctgctactgccaattcagatcgggggtggagttaatgagcagctaatcaggggttagtgagtggcctccccttccgctccgcttgtgtgggtttcgaatcgagggcggggagggagagtgacgcacgctggcgagctgctttctggcgtcccggacctgcgtagtacgtgtagattgttttggacttggtggctccagagtcaa

SEQ ID NO: 177909 - DNA, 524 bp, Zea Mays
tgatcttctgcccattctgcgcttactctcgtatggattggggcactggggtggctgatgcttctcctcgtcggcgtgccatgccgtgttgggcggcgcggctgccaccgccgtggagcttgggatggcgagtgggcacgatggactgtgaccgttgatctggccaggaccggcagagatcaagtcatgggataacgataaagcgttctgaatctcgaccgtccgatttggattgatcgggtgagatctggtcttaggggttttaaatctgggacgttgcttttggatccgagggcttggattgcgtaccggttcgataaagccaagatctaatcctgacattcgatatttgatcggacggccgagagtaaaccgtaccccttcggccgggccgttttgcagaagagaccctgcgatttttagaaatatacccgccatcctttccaggcaaaaataaattacagccgatcccagaacattatgttttagcccctgcgttctcgataatttttgctcgcagtcca

SEQ ID NO: 177910 - DNA, 577 bp, Zea Mays
ttgaaccataccacaccttgatcgtcttctttgaaacatttggctgttccagcccttatcttctcacgtatgtgcttcatacccacatcatctttttgtgcgtcaattattctttgtaagatgactgactccagcttcaaatgatttgaagtcccatgttgaatcattcccagatttaatttctccatctcctggcataatgtaatgtcagaagtcctcactgttagacaatggcaggaagccttacgactgagtgcatctgccactacatttgcttttcctgggtgataatggatttctaattcataatccttgatcagctcgagccatcgcctttgtctcatattcaattctgactgggtgaagatatatttcaaacttttatggtctgtataattatgacagacattacccaacagataatgacgccagatgtttagagcatgaaccaccacagctagctccagatcatgagtaggataatgttcctcatgtcggctcaactgccttgaagcatatgcaattactcggccttcttgcattagcacacagccgaggccactgcctgatgcgtcac

SEQ ID NO: 177911 - DNA, 1020 bp, Zea Mays
aacgcagttgagaacaaagggagaccagagaatgcagtgatgaaaaataaagtcgtaggcaagcaacacagtggagacagtcctgctatgaatacaagagctacgggtaccagaagcaagaggaagcagcttgacaattagttttctgtgtgatggtagaaataatattttgtaattcatgcggtctctgtgatgaccaaaacctatatttcgtaactcgtgtggtctgtgtgttgactgttgaccaaaacttgcattttttttaaagtcgtgtggtctgtgcatgaccaaaacaatggtctggtctgtgtcatgaactcatgaccaaaaactatgactggtttgtgaaaattggttgttctagctagcggttaatctggacgaaatatgcgtagttgaatgtcaattcatattctcatgacatgctgcagctaagatcaacgtatattcaaaaaaatgagcatgttttatgaaactaaaaaaaaattactacattcattcatcatgcacttggctcaattacacttgcagcagaaaaatacaaaacatgccacaactgctgcaaacactacgccctccattgcatcatcggttcacttattccatacgccacatacaacacaagcaggacgcaaacgcaaacaagtttcttgatccattttagctgatccaaggtcctttgcttcagccaagcctttgtgttcttatcggacttggaaatttgcttgctactgcctgaatcgctgttggacctgcaacggaaacaacaggaagaaccggcgtaggtagggcgtgcttggatggcagccttcctgacaccggaaggcaaatgatcctggtcacatgcataggaaatcgatcgaacgcctggcgttgctgtatgggccgggcaagaacatgccgccaccatcatatccgcgacacccatcatatcctcccagtaagaatactgacataatcctcctgcctgagaaacatcaacacaaaaccaaaagtgacagtagccgaactcactgcaaa

SEQ ID NO: 177912 - DNA, 850 bp, Zea Mays
aaacacaaacacacagctcccctcacaaatgtgcaaaagtggaccgatcaaggagtttggtgaggttatcggcaagctgtatgtgggtgtcaacatagcataagtctatgtctcttttctcataatgttatcttagaaaacaaaagtaggaatttatgtgtttggtcttagaatgcaacactagatctttggcaacaataatagcactggtgctatcacaaagcaaaggcatatgctgaaaaaccaaaccaaaatctctcaaagtggccatcatctagagcaattgcaaacaacagctagcgacaacaacacactcagcctctatggtggattgggctacgctagactatttacaaaaaggccaagaaatcaaagaatatcccaaaaactgacaagtcctagaaggtgacttgcgacccaagcgacaacccataaaatccgcaatagagtacccacacaaagacaggactgtagaagaggaataccataatataaactcaggagcgaaacgaaggtatgatccattctgccgcatgcttgtgggaagtgcgcgaggaagcgtgaaacctagtgcaaagacagacagtaaagtgtatgcctggtctcatcatcgtcaggtataggagagtcgatcatgctcatgtactccttctagtccacgggctcactgtcctcatcggcatccaaagccgatgtggtgaacatggtcatcgagagaagcttggcctcacccatgtcatacttctccagtacatccttggtgtatttgtcttggtgcacaaatgttccatcttggctctacttgatttccaacctaaggaagaaggtgagatctcatcatgctcatctc

SEQ ID NO: 177913 - DNA, 668 bp, Zea Mays
gaacaaatggattaagcacaagaaaagtgattggggatagccggatagggcgttaggccaccattgtttacctgcgctgtgcaccggagcaccagagtcgtccacgacacaccgacgagagagaaccgagggcagccgggcagggaggaatgaggaagagagaccagatctggattagggttaggttttcgggccgggagagaccacgagagagagacccggaagagcaccgccggaagctaggaaccacaccggcggcgggggaagagagctagggtggaccggaggagaataccacgccggagtccggatgcaccgctgtgggatgggggaggcgggaggcccagaggggaatcgtcgctgcgccgctgcagagggaggggaagaccaccggtcaccggagtccgtactcactggtcaccggagtccgtactccgtaggcggtggaggcggcagcgggattcgccgagtcgggagtcgccgagtcgggacgggaacgggacacgggagagggagagtggagagtggagagtggagagtggagagtgaggaagagcgaagagaggaggcgaccgtgaccgtgagcgtgagttgtaaatgtaacgggctgtacgggccgcccgtttatacgggccgtgcctgggctgacccgacgggctgcttcatcg

SEQ ID NO: 177914 - DNA, 294 bp, Zea Mays
ggctgattggcaggagcgggggcagtagtgggacgaataaaaataggctgcttgaatggatatgaaggtgggcgaggcgaagaacgattttgattaaaaggtcggatcaccaacctggttctcttctcaggcccttgatttgacctttcacctccaaacccctttgattttccatgtcctacagttttagcttctacttcaagtgccgtactgatagccctactgtaagtaaggtccaagcaggttgccattttttgctgaagcctgtcattaagtcctctcataaaacaattc

SEQ ID NO: 177915 - DNA, 483 bp, Zea Mays
tgttttaatggtggacgattaaactaataattaattaactgaccagagtgattataagtgaacgattataatgaaacgattaactaatatgcgcggacagcgtgcgatacatgcgaacgacacacagcattgtgcgcgacacacgcaaatgatgtgtgacaacgcgcgacaaatgcgacttagcgcccagacgacgcgtgtgaaaaagcacacgcaacatcgcacgaactacacgcaaaacggtgtgacgcgcggaaggcacatgattcagcgcgcggcaacacccgagaatcgctatcagatatcgtgttttatactaaataagcattaattcaaaaacatttgtgtagatataatcctattaacagatataaataaagcgtgtctaaaactataaactagtttaagtaagctactactttaataactcagataaataaataatcaactaattaattagaacacgcctcgcgacgaaataat

SEQ ID NO: 177916 - DNA, 796 bp, Zea Mays
ctagcaggtacttgtattctttcgttattttttctaaaatcgtttcttgatggatgaaacctcagccctcgggttcggcgggggtggagagaagatagagagaagagaggcagcgagatagaagaacataggtgtgagcacgggttcgatggcggctgtgcacacgacattaacagcaacaaggagggaaatgagggaaggggcattttagtcagataaagaaaacgacccacttaacatatgccttccggttggttattttgacagaaagagtgtaatcgagcgccccttcttacaagttcggcgagagatgtcctattttgaagaacgccatcgaagagtgtgacaaattcctcgtactttgggatattggcaatggattgctaatagatctcagttttgtataatttgtttgtttcagtttgtgatgttcatacatacatgtgcatagatctcaacggattattcgtactcattttagttttgttggtatgaatcattgtgtctttgttgcaagtgtgatatttatttacttttttggtctcatttgtcaattgctggatttaaggtgattgttagacgttagtaggcaatgtaggtgtattctttcatattttttgggtcgtttcttgatggccgaatattaattctccattatccgttaatttgagagagagtgcagtagaacgcagacctaaacggatttagcacataggagataatgtggtaaaacattttcaaggcattgttagttgaaggggtccaaagtgattttcatatcagtaacttaaaatca

SEQ ID NO: 177917 - DNA, 717 bp, Zea Mays
gtggaaaaacatgtcatatggcagtgggtcacctttcgctgctgctttcaccaacatgtcggcctcttcattcttgttccgctctatgtgttgcaatgtgaatcatttgaattgcttttcttggcttcggaaggcagagaggtattgcatgaggactgactctttagtggagtagtccatttcaatttggtcggcgactatcttagaatcagttttgactatgcatgttgtcacccctagggcttgtagcttgcggagtccaaggatgacaacttcgtattctgctatatagttcatgcatttgtttgattcaagtgtgaaatggaggtgcatggcatatctgtatttgaggcctatgggcgatgtaataatttccgcagcgccggcgcccgcatgacaccacacaccgtcacagtggatggtccaaatagtctctgtgcgaagctggtgtggctccgaaggccctgtccaatctactataaagtttgccaagacctaggatttgattgttgtccttggctcaaaggtgacgttggatccggagagttcagctgcccatttggctattctggcagatgcctcgggatttctgaataggtctcctagaccttgatctgtggtgaccctaactttgtgcgcctcgaagtagtgccttagcttgcacgaagccatgatgacattgtagtctatcttttctaactcagtcatgttgcactt

SEQ ID NO: 177918 - DNA, 438 bp, Zea Mays
cgcctgaccgccctgcagacgggtgatgtgccgactcggcatttaatgtgcctcgtccactctgctggcaggcgacgaccagaccaggcgatgtgcctgtccaatcaagcagcgggcagtacgcccacaccgctgcacgcacgcagtggccatcatgacttgaacaataccgaggaaccttctgcagcacgccgattctactcaagctgcggatgcgggggcacagggagatagcacaaggtgaccgacattagttgctccgggtataccatccttatgtctctggacccacatgtcagggtacggagtcttttgtgcatgccccccttcaactataaaaggggaggcatgcgatgttacaacacaagttcactcagactctcaagcttccacagcaatccaacacacagtggagtagggtgttacgctccggcggcc

SEQ ID NO: 177919 - DNA, 778 bp, Zea Mays
agcttattcgttttgccggtgaggagaccactccaaagtcgaaaaatgacaaagtagtagttttcaaaagctttttcaaagctggattgcggtttttgcttcacgagatgattggagaagttttggatattatgaaatctaccttcatcagctgacccctaacactatcgttaggctcagcatcttcatttgggcccttcgaagccaaggaatggacccaaatgctgaagctttctaccgagtgcatgagctacattaccaaacgaaggccagagaagatgggctacatgagaattttggctgttacaacttcgtgtatcgcaaggatacgaaggccccggtgctcagctattgcatcaagtggccaaccgactggaaaagtgagtggttctatatcaaggccgatgagaagaagagggagaagttgaagacgatgattctgagcctactgagtttaagcttcggattgactaggcccctgtgccgcatgacgttggggtcaccatgccaacaagttgtagcagaattcagggttatggctgaacagatcagcactagagatctagtgcaagaatacctagccaacggggtatttccgacgttgagtgaatggagtatgccgaagctgaagggaacgaagaaaaagaatgaacttgttcggttgccctatcgcttcaagtttgagaaacaattcaaagagccttgccaagagtggctagaaatgattgaggctatgtgcaacgaaattttgggcaattatactaaaaagaagatcaac

SEQ ID NO: 177920 - DNA, 511 bp, Zea Mays
ccttcacagtctgtagtccacgatgatgaacagcgcaggaccaagctccggtgagcctacaccggccgatttacgcaacgaccggtgctctactttggctgagaccaaattcaaaccctaacaagagtttctcctcaactaatttcactaacggcgctctaacctcctctgtccacggtgatcatgcgatcaacggccaaaccaacgcgttcccggcgatctaaggggtcttagcataattggcggggtcggggagcatcaggggcacacaaggacattgaaacaaaagagcaaagggcatgagcggacctgaggtgagctagccactgcgaggtcacaccgctcggtgttcttgagtgatttgcgggaaatcccaaattggggagctctagtggatgattcaaggcacgggttgcttcactggttgcacaactacctagcggagcaggcggggtcgtcaatttatagcgggcttgagcggtggccaatgaattcgagagagacacgcggc

SEQ ID NO: 177921 - DNA, 496 bp, Zea Mays
gttggccagaagctaaaaaaaacctaaaacaaacaggaccttaatttttccacctagtcacatgacactatgtcggtgtcctcctatatgcaatgagcttctttattgacacacaattgagcatttgaacaactccaatccatttcctactacatgtatctagagttcgtgctagctagcgtgcgtatgtgtgtctccgtctaagctcgtattagtccacctaattttttgaagtaaagtctaactaattcggtacccaactaccaaaatgaaacaaggactcctcaaccagctcgtcgcccatccagtagacggcatgcgggctggaccgaagcaaagaggctctagtttagctgagagagcaaacaacggcgcattggatccggtaaaagcgtgtctaggcagccggccgttgacgaaggaaaacatgcatgggagagctcggtttgcttttgtttctatcgaccgtccaatgcaacggccagcattggcgccc

SEQ ID NO: 177922 - DNA, 665 bp, Zea Mays
gtcagggcaataaaagattgaacagggtatttgatgcgattggcttcgtataccctaattaccactacccgctacgagggcaaggggaaaagagaaagattgtcgtttcagtcaccccagctgagcggaagagcaaaaaggtgaaagttctgacccaccggccgtgttatattgaaccggccgtagtacctgcatttggcgaagggacctctttagctgccaaagcaaaacaacctactccaattgtgcagagcgctgaagagtcgattgtagtgtcgaaggtgcctacagttgggccaaccaaagctaaagatgataaggccgaagagccacaggtggaaaaagtgataaaagtgctagaaatcctgagcccaccggcaggggcagatttgccgaagatgcaaaaagctcctgttgcaactcccaagaggaggaggatggccagcgtgctagacgctgttatagagaccatgaaggccttaactcctgctcctaccaagaaaactgccgaagctgccaaaatccaagtcgaagccaaagttgggccttcagcgcctacttagacgaaggccgccgagcctgaagataaggtgggtcagcaaatttaagataccggcaagacgatagagaaagatatggcagaaaaaacaaaatatcatgtcccc

SEQ ID NO: 177923 - DNA, 927 bp, Zea Mays
ctttgtcaagaggtatttcctttagttgttggaccttcagttcaaccgagatctccttcatgtcagctaagtaacctttagctttaattgtgtccgggaattttcctttgtattttccagatacacacaaaggagagttcgctgaaaggtctggaatgtactcagaatccacctaaagaataaagaacgacaattagacaaccaaaaccagtactgctccagcaaaacctgcaggatctttcttaatataatgatacaaagctcccttgcgcgttctagataaaacatgcagaattatgactggccactaacccggcctaaaaagttgttatagtttcattatcgacaaatataatagttaccaaggactcataatctgaagaacacacaatggaaacttaaaaataatgaaaaacttatcatgccttatacagtacaagttttagtttatacatctgcatctccacaattaagcacactaaggtagttttatgaagtacataggtttattctgtccaaacagcatatccacattgcttggcaaggtgggctcaaccatctggaatcaggtaccaacttgacacaaaatggtaaagcattacagcatttgagggcatcatgaactttgaaaatgaaatttgtatcagccaagaaggtcaataaccaaggagtatagattgtactgccacaaggtcactgaaaaaagtataattactaatcaatcatgcacaaactcacttcgaattcatcaagatgtgtcaaagcatcaatggagatatttgccacaattgtactcgacgctctcctgaaccatttaagaatctgattctcgattgatgctggacaacagatacattaaaaaatctggttaagttaaaaccacatatttctgaaagattaaattcgtttattgaactctagatcaat

SEQ ID NO: 177924 - DNA, 1454 bp, Zea Mays
tcttgatgcaagcctgatagctgttgttataagcgaactcagccaaggcgagatgatccttccagctacccctccatgaaagaacacaagcacgcagcatgttctccaaagtttgaatagtccattctgactgaccatcagtctgagggtgaaaagcaacactaagagaaagatttgtacccaaagcactgtgaagactctcccaaaatttggatataaatttggagtcccggtctgaaacaatggacttaggcacaccgtgaagccttattacttttttcatatacaagggaaccaactctgaagctgaatttgtggtcttcatgggaataaagtgcgcagacttagttaggcgatccactacaacccatatagcatccctgcctcgaggagaacagggtaagccaaccacgaattccatggtgatatgctcccacttccattctggaattcccaacggcttcaataaacatgcaggcctcttatgtttagctttcatgcgctggcacacctcacaggctgccacatacttagaaacatcaacctttatcctcttccaacataagttttgcttcaaatcactgtacattttggtttcgctagggtgaacggtgtaaggcattttatgagcttctctcaagatatccatcttcacctctgatttctgtggcacacaaagacggcctttgaaacaaaccaaatcattctcatcaatggtgaactgctgctgtgccacacacactctatccagaagggaggattgaatgagcatttgagtctccttgctagcggttacaacatagcacaaagcaactcccatatgatctagatccgcaatcaaaggcttggccaccttcgggacacaggtcctactgagtgcatcagccaccacatttgcctttgctaggtgatattgaattggcagatcataatcctttatcaactcaagccaccgacgctgcctcaaatttagctctttctgagtgaaaatgtacttgagactcttatgattggtgtaaatgtcacaatattcaccatagagataatgcctccacgatttcagggcaaacacaacaacggccaactcgaggtcatgggtaggataatttctctcatgtttcttcaactgcctagagccataagcaatcaccctgccttcctgcatcaacacacaaccaaggccaatacgagaagtatctgtataaactgtgaaacgcttaccactctcaggcaaggctaagataggagcattcactaacttgttcttcaatgcctgataactgacctcgcaatcattggtccagacaaaaggaacacctttctccaagagtttagtcaatgacttagtaatgctggaaaagtttggcacaaaacaccgataatatccagcaagccccaagaaactttggatttttgagacactagaaggtatcttccactccaccacaatagcg

SEQ ID NO: 177925 - DNA, 888 bp, Zea Mays
ttattaaattataggaactagattgggtcaatttggacaaaatatgaattttctaaggattaaataagttcctaggtttattttaatactaaaaaccaatttctaggattatttgtttattttctctgttccctggactttgcacaataatacagagaaacataggggggtttggtaaaaacatccctaagactcagggcgcccccaaatacggacggcgggttgatattcattaaatataggggctcttgtgaaaaagcgcgcggcgaaagggtatggttatatatgggccgtgcgatcacagatggagggctaagattaaatcgttctcatccccaaccggtatggcaccaggaccgtaggatcagagatctgttgcctagatttcaaatatgctcgatcagtcaccaccattggactctgaatggacgacccagatcatgagcccgaagtggctacgggagatctaatctccagcgtccattgaggaaccagccgccagggactctccttctacctccgtcggccagccatggtaatcgcacgctatcttctacctctagttcggcggcaataacaccgcacctgccctaggtcgcgacaaacccgagccccagaaaccccgcccaaggagtagcatcggtatggagtagttacttggaaaggagaaggtagttctcaccagaaatcctatgcgccggagttgaagctcttagccccgcgaccacatcaccaacggacaacagcacggaccggagcacacgcggtaggtcttacctttggtggggatgcaggcaaacacaaccacgacgcgacacgacagggcggctccgaggcgacatcaagggcatacaagcgattcgtcacgctcctggccgcgagttcgca

SEQ ID NO: 177926 - DNA, 504 bp, Zea Mays
aaggatcacaccaacgttcccagggcaacatccttaagctgactcttgatagtttgttggccaatgagcagcgccaatttgaagaactcatgagccaattggatgaggaagcatagcgccaacatgcccaggttcacgaggaggcaaagaagttcctatcatactcatggtgaatcgccatcataagatcaacaagaaaggggagatcaagcttgcatctctcctacctttgcttcagaccaccaatgcaagtaaatctgacgatattcaatcccttaaacaatatatagatctacaaagggatcaattaaaacattacatttagggggatggaataataatttaacaaacttacgcgtgcatatgagaaatctaccattcgtagttcccttcacgtgaggctagcaccagtacatctgtgcctagcgcatcagttgagaatgggccctctcagacccaaccattatatggtatgatgatgaaatcatacctgggtcaaccgct

SEQ ID NO: 177927 - DNA, 1207 bp, Zea Mays
tatgattcacatgtgtgtggatttgcaacttaaaccctaagttttgggcctatttgcaaaaaccctatttgaactctattgggattaagtctgaaattcagaaaattggctccactttgaagccttgtaacttccaaattatgaggagtttgccctagatcaacacatcaaacttgtagagctatgtaaggagaacaatttttattaagtaagccctagtgctacatgaaagtaagagaaaaacagacctgaagatggtctgtcagtcgagcataaccctgaaatcagactgacaatggcctagaactaggtttgagagccattttgagctagatttgttgctcggttgatggttgttgctatagcataattgtagctagtatgaagggctacaagtttgctactggcgaattagcaagttcttatgtagaaatatgtgttctggacgctacaagttgggctgtcatgggctctgaattgcatttctgatggtacagtatctcgatcggatcgccagctcagtccctcgccgccaacgatccgcgcgcggattcgtgctatcgccatcgttattcgcacttagaacaactagatagcgccggggtcagtaaatatcacaccgtggatatggtccggccactaaattactccgaccaccgtacccgagctagttacgattgcttcggatgggttcaccggagattgccacctcgcggtcttgcaccacgtgcccaggcatcttaccacgtcacggttagtcgtgttaggcatatccggtgatctccgggaggaccgccacggtgaaagccactaagcgcttgcgccagtgcccctcttcctctccggcctccgcgcgtcttcgtccaattcaccggccacctctcacggactctataaattgagcacactgtgagctccgtaggataattacgcatccatagcacccacgcttgcctccaatcgttcaccagagaccgtgaattgctcgttgcccccaatatccgtttccgccgccgtagaaacaccccaccgaggccagcttgctccaggtccgttcatgctccctgttctctcgttttagcgtgcttgtgtgtccctgttgctcctcgacccctccaattgagctagagtccctaggatcaccgggaacgggctcggttaaccgtggtgtccgctgtcaccgtgggcagggcgtgttagtgcgccg

SEQ ID NO: 177928 - DNA, 581 bp, Zea Mays
atggatcagtctcaaagtgcggtctttcatggtgtggcttctcttgtcatcatgagcccttcgtcactcatcagcatgcgtaggcgtacacttgttatggagcgttgtcctgtccttttggtgtacgaatcattgtagataccccggtgcccattcgacatactgtgcgtatgtacggacgtggcttgatggtggcgcgacccgttgtagctgacgtggatcagtagcgctagacttagatctctgcctcgccagttgctcgatggtggattggtcgactagagttgattggcggatagttggtcgtcattggagtgttgatcatcatccgagagttgatagtccactccgccttgtagacttgctcgcgtgggggacttggtcgtccgctccacctcacagacttgcttggcagggggcttggttacccgctctgcctcgcggacttgctccatgggggcatggtcgtctgccccatcttgcagacttgttcggcggggacttggttggtaaatgggacagagagaggtttatgggccttgccttaggtaccctgttcctgggtacccaacatttccgta

SEQ ID NO: 177929 - DNA, 841 bp, Zea Mays
tgcacatgctcgcaacatgtcttccaaaatctgattcaccctttctgtctggccatcggtttggggatgataggctgagcttcgtatgacctgggtcccaagtgattcctgcaattgttcccaaaatcgtgccacgaatggtgctcctctgtccgagactatagtccttggtatcccatgcagacgaactatctggtcaatgtagatctctgcatacttctctgtcctgtgggtggtgtgtactggcaagaaatgagcagccttagttaatctgtccacaataacccaaatagaatcatggtgcgtggatgtattgggcaatcccactataaagtccatgcaaatgtcctcccatttccaagatggtatgggaaggggttgcaaagggcctgctgtcttcaagtgactagcttttatcctctggcaagtgtcacactcagatacgtacttggcaatttccctcttcattctggtccacaaataaaaaattctgagatcatggtacatcttgttgctaccagggtgcatggagaatttggaaaggtgagcttcatccagtatcttctttcttagctcagggtccttgggaacaaccaatcgatccccaaaccataaaattcccttgctgtcctgacggaaacacttgtatttttctgccttttgcttgatcatttccttaatcatttgaacacccttatcctcgatctgtgccctggctatttgctcttgcaatgtgggctccaccgagatataacttaagtcacctgaagaaacaacttccaggttcagcttgcacagctcatcacacagggtggtaactctcgcatccatgctcatgcaa

SEQ ID NO: 177930 - DNA, 817 bp, Zea Mays
cgccggtggtggagcacggacgcgggagcacgtccatggagggattgcatgcgactggcaatgcgacggtggcttgcggaacatgaccatggcggagggatgttggcctgccgcaacttgcagaaaatgtcgggacacagttgtgcaactattgctctcaactgcgtgtaacattgttcttccctcattcagagcatgcttagttctcttcccatccactatatgtcatctatgttggtttccaagagtgtgctcaacgccattgatcgttgtaggtgtgtcttcctctagtcagggaacgatgcctcgttgcctcgaatgaggtttgtcgtcccaaaaattgtggtagctttggccttcctacagaatctggtgattcaacaaggttcttagtggctctcatgttcgttgggtaaaatggtgcttcggtggttctgatcccaatcagtttccttgccctgttgctcccatatacattgggcgtgtcttcaattccctcgtcgatctccttaggtcatgcaccttcgttgttgtgacttctttctggcttgatagttggattgttagcgacccttgtgtgtctccttctcctccctcttttctcattctgtcgagcctaaactatcggacaaaggtgtccttagtaataatcttgatttgcacctgcggcctcggccaagctcgttaccctgcatgcacttttgacacaggttcagctgtcaggtcgccaagatgtgaggaaaatgatgggctccggaaaggatttctccaccagcatggcgtggtatactattgttgaatatataggaacaactat

SEQ ID NO: 177931 - DNA, 723 bp, Zea Mays
atccaactgctcctgccaaggggaagaagaaaaagaggaggcttcggcgagtgtcatgtttgaatcaggatgctggcccttctgttcctgctgctgaagaagtaccagtggaactttttactggggctgaccccgatgggtgtgaccttgatgatgctaatcccaatgggtgtgaccctactgatgctgatcccaatgggtgtgaccctgctgaacccaatgggtgtgatccggccagagctgaccccaatgggtgtgttgttcgtattgttgacgaggatgaagaagaagaggaggaaatccccttaattcggaaaaacagccggcgctacctagtaagtggggagagtagtgatattccttctccagctttgtctgctcttgttggtctacaagagttgtccatagcaaattttgatcaggctcttgaggatatggttcctaaagatctgctgtccgagccaacagatggtggtatgatggacgtttgcactgacgttccggatgtggggttagagttgtctcgagtggcgtctcgtgcctcgtcgaccttggagtgcggtcttcagggtcaagaagctggtctaggttgctccattcccatggaggtgaatgagaatccttcagccttagaggtggctgctgtagagaacccggtccccaaggatggcgccagcgattacccagcccccgagggtgttgccggcaatgatccggctcggg

SEQ ID NO: 177932 - DNA, 421 bp, Zea Mays
attggtggtatggactaaataaggatgttgcttcacatgttgtactatgtgatgtttgccagagggtgaaagcggaacattaaagacctgctggtttactgcactcgcttaagatatctgagtggaaatgggaagagattggcatggacttcattgtgggattaccccgcacatctgctgggtatgactctatatgggtgattgtggacaggctaactaaagtagcccactttattccagtgaagaccacgtattcaggagccaagctagcagagttatacatggcacaaaattgtatgcttacatggtgtgccaaagaagattgtgttagaccggggatcacagtttacttctcggtactggaagaagttgcatgagtgcttggatacaagattgaaattttagttcggcctaccatccc

SEQ ID NO: 177933 - DNA, 1312 bp, Zea Mays
ctactgccacaagggttgctatgatggaggctgcccaatatatggcctctgcagttagagtatctcgactttagtgtagtttagtgcgcaacgtattaacataccatagcaatggtcagataagcctatgtcagtttgtgcatagtgtgcttgtttttgtgatatagctcaaagaaaacttgtgaaagcaaactatggcaactagaggagatatttagtgtctgagccaaaatttagatctaaattgaactaaggctttcactgtctacagattccatgtttagtgatgcctaccaatcaaaccactctgtgcaggtacaagatacgcctcaccgctgaagacgacactgacaccgccgagtttatcttctttggccggatggcacagcgcctcattaaaaaaatgtggacaccctcatatcaactaatccacctggtttcattccaagtgaaattacaaacctactagaaaagtctttcgagtggaatgttagcttcaccgaaagcacaattatttatagcagtgtttccttccaagtgaatgctataaatgcagaaatggatggtggcagcacacttccagctacaccgccctcacagccatcatccaccatactatctcaaggtaaagcttatcgtatttgtttagtcgagctatgtacattagtttgtgccaagttaggaatgaaaattatggttccttttctctgcttgtttatttgatgttccattccgttctacctgtgtatggtgggtcacctaggtctaaaatgaaacagactacaacatctgtccaacagacacaaactgtagaatgctcacctaaaactaacatggttgaaactcaaattgtcaaattgggcattattagtacatatgaaaaaatcgactagactcatacactgcagttttttgtggccctaaccagcatttttggcgacctgctaactttgcagcaggacaaggatcaggtgtcacacaaaacaagggggctgccttcatctgcgagtcgtcactaacaccggagagtcgcaaagtttcgtatagcgccaaggtgcactgttgtactcagttaaaaaatagctatctacaatataaaacctcattctccttctgtgtacactgagaaacaagccctacatatgtcttttgtttgcattgtatcatacatacaaccccacatcagggagacaacctgctgctaggaacagaagttatccctgctccgcctaacgtgcaagcgcattcaggagcccacaacacccctggtgccaacactctccgcccggtacgaactccgcgtcacagtcat

SEQ ID NO: 177934 - DNA, 437 bp, Zea Mays
gtagagttcatcactcatcaaaacatacttgaaagttgtacgccaaatgttcttatctgtcctgacattgggatttcgtaaataattagttatgggcgtcctccaatctcttgcatcggcttcattatcagccgaatcgattaggagaactttcctggtaaccccggacggtccggcgtcttcacacggatggtccgtgacctagggatctggccttgcactggttatcagattttcagtattgtgaaatttccctcgctttacccgataaccagatgcatcttgtgccaaattgttagctctatgattctcaacccttgagatatgtcgaatactgaattcgtcaaaagaatggattgtgctccaacatttctcaaggtaactatttagagtaccatcaaaacattaatattcttctaacacctgttggacgacca

SEQ ID NO: 177935 - DNA, 700 bp, Zea Mays
cggagttctgtctataatgacattgatgtacttgaagaagaacggctaaacgcggtaatccaatcagcacggtaccagcagactctaaggcgctatcacgacaaggctgtgcgacaacgatccttctcaataggagatctcgtcctccgccgaattctaacgggggagggacggcacaagttatcgcccttatgggaaggacccttcatggtagcagaagtcactcgacccggatcttatcgtctcactcagatggatggcacagaagttgggaactcctggaacatagaacacctcagaaagttttacccctagctatgtttcaaaaactgctgagacaacaatgtactctgtaaagtggaaatatgtcatcaataaaaaagaggtttcaaagatactcagtttgtttacgattgacttgcattcttacttaactcagggtgaccactatgccctactaacggagcaatcgacttaagccggcaacgacttaaggcagtgcaacatgctcacgcttacctcagggtgaccactatgccctactaacggagcaatcgacttaagtcggcaacgacttaaggcggtgcaacatgctcacgcttacttaactcagggtgaccactatgccctactaacggagcaatcgacttaagtcggcaacgacttaaggcagtgcaacatgctcacgcttacttaactc

SEQ ID NO: 177936 - DNA, 549 bp, Zea Mays
caaatcatgagcaacctatattgtaccaaaccctaacggattcaacaactagaagaaatagaagattacatgccgatttcaccttgggcccggggtcgtagcaacaaacaccaagtagatctcaaagtagaggaagcagactggaagtagaagtagccgacgggcacaaagaggaagaagtccaacacctcagagtccccacagcagccggagcagcgtgcgtcgagcaacctcaaagacagggaacagagacgaaccctgccagaggagctcaccgtcgccacgaacaactgctcagcaccatcggtctctcacgcaggaggattcgctggtgtggagcgcacacgtggaggtttcgccttcccgcgcgagccacccatcgacacgcgagagcgcccccgaatcactcgccttgcgccgcgagcaaccgagctcacaaaagacgaaccctaggggtgtttcctagagctaggtgggggaagggggaggggttaatgtgcacgcgcacaaccgagctctcaaatggaccaaacaacacaatcactaaaa

SEQ ID NO: 177937 - DNA, 416 bp, Zea Mays
gttgagtagcatgcaaactagcaccaggatagccacccattgatgggtaagcactttgattatatgttggatatccagatggtgggtaaccactatgtgaagagtacataggtgaaggatatggatatgatcctaatgggggtggagccatagatccatgttgtgcatacggatatggatatgcaactggaggcgcaaatacatatgatccagttgaatgtactggaggatagacagtcggaggataacatcctttgtcagcatgatgattgtcccttccacctcccatgttctgtcaccgagattattgtttgaagaatattggtaagtaaaaagtatacatactcataatgaggtaataattaatataaggagtaattgtgattatacccttctctgaccttgcaattgtgatt

SEQ ID NO: 177938 - DNA, 588 bp, Zea Mays
ggcacagctacccgcacgtgcttaccaaaatcgtaatttgtttggctcttcgttagttaggtacatacacatggaccctccagtcctgcatgcgtgcttcatctacacccgcatgttactctttagtctttactagtcatatgtccgagtgttatcagtcacgatatatatgtagactaggttaaaggtgatagttgtgcaaacacgttctaaatatttacgatgagtatctgaaagttctgagtgatttgcgaggatggtgcacaacaccaaaataggaaacttcctacaaccacttaacttcccagaagatcccgtctggaggttaataacttccaacggccaatgttacccctcgaaagtttttgttaactttctacggcctactacaccacttggaagttatcaataacttcctacaacctatgacatctctcggaagttaattaatttaacctaacggcgcgggcacgtgcaaacggagccccactcgtccaccacgacaggggcggattcaggccacgccctactcttgggtcgactaattgtgtaatagtagcccaaaaatgtgaatagttaccgaacagc

SEQ ID NO: 177939 - DNA, 662 bp, Zea Mays
ggagatggttgtccacggcgcggcgtcacacggtggcgcggacgaccgatttgggggaagaactaaattagggcgctacggtggctaatcggaggcgagggttggtgctctggcttcgtaacaacctagtggagctagctgtgcactcaatttatagcatccgagagcggtggctctgaatttggaagaggaaagctggcggccggagagagggggtgagtcaccagcgcgaactaccgtggctttcaccggggtaatgtctcaagcgatggataggctacctacggcgatctactatgatgtggtaactcttctaagtacatggcacggctacgaagggccgcgaactccggcgaggacacttcggtcaatcgcgtggcaagtggcacagtgaacagtccagtgataaggctccaactcttccctgtgatgagatctttcaccgccagccgttatccgcacactagggcgcatgaatcgtgacgccgacaaggatcgcggcgtggagttcaccggcggcacgttcattgtatctgaagatcttttcgttcactgtaccgtggctatcttcgtcactgtgtctgaccgagcaacttgtagggctttgttctcaaatttttgtgtggaaactcactaatccatctgtaggaaagttgatctcc

SEQ ID NO: 177940 - DNA, 569 bp, Zea Mays
agaatatacaatgagcaaaattacacaagggaggtgctaattaagactaccattgctgaatccagttaggaatggaggaatcgaatcttccccgcgctctgtggatgaccagaagtaatttctttgtgaattcatgcttgcattgctgcaccgttgggtctgtgttctcaaatagccatgcaattcggcacttacatatgctccatgttatgaggataactatctccatagagaagagaacgatgagttgctgtttcgaaaagattcttgaggcaattaatatgtctaaatagatcatagcaaacttatatgcatgtataattctctcttaaaaaagattcttgattcttttgtcttaaaatagtggtcgttctcgtttcgaataactgacttctcgcatggataacaaactcatcgcttgcacagttattgaaaatgctaaaagcacacaccacgacgaactatgcaatatatatagaatacgtccaacgtgagcggactgctgctagctactcgcctactcctacaagctagtagtagcctcttgtgaactgtgatgcgttctcgcg

SEQ ID NO: 177941 - DNA, 287 bp, Zea Mays
ataggtaagagagatgtgccacagccagatgaagggatggactgcccgttaccgaccgtaatggagcacgatggggaatgacaacgggaaaggagtataccgtcgttggaggacatgtgggatgtcgctctgctgtccataacccatgaaggggagtcctgcaccgccatttgattaagggcagcaatcaagttggctgtattccagccgcctgaaggagcacctgcggcggagaactgcggtggcgcaaaggcggtgtgggcctgctgtggaggaggcggagtagg

SEQ ID NO: 177942 - DNA, 614 bp, Zea Mays
ccaagtgatggaagaagaggggtcaggtccatgagccgaagtagtggagcaggcttgactaggtaagctagtagagttggctcggggtcaccccaataaatgtcgtcgtgctccacctccacaaagatggtttgtcccatctgatctagacctgtaggctcaaatacaagggatggacaaggtgcaacctcatcgaatgtaacctcacaagtctccatgatgcggttagtctccaggttaagaacacgataagcacaagaatgtaatgcataacctaggaaaccccatcagaagactgagactcaaaattgtccaaaattccttgttttagcacaaagcacctgcaacaaaataccctaaaatggctaaccttgggtggtcgtccaaaccgcaactcatatgaagtcttgttcaagaaagctcgaagaaagatgtggttcgacacatggcaaacattgttgatcgctttgccccgaaaatgcctaggagtcctatgctcatcgagcatcgtcctagccatctcaataagggtatgattcttgtgttcaacaataccattatgctaaggcacatacatagaggaaaattgatgatcaagtcctaaagaatcacaa

SEQ ID NO: 177943 - DNA, 500 bp, Zea Mays
acaaaatcaaacttattacattatgacttaaaaaattctaaagtagcctggtaatagatcctagggctccatagtgaatcctcttgcggggtggagacacaactatggcaaggacatgagcttcaggtggattccttccttcaatttgagcttcgagggctgcaatccttgcatgtgtgtcttcaagttcttcatgtacccttgagagatccagggtagcactgtccaggtcagtgttaagacctaccaccacgcctacaagggtgttgaggcgatcttctctagcttcacctggaacaacacttgtctggctctcacgacgcgaacgtaggggatggtgtctgtacatcgtgtcgtgcagctgctaccgttgagggaccacagagctctccgagcagcattgctgaccgaaacagtgtaggtggatagcagcgtcagagactcatgagatgatagagtcctgaaacctctatctcctgcatctaacactctggtatgca

SEQ ID NO: 177944 - DNA, 626 bp, Zea Mays
gggggctaatcgagagcgaggaatggtgcactggcttcgtaacaagctagcggagcaagcggggcgtcaatttatagtgaccagaagcggtggctctgaatttggggaggggataagcttgcggccggagcgaaggtgagtcactggagttcgctcaatgtggcatttactggggtagagtcccggggtggtaactaaccatctcgcatgacactttgcgacatggtaacatggtgagtaacgtggtgtattcggggtaacggcgaccatcacggcgacggcagcgcgaccacgtcgacgggcaagtgggtacggcgaagctgactctatccactccccttcggatctttttaccccctgcgactatccactcgccacagagcacaattcgtagcaccggtgcggatcacggcgcgaagatcaccggcggcgagattcactgaacgtggcgatcttgtttagtccactgttcaccactgaacatcgccccgagctgcttgacaaacaaggtttgggagcaatttactccaaaaattgtacagcaccaggccaagctcagtataacaagtttgttcactaatattagggcttcatttttgccacagtgaccctagtcttaactccac

SEQ ID NO: 177945 - DNA, 688 bp, Zea Mays
ttaaggttttgatgcaccggcctagatacattgaaacagctagggtgctgaagcttggtgaggggacaacttccaccgctgatccaggatacctctctattgtcagttccaagggggaataggctgaagtgctggaagtaatagggcaggagaaaaccgaattggctgaagcggcgaagcatcctgccgaagccaaagaaaaagcggccgaagagccagagctaggagaatcggcaggtttacaaaaaatcctgagcccgccaccggaaccggagttgccgaaggtgcccagagctcctgtaataactcccaagagaaggaggatggctagcgtgttgggcgctgtcttagagtcgacaagggcatcgactcctgcttctgcaaaggagactgccgaagatgctatagctcgtggtgaagtcgaagctgggcccttagtgcccattgaaacaaagtctgttggaactagatagagtattgaacaaggaccttcggacgtcggtctgatgctagagaaagaagatgcgcctatggaggttgaatatccgactcccgaagcatctagtgaagagctagacttcattattcgacatgcttcgggtaaaaaattgttggaagaggaaattgcggaagccaaacactatgcccgggaactgaagtacacgaaaggggccttggtgtataatgg

SEQ ID NO: 177946 - DNA, 602 bp, Zea Mays
aacaacttcaccgggcagaccctgtgctagctctatccctctccctatctcctctctgcttcgtgcgctggtagttgaaggatcggacgccgcgcaaaccctagccaacagaaaacctctcgcgtgcacgcagttgttccgccctcggtctcgttaggtccgtcgccctgctcggttcattgcgagctgctctagatctccgccacggtcctcgtcgctaacaaaccctccgcggaatcctcttagcctatgtgctcggttgctgaaaaatcgcaacaaactccaccgaatcctctagaaaccgacctggcgtggccctatcgttcgtgaccttataaggagcttcgctactcgtccctctcctcaaaatatgtcctgcacccagcttcacgagaatctacatcggtggccgaatagagctatgaggaatagagaagagaaagaaagagagagtgtggtctgtgtgccggtaccccttcatcgcttaatctctgggtggcgagggcgcttcggctaggcgagttgtggcgtccagatcttgttcacgttcacgcccgtcaacgaaagggagctttggcatctgccgccgcgataaagaagcg

SEQ ID NO: 177947 - DNA, 804 bp, Zea Mays
aacccttggcccattaggcccatgagccggccgccccctgccccttttctaaccctaagccgccgcccgtggctcctagccgccgccgccgttccctcttcagctttctctctctcacccgactttctctctcctcgctcctctctctgacgcactgcaccgcccgaccgagcagcccctgcgcccatcaagccgcccgcgctcctgaagccctgctcgacacgccgaccccgcacacccgaccggcttggccgccctgcgcccaacgccgcccctgccgacgtgccaacccgaccgcgctctagcacaccacccgcggacgcgcccgacgcgaccccgagctccagtcggccgagcgcccctgctcaggccaccgcaccgaccgccccgaccgcgctaaggcccaagccccgcgaccgtgacgcccctgccacggccggacccgagcacccgaccccgacgtccgtgccctgtgcagcgaccgagctaccccgacgcgactccgccaacccgacgcgacccgaaaccgaagccgccgctcatccgttactcgagtaaaggagcatcaatggagccgttacctctccccacgtcttcctctttgatgaatgccatcatgccggccaccatttcctccccctggcgtccccctctctctccctctcgtccctctataaattggagccgatctctctctccaagccatccctagctcaccccgttgccccctcactcctcgccgttgaaccaccgtccgtagttcgtccatcgccggagtcgacaccatcgcgctcggaattcgcc

SEQ ID NO: 177948 - DNA, 664 bp, Zea Mays
ggcaaagcaagaacacattcagtgaaccgatcagctagcagaaacacagtcttcacacaagagccatgaacttctccaaaaagaacaaaacctcgagagcatttcctccaacaaagttgtaccaccagcttgaggagaacactctaaatcactccagaaagcgttgagaaatctcaacattaatttttccaatacttcaattcactactatgtcgcttcctcctccatcgatgctcttgaagctgaaaatccaagaatgcacctcctctagcttcttctccaacatgatttgctcatcttcagatagcaacaccttccatttctgcaaaaacgaaacaacatcacggaggagcacaaaagggttgcatgggaactctttctcgaacatcatcttatttctattacgccataaggcccagaccatgcctgcaagcagaaataaacgaaaaagataagccctcttaggtttcgcttcaatccagaagcagaacatctcttccaccgagctgggaatattgttccttccaaaaacttgcctcaaacaactccacacaaaatatgccaaggagcactgaaagaatatatgatccactgtttcttgcttttgacataattgccacaaaaaactttaatccggtcactacccttccaaccttttttcagc

SEQ ID NO: 177949 - DNA, 389 bp, Zea Mays
atcgcataagcatatgtgtttataaaatcacttatgttgttccatactattcttatcaaccttaatttggtgtgtatgtatgttgttcgcagctagatgatgctgtcaagttgttcgaagaaaaagaggcctttgttttcatgcattgctgggaaattttaagagacgaaccaaagtggaacgataggatgttggagctgaacaatgcaagcactcctttgtaccaaggctgggcaaggaacatcaagcacagacgccattccaatccatggagagtctaagacacaggacgaccatctaaagagacgagaaggccgtgatagtgcaaaaaagaagaggtctagagcaatggatgccacatctgcttctagtatagcagtagatgtcct

SEQ ID NO: 177950 - DNA, 336 bp, Zea Mays
ctatcagggagatccttgcctattgagaccaattaaccaaaataaggatcaggcacacaaggcaacaagccaatgtagtgccacctaaactgcctaaaatggcacatgctaacacccccgcaatcagatcgtcagccactgtgcacgttcagactggtcctgaattcggtgaagacagaggatggaaggcccttggtgaagatgtcggcatactgtgatgtcattgacacatgtaggacatgaagatcaccagcggcaacccgttctctgacgaagtgtagatcaatctcaatgtgtttggtgcgttgatgctggatgggttcagaggtcatgtag

SEQ ID NO: 177951 - DNA, 331 bp, Zea Mays
caacctacaaaactgaccctatccataaaatagatcctatccctaaaaccgaccctatccacaaaacagatcctatctctaaaaccgaccctatccacaaaacagatcatgtatctaaaccgaccatatccacaaaacaaatcctatctctaaaaccgaccctatccacaaaatagatcctatctctacaaccgaccctatccataaaatagatcctatatctaaaaccgactctatccacaaaaccgaacccctcactcttccaacacctcgccagaaaccctgattcggagtccaaacttaaaacgaccgtaactttcacctcgtaact

SEQ ID NO: 177952 - DNA, 542 bp, Zea Mays
agctggaccgacataataaacacgctaagacttagtgcacaagtcccttacggacaaggccggatcagcgaaggcacacagcctcttcatacaaattatagttacatacgtacaacgagggcatcacaccttacattggttcaaccttcgggataatacccatctccctatagttaaacaacattatcctcagctcctcaccctcaaaaagacttcgcaattccccctcacctacactcgccccagctggcgaggacaacaattcatggttgccagtcctgtccacacgaagacgaccaccctccacctcactcactctacgcttcgccaccgcccttcgacgcttacacccaacacttggaccgggaacttcagcacccaccacacgcggagaagcctccgccgcagccacatccaatgccgcaaaataatccaaatcatcatccgaagactctttcgtccacaccaccgaactcccagaatcatcagactcaaaaaacttagacacagaatcacccgaatcattttccgcacccacggtc

SEQ ID NO: 177953 - DNA, 389 bp, Zea Mays
cgagggagagggattcgtgggtgacgaattgatgcgtccattgaagctgtgtaataactgagaaattgaaacgtcattaatggggtgagctcggaaaactgacgattgtggaagggaaggaaagtcatcggtgcagcgctttgcgaaggggaacgggcgtggcacggatcggcaagcttcatggagacagggaagacgaacggcggcggctacacccggtggttcatcgaacgggagaagatgcagtggaaaaggagatgaacagttctagagggcctacctgtcattcacacaaaaggagtaaagtggagaggaccgatcgatgacgtaggtggggcctgcacggacacatgttttagcctgggcatgtgctagcttctagccaatcg

SEQ ID NO: 177954 - DNA, 788 bp, Zea Mays
ccaccttaacctcttctatggtaaaatcagcagtaagacaagtgttttcttcgctagagatttgtgggatatcctgtatcctagagtcgtctagctggaagttggattcagtagctagaccgaatagagttttgtaatacaatgtgatatgtttttttaaatcaatatcccccgtaattacattgtctccattcataagcttgtaaatacgggttttcctgtgtttaccattcgcaactaaatggaaatacttggtgttcgaatctccctccaaaagacctttagtcttggcccgttgataccatttaatctcctcttctctcagcatcgttgcgagcctattacgaaggaagtttttggtatcaatttcctgggtggacaacaagaccgtttcagctttcttatcgaggatgtctaattaactcaggatctctttcttttcttttttgttagatccgctaatattgttagcccaccctctcagatgctgtctaacttttctgattttattctgccatttctccaaggccgaagtaccaccccagtcttgtgaccaaatctgagcaaccatatctcgaaacccctccctcagtagccatccgagttcaaacttgaacgtcggttggatattacttgggagactgtctccagtgttaagcaacaagggcgtatggtcagaaatatccctagagtgtgctaccaccgacgccttagggaagtgtagctcccattcagtagacactaggattcgatctagcttttcgtaagttgggttgaccctagaattg

SEQ ID NO: 177955 - DNA, 576 bp, Zea Mays
gtctgtctgacttctaaccccagataataagttagcaagcccagatcactcatgtcaaatgactgcttcattttcctcttaaactctgcaatttcttttactgaagggccacagataatcaagtcatccacatagacacctactatcaacaaagattcaccagagccctttctataaactgcatgctccacactgcattttgcaaaccccaacagaatcagctcagagtctagtcttgaattccaagccctgggagcttgtttcagaccatacagggccttgttcaacctcaaaacttttgaatccacttctgatttctgaaatcctggtggctgtgagacatacacttcttctttgaggtatccattcagaaaagcagattttacatccatgtgatgtagttcccaattttcatgagcagctaaggcaatcaacactctcactgtttctagtctagctacaggtgcaaacacttcatcgaagtctactccttctctttgagcataccctttagccactagccttgctttgtgtttcacaacattcccaactgcatcttttgtcaccttaaacacc

SEQ ID NO: 177956 - DNA, 922 bp, Zea Mays
cagaaacccaacgctcatctttcttcctcctaaagcaaaaatcagccagatgcccatccctctcacaataatcacaatggaacctcatctctcatatggattttgtttgtgggagggggctttctttttggatggcttaggggctctaggaaggggatcactagagatgtcgaaaagggtatcaagtgtgttccttaggtggttaggttttggaatccacacttgtttcttaggagggactctcacaggctcctcaatcacaccatctctcacagggtgataggtttaggtggggtgcttttgataagcttgggagtggcaaaaggtttctctgatggtttcaatccactccactcaccaacctttccaaagcaagcaacattcccatccttagcagcaaagcctagcctcgatctgctagttcccctcttgaactgacagaccatcatgcccaactagggctcactgctagacacctagctcaagaccaaccaaaggtatgtgttttcttcctcgatctgggccttgtcgtgtctgtaggactcaaaagaaaactacaaacccacacaaagtgcacattgtgtaggtgcaagggcactcactgagctagccttctcaagcaaggctagcgtctctctttcctagctcagtctgcaagccaggacaaacagtacacaaacctaacaagctaggcctagatcttaactcatcgtgctcgtcacattcagtctcgccagacaccacaaccgaagctctagcagacttaagctccttaagcatgctctcatacttgaatttaaaatctttcctctcacgagcagcaagcctaagcattttgtcctgactagacagaggaaccgttagctcttttacctcaatagcgagatcatcgacggagtgtgatacctcagaagcagagccg

SEQ ID NO: 177957 - DNA, 404 bp, Zea Mays
agaaaattttcgttgtaaatttgggggcacatacatgcagtcggggcaacccatggggcctcaagaactatcggtagaagccagataaaacctcaagggattacatccaacacttctcatggtagtgtagcgagaggatcaacctcatcgatgtcgacattgtcagcgctttcacctttggaaccatgagcaaatctctgatgcgtaagttgggatgcaaaagctcgtgaaccataaaggaactccttgacatcgtgactagccatgcaccggagaaagacacggtgggggcgatctttgatcatcacaaacagaaggataagcatgacaaagagctcgatgaaggcatctacggtcgaccgacaagagaaagaagaaagacatgtggcgacacgatgatgtgt

SEQ ID NO: 177958 - DNA, 399 bp, Zea Mays
cgcctccttgtcaaatcctcccttggacttgtacttgccggtgatggtcacgcgggctagactccgatttttccttcttggggcagctggcaatgaagtgatcgggatcgccacagttatagcatccgtccttggacctgccattgccgctggctcatacggttgttgtggaaccacgtgaaccagctggccacaagtgccagctcctcatccccaaggctctccaccttctcctctataatagacaacaaagaagataatcaaacatagcaggtgaggagttagaagcagaaccacctccagagaccaaggccatggtgggtgcaccagggttctcaatcttggcccgagtctggtggtcaatctctatggacttgagcttgctgaagagctcatgca

SEQ ID NO: 177959 - DNA, 525 bp, Zea Mays
tgccgagatcaagctcaaatcacacgaacttcacttcgaagtagactgaaattcgcgaacccaaaagctaacggtagaaggctgaagttatccgccgtgctaagcgactggagtatcgatcgatcagggtggtacaacacaaacggaaataataattgtctatccacacataagtccctggatggcaggatagaataaactaatttcgaattccactgcacttggctgatcattttgacagagtgagattgtgaactcagagaccgaggctaaattcagaccaatctatctatgcagcagcaacgtacggtagtacacactgaatcaccgcttagaacgaattggccgcaggatttcgaacaaacgtatggaatagtagaaccccacgaagttacgccacgatgcaacaccagcaccagttggttaccaaaactactggaaattgttgggggaccagaagcaacccaaaaccccaactaagcgcaccgaacaaaaacaaacaaatgccgacaccaagcacaaacc

SEQ ID NO: 177960 - DNA, 722 bp, Zea Mays
tgggcatgggatattcatctttaggagttgctctatttaaattgcgaaaatcaatgcatactctaagcttacctgactcgttcttctccaccggcacaatattggaaacccactctgcgtatctgcaaggtctgataaaatcagcttctagtagccgatggattttgtccttgatgtgtgggagaagttctggacgaaatgttctagctctctcttgaaaggtctaaaaccagatttaataggcagtcgatgctctacgatctctcggcttaatccaggcatctcagtgtaattccaagcaaagcaatctgaatattccttcaatagaccgatcatctcatctctaggatcggtctccagggtcttgtttacaaaaagtcggccttggagttttaccatctcctatgtcaatctcctccaaaggatcggccgatgtaaacccatgtcctagtttatcaagatctctgaattcctctatcatgctccccacagaggaattagatgatctttgtgtgacgacggactttccggtctcggggaccggatcatccgtattactgtcttttcgctacgatagatgttcggtcttaaagttcgaacccttttgtaaaagacccgaccctccggccttggaagccgaactgtccgtgaccaaagactcatgaactttgtgtgtattcatcatttaaactttatttaggatttagccgattctccatcgg

SEQ ID NO: 177961 - DNA, 1112 bp, Zea Mays
aaatgggagtgggaggggaagtagtggaagctggagtggtggaggtggtgggtatagcggaagtggtggatggctttggagcgacaggagctggtgaagtgggaggtggagtagacacagtggcgaaaggtgtggagggagcagtggagcgaggccgagatgcgaggcaacgaacccgataggctatctaatcacaggagatcttcagttgtcctcctcgctcagcctgctctgctgccgctgcaagtgctgcacgagcggctctgtccatacgacactttttcttgccctcttgttgctcgaggtaaacagtcttccccttgacctgcctgaaggggcaaggagggtcctcatcgtctcctccccctgacgatgagacgttctacgtccgcaccatcctgacctgactgctgcacgagtgagtgaaaagataagcagaagtagagagcagccgataggatctcaaatgaagtcatagctacctagaaatctcacgagagagagaaaagatccaggaaggataggagatgggcacacgggccggcgagatcactgaaatgacagaataggtgagcacgtattagtcacatagtcataagtatatgaaatgtgaataattacatacacagagagtgaatacacaaaaacagggcgatttggagaaacgagggtcaaatgactcaataacgacgaattatgccataggaagtttgaaatttgaaaagaggcatgaaatgatgtgggattgagtcgatacttcacagataggtatatatgagtgaatatgagtgaagtgtaagcttgatttgaaatttgggaagaaaacgaatttttggcactcggctgagaaatgatcgctataaatggaaacagtggtatattcggtgtctgggatatcggataggcgtgaattttggcgaggaagttactggaggtgtcatgagggtgctggaaaaatctagtgtcgatttgagcaaatttgagtgatttggacatttcaccgagcacttggtgcgcggggttttatagaagcgatgaattggttgttctaggttttgaaacctcccaaagggagagatgaacctgcaagggagctcaagagacacaaaggc

SEQ ID NO: 177962 - DNA, 805 bp, Zea Mays
agaatcacaacaagtctttgcctactcgttctggaagacaaccagatgttcgtgttcccagttggatagaggccctaactgattctgaagttgctgaggcaaaggtcttgttggctaaaattgctggtttaaaggacagaggcctaactgtcgaggctgtggtgatcgactttgtcttcaagaatatccaacctctcaaggacagattctaccctacatatgtttataatagtgtcagggatcctttccgagtgacgaacaagccaatctcagaggaaaacatcttgagccgggttgagatgatgctgagggtttccatagtaaatgtcagtgctcttagatcttactctgcctagaaccttcatccattggtaagttctgaccacttgattcctggctcgacgcttgctgagttattgtgtgctttgtgcttactatgctatttcattgttgtagagtccttttgctgagtttgtgtctaacccacctatccatggagaaagtagcagttctagccatagagtgtggctttccttggatgagatagaggtcataattgctgcgtaccgagctctgcctgaggaggataagcagacttacatcttgatacagcagcctgccagtgacttcaagattgaggttgttctcgacatgctggctggggagtcttctaagttggcgcgacttgagtcggggtgtggagcccccaagcagtcgagcgctggcaggaagagggcgaataatctcatgagtccatgatgcaaacaatcttgtcagtcaaatgccccagccaagtccatagatg

SEQ ID NO: 177963 - DNA, 521 bp, Zea Mays
tggagattgaggctactcggccgtaagaagctgtgctttcaccgtgcgcaatcgatttgggagaaggtggagagggtagtgcgaatttgacttcgatctagtcactgtgtttgcgatgatcacacctcgccgtgaacccaatggctatctatagccgtggcggtccggcgatcacctcgcggctgaagatagtatcgcaatcgcatgtcgaccacgtcggtagaaggtacagtgagggagaactacggcatgagcgccaccgcggtggaattcactgagtcacggcggccgccggtgagtaactccggctgggcctgggagatggcgccacgtacgggttatccctccccgacgttatccacaccataccgcccacgaatcaggacggcggtggcactaattttggcgcagagaggtcgccggcggtgagcaagccgcgctggcaacctgatccacccgagagcactgtaccatgggatacttcttcagtgtgcctgacagtcacagtttaggaccaaatt

SEQ ID NO: 177964 - DNA, 789 bp, Zea Mays
cggaggtcgaggggtccctccctccgtcgtccgggcgagcagtttctgccgccagggcgtgcagcttctccacagccgcaagcgcagcggcgcggtcaccccgcacggtgaggaccccggctggagacgacatcttgaggaccaaatacctgtaatgggcaatggccatgaaccggtacagggctggcctgccaatgtggcattgaacgagaggttaacctccgcaacgtcgaactggacgttctccgtgcggaagttttcctctatcccgaatgtaaccgggagcatgatgctcccaaggggatacaccggttgagcgcccactccagagaatggacgagagggtcccagtcgggaccctgggatctgcaggactgcagctgcttgaacgcagcgtagctgatgacgttgagcccagccccactttcgatcagaacatgatgcagcttgatgttggcaatgataggggcggtgatgagcggtagtatgccggcccctgccatgttctcgagctagtcagatgccccgaaggagatagtggtgctccgccaccgctggtgtggggctgccctcaggacccctagggtcgccgataggacctcgtggcgcagggacttcacgttcctgcgggaggtgagttcctagcttctgtcgtacatcacgtacaacttcttgtggtggtcgttatcatcaccggagtcagagtctccagtgaggatgtccttgaggacctgctcaggggactgatacccgaggtcccgttctcccgcggccacatcaccgtcgtcg

SEQ ID NO: 177965 - DNA, 526 bp, Zea Mays
ggcgatccaaactcctctccggcgttctcctcactggcggcgatcctccggcgaccaagtgctcctctcctgccctcctctctggtgagcagtccctgtttctccccttccctctctctctctgtttcaggggcagtcatgctctccaattccacctttgccacaaatttcaaatccattccaaattctatgaatccctgtgcttgattgtgtgccctcgtgctccattgaatcccatgcaggttcctagctccttagggagggtttcaccacctcaaatagccttttcaccgaaactctaaacctccgcacaccacatgctcggtgaaatgaccaaaccactcaaaattgctctgattgaacccaaacttttcaggcaccttcacaacaccttctgtaacatatttgccaaatttcacgccaatccgatattccaggcttcatttttactcaattccctgtttcgagcgatcaattccaagccgagtgcctaaattccattttctttgcctaaattcaaaccaag

SEQ ID NO: 177966 - DNA, 491 bp, Zea Mays
tctcattaatgcctgagggatgtttggaatcaacgaatcacgcttctgactattttcttcgtgatgtcaacactttggtgatagcagccgagtcatctgaaatcacgttgttgctttaggagtgacggccgagttattactggcgatgttggcgctttttgaagtaatggctgagcgatagcggccacgttagtgttttagagataacgaccgagcggttattggtgatgtcggtgttttagaggtaacacccgaatcccttggaactgtgtcaccactttaggaacaacaaccgggcgactgatgatgacgtcggtgttttggaggtaacagccgagtgatcgatggcaacgtcggcgttttagaggtaacaaccgagtgataacaggccacgccggccgctttggagatagtggccaagtggagtctggtaacgtcagcgttctcagaaatagccgctgagttagaatggaccgcgtcggccgttttgg

SEQ ID NO: 177967 - DNA, 340 bp, Zea Mays
gcatgtccggcgatcaccggagccactgccacggtgaaagccacttttcccccgcactgagctcatctcccctctccggccgccaccgcgccatcatcaattcaagcgccaccgcctctggaatctataaattgagcccaccgttagctccgcaacctcatcacgtaccccatcgtccagtatcacccccagtcctgcaaccgtgagctccaatttcaagttttccccaactctgttccgaaacaccgcatgatcgagctcaccgcggccagcccaatttaggtcagttcatgtttctctgttgcttgttctagcatccctaagctcttctcaaactccc

SEQ ID NO: 177968 - DNA, 531 bp, Zea Mays
ggcttagggcctgtttggtacaacttataagctgcctatggccaaaataggttgaaaccaacagctaatcgaaatgcttttttgcagattattctggactggattattcccacccactctcatttgtactaaaaacagaagctggatcagagcagcttattttgacagtgcttttactctaattgtgcagcttatctaagaagcacttcccagataaacctatatttacaattaaatcttaagaggaagtagattatagagttttcaatcacagtccttttactctatgtgtgcagcttatataagaagcgcttcctagataaaacctatatttacaattggagtttaataagaagtacattatagagttttcaatcatagtgtttgccggtattatcacatcatagacaagtatggaaactctatgaccagaccagactggcttagtgaagggcaacataaactattttacctgacgaattaaaggactactgtaaagcagttgttgttgacatacttatctgagtcaat

SEQ ID NO: 177969 - DNA, 362 bp, Zea Mays
cataaattgaaggtttacccccaggcgaggccgatccgacaaaaattacggcgcttcacgcctgacaagagagaagccattcgagcagagttggctcgcttggtcgtgaccggattcattagagaagtgttacaccctgagtggttagcaaatcctgttcttgtactcaaaaagaataaagtggattggcgcatgtgcgtcgactatacggatctcaacaagcactgtccgaaggatcccttcggactccctagaatagaccaggtggtagactcgaccgccggatgctctatgctgtctttcttggattgctactccaggtatcatcagatcagcctagcaaaagaagacgaagaaaaaac

SEQ ID NO: 177970 - DNA, 874 bp, Zea Mays
cctgaaactatttggaactggaagaaaaagtggtcgtcgcagactatttggaactatttggaatgtcagattttaaatctcagactgtaatctcagcacctcagtaatgtattgtgaagcaactttggaagcctattgatggctgatccatacagttatggattaagagtgctgtgccaaagtggaaaaccacatgttgatgtataagtatggttaaaggtcatgcccctgaaactatttggaactggaagcaaaagtggtccaaatatgtaatgtttaaattctggacttcagacttagtacaaattcagagtctgaatttgtgtgttttgggtaactttggaattcttttgtgcttgatatatggagtattagccataatctctgtatcaaagttgaagagcatataacaatgaacaagttcctttagaagaggttggcttgatgctacattaaaagaggagtaatggttgcttgaagatgggctgtcagggtgtgttcttatctgatttttgttcagaccaatgtaactctgacagtagaatgtggttcactttggagccctactgttactgatccatagtgttttgggccaaagtgtttatactaaattggtagaccatagaaaggaaagaaaggttgttgtggagtgtgaggcctggtactatgcaaaatagtgagtaaaatgttcttaaactagctctgtcaggttgtagtgagtggtgtcagtttcaactaactgaatttgggttcagtgtaatgtgctccacttttgggcaccataactttgaatatatgcatttttggcctgggaattctatagcaacgtgaaagagctatgcttggtgaaccactttgatgtagtgaggtaggt

SEQ ID NO: 177971 - DNA, 551 bp, Zea Mays
ttgcattcttttttatagggggtactactgcgccactttcaagtgttacgggctcgggatgtctccaatggtaacctcaactttgacctatgtgcaggcaataccctttatcgggatacactacatctcgggggagtcatggatcccgtccctaccacccgctgaagaataggctattgcaagaagcatttagagtcatatatgctactaggagcacccctaaagtcaaaacaagaaagttgttttgttagacatgaattctgcagaactaattaaattatccacatttgttggccatgatttttaatttgtattacaccgtccacattatttatcaagggtttcgtctacatatataaattgtatatcgtctttgactttttcatgtgcatagtttttttttaccgtgcacgtaaatatagtgtatgcctccctctctttggtgcgagtgtgcctaaggagagccagagcagaggtcgtagcaagcagtgttgataggtaggccggccgtaggtggcataggcggcggccgctgcaatgttgatggccgg

SEQ ID NO: 177972 - DNA, 440 bp, Zea Mays
atcacggaggccaagctgaatgccttaaacaaaatcctagaggagcagtgggcccaacagaccgcagttgtggagagcctgcaaaggctgcagcgggagctggatgacagggccagcagcattgccctagccgaggagaacctcaaggaaaaggatgcctccctggataagcaggcgacggatctcgcctggcaggagaaggacgacacctttagggaggaaatgtttgaaaggcaggaaaagctgctggctgatcatgagctcgaggcggagtagaaggagcgggcgctggaggagcaggtccgccagttcgaggcggcgcaggcagcacacgcagcaagggcccctaggcagtggaggcgatgaagaagacacttgaagatctccaggcggagcagcgcgctggggtccagcgcatcgccgcatgggccggcgaggcg

SEQ ID NO: 177973 - DNA, 844 bp, Zea Mays
tccctttcacccttctggcaactaacccttagcatactctccaagatgttgttcgcctctcttgaggcgcgaaggcgatgtgccttgatcagtcaccttgtcgatccctctagagaggaccgatgatgctcttttgagggatttaagtgtggtacattcaatcttagaggcagctaatgatgaggcgtggcatctacaatcgcggctagcggttcttaatgacctaggggcatgtaagctatcatggtccgacctctgggttctcgatgttttctagatccctgactacctagtggttcatcacaagtcctaggctcgaagtgttgcctttttcttatgcgttgatcgggctacaaggtccatttgtgtgcgggggaggaatcagatgtcgtgtctccttgacatcccggagtgtgttcatgaggctttggagtttgggattcaccatggcggagtgacaaccttccccattacgcaactttgctacgatgatcgtattcttgatgttgacggcctacctatcgagacaacgtcaatggacttggaactcctaacaagcggctttgacgccacgacgaactccgtgctcggggtggtgtcggtggaggagataatatgtgatctcccataaacatgctttgtggcatgtttgttcctacaatgtgtatggtcgttgggccccttggaccctggttggtactaaactctatcacggtctgaggggcgctataagtgcgactttttcccattcaccatactcgtgcgaggcgagcccccgagcctctgctcgatgcagagatccatctaggcgtcatctcgtattttttttgttttactctccccc

SEQ ID NO: 177974 - DNA, 306 bp, Zea Mays
caaataccacctaagctaatagtattagcaactgttggcgcagcaacagctaatagttggtttgtatggggatgtggttgatgccgtgccacgacgagcctttctggtcatgagaagatctggagcgcgcggtccatccgccgcgcctcctcaatcgtcgtcgtgatgaaatcctcagcgccatgttcatgtgctccgtgtcagcggtacaatccacatgatgccaggaccaggagtacattcttgggtacatcatgcgtcagcacaaagaattcatcctcgaatcagccaatccatccaagtagc

SEQ ID NO: 177975 - DNA, 662 bp, Zea Mays
gggagtaccaattctagagaacaaaagtaaaaggcgatctatggcgccgtgttgtcgtctagccataggaagacgtagcctttccccccatatctttgccgtagtttagttaacggattgcacaacgctacccggccgtccttagctacgaattgtgacgatgcccctgcttttgcaaaagctagcggaattattggaatctcttggcaccgtcggtcggtcggtcgatctctctcgcaacgtgcactgctgttcctcgcgaattgcatacgatgcgctagctagctagctctagctgagctcagaccagcagcacgcctgcatctgttcctcgcgatatgattcgtgcccgcctgccggccggtcattaaacaattagtatgtgttgcaatttgcaagtgaggtgacgatcgacgtgcagagagagagagagagatgcatggaattaatgggtactagtcaaagtatggcccaatgtggggagggctggaattttgtttctttccgccgcgcgccactagatcgtcttgtcatgtcaatgcctagactagggctggttgctagagagagtgctggtctggtggatcgacgactagccatggcggcatggcatgaggcgatggatctggatcaaaccgaaataggaacaggatggacggcat

SEQ ID NO: 177976 - DNA, 503 bp, Zea Mays
aaaatatgcccccaaatctagggttcgtatgatcgcgggcggcagaccaatcccccacggatgcatcatccagattgatgttaaataccctcaatctaccaccggagcagatccatgtacacttatgtcaaaggttgatgaagtgtgttaagaaaaccttaaccgatagagcagatccatgtacactagtgctgctcatactattcgaacccggtcattgacatgacttcggtaaactacagaactaagcacgtacaatttgcaaaaataaaggaagactcatgaacctgggagcagatagaagaacgcggtcgcacctgaagaacggaagattcgggccgcaacaacacgaatcgaagcgacaaagtccggatctgaggatggcgtccacgctcggagaggaaaacaacggatgcggcgacgaagagcctcggcagactgcgatttgtgggtgcttcggcttccgacgtgaacggggttgactgctcacgaactcgacgtgc

SEQ ID NO: 177977 - DNA, 484 bp, Zea Mays
gtctgactatctctttaagatatatccgggcaagggtggctcctccaaaagtggttttcactggaatgaagtgggccaccttggtgagacggtctattattacctagataaagtcattccctttttgtgtctggggtagttcggttacaaaatccatgcctatttcctcccacttccattcgggcactgggaggggttgcagtaggcctgcaggtttctggtgtttggcttttgttcgttggcaggtgtcacacggggccacataatgtgctatctcattcttcatccctctccaccagtatctagttttgaggtctaggtacatcttggtggttcctgggtggatggagtaggctgagttgtgagcttcattgagcaggacttctcgtgcctccccttttggtacacacagatggttcttgaaccaaaggactccttgttcatctgtcctgaggtccagaagttgttctttgtgagctttttc

SEQ ID NO: 177978 - DNA, 739 bp, Zea Mays
agataatccaaccggatttattctcgatgaaataactaggctgatggaaaaggtgtacacattcaacgtaagcttcacagacagcaccattgctttaggcaatgtgtgtttccaggttaacacggttgtcaccgagattggtgattgaggtcaggttccaatttcacccagtggatcccaaccttcatcaattccgtctgcgtgggctgcatccaagtctacatcagcagactctgtcctaactaaaggtacctcttctcaggcaccatagagcaccaaaaactacggcaaggataaggtaaccaatgctttcgaacactcaataaatttgttgttgccaccaactcaagccaccttacaaactttatgcacttcgatgtagcgtgcaaggtcgccaatgccaccatcaaaaggtgggtccatagctaccaggcaggttttgaggaagatattgggaggcttagctgataaaactggtgatggcgatgacttggcttccgtcattgctgattctaggtacatcctctgcctccctgtgccttcttggtgtttacaacatagtctgaatgccactgttatcaaataggttttagatttagttatggccttctttgctcacttttcttttgcctctgaaaaaacgttgtttagttgtgatgggcaatatttaaattagcaatgagctaaagtgacaagctgcatccctttcaaaagggagttacgatgctaggcctcatga

SEQ ID NO: 177979 - DNA, 313 bp, Zea Mays
gtcaatattctaggaatggtctaggtcttcgccggatagcgttgttagcctgtatgcgctgggggattccttcgacttgacgatgaatggaccctcccactttggctccagcttgccccgtgactctgtccgggtggttcggacgagtacgaggtctccttcgttgaattctcttgggacgactgtgtggtcgcgccaggccttcgtttgagcttggtatttattgagggcctgcagggcgaagacgtggtctccgtcgatgaggtctttggacgttggttcgtctacgtcgaggacggctgatgcacttgtt

SEQ ID NO: 177980 - DNA, 655 bp, Zea Mays
tggtcatcctccttctcttgggagttgtggcaggagcctttgtcacctacgacaattctgcctctgccggtgggctcaaaatttttggcatcatcactgttttttccaattttggctctttggtcgcatcatctttggcttcggctggcccgactgtaggcaccttcggcactacaatagattcttcagcgctccaagcggcgggagcagcttgttctgcttcggcagtagaggaggtcccttcaccaaattcaggcactatggtcgtttcaatatatcgaggccggtgcgtcaaaaccttcattttcttacccttcggcacagcagtggtggccgatgcggcagttttcctcttttttcctttcctcaaggggtagcagtaatcaagatatatgaagtcgattgcatcaaaaaccctgttcaatcttttcttgccctgacccttgaaggctgcggacaaggcatcatcttcggccctggaatatgtcccaagcagctcgtcgctagtagcttcaatgcatttcaaccagtcatcatttggtttgtcaaacttctctctgtatctaaaggtatatttcaatcgaattaatccaccttcgctggattcagcagtagcctccttcggcatctcccagctatccacaagtggccacac

SEQ ID NO: 177981 - DNA, 349 bp, Zea Mays
gagaagattactaaggagattctggaaggcctatcggaagatactggtgatagtgatagttatgatgctgaaagtgggggtggagattctgaggaacggccctggaggccaagtcattcgattttcgaaaaatcgaccatcaagcaaagtcaccttgagagcatgagagggagatactttcgggatatgtctattgtgagagctggcggagaaaacaacatccctgcccctgaggaagacgaagttgtgatttatcgaagcttcttcaaagctgggcttcagtttccgttgagcaagtttgtggttgaagtgttgaaaatttatcagatcttccttcgttagataaccc

SEQ ID NO: 177982 - DNA, 520 bp, Zea Mays
tgtctttagagcatagatatgtttggttaagaaagtgtagggtaagaaaagactccatcctaggttatggattttgactcatctggtgatcccgcttgatccttgaagacttgagttggtgcttatcctttcttaatgaggttgatcatcttcggtctccaatcttggtgtcttcatctgaactagggagatatagttaagatagttgggtctatgagtaggacatttttttaatcaataggttcacataaatggattgtgcaacttattgggagtgtatggctgagttgatctatgacattaacttaggcttaagtgacttaggagtatgtcttaatccttgtaccggcattaagtaactcactttagattggatcagatctagaataaattgatatagttattttagactcgataagatctaaataaattctggattagctcatggttgttattctaaagagggataaatatgctaattagggcaaggtgaatccataaggataaggtagaatctttt

SEQ ID NO: 177983 - DNA, 488 bp, Zea Mays
gacttatccccagtggcaccagcgctgtgctcgcctcaccgacccactcagccatccgctggaccacaacgcgtgttctgcctagagatcttccaaggccttcttggtggcctccgtcacctggggacccgacgccgcctgcgcggcttcgaaccggcggatctgctcctctagcttctgctccttctcctccgcctcaagctcatgctcggccagcaacatgccccgcctgaaggcgagttccttctcccgactggcaaggtccgtctcccgcctgtccagggacgtacccttctccttgaggttctcctcggcgagggcaatgtcactggccttgtcctccggctcttgttgccattttttcatcctttctatggcctcctcttgctggacccgttgggcctccagggtctggtccagggcatttagcttggcccggagctctgttgtgagggcctccctctggctcagggcctcctccctcttgg

SEQ ID NO: 177984 - DNA, 988 bp, Zea Mays
caatgaaataaagatggtgtatgtttggcatgttatattttccaaatgtttctttgcctcaaatgccatcccggacccgtgcacatgatggggtaggtacatcctgcgaaggggaggacactcccaatccgccacccatacctcctaccttggccgaggctatcgctgccttggtcaacgccatcgccgacaacatgcgctttctgcgcgaaatggcaggcaaccaatttcaacaacacgaaggaagtgttcccccttagggaccacgagatactacctatctggagttctttgaaactcgaccaccgctcttcgtcaaggcagaggaaaccttggaagctgaagaatgggtgtgagtaatggaacagaagttcgggctaatccgttgcaccgaggttcagaagcccctatttgccgctcagcagttaagagccctcgccagcacttggtgggcaaatttctccaccatccaacctgcgggacatcaagtcacttgggaggaattcaagttggcatttagggaacattatgttctggaaggcgtgttacaaatgaaactaagttcattcgactgaagcaagggggagatactgtgatgcagtatctcaataaattcaaccacctctcccagtacgccattgatcacatggatacagatctaaaaaagaagaattgtttcttgaggggactaaatgacagacttcagagtaagatggcgacatgtttggaccttacatgcagtagggctgtcagtacaacactagcagttgaagccaaaaatgcgggacacggaaaaagtcaaagggatatgcgggtgaaagatctactcaaggacctaaaaaaagaacaaggttggtaatccgacctttcaattcaaactgttcttcacctcgcccaccttcatatccattcaaacaacccgtatttattcgtcccactcctgccctcgctccgaccaatcagccgagtgcccctggtactagtttcc

SEQ ID NO: 177985 - DNA, 352 bp, Zea Mays
gttttttcttgccatggacgaggccgttgaagtacgccatgggtgaggtaggagctaggaagagctagctaggaactcaaacgtgttcgtatttgatctgagagatgcattgagcgagcctgtaaggtcggcaatgttatttcctgtaataatttatacgtagaagcgagtttgtgcatctgaatcatcgatcggcaatgttatttcctgtaagatcgatggaattgatctgtacatatgagcgttttgtgcttctggcgccgccgccgaccatgacgatcgttgcctttgcctctcgcgagccatatatagacgcgcgatgcattctcttggccgtcgtgtacagtagttg

SEQ ID NO: 177986 - DNA, 380 bp, Zea Mays
gtcgttgaggaaccggaggcgacagttcacaggtctagctggtttagctcctcgggctcgtggtcgaagtcggggtcatggaccttgacgcggctgtagaggaggaggagcgccggcttgaggatcacaatgaggtgcaggatgctaggtactttctggggttcggtgacacccatggggatcctattgaagttgatactgttgtcagctctcaaattggtactggcactagatcaacaagcccaccagtccctgatcctagtcaggctgatcctgatgctagtggtaccaagatgaagaaaaggtccaagtggtggaatgacttcgatgaattgactaagactgtcgatggtaagaaagtcaggtatgctgcttgttgc

SEQ ID NO: 177987 - DNA, 356 bp, Zea Mays
caagatgagtgggccccagcccggaagcattagccgtccccgcttctcaggcagttcatctcagcaaggcaggcccggtcacccacagggatatcagaatcagaatcagcgtccgcatcagcagcagtttcagaggcagtacccacaacagcagcagtatcgtcagaacagccagcaaggagggaatcggtatcagaagcagaacaaccaggcacctcgccttcctgcccccgtaacaaatcagagcaaccaagcagccctagcacaaggaggaggcagaggatgtttccagtgtggagaacaaggccattgggcgatgcagtgcccaaagaagattgcgcagcagcagaccaacc

SEQ ID NO: 177988 - DNA, 453 bp, Zea Mays
attcgatagacacctcttggtataataccagtattcctatacatgcactagaaaaatgtagacaccctccttacatctaggcaactcctaagtacttcttgttgggcttcgaatcgcggttgcttctcctgagcggtataactgcatccgacttcgagttctccctgacaatgctgttagctgtagatggtctgacaatactaacacattcccctcctgccacaaagttcacaatgatctcggccttggggagattaccaagggggtgcctcctcgctccaacaccgccaccgcactctacaactccacctttggggacaacccttgcacacagcttcctccacttctatttcaaggggcttgtcgtcgtgctcatctggcggcggtggcctgaggaggggatgcagggtttggtggtggtggccgttgtcggtggaggggtggtcgtggggg

SEQ ID NO: 177989 - DNA, 1082 bp, Zea Mays
ataatattgctatataactcttgattttttctactcttgttttcttgccattgtattgtcatccttggacaatatctacctcgatatattgaaccctttgtctctctacttctatccttgataatgcctttgtattttgtatccttaaaaaaactttctcatatccttggttgtataatttatcctcgcttcacccgttagtggttatcttatttcactcttggtcattaacaataatgtttggaatcttgtctatctccttgttatttctgatctgattcctatattttataatctctttcttattcctaaccttgtcccgcctttcaaaaaaagctataagaaattgttttccctaggcaagattgccttttgattgaatgaataacatcgagttatgttgtgctgatatgtttgagttcatgttagttatctttgtgactatgtttgatttgcttctttgtaatgattgttgttgttgtattgtgtgacttttgtccacaatgacaacagttagctaggttaaaccttagatagttgggttctctctactctttatagtctgccctagctcaatattttcgtcccttccttgcttactatatccatacagatgtcagaccttggaatgtcaactacaagtgatgtcactaagtgcaaagaatacattgtgttggcaaatcctccagctaaatctcagatggaacagttcaagaaggcgcactcacagtttctgcaagcaacctctcaagtggtagctagactccaacaagttgatttagcagaaatgcacatgagcagactaccaataaccatatgacatcaaccacaacatcaccctcgatagttgacttagaaaagctgttacatgcataagctctgatgatatagaaagcatctcaactcacctcctcatactagcaagtgttggcaagtcgaaacgtcactagaaatgaaacaactaatgaacagacacaaaaggatgcacaccaacagacaaatgatcttggaacatgttgttgttgcgagtactatggaattccttgtcgctagatcagtacaaacgaaagtgaaactacaaa

SEQ ID NO: 177990 - DNA, 891 bp, Zea Mays
cgaggaggcacctgtgttctctctacacgccgttgccggggtggctgtcgccagcaccatccaactccgcgtacatgtggggtcggcggccttcaccgcgctcgtcgacaccggctccacacacagcttcatcggggagaccgcggcccagcgcgcggggatgcccgttcagacgcgccctcgcctaacaaccacagtggccaacggggagcgcatctcttgcccgggcgtccttcgtcaggcgtcggtcgtcatcgatgggctggaattccgcgtcgacctctacgtcatgcccttggcgggctatgatatcgtcctcggcaccaactggatggccccattgggggacatcgtctagaacatcacggcatgcaccatggccttcaagcatgtggggtgggacgtaagttggcgcggcactgcacctccgcaaactccccgccttcatgcggccactccagtgaccgagccccttctcgatgagctgctggacgccttcgaggacgtcttcgcggcaccgtccggtctgccgccgacccgggggcgcgcacaccacatcactctcaagcccggctcggcccccgtggcagttaggccatatcgctatcgagccgcgcacaaggatgagctggaacggcagtgcgcggctatgatagagcagggcatcatgcggcgcagcgactccaccttctcctccctggtactcctcgtcaagaagctggacggctcgtggcgtttctgcgttgactaccgcgcgctgaatgccatcacggtgaaggatgcttaccccattcctgtcgtcgatgagctcctggatgaagaacatattattcgcgaatgccccaagaagcgtctagaccaactaaagaagaagacggtgaagcaagaccc

SEQ ID NO: 177991 - DNA, 462 bp, Zea Mays
cccatataaagatccccaccttaataatagcttctatagtatgttgatgaaggtaaatttcgaaggttttcaggagttcgtccaataatttatccagagggaacagaagtcctgccttcatgaagcttctgtaaactaccacttcatcagcttcgggcagagggatattattttcccctccagccctcacaattgagatatcacaaaagtacttccccctcattgcatcaatctgcccttgctaaatagttgatttcccgaagacaacatggcttggtctctagggccgatcttcggcatcttcattcccactttttgcatctaaactttcattatcgctggagttctcagatatcctagctagcatctcgtttgcaatcttctcttcattggttttttccatagctttataaaacctgtgtcacggaacctcccaaggtattaggcccacctacagatgtc

SEQ ID NO: 177992 - DNA, 658 bp, Zea Mays
ggatatgacagattaagtttcaaggtaaatacaaacgctttagcccttgttcgatttgatgaggattggagagagtttacaggcattaaatccactacaagttaaaatccccctcgtcccctccaatccccttgtggaggggattaagtgaacaagcccttgtatgtggaagttcataacaatctgtctttgtgtgccaacttcacaagaagaggtacagagctcggttggaccaggactaaggacatcttagtttcaaatgcaaatttgtggagagaatgtggaagaccttgagatggaggcgtaacaattgatctaacattcatgcagtgtgtgcctgaggttattctaaagagtcttgcactatatacagatatgcagatcaatctagcgattgagccttggcactggtgattagaacgaaacagacttagagggccagagaaaaggagaacaagttttaaatgaatgcccagacattggaattcatgaatttaatcagagaaaagggaagatgaaggagtgcgagatcaacgaacagaaaaaagggaaaggggacgggtgcagcatccccttttgaaaggggatcgatggctgatttttctcaattgtggaaaattttaggaaaaggtctgtttgcttgggattataatctgcc

SEQ ID NO: 177993 - DNA, 280 bp, Zea Mays
gtggacataaacaccatctaggtatgccttaaatagaggggattataggaatcctggtatcacaaaaggtgattagctagcccaataacgtcttcatccactagttgtactctaatacccttgcgtgtgaatacaatgccctcaatatcatagaaacgtcattcgaggtttaaaaggtgatatattgttttgaattctttatattccaactttttagcaactgtatggtggaaaaaggtgccttacaaccttaacctatgtttggacagttcactcatgc

SEQ ID NO: 177994 - DNA, 435 bp, Zea Mays
tcggtgtgcgaatatacttgtgaatctgtgtgtttataaaaatgttgtagtatatgttgtgtctcggattgcggcgataataggcaagctgacgtgtatgttatttagcggctatatcgttgctctagttagctgaattgttagatgacttggttaagcacgtaatcacggtgaattgcttgttgtgatctaaatgtgtatggttacggtcgcggatgaaaagtagtagcgctcatgtgatgtctaatttaaaacgcaaattgttgggtgattatcgtgaagaatgcgttgttaattggttatagtaattttagtgcactaaatgatttggataaaatttgtaagcctacttgctagtcctcatgtaattaatttaactctaagaagtggtaaagtgctggaatgattcaagtctctagaatgctgcaattcttg

SEQ ID NO: 177995 - DNA, 865 bp, Zea Mays
cagtatgctatatgagccctcggatcggggattgacggtccgaggcccacgcgacctccaaacccttggattcgatctcaacagtccgagtataatacaaccaaaggggtatcttgagctctaatctcggccacccaaggagatctaacggcgcacgttcttttccccaattctaaaatttgtgcacggcggctatcgccccttatcacggcgaatctcgccggagaggccctaaaccattatgcaagtgccctagctcccaatcctcccgcttctatgtgttatggggacaacaacgaacttgaacgagcaatcgtaccagagaaatttgtcgcgcaaagcgctggtcgcggaagagttgaatctgaggcgagggggtgatcttcgtcgggaaattgatccctccacgggactcgctatgagccagcagcggtggtcacaggttccgaaggtgatggcgggcgatttcgactcgagtcccgtattcgcgcagcagtccgcgacattagtcgtcgttgagcgttcatctcctacccactcccttccccgacagtagtggcgaggttgtgtgctagggtttgcgcctaagtttcgtgatggctttatacgcgaagaggcgatggcaaccgacaaggtcggaggtcgttgagccagaggttggacccgattcccggctaattcacacagccgtttcaatggcccttgcgacggggaaggggagaacccgaccggtggggcccagtgcacagcgaaggaaaaggaggtggggagctaacatgtggggtccaccaggcggtgagtgagggcacaacgcgagagagggactgcctggtgggggcctgttgtcggcgcgcatgatttccaa

SEQ ID NO: 177996 - DNA, 419 bp, Zea Mays
acgctaaggccggcccggtggccgcatacgcagagacgtgggcgcgtggcgtgtccccaccaatcagtgccggccgctgtcagcaagaaatccgcctgcctgttggttaatacaaggaagcccaaacgaacgagggacgccaaatcgccgagatgaacgaggggattagataaagcggccggtctttagcggggccagcagacagcgccctcctctcctcgcttcgcttcgcgttgccgccgcgaagcgctgggagtagcgtgctgccacctctcactcatcgcgggctccgcctcctcgcgcgcgagcggggtgggagtggggggacggcgacaagtcggttagggttgcgcggccacgtaactgggaggtgaaaggaggcgaggcagcagccagcatggagggcttcgccgcggcgg

SEQ ID NO: 177997 - DNA, 480 bp, Zea Mays
aaaagtctaatgctaagtgttggggatcagatccccaggctcctagggcccacgagtcaaagggggatggatgaagagtccgccccagaagtactcacccccaaggcatcgagcctagtggtcgggcgaggcgaagttaaggggggtcatgcgaaccgagatttagtcactcgagtagattttgcacccggtccaaggtctgtccccgcataaatggttgaccttattaaatacgcctggtaccaagccatgacagaaggttggtcgtcactccactcatgacctgcggacccaaaccaagagcccacccatgaactgcgaagccatagactcgtgactcactcatggcctactgagcctaggtctgagtcccctggcgatctatagggcatgcaatacaacgagaatcacttaggctcaggctacgaaggttaggggtcgacgcgacgcagaaggagtaatgatgacgcatgtgtcttc

SEQ ID NO: 177998 - DNA, 295 bp, Zea Mays
cacccttcttgttcttgcccatggttggttggaagagaagagaaaagtgggaaaataagcaacaaatggctagaagatgtgtgaagacaccagtgaggcaggcagtctatttatagaggccagaagcaaccgctcatctcctaccacggtcaccgaacagtcgcaagtattcaataagcaattcaaatcgtctggaagcaagtcaggcagcagacgtcgttttgcgtaacacgacaccatttggactgaggtcaactgcttggacgatatgattacaccccacggtcacgtcaag

SEQ ID NO: 177999 - DNA, 525 bp, Zea Mays
attcgatcccacagttgtgattgaggaccggatgaaatagctgatgcccatgtctgctctccataaggtcgcaggtgaacgacacgatactcttgaggtttcctcggacagcgcctggagcaagatttcttcgttaccaggaaaaaatctgctggggaggtagagtggagggtcatcttactccgcaaaggccgcgacggaggtggaggcaagcaaacaaatgacacgacgttgaacatacatgatgatctccaccgtgcgctcgaactcgtcggcgtcggccgcgccccagcagcacgctcgcaccaacacggacaaacactgtcgctcgttctccgactccgaccactgcagctcgaggggcgcggggagaggtccgtctcacctgcaccagccgcgggctcgccatcttctcttacctgcacaagattcccactccccgtttcacacacaatggttcacctgcaataatgggacatgaagtccttcgtgaatcgcctgtggtccaaaccgccatgtcacccc

SEQ ID NO: 178000 - DNA, 654 bp, Zea Mays
gctctttgtactttgtcattgacttgtgcctgcttgtttcctactgagtcccgaggctgaggccgagggctcggtcacgtacccgagcccccctggcgaggggttgcccatactgtagtggttgacacatgcttagaatggaaaaaagcttcttaagggatgtgtcagctctactgtattcgatgacgttggggacacccttcatcgtagatatcgagggcacaaccgggctcagacgaggtggaggttcgcccgaggtcgtgatcgaacccattttgagattcggtgacgcgtgccacatttgaaggagtgaccttccatgagattcgtgggagagtaggtagataaggtcgagctcgggcaaggcagagtttttcccgagggtgagttctatgtcgggcgagatggactttgcgcccaagggctagtccacgcccttgtcgcattacatgtcccatcaggggctggtcagacgacgtgcgtgtacagtgaccacttgcgtaatcatggtgggtgaatctttgacaagaccacggtgttgtaattcctgtacgcccgcaggcctaaatgggtaggtacgcgcattgaatgcgactgtcccgcagcggccttcggtcaagccttgccacatgccttgtcttcctcgcccgagat

SEQ ID NO: 178001 - DNA, 463 bp, Zea Mays
gcgatggtccatatagcaattcttgctaccatttccaagtctaagtgaactcgtgtagtaatggcaatcaggacatgctgcttcacctgatgtgatagatccagatgcatatcctaggctagggaaatctgtaatagtccatattactgcagctcgtagcaggaaaaactcaccctttgaagcatcataggttctgactccattaacaaacatatctaataaatcatcaacaagtggctggtaatagacatccatgtcactaccaggactatttcggccaggaatcagcaaagaaaggatgaaatttgattgcttcatgcacattgaaggggggaaattatatggaatacaaataccaggccaaacactatagctaacattcatgctcctaaatggattaaagccatcagttgcaaatgctagacgaatatttcggctatctgctgcaaactctggatgtttt

SEQ ID NO: 178002 - DNA, 502 bp, Zea Mays
ctaacgctctcagatcaacaccgaagaatggtaacgccgcgccccgccacgacgagctagcaatcggcttcaatagtggtatgcacgctacgctaatgatgatacgccgagcaggtgcgagcgaggggaaacgcttaccgatgaccactcgaacaacgccttcgcgatttcacccaccgccgagcgcagtcgcagaagaatcccgacggcagcggtgaccggtccgagctccactctgggtacccggctcctgcggcgaccacccgaccgcctagagcaacgaacggaggtgaggcgacggcggcgaccccaactcccacggcgaatcccgagctcccctccctcctagccggtaagtttggcgcggcggcggcgctgaaacaggggagacggagccagcacagcgactctttataggcgtggccaggtcgggatgagggtgggtgcaacggacccagcaaacccggccgacgggcgaggaggtggttgaggtgtgctgtta

SEQ ID NO: 178003 - DNA, 272 bp, Zea Mays
gagatggtggaggcgcgctagggtttgaatggtggaagaaagaaggatggtgaaaaaacacaatgcaaccagcaacaaatgacgcgaaagcacacaaattcaacaatgcagattattgaaaaaagtacgaggctcaaaagggtgctgagataaggtctaacctgaattttgatgtggttttgtggactgtaggagaaaaaacactcgataaacacatcgatcaacctggaaatctgataccacttgatatagttgaggtgcccaatctttcg

SEQ ID NO: 178004 - DNA, 589 bp, Zea Mays
actccactactttcaccactggcgacatactgtcgactgttctttcgagtcagagggacctcctcttcttcctccccatcgtcttcaccagcagcacaggcaacacccccatttggatcaacaacagatggagcacacccattgggatcagcagcagatggagcacacccagtggggtcggcatcagtaaattcaggcactggcactccttcagcagcaggaaccaaagtaccaacgtcccgatccaaactagatactcgccggaggcgtctctttttctttttctgctcatcagcaggaggatcaagttgattgactcgacaaggacgtctcgggcgaacactgacaggtttatgaacatctgaggttgtaccagcctctgggagaggcgccaccaccaatgtcccagcaggagcagcatcagaagaatcctcagccagcaaatcaagcatagcacttatctctgcatcactaggatccaagggcacctcaaagtggacctgtcgttcactatcaggaacttccctgagcgaggcaaccaagacgctaacttcttcagcagagggtcgcactctaaggcccaaactgc

SEQ ID NO: 178005 - DNA, 635 bp, Zea Mays
gcctcacatgttgataggtatatggcatctacgtattcgcggatctcatttggtggggctatttgagaacctggagatgcattatttgtgttcgcggacaactcaaaatatatcctggctcgatcacttcccttggtaacatatttaaacaagtacttgatcatgtgtgttttgttgcaccactcggcattaatatgtgcattgtattttttgagcaattgcatattgtatggcactacgctcctgttgtccaatttgactccaccttttactacgaaccgaccattgtttcgtcttctataaagggtatagccaaaagcatcgatgatagtctcgtcttggtacgtcttagggaattcttagagcatctatcgtttttcatgcatggacaccgcctgttgtaatcaccgcacggaccatgtatcatgaattcatcaaccagagcatagcccaagggatcaatggcaacgtcaggtatctcagcacatatgaaagtgtcgatggcacaggcatcggtctccgaacgaccaccaagcaaccatagaaggcggtgtatgtgcagtaggccccttttttggaattctacggtgtaaatcactgcatagctcagactatagatgagagcatgcaaataa

SEQ ID NO: 178006 - DNA, 561 bp, Zea Mays
atgctctggccacggtgtcaatgcgggtgatcaagtggattaaggtgttccggatcaccgaaggctgggctggctaaattgaagctagggaaaggttcctgggttcaccagagatgacgcacacgctaagctttgggctaggcccgagcaaaaaggtggggcgacggagagggtgtcatggcggtttttgacagcgcacgggtgcgttccggtgatgggcttcggccaaactccaaattgccgcatccaggagcaataagagatcaaagactaactaaaacagggagtaatttggtaattactgcccagaggagcgctggccacggatgtttcttctcggcggagctaagaacagaagagagagggaattggggctacgtgggttttccggtgagctcgagtcaagtgcttagtcgctgatgtgcgaaatgtggtgacgaaacagcgcccgcactcaatttataggccgtcggccgtagtcggatgaggatcggggatctctggatcgcgctggcaagcataccgcgcggcggattccggtgacagcgcggtgatcaccgt

SEQ ID NO: 178007 - DNA, 806 bp, Zea Mays
tgctgaggaagtgccagtgccggtttttgctgaagctgaacccaatgggtgtgacccgactgatgctgaacccaatgggtgtgaccttgatgatgttgatcccaatgggtgtaatccagccaaagttgaacccaatgggtgtaccgtccgcattattgatgaagatgaggaagaggaggaggaaattcccttgattcggaagaacagccggcgctacatagccagcggggagagtagtggtgttccttctccagctttgtctggtctcgttggtctgcaagagttgtctctggcaaattttgatcagactctcgaagacatggtcccagaagatctattgtcagagccgacagatggtggaatgatggaagtttgcgctgatgtgcctgatgccgggttagagttatcccgagcagcgtctcgtgcctcgttgaccttggagcgcggtcttaagagtcgagaggctgatctggattgctctgttcccatggaagttgttgagggtccttcatccttagagatgacagctacagagagcttggtcctcaaggatggtgctagcgtttgcccagcccccgagggtgttcccggagatgatccggctcggatgggtagcgcgagctatgacccagcccccgagggtgtccgagtgggttctccctctcatacttccatggctgttcatgtagggtcttctcctccgcattctggttgcatggtagcagcacgggcttcggatcaggaagtagccttagaggtcggcgctcctgatgacagaattttgatttccgctgatgacactgagt

SEQ ID NO: 178008 - DNA, 680 bp, Zea Mays
tgctaggctagctagctacacaaccgcacaatccatgcatccacccggccggccggtacccagcccagatgtacttgcgatggcagctttgttgtcaccggcacgcactggcaatagtagaacgagtcagcgagggatagattgaagaattaatggcccacacctccactggacaactgctatatactaggataacagagtgctgttcatcaatggatccaaagaaacgttctaactcgtaacagtattcacatttccgtctctagaccaactccagcaacgccctatactcggctacacgttcgtattctgcacgcccgaagccactattccaccctccaacagactctgtaaaccacagtgcaaaatgggtgtgcattttttcattccgtatttctacggtgtctctctcctctctgcacaagttaaaaccggagcatttaaaaagcgggacccaactgtcattgagatgatggggatgcggatatggagtctgttggacgaccgtgcaatatattgagcatgttgtcacgtaaaataaggatgcggagagagattctgctggagttaattggtcaggtacgtactcccctccaaattctttttggccctcttttttttcgtccaccacgttcaaattaatgataatgaatatagatctgtatacaaactagttaatt

SEQ ID NO: 178009 - DNA, 364 bp, Zea Mays
tttttaaattaacccgcactccagcccacacgcattgtacccattacccaacaaacccccacgagacgcgcaagggctcgacacaacacccaccttggctgcgtcgacctggagcatcgacgaggagaaggccagtcgcctctcgttcttccccaagagtaggcgaggtaggttcacgtcgtgctcgctgtaacatcccaattttgatcccaaggttaggaaccctaaaactcctaaaccccctatttatctcctaagaccccatctcatgaaacatttcattcatcatatgcatacaccatgattttctagtagcacttcacatagaatatttctttttgacacccaagaaatctagataaat

SEQ ID NO: 178010 - DNA, 719 bp, Zea Mays
tctaaactaaattcaaaactagatctaaattcaaacataaaaaataggaaaatagaaacaaaaaagggaaaagaatttatacctgcgctcggccaaatccttacatgctggcccaaccaaaccgcgcggcccatgggaggaaataccggcactgacacatggggccaatactccagcctctcaccccgccactcccatccgtgcgagcgcatgggcgcgatgcccctggcaagtgggcctgcatcatagcctctatgccaaaacatgtgtctgcatctttaccctcgctgatacttgggaccgaggtcagcactgtcccttttccgggtttgcctggattctgttaccaaatatctcaccgtaaccgtcatcaggatatcatcagaacctcatcaccgtctaagtcgtagctggctataaagtcacgaccattctctcccttagtcccctggtagccatagattggtgaggatagaagctccaccatggtagccaatcgagcggagcagattaaggtagaacaagccgtcattgtcaaccacgtcgacgaccatcattcagggaccaactaggggtagggggattgaccatggagtgtagagcatgcccagggggtggcatggtgtaggagtcctcgggcgtgcaggaatctctcacgcgagcgtgtggcaccgccgtgggctgcgctatgccgttgtccagcgacttcgcgtcatgat

SEQ ID NO: 178011 - DNA, 861 bp, Zea Mays
gagaaaagatgaaggcatgggagagccagtggtatgagtacaacaaagaatggagttgtgtccaagcttacacacggtaaagaagaggatataaccaagggtgaggtaagtaaaacaccgctctcaaattgggatagaagattggagatcttagagaacggacatagtgtaatcaccgaggtaagatcaagagatgagaaaggtaaaggcaataacaaacaaaagcataacaaaggatgggttaaaaactcgcaagcgacaaggaagaggatacgaccaagggaaaagtaggtaaaatacaatgctcagattgagatggaaaagagggtattttaaaggccggtataagataaacatcaaggtaagatatagaggtgataaggataaaggtactaatgatgaaaaacataatccatggacagagttaaggcaagactcacaaagtgacgaagtggagaaaacaatcaaggatagataagtgaggttccgacagaagagttgaagtaagaattcattactgaaggaagttacaaggacttaacgagatcaccaaggatgtgcaaaataaaatgaccgctcctagatcattaagaaacaagggtggtcggggacatgttaacttaaatgtcttaaatagactctgggatataaaggtaagcatatataaaaaataagaatacaccagattccaatggtacgagcgtaccaaggccaagagaatagaaaaagccaaaagatagcggcttcacaacggaatagggaggggtctccgaagacaaggagttcatggacatataaactgaaatgtctaagtaggcagtagaaattcagatgtaagtatttgaaacaagagtattaaag

SEQ ID NO: 178012 - DNA, 407 bp, Zea Mays
gtccggggttccaaaggtggccttgccgttgatcgctgatctggaccgtttggggatcgctttgtgtcatgtcagcaccgctagcaaggagactcagatgcttattcaatcctctctcatggagagagtgcgtgcggctcagcagcaggatcgtctactgcaggaagctcgaaagagggcgggtgatggtaaaccgcgggagttcaccattgatgagaatgatttggttcgtttcaggggccgcctctgtgtgcctcagaaatcagaggtgaagatggatatcttgagagaagctcataaaacgccttacaccgtccatcctggcgaaaccaaaatgtaccgagatttgaagcaaagcttctggtggaagtggatgaaggttggcgtttctaagtatgtggccgcct

SEQ ID NO: 178013 - DNA, 726 bp, Zea Mays
gtgtgaccgtgtgagtagatgtgtgcatgtttgagctgaatatatagcaagcagctgcaggggcaagcaagcatggtagcgtacgtcctcgggaagcagcatgcatatgcatgatctatatacgaataaaataaatagcaacctgatctggtcaagacgaaactagtagtagcattagcagttacctttaatcacaattgacttcggaactcggctcaacgtggcttttgtaaccaccaccaccatttgacggcgccaccaatcactgatcttgtcgtcccaaaaggaccgatcgtatccttgcgtatcactgtattatcaactagtcaggtgtatatgtgtgtgttttatatatcacacagatagattttatttaaacagaatagttgttcaaacacgtttcaaacttttataaacttttataataatctgtgctctatttgaactagccgttgtgttcaatctcaacgcgtctatcatgtaacctatatacatgcatacattttatatgtcgagtgagaaaccataattctaacctccgcgccatctctcgtgaggtggctcagacggcaccaaaccttagccaccgtcgcccctttctcctcccatctctgccctgccaccaccagagtgagcagccgaaagtctcgaacggcttacaaggatggtggcggcatggtcctctttgtgtgacccgaaatagtttagctcagcccaaacatagcc

SEQ ID NO: 178014 - DNA, 1030 bp, Zea Mays
cggtctgagctccatcgcttggccgctgcaggtagcttcatctcttggccgctgtaggctgctgcaggtagctccgtcggtctacccattggtgcgctgctgggagaaggtattggattcatctaactacatttatacaatttccaaacctgcatctagtatttggcgtttacattattgagttattgactcggcttctaaaatctgaaccaaatcctatagaatcaaattttactttagttgaacaaatggggtcaaacaagaatgctggaataaaatagataactattttttgtccaataaaattagcaaagcacccactataacatcaacaaccatttcactttagtttgttactacattgctactgttaatggtacacagttcaactgaatggtattcttttgttgcattcttttaagggcgattgagtaaacgttaatgtcgactccgggcactagtggaactgctggtgtatctcaagttgtagctgctactgcatctagaacagttgaagcatctcaagtggaaccaacagcagtcgcagtggcttctcgtggtttaacccgtgcacgtgctgctgctgcactagcatctgcacccccatccgattctggtgctgtaggtacggaagatacaatagaaattgaggatgatgttactattggtagtaagagaaagccaaaattaaaatcatgggtttgggaagagtttgacagacttgaaataaatgggatttggaaggcaaagtgcaaatggtgtaagaaatatttaggaggggaaacaagaaatggtacaagtcatttaagtggtcaccttgagatttgcccggatagatctgttagaaaagggttaaaacaatcatctcttaaactgattgcaaatccacatgatgggatagtaactttagagaaatacacatttgatcaagatgttgctagaaaagagcttgcattaatgattattgtccatgagtatcctttggctatggtagaccatgttggatttcgcaagttttgtgctacactgc

SEQ ID NO: 178015 - DNA, 354 bp, Zea Mays
gcaaatatttgttttgtactaagtttatatttttcattcattttttcagatttactatcttgatcacttacatcaccctgcatctcctgataacaaatatggtactcctcgcattaagttttttgataatgagaccataagagatttggcacggggtgacagacgtccaccccgtaaaactggtgaaccatttggctatgcagaggttagacatatccattttttgtcctgttttgcagaagtttcaattttaattactgctaacagttgtaactgggctttttacagtttcgtagccgttcagaaacgtgttacgtcattgcaccagaacggcccgtatctgccgttttcaac

SEQ ID NO: 178016 - DNA, 309 bp, Zea Mays
aaagagcctggatggtttgaaaagaagcgggttagctcgaatttttacttctttagttcttaatccttcaaattttatattgcatgcatgctgaaaataacggctcctctccgaaataaagggtgctcctagggcatccttttaaaaatctaaagaccggcccatcgggcctacttacttagccacctatttccccctctattcctaaggcctttcgtcctaggtctagcgttctagtcttgacgagtcatactagtttctaagcaagttttagattttcaaaaattggtattcatggtttattgtgct

SEQ ID NO: 178017 - DNA, 402 bp, Zea Mays
gtcggatacctctgctacccagcggcacgagctcccgcgaaggtcccgaggcgagcacgtcggcgtgggcatggctgagtcacgcaagagcagaggctgctggaggtgagggctgggcgaccgccgtgcaggggctgtcgcacgagcagggttagtcgacgacgaagcgtgggtcatggtgctgcgcgggcatcgggtctgagagcagagaagggggcacgcgctagagatggcgttcagcacgccgagctgcaggaggaggaagccgcgtagcatcggcttttatgcacaggaggaggggaagtccgagtgaatgttgttggttcacaacgagaaatttgagtggagtttggttgaggcgcccgtggaagtcgcacatttggttggagatcgtcacggggg

SEQ ID NO: 178018 - DNA, 2023 bp, Zea Mays
aaggagtcctcactctcccaggtagcttcctcttctccttctctgctccactgaactttacagagcttcacttctgaggtgcgggtctttcggacagctgaatcaagaatcttgactggcttctctcggtactgaagatctttctgaatctgcactgcctcttcttcgatgtgactttctggtgcttgtaggcatttgcggagctgggatacgtgaaacacattgtggatgtcagacatggattctggtagttcaaggcggtatgctgcgggtcctactctgccaatgatgggatagggaccgacgaatcgcggtgctagttttcctattacttggaacctcctgacaccacgcatcggggagaccttgaggtagacgaaatctccttcttcaaatctgagctccctccgcctattgtccgcataactcttctgccgattctgagcttcaagtagtctcctgcggattagggcaactttctcttctgcctctttgacaaaggcagatccttctaatgctttttcccctacgttggaccacatgagaggtgtctggcattttcgtccatacaacgcttcgaatggtgacatcttgatgctggcctgatagctgttgttgtatgagaattctgcgtagggtagactggattcccaacttctatcaaatgctagcacacacgctcttaatagatcttcgaggactttgttgaccctttctgtttgcccatctgtctgagggtgataagcggtgctaaaatctagcttggtgcccatagctttctgaaggcttgtccagaatttggaggtgaactgggttcccctatctgacactatctttcttgggatgccatggagtttgactatctccttgagataaattcgggcgagggtggctcctccaaaagtagttttcactgggatgaaatgggctaccttggtgaggcgatctattattacccagatagagtcatttcctttttgcgtccggggtagtccgcttacgaagtccatgcatatttcttcccacttccattcagggacggggaggggttgtaataggcctgcaggtttttggtgctcgaccttcgtccgttggtaggtgtcacaccgggtcacatactgagctatctctttcttcatccctttccaccagtatctggttttgaggtcaaggtacatcttggtagttcctgggtggatggagtaggctgagttgtgagtttcctcaagcaggacctctcgtgcttccccttttggtacacacagatgatttttgaaccaaagggctccttgttcatctgccctgaggtccgggagttgttccttgcgggctttttccacaagttttgctgtctctgggtctaggcattgagctttgtatatgaggtcttctagcattggtttgacttcgagactgccgctgtttcccagacatgtattcagttgagctgattctttcttccaatcttccaaaaagttggttccctttattccgaatggttttcgactgagggcgtctgctaccacgttggccttcccggggtgataatgaatctccaggtcataatccttgatcagctccaaccatcttcgccgacggaggttgagatctagttgagtgaagatatacctcagactcttgtgatcggtgaaaatgtgacacttgttcccgattaggtaatgcctccatatctttaaagcgtgcactatggctgccaattccaaattgtgggtggggtaattctgctcgtgcggcttgagtaggcgcgatgcataagcaacgactttctcgttttgcatcagcacacaccctaagccttgcctcgaggcatcacagaagacgacaaaatcttgatgaatatctggcagtgacaaaacgggtgcggttgtgagtttctcctttatgatctggaaacttccttcacattttggggtccacacaaatttatggtctttcttgagaagctcggtcataggtcttgctatgctggagaatcctttgatgaagcggcggtaatatcctg

SEQ ID NO: 178019 - DNA, 714 bp, Zea Mays
ccctttttcaaccaaatgaacctgagagcttccttgcaaactaggcatgggaacttaccgtgaacacaccaggcgcagaatagcccatacgccggtaagtcatgcatggagtactggtaccaaacatgcattctgaactttgtcttcgtagctcgatcatacgtccataccccttcctcccaggcacgtaccaattcatcgatcaaaggctccatgtacatgcccattttattccctgggtgttcgggaattatcaacgacacgaatatattctgcctttgaaagcacacaccagggggagattgattgggataacaaacacggaccaacatgtgtacggggcaacgctcattccatagggattggacccatctgtggccaacgcaacacgtacattacgagcctcttcgtctttctcacggtgaatggcatcaaagtgtttccatgcttcaccattagatgcgtgcaccatcttgtcaggattgtatcgttttccatttttgtgccatgtcatctgtttcgtggattcctctgtcatgtacagacgctggatcctaggtatgaacgaaaggtgtcgtaggattgtcaaggggatgttgagctgcctcttctgtccatcactagagtctacctccatgaacctagacgatttacacttgggacagtactttgtctccgcgtattctttcctaaatagcacacagccctttggac

SEQ ID NO: 178020 - DNA, 669 bp, Zea Mays
ttactagctcgaagttctttgatttctgcgatcaaaaatgcatccagatcaaatatgcatcagtggcacacccaagagccaacaggcaggtagaaagagccaacggaatgatactggaagcacttagaaagaaagtcttcgacaagaatgaaaagttcgcaggaaagtggattagagagttgtcatatgttgtctggagcctgagaactcaacctagccgagctctgcatggaaacactcctttctttatggtctatggttcggaggcagtgctacccgctgatctcaagtttggggcaccgagattaatctttgaaaacataacagaagctaaggctactagactggaggatgttgatatactagaagaagaatgattgaatacagtaattcagtcagcccggtatcagcaaactctgagacgctatcatgataaggccatacgacatcgatccttcgcagtgggagatctcgtcctgcgccgaattctaacagggaaggacggcacaaattgtcgccactatgggaagggccattcatagtagcagaagtcactcggcctggatcatatcgtcttactcgagtggatggcacggaaattgggaactcatggaatatagaacatctcaggaaattttaccccaagctagatttcagaagctattggga

SEQ ID NO: 178021 - DNA, 996 bp, Zea Mays
cgtgtgttgcaacggtatataaattgttcaacaaaatgttagtgcacaacgattacatgaaagcgaacaacacaaattactatcgacctcactatcttacaaattccatgtgtggctctcactgcgtgtctggtggcggcaccccacggcaccggcacaaagaagttcagatttgcggatgtgggtcccgtgcacgactgcctggaggcgagcgaagggagggcgacacacatcccagtttctacttgggtctgataaggacatgcttagtagctccaaaaaagttgtcgttgcataagaagtattagaaaattaaaatagttaatcgaagatgttgtggtttatgtgatttcagtgtcaaagatggcgaacaatcttttatattcgcaaaatgaagaagggccacatccttcagccacaaattgatagtaaataagttgtctgccatgaggcttgagcgagtaatagtaaaacttatttgttcgaattgaacagatgcaacataccagtgattggttcatagtaaccttgttaattgtcactaatgtctttctttttatctaatccataattctttgaattttaatttctagtactttgaagccgctaggtctgtactctcatatgcaactaaacattcacatatggttttagctttcttgatctttacagttaaaacaaattaaaataaggcaaaaagacatcaccttctataggctgccaatcgggtgagaaaaagagagtaccagctcaatgtggtgggttgtaaatctaaattcaaggtgagcaagaatcaccatgtagaagcagttgatgtcaactacaacccgctggctctaggactaatgatctcttatttttacgagtcatagccgaagtgtcgcaagaaagtagatccgtaatttcagtggctgatagtttatttattgttagacccaagaaacaaggtttagagcaagagcgttgtagagccgtctaaccaatttccaaaaccaa

SEQ ID NO: 178022 - DNA, 838 bp, Zea Mays
ggctttcctcggcgcgagcaatgtcgtgggccttgtcggggagttcctgctgcagattctgtagcttcacctcagccacagcctgcttgtcccgctgtttctccagcaccgtattataagctttcaacttatcatggagcgctgtgatggcctcctccctttggtttaagcgtacctccttcctggccaaactttttgccttttgggtcacctcttcctctcggtcagacacctttcggatgtcctccatgaagtcttcacgctcctgctcaaactcggcccgctctgaggcgaattggcaggacaccgtcttggtgcgctcctccagttgggtgcaccagtcgccaaggtgctggtgctcggtcccgagcgcctcccactctcgccggatagccacctcggtttttcggagagcctggtgagcgcgagacagcacctgagggaggagagtcaacattgcttcaggttcgacgccagatcggagcggtcacctgaggataacctccggagcctccggacttggcggtgggacaaagccggacgcgcctcccacacctgccaccgacggtgcaaccaacagtatcgctgcctccgagtctacaacagccgttggcaacgttgccacccccggaccccagctggaacttggggacccaaaggcgtcgcctcggcggtaacaggcggatcctgggggtccgacggcaccacctcagcgccagcatcaccctgcacggtggaggcaaacacagcaggagcctcttcggccactgccaatgccaggcttggcactgacgctgatgaagctgcggaagccgctgacggatcgccggcgacgtcc

SEQ ID NO: 178023 - DNA, 610 bp, Zea Mays
gttgtagggcatgatgaaaacggccaacaagagtatgaagttgaactgttgtcgtaaggagtgaaaccatcagtggacaagcctagacgaacacttctagcgtctcttgcaaattctgggtcaaaacgatccagagccttccaagcatcgccatctgatggatgcatcataatgtctggatcttggctcttacggtctccttccttatgccacaacattagcttcgcattttctggggttaaaaacagacatttaagccttggggtgatgggcatatattgaagctgtttaactgccacttttgtagcaaaagtagctccatcctcttttagtacctccgcatatcttgatttaccgcatatctgacaatgggtggccgcttcatattccttccagaacaacatgcaattatcttcgcacacatcaatcttcttatacttcatcccaagaccggacacgatcttcttagactggtataagtcttttggcatcttatggttctatgggatgagatcaataatcagattgattatatcgttatagcaattattcgagaagttatactttgccttcattgccataagatgtgtaaccacctgcaacacggtca

SEQ ID NO: 178024 - DNA, 678 bp, Zea Mays
gcgcacatatgagacacacccagctttatcctttaaatccaggtgtgacaggtgccatgggaccttgctaatgaacagaatcaagcaaaagtccgcgggcgagcgagaattttaggaaaatgtttgcggcggaaaaaaacagagttaggttttttgttcaccaggaaactgctagcgaggatatatatgcgtgcactaagtcgggtgcatcaagacagacgatgtaactcggaccaattctcagccaagcagagtaagtcaggtggatttgtgagttagatctatcaatttaattcatcagtcggatttatcagtaatgcttattagttggaattacgagtcgaattcatttagttggatttattagacgaaacacaagttgaacagaatgagaaactcaagattaaacagcacaaccatgttccattcatcggaagaagatcattacaaaggaaaagggttgactcattatgaaccgaccttagcatagcacgccctccactaccattttcatttccattcttactactactactactactacctactactacactacagtacactaatacttacgctggtggcgccctgccaccgctgttgccgttgccaccctcatcgtcgtcgtcatagctgctgtctccgccgccgcctttgtcaccgtcgcctttctcgccg

SEQ ID NO: 178025 - DNA, 468 bp, Zea Mays
aaatgctggtcgttgtagacctgtgtaataagattaagaaaatagattgttggcagccagaattgcggtctttgtgccaacatagatcgaatgaccttggtgcccctcagcctcatttgtaccatactgagtaaatccctcatttgtaaatggtagtatttattaagcagggctaaggatgtaagaaaagggtaaaatattcgaagaaattctaggatgacctacactgtaagaaaagttgtgaaggcagaaatgacctacatttagggttggatggacttaccgcttgcaggtacgcaacaggaatgtgtaagttgtaacttcagttgctaaatctatatgcattgtaatgtatcatctatgagacaaagatgatgggggactgcaagtttatgtaacatagtggctacagaggacctgatattatttttatgttaaaccgctttcctcctctcttttgtgttcttg

SEQ ID NO: 178026 - DNA, 901 bp, Zea Mays
cctctgaagtactttcctcaaatgctcctcatactcttgctcattctgcgaatatataagaatatcatcaatgaacaccactacgaacttgtcgaggtagtccatgaacacactgttcatcaagtacatgaagtaagctggcgcattcgtcaaactgaatgacatgaccgtgaactcatatagtctgtacttagtgatgaatgctgtcttcggtatatctgagggtcaaattctgagctgatggtagcctgacctcagatctatcttcgagaacacactggctcctctcaactgatcgattaattcttcaattctgggcagggggtacttgttcttgatagtaacctcatccaaaactcgataatcgatgcacatcctcttcgtgccatccttcttctccacaaataacactggggttgcccaaggcaaggtactcggtctgatgtagcctttctctaacaactcatcaatctgcttcttgagttccaccaactctggtccggacactcgataggctctcttggaaataggggcggtgcctagaataagctctatggcaaattcaaccttcctttcaggtggcatacctggtaactcctcaggaaacacatctgggaaatctgatactaaactgatagcctctgatggtttaatctcctcaatatgagtggtgacttggtgacaactccctttccttgatccagacaagaccaattccactaacacttcttctcctgatagggacactaccttcactgttctctcgttgcaactaagactggcttgatacttggttagccaattcatccctaggatgacatctatagttgtatcctggttacccataactatcaaatcggcggggaactctatcccccttatttgaacctttgcactaggt

SEQ ID NO: 178027 - DNA, 572 bp, Zea Mays
atgtgataggttttgtatacccagactattgctatccctcgtgaaagcagggaaagaaaagaaaagttgttgcttcgaccatctctgctacgccgaagggtaagaagattaaagttttgacacaccggctcaggtacattgaaacggctagggtgccgaagcttgctaaggggccttcttctgctgatgagccagagttccccgctcctgctgaagccacagcgggattagccgaagaactaattctgaagacagcagcggagcagacagaggccgaaatagctgaagtgtcgaaatgtcctcccgaagctaaggcaaaaacagccgaagagccaaaattgaggaaatcggcagaggtatcaaaaattcctgtagtgactccaaagaggaggagaatggccagcgtactagacgctgtcttggagtcaacaagggtaccaactcctgcctctacagaaatgcccagcacgagtgagaaaaatataaaagagaccgccgaagctgttacaactcgtgttgaggctgaagttgggccttcagttcccgcagaaacagggcctattgaaactgtt

SEQ ID NO: 178028 - DNA, 382 bp, Zea Mays
agatttcagaaaaaccccaaaaaggtcaccaaagagaagagcataaaagaaaaatcaggatttgctcaagttcaaaaccgaccctctttcaaagatcaaacatgttcactttgatcccaacatcaaaaccttatggcccaattgacaaaatggcgcccaaagacccctagaacaccctggtaaagtttgaacccaaccctaagccatttgacatgacttggcatggcttttgtctcggtgtggacagctcggacagagccgacttctcacccccatatctctctactccgaccgtatctttgcttggaactcacataaaaaaggtaggatttggtgcagggaagagaccatacacgggggttttgccaagatctgcatgcta

SEQ ID NO: 178029 - DNA, 352 bp, Zea Mays
ttgttatggtccctctgaaccccgtgggggcgatgatcctgatctgaatgcctctactatgaatgcaatttttatgtgtaattttgaatagtgcaaatatttgtttttaagaaaggtaggaacattgccactcacaattaaattaagtcactttttagaaaccagagaaagcgggtacttgtagaagaggaatctgcatgattatggagtccatgtattttgtgtgacccataacggaaggtgatgtgggtagattactaaatcaccttcagtgttgcagatgtttttcatttgcacacttttctactgcaagtttaaatggcagacgacattcagtctctgcattctctca

SEQ ID NO: 178030 - DNA, 719 bp, Zea Mays
ttactggactgcgcctactattagccgaaaacacagggacttaagcgaaaagatactcagactcagcgaaacctggactggaccacgggttattttctatctatcacatggattcatatgcaaaatgtctggccacgaaggggtactgtccattctgagtcgtcagatcaccgatccacgacccacaacagaacgcgaaccgatattctatttccgcccttggatcagaatccaaccgtccacgatcgatacacggattgcaacgcggggccggatccacccgctaatttctaatcggacggtcacgacccgatgccacgaaacggtattctgtcgccgatcctagccgttggctacgcattcaacgacccccggccgtcttctccaatcgaccgaacaaacaacggcatacacacccatacggcggcgccatcgccggcaccccgcacggtcggccccccctgccccaaccagcgcatgacatcacggaaaatagagaggaaggtaaggaggatctgatgggggtagacttacgggtgatcgagcagcggtgaactctgcccacgcggcacggcggcaaggggaaggaatctcgccaccgacaagaaattggcgcccaaggaatcgatgctcccgcccaaagagacaaccgacgtgcacgtggaactctggcgaatcacacaggtaccctaggatggtcaaatcctcccagaaatccc

SEQ ID NO: 178031 - DNA, 651 bp, Zea Mays
gtcaaggctagtgaagccaatcttgccgcgcagtccgaagctcaaagagccgaaattgaaaatttaaagaaaaagcttgccgagaagaatgaagatttcgaagtggctaaggcgaagcaggaaataagcgagtggactagcgcaaggttgcaaaaaaatgtagatgagcttcgggaatcaaaggaaagatattacggttttgcaaaggtgggtgcttactcgtccgagcaaaaatttattagaggcgatcccgaaggaatcatcgaatggatcggtgaagaagccaaagcttttgaagagatccttagtgatcgtggtgatttctgcgcctttgccggtgccagaggggttgcaacaattttggaaaaatctggctgcgaacacattaaagctgcaacccagacgaaggctgtctttaccgtggagaacacgaaggatccttcggctgaagcgactctgatgggcggaaaattttattccaacatttggatgtaaggcggccaagaactagccaacgaggcaataaagaagaatgagaaagaaactcatgaggctcgagaagaagccaagcgaaccgaagaggctgctgagcgcgcaaggcgcattggcattttaactgtttcaaagcttcagtattttttctggttttag

SEQ ID NO: 178032 - DNA, 425 bp, Zea Mays
ggggtggacggcgggttgaataggtaaaacccccgggtctcttttgaaagaagtacacgacgaaggggtattggtgatggctcgccgtcggatctgagatggaaagctcagattaaaacaacgaacaggcaagcgatttgatcccttggatcacaaatctacggccatgatttaatgtacgaaggggtatgcgcccacttaatcttatccgtgcactgcaatatcaacggtctgcgttgaaacctggtcacaatccaatccacatcgcccctgctagatcctactgtccttatgcatcttcttcctcagtccgagctgggcgatgccttgccccaaccgcggcggcggcttgaccgagccctggaccaccgccgctccgatgaccaccgttgcacggaacccaaatgttgtgatggcccgagcac

SEQ ID NO: 178033 - DNA, 393 bp, Zea Mays
actcaccgagatttgaagaggtgacccaggttcccacggcgcacgacggaaactaaagtccggcgacgaattccggacaccaccgcggtcacctcctccccggacggtcacgaaatcttcaccagacaccccgcaaagctcccagacacgactcgtgtgcccagtctttaggcgaagatgacaatggcgctggcggacgatttttggccgcagtccaagcctaagcctcctatttctcgccgcggttgctagattaaacgggagcaatggacgcaggggttcatggggtcaggacttataggctaacgacacgaacagtcgagaaacctgggcgtggggcgagttcaccggagattatggaggacgcggcgcgagttctattgacgtgggcgc

SEQ ID NO: 178034 - DNA, 623 bp, Zea Mays
tagcttttatgaatactgtaatgcagatttctttgcaccactgatttggaatatggtttctacttgacttttgggcgtgcatgtgctgtaggagcgcttccgcagaagcagtagtgcaattgaacagggagatgttgcgtactggaaaaaagaacatgatattgcgttgagattctacaatgaagtaaattattgcgttctccaaatgatattttaattgcatttatagatgccaatataactctccagcctctgtattattggatgattgcaggctgctcaggttggtcacgaggtcgcaaccttgtatgcaaagaagagtctttgctatctgcatctgcgtgatccagcaaaatttatcgatgaagcaattaactacataaatatggtgcagccagatttatcgacacttaaccctgagtctgatgctaagaaattggtgctggtgagttgttggtgctagcaattaacgacgccacaatgtgtcatatgcactattgttttgttgacggttcctgttttaggaatttggtagaacctggaaagcaccggggtctagttcgaggcaggattctggaagtagcccgactaacaaaactggcgaaacatccagcaggtttgaa

SEQ ID NO: 178035 - DNA, 402 bp, Zea Mays
ctccgttcatggccaggctcgcctccgcaacacgtgcagcagtgtcatactgtcgtgtcatggagtgcgatgtgaatcaccttggtcgtatgctactgttgggttgccaacctcgacgtcaccccgttcgtttcgactctacctcgacgtgctggtaatcgactaccgcaagtgagacccggtgtatcgccttccaggtgctcgacgaaaagcctggactagagtttgttgccacatgaccgtaaaattggaactgatttcataatggtaagcgatttcgctactccatatagttggctaaatgtttctaacgtctagctgataagtgttagtaatgtttatatatcatgaatttttgtgtaaataattgtgtcgatgccttgtgaagcagttaatattttc

SEQ ID NO: 178036 - DNA, 463 bp, Zea Mays
cacacttagctaataaatccccaaagtaacatgcttcgtaattacctatcttgtttataatcctttctttcttaccatatgtttataactcagatggtcaatagcaggaagggtggtggaattgatctaccccccaatcaacacagtcggaggatattcagacaaccccaacaacaacaagctgagatggatcctccaaatcctccaccagccggaactgatcccgcagttgcagcccagatacggataatgcaacaaatggcagatactatggcggacatgcatgcacagatgcggcaggaatgccaagagatgcgctaggagagagaggagatgcgtcaggagagaaggggacaacagcagcaagtcccatcgccaccaccgccaccaccacttccaccccaggacaagcaccaggaatttatgagccacaagccacctaccttcgccagttcgcctgatc

SEQ ID NO: 178037 - DNA, 600 bp, Zea Mays
ggccattctgcactactcgtacatgatattgaagatgtcagggcctcaaggaatcatcacaatgtgcgctgacttccaaggcgctgcggagtgcttttagggagccatccaagcggccctcaccgccgggcccctgacagctccccccatgcaggcagacaccaagccagaggaagacctcacaatacccactaacgaagctcaagccgtgacctctatatggccgattgaggagactaagaggatcaacctaggatttgctgacgagcgcaagactgccatgatcagttccacccttgatgataaataggaaagcgcactcatccggttcatgcaagataaccgagacgtatacgcatggcaacccgcggatatgccaggagtcccaagagagctggccgagcacaaattgaaggtctatactcaatcaagaccgattcgatagaagctgcgtcatttcacgcctgataaaagagaagctattcgtgccgagttagcccgcttagtgactgcagggttcattagggaggtactacatcccgagtggctagcaaatcttgttcttgtactaaaaaagaataaagtggattggcgcatgtg

SEQ ID NO: 178038 - DNA, 283 bp, Zea Mays
accaggttccgatgatgggaagataacatgaggagaggatgagcatgcaagcaacaaatcaggtattaccgaaaatgtcgtttcccaaatttgctggagaggatccggtggtgtggatagataagtgtttagagtatttctacatgtatcaagtgccacaatcactttgggtatctgctgcttctatacacatggaacagaatgctgctcgttggtggcaagttcagaaactgcgccaaggtatgaggaattggcaggagtttgtgcgagctgttgaaaacaa

SEQ ID NO: 178039 - DNA, 793 bp, Zea Mays
ctcgctccccaccaccgcgaggctgatgaacatccttgaagccaagcaccggtggaagagcgccgctcccacaaggtcgcgcacccccggtagagggaagacaagaccggtaacactggcccgctagggaggacaaaaggcatgaactctctagcggcaagctcatcggagtggataacaccggcgcaaatccttccgccgagcgccagcgcattccatctaagcaggcggtataccatttcgagcactcactcggtctgggcgtgctcgggatgaagtcacaaggccatggaaaactacgacaacgcgaagcagagaccttgaaggcaaacgggcgcggagcactcggaggcgaaagagcgccgcgagtgggaaagaagcaagacatggctgctactcgaggggtgaaccccattttaaaggcagatttccccactcgcgccccgaagcgtcacgggcaaggtctcccccgatgcgcaccagggttcccatcctatgacacgggggccaggcctcacatgtcatacaagctggcccgaagcgcgaagaaggcgaatcgtcgcacagggagcatgacaccgccccgcggtagcacgccccttcatcttcgccgcaaccaacggtcaagaaggcaaaccgccgcacaaggagcgtgcaaccgccctgcggatatacgccctttcatcttcgctgcaaccagcggtcaagaaggcgaaccgccgcataagaagcgtgcaactgccccacggttgtgcgccccctcggcttcgctgcagccagcggtccaacctct

SEQ ID NO: 178040 - DNA, 399 bp, Zea Mays
agaatcccttctgttgacttggtgagccgactggagatgattcttagaggcaaagtatccaatgttggtgctccagtggcgtattcagcctggaatctgcctcctgccaaggccttcactcgtttcgtgtcaaacccaccttcaactgatggcaatttgggccttagaacgcggccctctgatgaggaggttagtgctttggttgcttcacttgggaaaatccctgatgatgagagacaaacccatttcgaggtacctttggatcctactgatgctgaaataaacgccgtgcttgacatgttggctgaagattcttctgacgctattcctgctgagacattggcagtggcacctctcccagaggtcggtataatcttggatgctcagagacctgtccgt

SEQ ID NO: 178041 - DNA, 415 bp, Zea Mays
atgttcacgagctggctaggcgacagcgggagactgacgacaatctccatcgtcaggctacatctttgggtatcccttttgatccccgctcgtctgacgttccctccatcctcctctgctagagaataatgaatggcatcagcaaaattatggtgtccctttcatgtctcctgaagatgaagaaggtgaagattaagaatttttttatgacagagagcagtatgtcccgcctccccaccagggggatccgggtccatcttcatcctatcctcctccccaggatccttctggcagctatcctcccccagctaaccctggggaagaaaactttgcatcaaatttggcgtcgcggttcttcgatccatccccttcatggtgatatgtggttgtttctctcctcttgtttttggtgctc

SEQ ID NO: 178042 - DNA, 544 bp, Zea Mays
gttccttcctctctcctctcctcctcaatcttgcggcgccgaccaaaagaaaatcaccattgcctcgcgcgcagaggagtgaaatcgccgccgccatcgaccattcgcagctctgtcgccgtgtcctaggaattctgccaggagagttcgcctgcgcctgggaaagaggtttgcggccgcaattggaaggaatcaccatctagctgggtgaattgctcgtcgaagcagtgttcgtaccgtccttccgcctctcgccgtggcgcggctcctccacctcgccattgtcggtaataagcacttccctatgtccgccacactctcaatttcgcttagcacctaggtaatcgtagtttggcgctcagaatcgctaagaggggtcgctggcgtgctctgccgccaggaggctgggcgcgccgccgtggctcagtctaggaggaaaaggagtcgaccgcggaccgttggatctagcgcgtgtggctctgattagataggagataccctttcgctcgattcaatcgcatccatcgatgttcgatcgggcgat

SEQ ID NO: 178043 - DNA, 678 bp, Zea Mays
gcaagggttcaaataagggggatagaattccccgctgacttaatagttatgggtaaccaggatacaactatagatgtcatcctagggatgaattggccaaccaagtatcaagccagtcttagctgtgataagagaatggtgaagttagtatccctatcaggagaaaaagtgttagtagagttggtcttgtatggaccaaggaaagggagttgtcaccaagtcaccgcccgtattgaggagattaaaccatcagaggctatcaatgtagtatcagaattcccagatgtgtttcccgaggagttaccaggcatgccacctgaaaggaaggttgagttcgccatagagcttataccaggcaccgcctctatttccaagagagcctatcgagtgcctggaccagagttggtggaactcaagaagcagatcgatgagttgtcagagaaaggctacattagatcgagtacctcgccttgggcagccccaatgctgtttgtggagaagaaggatggcacgaagagaacgtgcatcgattaccgagccttgaatgaggttactatcaggaacaagtaccccctgcccagaattgaagatttattcgaccagttgagaggagccagtgtgttctcgaagatagatctgaggtcaggctaccatcagctcagaatccgaccttcagat

SEQ ID NO: 178044 - DNA, 871 bp, Zea Mays
ccgcggatggggcacgcagaagccttgcgcccggggttaggcggatcggcggcggcccggaagctccggtgagcaatcaacgacggttcggtcatcgatcccgcatgccagcgccacgggcggcttcccaatggctcggtgcaagatccagacccgatcttaggttctgggcgaccgtgggggaagggattcgcggcggcgcggggcgacttgatgcaagatcttgttttccctctccctctctttctagtggttgatggcaaactgatggtgcagcccagctttatagtctccagggagcggcgccacgacatgccccaacaacctccccccagctgggcgagtccgcgaccaaggcgtcaagcgcggatctcgggtgtgttcattgtgtcggaggggacgagtccgtgccacggatgtcggtaggaggttggcacagaatcacggaggttcggagaggtcattgcgcggtttggttgcaacgacccgcgagatccgtggcgagctggaggcggtgactgttgcttctgtgagaccgagcgggacctgcggtgagttggggaaggatctgaccgcgagggcccaccgaccggtgaccaccaaggcaatacgcgcaacaaggagaacggacagggaggctgctaggtggggccaggccatcgatcatggcacgtgaccaggcgcgagcgtctgtgtgggttgggctgcgcgcggtggtaaaatggtattgggccgaggcgcgcaaaaattcggcccaaggtgagttttttccctttttattttctttattgtttctattttcctttgttatttcaatttaaaatcaaaccaagttttaaattctaaatttcaaatttatgcacaagaaaaa

SEQ ID NO: 178045 - DNA, 441 bp, Zea Mays
tagcattcggagtcaactgatgaagataaatttcaaactttttcaggacttcacaaatcatatcgtacaaagggaaccaaagcccttcgtgaaagaagcttttaaaaactattacttcatcatccttcggctctagaatcacttcatccctagtaaatcttatcagttcatcgtcatttttcccaaaatacccaagctttttcattagaactaagtcttctgctttcacagtggatttcccaaattcaacatgattgggcttgcttgcactcaagatgccatcatcttcttcatcatcactaccaaattcggcaacaatagttttagcttcgacattaacactgtccttctcgagaaaagatcctccttctcttgaacaactaatccagagagcttcataacttctgaaattggagctgtctcagtggcctcagtttctcc

SEQ ID NO: 178046 - DNA, 698 bp, Zea Mays
aatttgccttgaagttgctctgtgagaaacactgaataggcatagcgatggtacagtgctaggaggataaggatcaggacctcaccggcgataagaatgccacggcggtcgggatgggtcggcggcggccacggtaaaggttctcggcgacgtggcagtgaatcactgaggtggcgttacccggttaatcggtggccaccgtactttcgccgtggctcgccagcgtagcctggaatccgcaatcctcatccaattccgaacgacggcctataaattgcgcccggattctgcttcttcaccacatcccgcacctcagtgcttgagcaatcggctcaatttcaccggagcactcacgcagcccccaaattccctcctcctctgttcttagctccgccgtgaagaactccaccgtggtcagcgttttgcgggttagtaatttcccaattgctccctgttttaactcgtttgtagcctcctattgctctcagtaccaaccaatttaagttcggccgaagcctttcaccggaacacacaattgctttgtagaacgtcgctgtgacaccctctctgtcgccctatgtttctgttcgtgcccactccaaattttagtatgtgcgtcatctctggtaaacctgtgaagctttcccaagcttcaatttggtcagtcacgtcgtcggttggtcggaacgtgttcatcc

SEQ ID NO: 178047 - DNA, 656 bp, Zea Mays
cgcggcccaaccgggggaaaatttgcacgctgaccggtgggccgctccctctaccgttctcttgctctctgactgatggtcccgggatcgccaacctctccctgctcgtgcgtgtgttttctattcctgacaagccgacccactctccatgccctaccgttagctcctcaagcagcacgtcactggcaatcgggcccgggccgtcaacgcctcctccctactacccacgccgaaatcccgtccgcggaagtcgctgaaccactcaagcttggtggccgccatggccgtcgccggagatctcggggtcttcccttccccgccaacgaacatccctctgcgcggactcactctcctctataaaaggatggccgcgtaaacccaaaatatcatgccatagactccgggtgagagagagatcagggcattgccggtgcctttcggatgcctcgctggtcgggccaaattgggaggacagggagcttcaccgacacccacctcgtgtttgcgtgacctttcggggtggggaatggcgggactcgtcgggatttcgtcgccgaacctggtggcgccaccgcagagccacctgtaccgtgggcggggtacgtaggcgtcctatatccaggtaaaagtcccctggcactttcgattcgtactcc

SEQ ID NO: 178048 - DNA, 1313 bp, Zea Mays
ccaaaactcacaaaagggatgaatgcactttcagaacacaaatctattgtccctcaatttccgaaaccatgatagttggcgtgccaggtagcagaccgatagcgtgccaagtgacatcttccactccaatgactagcactttagtgttcgccagtggcgaaagattcgatccaggaagtcgcatcactttcaactctcttgacttcctcgccaccgccaccggtgaaccccacctcgtccactctgacagcatctgaggccgctcgccgacatttggcgtgccaggtagcctcctggatccattatggcttcctctacctgccaatggatttcagtaaggcaaacaacaaaagctacgcctttgtaaacatgacttcgttggaggcgatttgtcggtcgtgccgcgaccttacaaaggcccaccgcgttctgaagggattgcaagggcactgctaagatctgtgtggtccaccacgatgatcatcagccaagccccatggcgtacgaggtttccatcgtcagccaccagccaagatccgccatcgacacctacgaggacggtccaagtcgctacttaaccgaagaagtctgacgcccgtcatcgctcgggcaattggcgaggtgtttgcaccattcatctaaaatgtagcatgagaatgaactcttcgtttgtaataggatagcaattacgtgtgatccacccggtgaggtctgctctcataaacacggtctatggcatccatcgcctaactcttataagtccagttatgaaggaagaatttgctctaagttcaattcttttccttctttaatttacatatattgtttcctctaacccccacgtggtttctaacttatgttgtgatcatgtaattagcttgtcgcttagtttgggcccctttggtgctgaacgaggatcgaactgctagggacctcagctaggggaaacgaccacatacctacatcgctgccaggtgttggcgtagcagagtgccaggtcattgatttacgtacataggtttttcatttgataaatttggaaatagttatgttcaatttgagattctagttatttgattgaggaggggaggggcgccggtgctagaaaccatcgtggcgctatcgcctgccatccctggtgctggaaaccgtcgtggcgccatcgcctgccacccctatgaggcctaaattcgcgaggacacaaggaggagctcgccgccatcatccttagaaaccgcttgagacttttggctgctgactttggtggctgcaaggcagagaggggaggaggcaggggccagggctagggttta

SEQ ID NO: 178049 - DNA, 322 bp, Zea Mays
cttcctatggtggttctggtattgatgtgaggattacaagctgagagttgcgggtgttgtaggctaagttgggatgaaatgatatggggtacctcctggccttatatacacgaccaaggagagttataccgttacaagtgatgatttctatctacttgatgatctccttttttgtagcagactgtatccctacatatccggagtcctcgcctacacgtctgagttaccgctgagggtgatcaaaactgtaccgaccgatacgtccgtgctcctatggcgcttaactcgggcattggttttcgtcagcttagatcgggcccac

SEQ ID NO: 178050 - DNA, 612 bp, Zea Mays
gcccaaatttagtggtgagacttcttcagctactaaagcgaaagaacttgcgccccctacgcaaaagattgaagagccggctgcagtacccaaggcaacctcagccaaattagctaagccgaaggtggttaatattgaagagacaaaagtcgaagggacgaaaatactagaagttctaagcccttcggcagaagtgacagtgctgaaggcacaaaaaggtcttacagcgacccccaagaggaaaaggatggtcagtgtactggatgcgctggagacgataaaaacgtcaagctctactccagggaaaactgccgaggcttcaaaaacacagactgataccaggctgaccgaagccgaagctacaaagagccagaccaacaccgaggctgggcctttagagcccaccaaggagaaatccttggaaaccagagaaaaggcagcggataaagaagctgtaaaacaaattctgcctgaaaaagctaccactcctactcccgaaaagccttccgaagctcttgattatattatacgacacgctttgggaaaaagattatctgaagaagagatttttgaagctaaacactatgcccgagaactgaagtatccgaaggg

SEQ ID NO: 178051 - DNA, 518 bp, Zea Mays
cagggatcggaggtagaagaaagctattgaggagacggcggcggccaaacagccagcccccagggtattcgtgttgtctgtctgttctttcatacctcttcccgttcgagtctcaggttatatatttcttattacaagcagcccatcaggcctacacgacccactccggcccaaatacttttacactacgacgctttactcgttgtggacgcggcgctgctccctcctcagactcgccatctgcatctctgtccactgctctgctgtcctggacgccggagctgacattcccccgctcttgaaacgccgcttgtccccaagccggcgcgtgtggaaatcggtcttgtaatgctttcaagacttcccaggttgctaaggattcatccatgccggaccatgtcaccttgacttgcgccactgtcgctccgcccttttggatcagccgactttgtaacactcgaagaggaatctgtagagcgtcagtatgagcgggaagtgaggcagccaccacctgatcg

SEQ ID NO: 178052 - DNA, 2979 bp, Zea Mays
ggcagagattagaggtagaagaagggtattggggagacggcggcggccaagacagccagcccccaggtactcgtattatctttctgttgtttgatgccctctctgtctcagcgttccccggtttatacgccttattacaactcagcccaacagacctacacaacccactccggcccaaatactttcacgctacgacgctttactcgttgtggacgcgcaacggcttcctcctcggactcgccctccacgtatttgtctgcacgaccgacgtcctggctgttggagctgacattcccccggtcttgaaacgccgcttgtccccaagccggcgcgtgtggaaacctgtcctgtaatgctttcaaatcttcccaggtagccaaggaatcatccatgccggaccataccactttgacttgtgccacggtcacgcctcccttttgtatcagtcgactttgtaacactttggtcggtatctgaagagcatccgtttgagcaggaagggaggcagccaccacctggttgcggctgattgcggctttgagctgtgagacgtgaaaaactggatgaatttgggctgaatcaggtagatagagtttgtacgccgtggcaccaatgcgctggataatagtatatgagccaaaatatctgaaggcgagcttttgattgccgcgccgtgtcactgaagactggacatacggttgtagtttgagatagacacgatcacccacagtgaaaaccctctcagatcggtgcgtgtcagcatacttcttcattcgactttgagctctgaggagatgctgttgtatgagcttggagatcacttctctttcctgcatccactgttccagatctgtcactagaattgccgaattttgatgcagcccaaagtgcttaggaggatgcccatataacacctcaaatggggatcgatccagagatgaatgtgaattggtgttgtaccagaattcagctacaggcagccactgactccatttgcttgggcaggcatgaacgaagcaccgaaggtatgtctcaatgcattgattgacccgttccgtctggctatccgattgtgggtgatacgatgaactcatgcagagttgtgtgctagacagtgcaaacaattgttgccagaaggcgctggtgaaaacacgatcacgatctgagacaatattgtctggcataccatgtagccgatacacttgatccaagaagagcttggcgactttaggtgctgtaaaggggtgagacaaagccagaaagtgtccatacttggaaaaacgatccaccaccaccaggatacagtccgctgcaccagacttcggaagtccctcaatgaagtccatagagatggagtgccaggcatggggaggcactggtagaggtgccagcagtcctggataacgggagcggtctggtttggcctgttgacaagtgctgcatgactaaacatacccacacactgcctgtttcattcccttccaatagaacaattgcttaatgcggctgtaggttactggaaaaccagagtggccgccaataggggaatcatgaagggccgaaatgatttggcgttgaatatctgccgaactccccagccatactcgtcctttatgtcgaatgacaccctgagatagtgtgtacggggcaacagcatccgcggagacagccagttttgtcaaaaggtcctgtgcttgtggatcatccctgtagcttgcaacaatttcttgaatccacagtggagtaccctgagatatgtgcatggcttgcccttctgtcgggacccgagaaagagcatcagcagccatattgtcacaaccctttttataaataatgcggtattgcaaaccagccaacttgacatacaatttctgttgccagacagtatggagccgctgttcatttagttgcaccaggctttgatgatctgtgtaaatatgaaattcagccaattgtaaataggaacgccactgcgtcacatcgatcagaatggccaaatactctttctcatatgtagaaaggccttgattcctgggtcccagagacttgcttaggaatgccagagggtgtccacgctgcatgaggactgcgcctatgccagtgttgcaggcatcagtaaaaatacagaaaggcactgaaaagtctggcaatgcgaggactggtgctgagcttaaggcctgcttaagtaactcaaatgcctgttggtgttccacagtccaaataaacaacacatttttctttaacaaatccgtaagagggcgagatatcatgccaaaatgtctgacgaacttacgataaaaaccagcgagacccagaaaactgcgtaactccttgctattggctggtgtcggccattgttgcacaacagttatcttgtcgggatctgttgatacaccctgtgcactgattatatggccgaggtaagcaatactggtttgagcaaattcacatttggacagcttcactttccagtgatccttccgaagcaagtgcaataccgatgacaaatgagttaagtgagaatcaaaactgggactgtatattagaatgtcatcaaagaaaaccagggcacatttgcgtaagactggagccagggtagtattcatggcctccagaaaagtattgggtgcgccagtgagtccgaaagccatcacgcgaaactcaaattggcccaaatgagtttgaaaagctgtctttggttcttctcctggccgcaaacggacttgatgataaccagccttcaagtcaagcttgctgaaccacttagcttgagtgagttcatcgatcagttgatcaaatactgggactggatattttcctttcactgtgatagcattgaggtaacgatagtcaacacaaaatctccatgtcctatcctttttcttcaccaataaaactggggacgaaaatggactctggcttttttgaatgaccccttggtccagcatttgttgcacctgcgtctcaatctcatccttg

SEQ ID NO: 178053 - DNA, 1044 bp, Zea Mays
ctttgctctgtcaaacgtcttgtcctctctacgacctcctcccgccgaccactcatgtgtcgtcttccattcatagcgtgctcgtcgatcctcattggagtcgcgctatgaaggatgagtaccaggccctccttgccaatcacactttggattttgtgctccgtcccctaggaggcaatatggtaactggcaagtgggtctggacacataagcggaagggattattctctataccgatacaaggccccgctaggttcttcgggcttcactcaccgttctcgggttgactacgatgagacattcattctaatgatgaagtatgttaatgtacatgtcgttctctcactggccctctctcgttctttgccaattcatcaggtaggtgtcaagaatgccttacttcatggaacacttacagagaccgtctattgcagtcagtctgtcgactttgttgactctactcaacctaacatgatctgaaagctcaacaagtccctctatagtctaaataggccctccacgcttggtacaacaagtatgccacatatctgctctccctaggctttgttgaggctaagtcagacacctctctgttcatctactagcatggcagtgacactgtataccacctcctgtatgttaatgacattgtgctcattgcctcttcttcgggcctgctacaccagatcattaccacccttcagcacaagttcgcaatgaaggatttgcatcttcatcatttctcgggattgatgttgagcctcgtctggatggtttatttcttcagcaacaccagtacatcgtatcataaggtgagctgacatgctggattgcaagccatgagccacaccagtcaatgaccccactgcctaccacagtcttatccgtgatctttggtatcttaccttcacccagctcaagatcatgtatgttgtccaataggtctgcctctacatgtatgatccccaagagccgcacctgagtgcagtcaagaggatccttcaataccttcagggcactgtcgactacgagctccatcttcag

SEQ ID NO: 178054 - DNA, 430 bp, Zea Mays
gaggcccacgaaaatagcttgtattttcgtcggccaaaggggcccacgtaaatagctgctgtattttcgtcggccttggacaaaccgacgaaaatatgttattttcgtcggtgccgatgaaaatagttgcttattttcgtctaacatattttcggcggctattttcgtcggtatgccgacgaaaataatctattttcgtcggtttaagcttattttcgtgggtttttggcccatgaaaatttaggcgtttcctgtagtgtcgggcggtccgtgcgaagcgtcggacaatctggtgtgccagccgccaatgactagctgccacattggccgagggccaacgatcaagtggagcaccggacagtctggtgctccctagaacaggaaactagccaatcacgcgattgtgtgcccgtacactgttcactgtccg

SEQ ID NO: 178055 - DNA, 328 bp, Zea Mays
gggccctaaatcgctgggtcaggttactccggtcgtggtgaccgctgcgagcgcgggcggcgctgctgcgtggcgagggagagaagacgggtcgtgcgccgttggatcgaaaagaaacgacgcagattagtttgggcgtatcgattcggccgggtgaacatggtctgtccgatttcgatcctgcgctccctgattgattttagttgtttaaaatctatgtcgtagatcttgcatcctggggttctcgtagcgtaccggttcgcggagggacggatctaatccgggccatccgcgcttgatcggacggccgtcaacacttcatacacct

SEQ ID NO: 178056 - DNA, 668 bp, Zea Mays
agctatgctgaccctaggtcgttagactagttagaaatggaaagcctagttagtctttcaaaacttgagttattttcctccataaaaaacttattttatatccaaactcaactcctttataatcaactcttctagtctgattttctgtcatctatcggaaggttgctatcagaagaactgcttacaaaagtattacttatgttgctcaagatcggccagcaccctctacctcacctttggatgatgaagaagaaacgtctttctctgccttatcctcattctttttggaaggctttgttatggaacccctgagtctatcaccatactcctttaggttgataggatagtttattgaaataagctagacacagtagacgataaaacagtgttatactataataataacaacaatgtgatggtgatgtttgatatgtttgagttgtatttttgtttgagtgcaatggtctgatggccataagagcaaaaaaacataaacttaagaaattcccctctagaatcttttctactccccacttctctaagaatttcaatctctgaccaatcagatggtgaacgctcgtcaaggacccaacaacaaccggaaccagcgtggtcaacagataccaccaccaccgaaccccaacatggaacagttcatcgccgcccag

SEQ ID NO: 178057 - DNA, 481 bp, Zea Mays
catccgagaacaagtgaccaacaggcggacattgtcattccctagaagctaaccaaccctaagacggcttggtctgggacatcgttgctggccttgctgcgacgattcctgtgaaccaaggagggcacatcctcttcatcctcctcttcctccaaaacatacctactaactctagtgccaccgcaactctcaacgtcatcttcaagatcgacattcgccacgtcattaccaaggtctggagaagtggagtcagcctccagttctaagccggatgagcgccaaagctttccttttctcctcttcgtctcggtggacatggccaaggagcctacccagcgtgtccgcttgcgacgagcgctaccagggctgcaaattcttttctgtccatcgcacacacgcccgataacagcatccgcagactcaactcgagcagacctagatgactctccaactagtacattcagaactgtgttcacctcag

SEQ ID NO: 178058 - DNA, 398 bp, Zea Mays
atacctcaagatccacccacctaactttaatacaggtggacaattcgttgagcacgcctggacggtccgtgatttgggagttagtactatccgtgacctgagcatagatagtccgcaagccaacttaccaaaaccacttagtccctactcaaaacgatttggacacctccgaatggtccacgcctgtcgactagaatgtccatgcaacaactcagggactatgccaaaactggacccttcctggtcaacactgtaggacggtccagccacttggcccggacggtctatagtaaaaatactttagaccacaccaaaacttactatttctgtagacctccctattagcatgcagacagtctagcctcctagcccagacaatccgtggaacaaaacaatta

SEQ ID NO: 178059 - DNA, 319 bp, Zea Mays
gtgttagccctgaggagtcaaacaaaaaatttacggagattgtcaatattccatgaatgctctaagtcttcgccggatggcgttgttagcctgtacgcgctaggggacgccttcgtcttgacgatgaaggggccctcccacttttgctccagcttgccccgtgactctgtccgagttgtccggacgagtacgagatctccttcgttgaattctctcgggatgactatgtggtcgcgccatgcttttgtttgagcttggtatttgttgagggcctgtagggcgaagacacggtctccgtcaatgaggtccttcgaagttg

SEQ ID NO: 178060 - DNA, 491 bp, Zea Mays
gctgcattggtttagaaaatttatcttctcagtcttctatgatggcctcgaggagacgcggtattggcgcgagcggcggtgtgacttttctgcacccagaaaccggcgcgccgggtgcatgacatgtgggcctgggcccccatgccagaggttggaccatcggtcgaagctgagggggcgcacaaccacggggcggttgcacgctccttgtgcggcggttcgcctccttgaccgctagttgcggtggagatgaaagggcgtataaccgcagggtggttgcacgctccttgtgtggcggttcaccttcttcaccgctggttgcggcgaagatggaagggcgcataaccgcagggcggtttgcacgctccttgtgtggtggttcaccttcttgaccgctagttgcggtgaagatggaagggcgtataaccgcagggtggttgcactggcgcgccgggtgcatgacatgtgggcctgggcccccatgccagagg

SEQ ID NO: 178061 - DNA, 849 bp, Zea Mays
tagccatccgatccacgatcggtggccaggatttaaaacaccttggatctattcccgaccattcccccacacaggccgagagccccgcgacaccgccggatgctacggtggcggacatcgcgaagacagccaattttcaaccccgcgcacaaaatttcaaatcgaagaaagctacacatataggaaaccaaggcgaatgattcagaggagttattaccggttattggctaatgcagagccctgtcttcagtgtggtgtggatgacggcaattttctggagtcaggcgaggaattctcacttgctaggcttaagccttgaaaggctttagtcgtccctcgtgaatcttcttgaccaccagtggatcccccgaatgagggtatggtcgaggcgcgacgttggtagcttcgcttctttctctccctctctcacgtggcgctctctttctctctcaaccctagggcttgacggcgttcaaggtgatggctgaggggggtgtggcaggtcttggtttatatagccgcaagggcacgtgctagggtcgcaatggcctaacaaccgtgtgtcaaccccgacaccacgatggtggagttcggtgcaaagcttcgagaagattgtggtgaagaaaacgctactaggagggtcccacatgttggttactatggttatgggcgcgctcgactgagagagtcgttcagcggtccccactggtcagtgagatggcgcgggggtgggctaccagctcttggcttagccggccaacgagtggaggatgttgggctagggtgaggtggtttcggccgaacactggaaggcttcccttttctatttcttttattttttgtgctcta

SEQ ID NO: 178062 - DNA, 286 bp, Zea Mays
cagaattatacgttagtaccaattagagattaaatggttatgcacatgatgagtttagtaaaaatccatcggtgtcactggtgttaagttgaggtttatttgcgcgtggaaagtaataatgtgattaatacttagaactcttagtcgatagtagaaattgttttggcttatatagagaggtggtgacatgccaaagtagtcatcgcttcctctatatcttgagtagggtcaatatgcgttatgtgttcatgaattgggaagtaagcgcatgatggtttcgagttag

SEQ ID NO: 178063 - DNA, 661 bp, Zea Mays
tgaactttaggggccattttgaagacgatcccatggatgtttgagcatggtgactacagttggtttatagatggatcattagacaacaacttcgatactagccgatcagcaagttgccatgtaaatttaggagaaaattgaactcaaagttgatctgtcaggcttactgaagaacaacctaatggtacagtgcactaaatatctcaggcttcagtctctcgccgccgacaatctgcgcgtccggattcgcgtcggcggtcgtcgcgattcatgtcctgagctagtggattatgctcgacgtgaaaagatcttgccctagataaacacaagccaccgtggtcactctgccttttgcccacttgcaccggcaacgtggccgcacggccattaccacgggcaccgccgttttccccggtcacgccacgctatgaccctttttaccacatcgcagtagctcggcttgcgatgtctgttcatcgccggtgagttcgccacgacgaaagacactaatcacgcgcgccagtaacttcctgtttctctagccgccgcgcgtattcatccaaatccctggccaccgcttaagcccgttataaattgagcccgccgtgagctccgtagggtaattacccatccatagcacccacgcttgccttcaattgtc

SEQ ID NO: 178064 - DNA, 665 bp, Zea Mays
gtgggcaacaaatttctgttctatcatcatctcccaatcaagatatccctcagcatcataatgacctgaaaaagatggtatagaaaatttaatcttagcataagggtcgtcaggagcacgattgttattaccttgctggcggtgtggcataccttctgtgttttgatgaagacggcgatggaggggcaaatctctggtggccgcttcatcataattaccttcttcatcaaacatcgcatcatcgggaagacatggacgaggaggtggtggtggcggtgcttgttgttgcgtctccaacacaacaagtctatcgataatctgggacaatcgtcgatccagcctctcgtaagtcttgccaaggttcatgttaatgaaggcatcatgcactgatttgtggaccgtcttctccatttgctccttcaggagcttgttgtttgcctcaagatcttggcggctaacacattcatcgaagtctgtagggatccttgcttcttcttcgtcgcctgccatcgaaacacaaaaacaggaaacaaacgatgaaggttatccctaataagcaactacgcgctctctgggtgaataggaacacacactaccgtgtcttaccaagttcttactagtatctaatgaaaacacaatgcaaaggacggtacaatcagaggctg

SEQ ID NO: 178065 - DNA, 724 bp, Zea Mays
cgcccgaagcgttctcgccgagccgatcaacccacttctcctgctgaggggcagaagaagaagaagagacgtcttcgtcgagtgtctagcttggatcaggatgccggtccttctgttcctgttgctgaggaagtgccagtgcatgaatttgctgaagctgaccccaatgggtgtgacccaactgctgctgaccccaatgggtgtaatcctgctgaagttgaccccaatgggtgtactgtccatgttgttgatgaggatgatgaagaagaggatgaaatccctctgattcggaagaacagccggcgttacatagctagtggggaaagtagtggtgttccttctcctgccttgtctgccctcattggtctgcaagaattatctctggcgaactttgatcaaactcttgaagacatggttccagaagatctgttgtcagagccggcagatggtggcgtgatggatgtttgtgctgatgtgcccgatgccgggttggggtcatcccgggcagcgtcccgcgcctcattgaccttagagcgcggccttgagggtcaggaggctggtctggattgcactgctcccacggaagtgactgagggtccttcagccttagaggtggttgttgcagagaactcggccctcaaggatggcgctggcgcttacccagcccccgagggtgttgccggagatgatccggctcggatgggtagcgcgagctgtgacctag

SEQ ID NO: 178066 - DNA, 447 bp, Zea Mays
atcttcagcgtccatgggatcagcagagtgggcaaagacttggggatggcccctcatgaactctgcccgcttgtctctggcacttgaggcatttggacttgcactggaggttgaggtggtggtggctgctgctgcacctgctgcatggctgctaaggtctgaccagttgcctggactgcttgggtctgcatcaagaacatctgctcaatagtcatcgggggtggcagtggcaaatgctgctgcggggctgcttcctcttggggtgcctgttgttcaggctgagcacgcctcgcacctctgcgcctattctcagacatctgtagaaatcacacacatatatcaaatctgactttgcagcctttcagcataagaaaagatgtatagaagatcttcgtagaactgaacaattgaccatcttcactgacaacttctcagataaagaggaaa

SEQ ID NO: 178067 - DNA, 416 bp, Zea Mays
cgtgcagccaccctgcgtgatccctggccaggccagtgcctagtcgagccttcccagccatgacacgccctcgtatggtgctgctgcgcaccgctcagccccgactccggcgagcagacgccaccgctatcagccccacccgccgtagtgcccgccacatcggcgtcacacccgctccagcaggccaatccattttcctactgtggccgttcgtgcagtatggaataggaaaaaaggaaaccgccccgtgtggccccacctgcatgcccattcgttgcctagtgccacggcgcgatcttctcactgcacacacgatcgctgcacagaaaggagaaccatcgtaggcccctgcatgttccttcctatacgatatcctcattgcacgtaatgtgtgtgggaaagaaaactgactacca

SEQ ID NO: 178068 - DNA, 390 bp, Zea Mays
aacttgttgccatacatgtaaactacatccttgaacactcttatatcatgtacggaaccaagccaccccatgacgacaaaagtaaatctcatgtcgaagtaacatatggccaacattttctcaaactttctgctcaaagttggcgactatagtagaataggaacaggggagttggcaatgatagcatgggagcagcaagggaaatggcgatggcagggaagggtacagaggagcgtgcaagggccattcccggaaatcatccgttcatcatccactaacacgccatcaatcccctcgctcatggagcaagaggaagagggtgaaggatagcataggtgccatagtgggagcccaacttggtttttacactattgcccctcaccatcaaca

SEQ ID NO: 178069 - DNA, 416 bp, Zea Mays
gctcagttaacattgtctattaagcttcaaccaatctaattttgtcaatctattgtgggcgtccgaaggacggctgatggtctagtgaaagcaaagcatctgtgtaccttaaacacgaaaaatcccaacccggtttcctagaagctgcaagcgcctaaagaagagaaaacagatttgttgagcgcgtcaagattgcataaacagaaaccatccctcctgcatcaaatatgcaagaaaacatggactactcctagagactgctaaaaacttgttgccaaaaacctcacattgggggctgttgtaaaaaaaactccctaaaatattccaccgccacagcagactgctaaaacattcaccttaaaatttttgaaacagccaacatgggccatcatagactgaataggcctagtttgcag

SEQ ID NO: 178070 - DNA, 1171 bp, Zea Mays
atccaggacaatggcgacccaatcgaagcttctgcagcaactgtgcgaccgcttcgaacaccaagatcagcggtggagcagcatcgagaaggtggtagatcagaacgcggtcaacatcgccaatcttcaagggaggctcaacgaagaagaactgacgcgcgtattgggggaacgcttggacggacagttggcggaattccaacaagaccaagcgtatcgtgtccaggaattggtggcaaatacttccactcgcgtggcggtgctggaaaacgtgtcttctgtgtttgaggcatggcgaccacgcatcgagggttccattgactctgtcaggtcttcagtcgacaccatgcggtcagagctcgcccgtctcactcagctcctggaaggcggcattgctggagaacatcaagcacgtccgagtctcctgggagcgtatgtacctgtggcggagcgtccttctacgaccacagccacacacaactccgactgggccaacggccaccgcaacgcttgtcaacctcgggagtatggaattgagaattcccaaattccaatccatctcccgaacaatggtatgcattctccctacattccccaaactcaggatactaggccaaaccggacgagttgggataaccatccatctacatctgatgctatggggggtagtgttcaggaccctaattttgctaggaatttagggagcctaccgaaactccattttccatcatttgacggtgggaatcccaagctgtggcaaactagatgtgaggactacttccttatgtattcagtggacccccgtatgtggatcaaggttgcttctatgcaatttgtgggaccagcagctatatggctacaatcgattgagtataagttggttcaaatgtcttggggggaatttgggcgcctaattcaggaaagatttggcaaggaccaatatcaggggctccttagacagttattccagatcagacaaacggggacagtagctacttatgtggaggaattctctcgattgattgacaagttaaatgcctaccaaaccatgtctgatcccttatactatacattaaaatttgtggatggtcttagagacgacattaaagctgttgtaatgcttcaaaggccacaagacttcgatactgctgctgttattgctcaattacag

SEQ ID NO: 178071 - DNA, 931 bp, Zea Mays
ttagtagccacttgagtataataaacctgtccagttctcttttcacccttgtctgcctggttgcttgccatatttcccttgccttgagaagtatttctagaagtcttttggaagtttgacttgttttgcttcgggtaaggacaatctttgatgaaatgtctaggctttccacagttgaagcagctattagatgagatgggtaaggctgggaaatgagtaccaggggcacccgactgagtggtttgagtaggggcagcagtttgctgaatgaagaccggttgcttaaaaagataggaggatgggcgagaaaaagaacgatttggattgaaggaacgaatcactagccttggccgcttttcggatccctgagaggatccctcacctccttcacgtctaaacctttttgtcttcccatgctccgagttcttcacctccaccgagattgttgtactcatggccatattgaaagtgagatctaaacaggtggccattttccgctgcaggctatcattcagacctctcatgaaacagttcttcttctttaagtccgtattgacttgttctatggcatattgagaaagatggttgaacttagcaaggtactgcatcacagaatcaccaccttgcttcagacgaacaaactcttccaacttcatttatagaacaccatctggaatataatgcttcctgaacgcttgcttgaactctatccaggtaataggatgaccttcgggctgaatagctacgaagtttgcccactaggtactggcgggacctcgcatttgttgagcagcaaacaggggcttttgagtttccatgcatcggatcagtctgaacttctgttccatcacgtggatccactcgtccgcctccaggggttcttattctttaacaaaaacaggggaccagtttctgagaattccatgtaagt

SEQ ID NO: 178072 - DNA, 642 bp, Zea Mays
aactaataggttcctaatacaattatgtgtaaggtgtttatagtgacactttatcccgaaaggtgttaagtctgcgcataaataagagataagtgtattttgtgtagtgtggattgattttgagtgcatgtgtcgcaagaaatgaattagtgcgcatataggcgatgaatgggtgtgatgaaatggtgacatgcctttgtagtcatcatgtcatctgttggtgacccaactgaaggtcgtagagaaaggtcgattacctgtgtgttattattgtcgccttgaggttctgtatgaattgaaatgtgaagtagtagtgctcatgtgttgtctaatttaaaatgcaaattgttggatgattattgtggtgaatgcgttgattagttgggtatggtggttctagatcgcgaaataacttatataaaaattagcaagtctacttgttagttctcacttggttaatttaactctaacaattgcccaagtgttagaataattcaagtatctataacgcgacaattcttgaatggtatatgagctgaaatttattaattgttgttttgggctgcacgtactgttttagttgtgctatatgtttgatgaactaaattgtgttttctgtagatatgtgctatagaaaagtgg

SEQ ID NO: 178073 - DNA, 377 bp, Zea Mays
tcgtcctgtagctagacggatcatgcttgacaagacatttgagctctcaactatccgttttggcatgctagctgtcatatttactcctgagtgtccttggtcctaatagtacccacgccaaactttagatcagtctatatctcccttcgtatctactattcatagaagatgtgaagatccattaacttgcatggctctatcatttaggttcatgaaaactcttaaaatgcatttcatgacctaaatcgtataattgtgtaataagttcgtgggcgtcgtcgtctcatgcattttactcaaatccaaacgttccaaactaaaggtgtttttttaccagaacgtgtatgcgcccatgcatcatcaatgtattcatgagt

SEQ ID NO: 178074 - DNA, 543 bp, Zea Mays
gcttggtcattgcgagcgtgctggcatcggtctgctgaccagcggaccccacctgtcaacccctttcccctggccaactaccaacccaactccctccccgcgcacgtcgcccacctgcccaccatagccgaagccgtagagcttaaccacccccacacgtgcgacctaccccactgcttgccccggtttctaccccgcaccactccctcgtctcgtctgtggctgttgcccaccgcgcccctgtcgccccgctcagttttgctcatcaccactgaagcttgctaggaagcactgtcgtccatgcattcgtcgagccctagaccccatcctaggctggagcacggcatccgccgctcgtgcacctgccacacccgaagcaccgtcgagttggcttggccgagctccaccataggtgagaaccataggccctctcctcctctctctctctcattcgctctccatcctctctctgcccacgccggtgaactatcgcgacggcaccgagtcttcatggtgggccctccccgaccatctgccgtcgcc

SEQ ID NO: 178075 - DNA, 674 bp, Zea Mays
gtgtctagatttatcttatccatttaaatatagacatataaataaagagcaaaaacgattaatgttttgagactgatggagtactgtattgttaagagtatccacataaaacagcttacttacatacatactatatacacgaacgaggacagtaattaacacatttacaagacattccattcatttacatgcacaattgtatatgatatatactcgcttcacatccgttgataaccacggtcaccgactacacttcccaagagccgtccggacgtctgcacgggccgccaacctggtgcctccagcaggttcttgtaccaaacacgcagtacagatcacatactaataagacacaatcacacggtaccattaatcaatctgagatcgagataagcacacatggctgacccaaagcatgcaatgcagatgcaggcttatgcgaccggcagcgtcttgctgaagcaaccgttggcggtggtgcagttgacgaagcaggtggcgggattggggttgagcacacacgtgatcccgcagattatgaggcagttctggcacgcgggcgggcagaactcgccaacgccgccgtgctgttcagcaagaaggctcagctcgagctccaggaactcccgcaggagcgcgccggccgcggcctgatcctcgtcaccgggggatgc

SEQ ID NO: 178076 - DNA, 2520 bp, Zea Mays
gcaagaacttcctcaacatagagagatgaaaaaccgggtgtagccctgccatggaatccggcagttgcaagcgataagccaggctacccactcgggccaagatagtgaacggtccaatgtatctcgggctgagctttccggagacaccgaaccgaacaactcctttagtaggggataccctgagaaggacttggtcacccactgcaaattccaaatcccgcctcctcacatcagcataactcttctgacggctctgagcggccaaaatgttctgacgaatttcccgaaccttttcagaattctgctgaacccaatcaggaccaaccagggatctctcccccaaagtctcctagcacagaggggagatacaccgcctgccatacaaagcctcaaatggtgccatcttgatgctagcctggtagctgttgttataagcaaactctgccaatgcaagatgatcctcccagctacccttccatgacagaacacaagcacacaacatgtcttccaaggtttggatcgttcgctccgactgaccatcagtctgagggtgaaaagcgacactaagtgaaagcttggttcccaatgcactatgaagactctaccagaatttggatacaaatttgaagcctcgatcagaaacaatggacttaggtaccccgtgaagcctgactacttccttcatatacaagggaaccaaatctgaagctgaatttgtggtcttcatgggaataaaatgtgtagacttagtcaagcgatccactaccacccatatagcatccctgccccgaggagaacgaggtaaacccaccacaaaatccatggtgatatgctcccatttccactccggaatttccaatggcttcagtaaacctgcaggtcgcttatgctcggccttcacgcgctgacatacttcacaggcggccacatacttagaaatgtcaaccttcattcgcttccaccagaagttttgcttcaaatctcggtacattttggtttctccagggtgaacggtgtaaggcgttttatgagcttctctcaagatatccatcttcacctctgatttctgaggcacacaaagacagcccctgaaacgaaccaagtcattctcatcaatggtgaactcccggggtttaccatcaccaaccctctttcgagcttcctgcaatagacgatcctgctgctgagccgcatgcactctctccatgagggaggattgaataagcatccgagtctcctcactagcggtgccgacatagcacaaagcgatccccaaatggtccagatcagcgatcaaaggcaaggccacttttggaaccccggacctgctaagggcatcagccaccacatttgccttccctgggtgataatgaatggacaaatcataatctttaatcaattcaagccatcaacgctgcctcaaatttagttccttctaagtgaaatatacttgagacttttatgattggtgtaaatgtcacaagcctcgccataaagataatgcctccacgactttagagcaaaaaccaccgcggccaattcaagatcatgagttggataattcccctcatgcttcctcaactgcctagagccataagcaatcactctgccttcttgcatcaacacatagctaagaccaattcgcgaagcatccatataaactgtgaaacgcttaccgctctcacgcaaagctaggataggggcgtccaccaacttgctcttcaatgtctgataactgacctcacaatcgttggaccagacgaagagaacacccttctccaagagtctagtcaaaggattagcaatgctggaaaaatttggtacgaagcgccgacaatatctagtgagccccaagaaacttcggatgagacactagagggtctcttccactccaccacagccgcaacattcttgggatcaaccgcaatgccctgctgattaatcacatgccctaagaaagccacttcggacagccaaaaggcacacttcttcaacttgccatagaactgattcttccttagggcacccagaacgagacggagatgatgctcatgctcagcctcagtctttgaataaatcagaatatcatccaggaacacgaccacaaagttgtccaagaactcatgcaacatcctattcattgcttccataaaagcagcaggggcattagttaagccaaaagacatgactatgaactcataatgcccatacctggtgcaaaaagcggtcttctcaatatcctcctcacgaatccgcaattgaagataaccagagttcaaatcaattttggagaacacctgggcacccctcaactgttcaaagagaacctcaatacagggtagcggatatttattcttgattgtcacttgattcaaagcgcgataatccacacatagcctcttgcttttatccttcttctcaacaaacaatactggggaagcccatggagacctgctaggcctgatgaaacccttagccagcagatcatccaattgccacttcaattcaacctgctccttt

SEQ ID NO: 178077 - DNA, 2010 bp, Zea Mays
caatttctctgattttctcggggtttggactgcgcacacaaaatccagaaagtacaggggcgaccttgcaaaattcccgagacacagccaacagtgcacgggacggcaggttctattttgtaataacctagggtctcttacgcaattttacagggccgaaggggtatggttctttctgagccgctggatttcaatccgatggtacatattagattaggcgcttaatgaaccggtacgcgcctgatttaatctctaccgctcgttttcaatccaaaggcccgagttctattactatgtgatctaatctccaccgcatagactctatccaacggttaaaatgcatcccgccaaggatctaatcacagccctccatggagatctaacggtccagtgatcgtcatctacattgccatcacccgaccgaatgccccgccgcggcgttcaccagacacggcaaggccattaccggcagcacccaaagctcaagtcccaccggtaaacttcactccgacaaccgcgaaacgaagagtagtggattgcgagactggtacaggagttctcaccacggttggtagcgcggacagccctggccacgggaacctacggtcagcggccggacgattcccgacggtgtgaaattaccgcaactccgagagcccctccagatgcggatgccacgaacggtttccacacgcgccggcgacttcgctcgatcctttcctggtccgattccaaggccccaatgatgatgaggacgcggggcatcactggcggctggccttctctgctacgcggctgcacagcggcagcgacgaggtcgaccagagaagaaccactgccacatcgaaacccagcaccgaattcgcaccccccaagaccaccagtaagcccaaatcgcacaaggacttcactcggagctcggtcgatggtggacgcgcacgacggcgaggatgtcccgcgagtgcacggtagacccgcagaacctcccccgcgaactcggtctgtggagttttttttgtgatgaggatagctaggggaaaggcagggcacggtatttattcgttggcgctccgaaatcgcggagtccggtggcaaatccccggccgaaattgcgcaacagaacagagtctgttggggtgttccgtgatggtaggtagatggagcaccaggcgctgaccctaccttctgctgcgctcgttggagatgccctggcaccgtgcgcagtggcgcggcgcccctccttggctgcacgggtcggtggtgtggtcatggcggtgaaggtttcgcaacggccatggcgagctcccaagcagctaccgcagcgaggaaagcggcttcaggcgcaaccacctgaggaagatgcggactgactacaggggtccactcggcagcgtattttctgcgcactgggccgagcgcgcacgggagacaagtccaggttgggccgaaatggtgtttgcaggcccaaaccagattcctttttttttcttttctgattcattgtcttcctttcctttctatttttggatctcaaatttaaattcaattttctgttgtgaattttgtaccttgattaaatgtataaattaaagataccagtatgaaaattttaattattcaaatataggtttctttatattgtattctctttcttttttctagttaactttcaaattctagattccaaattaggtttaaccctaatctcaacattaatacatttttatcatcattgaatgcacaaacaaataaactcatgatgcactatttcctttattttaatatggttattagtagtcaaatataccttttatatctcccaattcttgcacatcctatgaactcaattatttgggtattacatgaagccattgtcatatatcaataaaataagttttatcttcgtatccacaaactcatgccaactaattgaccttgtagttcatattacattgtagtttacttgcgttattttattatagattgctgctgccttaattgaccttggcc

SEQ ID NO: 178078 - DNA, 550 bp, Zea Mays
cctcttccgctcttcggcagacggctgctggaggctggagccgtgtgttgtgtgcagacgggcgtgtcttcgcctcttcggtagacgacagctggaggctggagcctggagaacactgagaagacgggctggacgcctggacggaccgacggctacggcttcgacgctacaggctgtactcgtagtctcggacgcctatacttggtagcctacaccagacagcagttagcagacagcaggacggccttcggcctggacggcggtcggcgggcgggcggacgacgggtgagtgtcggtggacggccggacaggcgactagatgagtccgtgactccggacggcggccggctggaagatggacttagggtttcactttagcatggaggcctgctgttgggttgggcttggcagatttgggccttgactgttgactccgctccgggttaaatccggaataaatacggaaatatcccgaccaaatacgggatcccgacaatccgaacggaaaatagtatttcccgtttccgtcccgctcccgtcaacggccaac

SEQ ID NO: 178079 - DNA, 437 bp, Zea Mays
gaaaatgcagggagactattgtgcattgattggggcgcacaacatgactttggttcttgagtaggccaaatgctcaaatgttaaatttgtcgctagaccaaacttaaacattatactggacaatattgggaaaccataaatggaatcttccagtcttgctaaacggttttacactcttatttggaacaaaggaggatgggagtcggcgaaggtagaggtcaaagccaacaagaagaaggtttgctggtgagttataatttttgtggttgtgatgtgttttagcttttgctaaagatctattttttataggttaaagaagttgctaaaaagctgaagctattaaagaatacaggaagaggggaaaggatgaaatgtcgaaggagccacgaaagaaggccaaggatggggacactactatggatattaccttagaccag

SEQ ID NO: 178080 - DNA, 863 bp, Zea Mays
gtaatcatcaagaaagtcgaaggccgctggtgggggtggattggaagcctcagaaaagggaaacgaggtttcatcaaaaaccacatgacgggagataatggtacgattggattggcgatcaaagcataggtaacctttgtggtggggggaatagccaaggaagacacaaagggttgagcgaggggataatttatgtggagtggtggcagaaaggttggggtagcatttgcagccaaaaacgcgaaggtgctcataggatgggttgtggccgaagagagcaaagtgtggtgtagagagtgcgagtgttttggtgggtagtatgttgaggagatatgttgcggtcccaagagccgcagcccaaaaactggggggaacactggattgaaagaggagggtgtggatgatattgttgatggaacggatgacacgttcagccttaccattttgagctgaagtgtaggggcaagacatgcgcagatggactccatgggaggagaaaaaagtgcgggcttgaaggttgtcaaattcgcgaccattgtcgcactggatgctctggatagggacaccaaactgcgtacgaacgtaggcaaagaaattggttagggtggaaagggtgtcagatttgagacgtaaaggaaaagtccataaatagtgagagcagtcatccaagataacaaggtaatatttgtggccagacacactagtgatgggtgaggtccagagatcacagtgaattaactgaaaattacaggtggcgcgtgaggaagaagtaggaaatggtagacggacatgtcgtccgagttgacaagcatgacaaggatgagtactagtatttttattacaagaaattgcggatgactgcg

SEQ ID NO: 178081 - DNA, 837 bp, Zea Mays
gcgaaggttgctgagagctattgtgcagctttcgtcttcagcgctcttttgtgccctcaaggcattgctaataattaagccctgcaaggaaaagaaaagaattaagcatgaaattgaaatactttgttttcaactttaaagttaacagcttatgtacctttatactgttgtatgcaaggctatcagcaagatcatccttcgacatggccgaaaggccttcctcaagcttcagaaatcccatacttttggctatctcccggcaagcggatatttcattgttgttcgggagacagtacaggaaataattttcgttagtgccgttgaaaactaaggatcccttcgggtattttagtttctgtgcatagtgtcaggcttccaagatttcttctttagacaattctttccccgaagcatgtcgaataatgtaatcaacatcttcggccggagctttgggggcaggagacttagctttatctatcataccttgcaccgctgtcatgctggtatctagagtttgttgcccagttttgtcctcaggtgcggcagccttcgtctcgatggacactgagggcccatcttcagctttggcttggattgtgacagcttcagcaactttcttagtaggagcaggggtcaaggcttttatggtctccataacagcgtcaagcacgctggccattctcctcctcttgggagtggtggcgggagcctttattactttcggcaactctgcctctgccggtgggctcagattttttgatattatcactaatttttccaattttggctctttgaccgcatcagctttttcggttggcccggctgtaggcaccttcg

SEQ ID NO: 178082 - DNA, 326 bp, Zea Mays
gctgaaaagatagttaataatgcgcaaattataaagaaacaactaacccgcatcttcatcatttgcattacttgccctatgtgtcgcacggtatgcatcaacttcgtccatggatactccaacctttgggatatttgcatgccatccaagttcgcctctagggaagaataatggatatgatagtgcatcgtagcatccatggtatgagcggatgcagtggtttgaactgtccttcccatggagcataacactcttgctgaactggcctcacccttcgctcccttcgatccagacagcggccacctcagaagtgagaggtgtgttat

SEQ ID NO: 178083 - DNA, 933 bp, Zea Mays
gccagaacataccaatccatctgcagcaaacttgtagccctttatttcaactataattctgctatagaaactaccctcaatcgagcaatgaatctaactctaaatcgagctctaagttcatcctactttactgctggtgaggattcagacttagggttgcctgacagcccgactttggatctaattatctcaaaatttctcatgacaccaaggcttaatccctatagcaaagttgtactcctacaggagctttacaagttggatatgttgaccctaggcaaattctttgtatttttaaaactatagagctccaaagtcagccttgttcaactgttttcagtcttagccacatgagaggaattgagtggctttttgcaaataagccccttccacatcttttgacttggaaatcctcaaacatgtgaaccatgtgctttggggtgcccctaataccatgatttttgtacttgggtccaaaagtgggcaacatttacatataaccccctagggtttcaatccagggttttctagggatttgtttagggtttttagtacttctagggtttgggtgccacttaagtccattaatggggatatgttaagattatttctcatgagttttgaagttttctctcatttgggctttattgacacccaaagctcagtttagggttaagtaccctaccctagggtttcacccatgaccagtcacatcattacaacttgtttgaattcttttctagtaaatgcactctaagtataacaatcacatgatatgctaatgctcatgatgttatgcttaaattttagtggcagtaacactaggggtgttacatccttccccccataaaagaatctcgtcccgagattaaaagtcctagggcaagtaatggaaaaggaaatgtatcatatttttatttccttatttttggt

SEQ ID NO: 178084 - DNA, 487 bp, Zea Mays
ggacgatctgaggcacgggctggtgtgttgggtgcgtgactacctagcggagctcacggcatgctcaatttatagggcccgagggcggtggctcgtgaatttggaatggcgcgctggcggccggagagagaggagagcactagcgcaagagatgcgtggctttcaccgtggcctgaccaccggcgatgaccagacatgctagagcgagtcactgcgagaaagtactacgtctaggcacgtggcatctgagcggcagacggctaactccagtgagcttatctgaaccggtcgtgaatcaagcggacacggcggccggggcggaacagggccctaagtccatcctcaatgcgatatttcttaccccgagcagttatctgcactccgttgagcatgaatcgcggcgcctggcgcgaatccgagcatggggtcaccggcggcgaggttcactgaaccagaagatctttttcagtcactgtacaatcagaac

SEQ ID NO: 178085 - DNA, 294 bp, Zea Mays
gatttatgtaccctgactaccgctacccgccacgggggcagaagagaaagagtggaacttctgggaaggatgttgcttcagccgcttcaagcgagcccgcgccgaagaggaaaaaggtgaaggttcttactcaccgaccgcgctacattgaaccggccacagtgcctaaatttggcggtgaaacctcttcggctactgaagccaaaggacatgctcttacgcagaggattgaagagccggctgcaatgccgaaggctgacaaaattgaagaaccgagaaccaatgagacaaaaa

SEQ ID NO: 178086 - DNA, 394 bp, Zea Mays
gctaagaattatactaataaagttttcccccttagaaagatgccgccacgcacaaggctaacggcgcgcaagtcaactggaccaatcggtgtgccccggcatcaactggcccctcgacatgaaaacagtagcagtgggagtaatgaccccataggagatcttgaagcccgagtaagtcgacttcaagcggcgctgcaacacaggaccgatgcttgggtcgcggacggagatagaataaatgaactaagaagggacatccgtcacctgcaggatcagcttgctgatcgggacttagcactcgactgggcagtacagtcccgtttgttggcatgtgctaaggaagcaagggctcaggctcgaattaaggaacttagctcaactgtcgacgacctgc

SEQ ID NO: 178087 - DNA, 427 bp, Zea Mays
ggttgctgctagatctttttgcgtcttcggcgcctccactcctgttgaagggcttagaatttctaatgttttcgtcccttcggttctcggttcctcaattttgccagctttcggcattgcagccggctcttcaatcctctgtgtaagagcaggttctttggcttcagtagtcgaagaggtctcaccgccaaattcaggcactgtggtcggttcaatgtagcgcgattggtgagtaagaatctttacctttttcctcttcggcgcgggctcgcttggagcggctgaagcagcagccttctcagaagttgcaccctttcttttttgcccccgcggcgggtaccgatagtcagggtacacaaatccaatagcgtcaaaaaccctatttagtcttttcttttttcggctcccgaaggccgcggataatgca

SEQ ID NO: 178088 - DNA, 1083 bp, Zea Mays
aaaaatcatgaaactatttttagtaaatactatagaaaattagaaacctagcacaattggtttggtatttttatcatttttctacatttttctacaatttctttagctctggcagaaaaagaaaaagaaaaagataggaatagtgctggaccgcaaccggcccaagtcggcccactactggagaaaagtgcccccgcgcgcgcccacgctggcagatttgcatagaggcccccgcttgcctggataactcgttaagagccctcagccactattcatcgtctcactgacaatcacacataggtccctcgacttttgtttcttctccaatcagacccatggccacggcgcgctcgccgtcgatcaccccgcggctcgtactagccatgaccggcggcgactgtccaaattagctacggggtgagcattaccgacccaaggcgactcaagaacagccttcaattttggtttgtacacttagagaacgtcctacccacgcgcacggcggaaaccgtgacgtcgagcccgcgttcccattcaatcacgcccgaattggtcaaatggctgctacgatgagcttcacgggtatacagagctgctaaaacaacacttgagaagtgcagagccataccggagtagtccggccatggagcgcggagaagttgtgctcgctggtgacagaaaagggggaaaatggcgccgcgacggttctgggtggaattgggaggtgagattggggctacacggccgtaaggaactatagtttcactgtgcactaccaattttgggagaggtggagtggattccacgaatttgtacttcaactgagctcacaggtggagatgtgaatacctcgccgtggtccatggcgctatttatagccacggcggtccggctaacgatcaacgaccgcggaaggctttgctcacgcatggcaaccacatatagaagaggtagagtaagggaggagcaaggcatggatgacaccgcggtggaattgaccgagccacggcggccacaggtgaataactccggacatgcccggctgaactcgcgagatggtgccacgttcgaagctatcctccc

SEQ ID NO: 178089 - DNA, 541 bp, Zea Mays
ccacttggtgaaatattcaacgacaacgaaggtgaattttaagttgccatgcgctgttggcagtggtccaacgacgtctagtccccaacgctgtagtggccaggtatgtgcaatgagctttatgagctgcgaaggggcgcccgttcaaggtgataacttttggcatgctttgcacgaacgagtcacctggttggccgcgcacacaattgctagacagtagaaaccttggcatatgaccttggcagcgagggctcttggtctcgaatgtgatccgcatatacccttgtggactttgcggagaagttctatgccttcggcttcagttatgcattttaacatgggttgacttatccccttcttgtagagttgtccgtcgactatagcgaagtctctgcttctgtgttttaaccttttagcttcgctttggtcggagggatggtaatgaccttggagataaagggtgatggatgaccgccagtctttggccattattagatttactatcttgtgctcatcggcatcttgtgttatttgtagaccc

SEQ ID NO: 178090 - DNA, 574 bp, Zea Mays
gcccatgctgcgacagttctaagacctagaggccgtgtggatccgtgcgatggcgaggtcggcgaggaaggtcgcgccccacctcgtaccctctttcgcagcagctacacgtgggaccgcacgaaagcagggcccaccatagcagcgacagagcgactcccacgcggggatgaaggtgcaggtggacgaagctcaattgtggatttggggtggaccggtggggtggacgctgggccaggcagctgggtgcgaatgtcgcctttcactagaggggtcaccacgcccatgcccccgcgtggcaacaaatggggagctgtcatccgtgtccacgcccacaccaggctgctggatccgtcatccgtgtccccacacactttttacacggaatcctaaacacctggggcaagatcccaatggattttagcttccaatatcatcatgactcgtcgttgaacaagaagttcatctaaatttcgtagttgtctcgctaacgagggagagtgcccaaaccgccgctccaatgccacggggtccgggcatccagctctgccaccacaatcgccagctcaaccag

SEQ ID NO: 178091 - DNA, 773 bp, Zea Mays
caaagaggatcggccgcgcgcggccacgagggtcacatgacttgggagggaggcgcaccgcatggggagggttgagggtatagatgtccaaatggtacgggtcacccgttagcccgaggcccaacacgattttgcccggtaccaacctgacccgttattatccatgctcggaccggaccgtgtttgagccgccaatccggcatgtcgtgttttgcatgacccgacccgatcaaaaggccggcacggacaccgaccgcatgtccatcgaataacccccctcgcccggcacccgaccccacgggcccactctctagaaccctatgtggctactccctgtcccggctccctctccgcctccgtccccaaatctgaaatcctctccgtcctgtcaccgactcgacgatcctccctcgtcggtaagtcacgcggttctagaatggtaagctcagtttggacatcaatactcggtgatggccggtaagctttgagccttcgtcgacgctctaagcctagccctgtctataatcctcccctgattctttgctcccctcctcggctgctacctcctaccatctgttattccttatcctcatcgccatcggcgactccagtgcttcagttgtgtttggtaagtccctagatgtttgttctttagatcgggtgatgtttctttggttctggattctggtgaatctagtggagatgcttgtcgatctggtgatgttattagtataaactccagtgtcgcagccgtcgaggagtcggtctcgcca

SEQ ID NO: 178092 - DNA, 447 bp, Zea Mays
gtcgactgtgagctcggacgggactccgaatcggcaaacaatgttttgccagaagaacttctgggtagtcttcgacgttattgtggatactaccctggcttcgatccacttggtaaaatattcgatggcgacgaaggtgaacttgaggttcccttgagctgtaggtagtggcccgagaatgtccagcccccaacgttgaagtggccatgtgtgggcaatcagcttggtgaactgcgaagggttgcccgagcggggagaaaacttctggcaagcttcgcacgacctcgtgacttgattcgcggtgtagattatagcaggccagtaaaatccttgacggatcaccttggcagcgagggccctaggccctgagtgagagccacaagttccgctgtggacttcgcgcaggatctggatgccttcggttttggtgacgcatttaagcatggg

SEQ ID NO: 178093 - DNA, 314 bp, Zea Mays
ttaaagcaatgggggttggggaattcggtgcttgtgttacataccggtgatgaagaaaggtggtgtgaagtatggagaacttgaaagctcgctcttcaccttaactttgttggcatgtcctaatttagaagttagcatatccattgtcatggttgtcattgtgtttgcggactcatgtcaagatacttaggcagagcatggtgctaacagtacgagtaaagtcgactgtggttgatgggattttttggggtagggcaacattactgtccccctccctctcatttattggtgtatgctgttgaaaggatggccat

SEQ ID NO: 178094 - DNA, 816 bp, Zea Mays
tcaaatcatggaaatgtcacatagcaatgtgaacacaggatggcagggggaaaactcggcaacccttcgataaccccaggagctaaataaaaccaaaagtcccaccaattgccccatttattcctagcacagggaacaatctcgacaacttcagccgaggtcttcccagtcctcggcgtgaaagtgcatgatccaaattgggctatcttatcacctatttttctcttctgccaatgcaaacaataattcttagcaaagacttccacagatggctacccatcgtatgaggagatggcccagacatacttcttaagcgccaccactgcatttggtgtcaactaatgaacctgtacctcaaacttccgcaaaacttctactactaatcgatgcgttgggaggcgaagaccagcaacaaaaaaggcttcaaaaacaaccaattcccccctccggctcagggacctcttctgcccctggagcccgttcgacaccgttctcgaaatagcctagccgctgcatctctagcacatggcccgaaaaaatccttgaggtcctgacctcgacggtgtggccgggctgcagttcaagcatcgccaaatcactcaacatctcctcagacgacggtgtggcccgcgacgcgctcgcagcagacgaagaagatgatgacattgtcacgtaccgtcagcggcggcgtgcggtttgcttgatacgagccagatcaccggtgaagaaggagcaaggagggcaggcgagcggttgtcaatgctagggtttttcctgcgcgagctcgagcaggcaaaagcctcagtcgaggccagg

SEQ ID NO: 178095 - DNA, 618 bp, Zea Mays
aactttgcgaattcaggtattctggtcccttgtgggtatgggagccggtcaagctggctatcataaggtctccgatatgactgccccccggggactatactaactccaagcttatctcggaacgccccagctatttcctcccttactatatcaatggcaaccggtgggagaccaccggctctttgatccaatatgggtgagtttgtttggatgttggtatgttgttttcctccccattggtttgggttttgtagcgcgttaatgcatgccccatgaggttcataggactggccattcctttctggccttctaggggccggaaagtactcactctcatgggtttgatagattatattatggtgctgatgtgtcatatggtgagatggggagtctagctgggacggatacggagttggatatccatcctcctttaaaaactctgtgccggaccgtccggttaaatacgcggaccatccagccccgtgcgcggactgtctggccatgtggccggaccgtccgacattgtattcgggttgtctggcgccatacgcagatggtccgaatgggttatctagggtttgcacggcatgtggcggcttgggtgcaggtctcggtaat

SEQ ID NO: 178096 - DNA, 272 bp, Zea Mays
atttgtagagcattatagagaacacttgtatcatgcatggaaccaggttgaccaatagacgcaaaggtgaaacgcatgtcaaaatcaacaactgccatcacattttgtgttgctttaccaaatcttcctaggtacctgagaaaatcttgtggaggtggatttgcacaaatatgagtcccatcaatggctccaatgcaatctttaaagtgtgcccacatccttggatcatttcttatcctactatgcacattacgaaagtttggatctttagg

SEQ ID NO: 178097 - DNA, 588 bp, Zea Mays
tagaggacacatggatggccaggtggccattactcagctagatagccaagtcaagtggctagttggctactctctctcctccatcttccatcgaatggtccacaagccttcattgaggtcagcttgatagttaattgctacaaccatcagattagacttgtgtttctcccttagacattggatcaaggtgccttagatttctgactttacctatctatgtgctagattggtgatgtggcggtcttccagccctttgacatgccatccgtgtggctacacatacaagttgcattaggtgcatcgtgacaagcgtgaaggaccgaggtggagtgtgtgtgccttagccaagtggttgagcaatcttcgaggtggatgggtagccaatggcatggtcaattgaccatggttcctaaatgacttaaccatttccactcctgcctagccattttcactccttttgcattataacctgcaatcaaatattccaaacaaaacttgtgaaaatcaattagtaataatagtaatcactttgtgcatgaaatcactctcattttatgataattgatggccaaaatacgaaataacgac

SEQ ID NO: 178098 - DNA, 983 bp, Zea Mays
aaatcagtgtgattggctcaactttggagctttgcatcttttaaattatagggtttttgccctaggtcaccacatcaaaattatagcccaatcataggagaacaactttgcttaagagtgtgagcatagttgttaagaaaatactgggagataattgagcctgaagttggactgtcagactgcttgaaatctgaaattcagattaacagtgggatgacatgaacttagggcttgattttaagcaagatccagtgactttttgtgggagcacattgtagcaaagttgtagctggattgtagctctacaattttgctgcagagcatggagcatgtttccatataagtttgagagaaaatcaagctcaaaaatggtctgtcagactgactgaaccccattcgcgatggtacagtgtcccaaacggatcagactgccagcgtcggatcctcaccaccggcgacctctctgcgcaaagattcacgctgccgccgttgcgattcacgtcgtcagtaactagataagtctgccacgtagtagctcgacggcaggggatagctccggtgactcaccatcctagcccccttgctctgcggcttgagcagataagctcgccggtgaaccgtcgtcgcatggccttacgccgcgtgtccgagccttgccaccgcactgccacgattcactttagcgccccgttgatcgccggaatagctgccatggcgtggaacacgtatttactgcgccagggttcttcttcatctccggccgccagcgtaatctgctcaaattgctcgtcaccgctaccgctccctataaattgagtcctgtgttagcttcgcagcatcatcacacaccaccacaccccgtattgctcacagccgatcaccagcaagcccaaattttgaacttcccccaatttcggtcttcgccgccgtgaaacacaccccgtcgtggtcagcccaactcaggtcagctcttcccctctgct

SEQ ID NO: 178099 - DNA, 448 bp, Zea Mays
cagcagcagatggagcacccccattggggtcagcagcagatggagcacacccattggggtcagcagcaggtggagcacccccattgaagtcagcatcagtaaattcaggaacaggcacttcttcagcagcaggaaccgaaggaccaacatcccgatccaaactagatactcgccggagacgtctctttttccttttctgctcgtcagcaggaggattaagttgattggctcaggaagggcgtcttgggcgaacgttgacaggcctctgaacatccaaggttgtatcagtttctgggggaggcgccaccaccaacgtcccagcaggagcagcatcagaagagtcctcagccagcaaatcaagcatagcacttatttctgcgtcactaggatccaaaggtacctcaaagtggacttgccgttcatcatcaggaatttccccgaacgaggc

SEQ ID NO: 178100 - DNA, 427 bp, Zea Mays
gtcaactgcttggacgatatgattacaccccgcggtcacgtcaagttactactcaagggcagtttgctaaacgctcagcgtaccaagccgtcccttggttacacccattggggaggggacgtccaggaattttcaatagattttcccaaacagtcacatccatacagtatacgcaataaatgtatcaagacagaagaaagatatcgatggagatcggaggaaagccaaatatagctactgaagtacaagtctaatcaacagaagcattgaagcacaaagcgaaatgaagaccagccaagagccatctaccagacgtccaatctatcgccgatcaaataaatttcaaacctaacaggacatgggtagatcgcgctactgatttctaaagaaggaattgaagacaacaggctgatctctaaaagcataa

SEQ ID NO: 178101 - DNA, 370 bp, Zea Mays
ctctccctcagttctcctctccctctgttctggtgagcagaggctcccacttctcccttttgtgcaaaaactccaaatcctgagaaatctggtgaatccctgttgtggtttgtgtgtctctgtgtgtattgagtatccctgcaggttcttagctccttcgggagggttttcccacctcaaatagccgtttcaccgaaaacctaattctccgcacgccacgtgctcggtgaaatgcccaaaccagccaaaaatgctccaattgaacccaaatttttcaggcaccttcacaacacttccagtaacctacctgccaaatttcacgccaatccgagattccaggcttaaatttcaccaaatttcccgttttgag

SEQ ID NO: 178102 - DNA, 588 bp, Zea Mays
gtgtgacatagctggatgccactcggccgttaacttcaatgcctctatagattagacttgtgcttggtgaccgcatctagacttcctcccatttcagccgatcttcccctttggtcgtggtatattcattgcatatatttgcaggtctcaccgctttagaaaatcttagagaatctgggcgggacacccaatgggtgtgcccaacgggtgtctgcccagtaaaagatgtccatcgtgtagtcctgaaatagtaacttgatacgacagagaggtgtaatactccacttgagcggttgactttgattccatccggtgtcgtgttatgcgaagcggcgccagacgcctaactcattttaggaggtttgaatcattattgaattcttgtgactgttcggtgagcgggtaggaagcgaacggtcatctcccggccactttaaatagcccgctcgcctaggctactctccccacttgttctcgttcattcgcgttcttcttcttccctgcttcttctccttcggagtgagccatggccagaggaaaaaatggcaagaaagggtgccaccccaccgatgggaagcacaagcgccc

SEQ ID NO: 178103 - DNA, 281 bp, Zea Mays
accgttaaacactaaggcccccttcgggtacttcagttctcgggcatagtgtttagcttcaaaaatttcttcttcggataatctctttcccgaagcatgtcaaatgatataatcaagatcctcggagagtgcttcaggggcaagggattcgacctctttggccgcactcttctcaaaacctatattaatatctggagttattccttcggctttctgctcggtggcggcaagcttcgtctcagtaggcactgtgggttctgcctcggtttcagcctgggtta

SEQ ID NO: 178104 - DNA, 706 bp, Zea Mays
cctcttgtataatttctggcccaaagaactgcctttcaccagtttgatcccaatatagaggagtcctgcattttctgccatatagagcttcaaacggggacatcttcaaactagcctgatagctgttaatgtaggagaactttgcatatggtagactcttgtcccaactgccaccgtgtttaagagcacatgctcttaacatatcttccagtacttggttggttctctcggtttgcccatcagtttgaggatggtaggccgagatgaagttaaatcttgtatccaagcactcatgcaacttttgccaaaaccaagaagtaaactgagatcctcggtctgacacgatcttcttaggcaccccgtgtagagaaactatccatgccatgtacaactctgctagcctggctcttgaatatgtggtcttcactaggataaagtgggctactttagttagcctgtccataatcacccatatagagtcatacccagtagatgtgcggggtagacctacaatgaagtccatgccaatctcttcccacttccactcaggtatcttaagcgggtgcagcaaaccggcaggtctatgatgttcagctttcaccctctagcaaacatcacacaatgctacatgtgaagcaacatccttctttagtccataccaccaatacttctgcttcaagtcttggtacatcttggtactgcccgg

SEQ ID NO: 178105 - DNA, 659 bp, Zea Mays
aatgagtatggggtgatttggttgtgtgacttttgcaaagtttaaactgatggactatatagtggtaagagcataactcttttctattatataaatatatgtaactttctatctttaacatatactactttatatctaactttctatctttaacgtacataccattctatatttaacgcaagttttttattattattattttcctagccggtcccccctcccctcatcacatgtgcttccgcgaaacaacgctctgaattcaacagtgcctaaattaagtgacacaaacctaaactttcatatgactactatatagcatgtgttacacacgatcccgaggagatgatcaatggtggctgtggcgcatgtgaggagagggggaagggaagggatgagggatgattcaaataaagtagttcatagggaagggagatgagttgtccaactatctagaccgctgattttcatagtgtgttaagtttgagtacaatatgttttgtgaatttagtgggataatgagtatggggtgatttggttgtgtgacttttgcaaagtttgaactgatggattatatagtggtaagagcataactcttttctattatataaataaatgtaactttctatctttaacgtatacaactttatatctaactttct

SEQ ID NO: 178106 - DNA, 329 bp, Zea Mays
ccttggggacgttcatggcaatgagaaggtaggccgggatggctgaaagcacaaagcgcaccatagctgtcctgccaccaagactaagcaaccgagccttccaattaggaaggtggtcggcaactttctcgacccaaaccatgagatcattctttctgagcttcttgtctgaaattggcagacccaaataggtgcaagggaaccctaatctgaaccttttaatcaccgatcaccagttaggattgaatatcccaaagcggtacggtgaaaacctaatctcagccgtcggctgagaatctgatggtcccctatcctcctccccaacactg

SEQ ID NO: 178107 - DNA, 359 bp, Zea Mays
cacacataataccattcattaggtgatttatcaaaaaggcagagttccatgaaagcatttatgtgcattttcccactaaaggaatgcctcaatttcaccaaacaacactatcattacaaacaacaccggacataacccatcggctacaacaattgaaatatcactcatccatcgcatcaccaatacgaccccacattgcatacatattcactgacgcatctctcacataaatctacaccttaaacctaattctcacatcaacacgatgtttgcttcccgaacactaatacgtccatacaaccacatacaactgaaccctttcatcatacatctcatgcacatcacaaaaataactccta

SEQ ID NO: 178108 - DNA, 1314 bp, Zea Mays
aaggaattgggtaaaaccttagaggatccaatgagcctcgtagcagtcgagcgtgacatcggagttgagcttgtgcttcaagatccactcgttagtgattgcatgtgtaggatgaagaacgagggtccaggtgttgttagcgaccaaagcatggaaatcctctttcatggtgcggtgccagtgtgagtcaccaagggcacataaataggttggggcaccaaatatatggttgtcaacgtgagtaggagcttctgcgggtggaaaccagtcttagcatgtgtctatataccatcgagattgttgatgggaagggcagacactgcatcgggttgtagcagaggtgcatctatgcgtagtacgcgcattgtgcgaggctagttagggtcatctaggttttgtgcggtcggccctattgaagtagtcaacccactgaggtaggggccaatggatcgaatggtggaggtagccgtagtgcccatagcacctaaggtgcgggcaggcggcctaggcatgtttgtcaaaggaggtggccctttaaatgtgtggggaaggatgccatgcataggtgtaggtgatctggtcagagcaattggtgacggtggcctgcaagtatctagcccaactggaggatgggcatattactcggtgggtgtggtatcatgggcctagacatgtagcggtcaaacaacaacttctgtcatagaacacttggaggctggtagggcaccaccttctgatgctatggcggttgcaagggggcactattagggctttaagcgctcactggatagggagcatcgaatctcggtgtgggaactcatccaaaaaatcaaagttatggtgtgttgtcgaggtgaaggcctcaacaaatagaaaataggccccgttgaagacaacatggcgggaaatgatgacactatttgtagtggggtcgagacattgatagcttttgtgatgggatgagtaacctagaaagacacaaaagtagaatgagggaccaacttgtgtggtgctatggagttagtgttgaggtaacatcagcatcgaaacacctaatatgatcgtaagtgagctggtgaccatacagagcaaagtgtgggggtgcaaaatcgtagtgtcttggtgggatgctagttaagaaggtaggtggcggtatggagggcctcaacccagtaaggaggggcaggtgagcttggaataaaaggtattacattatgttatttgtggtgcggagaacacacttagccttgccattttgttaggatgtgtagaggcaagacatgtggaggagtaccacatgagagtggaagaaag

SEQ ID NO: 178109 - DNA, 278 bp, Zea Mays
cttcattatcagacaaaagctagagaagatgggctgcacgagaatttcggctgctacaattttgcttatcgcaaagatgcgaagtctccagttattagctatcgtaccaaatggcccaccggctggaagaccgagtggttttatgttaaggttgacgagaagaaggagaagctggttcagagcccattggagttaatctttggagaaactaggccctagtgcaacatgttgccggaatcaccatgccaaattaccttggctaaatttcgagttgtttc

SEQ ID NO: 178110 - DNA, 363 bp, Zea Mays
ggtgactgagaatcctttagccttagaggtggctgctgcagagaacccggtccccaaggatggtgctagcggttacccagcccccgagggtgttgccgataatgatccggctcgactgggcagcgcgagctacaacccagcccccgagggtgctgtcggtggtgatccggctccgatgggcaatgtgggctacgacccagcccccgagggtgtccgagcgggctccccttctcatacctccatggatgtccacgtcgggtcttctcctccacattctgattatatggcagcaacacgtgcttcaaatcaggaagtcaccttagagaccgacgcacctgacgctagagttttgattcctgctgg

SEQ ID NO: 178111 - DNA, 387 bp, Zea Mays
ctgagtctgactcgtcagtcgtgactaggtctgccggtctgtagcataaactcctccagactagtacgtggtggtccacgcggatggatgcgaatcgtcgtcctgcatgtacacggaagacataccgaacccccggtagtgcacgatctgcaactcaacaggtcaaccccatgcacacgcagtgaagtgcgtatatatacggacctggttttcctcctcctacgtaccaaaggaaaccatagcactgcttccccaagcctcggctaactgcacgtacagcccgttcctaacaaataacaacagcaagctttgtttcatcagctgatcaattaatcgatctcatcctcttccagccacgctaatgatggcagccagcatctcttccag

SEQ ID NO: 178112 - DNA, 579 bp, Zea Mays
cagaaattaataaatttcagctcctatacaattcaagaatcgccgcgttctagagacttgaattatcctaacacttcaccatttgttagagttaaatcaataaaggaggactaacaagtagactcactaatttttatataagttaattcacacgcgagaactaacatacacatttaattaacgcattcaccacacgaacacagtttatcgccgcacactagtttctaacatgcttttcacataactcgtaattcaactattcactaacaataaatcatgcacgacaacttccacagcaaccgatttatttatttggaacaccgcctgcctagcgtaccactagttcccacattttgatttaagctaaaaaatacagcctttattcgattatacaacaacgacctaagcgtcacgttacccaaggcatacatccttcctcattgcgagtataaccatatcacggcatatacccgcacatacgtgccccaggttacgcacaaggcatcaacaacatagtgactctaaccagattaatcatactcctcattcgcctcgactatcccaattatcgatcacatg

SEQ ID NO: 178113 - DNA, 1975 bp, Zea Mays
ctttccaaactaattttgctctaatttccactcaccacgttgtcatcatctgtctcaataagagcaactacttcctatatggtcagtccaactctttcattttgttttgagcgtaaaggtgatgggttatgttagtgcacctagatacgggtaccctctaccctatagcacatatgaccagtatggagtacatgccaaggtcctcaccaccaatggtgtgttatagtaagaagacccagttacgaggagaatagcgtgtggtcaggacctaagccacatgtccatgtgggaggtccccctgcggatgcccccatcaaaccgattgtcaggtctagttgtggcacatgtcgctggcgccctaccagagccaacagcccccaggaggctttgtgcgtccacctgctctgccgaccacaactgggtctagatgcgccacgtgccctcaggtcttcggcttccctgaggagctctgggcacaccacgtgtctggcctcccacgccgtggttggtcaagtagtaggtggagtcggaaagtttctgtgcctatatagggcaggcataattgcgtcccacaacctgcaccacattggttgtcaagcccttacaccataggtatggcaccagtacaccactatgggtacacgcatggacacaaccaccataactagtgattacatccaccatgacgtgtaggcgacaatgccataggactaagatgaacttacaccttctatagcaacagtaggcgaggtatgtctaacaggatggtaccacataacttgtgatactctcttccttggactataaaagggataggggtacccctctataagaggggttcaaacgtccaaacccatccccaaaccaaattcaagccaacaactcaaagacaagatcaaactgggcacaccagattcacacaactaaggactcaccattttttgctttcgagcaaaacaataagccaacatagagaatgttgggttttacgctacgacgacctaaacctctctcaatctagtgtcccttgttgtcgggggaatgaccaccggaccatgggacccttcggtcagtgagcgcgctgaggaaagagcccctgatcggtggggcctgttagtcagccgcaagaggcaggcacgctagccctggaaggactatcccccagtcaaaccccatggcaccgagactagggtagggtggtggagcctgacaagggaggatgggcgtgtcagaagggaaccactcgagtggatcccgcgcccggccgcagactgacctgccataaatgactgaccgcgttaaccacacctggcaccgagctacagtgtgggtgtcgatccgcttccacctcatgacctacggacccctcaggctgcataacactcatgacctacgagcccccgtactatggcgcattaatggcccacgcgcctctcagcctacgacgcacttatggtctatcgagactagtcttgagtgcgcaaacctccgacaggacactaaagaatgggccgcgtagagctctagactacgaaagccaagggtcggcgtagcccaaatgatggcgcacgggaccaatgtcacccccacgtcacccaccacaataaatacacgacatccaggcagccccgagccccacgagtacgcgtggcctcacccaaggtaaaacactagttttacccctgtcttatggctccttcctagacaagccacagctggtcgacccctctccaggccagctggcctataaaagagaaagggtcaccttagggcaggagaaagggtcaccttagggtagggggatcaagagggattggacttggagacaactgaacacctccagacagagacgaacccataaggacgaacaggaggaggagcgtcgatgaggaccaggaggccgaagcctcgccaagacaagacttagctatgactccaccttgcagcttctaagctccacttccaccctaataag

SEQ ID NO: 178114 - DNA, 651 bp, Zea Mays
atcatcaaggtttaacaatatagcaccaacgatgttatcatataacgacaccaggggtgggtacattactatcaataatatgtatcatgtatacatagatcaagcttcatgaagatgaaactgagcaaaaggtcccatggtctcggccacgagcccaagaactcaaaaataggacagggaggagcccacaaccagggtgattctagaagcgcggatatgacaaagatatagataaagagataacacagagttggactcataatggttatgctttggacaagggaggtattaatgtgtttcaactaccttaaccgactttagctgcttcaaccaatagtcatgttgcatgactctcaaattgcaagagtcatgcaatgcttagggtgctatgccctatagttgtaagagtgagagataagaagagagggagagaaggatgcctctaagtgttggtgtgcggttccatcttcttttcctccactactcggcacaatttgccacactcatcaatgggcactctctctatcccatagacgcccttaaccaatcatagtttccccatccctccattctggcatgacaccatggacgctaccacccataaccaatcatagttgctcacaaatcttgagctagaaggatatggacaac

SEQ ID NO: 178115 - DNA, 702 bp, Zea Mays
gcgaaaggagaggtaggcaaacaagaccagctaggatgatcaacagaaatgctatgaagttttggattaaggatttatggaaagaaacatgacttgcatatggtttccgcaactagacctaacaacattttttgacacaacaagtgcacaaggaagctttagtcgatttaggggtcaaactatgggaatctacaagttgtgcaggtgtcacttcaagggtaagatacacaagggttagaaaataccaactcaagcatgatttttttagaggtttcgcttgctaaccactaggttggttaaagtggggggggggtcttttcatgagcagaacagagaacatttatttttttgctggttgggggcaaaagggttgaacaaccaaaacatttcctagatagcaagacaagagaagcacataacacaacctagtcaagactatcatgacacacaggataagacattttttttgcagttcatagcaatacaacacattattcacaatttcttattattggaataaggtgagagaagcatgttggtgcaaaagagacaatgatgcggcaatcatgatgcatgctcattctagacgtcttctcagacctaactaatttttcgggtgcttctacagcatccttcctaatagtagtagtagcctttatggcctatataaatagccacctagctacccatctatttcctaag

SEQ ID NO: 178116 - DNA, 557 bp, Zea Mays
gagctccacactgtcgtattggatctagccaccggggtacgcgaggtatcttgcagaaatgaaggaaaaagaacgcagggtccaatccaaagtaatcgatgggccctaaagctgcgtggtaatccaaagtgatcggaccacaccttcaacttcaaataaaattaggaatagcgtttaagtcggaggaagaagccgccagcacattatacacacgcacagcttccaagacaaacaccatcgtaatgactaatcagcaattcactggcacttgagacgccaaatccgctcatagaagtacacatatcaagaggtgactacatcatcactctactgcttctcggcatagccctcatagtggagctagtgcatacggcattttatctggcatcggactgggcccaggtagcactagccaccatgtatgtcaagaaacaatggtacgaaatcagtacatccatctttggagcagtcaccactttccttagcagtcaccactacatccatcgttttcgccgttgtcggacgtctcgttcatctttccggtctttgtcctattc

SEQ ID NO: 178117 - DNA, 651 bp, Zea Mays
aatcttgccctcgagattcagactgggcttgagaaaatgtaagggtattccctcctcaaggagtcctcactctcccaggtagcttactcttctccttctctgctccactgaactttacagagtctcacttctgagttgcgggtctttcggactaccgagtcaagaatctttactggcttttctgggtactaaagatccttctgaatctggattgtctcgtcttcaatgtgattttttggtacttgcaggaacttgcggagctgggacacgtgaaacatattgtggatatccaacatggattctggcaatttaaggcggtatgctgcgggtcctactctaccaatgataggataggggccgatgaaccgcggagctagcttccctttcacttgaaatcttctcactccgtgcatcagggagaccttgaggtagacgaagtctccttcctcaaatctgagttctctccgcctgttgtccgcataactcttctgccgactctgagctataagtaatcttttgcggatcagggaaaccttctcttctgcctctttaacgaaggcaggtccttctagtgccttttcccctacgttggaccacattagaggggtctggcactttcgtccatacaatgtttcaaacggtgacatcttg

SEQ ID NO: 178118 - DNA, 694 bp, Zea Mays
tcagccgatttgactatgatatcatcaatgtagacttccacagtgtttcccaacagctcgtaaaagatcagattcatagccctctgataagtagcaccagcattttttagaccaaatgtcatgacaacctattcaaataaaccaatgaagcctggacatataaaggtcgtttcagacgcttcttcttcgaccatgaaaatctgattatatctggcattaccatcaagaaagctaataattctatttcctgatgcattattgatcaacgtgtcggctatgggcatgggatattcatctttaggagttgttctattcatattgcgaaaatcaatgcatactctgaacttacctgattctttcttctccaccggcacaatattggagacccactcggcgtatctgcaaggtctaacaaaattagcttctatcagctggtgaatttcgtcctttattcgtgggagtaggtctggatgaaatgttctagctttctgcttgaaaggtctgaaatcggacttaataggcagccgatgctctactatctctcggcttaatcctggcatctcagtgtaattccaagcaaagcaatcagaatattctttcaatacatcgatcatttcatctctagaatcagtcttcagggtcttgtttacaaaagtcggccttagagttttaccatctcctatgtcgatctcct

SEQ ID NO: 178119 - DNA, 746 bp, Zea Mays
ctcccccttcttctggtcaccctggcaggcctcccactgctcccgagtgagatgtagcttcccgccaatagtgataggcccagagggagcctgtggttcgtcgccgtcgaccaccttgagacgacctatcgccacttcgatcgtcatcgtggagaggtctagcagagactcgatcgagcgagcgatctgcttgtacttctcagggatgcaacggaagagcttctcaacagctctctcctcatcgtaggtgtcgtcgccgaactgcaccatcttctgcaacagagtgttgaggcggagagcaaagtcatcaacatcctcacctggcttgaaggccaggttctcccactccttgcgaagtgcctgcagtgtggtcttgcgggcacggtcgctgccgatgcgggtcacagcgatggcgtcccaggcctccttggcagtccacttctgggaaagcgaaaactgcatctcggacgggactgcagcaatgagggcatccaacgcccatcgatcctcgtggtagtcaacgtcgccgtaccgaactgcttcccacatttggcgaacctggagccgtaccctcatcaccgcagcccactcgacgtagttggtcttggtgagggtaggccacccaccgccgggaccgatgtccctgacaatggcctgggccatgcggcgaccatggtaccgatccggggagggagagtcgcgccgcctgtagaggccgcgatctccgtcgacccggtcgccaccgc

SEQ ID NO: 178120 - DNA, 553 bp, Zea Mays
cggcctcgcccgagcgacggaggtgcgggacggctcgccaacacacgacgctacgagtctacgactgctattgcgcaacgagcggggaagaatggcgtctgcagtgatccgatgtcggacaacagatgacacttaagggaggcgatagagagggagaaggcctggggttcctcaccttagagcggacgtctggctcgacagagatggtcgcggttggggcgtgcgcggcgagagcttcctgcgtggtcgtggcctccggcgaccagggctaggacgagcacgaatgccgcgacgacgatggggaatctgcgccaggggctgccggtgtgctcgcacagagccttgccgcgcaggggtcgagacagggagtgctgaacctccatggccgctcggtcaatgtgttgattgaggtcggatggggccgagcagtaggaaagcgagacaaggcgaggggaggagagagggaggaagaaggtgctacgcacggcagcgagttggcgatgtgggcgcagggactcggacggttggagaagacgtgccctggcggccagag

SEQ ID NO: 178121 - DNA, 713 bp, Zea Mays
gcgtgctgattttgagtccagcccaatcgaagttagctatgagtcaagagtctgaatgcttttggagaatgaaaactttattgatgatgaaatcctcggatttacaggttacaatgttccttcaagaatgttgaggcctcgctaaggatagaattttctgaggtgttctatgttccacgagttccccacttccgtgtcgtccatctgagtaagctggtatgatgatcccgatcgtatgacctctgatacaatgaacagtccttcccatagtggtgataacttgtgctacccttcccccgtaagaatttggcgaagtatcaagtctcccactgcaaaggaccggtgccgcacaactttatcatgatagcgtctcaaggtctgctggtacctagccgactgaattactgtgttcaatcattcttcctccagcacatcgatgtcttctagcctggttgcttctgctttggctatgctttcgaaagttaaccttggcgccccgaagattaggtcgacgggtagcactgcttctgatccataaaccatgaaaaacggggtatttccatgcagagcccgactgggttgagttctcaggctccaaaccacgtatggcagctctctaatccatttccctgcaagcttttcactcttgtcgaataccttctttctgagtgcttacagtatcattccgttggccctttctacttggccattgg

SEQ ID NO: 178122 - DNA, 609 bp, Zea Mays
aagaaaaagacccctcatatacagtactagaaaaggaagcgccctatcgggcgctagacaccttatgcacgtagagaaataaattaaactatatgttgcattgtatataaacacattttaatgcagccataaaattagacaaagaaaaccataataattatgtaccaataggctttgacgatcatcagggagcagatgaacgaacagtcgatggaagcagatggtagtacaagtcagcagcaagctcggtttaattgtgactctaggcaactccactattaggattaggtttgatgattatttggtctcttctctctttgcttctctgggcgcgggctatagggcgccatagggagcggggcagcgggccacctctgtgtggccataaagcgggcggcggcgggtagcaagggaggcaaggagggaggtgtgcgtcgctgacgtgggcccacctgaaagtggagggaggctggaggggagatcgtgactggtgaggggaaaggtcaagcggaggagagagaaagagaggagcgagcggttttagactcgcagacagggttcacgtggctccgtataagagatatatgtactatcttctgctagtggagc

SEQ ID NO: 178123 - DNA, 301 bp, Zea Mays
ctggccaccactcagaagacctataaattgagcacgccatgagctccgtagggtaattacccatccaaagcaccagtacttgcctccaattgttcaccagagaccacgaattgctcatctcccccaaatcgggtttccgccaccgtgaaaaggtcctcgccgtggctaactcgattcaggtccaatcttgtcctctgctctcttgtttcagcactcttgcatgccactgatgctcctcgacccattcgattaagctagactgccctagatcgccgggaacacccgtgctcatccgttgttt

SEQ ID NO: 178124 - DNA, 365 bp, Zea Mays
gaaattttctgcaggtacactgactaaactctaggaaattactactagttaactccggagtgagtaggtatgccaccgccatagagcgtgcaagccactatatgctgacaagattgtgaggacgaataggacgaacatgcatcatgacatataactttaagttaaaccccctatgtagtagctttagtacgtgtttcgtctaccctgttcatgctacctgtctttgcctttctatgctacctttccctgttgttgaagactggaagccaagtttagtttgtgggcagaataccttacgctgcagccagaaggacgttaagttctcgggttgagttccgtgaggtatttcgggcacatcatatatc

SEQ ID NO: 178125 - DNA, 954 bp, Zea Mays
gctcgcccaaagcgccttcgcctggccagtcatccaactgctcctgccgaggggaagaagaagaaaaagaggaggcttcgacgagtgtcatgtttgaatcaggatgccggcccttctgctcctgctgctgaggaagtgccagtggaactttttactggagcagatcccaatgggtgtgaccctgctgatgctgatcccaatgggtgcaatccagccagagctgaccccaatgggtgtgttgttcatattgttgacgaggatgaggaagaagaggaggaaatccccttaattcggaaaaacagtcggcgctacctggtcagtggggggagtagtgatattccttctccagccttgtctgcactcgttggtctgcaagagttatccatagcaaattttgatcaggctctcgaggatatggttcctgaagatctgctgtccgagccaatagatggtggtatgatggacgtttgcactgacattccggatgtggggttagagttatctcgagcagcgtctcgagcctcatcgaccttagagtgcggtcttcagtgtcaagaagctggtctaggttgctccattcccatggaggtaactaagaatccttcagccttagaagtggttgttgcaaagaacccagtccccaaggatggcgccagcgatttcccagcccccgagggtgttgccggcaatgatccggcctgggtgggtagtgcgagctacaacccagcccctgagggtgctgccggtggtgattcgactccgatgtgcaatgcaggctgcaacccagtccccgagggtgtccgagcgggctcctcttctcatacctccatggatgtccacgtcgggtcttctcctccacattctaattgcatggcagcagcacgtgcttcaaatcaggaagtcgccttagagaccggcacacccaacgctagagttttgattcctgctggtgat

SEQ ID NO: 178126 - DNA, 476 bp, Zea Mays
cggcggcggaactttcccccacccgcacccacactctatctcacggcgaggtgtgctcagggcctgcccggtgctttgtgatgatggacagggaaggggtggtcgtgacccttatacccgaggtcagatcatatcaacctcggctagattcacgcagcacttcgcggcggccggtacggaggttcggtgcgcccaacagaaaggcggacaagggaggaagaggcggttcctgacgcccggggcccaccaggcagagaggctaccacgctggaccaacatgtcagtgccagagcatgacgcgtgcgcgtggagattggttggacgactgacgagtgggccagcacggcagagaaacgcgcgtgtggtttgtgggcgctgtcgtcgcggacccacatgtcagcgccggttggctgttgggctagtgggagagaaaatgtggaggtgggccgaatagaatggaatcagcccatgaagcc

SEQ ID NO: 178127 - DNA, 445 bp, Zea Mays
ttgggacctgtcattagccctgatccaatgacaactgaagcagaattattgaaagaaattttcagactggcaagaaactaggaaaccacatataactttctaattaatattagaaattgtgatgtgaagctccatcatgttatacctataaaacatgcatatttcatgaaggctcagagctctggccttggtttctgttgattcaaagttcaatatgtgtgcagtaacaagacagtacatgagcatgcaaagttgcaaaccatgtcggtgctacacctaccagtccaagcagaggcagaggagcggctgccaaccgtgcggcgcacacggcgtggacagattagctgtgcacgtagctgcaggcggaaggctggacggtagcagggggcaggggcgcagcattctctgcttgcggtggtggacgagcagacgagagcaggggagc

SEQ ID NO: 178128 - DNA, 500 bp, Zea Mays
atattctagtcttcttcatccttcgtagctccattgcctgctgtaggagaccgttcgtcagcaaggttcacggaatgagggggcctaaaaaggttcagctccccatcacgtccttcatttgctgttcccgatgatccggctcctattgcagcaacgtcttgaggcacgtccaggtgcagtcgagcatacaatacatgcacttcttcatgtaatgtattacagtacacttgcaggctttcgagggatgctctaagctctgccacatgagctagagctttcgcttcgcagtcccaagtgaaagagcgcgagttgacggcccaatcaatggtcgtatcccgttccaagatttcgtactgctggagactcactttggctgacaattccgttatacggagactgtcctgctcacgtgccctattcctatgacgtaactctgaccgaagttgctctatccaggcttccaggtctccaatcgggtcattactgccactactacttcc

SEQ ID NO: 178129 - DNA, 833 bp, Zea Mays
agacagccgcaaagagtgtcgtcatgccacttcgaatccttcttcgtcgctgttgtcaacaacctccttgtttctgggacatcaatcaaagccctcgaggcaatcagacaccgaggttcagaaagttcacaatatataggatgaacgtataatcttacttaccagcttaaagaactcaagtgcatcccacgcatcgtagtcacggagatgggcaacagactgatccaggtcgtagttgttctgccggagtatatgcttgttcaggtcagcctgcatgaagcccagaccctccagctcacccatcagcttcccctccatgtggttgacgacctgttcaggcaagggcgttgctggaacaggagcaatactagctgctggagcacacatgtgaacataatcatcaacgacaggcgcagaggagctaacagggagcataggcagaggattgggcagggcaaaggcttcagatgcagtcacaccaccaggtattgaatccagtgaagactcggcagaaacatcagtggcaggaatttgcaccggtgcaactgttgttgggacagagagcatatcaccacgagcaggcctagattcctcaagtttcatggtttcctgaaagcttccagggcatctagggaaagattctgagaacacattgtttgtctcaatataaggtgtgaaaggcttgctgttcgcttctgggattccagggcatccatagaaatgttctgagtaaaaaatgtttgaatcaatatcaagtgtgaggcgcttcagttttgcttgattcacagcagcctgtttgccgccactagattgaataggttgctccacctgcg

SEQ ID NO: 178130 - DNA, 391 bp, Zea Mays
cgcctcctcggtctggtagtgagcagggcgaaccagcatggccatggcaaccgcggcggcggaaaactgaggagcacgaacgcggagaagcgtggaaggctcggaggcgaaagggcggagcagttaggaaagaatgcgaaagcaaaaccactgcgtgcggaaaaccctacttcaagagatggctcctcgcacactccggaaaaatccgcctggcgcatacctagcgcccgagcaactcagtcgctgacagagggacccggacccgcaagtcacgtggctgaggcgctggtctccatgcgcaggaggagcaaaccgccgcgcacgctcccacttcgcctcggggccgctactggaagatattcttaacataggcggggccagcagggcgccc

SEQ ID NO: 178131 - DNA, 500 bp, Zea Mays
ttcaaaatcatgggacaagatgaaagtcctagaaaatcaattaaacctactacataaatgtttaggatcaaattgctgctcattttttggaattcatataagcttgttatttaagtacttatatgagcttttgtagctgtgtgaatgatgtggtacatgatgacctcgaggtggtacatcatgtggatctggaggtccatggcgttgatctggtgaaatttcttcccgaccctcttcaaagatgactttatttttgtttgtggttgatgtcttgactactaatagttttgttgactactaatagttttgtgaggtacacggtggtagatccaatttctatgaattgtgtttcgatttgttggattagttcaccttaatctgcttaagaatactcttggtgtgatatagggtggcacatatattacatggatgtgtgcagtctttcttactagtccaattatgtaggaggctgtctagttctacaggttggtttccatagt

SEQ ID NO: 178132 - DNA, 709 bp, Zea Mays
caaataaaaaacaaagaattaatataaaatggtaggcaaaacacaaaaaatgtctccttgcaggcgcttaaacctaggagctcggtctcttagttagcaggtcaaaccattgagctatgcatgtgttttcgatatatacccagcgctaatatacttaaacgcattagcctccgcattgcccaacacattgggcgccaaaaaacatgtttcgccgtcgtcactaaaacagacgccgctcatcctctatctcccccactcctcttctttctcccccactattttctccaaacctaatcgccgccgtcaggacacgaccgctgtcgacgacctgccccctcgactaggtacctcaccgccgccactaggacacatccaccgtcgacgacctgccccctcgaccaggtacctcaccgccgcccccttacctcttatcgcgtcgatgagctgcgtcgttgccgacttcactcgccgcatcccgctctatctcattgccatccgcatttctctctccccttccacctaacacaccccatccacattgctctcgccaacccctaaaccctaaccatcgctggatttgggtcatcgcagacgaccttgatggtgaacaaaaggaggcacagaagtcagaaaggtccaacccctaaaccctaaccatcgctagatttagtttaattattcattcgttgttctcagagatagtgtaaat

SEQ ID NO: 178133 - DNA, 897 bp, Zea Mays
tcgagtttgtgttaccccctccagtatgaatcaagaatttggttgcttcaaatgaccactgttttgttgatttccatttgcgcgtttgaaagtttgtccatgtgcttgacattgctggcattttagaggtaactgtcgagtgatgtctgaggcttttgctttttcgagtagtgatctggcactttagagataatgcctgacccaagaaaccccatttatactcgtgccgacgtgcctttttgattttcgagccctaacttcactttttcccttcagccgctcctctgcttccctgaaattctgagcccgctcatcccgcccgaaagattgtgatagctcccaagcggaagaggcaaagcaccgctgctgcgatcatcccatccatcgaccccaacagccagctttcgtttgctggtaaccacatgtctattatctccaaatttgaccttctccaccttgttgagattgggggttttgctaccaaaagagctatgttcttggcgaatctgtcgtggtgtcactattccgacagaggacactcacgaatctgttgtttacatcatgtttcttatccatgggcttgctcttcccatctccccttttttccgcggcctccttgatttttacgaattaaatctgacacacttgaaccctaactctattatgcaagttgccattttcgtacatctatgcgaggcttttcttgggattccccctcatttcgaactgtggaagtatctttatcactatcggcccgggatggctggggggcagcatcagcttgtcggcgcaagtttagagcttcaccgggggaggaaagtggagtatcttgatattcccctcaaggacagcattaaaggatggcgtcttgagtggtttatcatggaaaatcattgc

SEQ ID NO: 178134 - DNA, 552 bp, Zea Mays
ctggggatagaaggagcttacactcaacgaatctttcctatgtgcaccagatatggttacaaacacataatagagtgaaataactaatttaccaatcatcagaataaagccatttggggtgtatggtgcaccagtcccatgggcaccggacacgtttggtgcacccacagagattaagtggaaatggttccaattagattctcaactagggctataaataaatggtgtggcaagccttggccagcctcttagagcttccaactaatgtgcacacccctggagagctgatatacacactccactcacttgcatccattagttacacatttgggtaagattacagaggctctagagcatttatatcatccacttgcatctcatggcagcagttgagaatggaggctgatttcgtttattactcttggttattgccatcacttaggcggcttggagttcagggatctttgaagggctaccaacaattgttgtcgcctacgatttggcctaggcattcggttctttgactcgcttcgatttggtcccttgattttt

SEQ ID NO: 178135 - DNA, 562 bp, Zea Mays
gcagcagataagaaaccacgcatacccttttgatctttgtgtgctagatatgttcctactatcaacttttgatcagtagtaattgtcatattctcaagcctttgccacaacattgcatcagggttaacaaaaggcataggcgctggaggtggtggcttcttcagatcatttcgaagttctaccaaagtagcactgagttcatctactacctttgttgtgcgactctttggtttaacattcctcttgggtcggtacaccctctccttgtgggcgcttcaatccagaacttgacgagctatgatcaacactttgagatggatggtgattgggagatggtaaagtgtcagaatcatcacctagatcatgcacaggctgaggatagttggagaagtcactgcacacatcatcattgaagtcactgtcatctccaggatgagtttcattcatgcaggttgtagcatccatagctagagagccatcagcactactgtcaataaacaactcctgcatctcattgaaaaacttgataggcttagaaaggagcctccttgccctatcctgc

SEQ ID NO: 178136 - DNA, 518 bp, Zea Mays
aacgtgacggagtgggtccagctggtctattgaagcttggtcccttgggtggaaacccaaaggatcgagttctctggtgctggtcttgctgctgagctcggaggacttggaatttcctcttgaggtgatcttttcttcttcccttgccctttccacttgtatggctttgtttgagaggtgcgagaagttgaggaaatcttggctagctaggatggtcttgagttctggtctgagcccttttagaaagcgggccatcttcttggcttctgtgctgacgtcatcaggcgcgtagcgagccaattctgtgaatttgtgcacgtactcactgacagatctttcaccttgagttagttcccgaaattcatcttccttgagttgaacgattccttggggcacatggtgctctcagaaagcagtttcaaactctgtccaggtagcatctctgacggcagtgctgaaggtatcccaccatgctagggccatcccggaaagttgatgagcagccaaatgaacacgct

SEQ ID NO: 178137 - DNA, 1906 bp, Zea Mays
ttagcttccagctagatcacaggcacatcaagcctgttgtggatgtgtagtgctgtaccagtacagtgtgtaatggttcttgtatatgcttgtttttttttctttgtctgtgtatttagcagccacgatcaacgaggttggttggtcgcagcagaaagtctttatctccaaataattaactagaaacaagaaagaaagctaaacatgcatagagagtctatatgtacgcgttcagggtccatggactattctatacgtctcccaatcagtacagttgtggcatggaatttctacctccgttttccacttgctgcagcagtcggcaatatgaagtgcatgtatgcatcacttgagagttgacacctcaaactctgccaagaagaaagaaaaaagaacccaagactactgcattgttgattgtcagagatgaaaaattaaaacccatgttccatgtaaatggctcacatgcattgcgactagctaaacctcttatgaaattagaacagggcagggaatcggcgggggggtcaatccaaaggatgcctctgtaatgttctcttggcattgtattcacgtggtcagctgtctccctgtggatcattgctccaccccaattcaattttaaatattagacacggccacatcatgataggttcaatctaacccacataaattaaagggtcactaaacattgcatagcagaagacgacagagtattagtgtagcaaagatgaaggagaaagttgacacgtatgtactgtaagcagtaggtgaggaggagtggctggctacccatgccatgcatgaggccatgacaacagcaagattagggatttgtcgcatgcattagcatcacaacagtggacagtggagtatatgttgtccaccatattagcaggcattcgtgtattaactaggaactaaagttgtagcaggagacaagacaagtatgctatacctacatacatcgaccatatgcatgcagcatgcagtagtagtggtgacatgtgtacaagatagaggggtgacacatgtaccagcagtcggatgaggactccacaacaatctcactatattttacccacacttgttcccaatctacatgacagaacaaattcatgcacgtacaatatcagcttacagtgacgtctctacccgtgcattaatcttaactaatttcctgctactatgaaaatggaaaatcaaacggaacagaagtacagaacaaggtctctgcgacgattgatctttcggacaagacgccttaattgactccctgtctcttacagagcatcggctttctaattttctcaccgaacgcatgaatccatccatgagacggaatggcgtacgacaccacatgatcaagtgacctccatagtccagaccaggaggcaggaattctaaacagaggttgcagccatgcgtgagtgcacatgcgactgctgtcaaaagcaaaccttcccgaggtttgattggtccctaatatggacggatgccatgccattcaagtacaactgcggctgccctgcccagcccaggcccctaccactacaacattaagctctgccgacagtgttagtttcacagcctgtgtaaaagtcttcagatctttccaagtcaaaattcgaacggccaccgagtgctcaccgacatggctatgaccacccacatctacccttttacattagcatccaaagtctcctcgctggaataagcagcgggtgtccttttttttttgaaacacgacaacgtgatccccagctgagcactttagactcagatggaggatccaggatcaactctaccaggatagacctgggcaagtaacaattttcccgtagcatgtgctctgggatcatagtcagaatattccactgccacatgttaagtagctgacgttcaa

SEQ ID NO: 178138 - DNA, 412 bp, Zea Mays
cactggcttttctcggtactggagatccttttgaatctgaattgcctgtgccttgatgtggttttctggtacttgcaggcatttgcagagctgggacacatgaaacacattgtgaatgtctgacatggattctggtagctcaaggcggtatgctacgggtcccactcggctaatgacggggtaggggtcgacgaaacgcggtgctagctttcctttcatttggaaccttttgacaccacgcatcggggagaccttgagataaacgaaatttccttcctcaaatctgagttctcttcgtctgttgtctgtgtaacttttctgtcgactctgagcttcaagtaacctcttgcggatcagggcaactttctcttcggcttctttaacaaagtcgggtccttctagtgtcctttcc

SEQ ID NO: 178139 - DNA, 1306 bp, Zea Mays
aaacatttcaatcaatcaccatcacatggttggtatttattaataggataacttaaaagagtgttcaacatctaacgtgaagtataacttattacatcataactcaaaaacacctaaagcagcctagtgacggatccgggctctccatagcgcagcctcttgcgaggaggagacaacaccatgacggggacctgagcttcgggcggatccagtccttgcagttgggcttccagggctgcaatcctggcgttgggcattctccagctccaagtgcaccctagagagatccagggtggcactgtccaggtcggtgttgagaccggccactacaccagctagggtgttgaggcgatcctcaccagcttcacctgggacgatgctggtctgacttcctccacgcagacgctgaggaagatgcctgaacctcatgttctgcagctactgccggtaggtgtggctgagcgaccacagggtccgacgggcagcgtcgctgaccgaggcagtgtaggtggacagtggtgtcagggactcgtgagcagacagagttctgaatcccctgtcccctgcatccatcaccctgacgtggatgcgagtgatgtaatagcaagcccgaggaggctcgctcactcgccttgtttcgtacagggggcggacgtaggtgcctagcgcgtgcagcacttcttgcagtaggttggggaagtgccctgtctcgaacattgatgtataatgttcgacaataggatcaaaccccatgaagtagtcctgctgggcgtagtcagcttcctcgtggacgtgttcatctccaccttcttcgtcgtcgtcgtcctcgtcatcgtcgtctccggagtcgtcagggtcgttgcctccgggtgcaggtgcttggaaggctggtgcaggcggtgctgacgttgatgacctagctgcgaaggccagggactctgccaacggggtgggcgtcggcagctgctcctctgagctatcctccaggttgactacattctccactcggatgggagggagatccgccggaacttcctcgactaccactgggtagaccgggatctaccgaggctgaggggcgtagctggtgtagatgtgggtagtttggagagtacgaaccatctacaagagaagagtcaactcagttgaaattttaaagaggtaaggctgataaaataagttataagaatgaaattagcaagttttgaataactaggctttccatttctaactaatctaaccgcctagggtcagcatagctttgataccacttctgtcacacccggttctagggggtagaaccgag

SEQ ID NO: 178140 - DNA, 502 bp, Zea Mays
actcagtttacaatgacatcattcatacgcacatctactattgatttctgttaataatccagttccggtaatgcatactagaaaatttctaggactgctgaaagagtatgagctattcagacatccagcgcgactggtgagtctacggcacaaccaccgaatccttacaaatctggggatcgcaccagaacttgaactgaatccttactgttttaggtagaagtagcctgtatacagaacaggtttctccaaaagggaatccttactgttttagttttctgtgcctctcttcgagaccatccatagtcgtaggctcgtagcaacttcgaaaatgaagtgaccagatccgtagttatgtactcaaactatgcataaacttacatgcggctacagcaaagcttcctatacaaaagtcatggatctgaagcgacaaatggagcaagcgacacaatgattatatctccgccactggcatcgccaaagaagtctccaaaagcccgag

SEQ ID NO: 178141 - DNA, 581 bp, Zea Mays
caagtattgtagagaaacaaagagcggagggggtggtacccgattgaaggagcatctcacgcatagagggaagaatgtcaaaaattatccttttattcctccagacataaagacataattccaaattgacatatataagacaaagaaaaaagaagatgtctaggtttaggcagcagctgagggcagatgaggcagcacgaacccattttggtgaatcaaatgacgatgagtatgaggatgaacttcaggcggctctgcatcagtcacgtgtggagcacaaatatagttagagggctggtgcaaggtatggcagaggtggcagatctggatcctctagatagagggtatctcgagggccacttgataggatgatgggaaggagtatggagacaaagagcaatcgacgtcgttcggttttattttttgtccaagatggaatctgtagctcaaatagctccagttcttctaactatccgtctggacaaagacacaatctataacccttatgcatgataatgccaatcgggttagggaccagcaggcgaagtaccaccatcgatcatgtatgagtatggaccccc

SEQ ID NO: 178142 - DNA, 461 bp, Zea Mays
tatgcaggtggtggacatgtatgtggtggacatgcatgtggtgaataatcaaaaggtgttgtccatggtgcccgtggtgtaggtggaactagctgtactaccttttgggctagtttggtcggtcgtgtttctttttcctgtctttctaaagttggtggatgaggtcgctttgttggacgatctataggagtggtcttcttattgacatatttagaaagaagctaatcaaaaataggacaagtactaataatctgactagatgctttggatgtgttttgtttccccgtacctatttctgatcatcgcagcctaaaggtctagtgtcactagtgcctctggtcatccatggaccattcgggcgttgtagtcagaccatccatgtggggtccaaaccatgcatccttaggtcctaggctatttgacgtgcgctggataggtggtcagattgagtatctgatcct

SEQ ID NO: 178143 - DNA, 1327 bp, Zea Mays
tgtaacttcaaatataccatatctccaacctcaaaatgatgttctgtacgacctttatctgcttgagatttcatccgttgttgagcttgaagcaagtgttgttgtaccagctgaaccatcaactcacactattttaaccatggctgaaggtccatatgggtagtggtatctgaaagttttaagcccaaattacgtggagtgtgtccatataaaacctcaaaaggggagcgtccaagtgaggaatgaaaaccggtgttataccaatactctgccactgacaaccaaccggaccacttggacgaacacgcatgaacaaagctgcgaaggaaagtctccaaacattgattgactcgttccgtttgtccgtcggtttgggatgatatgaggaactcatcttcaatgtggtaccagccaaatggaaaagctcctgccaaagcttgtgaaaatgcgatctcagtctgagacaatagcctgaggaagaccatgtagtttgtacaccacatcaatgaagagttgagccaccttcaaagcagaaaatgggtgcaataatggaacgaagtgagcgtacttcgaaaatgtatctactaccaccataatagtgttagcactgccagaccgaggaagaccttcaacaaagttcatactaatcacttcccaagcctgctcaggaactgacaatggttgcaaaagtctaggatatttactacggtctggcttggactgttggcatattgtataagatgtcacatatggttactgctttcattgatggacaggaaaataactgtttgatcctgcaataggtaacaggaaaccccgagtgtcttcctactaggttgtcatgtaaagcctccataacctgaactgaagagctgaattttttcctatccagacacgacccttataacgtataagaccacttttaagagtgtaatgccccgatctgctaggatcgacagatagtgctgtcagcaactgctgagcttgggtatcttgtttgtaggcatccattatctaaagcattcattgaggtgtaaccgaagtcaaaccaaacaattcagatgatggccttcaagacagcgcatctgctgctccattatcagcacccttcttgtagaaaactttatattgcagtcctagtaacttggaaaacaccatttgttgccatggagtagacaatcgttgctccatcaaatgagacagattgcggtggtctgaataaatgacagattcaactgtttcaagatactgacaccacttgtcgacagccatcaatatagccaagtattccttttcgtatgttgataatccttgacttttgagcccc

SEQ ID NO: 178144 - DNA, 508 bp, Zea Mays
gggggatagtatttcccgctaatctcatagtaatgggtactcagggaatagatgtcatcctagggatgaattggctagataagtatcaagcaattatcagttgtgataagaggacaattaagttggtgtccccactaggagaagaagtagtagctgagttagtctcacctgagccaaggaaagtgagtggttattagatggctatcaatagcaaggagccagattcactcgagattatcaaggttgtgtccgaattcccagatgtgtttccgaaagacttaccaggcatgccacctgagcgaaaagtcgagtttgccatagagcttcttcctggcaccgcccccatttctaaaagagcttacagagtatctagaccagagttggttgaactcaagaagcagatcgatgagctgtcagagaaaggttatataaggccaagcacctcgccttgggccgcccctgtcctattcgtggagaagaaagatggcactagaaggatgtgcatcga

SEQ ID NO: 178145 - DNA, 718 bp, Zea Mays
gttaagtatgcgtgccaattgacagtgaacaatctgagtgcctttgaaacctttttattgatgatatttttctcgatttacagaatacatcatcgttccgagagcctctgtgatgtagctacgggtagaacttcctgagatgttctatgttccatgagttcccaatttctgttccgtccatctgagtgaggcgatatgatcccggtcgagtgacttctgctactatgaatggtccttcccatagaggtgacaatttatgccatccctcccccgttagaatttggcggaggacgagatctcccactgcgaaggatcgatgtcgtatggccttatcatgatagcgcctcagagttcgctggtatcgcgctgattgaatcaccgtattcagtcgctcttcttcgagtacgtcaacgtcttccagcctagtagcttcagcttctgctatgttatcaaagattaaccttggtgcctcgaacttgagatcggcaggtagcactgcctccgaaccataaaccataaagaagggggtatttccatgcagagctcgactgggttgagttctcaggctccaaactacatatggcaactctctgatccattttcctgcgaacttttcattcttgtcgaagactttctttctgagtgcttctaatatcatcccgttggctctttctacttgcccattggctcttgggtgcgccaccgaggcatatttgat

SEQ ID NO: 178146 - DNA, 534 bp, Zea Mays
taggtgcgcgttgcaccggttcaatttggatttggagctcgggtggtccggttgggtgtcgcgccagccatggctccgccgtgctggccctgcgccaccgtgttggtgcggccagtggggaagaggttgtgtgcgccgtccgtctcttgatgaacggcgtagattagagaagatcgtaccccttcgcgggatagaatctgggttgtcgatcttactgcggatggttgagattagggattggcgtgggctggcgctgatcgttggatctaggtctgaaggtcgatgttgcgtaccaggttggattgaagaaggatttaatccaagcgctctattttagatccaacggccagtagtattccataccccttcgtccagtcctttttcctaaagagtcctcggactttctggattttgaacccgccgtccgtggtagctgtgcactgagtctgggtgaatttgcgagtgagcccctgatctttttagtaattgacgcgcaaaccaggaaaatagagaaaacagggaaatcaatttaga

SEQ ID NO: 178147 - DNA, 590 bp, Zea Mays
atggagcccagcgcagcctctgcccggcgtgccgccgctgcgcaccgctctggtgagcctcgccggcgagtgaccaccacatccccatggctgagccccccccgacgagccccaaggtgcggccaggaggccatttgtggcgcgcaggcgagcccggccctccccaggcgcagtctccatggccggcgagatttcctgctggccggtttcatctccttccgtccgtctctgtgttcgtctgtggaagaagaaaaggcagttgttcgttcgtgcaaaaaccagggaaaaaaggaaaccgcccgtgggccctacccacatgcatgcacctttgcctccgtgattcctgtgatcgcatgcgaccaagccagtaggcctaggaatggctaccctcatgcagagaaaacgtggtcacgtgttagcatgcctttggcatttttaatttgcgtgatcttctgtgatcacaaccgtgcgaccctctgtgaggcttatttttttcggctaatagaaatgtgttgtatcacagtaatccgtgagatactaaatattcaacatattttgtgtctcgaatccgttttaatccgttccaatca

SEQ ID NO: 178148 - DNA, 449 bp, Zea Mays
atccaacctaatctagattttatctaaactatgatgatctaatcgagagtaagttacttaatgctggtcatactcataattcacttaggcctaaattggtgacttagattgactcggccatacccaacaacttgacctacataacaggttacataacctatccaatccaagcaaacaactaaaccagaacacctactaaactaactgccctacctacatgtcacctacaaatatgtcccaaccgcatgaccctaactcagatggagacacaagataatcaacctcatcaagaaaggataagcaccaactcaagtcttcaaggaccaggctggatcgccagatgaatcatgatccactacccatgatggagtatttccttaccatactctttcttacccaaacctctctatgctttaaagacatctttaaccatacacaatgaggtggat

SEQ ID NO: 178149 - DNA, 1021 bp, Zea Mays
gtcggcctcgagggagtggtagatggcgtcgaggagcgcggcggagaaggacggctggtggccccggctgggccggggcggcggggctcgggcgccgtcgtgcggaggcatggtggaactggcgacgacgtcgggcgtgtggacgtagacttgccgggaggagagagcgcggctgcggctgcggctgcccgaggaagggtggacagttcggtagcgcgttcgtgcgggggtgaacgatcgatcaaggcaaggggtctggggaaatggcgcgcacgcacacgggcacaggcacaggtggaagcgaaatggaggtgggtgggtgattacttttctctgattctctctcccccaacgtccaggccgaggccggggagctttctgcgccgctcatgtgcagggaaagctgagtggggacgtactgcggcggcctcgtagcctctgatagtgtgtgtctacgagacagagatcggtatgtgctataggtatcaggtagcgaggcgacaacgctcccatgacagcgagtgcaatgcaatccatttaccgatgacagcagacagcgctaacattactatgcagtagaaccacaaggttgagagcagaggcagtagtgtggactgagagagaatggccgggccatctcttcggattcggagtaccagtgcaatgaacagatcactttgctttcgaggcatccgaatgatgcggtgccttttgtaacactaggggttcatgattgtgcagcccaatagcataaagagcgccggtagtgctagacgaaagagagccattttattatgagcgtgattgctagcaacaacagatcagaaaaagggaagaaaaaaaagtgcagtgcagagtttacaagaaccaagtgaggcaatcaggcaagtgaacctaggaagtcctaatcgcgatcatcacgccgccatgagcagtataatgtcccggatttgatagctacagtacaggctttggcgctcgatctcggtcacgaagagaggatagtgggtggaggttacct

SEQ ID NO: 178150 - DNA, 1084 bp, Zea Mays
ctcagcagcaggagcagaaggatcagcaccctgatccaaacttgacactcggcgaagatgtctcttcttctttttcttcccctcagcagattggctcggcgaggacgctttgagtgaacaccatcatacctctgaatatccaaagctttgccagcctctgggatgggcgctgcatccaatgtttcagcaggggctgcatcagaggaatcttcagccaacatatccagcatggcacttatctcagcatcacttggattcaaaggtacctcgaaatgaacctgcctctcatcatcagggatttcaccaagtgaggcaaccaaagcacgaacctcttcgggagagggtcgcactctaaggcccaaactgctatcaccagcaggaggattcgacacaaaattggtaaaagccttggaacgaggcagattccaggccgagtatgcaacaggagcaccgatgttcgacaccttgcctctgagtatcatctcgagccggctgaccaaatccactgcaggaattcttctgttggtaacccgggtcgaatcagcgaggcctcgatacagataagtcgggtatgctctgtcctttaatggctgaatgttcttgaaaatgaaatcggcgaccacaacttctgcagtcagacccctctctttcaacagtccaacctcagcaagcagaacccctgcctcagccacctccaggtctgtgggggactcggtctagctcgaagtacgaacatctgactgtctccctggccgtggggggagggaattcccgtggttctccatgataaaccactccaggcgccatcctttgatgctgtccttgagtgggatgtcgaggtagtcggccttcctcccacggcgcatctccaaactcgtgcccccacaagctggtgctaccctccagccatcccaggccggcagtggtacaagtacttccataggccgaagtgtggcagaataccaaggaaagcttcgcacaagtgaacaaagacggaaacttgcagaatggaattgggattcaggtgggtcagattcaagtgatagaattcaaggagaccgcggaagaaaggggaaatggaaag

SEQ ID NO: 178151 - DNA, 555 bp, Zea Mays
ccaaaacgcaagcgcattacatccatgcaaaagtctacaccaagaaactatccgcgcacagaccaactacaggcgcagccggaccaacataataaatgtggcagaccaagcgtgcaacgcccctatggacatagctggatgcgcgaaggcgcacagcctcatcatacaaactatagtaacacacgtacagcgagggcatcacgccttacattggttcaactttcggaatgattcccatctccctatagttaaatagcattatcctaagctcctcaccctcaaaaagacttcgcaactccccctcacctacactcgccccagccggcgaggacaacaattcctgcttgccagccctgcccacacgaagccgaccgccgtccacttcacccactctacgcttcgccaccgcccttcgccgcctacgcccagcactcggaccaggcacaacttcagcatccgcaacacgcggggaagcctctgccgcatccacatccaaggccgcaaagtaatccaagtcctcatccgaagactcttccgtccactcaatcgaactcc

SEQ ID NO: 178152 - DNA, 539 bp, Zea Mays
atgaataaaacaatacatagataaaataaaatcttacatgttatgctgggatttttgtttttgccttaggattgaagtggaattccagcttagactaaaaagagatttggattttgaaataaaatctaaaaaaactgaaattagaaatgaaaatagcaataagaaaaacaataaaaaaagaaggaaagaagataacctggccggcccatcaacacttgaagtcgaagcccatgcctcccacgtcctcttcttatctttttcctttattttatttctctagccgctaatgccaatggtcatgacgagacatcgtcgtttatttctcatgtgatattgccgcctagaacccaccgctcagcatcaccatcgcgcgcacatcaccgactttgcgggctcctgcggcgacggacttcatccttgcatatgtagcttttcccgtgtatgacgggtgggccacattgtagctgtgtttttcccttcggacaatcggatctcaacgaaatcgcgtgcactgcgccgattgttgctgccaactatgt

SEQ ID NO: 178153 - DNA, 316 bp, Zea Mays
atcggacagaagcgagcatcacagcagtagttgccctcgttccgttaccgtcgtaattcctccgcacccgacccgtttcgtgttcagcagacaccccactgctccccgtcgcctccgcatctcggggaccttgcacctcgctagcgcatccggcgacttcccagaagctgtagcggccgcgccgggcactagtaccggcgcggagcccatcactttccgcctacctcgccgccgccgcttcggccggcggccatggcgaactacctcgcgcagttccagaccatcaagtcctcctgcgaccgcatcgtcatcgccg

SEQ ID NO: 178154 - DNA, 517 bp, Zea Mays
acctcatactacatcggctcaaccttcgggatgatgcccgcttccctataattgaacaacattattttcaattcctcaccctcaaaaagattccacagatccacctcaccaatgctcgtcccaatcgacaaagacaatagctctcgtttaccaaaccggtctactcgaagactgtcccgctccatccccatccgacggcgcctaccactccgtgaaacctcgcccacactatgcttcgacaccaccctttgtcgtcggcacttggtcctcgcactaggaagaccagccacctcgccaacctccacctgtggcgaggattccgccgtgtccacatctaacgcagcaaaataatccaagtcttcatccgaagactcttcggtccaggaaaacgtactcccagactcagcatcatacaagaaacacccagatctagaaccagataaattgtcattggcaggcactacggttgcggccgccacaaaattagtatcgtcagcagcggttgcttgcgcaggcc

SEQ ID NO: 178155 - DNA, 590 bp, Zea Mays
gagaggtccaggaccataaattcataatgcaggtacgtatgttgtacatacttgtagttgcctcacccttttttactggccactcatacgtatgttgaagtaggaggagatcaaacatgtcttgaagattattgaaccagagaatgttgtccaaattgtaacagataatggttccaactttaagaaggtttgtaagatgctaagcagagaagccacatagtacgagcatatagtatggcaaccatatttagcacataccattaatctgatgctaaaggacatttgggaagtgggcacatcatgaagcgatgattcaaagcgcccaaaggatctatagttggatgtacaactcatcaagtttacacagtatgatggagaaagccatcggaggtgagtaagtgaaatggaatgctaccagatttggcactaactacatgttcttggaaagttttatgagaaggataagttcatggtatggtttatgtcaccggaaatctagcactcgcgttacttcctaactgaagtggaaagatatgctttcgacaacatcaccaatgttgactagtgggagaacatgcaatatgttttag

SEQ ID NO: 178156 - DNA, 811 bp, Zea Mays
gcctatctgaaggggtagcggttctaaattcttctgctgacaacaatgccactagacgagtagagtcctcctcaatcaccctatcatccaggtcaagcaccaactgatcgtgaacaactgacgcaacgggctgaagaggagcaggatgaggctgttgaggctaagcagtccaaccattagctagacccaagttaagggcatcatttcccaaatagggccaccttgtgcttcttggataccttgagcttcttgaactccgcctagattctgattgaccaaattttccatgaagtcccccatagcctgcagaaaatcttcatcattgtcatcttcagggaatgggtgaggattgccgttagggggaatgttgtcttccaggttagcaatttcatcattgttccccaattgctaataatcattaggggtcaggatatagatagggatggaccaagaacacgccattcccgtgttgtcaacaccaaacgagagcaagacacttatggggacttccctagtagagatgtaaaggcatttgaccaacacacaggattttatccttgggctgttgtgccacctaaacagcttgccaaatgaggccaccacttggtggatacacatgtcgttcatgtgggtgaccagaaatcccaacatcaagatccaacctttccttgaataaacgatttctcggaaattttgagccctatcttggcggatgaatcgaactaatgtaccttccacattgtagatatctccaaaaagcaatctatctttttgaaaaaggcttcccatctcaaaaatacccaacccaaaa

SEQ ID NO: 178157 - DNA, 766 bp, Zea Mays
ttccaaggtcgatgaggcacgagaagctactcgggataactctaaccccacctctcggatgtcagaacaaacgtccatcatatcaccatcagctggctcggacagcatatcttcaggaacgacatctttgagagcctgatcaaaatttgctatggataattcttgcagaccaacaagagcagacaaagctggagaaggaatatcgctactccccccactgactctgtaacgccgactgttctttcaaactaaggggacttcctcttcttcttccttgtcctcgtcaacaatatggacaatatacgacacagggtcacacccattgggatcagctctggtagggtcacacccattgggatcagcatcagtagggccacacccattgagttcagcatcagtagggccacacccattgggatcagcatcagcagggacacacccattgggatcagctccagtaaagagttccactggtacttcttcagcagcagtaacagaagggtcggcatcacgatccaagcacgacactcgccgaagccgtctctttttctttttcttcccctcggcaggagcagctggatgactgacttggcgaagacatttcgggcgagtaccctcaggccttcgagtatccacggttttctcaggctctgggatagttgcaacagccattgtttcagcatggaccgagtcagaagaatccccagccaacatgtccagcatagcgcttatctctgcatcacccggactcataggcatctcaaag

SEQ ID NO: 178158 - DNA, 671 bp, Zea Mays
gcgaacacaccgtctgcggaatttgggtccagggcttcgtgtttttgcgaggaatacatgtgtggtgttgcggtgactggggtaccgtcggtgcgcttagaatcgctcgcctgtgttcttcttccgccgcgtcgcgtggacaactgcctctgcaccatcaatcgccgtcgggtaactactctacttgccaagctttgtcttcgctacgtgtattccggttgagatcgaagctttaggcgcgggatcaggtaatgggggattccggcgatggcgctccgccgtgggggccctggtcttccctcaagccgtggtctgggggtaggagacgttgtagccaccgttacctgttagatgtgcggctcagattggaaaccagttatcgattcggacacgttcgcctgagacattcgattagtgatccgagggtagggatcggatctgggcattgtaaaaccctagccgttgatctgtcaacatatgcccaggatcagaggggaaatacatcgtttcatttaattaaatcagcatcgttgattcccaatccaacgcatagcatcgcataccgatttgggtgtgggcttgatataatcagaaccctcggttgtcgatcggacggctctgaacgaaggataccccttcaaccctgtaaaactgcaaaagagaccctatgc

SEQ ID NO: 178159 - DNA, 694 bp, Zea Mays
gtggcattgaccaaggcagcgatagcctcggccagggtaggaggtacaggtggcggattgggagtgtcctcccgaccatgagatgtacacgccccatcatgagcacgggttcgcgatggcatctgaggaagaaaacatcctgaattattacatgccaacacaccatctttattacattgcgaaatagtaataattacacatactcagtattacaactcaaccttcttatttattttacatgagtacattacgtaaactatactactctaatcctcttcgtccttagttgttccgctgcctgctttaggagaccgttcatctccaagattcatggaaggaggggctccaaaaaggtcaatcccccatcagatcctccatttgttgttccagatggtatagctcccattgttgcaacttctggtggcacgttcgggtgcaaccgattatacaatacgtgcacctcttcatgcaaggtgttgcagtatgcttgcaggttttcgagggatgcgctaagttctgctactcgagctagagctttggcttcacaatcctaggcgaacgagcgcgagtatacggcccaatcaatggtcgtatcgcgttccataatttcatactgcaggcgattaacttcgactgatagttcagcaatgcggtgactatcgcacgcacgctccttgcatccgtggcgtagttc

SEQ ID NO: 178160 - DNA, 635 bp, Zea Mays
cgacaacaactggtgccatcctcactcccttggatcctaaccagggagaagaaacactcctccgattaagcccgatcgagagccagaagaggaaagctatcagccctgtaccataagatgatgagcccgaatgagagatccacaacccatccaccaacaagttgaaaagtgcaaacagaagatgcttcaactttctgagtttcagaaccagattgatgaaacaactgagcaaatgcataacattgtgcaagacactggccatcaacatgagggtcacaaccatgttgatctttgacatgaagcatacaactatgatgacttcttgtatgacgatgcttcttctttgacaccagagctgcaagccacaccatggccatcactatacaaacccccacaactaccaatgtatgacgacctgtcagacccaaaatagttcctaatgagctactaagctacaatatcttcttatggaggtaatgcaatagttatggcaaagtcatttgccatgacagtcagaagtgtagttcagacttgatactcatctcttcggccaagaatgatcacttcatggcaaaagctaagggacatgcttctcactagcttccaaggtttctagaccaagccaatcactgctc

SEQ ID NO: 178161 - DNA, 655 bp, Zea Mays
gatcgggcttaaaatacagagaagtgcaggggctctgatgcaaaacttcctaagacacagcgcacattgagcggggacggtgggttgttttctggaaattgtaggggctctttaagaaaagtgcccaacttaaggggtacgcgtgaatcacgaccgttcgatcagatatcaacgcgcccgattagattagttctcgtctgaattggtatacgatccgggccactcatcaggcgatcaacggcacgcactcgacggacgaaagggtacgcatcatttaatcgggagcgcttgctctgaaatcaacggccaaggttgcaccatcctggatctaatcacagccctcgcctaaagatcccacggtcctagccaaaccgtgacgcttgatcccatctcagtcgttggttgcacaatctatggccacagtgtgcctccccttccccggtggccaaacaccaccgtgaacagggcatcacggcggagctttgccggagccaggcgatctgaggcactgatgtgtaattcccttaaccgaatatacctaaacgacacgggtgggcatacgaataaaataatagctaactcaccggcgacattgacgtcgaggaggccgaccacgatgggttgcagtttccatggtggcgctacagcggtggtg

SEQ ID NO: 178162 - DNA, 572 bp, Zea Mays
aagaaagatggatacaagagacaattctaaggtacaaactcccacttcaatcggcgaattccgagtcctcacgatcaataattctgaaaccagcagtgcaaggtacacagtccgcagacattgaaacagacataactccagcaacagtcccactgaactacacagtagttgtttgttaaccagttgatgccatgctcgtcccaaacaaaccttctttcatcctttgctcatgtcgcaatcttttcatcgaccacaataataccttctattctttaccttttgccctaggaatagacagtaatatagatttccctctctaattttcacctctctccggctctgtcgtttagaggcgtcttgtatggcctgccgatcgcaaaacaaaccctaagatctctcctcttcggcggggtccctcctaggagcgagatcgaggtgctgtttggcgaattctatcgcctctatgcacacgcggaccatccggcttgttgggtagaaaccctagtctctgcgccaggtcgcggaccgtccgaccctcggttgcagactgtccacgcttccgcagatagcac

SEQ ID NO: 178163 - DNA, 418 bp, Zea Mays
cgctagaccacctgtctctcgtgcccaaggggcaccccacggaggcgaacgaacattggacgacatcctcgacgctcagtgcccgtaccacaaggatatgcgtcataccctccggaactgcagagacttcaatcactccgtcgggaatgacctacccttccaacctctaccacctcccccaccacaaggaggacctggagaacctcgacaacctcaacagcaggaaggggaggagacggagtgttcccgcgcgtcgatggagaagtcaacgtcatcttcggcggacacgggtcataagagaacaaaaggcagcagaagctcaacgatcgataggtactgatggcgaccactagtgctcctgccccgtatcggtggtcagagcacccgatcacctttactcgggcaaatcaatggctca

SEQ ID NO: 178164 - DNA, 344 bp, Zea Mays
agatgctctacattccatgaattccttgttttcgtgccatccatttgagtaagtcgatatgaccctagacgagtgacttctgctaccatgaatggcccttcccatagtggcgataatttgtgtcatccttgccccgttagaattcaatgaaggaccaagtctcccactgcgaaggatcgatgtcgtatggccttatcatgatagcgcctccagaactgtatttaatcgttcttcctccagtatatcaatatcctccagtctagtagcttctgcctcagctatgttttcaaagatcagccttggtgccccaaacctgatatcagcaggtagtactgcctccgaac

SEQ ID NO: 178165 - DNA, 696 bp, Zea Mays
tttttgctgtcgagcactggcgtccctaccttcagcatggtgaatttatcatcaaaacagatcaccaaagcttgactcatttggatgatcagaggttgtctgcaccatggcagcagaaaggcttgactaaactgttggggttacagtataaaatccagtacaagcaaggcagtgaaaatcgggttgctgatgctctgtccagaagacccaatatggatcaagatacagccaatgctcatttgaacacagtatcaatgtctactattacacccgactggttgctgcaggttactcaagggtatgatcaagacccgacggcaaaaaaaatattaactcagctagctgtgggtggtcaactggcacactatacaatcacccaaggtgttattcggtacaaaggaaggatctggctgggaagtaaccaagagatgcatcagaaggtgatgtcggcattacatgatagcgcagttggtggtcattctggatttccagttacctattgaagaattaaatctaattttgcctggccaggaatgaagcaccaaatccgtgaatttgttcaagggtgtcagatctgtcaacaggctaaaccggaaagggttaaatacccaggattactattgccgcttccagtccctaaacaagcatggcaaacggttagccttgattttatttctggacttcctccaacaggca

SEQ ID NO: 178166 - DNA, 685 bp, Zea Mays
gggaggtagacaggggtagacgatgatggggtagacggtctcatctcagacaacgacgcggtcgcagtggtgagacagcggtgggactaggaaagcaaggcaccgcaggagcctcaactacggagtccgagcagcaggggctggcggtgaggacacggcgcgcccgcgcacggaatcgatgggaacggcgtggcggggagcgcacaaatgttctgcgagtcaggcggttgcgtccacacacacgcgcgcagggagacctatctggaatcgtcgcggtgctagggtcactaatccagctgggggcaggctcgccgaccgtggggatgaagcaaggttgaccggtcgtgtcaccgaaaaggggaccgaggtggctatgcggatgggagtcgagacgcaggggctcttctagggaagggtgtggggtcaacgctagcgccatggtggacaaggccgcgcctgccgaacagggatagagaagaacaagaggccatggtcaggggtacacgccggggatcctcaccttgaagctcgacggagatggcgagagcgcgactcgacagggcgtggatgacggcgatggtgcgcggctctgcgtggacgacacgaggtgcaccgggcgcgcgcacacgacgggaggtgcaggacggcggtggggcttggtgatggcggctcgatgagttcctgg

SEQ ID NO: 178167 - DNA, 368 bp, Zea Mays
tttaggttgacatttagatttccataaccaagagaagagagggtgcgactgctgggtgccaatcaaatgagcatagaccttctgagatgaaaacatatttgaagagccactgcagcgccaaatatcattgtgatcatgcaattggagattagcaagaatgtcctgaaatgaaagtagttgtccaaacgcttcagcagataagggaatgtggaacagttcattcggggaagccaaccgagcttgataaatgttaatctccctgatagatgcaaaagaccaaagctccgggaatctttcagatgtgcgctgcccattccatcgatcatgccagaggagagtagttttcccatttccaacctccactcggg

SEQ ID NO: 178168 - DNA, 515 bp, Zea Mays
tggcgaacgtggagttgagggcggcgatgaaggcggacgcgggcgtggcgttgtactggctgcacccctggttgagcagcgtggcctgcgggtcggcgaaggtgatcgggacccacgcggacgcaactaccaaggttagagccggcaagagcaggaagcgacccatgcgatggtgcatagccaacgccggtgagcacacggggtaggagatgaggcgaaaagaaccaccgtcgttggggcggtcaggtggggtggtactgccgtactgatagctggagtaatggggattggattggaattggaactagggagtgtggactgtggaggcgtaacctggaactggacacctggagggagcaggtctgcaggtgattagtttggacaaggtataaataaccgcatgagggagtcggagctcgtgacacgttagatactgtgtttcagctgaaatcgcccatggaattcctttcatactattgtcgtttgttgggctgtgggctacaggtgtggctgca

SEQ ID NO: 178169 - DNA, 422 bp, Zea Mays
tcgcgcttacttaactcggggtgaccactatgccctgctaacgaagcaatcggcttaagtcggcaacgacttaagacggtgcaacatgctcgcgcttacttaactcagggtgaccactatgccctgctaacggagcaatcggcttaagtcggcaacgacttaagatggtgcaacatgctcgcgcttacttaactcggggtgaccactatgccctgctaacggagcaatcggcttaagtcggcaacgacttaagacggtgcaacatgctcgcgcttacttaactcagggtgaccactatgcccggctagcagagcaatcggcttaagtcggcaacgacttaagacggtgcaacatgctcgctcttacttaactcgggattactactatgccctattaacaaaagcaatcggtttgagtcagca

SEQ ID NO: 178170 - DNA, 623 bp, Zea Mays
cgggggcgcgcgcggcagcggccagtgcgcgcttggccggtcagacaaggcattgagcacgtggcaacatttgttctggtcactttcaagcgtcgattagcctgtgatctcttcgtatctacccaaaatccatgtataagatttcttccttgtagtatgcccgttgtatctcatgcagtgctcaagtggatttgacctcgggttggcaagttacgaggaggtgaagttgtgtctgtccgagctgtccacatcgagacaaaagccatgtcaagtcgggtcaaacgacttagggttgggttcaaacttttccagggtgttctaggggtctttaggcgccattttgtcaattgggccataaggttttgaggttgggaacaaggtgaacatgattgatctttgaaagagggtcggttttgaacttgagaaaaacctgatttttcttttatgtccttctctttggtgacctttttggggtttttatgaattctttttagggtcattctcttactaacttttgtagggtattaagtgtactacaatttttataattatcccaagtcatgacaatatgatttgcatagcctttttgctataataccctctagggccccaattgcctaaag

SEQ ID NO: 178171 - DNA, 957 bp, Zea Mays
aaggaagagtatatagccaaggacgagataagtaaaacaccgctctcaatttgagatatgaaagaggagatttaaaaaaagcagtcctaagataagcatcaaggcaagatctatagattggaaaggtaaggatgatatcaaacaatagctcaacaaaggatggagttaagggaaaacaagacttgcaacgcgacaaaggaaaaggaaaatgaccaagagcggtttaggtaaaacaacactctcaaactgaaatggaggaggtgaggcttcaaaatgtgggtaagtgtcatggtagataccgagagatgtcaagggttaaaggtgataacatacaaggatgtaagggaagaggtgaatgtgcataagaaccaaggatctaagtacaaccaagaatagagttaagataaatattgtaagtggtaaggaataggatataaccatgggtgagataagtaagacaccactctcaaattgagatgggagattgaaaattttagataacgggcattgtgtaaccaccaaggtaagatcaagagatgagaaagataaagacaataacaagcaaaagcacaacaaaggatggagttacaaactcgcaagtgagaaggaagaggatacgaccaagggaaagataggtaaagtacatctctagaatgagatggaagagggatgattttaaagggcaggtattgtaacaccccaggtgttactcaaggcctttgctcaacacatacacatgtgacctattatcacatgtgtcctaatttgagaaagaggcaccaaaattgagaagcaatgtcttaaccaagtgttgatcctactagaaggcatatcctaacctattcatgcacctccaattgagaaaaatgctcaaaccctagactaccctccttaagccattagagctccaagaaaggattagtgggagaactatgtaaattaccgaatcattacttg

SEQ ID NO: 178172 - DNA, 556 bp, Zea Mays
cattgatgtcaggccgcccgtagcgaagaccttgatcctatcgaatacgggcaggaactctggcgagagggatggcttggtcctccattgcttgcggtcgagggctggcccattgctcggcaggattaggcggtcgttggcctcggtgctagcaatcacccagtcgctgcgccagttttcccacctcgcaccaccaaaggtggggatgtagactatggcctgatctggcctcgtctgaaagtagtaggcaccaatgtggtccctagtcttcccggacctgaccagcacgaagaagtagcggaagaggcaagtgcagggggccacacctacgaacatctcgcagaggtggacaaagattgctgcctagaggatggagtggggcgtgaggtgttgaagctgaagcccaaactcctccagcagtagcaggaagaagggcgaaatcggtagagccaactcgcaagagatgtaggaggtgaatagcacaaactctctggcggcgagatcgccaaggggggtagcgccgacatggattcttccggcgagccctggcacgctc

SEQ ID NO: 178173 - DNA, 338 bp, Zea Mays
caaatttttaattataatatatagttatgtaataaaaatgaactattatgacactaccttactattttaatgtgcttgtgtagttttcaaaccctcgaactcaacacataaaatgtaagttgttatcaaagaatagaatgaatgagttcagacaacccaaaaacgtcgttcaagtatttgtaaccgaaggagtaacagctaaccataaacaaatgaagcaactcagcactgaatacagaatgctaaatgtaaattgagtagtatttaatagcaattagtataactgcttgtaatagtaaaaattacaaacctaccttcctaaacatgacttagaaaaa

SEQ ID NO: 178174 - DNA, 322 bp, Zea Mays
aaatacaaatttgacgcaatattaaattgggcactattcaacctgtagcggccacatatattttagtttgtttcggacaggatttttttagaatacttgattggactgaaactcatcgtcgtgtcctagatttttgaatgttaaatgttgcaggcatcttatcatgacctgcacacagatcacatacagacttcccacaaagaagtagcgcaaaagaaataagttgaacaaaccttatgttctcctctgatggatattgcatcatagcaaggcccaggtgtaaatgtctcccttccagtaagtgctccttccgagattactc

SEQ ID NO: 178175 - DNA, 969 bp, Zea Mays
gcgtgagcgtgtcgcactgacttaagtcgtcgccgacttaagccgattgctccgttagtagggtatagtggtcaccctaagtcaggtaagcatgagcatgttgcaccgacttaagtcatcgccgacttaagtcgattgctccgttagcagggtatagtggtcatcctaagtccagtaagcgtgagtatgtcgcaccgacttaagtcatcgccgacttaagccaattgctctgttagcagggtatagtggtcaccctaagttaggtaagcgtgagcatgtcgcaccgacttaagtcgtcgccgacttaagtcgattgctccgttagcagggtatagtggtcaccctaagtcaggtaagcgtgagcatgtcgcaccgacttaagtcgtcgccgacttgagccgattgctccgttagcaggatatagtggtcaccctaagtcaagctgggcatgctgattttgagtccagcccaatcgaagtcagttgtgagtcaagagtctgaatgcctttggagaatcaaaactttattgatgatgaaatcctcagattttcactgtacaatgttccttcaaggattttgaggcctcgctaaggatagaattttatgaggtgttctatgttccacgagttccccacttctgtgtcgtccatctgagtaagccggtatgaccccggccgtgtgacctctaatacaatgaacggtccatcccatagtggtgataacttgtgccgcccttcccctgttagaattcaacgaaggaccaagtctcccactgcaaaggatcggtgccgcacagctttatcataatagcgcctcaaggtctactggtacatatccgactgaattactatgttcaatcattcttcctccagcacgtcgatatcttctagcctggttgcttctgcctcggctatgctttcgaaagttaacctcggcaccccgaagattaggtcagagggcagcactgcc

SEQ ID NO: 178176 - DNA, 742 bp, Zea Mays
atgcctgatataataacgcgacctaaagagatggcttaaaatacagccgcatctccaaatcgattttgtagaggacttcatgttttcagccgccgcctctagaaatttgtttttttagagatggcgaaacaaactattcctccaaagtattgatccccgttgttttagcgttgggtgacggtgcttggagctcggaatgccttgaatttgaagggaggttgtcgtctctgttggttggcatgtttctcacctttccattgtgctccatcattgagaatggctttggatcggcggcgtagctacgaggggtggagtggatgcacaataattgtggtgcgtgttgtgattagtggttgtagggcgctacgatctttcgtaaactctgctagaaaatgtcttttgaaagtatatttcaagctgatctccgttctacaagaaaagctgttgtaaactggtatgatgtgcctacttttgctccttgaggtcctggcataaatgaatgagcatgccactattggtgccccgtacacactgctttaccggacagaggacagcagcgccctggactattcgcagtcctctctctgtatctcactttgcgtcgtatcgctaaaattctaaccctacatttttatttgatttcctgatgaattgttaatggacaggtcagtagaccagctaattgttccctatacctcttaaatagctattgttgctagttgctccaacccagctaaatcta

SEQ ID NO: 178177 - DNA, 853 bp, Zea Mays
tgcgcgtcgcgtgcgatcatgcggggagataaaacccacgccgcgaccgtcttcgcaatggccagttccaaatcgctctcgtcgccaaaaccctctcaccatcgtagccgtcgtcggtcttgtctagaggtcagaccgctgccaccgtaggattcccatttttaccaacgccctgtcttcggcgcaccgccaggggaatcaccggaacgcaaggaagtagtccatgccctctactcgagctaggcacccctagggtctcggggattcctcactggagatccgcgggcgtgcaacctcatggtcgtgccgccatcgtcacaaatccgaggtaaattcacctccctactctctgcactaccctcctctacgtatagcgcagtttggaattaggtttgggggccaaattcggggattgggcacgccggccatggcctctgccgtggtctggtgggcgccgccgcctcataccggcgtttgctggcgtggtggttggggcgaagtcgcggttgccgttgatctagacattaacggctgagattagattcagggataccccttcactacgttaaaaccagaccgtcgatctagatctaagggtcgaggttagatctagcataattatatctagatcgttgaactcagatcggacggtgcctattccttactagttcacaccgttgcggatctaatctcgcgcgtccacgcctaatcggacggctagcaattgcccgtaccccttcactttgccagtttgcagaagagaccctagaaaacctaggaatcaacccgccgtccattgctacagttgtctgtgtcttaggatcttttgcgctagagtccctatgcttaccag

SEQ ID NO: 178178 - DNA, 484 bp, Zea Mays
cggcggccgaccccggggccgcgcccatcccgacgttttcccgattctccggctacctcctcccttatctccttgcgcgtgacgcgcccacgactcctcgtcgtcctcttgtgatctggtccccatctcgctgccgcctcctcccgacttaccaaactccaacacgccatgcgaccatgcgctcatgcatagcatagatatagctgtagccaagctgcccaagcacgagcaccactcgtcttctccgaccttccagctctagctctgatccgagccgaaacagccatccaagacgcccgcggccgccgtgagcgggtgaccctctgcgctgcgctgcgtcaccacccaaatggatgacatcgccagcgaggcgcccgtgggggcgttcgccatcggcccatccacggcgctgggcggcgccgtcgcgctccgggtgctgctctgcggctccgcggcgcgcctgcgtcatcgtctagccgcggca

SEQ ID NO: 178179 - DNA, 688 bp, Zea Mays
gtggattcggaaccgagctccgccagtgatttaaacgttgggcgggcgctgccattgccgtcgttgacactcatctccatcaccactccgcgtctgtgacccgatccctggcattcgggtgtgggcgtggattgttctcggggaaggatccgggtgcgtgggtcctcgggaccgggaggattcctcgccgtcgttaccctgccgccgcggaccgcacttcgccgtagcctgcttccgccaccgttcgtgcgcgctgtaagtccctccatggcattcgttgttaagcatttggtgcgtaggaagtctcgggtgggaattggtccgttagctggccaagttggctgtactccggcgacgccccgccatatttctagcagcgccgccgtgcgcggtagctggaggttggggatggggactggtgccattgaaaggttgatgtgtggccaggattagatccgaggagagaatctttgtgggccgttgatcgactaatgaacgggtcggatcaaaccaggggatagcattttggtctagggaattccgtacgttagatcacgatcgtgcgcaccagaacagatcacggcattttaaaactggggccatcggatcatgatccaatggctcatgatgggccgataccccttcggcatggctggtttacaaaagagcccctctactttccgtaaac

SEQ ID NO: 178180 - DNA, 494 bp, Zea Mays
cgcgtcagtagcaggtagcgtattcctggcattaaatgcacacggtgctccagccctataatgtgtggattttactgttagctgcacattactgagtcaagagcattgacccaatgctacatttgtgcacctttcattatgacttccacttgctttgcgtgttgcctaggcatgaagggacgggcaaaggagacgacactgcccacacatacacatggcagcgtaccaggctacgtcgcaacctactgcaagggctgcacacattctccaatgaagacgaagcaggacgataggatgttaggagcctacgcaatgactaagaagggatatgcgctcaagaagagctagagttgtcagctctatccggtgtttcctattctacattgtatagtctcctaggcccacctatcagcgcctgaactcccttgtaacatgcctcccttggactataaaatggtgagcacttgctccgtagcaggggaggttaattcaca

SEQ ID NO: 178181 - DNA, 318 bp, Zea Mays
gcatgttgttgcacaagttataccctcgagtcacagataagtgaccttttgcactgtgtgcagtcaaagtatttaaacattgatcatcaacacctcttgacagttagattgaatatgtgaaaatggtatgagcatatctgtctcaaatagtagttgcataatgttgtgatatttctgtacattgtaattgttgcaagcaatggaaattagcagtcaaaggtacacattaatgactgtgagcgtcttatttgtgacggtagggagtgttctgtttgtataagagttagatacagaatttctgctcttgcttaagcaacg

SEQ ID NO: 178182 - DNA, 575 bp, Zea Mays
ggggagtacggtcgtggccttgggctactttataggtgcgggcgcagggtcgggtgttgcttggcatgggcgcgtggggccgagcatcggggcgtgctctggcgcgccaggacaggtcaaacacgtggacgtttgtttctgcccttgttcaaacgcatgctggttgaccaaacgtgcaaatcttgccaaaaatcctatgtaaagtctcttctctgtgccaagggctatctgacttgtgtgagttccaagtgaagatatggtcgggtgtgggagatatggtggcgccaagtcaggtctgtctggactgttcagcccgagacaaaacccatgtcaactcatgtcaaatggttttggttttagttcaatttttccagagtgttcctagggtattttggcgcccttttgtcaattggaccatgttgatttggcgtttgcaactaagtgaacacatgtgatctttagaagagggctgaaattagacttagagaaaaagggggttttcttttgtgcttcccacatgagtgattaatttgaggattttgtgggacctttttgggaaaaactccttactattt

SEQ ID NO: 178183 - DNA, 528 bp, Zea Mays
catcagtcagctggacacctgtttaacagtctaaagttatctcagagaaaatatctctctccattaaagttcatcgtagtttcttggtaaaagggtggtagagatagagctataccgtgcgaaggggcgagttttccatctggtgcagctccttttactgatgatacagctgaaaacttggagaactatctagaggtgactcagctgcttaactgttggaggtgttgtccaacatgcagtgaaggagtattcattgtcacactgtatttctcttcgacgtggtggtcatgcagaagataagtggagcatgttggctctcttttaccctctgtatatgaccccaaacggaaatccaaaccggctgcaacagatgtccttgttttgggcatataagcacacaaactgagatcccccaagttctagcggattccatacttctccaccgcgccacaccattcacaaacatctagggtaagccctcaaaccttgtccaaacctctgtttcaccaaaaaggctagaacaccgag
